United States Patent Application Publication US 2011/0277190 A1 - sequence listing, part 11

SEQ ID NO: 45960 - protein, 223 aa, Zea mays
  misc_feature (80)..(80): Xaa can be any naturally occurring amino acid
  unsure (1)..(223): unsure at all Xaa locations
MASMLARRSLNTLRTRHLVLSGKALQGSHLSGLQSRAISYGSKKDDEEEEQLAKEISKDWNTVFERSINTLFLTEMVRGXLSLTLKYFFDPKVTINYPFEKGPLSPRFRGEHALRRYPTGEERCIACKLCEAVCPAQAITIEAEEREDGSRRTTRYDIDMTKCIYCGFCQEACPVDAIVEGPNFEFPTETHEELLYDKEKLLENGDRWETEIAENLKSESLYR

SEQ ID NO: 45961 - protein, 447 aa, Avicennia marina
MESQGREDVVGCSGAGGRVHSDGHIDIEIPETAHQISNDSWFQAGFVLTTGINSAYVLGYPGAVMVPLGWIGGVIGLILATVVSLHANALVAKLHDFGGKRRIRYRDLAGSIYGGKAYSITWGMQYVNLVMINVGYIILAGNSLKAVYLLFRDDHVMKLPHFIAIAGLACGLFAISVPHLSALRNWLAFSTLFSMIYIVGGIALAIKDGFKAPPRDYSIPGTKTSRIFTTIGASANLVFSFNTGMLPEIQATVRPPVVENMMKGLYFQFTVGVVPMYAIIFAGYWAYGSTTSSYLLNNVHGPIWLKTTTNISAFLQSVIALHIFASPMYEFLDTKYGIKGSALAVRNLSFRILVRGGYVAMTSLVSALLPFLGDFMSLTGALSTFPLTFILANHMYLVANRNKMSLLQKNWHWLNVVLFSCMAVAAAVAALRLIAVDSRTYHVFADI

SEQ ID NO: 45962 - protein, 342 aa, Bartonella henselae str. Houston-1
MRALQLFNERQLEITTIAPPPPPNPDEVTVRIKAVALNHLDVWGWRGMAFAKRKMPLVIGAEASGEVTQLGSNVKNLQLGQIVSIYGAQTCGICQACREGRDNLCNDVKGVYGFHLDGFARELVNLPVRLLVSAPAKCDELQAAVAPITFGTVEHMLFDNAKLQTGETILIQAGGSGIGSAAIQLAKQKGCTVITTVGSDEKIAKAQSLGADHVINYRKDRFEGVVRKLTKKKGVDVVFEHVGAETWSGSLLCMKPGARLVTCGSTSGISTSFNLMQLFQQQLKIFGSFGCRIENMQNAMQKMAQGVVHPVIDTIVQFNEIDTALKRMESRDVFGKIILKID

SEQ ID NO: 45963 - protein, 268 aa, Salmonella enterica subsp. enterica serovar Typhi Ty2
MERYENLFAQLNDRREGAFVPFVTLGDPGIEQSLKIIDTLIDAGADALELGVPFSDPLADGPTIQNANLRAFAAGVTPAQCFEMLALIREKHPTIPIGLLMYANLVFNNGIDAFYARCEQVGVDSVLVADVPVEESAPFRQAALRHNIAPIFICPPNADDDLLRQVASYGRGYTYLLSRSGVTGAENRGALPLHHLIEKLKEYHAAPALQGFGISSPEQVSAAVRAGAAGAISGSAIVKIIEKNLASPEQMLAELRSFVSAMKAASRA

SEQ ID NO: 45964 - protein, 424 aa, Bartonella henselae str. Houston-1
MQYNDHFGRPIVAITGAGIVTSLGKGKHENWQKLTSGVSGIHKITRFPVDELKTRIAGTVDFLKESTYGASALSEKLANLAAEEALEQADLGKTNFNGPLFLAAPPVELEWKARLTLDQEGELNSAPSYVHLLEICSHKLHETLFETTQFGAIAENLQKKFGTKGLPITLSTACASGATAIQLGVEAIRRGETNRALTIATDGSVSAESLIRFSLLSALSTQNDPAEKAAKPFSRDRDGFVMAEGSGALVLESLKSALDRNAIILGILAGCGETADDFHRTRSKPDASPAIEAVRKALEDANITINEIDYINAHGTSTPENEKMEYLALSTVFGDRLEHIPVSSNKSMIGHTLTAAGAIEAVFSLLTIQSGILPPTINYDDPDPAIPLDVVPNHSRKACVNAVLSNSFGFGGQNMSLVITAYKG

SEQ ID NO: 45965 - protein, 502 aa, Lotus corniculatus var. japonicus
MAALPECSAANLAQLIGPNATDAAAVAGFICDQFTAVGQRFSDTAFAVDSTYLLFSAYLVFSMQLGFAMLCAGSVRAKNTMNIMLTNVLDAAAGGLFYYLFGFAFAFGAPSNGFIGRHFFGLKDVPTVAFDYSYFLYQWAFAIAAAGITSGSIAERTQFVAYLIYSSFLTGFVYPVVSHWFWSGDGWASATNTGNLLFGTGVIDFAGSGVVHMVGGVAGLWGALIEGPRIGRFDHAGRAVSLRGHSASLVVLGTFMLWFGWYGFNPGSFTKILSAYDSGNYYGQWSAIGRTAVTTTLAGCTAALTTLFGKRIISGHWNVTDVCNGLLGGFAAITAGCSVVEPWAAIVCGFVAAVVLIACNMLAEKVRYDDPLEAAQLHGGCGAWGIIFTALFAKEEYVNQVYPGKPGRPYGLFMGGGGKLLGAHVIQILVIIGWVSATMGPLFFILNKMKLLRISTEDELAGMDLTRHGGFAYAYEDDESHKPGIQLRKIEPNSSSTPSAES

SEQ ID NO: 45966 - protein, 585 aa, Triticum aestivum
MCGILAVLGCADDTQGKRVRVLELSRRLKHRGPDWSGMHQVGDCYLSHQRLAIIDPASGDQPLYNEDKSIVVTVNGEIYNHEQLRAQLSSHTFRTGSDCEVIAHLYEEHGENFIDMLDGVFSFVLLDTRDNSFIAARDAIGVTPLYIGWGIDGSVWISSEMKGLNDDCEHFEIFPPGHLYSSKQGGFKRWYNPPWFSEVIPSVPYDPLALRKAFEKAVVKRLMTDVPFGVLLSGGLDSSLVAAVTVRHLAGTKAAKRWGTKLHSFCVGLEGSPDLKAAKEVANYLGTMHHEFTFTVQDGIDAIEDVIYHTETYDVTTIRASTPMFLMSRKIKSLGVKMVISGEGSDEIFGGYLYFHKAPNKEELHRETCQKIKALHQYDCLRANKATSAWGLEARVPFLDKEFINEAMSIDPEWKMIRPDLGRIEKWVLRKAFDDEEQPFLPKHILYRQKEQFSDGVGYSWIDGLKAHAESNVTDKMMSNAKFIYPHNTPTTKEAYCYRMIFERFFPQNSAILTVPGGPSVACSTAKAVEWDAQWSGNLDPSGRAALGVHLSAYEQEHLPATIMAGTSKKPRMIEVAAPGVAIES

SEQ ID NO: 45967 - protein, 155 aa, Zea mays
MQIFVKTLTGKTITLEVESSDTIDNVKAKIQDKEGIPPDQQRLIFAGKQLEDGRTLADYNIQKESTLHLVLRLRGGAKKRKKKTYTKPKKIKHKHKKVKLAVLQFYKVDDATGKVTRLRKECPNTECGAGVFMANHFDRHYCGKCGLTYVYNQKA

SEQ ID NO: 45968 - protein, 272 aa, Oryza rufipogon
MGRRACCAKEGMKRGAWTSKEDDVLASYIKSHGEGKWREVPQRAGLRRCGKSCRLRWLNYLRPNIKRGNIDDDEEELIVRLHTLHGNRWSLIAGRLPGRTDNEIKNYWNSTLSRKIGTAATAAAGSRGGSTPDTARATDAASSSSVVPPGQQLQPASRADTDTATAAAAAAATTTTVWAPKAVRCTRGFFFHDRETAPLAAAAPAPAGELGDGDDVDCDYYCSGSSSAATTTSSSSLPAVVEPCFSAGDDWMDDVRALASFLDTDDAWNLCA

SEQ ID NO: 45969 - protein, 571 aa, Trichodesmium erythraeum IMS101
MTKFVFITGGVVSSIGKGIVAASLGRLLKSRGYSVSILKLDPYINVDPGTMSPFQHGEVFVTEDGAETDLDLGHYERFTDTSMSRLNSVTQGSIYQAVINKERRGDYQGGTVQVIPHITNEIKERIHRVAKNANPDVVITEIGGTVGDIESQPFLEAIRQFRKDVRRNNALYIHVTLVPWIASAGEMKTKPTQHSVKELRSIGIQPDILVCRCDRKLSEGLKEKMSEFCDVPVESVITSQDAQSIYEVPLMLETEGLAVQALELLKMEQRQPNLSHWKTLVNRLYHRDKQDIRTSQGKLSITATVEIAIVGKYIQLSDAYLSVVEALRHAAIAVGVDLNLHLVNAEDVETKGARTYLEKANGIIVPGGFGVRGIDGKIATVEYARINKIPFLGLCLGMQCAVIEWARNIAKLDAAHSFEFDPQTPNPVINLLPEQQDVVDLGGTMRLGLYPCRLQGDTLAFKTYQQEVIYERHRHRYEFNNAYRNLFKETGYIISGTSPDGRLVEIIELPAHPFFIATQFHPEFQSRPSTPHPLFHNFFQAANSQEKCDNLSVNNTEETPDNLVSKSSIPN

SEQ ID NO: 45970 - protein, 270 aa, Oryza glaberrima
MGRRACCAKEGMKRGAWTSKEDDMLASYIKSHGEGKWREVPQRAGLRRCGKSCRLRWLNYLRPNIKRGNIDDDEEELIVRLHTLLGNRWSLIAGRLPGRTDNEIKNYWNSTLSRKIGTAATAAAGSRGGSTPDTARATDAASSSSVVPPGQQQQPASRADTDTATAAAAATTTTVWAPKAVRCTRGFFFHDRETAPLAAAAPAPAGELGDGDDADCDYYCSGSSSAATTTSSSSFPAVVEPCFSAGDDWMDDVRALASFLDTDDAWNLCA

SEQ ID NO: 45971 - protein, 249 aa, Elymus caninus
LTGITGIVNGMDVSEWDPTKDKFLAVNYDITTALEAKALNKEALQAEVGLPVDRKVPLVAFIGRLEEQKGPDVMIAAIPEIVKEEDVQIILLGTGKKKFERLLKSVEEKFPGKVRAVVRFNAPLAHQMMAGADLLAVTSRFEPCGLIQLQGMRYGTPCACASTGGLVDTIVEGKTGFHMGRLSVDCNVVEPADVKKVATTLKRAIKVVGTPAYQEMVKNCMIQDLSWKGPAKNWEDVLLELGVEGSEPG

SEQ ID NO: 45972 - protein, 269 aa, Oryza glumipatula
MGRRACCAKEGMKRGAWTSKEDDVLASYIKSHGEGKWREVPQRAGLRRCGKSCRLRWLNYLRPNIKRGNIDDDEEELIVRLHTLLGNRWSLIAGRLPGRTDNEIKNYWNSTLSRKIGTAAAGSRGGSTPDTARATDAASSSSVVPPGQQQQPASRADTDTATAAAAAAATTTTVWAPKAVRCTRGFFFHDRETAPLAAAAPAPAGELGDGDDVDCDYYCSGSSSAATTTSSSSLPAVVEPCFSAGEDWMDDVRALASFLDTDDAWNLCA

SEQ ID NO: 45973 - protein, 249 aa, Elymus ciliaris
LTGITGIVNGMDVSEWDPTKDKFLAVNYDITTALEGKALNKEALQAEVGLPVDRKVPLVAFIGRLEEQKGPDVMIAAIPEILKDEDVQIVLLGTGKKKFERLLKSVEEKFPGKVRAVVRFNAPLAHQMMAGADVLAVTSRFEPCGLIQLQGMRYGTPCACASTGGLVDTIVEGKTGFHMGRLSVDCNVVEPADVKKVATTLKRAVKVVGTPAYQEMVKNCMIQDLSWKAPAKNWEDVLLELGVDGSEPG

SEQ ID NO: 45974 - protein, 360 aa, Oryza sativa
  misc_feature (101)..(101): Xaa can be any naturally occurring amino acid
  misc_feature (145)..(145): Xaa can be any naturally occurring amino acid
  misc_feature (310)..(310): Xaa can be any naturally occurring amino acid
  unsure (1)..(360): unsure at all Xaa locations
MHSKKKMHVSLILLCLQYCREGTRTMASSSSHGATKNRPWTLTLGQRNSPRRRRRVTWPGTAATARWRRRRRPAASVSRAGGSSDDGYNWRKYGQKQMKGXSENPRSYYKCTFPGCPTKKKVERSPDGRITEIVYKGAHNHPKPXHGRRNASSCATAAACADDLAAPGAGADQYSAATPENSSVTFGDDEADNASHRSEGDEPEAKRWKEDADNEGSSGGMGGGAGGKPVREPRLVVQTLSDIDILDDGFRWRKYGQKVVKGNPNPRSYYKCTTVGCPVRKHVERASHDTRAVITTYEGKHNHDVPVGRXAAQQGPYTLEMLPNPAGLYGGYGAGAGGAAAFPRTKDERRDDLFVESLLC

SEQ ID NO: 45975 - protein, 352 aa, Pseudomonas aeruginosa UCBPP-PA14
MKALRWHAARDLRLSELERQAPRPGEVELEVAYCGICGSDLHEYQSGPHSIPQAEAHPLSGCRAPLTLGHEFCGVVAALGPGVEGLRIGDRVAVEPEYRCGECRYCREGRYNLCESMGFIGLMGDGGFAERARVPAYMLHRLPDAVGFRQAAVLEPAAVALHALRRSSLAPGQRCAVFGLGPIGLLLVMLARLRGIEDIAAVDVSPERLALAGEFGASRALDARDGDTAARLREGGALDCAFEAAGSQASLDAALASLRKGGELVLVSLMGEVRLDAFDLVNRELRLLGSVGYRDAYPELIALLADGRLDLARAVTRSVPLEQAVEHGFEALLRDKSQVKVLVNPNPALADA

SEQ ID NO: 45976 - protein, 249 aa, Elymus ciliaris
LTGITGIVNGMDVSEWDPTKDKFLAVNYDVTTALEGKALNKEALQAEVGLPVDRKVPLVAFIGRLEEQKGPDVMIAAIPEIVKDEDVQIVLLGTGKKKFERLLKSVEEKFPGKVRAVVRFNAPLAHQMMAGADVLAVTSRFEPCGLIQLQGMRYGTPCACASTGGLVDTIVEGKTGFHMGRLSVDCNVVEPADVKKVATTLKRAIKVVGTPAYHEMVKNCMIQDLSWKGPAKNWEDVLLELGVEGSEPG

SEQ ID NO: 45977 - protein, 458 aa, Gloeobacter violaceus PCC 7421
MKVLFAAAECAPLAKVGGMADVVGSLPLALAEMGLDVRIILPYYGFLGELPKSEQPVWTGGAMFQQVEIYEARLPGSDIPLYLVGHPAFANERIYGFEDEAWRFTLFSRTVAEFLWRGGWDPQVLHCHDWHTGLLPLWMRSMPVMTVFTIHNLAYQGPPLPYFRAFVDVPYDTGAWNPMVAGIIHSDAITAVSPTYAREICTPEYGERLDGLLRGQGNRLTGILNGINTKALDPATDKHLTVNYDTTSLDRRVENKLALQREFGFEVSADRLLVGIVSRLVDQKGFDLLAPLWDNWMHTSGAQLVVLGSGDPFYEFLFRSAAERYPDRIKAVLSYNVPIAQRIYGGADLFLMPSRFEPCGIGQMIALRYGAVPLVRKTGGLADTVFFHNPLDEKGNGFLFDRYDPANLLAMLYRAEEAFRYKDYWRRLQLRGMEADLSWRASAHQYADLYKSLIARLG

SEQ ID NO: 45978 - protein, 107 aa, Pinus taeda
FDKDGDGCITTKELGTVMRSLGQNPTEAELQDMISEVDADGNGTIDFPEFLNLMARKMKDTDSEEELKEAFKVFDKDQNGFIIHAELRHVMTNLGEKLTDEEVEEMI

SEQ ID NO: 45979 - protein, 340 aa, Zea mays
MEKKKVAIPLVCHGHSRPVVDLFYSPVTPDGYFLISASKDTNPMLRNGETGDWIGTFQGHKGAVWSCCLDRNALRAASASADFSAKVWDALTGDELHSFEHKHIVRACAFSEDTHLLLTGGMEKILRVYDMNRPDAAPRELDKSPGSVRTAAWLHSDQTILSSCTDMGGVRLWDVRTGKIVQTLETKASVTSAEVSQDGRFITTADGSSVKFWDANHFGLVKSYDMPCNVESASLEPKSGSKFVAGGEDLWVHVFDFFTGEEIACNKGHHGPVHCVRFAPCGESYASGSEDGTIRIWQLSPANADDNEVANANGKTTAGVNEVTTKIEGFHIPKEGQTEG

SEQ ID NO: 45980 - protein, 332 aa, SYNECHOCOCCUS SP. WH 8102
MAPAAATASKPATSARSVSVDVDLVRSYLRDIGRVPLLTHEQEITLGRQVQDLMDIEAMQTELESRDGDKPSRDKLAKASGLTPLQLKRKLQHGRRAKERMVAANLRLVVSVAKKYTKRNMELLDLIQEGTIGLVRGVEKFDPTRGYKFSTYAYWWIRQGITRAIAEKSRTIRLPIHITEMLNKLKKGQRELSQELGRTPTITELAQYVELPEDDVKDLMCRARQPVSLEMKVGDGDDTELLELLAGDADLPSDQVEEDCMKGDLRSLLGQLPHLQEQVLRMRYGMDGEDPMSLTGIGRILGMSRDRVRNLERDGLAGLRRISDQVEAYVAS

SEQ ID NO: 45981 - protein, 107 aa, Acacia mangium x Acacia auriculiformis
FDKDGDGQITTKELGTVMRSLGQNPSESELQDMINEVDADNNGTIDFPEFLTMMARKMKDTDSEDEIREAFKVFDRDNNGFISAAELRHVMTSIGEKLTDDEVDEMI

SEQ ID NO: 45982 - protein, 197 aa, Arabidopsis thaliana
  misc_feature (166)..(166): Xaa can be any naturally occurring amino acid
  unsure (1)..(197): unsure at all Xaa locations
MSSSNGGVPPGFRFHPTDEELLHYYLKKKISYEKFEMEVIKEVDLNKIEPWDLQDRCKIGSTPQNEWYFFSHKDRKYPTGSRTNRATHSGFWKATGRDKCIRNSYKKIGMRKTLVFYKGRAPHGQKTDWIMHEYRIEDTEDDPCEDGWVVCRVFKKKNLFKVGNDXYDYSLALLPRESEYQQACQPSGVEVGTCKAV

SEQ ID NO: 45983 - protein, 311 aa, SYNECHOCOCCUS SP. WH 8102
MTEEHDRWRWNRHTIGWSLIGNTDAPLAVILIHGFGANTEHWRFNQPVLAKATATYAIDLLGFGRSDQPKAHLKDEVGESGSVQYGFDLWGRQVADFCREVVGRPVLLVGNSIGGVVALRAAQMLEETPGLSPCRSVVLIDCAQRLMDDKQLASQPAWMTWVRPLLKTMVRQRWLSTALFRNAARPGVIRSVLKQAYPSGANIDDALVNLLYQPTQRDGAAEAFRGFINLFDDHLAPQLMGNLTVPVDLIWGEKDPWEPLAEAMNWAETIPTVRSLQVITGAGHCPHDEAPETVNQQLLRRVQEHASAAPD

SEQ ID NO: 45984 - protein, 471 aa, Oryza sativa
MYKEDAHGGSYQQSWQQNAPPPPPEHVVKMHPSPPPAYANRPPQPPSTPPAAMINSSGGSGSYSGGEILPPPSPGAALGFSKSTFTYEELLRATDGFSDANLLGQGGFGYVHRGVLPTGKEIAVKQLKVGSGQGEREFQAEVEIISRVHHKHLVSLVGYCISGGKRLLVYEFVPNNTLEFHLHGKGRPTMEWPTRLKIALGAAKGLAYLHEDCHPKIIHRDIKASNILLDFKFESKVADFGLAKFTSDNNTHVSTRVMGTFGYLAPEYASSGKLTEKSDVFSYGVMLLELITGRRPVDTSQTYMDDSLVDWARPLLMQALENGNYEELVDPRLGKDFNPNEMARMIACAAACVRHSARRRPRMSQVVRALEGDVSLEDLNEGVRPGHSRYFGSYSSSDYDSGQYNEDMKKFRKMAFTNNNDTSSQYSAPTSEYGQIPSASSSEGQQTQEVESRTTKRGGYSGYSSGYSGAS

SEQ ID NO: 45985 - protein, 440 aa, Avicennia marina
SAPAHSGCDRGLCSDDHVAVEIPDTAHQISQDSWFQVGLVLTNGVNSAYVLGYSGAIMVPLGWLGGVVGLILATAISLYANALVAELHEFGGRRHIRYRDLAGFIYGRAAYNLTWGLQYVNLFMINVGYIILAGNALKAMYVLLLDDHLIKLPHFIGIAGLACGLFAMAVPHLSAMRVWLVFSTLFSLVYIVIAFALSLKDGVEAPPRDYSIMATTASRIFTAIGASANLVFAFNTGMVPEIQATVRPPVIGNMMKGLYFQFTAGVLPMYALTFIGYWAYGFEASTYLLSNVHGPVWLKAVANVSAFLQSIIALHIFASPMYEYLDTRYGIKGSALAFSNLCFRVVVRGSYLGMTTFVSALLPFLDDFMSLTGALSTFPLTFILANHMYLVAKKHELTSLQKSWHWFIVCFFGCMSVAAAAAGLRLIVVDSSHYHVFADL

SEQ ID NO: 45986 - protein, 231 aa, Brassica napus
  misc_feature (15)..(15): Xaa can be any naturally occurring amino acid
  misc_feature (22)..(22): Xaa can be any naturally occurring amino acid
  misc_feature (24)..(24): Xaa can be any naturally occurring amino acid
  misc_feature (43)..(43): Xaa can be any naturally occurring amino acid
  misc_feature (49)..(49): Xaa can be any naturally occurring amino acid
  misc_feature (58)..(58): Xaa can be any naturally occurring amino acid
  unsure (1)..(231): unsure at all Xaa locations
PAPLASILWLDDQLXSEDKLDXIXTVVDAKNLRFQLNERRDSXSFPEAXNQIAFADTXIMNKVDLISQEESDELEKEIHSINSLANVIRSVRCQVDLSNIFDCQAYDSTHVSRLESLLEANKSLTTTDLHDSGVRTLCINEPQPINLDKVRLWLEEILWDKKLDMDVYRCKAVLNIQNSDQMHILQAVKEIYEIVPARKWSDEENRVNKIVFIGHKLDEEALKTGLRECRP

SEQ ID NO: 45987 - protein, 428 aa, Burkholderia vietnamiensis G4
MSSQLQSIPSYLHADDLGPWGNYLQQVDRVAPYLGSLSRWLETLKRPKRILIVDVPIELDNGTVAHFEGYRVQHNVSRGPGKGGVRYHQDVTLSEVMALSAWMSVKNAAVNVPYGGAKGGIRVDPRKLSRGELERVTRRYTSEIGIIIGPNTDIPAPDVNTNEQVMAWMMDTYSMNQGQTSTGVVTGKPISLGGSLGRKEATGRGVFVVGCEAAKKKGLEIEGARIAVQGFGNVGGIAAKLFQEAGAKVIAVQDHTGTIYQPAGLDANKLLDHVARTGGVAGFEGTEPMPNDEFWTVETDILIPAALENQITEKNASKIRTKIIVEGANGPTTTAADDILSANGVLVIPDVIANAGGVTVSYFEWVQDFSSFFWTEDEINHRLERVMREAFAGVWAVAEEHNVSVRTAAFIVACKRILMAREMRGLYP

SEQ ID NO: 45988 - protein, 283 aa, Pseudomonas putida KT2440
MTTALRQPTLSSQCLAEFLGTALLIFFGTGCVAALKVAGASFGLWEISIIWGVGVSMAIYLTAGISGAHLNPAVSIALTLFAGFDKRKLPFYMLAQVCGAFCGAALVYTLYSNLFFDFEQAHAMLRGSEGSLELASVFSTYPHPSLSTSQAFLVEVVITAILMAVIMALTDDNNGLPRGAMAPLLIGLLIAVIGSAMGPLTGFAMNPARDFGPKLMTFLAGWGEIAFTGGRDIPYFLVPVFAPILGACLGAASYRGLIARNLPMAPAATPETNDIRQGDTQAN

SEQ ID NO: 45989 - protein, 682 aa, GIBBERELLA ZEAE PH-1
MGYGELDQKAINTIRVLAADATAHSNSGHPGAPMGMAPVAHVLFNKFMNFNPKNPDWLNRDRFVLSNGHGCMLQYAILHLFGYDLSIDDLKAFRSVDSRTPGHPEAHDTPGVEVTTGPLGQGISNAVGLAMAQAHTAATFNKDGFELVNNYTYSFLGDGCLMEGVSSEACSLAGHLQLGNLIAIWDDNQITIDGDTAVAFTEDVPKRYEAYGWHVIKVDDGDHDLAAIEAAIKEAKSVTDKPTLIQLKTTIGFGSLNQGTHGVHGSPLKADDIKQLKEKWGFNPDESFAVPQEVYDFYGKRSSEGAAREQEWNQLLAKYKEQYPKEHADLVRRLTGELPEGWEKSLPVYTPSDPAIASRKLSETVLAKIEGVIPELFGGSADLTGSNLTRWKEAVDFQPKSTGLGDYSGRYVRYGVREHGMGAILNGLAAYGTILPYSGTFLNFVSYAAGSVRLSALSRVRTIWVATHDSIGLGEDGPTHQPIETLAHFRALPNTMVWRPADGNETSGAYYVCLTSKHTPSIIALSRQNLPQLEGSTIEKAAKGGYVLHEVEGADITLVSTGSEVSIAVDAAKYLEEKKNIKARIVSMPCFEAFDLQDKEYRLSVLPDGVPSLSIEVMSTMGWERYTHEQFGINRFGASGAYKDKFEFTPEGIAKRAVATIDFWKDVPNVRSPINRAFQQII

SEQ ID NO: 45990 - protein, 228 aa, Agrobacterium tumefaciens str. C58
MGRKLLAEFFGTFWLVFGGCGSAVFAAAFPELGIGFTGVALAFGLTVLTMAYAVGGISGGHFNPAVSVGLTVAGRFPASSLVPYVIAQVAGAIVAAAALYVIATGKAGIDLGGFASNGYGEHSPGGYSLVSALLIEIILTAFFLIVILGSTHGRVPAGFAPIAIGLALTLIHLISIPVTNTSVNPARSTGQALFVGGWALQQLWLFWLAPIVGGAAGAVIWKLFGEKD

SEQ ID NO: 45991 - protein, 342 aa, Trichodesmium erythraeum IMS101
MPLKVAINGFGRIGRLVFRAGLNYPDLIEFVGINDLVPPQNLAYLLKYDSTHGRFQGEVTASDDGIKINGKLIPCVSVKNPAELPWKEKDAHYVVESTGLFTTFDSASNHLAAGAKRVIISAPTKDPDKVKTLLMGVNHDLFDPAVDTIVSNASCTTNCLAPIAKVIDDNFGLTEGLMTTVHAMTATQPTVDGPSKKDFRGGRSAAQNIIPAATGAAKAVTLVLPHLKGKLTGMAFRVPTPDVSVVDLTFKTEKSTNYKDICAAMKTAAENSMKGILSYTEDPVVSTDFTGNSHSSIFDAGAGIELNSNFFKVVSWYDNEWGYSNRVLDLMLSMAEKEGKPK

SEQ ID NO: 45992 - protein, 135 aa, Brassica napus
  misc_feature (56)..(56): Xaa can be any naturally occurring amino acid
  misc_feature (72)..(72): Xaa can be any naturally occurring amino acid
  unsure (1)..(135): unsure at all Xaa locations
THNPNHQLVKFREKLVKITNTFLTCCKGTVRRKNIALHNTNSTFYKKLQSTLKRIXVNSIPSIEEVNIFKDXLFVIYFTNPKFQSSFIANTCSFIFSSHTKKLEVFLPYISHPLLPDNIVNLYYLTLQFNKLFPV

SEQ ID NO: 45993 - protein, 518 aa, Colletotrichum lagenarium
MPTLGFLKKKRTREGNQDPQGSLPTSPVTPTSSKPFDSSISTTLSSLSNNSQATSQPSGPGQKQQEDPASSEAAKNQQMYPVTVHPAPNQQHYNQQGEPQQNLPSISNLINPTQHDASSNGHNYLAQPTQTSQPNPSPGTDPTRLQQQQAQSMLHPPTQPQQQQQQQQQQQQQQQTQQLQQQKNGMPQQAPDQQVRQTKGKYTLQDFDILRTLGTGSFGRVHLVQSKHNQRFYAVKVLKKAQVVKMKQVEHTNDERRMLGEVKHPFLITLWGTFQDSKNLYMVMDFVEGGELFSLLRKSGRFPNPVAKFYAAEVTLALEYLHSRDIIYRDLKPENLLLDRHGHLKITDFGFAKRVPDKTWTLCGTPDYLAPEVVSNKGYNKSVDWWSLGILIYEMLCGYTPFWDSGSPMKIYENILKGKVKYPAYINPDAQDMLSKLITADLTKRLGNLYGGPNDVKTHPWFQEVTWDRLARKDIDAPYTPPVKAGAGDASQFDRYPEDPERYGSSGHDEYGHLFTDF

SEQ ID NO: 45994 - protein, 135 aa, Zea mays; identical to SEQ ID NO: 816

SEQ ID NO: 45995 - protein, 249 aa, Elymus dentatus
LTGITGIVNGMDVSEWDPTKDKFLAVNYDITTALEAKALNKEALQAEVGLPVDRKVPLVAFIGRLEEQKGPDVMIAAIPEIVKEEDVQIVLLGTGKKKFERLLKSVEEKFPGKVRAVVRFNARLAHQMMAGADLLAVTSRFEPCGLIQLQGMRYGTPCACASTGGLVDTIVEGKTGFHMGRLSVDCNVVEPADVKKVATTLKRAVKVVGTPAYQEMVKNCMIQDLSWKGPAKNWEDVLLELGVEGSEPG

SEQ ID NO: 45996 - protein, 427 aa, Photorhabdus luminescens subsp. laumondii TTO1
MSQSDILYSQAKQLIPGGVNSPVRAFNGVGGTPLFIKHADGAYLYDVDGKAYIDYVGSWGPMVLGHNHSAIRNAVIKAAEQGLSFGAPTAAEVEMAQLVTELVPSMDMVRMVNSGTEATMSAIRLARGYTHRDKIIKFEGCYHGHADCLLVKAGSGALTIGQPNSPGVPVDFVKHTLTCTYNDLSSVREAFEQYPQEIACIIVEPVAGNMNCVPPQPEFLPGLRALCDEFGALLIIDEVMTGFRVALSGAQSYYDVEPDITCLGKIIGGGMPVGAFGGRYEVMEKLAPIGPVYQAGTLSGNPIAMAAGLACLKEVSQPGVHQRLTELTDNLAAGLTKSAKAANIPLVVNHVGGMFGIFFTDAETVTCYQDVMNCDIERFKHFFHLMLDEGVYLAPSAFEAGFMSIAHTDEDIQRTVNAAARCFAKLK

SEQ ID NO: 45997 - protein, 249 aa, Elymus mutabilis
LTGITGIVNGMDVSEWDPTKDKFLAVNYDITTALEAKALNKEALQAEVGLPVDRKVPLVAFIGRLEEQKGPDVMIAAIPEIVKEEDVQIILLGTGKKKFERLLKSVEEKFPGKVRAVVRFNAPLAHQMMAGADLLAVTSRFEPCGLIQLQGMRYGTPCACASTGGLVDTIVEGKTGFHMGRLSVDCNVVEPADVKKVATTLKRAVKVVGTPAYQEMVKNCMIQDLSWKGPAKNWEDVLLELGVEGSEPG

SEQ ID NO: 45998 - protein, 464 aa, Edwardsiella tarda
  misc_feature (186)..(186): Xaa can be any naturally occurring amino acid
  unsure (1)..(464): unsure at all Xaa locations
MKKGTDTRGGYLDSRFGSEAIRTAAEAHHFPQGEMREDIAFQVINDELFLDGNARQNLATFCQTWDDDYVHRLMDISINKNWIDKEEYPQSAAIDLRCVNMVADLWHAPRPADGQAVGTNTIGSSEACMLGGMAMKWRWRAKRLAQGKSVDKPNMVCGPVQVCWHKFARYWDVELREIPMAPGKLXMDPERMIAACDENTIGVVPTFGVTYTGNYEMPDVLHKALDDLQARTGLDIDMHVDAASGGFLAPFCAPDIVWDFRLPRVKSISASGHKFGLAPLGCGWVVWRDAASLPDDLIFKVDYLGGQVGTFAINFSRPAGRVIAQYYEFLRLGREGYTKVHTASYQVAQFLAAEIAKLGPYEFICSGDPQQGIPAVCFRIPAGKALGYSLYDLSERLRLRGWQVPAFALNGEMSDVVVMRIMCRRGFEMDFAQLLMEDFRAALAYLKAHPAVANVAHQNSFKHS

SEQ ID NO: 45999 - protein, 249 aa, Elymus mutabilis
LTGITGIVNGMDVSEWDPTKDKFLAVNYDVTTALEGKALNKEALQAEVGLPVDRKVPLVAFIGRLEEQKGPDVMIAAIPEIVKDEDVQIVLLGAGKKKFERLLKSVEEKFPGKVRAVVRFNAPLAHQMMAGADVLAVTSRFEPCGLIQLQGMRCGTPCACASTGGLVDTIVEGKTGFHMGRLSVDCNVVEPADVKKVATTLKRAIKVVGTPAYHEMVKNCMIQDLSWKGPAKNWEDVLLELGVEGSEPG

SEQ ID NO: 46000 - protein, 552 aa, Edwardsiella tarda
MAGMVIYPIVNIDFLQFLEKTQLNKPSQHATTTEESAMNIVNGINGLIAKKNVLFFLTSLAISPSVLADTLTRDNGAPVGDNQNSQTAGPNGPVMLQDVQLLQKLQRFDRERVPERVVHARGTGAHGVFTPTADISDLTVAKVFTPGSTTPVFVRFSSVVHGTHSPETLRDPRGFATKFYTAEGNWDLVGNNFPTFFIRDAIKFPDMVHAFKPDPRTNLDNDARRFDFFSHLPESTRTLTLLYSNEGTPLSYRNMDGNSVHAYKLINDKGESPLCEVHWKTRQGIKNLDPQQVEQIQGKDYSHMTQDLVTAINRGDYPKWDLYIQVLRPADLKNFDFDPLDATKAWPDVPERKIGEMVLNKNPDNVFQETEQVAMAPSNLIPGIEPSEDKLLQGRLFAYADTQFYRIGANGLSLPINKPHSVVNNGNQDGQLNSGHTLDKGVNYQPSRIYPREELVSSRYSQTPLSGTTQQSKIQREQNFKQAGELYRSYSKKEQNDLINSLGTSLASADTVSKNIMLSYFYKADKDYGTRLTSVANGDLPTVKNLADKLQD

SEQ ID NO: 46001 - protein, 180 aa, Brassica napus
  misc_feature (14)..(14): Xaa can be any naturally occurring amino acid
  misc_feature (36)..(36): Xaa can be any naturally occurring amino acid
  misc_feature (41)..(41): Xaa can be any naturally occurring amino acid
  misc_feature (62)..(62): Xaa can be any naturally occurring amino acid
  misc_feature (113)..(113): Xaa can be any naturally occurring amino acid
  misc_feature (145)..(145): Xaa can be any naturally occurring amino acid
  misc_feature (147)..(147): Xaa can be any naturally occurring amino acid
  misc_feature (150)..(150): Xaa can be any naturally occurring amino acid
  misc_feature (153)..(153): Xaa can be any naturally occurring amino acid
  misc_feature (157)..(157): Xaa can be any naturally occurring amino acid
  misc_feature (162)..(162): Xaa can be any naturally occurring amino acid
  misc_feature (166)..(166): Xaa can be any naturally occurring amino acid
  unsure (1)..(180): unsure at all Xaa locations
MRAILMKGHKRPIXFLRYNRDGDMLFSSAKDQTPTXLWYAXSGERDGTFRGHNSAVWCGDVXRDALMLVTGSADQSAKLWDVKIRQQLFSFKFGSPARSVDFALGDQLAVITXSDPFMERTSAIHVKRTAEESLCLSWGAPMGSXRXNRXLVXGPLXQPLVXGGGXKAGGKNWDGKRIFG

SEQ ID NO: 46002 - protein, 302 aa, Daucus carota
MDNSCATLQEGCLVVQQQNTTAAATMATVDHSSSSTKAPVTRNSRWSLAGMTALVTGGTRGIGHAIVEELAELGACVYTCSRNEQELNERLEEWRAKGFDVTGSVCDVSSVTEREQLFQRISSCFGGKLHILINNVGTNIRRATENYTAEQYSIVMATNLEAPYHACQLAYPLLKASGSGCIVFNSSVAGLVHLGTPGSVYGAAKGAINQLTKNLACEWAKDNIRTNCVAPGYIKTPPVEKLFERKNFLDRLVSRTPLRRPGETEEVSSLVAYLCMPAASYITGQIIAIDGGLTVNCFERVV

SEQ ID NO: 46003 - protein, 159 aa, Gossypium hirsutum
MGFTEKQEGLVKESWEVLKQDIPHSSLRFFSLILEIAPGAKNMFSFLRESEEIPQNNPKLKAHAVKVFKMTCESAIQLREKGEVVVADTTLKYLGTVHVKSGVKDPHFEVVKEALLRTIEEAIGEEKWNEEMKNAWGEAYDQLAEAIKAEMKNHHDETA

SEQ ID NO: 46004 - protein, 140 aa, Burkholderia fungorum LB400
MNKPDDLNTDAPAVQKDDAEWRKQLSDVEYQVTRHAATERPFTGRYHDHWDRGIYDCVCCGTPLFESDTKFDAGCGWPSYFKPINGEVIAEKTDRSHGMLRIEVQCKNCGAHLGHVFEDGPAPTGLRYCINSAALQFEPK

SEQ ID NO: 46005 - protein, 307 aa, Lactobacillus acidophilus NCFM
MKKIVVIGSSNVDTTLHVKDFPKPGETINATEITTAAGGKGANQAIAAAKSGAETYFINRVGEDSEGGYITHQLKSYGVDTTYVQTTMGVKTGHAYITLNEAGQNNIVIDHGANYELTVEDIKAAGDLIKSWDCIIAQFETPIEVTTAAFKMAKKAGKITILNPAPAVEEIPEELLKYTDIITPNETESAKITGIQIKDKSSLAANAEKLHLLGVKNVVITYGDKGSYISTKDIETLIPAYKVEATDTTGAGDTFIGYLASNLNEDLSNFEDAAKIASRASSIAVQRLGAQPSIPTAQEVEQAMEDE

SEQ ID NO: 46006 - protein, 172 aa, Arabidopsis thaliana
MAILIPASFGRLTITSRAQVRVRVSASANQRTIRRDSVDWVKETSSFFEEDKRPIMLFDGVCNLCNGGVKFVRDHDRNRSIRFEALQSEAGKKLLLRSGRAPDDISSVVLVENDRSYIKSEAVLKIMKYIDLPFPQLAFFLQFAPLFVRDFLYENVANNRYAMFGRSDSCEL

SEQ ID NO: 46007 - protein, 293 aa, Nostoc punctiforme PCC 73102
MLSQLGATSHLSPHLTFGTISTRTVYQSTKALAEQLKTQPKAEFSLKAFRDRLRWHDSFTQRLYFHPEIAYTNRYREFDKLYTPETLSGAKQELYQAWQQGMTGFPLVDASMRQLQTMGWMNFRMRAMCATFLTINCGVSWHHGAKHYMNYLVDGDLAIDNWQWQMQAGVTNPLSDTFRIYNPSKNIAEKDPLGEFIYHWIPELRGYSLLEIEQEKYIETSNYPKVILDWSKTRKVNGKIVSDLRKQTKQRLLSQGGDEYDSAIAAKETVDKYWQHKDKEYKEYQQKLTELQE

SEQ ID NO: 46008 - protein, 306 aa, SYNECHOCOCCUS SP. WH 8102
MIDRLGPPGGDPAIDGPLDDRLGGAPANVACGLARLGTSVAFLGRLGADAIGDRFATLFLQRGVDVDSVQWDAQRPSRIVLVRRSADGERQFRGFAGDEGLGFADQALASVELPKQARWLLTGTLPLAAHASADSLRGAVAQSKARGIALAVDVNWRPTFWDSAARPDAGPSQQAIELIRPLLEQAALIKLAREEAIWLFGSTDPRAICTQLPQEPDVVVTDGAEPVRWWMDGASGTQPAFHPPQVVDTTGAGDAFTAGLLHRWSASPAERVRFASACGALVCAGAGGIDPQPTEAQVEAFLGGVS

SEQ ID NO: 46009 - protein, 270 aa, Buchnera aphidicola
MNRYQKLCKKLIPFKKGCFIPFVVLGDPSIDMSLKIINALIENGADGLELGIPFSDPIADGEIIQKANLRAFNSKINLHKCFDILSEIREKHQTIPIGLLLYSNLIFKFGINKFYLKCYKIGIDSILIADLPIEESYVFRKYAVINNILPVFICPPDAKKNVIKNIAIHSQGYIYLLSRSGVTGINQEIMIPPLSLINKLKKLTKTPLIQGFGVSYPYQIQKIILSGISGVICGSIIAKLIENYFQDDDKLIKEIIFLSKSFKKATIIIE

SEQ ID NO: 46010 - protein, 314 aa, Zea mays
MATLTVPSSVPAVAEDCEQLHKAFEGWGTNEKLIISILAHRNAAQARAIRRGYAEAYGKELLRALGDEIHGKFERAVILWTLDPAERDAVLANEEAKKSHPGGRALVEIACARTPAQLFAVKQAYHDRFKRSLEEDVAAHVTGDFRKLLVPLVSAYRYDGPEVNTSLAHSEAKILHEKIHKKAYSDEEIIRILTTRSKAQLLATFNSYKDQFTHAINKDLKADPKDEFLSTLRAIIRCFTCPDRYFEKVIRLALGGMGTDEDDLTRVVTTRAEVDLKLIKEAYQKRNSVPLERAVAKDTTRDYEDIMLALLGAE

SEQ ID NO: 46011 - protein, 440 aa, Bacillus cereus ATCC 10987
MKQHPFKIASLGMQHMLAMYAGAIIVPLIVGGGLGLNQKELTYLVSIDLLMCGVATILQALSNRFFGIGLPVVLGCTFTAVGPMIAIGKQYGVSSIYGAIIAAGLFVVIFAKLFGKLVKLFPPVVTGSVVTVIGVTLVPAAINDMAGGVGSKDFGSLENLALAFGVLLFIIIMYRFFDGFIRSISILLGLLFGTIVAAFMGKVSLQAVGEADWFHGIQPFYFGTPTFELTPIITMILVACVGIVEATGVYFALSDICNKKIGEKELTKGYRAEGLAMVLGGIFNAFPYTTYSQNVGLVQLTGVRNRVIIYTCGGMLIVLGFIPKIAAITTIIPKSVLGGAMLAMFGMVMAYGIKMLSSVDFGRQENLLIVACSVGIGLGVTVVPTLFSQLPESIRILTDNGIVLGSASAVLLNIVFNMVPQRKVKVKDEPVPIQSAVREA

SEQ ID NO: 46012 - protein, 495 aa, Oryza sativa
MEGNARGGGHSEALKNYNLGRTLGIGSFGKVKIAEHKLTGHRVAIKILNRRQMRNMEMEEKAKREIKILRLFIHPHIIRLYEVIYTPTDIYVVMEYCKFGELFDYIVEKGRLQEDEARRIFQQKPENLLLDSKYNVKLADFGLSNVMHDGHFLKTSCGSPNYAAPEVISGKLYAGPEVDVWSCGVILYALLCGTLPFDDENIPNLFKKIKGGIYTLPSHLSALARDLIPRMLVVDPMKRITIREIREHQWFQIRLPRYLAVPPPDTAQQAKMIDEDTLQDVVNLGYEKDHVCESLRNRLQNETIFQATVAYYLLLDNRFRATSGYLGADYQESLERNLNRFASSESASSNTRHYLPGSSDPHASGLRPHYPVERKWALGLQSRAQPREIMIEVLKALEDLNVCWKKNGQYNMKCRWSVGYPQATDMLDVNHSFVDDSIIMDNGDVNGRLPAVIKFEIQLYKSRDEKYLLDMQRVTGPQLLFLDFCAAFLTKLRVL

SEQ ID NO: 46013 - protein, 271 aa, Desulfovibrio desulfuricans G20
MAHDVRLRTAHAATDYVVNHHGGYIMTLVSHLSLYITPDPDAMARQAAELIIERCAAAVAAHDAFTIALSGGSTPVPLFRLLAGQEYADRIPWNKVSVYWVDERCVHPDHEQSNYRVARDELLHKVDATKFYRMKGEAQPEIAAQAYEELLRRQFGLSAGELPRFDCVLLGTGADGHTASLFPHSTGLEEREKLVIDQYVPSLHSTRLTLTLPVINNARDVIVMASGHAKHPVLAKALNLLEPRLLPIQHIAPAAGRLSWVIDQAAAQPAA

SEQ ID NO: 46014 - protein, 464 aa, Escherichia coli O157:H7 EDL933
MVRSQLSRADAPCLLTSLRRQLMAMFGLPHWQLKSTSTESGVVAPDERLPFAQTAVMGVQHAVAMFGATVLMPILMGLDPNLSILMSGIGTLLFFFITGGRVPSYLGSSAAFVGVVIAATGFNGQGINPNISIALGGIIACGLVYTVIGLVVMKIGTRWIERLMPPVVTGAVVMAIGLNLAPIAVKSVSASGFDSWMAVMTVLCIGLVAVFTRGMIQRLLILVGLIVACLLYGVMTNVLGLGKAVDFTLVSHAAWFGLPHFSTPAFNGQAMMLIAPVAVILVAENLGHLKAVAGMTGRNMDPYMGRAFVGDGLATMLSGSVGSSGVTTYAENIGVMAVTKVYSTLVFVAAAVIAMLLGFSPKFGALIHTIPAAVIGGASIVVFGLIAVAGARIWVQNRVDLSQNGNLIMVAVTLVLGAGDFALTLGGFTLGGIGTATFGAILLNALLSRRLVDVPPPEVVHQEP

SEQ ID NO: 46015 - protein, 175 aa, Triticum aestivum
MAPTVMASSATSVAPFQGLKSTAGLPVSRRSNGASLGSVSNGGRIRCMQVWPIEGIKKFETLSYLPPLSTEALLKQVDYLIRSKWVPCLEFSKVGFIFREHNASPGYYDGRYWTMWNLPMFGCTDATQVINEVEEVKKEYPDAYVRIIGFDNMRQVQCVSFIAFKPPGCEESGKA

SEQ ID NO: 46016 - protein, 341 aa, Rubrobacter xylanophilus DSM 9941
MARVYREGDIGNEIAQKRIAVLGFGSQGHAHALNLRDSGCEVTVGLYRGSASWPKAEEAGLRVAEIPETVRWAEVVMMLLPDERQPPVFREQVAPNLAEGNLMLFAHGFNVHFNQVSVPPEVDLGLVAPKGPGHVLRSLYEEGKGMPALFAVGRDATGQARDLVLSYAKGIGCARAGVLETTFAEETETDLFGEQAVLCGGLSALLKAGFETLVEAGYQPELAYYECVNELKLIVDLIYEGGLARMRYSVSNTAEYGDYTAGPKVIDEGVRERMREILADIQSGRFAKEWVLENQAGGSSFLAMRRREAEHMVEKVGAELRALAAEGAQSPAGSPAGGESR

SEQ ID NO: 46017 - protein, 524 aa, Bordetella bronchiseptica RB50
MAPPDHVVPSPANGHRHDARPATRLPEPTSLRRTLSARHLTMIAVGGSIGTGLFVASGATIAQAGPGGALLAYLLVGIMVYFLMTSLGELAASMPVAGSFSTYGAKYVDEGFGFALGWNYWYNWAVTVAVDLVAAQLVMAYWFPEMPGVLWSAAFLALIVGLNALSARGFGEAEFWFALIKVIAVLAFIAMGVLMLLGIIRGGEHGGLAYWTLDDAPFAGGFAALIGVAMVVGFSFQGTELIGIAAGESKDPARNLPRAVRQVFWRILLFYVLAIAVIGLLIPYTDPQLLRNEVSDVSVSPFALIFERAGLLAAASIMNAVVLTSVLSAGNSGMYAATRMLYSLARDGKAPARFGRLSRSGVPLWALLATTAVAALCFLSFLFSPKAVYIWLLNTSGMTGFIAWLGIAISHYRFRRGYVAQGNNLADLPYVSPFFPFGPLFAFVLCLVITLGQNYHAFLQDRIDWTGAAATYVGIPLFLAIWAGYRLVRGSRFVRYRDMQFPDLRMRNRELNAMLSGDCAEPRR

SEQ ID NO: 46018 - protein, 516 aa, Triticum aestivum
MRSPRLTCSRWCSRLARSPSSSCCGPRGPPLCTRYPSIVYPSAMDVPLASKTFPSPSPSKREQCNVDGHKSSSKHADLNPHANDSVLGIILGGGAGTRLYPLTKKRAKPAVPLGANYRLIDIPVSNCLNSNISKIYVLTQFNSASLNRHLSRAYGSNIGGYKNEGFVEVLAAQQSPDNPDWFQGTADAVRQYLWLFEEHNVMEYLILAGDHLYRMDYEKFIQAHRETDADITVAALPMDEERATAFGLMKIDEEGRIIEFAEKPKGEQLKAMMVDTTILGLDDARAKEMPYIASMGIYVISKHVMLQLLREQFPGANDFGSEVIPGATSTGMRVQAYLYDGYWEDIGTIEAFYNANLGITKKPIPDFSFYDRSAPIYTQPRHLPPSKVLDADVTDSVIGEGCVIKNCKIHHSVVGLRSCISEGAIIEDTLLMGADYYETEADKKLLAEKGGIPIGIGKNSHIKRAIIDKNARIGDNVMIINVDNVQEAARETDGYFIKSGIVTVIKDALLPSGTVI

SEQ ID NO: 46019 - protein, 392 aa, Burkholderia fungorum LB400
MTDAVIVSTARTGLAKSWRGGFNMTHGATLGGHVTQAAVERAKLDPARVEDVIMGCANPEGATGMNIARQIALRAGLPVSVPGMTVNRFCSSGLQTIALAAQRVIAGEGDVYVAGGVESISCVQNEMNHHMLTEGWLSENKPEIYWSMLQTAENVAKRYSISKERQDEYGVRSQQRAAAALEAGRFKDEIVPLTVLAGVTDKAGGRLFTKEVTVSGDEGIRADTTLEGVSKIRTALPGGVITAGNASQFSDGASACVVMNAKVAEREGLQPLGIFRGFAVAGCEPDEMGIGPVFAVPKLLRQAGLKVEDIDLWELNEAFAVQVLYCADKLGIPQDRLNVNGGAIAVGHPYGVSGARLTGHALIEGKRRGAKLVVVTMCIGGGQGAAGLFEVV

SEQ ID NO: 46020 - protein, 481 aa, Silicibacter sp. TM1040
MKRTRNVKIVATLGPASETYETIRALHEAGADVFRLNMSHGSHDEIAVKHKIIRQVEEDLDSTIAILADLQGPKLRVGVFANGAEELEEGANFRLDLDPAEGDLSRVCLPHPEIFQALEPGASLLVNDGKIRLKVEDCGEDYANCVVTTGGTISNRKGVNVPDVILPLAALSEKDRADLEFVCELGVDWLALSFVQRAKDVFEARALADGRAAILSKIEKPAAVDNFAEILDASDGIMVARGDLGVELPVSHVPPIQKRLVRKSRAAAKPVIVATQMLESMIESPMPTRAEVSDVATAIYEGTDAIMLSAESAAGQYPIEAVQTMDKVATEVEQDPTYRDIIAASRSSKGDTIADGIVAAAREIAEKTEIKAICCFTQSGTTALLTARERPYVPILALTPLAKTARRLCLTWGCNCVVTPKVDRFKGAVVSAARAARSGGFASETDQVVVTAGVPFNVPGTTNILRIAPCDERLIYNTDPE

SEQ ID NO: 46021 - protein, 376 aa, Arabidopsis thaliana
  misc_feature (11)..(11): Xaa can be any naturally occurring amino acid
  misc_feature (28)..(28): Xaa can be any naturally occurring amino acid
  misc_feature (80)..(80): Xaa can be any naturally occurring amino acid
  unsure (1)..(376): unsure at all Xaa locations
MGCLFDDTLSXSNPISPLVVDHDNELGXLMAVRLANAAAFPMVLKASLELGVFDTLYAEASRTDSFLSPSEIASKLPTTXPRNPGAPVLLGRMLRLLASYSMVKCEKVSVGKGERVYRAEPICRFFLKNNIQDIGSLASQVIVNFDSVFLNTWAQLKDVVLEGGDAFGRAHGGMKLFDYMGTDERFSKLFNQTGFTIAVVKKALEVYQGFKGVNVLVDVGGGVGNTLGVVASKYPNIKGINFDLTCALAQAPSYPGVEHVAGDMFVDVPTGDAMILKRILHDWTDEDCVKILKNCWKSLPESGKVVVIELVTPDEAENGDINANIAFDMDMLMFTQCSGGKERSRAEFEALAAASGFTHCKFVCQAYHCWIIEFCK

SEQ ID NO: 46022 - protein, 87 aa, Arabidopsis thaliana
AGVLYAPGKASNAGGVATSGLEMSQNAMRLTWTRAEVDQKLHGIMKSIHAACVQHGKRADGTVSYIDGANIAGFVKVAEAMLAQGVL

SEQ ID NO: 46023 - protein, 589 aa, Oryza sativa
  misc_feature (544)..(544): Xaa can be any naturally occurring amino acid
  unsure (1)..(589): unsure at all Xaa locations
MEETPLPSGKNFRSQLAAAARSINWTYAIFWSISTSRPGVLTWKDGFYNGEIKTRKITNSMNLTADELVLQRSEQLRELYDSLLSGECGHRARRPVAALLPEDLGDTEWYYVVCMTYAFGPRQGLPGKSFASNEFVWLTNAQSADRKLFHRALIAKSASIKTIVCVPFIMHGVLELGTTDPISEDPALVDRIAASFWDTPPRAAFSSEAGDADIVVFEDLDHGNAAVEATTTTVPGEPHAVAGGEVAECEPNADNDLEQITMDDIGELYSLCEELDVVRPLDDDSSSWAVADPWSSFQLVPTSSPAPDQAPAAEATDVDDVVVAALDSSSIDGSCRPSPSSFVAWKRTADSDEVQAVPLISGEPPQKLLKKAVAGAGAWMNNGDSSAAAMTTQGSSIKNHVMSERRRREKLNEMFLILKSVVPSIHRVDKASILAETIAYLKELEKRVEELESSSQPSPCPLETRSRRKCREITGKKVSAGAKRKAPAPEVASDDDTDGERRHCVSNVNVTIMDNKEVLLELQCQWKELLMTRVFDAIKGVSLXCPLGAGINIGWSPWTEDTSQVCLICCRRTWDDYRSSPESYSKLAS

SEQ ID NO: 46024 - protein, 130 aa, Brassica napus
HASDHDRIQALAEGRQWRDPAVVKEVVPPLQGSNGGWDDWDNDDAFRSPRRNQSASDFRGYGGGGGGGGGAPAKSKSSEDIYSRTQLEASAANKESFFAKRMAENESKPEGLPPSRGGKYVGFGSSPGPA

SEQ ID NO: 46025 - protein, 366 aa, Eucalyptus gunnii
MGSTGSETQMTPTQVSDEEANLFAMQLASASVLPMVLKAAIELDLLEIMAKAGPGAFLSPGEVAAQLPTQNPEAPVMLDRIFRLLASYSVLTCTLRNLPDGKVERLYGLAPVCKFLVKNEDGVSIAALNLMNQDKILMESWYYLKDAVLEGGIPFNKAYGMTAFEYHGTDPRFNKIFNRGMSDHSTITMKKILETYKGFEGLETVVDVGGGTGAVLSMIVAKYPSMKGINFDLPHVIEDAPPLPGVKHVGGDMFVSVPKGDAIFMKWICHDWSDDHCAKFLKNCYDALPNIGKVIVAECVLPVYPDTSLATKNVIHIDCIMLAHNPGGKERTQKEFETLAKGAGFQGFQVMCCAFGTHVMEFLKTA

SEQ ID NO: 46026 - protein, 186 aa, Pennisetum glaucum
MAKCYPTVSAEYQEAVEKARRKLRALIAEKSCAPLMLRLAWHSAGTFDVSTKTGGPFGTMKNPAEQAHGANAGLDIAVRMLEPVKEEFPILSYADLYQLAGVVAVEVTGGPEIPFHPGREDKPQPPPEGRLPDATKGSDHLRQVFGKQMGLSDQDIVALSGGHTLGRCHKERSGFEGPWTRNPLVF

SEQ ID NO: 46027 - protein, 395 aa, Triticum aestivum
  misc_feature (183)..(183): Xaa can be any naturally occurring amino acid
  misc_feature (227)..(227): Xaa can be any naturally occurring amino acid
  misc_feature (246)..(246): Xaa can be any naturally occurring amino acid
  unsure (1)..(395): unsure at all Xaa locations
ASWWWEGAVGAVKKSQEERTELSFQSVALVIGSTGIVGTSLVDILPRDDTPGGPWKVYAVSRRPLPPWSPQPSPAVTHLLLDLADPVAVAEALKPLTDITHVFYAAWSSHPTEAQNREANSAMLRNVLSVLVPGCPALAHVCLQTGRKHYIGPYEAIGKIPVPDPPYTEDMPRLDYPNFYYDXSDVLFEEVSRRDGAVSWSVHRPSVVFGFSPRSAMNVVGSLIRLXAAICRKEGAMLRWPGTRVXAWEGFSDASDADLLAEQEIWAAVDPLAKNEPFNCSNGDLYKWKQLWPMVADRFGVEWTGYEGEDSRFMLADAMAGKEAVWAEILQENELVTTELQEIANWWFLDAVFNVKSEHLDSMNKSKEHGFLGFRNTAKSFNAWIDKMKALKIVP

SEQ ID NO: 46028 - protein, 481 aa, Arabidopsis thaliana
MGMDIADKENTSPLLFEFCNCYKVASLTETILNPVNVSNLKDRYVLGEQLGWGQFGVIRVCSDKLTGERLACKSISKDRLVTQDDMKSIKLEIAIMAKLAGHPNVVNLKAVYEEKDSVHLVMELCAGGELFHKLEKYGRYSEVRARVLFKHLMQVVKFCHDSGIVHRDLKPENILMATMSSSSPIKLADFGLATYIKPGEKLSGTVGSPFYIAPEVLAGGYNQAADVWSAGVILYILLSGAPPFWGKTKSKIFDAVRAADLRFSAEPWDNITSYAKDLIRGMLCVDPSQRLSADEVLAHSWMEQLSESGQEQYDQDGFGCEGLENGGCSFSTQCVSREQDYSFSVGQLEQSTDNDFKSSFSTFLPADNTLPNSGFDGFSFDGKQPESTTAGFSSTGIPSMPSFTFFCTRENQTEAGGKSETRRERGNWSRMSGLHSKRNRTIGLGELDQLVVDVAVTESIIRWASCTHIPTAPSLRLSLVC

SEQ ID NO: 46029 - protein, 214 aa, Pennisetum glaucum
MAPMKLYGATMSWNVTRCAVALEEAGAEYEIVPINFATAEHKSPEHLARNPFGQVPALQDGDLYIWESRAICKYAARKCKPDLLKEGNLVESAMVDVWMEVEANQYTSALDPILFECLISPMLGGSTNQKVVEDNLEKLKKVLEVYEARLTKCKYLAGDFLSLADLNHVSATLCLFGTPHASVLDGYPHVKAWWSSLMERPSVQKVAALMKPSA

SEQ ID NO: 46030 - protein, 205 aa, Brassica napus
YKPRFWSGFPARPTRPAYQGFASGDLDSDAQSVRMFVADGGECLIAQSFAKNMGLYGERIGALTIVCTSEDVARKVKSQLLLVVRPMYLSPPIHGASIVTTILKNSDMYKDWTIELKGMADRIISMRQQLYEAIQARGTPGDWSHIIKQIGMFSFTGLNEKQVRMMAKEYHIYMTYDGRISMAGLSSKTVPQLADAIHAAVTRIP

SEQ ID NO: 46031 - protein, 589 aa, Candida albicans SC5314
MLELNSITIPRNFTEFQLTALKIYYQLKILFLATYCAQGSFGLNGSVCLARDIFVGYVVYTQLLKLYRVLRGYGIVDSIRRLYLYVSSTVSSQIFSLPFIKSKIDKELQATIGKVEEEIMKNDPQLLQFPELPEQGIDADNVSLELDKLQNLKHSDWINGRVSGAVYHGGENLLSLQVEAYKKYSVANQLHPDVFPGVRKMEAEVVHMVLDIFNAPSDGCGSTTSGGTESLLLAGLSAREYGKKYRGITEPEVIAPVTIHAGIEKACFYFGMKLHKVDLDPVTFQVDVKKVERLINSNTVLICGSAPNYPHGIIDDIESLSKLAVKYNIPLHVDACLGSFIVSFLEKSKVHGDRKLPIFDFRLPGVTSISCDTHKYGFAPKGSSIIMYRSPKLRECQYYIASDWTGGMYGSPTLAGSRPGALVVGCWATLINIGKQGYTKFCYDIVSASMKVKRAIETDPILSKHLQIIGDPIGSVISFQLAPQQSGNLSIYEISDLLTKKGWHFATLQNPSALHFAFTRLTVPVVDELIADLVEATKEAVAIAEEHKKNGVTKAPGDTAALYGIAGSVHTAGLADRLIVAFLDTLYKI

SEQ ID NO: 46032 - protein, 193 aa, Brassica napus
  misc_feature (74)..(74): Xaa can be any naturally occurring amino acid
  misc_feature (130)..(130): Xaa can be any naturally occurring amino acid
  unsure (1)..(193): unsure at all Xaa locations
AGIPASTHASGYFHETIWKGVPRGLRRVDTALKNIGINERVPYNAPLIQFSSWMGGDRDGNPRVTPEVTRDVCXLARMMAANLYFSQIEDLMFEMSMWRCNEELRVRAEVQRCAKRDAKHYIEFWKQIPXNEPYRAILGDVRDKLYNTRERARQLLSSGVSDIPEDSVLTRVDQFLEAVELWYRALCDWGRRA

SEQ ID NO: 46033 - protein, 211 aa, Campylobacter upsaliensis RM3195
MENLISGAIKFMQEDFKEHSALFESLKNKQNPHTLFIGCSDSRVIPNLITNTGPGELFVIRNIANIVPPYRVGEDYLATTSAIEYALTSLQIKNIVVCGHSNCGGCNALYSSEKELEKVPNVKKWLTMLEPIKKDVLLFSNNDLAMRSWLTEKLNLVNSLQNILTYPGVEKALSEGKIEVHAWYYIIETGEIYEYDFKAKIFTLIQNRRNV

SEQ ID NO: 46034 - protein, 455 aa, Oryza sativa
MHQRPRLPNPTNQPPPRQQKDPQFPRKTLEFDPASRRVGCSPMEAAAAAAAALLSPPAAAAPSRRPGTPGATSLPFARRRGVAAVKGLGRQQLTCRRRGVVVRAASWSPSGPESLPPPPSSSIAPLQMESPVGQFLSQILATHPHLLPAAAEQQLEQLQTDRDAAKDNGGDKPAPSDGDIVLYRRIAEVKEKERKRALEEILYALVVQKFVEAGVSLVPALSHSISSSGRVDQWAESVEGKLEKMHSQEAYEMIENHLALILGQRQADATVAAISKLRVGQVYAASVMYGYFLKRVDQRFQLEKSMKTLPWGSEEEDKLNQVMTTDSRPSPQTSTSHPEMASWTSPNFSAGGPSQSVKPCRLRSYVMSFDSETLQSYATIRSKEAFGIIEKHTEALFGKPEIVITPEGTVDSSKDEHVRISFAGLRRLILEAVTFGSFLWDVESFVDTRYHFVAN

SEQ ID NO: 46035 - protein, 320 aa, Rubrobacter xylanophilus DSM 9941
MVLRARTPSRGEDRMRVLVTGGAGFIGSHVAEQLLSRGHEVAVLDNLSTGKRENVPPGARFYEADVRDGCAGVFEDFRPEAVSHQAAQMDVRRSVAEPDFDAEVNVIGTVRLLEACVRGGVRRVVFASTGGAIYGEQEEFPATERHPQYPISPYGVSKLAGERYLHYYNAQYGLPYAALRYSNVYGPRQDPHGEAGVVAIFCGRLAAGERATINGTGEQTRDYVYVGDVARANVLALENELPPGAYNIGTGVETSVNELYERLRRLSGRDDLDPEHGPAKPGEQQRSCVDPSLAGRVMGWRPEVGLDAGLKETLRFFGGL

SEQ ID NO: 46036 - protein, 488 aa, Prosthecochloris aestuarii DSM 271
MSNSDTRVQGKKLSPEKVMNKLVSLAKRRGFIFPSSEIYGGLSSCFDYGPLGSEMKKNIKDLWWTSMTRKHQNIVGIDASIMMNPTVWEASGHVSSFNDPMIDDKTTKRRYRADHLIENHIEKLRRDGKTDEAQRISSSYEQAADAEDSNKAFYDIIIAEEIKAPDTGSSDWTEVRQFNLMFKCNMGALADSAGSVYLRPETAQGIFVNFHNVRESNRMKVPFGIAQIGKAFRNEIVKGNFIFRMVEFEQMEMQYFVKPGTQKETFEAWREERFNWYKERLGLTPGKLHWYKHDKLAHYADLAYDIKFEFPFGIEEIEGIHSRTDFDLKQHQEFSGKNMEYIDQATNERYIPYVVETSAGADRLFLALLCDAYTEDVIDGEERVMMKFSPTIAPVKAAVLPLMKKGEMGEKASKFRNDLAEQFLVQYDDAGSIGKRYRRQDEIGTPFCFTVDHQTLEDDTVTVRYRDTAEQQRMEMSKVPEFLAAEIV

SEQ ID NO: 46037 - protein, 500 aa, Oryza sativa (japonica cultivar-group)
MVLTHVEAVEEGSEAAAAVFASRYVQDPVPRYELGERSISKDAAYQIVHDELLLDSSPRLNLASFVTTWMEPECDRLILEAINKNYADMDEYPVTTELQNRCVNIIARLFNAPVGDGEKAVGVGTVGSSEAIMLAGLAFKRRWQNRRKAAGKPHDKPNIVTGANVQVCWEKFARYFEVELKEVKLTEGCYVMDPVKAVDMVDENTICVAAILGSTLTGEFEDVRRLNDLLAAKNKRTGWDTPIHVDAASGGFIAPFIYPELEWDFRLPLVKSINVSGHKYGLVYAGVGWVIWRNKEDLPEELIFHINYLGADQPTFTLNFSKGSSQIIAQYYQFLRLGFEGYKSVMKNCMESARTLREGLEKTGRFTIISKEEGVPLVAFTFKDGAGAQAFRLSSGLRRYGWIVPAYTMPAALEHMTVLRVVVREDFGRPLAERFLSHVRMALDEMDLAARAPVPRVQLTIELGPARTAGEEASIRVVKSEAVPVRKSVPLVAGKTKGVC

SEQ ID NO: 46038 - protein, 447 aa, Eremothecium gossypii
MASQEEFYRTQIFGTVFEITNRYADLNPVGMGAFGLVCSAVDTYTQQPVAIKKIMKPFSTAVLAKRTYRELKLLKHLRHENLICLEDIFLSPLEDIYFVTELQGTDLHRLLQTRPLEKQFLQYFLYQILRGLKYVHSAGVIHRDLKPSNILINENCDLKICDFGLARIQDPQMTGYVSTRYYRAPEIMLTWQKYNVEVDIWSAGCIFAEMIEGKPLFPGKDHVHQFSIITDLLGSPPKDVIDTICSENTLKFVTSLPHRDPVPFTERFKNLKPDAVDLLEKMLVFDPKKRITAGDALTHPYLAPYHDPTDEPVADAKFDWNFNDADLPVDTWRVMMYSEILDFHQVPDSQINPNDTFDDQVAAATAAAEAARQQQQQKQQQQKQQQQRHQGVEHGAQHVQLQHGAKQLSADPLVGDSNGGIPLNVSAANETLNNFANQAAQYATDFE

SEQ ID NO: 46039 - protein, 333 aa, Medicago sativa
MATLILPPIPPSPRDDAMQLYRAFKGFGCDTTAVINILAHRDATQRAYLQQEYKATYSEELSKRLVSELKGKLETAVLLWLPDPAARDAEIIRKSLVVDRSLEAATEVICSRTPSQLQYLKQLYHSKFGVYLEHEIELNTSGDHQKILLRYLTTPRHEGLEVNREIAQKDAKVLYKAGEKKLGTDEKTFVQIFSERSSAHLAAVSSYYHDMYGHSLKKAVKNEASGNFGLALLTITECATNPAKYFAKVLYKAMKGLGTNDSTLIRVIVTRTEIDMQYIKAEYAKKYKKTLNDAVHSETSGNYRIFFSHFWVRITSQRCSIMFRFGYISNYDV

SEQ ID NO: 46040 - protein, 608 aa, Arabidopsis thaliana
MGGLIDLNVMETEEDETQTQTPSSASGSVSPTSSSSASVSVVSSNSAGGGVCLELWHACAGPLISLPKRGSLVLYFPQGHLEQAPDFSAAIYGLPPHVFCRILDVKLHAETTTDEVYAQVSLLPESEDIERKVREGIIDVDGGEEDYEVLKRSNTPHMFCKTLTASDTSTHGGFSVPRRAAEDCFPPLDYSQPRPSQELLARDLHGLEWRFRHIYRGQPRRHLLTTGWSAFVNKKKLVSGDAVLFLRGDDGKLRLGVRRASQIEGTAALSAQYNQNMNHNNFSEVAHAISTHSVFSISYNPKASWSNFIIPAPKFLKVVDYPFCIGMRFKARVESEDASERRSPGIISGISDLDPIRWPGSKWRCLLVRWDDIVANGHQQRVSPWEIEPSGSISNSGSFVTTGPKRSRIGISSGKPDIPVSEGIRATDFEESLRFQRVLQGQEIFPGFINTCSDGGAGARRGRFKGTEFGDSYGFHKVLQGQETVPAYSITDHRQQHGLSQRNIWCGPFQNFSTRILPPSVSSSPSSVLLTNSNSPNGRLEDHHGGSGRCRLFGFPLTDETTAVASATAVPCVEGNSMKGASAVQSNHHHSQGRDIYAMRDMLLDIAL

SEQ ID NO: 46041 - protein, 400 aa, Streptomyces clavuligerus
MSNQEFAQRWQGVMIDSYGTPGLSFVRGEGSTLWDADGTAYTDFVSGLAVNALGHAHPAVVGAVSRQIASLGHISNFYSAEPTITLAERLIELFGRPGRVFFCNSGAEANETAFKIGRLTGRSRIVAAQSGFHGRTMGSLALTGQPAKREPFLPLPGDVTHVPYGDAEALRAAVTEDTAMVILEPIQGESGVVVPPKGYLRAAREITEATGTLLVLDEVQTGIGRTGHWFAAQAEGVEADVVTLAKGLGGGLPLGAAVAFGRAAELMTPGHHASTFGGNPVSCARTRVLDTIAADGLLDRVKQLGSAPDEWSVRDAAAIRWSPMSGAGLMLGIVLNEPLAPQVQLAAQKAGFLVNVPAPDVVRLIPPLVIEETEVDAFLQALPGLLDAVHERDREGQTGE

SEQ ID NO: 46042 - protein, 382 aa, Thermosynechococcus elongatus BP-1
MVACEFSPGLDGIPVAQSAISYVDGQAGILEYRGVPIQELAEKSTFLETAFLLIWGYWPNREELAAFEHDITYHRRVKYRIRDMMKCFPESGHPMDALQASAGALGLFYSRRALEDPEYIRAAVIRLLAKIPTMVAAFQLIRKGNDPVMPCDELDYAANFLYMLNERRPDPFAARVFDICLILHAEHTMNASTFSARVTASTLTDPYAVVASAVGTLAGPLHGGANEDVINMLEEIGSVENVRPYVEKCIQNKIKIAGFGHRVYKVKDPRATILQKLAEQLFDKFGGDRYYDIALKLEEVVGEYLSYKGIYPNVDFYSGLVYRRLGIPSDLFTPVFAIARVAGWLAHWKEQLEANRIYRPTQVYTGAHNQPYVPMEERNHRP

SEQ ID NO: 46043 - protein, 161 aa, Polaromonas sp. JS666
MNTVYAFEARQINGQNIPLSEFSGKVMLIVNTASQCGFTPQFGGLEELHKTYAGKGLAVLGFPCNQFGSQDPGSDGEIAEFCQVNYGVSFPMMSKIDVNGPAAHPLYKWLTAEAPGLLGSKSIKWNFTKFLVGKNGQVIKRYAPTDKPAELARDIEAALAA

SEQ ID NO: 46044 - protein, 170 aa, Zea mays
MAAAGAGELERVGSLGFLSELLDSAELPPLIGADVDEVIDFNGPASTSGAPGTSHSHLPVKMEEHALLHMQYQQPPPPPPPPTSYYSSQYFSLPAMNSGDVLPPAIRRYCKAEQQVVSGQTAASAVSPSRETGLSADPNAEISSAVTPSSHQFLPEFDDPVLNLADLWKY

SEQ ID NO: 46045 - protein, 56 aa, Zea mays
MSDGTATCIDIILAIILPPLGVFFKFGCGVEFWICLILTFFGYLPGIIYAVWAITK

SEQ ID NO: 46046 - protein, 245 aa, Glycine max
MRALTSSSSTFIPKRYSFFFFLSILFALRSSSGGCSEYHHHHAPMATIGGLRDSQGSQNSVQTEALARFAVDEHNKKQNSLLEFSRVVRTQEQVVAGTLHHLTLEAIEAGEKKLYEAKVWVKPWLNFKELQEFKPAGDVPSFTSADLGVKKDGHQPGWQSVPTHDPQVQDAANHAIKTIQQRSNSLVPYELHEVADAKAEVIDDFAKFNLLLKVKRGQKEEKFKVEVHKNNQGGFHLNQMEQDHS

SEQ ID NO: 46047 - protein, 220 aa, Bacillus cereus E33L
MKAIIFDFDGLIVDTETIWFHSFRDAVREYGGDLPLEEFAKCIGTTDDVLYTYLNEQLKEKFDKYALKEKVKNLHKEKMKIPEARDGVKEYLEEAKEMGLKIALASSSSREWVIPFLEELQIRDYFEVIKTREDVEKVKPDPALYRVAIEDLGVDSSEAVVFEDSLNGLKAAIAAGLTCVVVPNDVTRNLPFENHHLRIESMKDKSLKEVLQNIKKDRIS

SEQ ID NO: 46048 - protein, 470 aa, Burkholderia fungorum LB400
MGRLIVVSNRVATPTETKGSAGGLAVGVFGALKDAGGVWFGWSGDVVSETVANAGPTLEQDGAVTFATVGLTRKDYDQYYRGFSNATLWPVFHYRNDLARYEREEYTGYRRVNAWLAHKLIKLLEPDDVIWIHDYHLIPFAEALRNEGVTNRIGFFLHIPFPAPQILLNIPPHEELVKSLSCYDLLGFQTATDELAFKDYVTRHARGTVSADGLVEAFGRKLRTGVYRIGVFPDEIAEQAKRYESRQHVLDLKQSLEGRKLIMSVDRLDYSKGLVERFRAFEHLLERSPEWRGNVTLVQIAPPTRSDVATYQKIRQDLEYEAGRINGRYSGLDYTPIRYLNQQYDRWKLMSLFRESQIGFVTPLHDGMNLVAKEYVAAQNPDDPGVLVLSIFAGAAAELSGALLVNPHDAIGMCEALQRALQMPLDARQRRHEINMAALRKNDLGVWRDTFLHDLRSVPVQQPGKGGGHN

SEQ ID NO: 46049 - protein, 484 aa, Agrobacterium tumefaciens str. C58
MKNLHRRDLIEDRAFVNGAWVERDQMFAIVDPAGGDHLADVASCTLNDVDFAIDAASKAFAGWRDMLPVDRGDILRNWSARMRENAHDLATIISAEQGKPLAESRGEIAYAANFLDWFASEGERSYGETIPTHLKGSNLSVRMQPIGVTVAITPWNFPSAMIARKAGAALAAGCTMIVKPAPETPLSALALARLAEESGVPPGVLQVLPGEAAPLARRLLENTEVRAFSFTGSTEVGRILLTQSAATVKKASLELGGHAPFIVFADADLTEAVKGCLGAKFATSGQDCLAANRIYVQRSLYPRFVERFAEATSRLTVGHGLETGVDIGPMTRPSVAEKCRQQVAQALSAGARLVCGGQDSPLGGNFVTPTVLADVTDDMLIAREETFGPVAAILPFDDEAEVIRRANATEMGLAAYLYTNDLGRAMRLTDQLEYGMVAVNTPKFTGAPIPFGGWKQSGLGREGSRHGLMEYLEPKYVCFGNLAA

SEQ ID NO: 46050 - protein, 56 aa, Pennisetum glaucum
MSDGTANCIDIILAIILPPLGVFFKFGCGVEFWICLVLTFFGYLPGIIYAVWAITK

SEQ ID NO: 46051 - protein, 391 aa, SYNECHOCOCCUS SP. WH 8102
MLDHELLNGLDQALPELIELRRHLHAHPELSGEEHQTAALVAGELRACGWRVQEGVGRTGVVAEAGPLDGPTVGLRVDMDALPVEERTGLSFASTRQGVMHACGHDLHTCIGLGVARLLGAREELPFRVRLLFQPAEELAQGAVWMRDAGATDGLNALFGVHVVPNLPGGSVGIRRGCLTAAAGELEIQIQGEGGHGARPHQAVDAIWLAARVVTELQQAISRRLDALQPVVISFGRVEGGRAFNVIADRVRLLGTVRCLDLDLHGRLPAWIDNTVQAICRSGGGEAEVSYRCIAPPVHNDPGLTDLMEGRAVQLLGRDQVLPVDLPSLGAEDFAELLRDVPGTMLRLGVAGPDGCAPLHHGRFQLDERALGVGIQVLTATLLEWMEVQSV

SEQ ID NO: 46052 - protein, 394 aa, Shewanella oneidensis MR-1
MKITPSTETAQPSNGFGHSIAQWQHPHGFSKQNADGEKNTRYVLYLTVITMVAEIVAGTIYGSMALLADGWHMGTHAAAFMITLFAYSYARKHANDPAFAFGTGKVSVLGGYTSAIALGLVALIMLIESGMRLINPENIHFNEAIFVALIGLSVNVLSMFLLKDHHSHDHGHSHGNSHGHSLHQVHDKHEHTAHKDNHCCDGLEHHAADHDHDHDHDHDHDHDHDHDHDNHSHNHAHGHSHGHSGHDHNLRAAYFHVLADALTSVLAIAALLFGKYMGLTWLDPIMGIVGAIIISRWSWGLIQQTSPILLDGGVNVALQRKVRETIEAVPDHQVADLHIWRVSADHHAIMASIVSHSPKEASYFNQLLSQFPELSHITIELHTCRQGECVAKEA

SEQ ID NO: 46053 - protein, 83 aa, Pennisetum glaucum
MGDANCCRFLEILLAIVLPPLGVFLRFGCCSMEFCICLLLTILGYIPGMIYAIYVLVALDSDRSEREYYTLAYAHALKSLAVH

SEQ ID NO: 46054 - protein, 508 aa, Nicotiana plumbaginifolia
MAAATIIAATVGILVAIFCGKFLYTIWWWPKMIEKKLKKEGIYGYPYKLLFGNLKEIMKMSKEAKKQPLLTHDIIPWVNPFLQHVANTYKKIFVLWYGPTPRVTVTDPKLIRELLNRYTEFHKPEANAFIHLFVTGLASYDGEKWDTHRKLLNPAFHVEKLKRMFPAFAMCCDEMLNRWEESVGKTGSCELDVLNEFLNLGGDVISRAAFGSNIAEGRSIFLLQKEQCELILASPFTLFFPSLRFLPTASNRKAKYIHKKVISLIRGIIEKREDAVRRGISDNDDILGLLLKARNADNKSRAGGLTTEDVIEECKEFYFAGQDTTTALLSWTMVVLSMHPEWQDKARNEVFQVIGKNKPKFDDLNQLKLMNMIFQEVLRLYPAIFLIRSTSKSTKLGDMTIPAGVQVCVPTHLVHRDPEVWGDDALLFNPERFSEGVSKAAKEQMYFPFGWGPRMCIGMNFGMLEAKLILSQILQRFWFELSPSYTHAPLLTLIMRPQYGAQIIVHKL

SEQ ID NO: 46055 - protein, 435 aa, Bdellovibrio bacteriovorus HD100
MSKVTLFWFRRDLRLDDNAGLYHALKERSAVLPLFIFDSEILENLDDPADARVTFIYEQIQDMKQQLNAKKSDLIVRHGKPLEVLKTLSDEMAVEAIYANHDYEPAARKRDEKVAAWAAKAGIEFLTFKDQCLFEKDEILTDARKPYTVYTPYRNKVLANLSEFYLKSYPNDLYESSYAKVKKAEPLLTLKSLGFERSNIEFPPMDLSTKMLKTYHATRDFPADEKGTSHLGLHLRFGTLSVRELAREAKKYSPVWLSELIWRDFFMQILWHFPQVENQSFRPEYDKIAWRKSKADFQKWCEGRTGYPLVDAGMRELNATGYMHNRVRMVVASFLCKHLLIHWYEGERYFAKKLLDYDLSANNGNWQWAAGSGCDAAPYFRIFNPQTQFEKFDPDGKYVQKWVPEYGTDEYPQPMVDHNEARGRCLQAFTKVLKK

SEQ ID NO: 46056 - protein, 481 aa, Arabidopsis thaliana
MSLKALDYESLNENVKNCQYAVRGELYLRASELQKECKKIIFTNVGNPHALGQKPLTFPRQVVSLCQAPFLLDDPNVGMIFPADAIARAKHYLSLTSGGLGAYSDSRGLPGVRKEVADFIERRDGYPSDPELIFLTDGASKGVMQILNCVIRGQKDGILVPVPQYPLYSATISLLGGTLVPYYLEESENWGLDVNNLRQSVAQARSQGITVRAMVIINPGNPTGQCLSEANIREILRFCCDERLVLLGDEVYQQNIYQDERPFISSKKVLMDMGAPISKEVQLISFHTVSKGYWGECGQRGGYFEMTNIPPRTVEEIYKVASIALSPNVSAQIFMGLMVSPPKPGDISYDQFVRESKGILESLRRRARMMTDGFNSCKNVVCNFTEGAMYSFPQIKLPSKAIQAAKQAGKVPDVFYCLKLLEATGISTVPGSGFGQKEGVFHLRTTILPAEEEMPEIMDSFKKFNDEFMSQYADNFGYSRM

SEQ ID NO: 46057 - protein, 876 aa, Pseudomonas fluorescens Pf-5
MTDIDARLREDVHLLGELLGNTIRDQYGEAFLDKIEQIRKGAKADRRGSPGAELSASLDQLSEDELLPVARAFNQFLNLANIAEQYQLIHRRDESQPAPFEARVLPELLARLRAEGHSADALARQLGRLEIELVLTAHPTEVARRTLIQKYDAIAGQLAAQDHRDLTSAERGQIQERLQRLIAEAWHTEEIRRTRPTPVDEAKWGFAVIEHSLWQAIPNYLRKADKALFEATGLHLPLESAPIRFASWMGGDRDGNPNVTAAVTREVLLLARWMAADLYLRDIDHLAAELSMQQASPALLARAGDSAEPYRALLKQLRERLRATRNWAHAALSAAVPAGAEVLHNNRDLLEPLQLCYQSLHECGMGVIADGPLLDCLRRAVTFGLFLVRLDVRQDSSRHTSAMTEITDYLGLGRYEDWSEEDRITFLMRELSSRRPLLPGYFKPSADTAEVLATCREIAGAPAASLGSYVISMAGAASDVLAVQLLLKESGVLRPMRVVPLFETLADLDNAGPVMEKLLHMPGYRSRLQGPQEVMIGYSDSAKDAGTTAAAWAQYRAQERLVDICREQQVELLLFHGRGGTVGRGGGPAHAAILSQPPGSVAGRFRTTEQGEMIRFKFGLPDIAEQNLNLYLAAVLEATLLPPPPPQPAWRHLMDELASDGVRAYREVVRDNPQFVEYFRQSTPEQELGRLPLGSRPAKRRAGGIESLRAIPWIFGWTQTRLMLPAWLGWEAALSKALARGEGDLLGQMREQWPFFRTRIDMLEMVLAKADADIARSYDERLVEAELLPLGEHLRDLLSQACAVVLGLTGQSQLLAHSPDTLEFIRLRNTYLDPLHLLQAELLARSRKQQAPQGSPVEQALLVSVAGIAAGLRNTG

SEQ ID NO: 46058 - protein, 424 aa, Silicibacter pomeroyi DSS-3
MIRLNSQADWVERARAVLPAAGFGNFDPAVVIARGQGARVWDQDGREYVDYLIGSGPMLLGHGDPEVMEAVLEQLPLGTTFFANNTKGIELAEAIVQAVPCCEQVRFVTSGGEADMYAIRLARAFTGKPRIVKFEGGYHGMSAEAQMSLAPARAVNFPTPVPDSAGIPPGVADQVLVAPFNDLEAVASLLAEHDDIAAIIAEPLQRIIAPAPGFLQGLRALCDRHGVLLIFDEIVTGFRLSYGGAQEHYGVTPDIVTLGKVIGGGFPLAALGASARIMAHFDKGAVGGEGWLMQLGTLSGNPVAAAAGLKTLEILRRPGQYARLRDLGERLMAMHERALGAQGIAHRLSGDATLFDVYFTDAACTDYRTARHAAPELAQVWNAVLRAEGVLKSPGKLYPSLALGEEELERTEAALNRAAAAVTG

SEQ ID NO: 46059 - protein, 144 aa, Nicotiana tabacum
MALTQQPASSGSDGQRYATNDDRKRKRMESNRESARRSRMRKQQHLEELMSQMTQLQNQNVLWREKIDAVGRNYLTLDAENNVLRAQMAELTERLDSLNSLTRFWADANGLAVDIPEIPDTLLEPWQLPCPIQPITASADMFQF

SEQ ID NO: 46060 - protein, 681 aa, Arabidopsis thaliana
MSGSVSGCGSGGCSIVWFRRDLRVEDNPALAAAVRAGPVNALFVWAPEEEGHYHPGRVSRWWLKNSLAQLDSSLRSLGTCLITKRSTDSVASLLDVVKSTGASQIFFNHLYDPLSLVRDHRAKDVLTAQGIAVRSFNADLLYEPWEVTDELGRPFSMFAAFWERCLSMPYDPESPLLPPKKIISGDVSKCVADPLVFEDDSEKGSNALLARAWSPGWSNGDKALTTFINGPLLEYSKNRRKADSATTSFLSPHLHFGEVSVRKVFHLVRIKQVAWANEGNEAGEESVNLFLKSIGLREYSRYISFNHPYSHERPLLGHLKFFPWAVDENYFKAWRQGRTGYPLVDAGMRELWATGWLHDRIRVVVSSFFVKVLQLPWRWGMKYFWDTLLDADLESDALGWQYITGTLPDSREFDRIDNPQFEGYKFDPNGEYVRRWLPELSRLPTDWIHHPWNAPESVLQAAGIELGSNYPLPIVGLDEAKARLHEALSQMWQLEAASRAAIENGSEEGLGDSAEVEEAPIEFPRDITMEETEPTRLNPNRRYEDQMVPSITSSLIRPEEDEESSLNLRNSVGDSRAEVPRNMVNTNQAQQRRAEPASNQVTAMIPEFNIRIVAESTEDSTAESSSSGRRERSGGIVPEWSPGYSEQFPSEENGIGGGSTTSSYLQNHHEILNWRRLSQTG

SEQ ID NO: 46061 - protein, 615 aa, GIBBERELLA ZEAE PH-1
MTTPGVGHSSPRLVVDDNTTSLLQTKMLVTEKKNLTSAVTLLGAPGTTTSPLASINESDSRDPPSSLGASSIQIKGIGDMSSTTTRGWFFYGAFGTLCLVTFIIALDSTIICVALPTIVEDIGASAIEAFWRGTSFLLASTVVQPPIASLSHIFGRRPALLASVTIFAGGSIMAALAKNVSVLLGGRTLQGLDSGGILALTYVIATDLVSLRERGKWFGLISLNWAIGSILGPLIGGALVEVSWPWLFWINLPFCGVAYIMIPITMRIKRKEDASVNTKIKEFDWIGTIIFVASLKSFLIPLSWGGIMYDWSNPRTVVPLVFGILSLIAFGVHIKFCRRYSRCDPLLRPSLFTSLTALSAYFATIIHGIIVWCLVYYVPLYHEIRGSSPITAGVAVLPFTGTVAPAAVVVGLLITKTGTYRPFIWAGWTLVPLGMGLMMLLEKDTETYKWVIIYLTGGLGLGILYSAQAFAAQASASNSDLPFAASMYAFCRSLGQGIGVAVGGVTFQNEFRKQIQKSTEFALKADEWAKDASALVQIVKKSPASMQLMRDTIINGYIKGLRTVWMVLTLVACVALVVSLAGVKAKSLDRKFETEHELDQGAGERSDKATPDIDV

SEQ ID NO: 46062 - protein, 391 aa, Staphylococcus aureus subsp. aureus MRSA252
MLDWFQLANNKENKTIQLRRYLHQYPELSFEEFQTHDYIVNQLSQLSCDIETPIGRNGIKATFKGLGTGPTIALRADFDALPVEELNDVPYKSKNPGCMHACGHDGHTAILLTVAEILDEHKHLLEGNVVLIFQYGEEIMPGGSQEMIDAGCLENVDRIYGTHLWSGYPTGTIHSRAGAIMASPDEFSVTIKGRGGHGAKPHETIDPIVIMAEFILSAQKIISRTIDPVKQAVLSFGMIQAGTTDSVIPDQAFCKGTVRTFDSKIQEHVMHKMDKLLQGLAIANDIEYDLNYIKGYLPVHNNEKAYQVIKEATNDLHVRFNESDLMMIGEDFSHYLKVRPGAFFLTGCGNESKGITAPHHNPKFDIDEKSLKYAVAVFLKIIELEQVFKTN

SEQ ID NO: 46063 - protein, 515 aa, Polaromonas sp. JS666
MKKFLASLVLGLSLLGTGAAVMAQAPAAAPAASAAEAKPAEAAAPAAPAAAAAPAAAAAAPAASAAAAPAPVPNKGDTAWMMVSTLLVIMMTVPGLALFYGGLVRSKNMLSVLMQVMVTFSMIVVLWFIYGYSLAFTEGNAFFGGFDRLFMKGVWDNAAGTFANAATFSKGVVIPEIVFAAFQATFAGITCTLIVGAFAERIKFSAVLLFMAIWFTFSYAPIAHMVWFWMGPDAYTGKEVVDAMTGKAGYIWQMGALDFAGGTVVHINAAVAGLVGAFVIGKRIGYGKESMAPHSLTLTMVGSALLWVGWFGFNAGSALEANGFAALAFINTLGATAAAVLAWCVGESLMRGKASMLGAASGAVAGLVAITPAAGNVGIGGGLVIGLAAGFACLWGVNGLKKLLGADDSLDVFGVHGIGGILGALLTGVFNSPSLGGPGYVADWTTATMVTAADFSVVSQLWIQAKAVLITIVWSGVVSFIAYKIVDLTIGLRVSEEDEREGLDITAHGETAYNR

SEQ ID NO: 46064 - protein, 217 aa, Listeria innocua Clip11262
MNDIIHDYLLKHIPKSTPFFEELEVYAKEHEVPIMEPDSLHCLLQILDIQKPERILELGTAIGYSALKMADKLPKTEIITVERDEERYKEALHNIERYGASDRIKVLLTDAIEGSEEILTYGPFDAIFIDAAKAQYEKFFHIYTDSLAPDGVIYSDNVLFKGLALDMSPEKQRKLRVARKMRHFNDFLVTHPDFDTTTIPLGDGLSISKRKKTGGIS

SEQ ID NO: 46065 - protein, 175 aa, Zea mays
MSLIRRTNVLDPFSLDLWDPFDGFPFGSGGSGSLVPRTSSDTAAFASARIDWKETPEAHVFKADVPGLKKEEVKVEVEDGNILQISGERSKEQEEKTDTWHRVERSSGKFLRRFRLPENAKAEQVKASMENGVLTVTVPKEEAKKPEVKSIQISGAMRWTAVCRAVVWSFARSSR

SEQ ID NO: 46066 - protein, 520 aa, Agrobacterium tumefaciens str. C58
MPSTRRNSPERPFHSAAGNNQALAARARVMASWNISNPNMSASAIWLPERISPMTIDIKNIAEMDRNAVLHPFTQLKDFASGKLGEPTIVETGKGIRIQDAHGKQLIDGFAGLYCVNVGYGRTEVAEAISRQAYRLAYYHSYAAHTTDELAILSDRLVRMAPGKMSKVFYGMSGSDANETQAKLVWYYNNLRGKPQKKKIISRERGYHGCSVVAGSMTGMSFYHDHMDLPRVGILHTGVPHHYWGAEAGETELEFSKRRAAELEALILREGPDTIGAFIAEPVLGTGGITPPPEGYWPAIQEVLKKYDVLLIADEVITGFGRTGSMFGSQHYGIEPDLITVAKGLTSAYFPLSGAIVGEKVYTVMEDGADRVGAFSHGYTYSGHPIGAAAANAVLDIVEKEDLPGNAQAVGSYFQEQLKAKFAQLPIVGEVRGVGLMGAIEFVADREKKTRFAPHLTVGARVSKAARNGGLIARAMPHGDILGFAPPLVTTKAEVDEIIAIAEAAVRTVMDDLVQAGEKI

SEQ ID NO: 46067 - protein, 201 aa, Fragaria x ananassa
MEAKEEDVSLGANKYPERQPIGIAAQSQDDGKDYKEPPPAPLFEPGELTSWSFYRAGIAEFIATFLFLYITVLTVMGVLKGPTKCQTVGIQGIAWAFGGMIFALVYCTAGISGGHINPAVTFGLFLARKLSLTRAVFYIIMQTLGAIAGAAVVKAFENKNHFFELNGGGANSVAHGYTKGSGLGAEIMGTFVLVYTVFSAT

SEQ ID NO: 46068 - protein, 490 aa, Silicibacter sp. TM1040
MLDATTDLKSLLADPTLLEDRAYINGAFVAGEGTFEVTNPARGDVIANVADVSRMQARDAIAAAQGAQKEWAKWTGKERAGVLRKWFDLMMAHQEDLAVILTAEMGKPLAEARGEIAYGASFIEFFAEEAKRVYGETIPGHQRDKRITVIKQPIGVAASITPWNFPNAMITRKAGPALAAGCAFVARPASETPLSATALAVLAERAGIPAGVFNVIPASDASGIGKEFCENPIVRKLTFTGSTNVGRILLRQAADQVMKCSMELGGNAPFIVFDDADLDAAVEGAIMCKFRNNGQTCVCANRIYVQSGIYDAFAAKLKEKVEAMKVGDGLEDGTHFGPLISEAAVKKVEDHIADAMDKGAEVILGGAPSELGGTFFEPTIVTGATPDMAFAQDETFGPLAPLFKFETEDEVIEMANDTIFGLASYFYAKDLSRVYKVAEALEYGIVGINTGIISTELAPFGGVKQSGLGREGSHHGIEDYLEMKYLCMSV

SEQ ID NO: 46069 - protein, 214 aa, Bacillus licheniformis
QTGGSFYEPFNNYNTGLWQKADGYSNGNMFNCTWRANNVSMTSLGEMRLSLTSPSYNKFDCGENRSVQTYGYGLYEVNMKPAKNVGIVSSFFTYTGPTDGTPWDEIDIEFLGKDTTKVQFNYYTNGVGNHEKIVNLGFDAANSYHTYAFDWQPNSIKWYVDGQLKHTATTQIPQTPGKIMMNLWNGAGVDEWLGSYNGVTPLYAHYNWVRYTKR

SEQ ID NO: 46070 - protein, 275 aa, Zea mays
MKWNVNCINQYQEVLLCFVFEPRVVRSAHTHNQISPKSTRRHLRFKMQIFVKTLTGKTITLEVESSDTIDNVKAKIQDKEGIPPDQQRLIFAGKQLEDGRTLADYNIQKESTLHLVLRLRGGMQIFVKTLTGKTITLEVESSDTIDNVKAKIQDKEGIPPDQQRLIFAGKQLEDGRTLADYNIQKESTLHLVLRLRGGIQIFVKTLTGKTITLEVESSDTIDNVKAKIQDKEGIPPDQQRLIFAGKQLEDGRTLADYNIQKESTLHLVLRLRGGQ

SEQ ID NO: 46071 - protein, 345 aa, Glycine max
EMGVKMYSDMVTLQTMDSIFYEVQRQGRISFYLTQMGEEAVNIASAAALSPDDIILPQYREPGVLLWRGFTLQQFVHQCFGNTHDFGKGRQMPIHYGSNKHNYFTVSSPIATQLPQAVGAAYSLKMDGKSACAVTFCGDGATSEGDFHAAMNFAAVMEAPVVFICRNNGWAISTPVEDQFRSDGIVVKGKAYGIWSIRVDGNDALAVYSAVHTAREIAIREKRPVLIEALTYRVGHHSTSDDSTKYRGTGEIEYWKTARNPVNRFKRWVERNDWWSDKDELELRSSVRKQLMHAIQVAEKAQKPPLEDLFSDVYDQLPSNLQEQERLLRKTIQKHPKDYPSDVPL

SEQ ID NO: 46072 - protein, 683 aa, Oryza sativa
MPQSVLVDRATSESLIGPDWSLNLEICDILNHDPSQAKDVVKSIKKRIGHKNSKIQLLALTLLETLIKNCGDFVHMHVAERDILHEMVKIAKKKPDYHVKEKILILIDTWQEAFGGSRARYPQYYVAYQELLRAGAVFPQRPDSSVPIYTPPQTQPLRNLPPALRNTERQQEAPESSSTPEVPTLSLTEIQNARGVMDVLSEMLNAIDPGNREGLRQEVIVDLVDQCRSYKQRVVQLVNSTTDEELLSQGLSLNDDLQRVLAKHDAIAAGIAVRVEKPKSVQARGDRSPSIKPEGAKQPDQRSSEAASTVTPFEQLALPAPASSSSSKPPVEPAVGPSIDLLSGDDYFKPEPVNSQALVSVGNPPAASANNTLDLVDMFAQSNVGNNPNPAVTSSMLNSNPSLSEPQLYPSQQTVPPQQPSPYSNGLTSNTMAPYDQPSDINATGSWNSQFAHGMLPPQLPPQLPPQQPPNYGQGQDQSGDLPPPPWETQPAESDQFQPGQPRGLAMPSGQIGGIQSQPVQVQPGQVAPLQPMLTGQPTGMQFQQGFGDQLGAQQTQPLHTQYGGMYPTMQGNQSAGMYPQQMAGDFYQQQMYGGQMAGYGYGQQSGGYYAPNAAYGYGGANELSQGMNGLAVQDNSLYGTSASSSFQQPMRPSRPEDSLFGDLVSIAKTKPSKTAANKAGGL

SEQ ID NO: 46073 - protein, 500 aa, Arabidopsis thaliana
TAAVIGLNTGKRLLSSSFYHSDVTEKFLSVNDHCSSQYHIASTKSGITAKKASNYSPSFPSSNRHTQSAKALKESVDVASTEKPWLPNGTDKELEEECYDDDDLISHSVEAILLLQKSMLEKSWNLSFEKAVSSEYPGKGTIRKKKIPVITCSGISARQRRIGAKKKTNMTHVKAVSDVSSGKQVRGYVKGVISEDVLSHVEVVRLSKKIKSGLRLDDHKSRLKDRLGCEPSDEQLAVSLKISRAELQAWLMECHLAREKLAMSNVRLVMSIAQRYDNLGAEMSDLVQGGLIGLLRGIEKFDSSKGFRISTYVYWWIRQGVSRALVDNSRTLRLPTHLHERLGLIRNAKLRLQEKGITPSIDRIAESLNMSQKKVRNATEAVSKVFSLDRDAFPSLNGLPGETHHSYIADTRLENNPWHGYDDLALKEEVSKLISATLGEREKEIIRLYYGLDKECLTWEDISKRIGLSRERVRQVGLVALEKLKHAARKRKMEAMILKN

SEQ ID NO: 46074 - protein, 548 aa, Vibrio parahaemolyticus
MAAKDVKFGNDARVKMLEGVNVLADAVKVTLGPKGRNVVLDKSFGAPTITKDGVSVAREIELEDKFQNMGAQMVKEVASKANDAAGDGTTTATVLAQAIVNEGLKAVAAGMNPMDLKRGIDKAVAAAVEQLKELSVECNDTKAIAQVGTISANSDASVGNIIAEAMERVGRDGVITVEEGQALQDELDVVEGMQFDRGYLSPYFINNQEAGSVELENPFILLVDKKISNIRELLPTLEAVAKASRPLLIIAEDVEGEALATLVVNNMRGIVKVAAVKAPGFGDRRKAMLQDIAILTGGTVISEEIGLELEKVTLEDLGQAKRVSITKENSTIIDGAGEEAMIQGRVAQIRQQIEDATSDYDKEKLQERVAKLAGGVAVIKVGAATEVEMKEKKDRVEDALHATRAAVEEGVVAGGGVALIRAASKIVDLEGDNEEQNVGIRVALRAMEAPIRQITKNAGDEDSVVANNVKAGEGSYGYNAATGEYGDMLEMGILDPTKVTRSALQFAASVAGLMITTEAMVTDLPQKESAGMPDMGGMGGMGGMGGMM

SEQ ID NO: 46075 - protein, 152 aa, Brassica napus
MEETLRSASAIADQRQKIEQYKLILSSVLSSNDLLQAKHFIDHILSDDVPLVVSRQLLQSFAQELGRLEPETQKEIALFTLTQIQPRVVSFEEQALVIREKLAALYESEQEWSRAAQMLSGIDLDSGMRAVDENFNLSKCIQIARLYLEDDD

SEQ ID NO: 46076 - protein, 619 aa, Neurospora crassa
MFGGGSSSAASKSVSGSASDSGSSGKDRSSSKSPSPEKEAPGNGGASPKSIKSADQSTAGDTQIGNGSPPSAGSSSDSKKKRSSGVSGRASSLIAQAKNTLFTQVANRNSGDMSTDSKNSNQTSLQKLGKQDQALAVPQGQHNNAAGESLPGPRSTFKVGVWEDRNKKCRRTMEDTHAFLYNFLHTPAPVLGAEGSAQKQSKSANESHEKRSSSSASQNADMIETDNGYFAIFDGHAGTFAADWCGKKLHIILEDIIKKNPNAPIPELLDQTFTTVDTELEALPLKNSGCTAAVAVLRWEDRVPSNQSATGSQAIAPAVVKATEDALKVEDGQSEKSLNSSIPEATHAKLKNSATRQRVLYTANVGDARIVLCRSGKALRLSYDHKGSDENEGKRIANAGGLILNNRVNGVLAVTRALGDTYIKDLVTGHPYTTETVIQPDWDEFMIIACDGLWDVCSDQEAVDLVRDIQEPVIAAKKLVDHALSRFSTDNLSCMIVRFDKQALLENQNNKDSAIGVEGDATTAAGTVTESEKIVTATKQKIAEGSTPAVGISASNFGRGHDPTPLEDGEKKPFVPTTIEGSVEEEPVVLSDSPEATPDGSVTAMKLDSLPEAKKSLDA

SEQ ID NO: 46077 - protein, 280 aa, Streptococcus pneumoniae TIGR4
MNTYQLNNGVEIPVLGFGTFKAKDGEEAYRAVLEALKAGYRHIDTAAIYQNEESVGQAIKDSGVPREEMFVTTKLWNSQQTYEQTRQALEKSIEKLGLDYLDLYLIHWPNPKPLRENDAWKTRNAEVWRAMEDLYQEGKIRAIGVSNFLPHHLDALLETATIVPAVNQVRLAPGVYQDQVVAYCREKGILLEAWGPFGQGELFDSKQVQEIAANHGKSVAQIALAWSLAEGFLPLPKSVTTSRIQANLDCFGIELSHEERETLKTIAVQSGAPRVDDVDF

SEQ ID NO: 46078 - protein, 136 aa, Bdellovibrio bacteriovorus HD100
MEKVDISMRNVVFFDGVCHLCNGFVDAVISKDKNHTFLFAPLQGTTAEEVLSAQDRTNLDTVIYFESGKLYYRSAAILKILTGLGGAYKLFGLAWIIPGPLRDVLYKLIAKNRYSWFGEREFCRLPTPAERSYLLP

SEQ ID NO: 46079 - protein, 424 aa, Methanosarcina mazei Go1
MVSEITLEKSRQMYEKAKTLIPGGVSSPVRAIKPYPFYTASANGSKIRDLDGNEYIDYCLAYGPAILGHNHPVIKEAIRQQLDRGWLYGTPTELEVTLAEKVASYYPSIDMLRFVSTGTEATMSALRLARGFTRRNKFIKIEGGFHGAHDAVLVKAGSGATTLGEPDSLGIPADFTKHTLQAPYNDIETMTSLVEKNRDDLAAVIIEPVLGNIGPVLPLPGYLEELRKLTEENDVLLIFDEVITGFRLAMGGAQEYFGVVPDMTTLGKIVGGGLPIGVFGGKREIMEMIAPSGAVYQAGTFSGSPCSVAAGIAMVDYLNEENIHAKLNSAGDYMRAALSEIVEDEGLDYHVCGIASMFKIFFGDEPHNYQEVLKCDKEGYLAFFHRMLASGVFLPPSQFETNFISAVHSDEDIEKTLEAYSENL

SEQ ID NO: 46080 - protein, 325 aa, GIBBERELLA ZEAE PH-1
MTVSEPTDVPRQHVRVAVIQAEPKWLDLQGSVEKTCALIADAAKNGAQLLAFPECWVTGYPAWIWTRPLDPDLTCRYIKNSLRTDGPEMTKIQQCAADNNIVVVLGFSENSHNNLYISQATINSNGEILALRRKIKATHMERTIFGDASGDALTSVVDTGIGRVGALSCWEHTQPLLKYYIYSHREQIHVAAWPPLYLYKGEQELWSMSKQGCRSLSQVYAIESQAFVLHATSVMSEQGIKLMGTDGGAIMNAPGGGSSAIFGPDGRIITEDLPETEEGILYATLDMDEILKSKSFIDVCGHYSRPDMLWLGVDKEVKKHISHKE

SEQ ID NO: 46081 - protein, 303 aa, Rubrobacter xylanophilus DSM 9941
MDGLVSKVLLATDGSREAARAAGMARELSGALGAELHVLYVQPIPEAYINQWEMAGPEFIDGIFKRAEGEARKKAEEEAAKLGKDGVAGVHAAVGRTDAEIVRVAEELGAEIVVVGSRGLGALSRALLGSVSTSVVRHAHTSVLVVRGEGRDRYLPGRILAAVDGSREAEAAARMAAEISGATGSELHLLYVLDLTPRPPYPHPLAGESWDRHLEEAKEKARAFVEERAKQLREAGAEVAVAKVAFGEPDKKIVEEAEELGASLVVTGSRGLGSLRRSLMGSVSDSVVRHAHCPVLVVRRRAE

SEQ ID NO: 46082 - protein, 300 aa, Arabidopsis thaliana
MRTSSDRNRIASTDISPMSSLTVRRVQNLIERCLQLYMNQKEVVDTLLEQAKIEPGFTELVWQKLEEENREFFKAYYLRLMVKHQIMEYNELLEQQINHMRQMHPTAGASVRNRNGSHVPPMNQQQLLYERKEPDQSSPNLSSPYLNGGSAINTNIPSYVDFSSHSRRVDPSPNSLSLQATNMPLMQGMIKSETAYQNCAPYMYGGEAQSTVGDVTIASFSNDSSNQSLNDPLVDPDAPTFGSLGQIPQNFSLSDLTADFSQSSDILESYEGSPFLLADAENFLDSSERVEHQGEHLKLC

SEQ ID NO: 46083 - protein, 420 aa, Rhizobium tropici
MVEKRFPAAGRDAMAYVLAGGRGSRLKELTDRRAKPAVYFGGKTRIIDFALSNALNSGIRRIGVATQYKAHSLIRHMQRGWNFFRPERNESFDILPASQRVSETQWYEGTADAVYQNIDIIEPYGPEYMVILAGDHIYKMDYEWMLQQHVDSGADVTIGCLEVPRMEAVGFGVMHVDDKDRIIDFVEKPADPPGIPGNPDFALASMGIYVFHTKFLIECLKRDAADPNSSRDFGKDIIPHIVKNGKAVAHRFTQSCVRSDFEREAYWRDVGTIDAYWQANIDLTAVVPELDIYDKSWPIWTYAEISPPAKFVHDDEDRRGSAVSSVVAGDCIISGASLYNSLLFTGVRANSYSKLEGAVVLPSVKVGRRAQLKNVVIDHGVTIPEGLVVGEDPELDAKRWRRTESGICLITQSMIDKLDL

SEQ ID NO: 46084 - protein, 139 aa, Mycobacterium smegmatis
MTERTLVLIKPDGVKRQLVGEILSRIERKGLTLAALELKNVSDDLARQHYAEHADKPFFGSLLEFITSGPLVAAIVEGPRAVAAFRQIAGGTDPVEKAVPGTIRGDFALITQDNLVHGSDSPESAAREIALWFPGEATA

SEQ ID NO: 46085 - protein, 480 aa, Rhizobium tropici
MKVLSVSSEVFPLIKTGGLADVVGALPIALKPYGVETKTLIPGYPAVMKAIRDPVVRLELPDLLGEAATILEVEHAGISFLVLDAPAYYSRTGGPYVDATGKDYPDNWRRFAALSLAGAEIAAGLLPGWRPDLVHAHDWQSALVPVYMRYYPTPELPSVLTIHNIAFQGQFGADIFPGLRLPAHAFSVEGIEYYGDVGFLKGGLQTAHALTTVSPSYAEEILTPEFGMGLEGVIASKAYNLYGIVNGIDADIWNPATDPMIAQTYSAATLKERAINRHRVVEHFGLEEDDGPIFCVVSRLTWQKGMDILAEVASEVVHMGGKLAILGAGDAALEGALFAAAGRHRGRVGVVGRHNEPMSHLMQAGCDAIIIPSRFEPCGLTQLYGLRSGCLPIVARTGGLNDTIIDANHAALQAKVATGIQFSPVTAEGLLQAMRRAMHLFQDRKVWTQMQKQGMKSDVSWGRSAERYAALYSSLVSRGA

SEQ ID NO: 46086 - protein, 995 aa, Oryza sativa (japonica cultivar-group)
MAAEEVEAAAIDGSGEEAKRKSGKQRGSGAKGRRRNGDRAFRPPAMRPEEEGRGVATRPGALRERKPPPNAFNAPDDDEDVEKTDQLLEPLNKPKRRDAGKKRGPRKKKVDQENIKTHRHNANAVKGKMLVNDKVSKTEKKRKRGDTGAAENNGKGKKMLTGENALMCHQCQRNDKGRVVWCKTCNNKRFCVPCINQWYPDLPENEFAAKCPYCRKNCNCKACLRMRGVEEPPRKEISKENQIRYACHVLRLLRPWLIELRQEQMAEKELEAKIQGVSVDQIKVEQAVCDLDERVYCNRCSTSIVDFHRSCKHCFYDLCLTCCQELRKGEIPGGEEVEILDPEERDKDYAFGKILSDGENQRDSLKCRSDTQNSESNKGMASDENQKKALLLWKANSNGSIPCPRKEKEDCSFSSLDLKCLFPEKLLPELEDRSEKVFWSETFAKELGRTSELCPCFDHSGKIRSDSKKLRQAANREDSSDNYLYCPVATDIQDADLLHFQMHWAKGEPVVVSDTLKLTSGLSWEPMVMWRAVRERTKGKAEDEQFAVRAVDCLDWCEVEINIHMFFMGYTRGRTHPRTYWPEMLKLKDWPPSSSFDQRLPRHGAEFISALPFPEYTDPRYGPLNLAVKLPGGVLKPDLGPKTYIAYGFSEELGRGDSVTKLHCDMSDAVNILTHTAEVPCETYDAVQIKNTQKKMKMQDDMEIYGMIESGSELKPSACPVELGNKAVGEAPKASCSKENVHTLKDKSNGLDINASPPDDAGGDARDEALSYESVVHSDVAQCPNHNHETNNSDDARIGAQRCQKKAKGRPPKTGSGVSEHQESGGALWDIFRREDSEKLQDFLRKHAPEFRHIHCNPVKQVIHPIHDQAFYLTAEHKRKLKEEYGVEPWTFEQKLGEAVLIPAGCPHQVRNLKSCIKVALDFVSPENVGECVRLTKEFRRLPSSHRAKEDKLEIKKMAFHALNEVLNFLDPPSSEGSKEAAEKPRRGRGRPRKH

SEQ ID NO: 46087 - protein, 868 aa, Oryza sativa (japonica cultivar-group)
MLVNDKVSKTEKKRKRGDTGAAENNGKGKKMLTGENALMCHQCQRNDKGRVVWCKTCNNKRFCVPCINQWYPDLPENEFAAKCPYCRKNCNCKACLRMRGVEEQPPRKEISKENQIRYACHVLRLLRPWLIELRQEQMAEKELEAKIQGVSVDQIKVEQAVCDLDERVYCNRCSTSIVDFHRSCKHCFYDLCLTCCQELRKGEIPGGEEVEILDPEERDKDYAFGKILSDGENQRDSLKCRSDTQNSESNKGMASDENQKKALLLWKANSNGSIPCPRKEKEDCSFSSLDLKCLFPEKLLPELEDRSEKVFWSETFAKELGRTSELCPCFDHSGKIRSDSKKLRQAANREDSSDNYLYCPVATDIQDADLLHFQMHWAKGEPVVVSDTLKLTSGLSWEPMVMWRAVRERTKGKAEDEQFAVRAVDCLDWCEVEINIHMFFMGYTRGRTHPRTYWPEMLKLKDWPPSSSFDQRLPRHGAEFISALPFPEYTDPRYGPLNLAVKLPGGVLKPDLGPKTYIAYGFSEELGRGDSVTKLHCDMSDAVNILTHTAEVPCETYDAVQIKNTQKKMKMQDDMEIYGMIESGSELKPSACPVELGNKAVGEAPKASCSKENVHTLKDKSNGLDINASPPDDAGGDARDEALSYESVVHSDVAQCPNHNHETNNSDDARIGAQRCQKKAKGRPPKTGSGVSEHQESGGALWDIFRREDSEKLQDFLRKHAPEFRHIHCNPVKQVIHPIHDQAFYLTAEHKRKLKEEYGVEPWTFEQKLGEAVLIPAGCPHQVRNLKSCIKVALDFVSPENVGECVRLTKEFRRLPSSHRAKEDKLEIKKMAFHALNEVLNFLDPPSSEGSKEAAEKPRRGRGRPRKH

SEQ ID NO: 46088 - protein, 231 aa, Lycopersicon esculentum
MAAAEMERTMSFDAAEKLKAADGGGGEVDDELEEGEIVEESNDTASYLGKEITVKHPLEHSWTFWFDNPTTKSRQTAWGSSLRNVYTFSTVEDFWGAYNNIHHPSKLIMGADFHCFKHKIEPKWEDPVCANGGTWKMSFSKGKSDTSWLYTLLAMIGHQFDHGDEICGAVVSVRAKGEKIALWTKNAANETAQVSIGKQWKQFLDYSDSVGFIFHDDAKRLDRNAKNRYTV

SEQ ID NO: 46089 - protein, 231 aa, Lycopersicon esculentum
MAAAEMERTMSFDAAEKLKAADGGGGEVDDELEEGEIVEESNDTASYLGKEITVKHPLEHSWTFWFDNPTTKSRQTAWGSSLRNVYTFSTVEDFWGAYNNIHHPSKLIMGANFHCFKHKIEPKWEDPVCANGGTWKMSFSKGKSDTSWLYTLLAMIGHQFDHGDEICGAVVSVRAKGEKIALWTKNAANETAQVSIGKQWKQFLDYSDSVGFIFHDDAKRLDRNAKNRYTV

SEQ ID NO: 46090 - protein, 502 aa, Arabidopsis thaliana
MVLSHAVSESDVSVHSTFASRYVRTSLPRFKMPENSIPKEAAYQIINDELMLDGNPRLNLASFVTTWMEPECDKLIMSSINKNYVDMDEYPVTTELQNRCVNMIAHLFNAPLEEAETAVGVGTVGSSEAIMLAGLAFKRKWQNKRKAEGKPVDKPNIVTGANVQVCWEKFARYFEVELKEVKLSEGYYVMDPQQAVDMVDENTICVADILGSTLNGEFEDVKLLNDLLVEKNKETGWDTPIHVDAASGGFIAPFLYPELEWDFRLPLVKSINVSGHKYGLVYAGIGWVIWRNKEDLPEELIFHINYLGADQPTFTLNFSKGSSQVIAQYYQLIRLGHEGYRNVMENCRENMIVLREGLEKTERFNIVSKDEGVPLVAFSLKDSSCHTEFEISDMLRRYGWIVPAYTMPPNAQHITVLRVVIREDFSRTLAERLVIDIEKVMRELDELPSRVIHKISLGQEKSESNSDNLMVTVKKSDIDKQRDIITGWKKFVADRKKTSGIC

SEQ ID NO: 46091 - protein, 596 aa, Saccharomyces cerevisiae
MKLSVLTFVVDALLVCSSIVDAGVTDFPSLPSNEVYVKMNFQKKYGSSFENALDDTKGRTRLMTRDDDYELVELTNQNSFYSVELDIGTPPQKVTVLVDTGSSDLWVTGSDNPYCSTKKKDTTGSSFKQVNKDALASVVESVFTEISYDTTIVTSEATATFDSTASTSQLIDCATYGTFNTSKSSTFNSNNTEFSIAYGDTTFASGTWGHDQLSLNDLNITGLSFAVANETNSTVGVLGIGLPGLESTYSGVSLSSVQKSYTYNNFPMVLKNSGVIKSTAYSLFANDSDSKHGTILFGAVDHGKYAGDLYTIPIINTLQHRGYKDPIQFQVTLQGLGTSKGDKEDNLTTLTTTKIPVLLDSGTTISYMPTELVKMLADQVGATYSSAYGYYIMDCIKEMEEESSIIFDFGGFYLSNWLSDFQLVTDSRSNICILGIAPQSDPTIILGDNFLANTYVVYDLDNMEISMAQANFSDDGEYIEIIESAVPSALKAPGYSSTWSTYESIVSGGNMFSTAANSSISYFASTSHSATSSSSSKGQKTQTSTTALSISKSTSSTSSTGMLSPTSSSSTRKENGGHNLNPPFFARFITAIFHHI

SEQ ID NO: 46092 - protein, 231 aa, Solanum habrochaites
MAAAEMERTMSFDAAEKLKAADGGGGEVDDELEEGEIVEESNDTASYLGKEITVKHPLEHSWTFWFDNSTTKSRQTAWGSSLRNLYTFSTVEDFWGAYNNIHHPSKLIMGADFHCFKHKIEPQWEDPVCANGGTWKMSFSKGKSDTSWLYTLLAMIGHQFDHGDEICGAVVSVRAKGEKIALWTKNAANETAQVSIGKQWKQFLDYSDSVGFIFHDDAKRLDRSAKNRYTV

SEQ ID NO: 46093 - protein, 231 aa, Solanum habrochaites
MAAAEMERTMSFDAAEKLKAADGGGGEVDDELEEGEIVEESNDTASYFGKEITVKHPLEHSWTFWFDKSTTKSRQTDWGSSLRNLYTFSTVEDFWGAYNNIHHPSKLIIGADFHCFKHKIEPQWEDPVCANGGTWKMSFSKGKSDTSWLYTLLAMIGHQFDHGDEICGAVVSVRAKGEKIALWTKNAANETAQVSIGKQWKQFLDYSDSVGFIFHDDAKRLDRSAKNRYTV

SEQ ID NO: 46094 - protein, 427 aa, Colwellia psychrerythraea 34H
MNKSEQLFEQAQKIIPGGVNSPVRAFNGVGGTPCFIKRAQGAYIYDADDKAYIDYVGSWGPMILGHNHPAILEAVITTAKNGLSFGAPTEIEITMAEKVRELVPSMESLRMVSSGTEATMSAIRLARGYTGRDKILKFEGCYHGHADALLVKAGSGALTLGVPNSPGIPEDFAKHTLTVSYNNIDEVKEIFAKYADEIACIIVEPVAGNMNCIPPVEGFLEGLRDVCDQYSSVLIFDEVMTGFRVALGGAQAHYNIKPDLTTLGKVIGGGMPVGAFGGKQEIMDYIAPVGPVYQAGTLSGNPIAMAAGLASLTELAQGNKHQQLSSATEKLAMGLKAAAERNGVSLSVNYVGAMFGFFFTEDKNPITTYEQATQCDGEMFKRFFHLMLDEGVYLAPSSYETGFLSTSHTDDIIEKTLVAADKCFAQL

SEQ ID NO: 46095 - protein, 534 aa, Oryza sativa
MGNSCQNGTYGNNYQNSNRFQNDRFASRYVDGNDTEDCYSGSSRASLAGALRQGLNLKSPVLGYKTPNVRELYTLGRELGQGQFGKTYLCTEISTGCQYACKTILKSNLRCVSDIEDVRREIQIMHHLSGQKNIVTIKDTYEDEQAVHIVMELCAGGELFSKIQKRGHYSERKAAELIKIIVGIIETCHSHGVMHRDLKPENFLLLDADDEFSVKAIDFGLSVFFRPGQVFREVVGSPYYIAPEVLEKRYGPEADIWTAGVILYVLLTGVPPFWADTQSGIYEKVLDGRIDFKSNRWPRISDSAKDLIKKMLCPYPLERLKAHEVLKHPWICDNGVATNRALDPSVLPRLKQFSAMNRLKKLSLQIIAERLSEEEIVGLREMFKAMDTKNRSVVTFGELKGLKRYSSVFKDTEINDLMEAADDTTSTINWEEFIAAAVSLNKIEREKHLMAAFTYFDKDGSGFITVDKLQKACMERNMEDTFLEEMILEVDQNNDGQIDYAEFVTMMQSNNFGLGWQTVESSLNVALREAPQVY

SEQ ID NO: 46096 - protein, 188 aa, Triticum aestivum
  misc_feature (30)..(30): Xaa can be any naturally occurring amino acid
  unsure (1)..(188): unsure at all Xaa locations
IVAHAPPRGGLVGTPGGSFQGVKSTAGLPXSRRYKGGSLGSVSNGGRIRCMQVWPIEGIKKFETLFYLPPLSTEALLKQVDYLIRSKWVPCLEFSKVGFIFREHNAFPGYYDGRYWTMWKLPMFGCTDATQVINEVEEVKKEYPDAYVRIIGFDNMPQVQWVSFIAFKPPGCAPPPPGLNRSLTTGHI

SEQ ID NO: 46097 - protein, 359 aa, Arabidopsis thaliana
MSCFKSKFADELIANAAYIGTPGKGILAADESTGTIGKRFVSINVENVESNRRALRELLFTTPGALQYISGIILFEETLYQKTASGKLFVDVMKEAGVLPGIKVDKGTVELAGTNGETTTTGLDGLGDRCKKYYEAGARFAKWRAVLKIGNNEPSELAIHENAYGLARYAVICQENGLVPIVEPEILVDGSHDIEKCAYVTERVLAACYKALSDHHVILEGTLLKPNMVTPGSDSGSKVKPEVIAKHTVRALQRTVPAAVPAVVFLSGGQSEEEATVNLNAINQLKGKKPWSLTFSYGRALQQSTLKAWGGKEENVDKAQKAFLARAKANSEATLGGYKGDAQLGEGASESLHVKDYKY

SEQ ID NO: 46098 - protein, 253 aa, Bacteroides fragilis NCTC 9343
MSIESFNLLLLVMGLVALVVFIALYFVRAGYGMFRSRSWGISVNNKIAWILMEAPVFLVMGWLWWHSDRRFLPVELTFFLFFQLHYFQRAFVFPFLMKGKSKMPVLILLMGVIFNILNGLMQGEWIFYLAPSDYYTPGWLLTPCFWIGTLLFFAGMGINWHSDSVIRHLRAPGDTRHYLPQRGMYRYVTSANYLGEIVEWVGWAILTWSLSGCIFAWWTVANLVPRADAIWHRYREEFGTQVGLKKRIFPFLY

SEQ ID NO: 46099 - protein, 447 aa, Bacteroides fragilis NCTC 9343
MKKEYLIYKLSEAMKDCTRIDNELFPKFDVKRGLRNEDGTGVLVGLTKIGNVVGYERIPGGGLKPIPGKLFYRGYDLEDLAHAILKEKRFGFEEVAYLLLSGSLPDKEELASFRELINDNMPLEQKTKMNIIELEGNNIMNILARSVLEMYRFDPNPDDTSRDNLMRQSIDLISKFPTIIAYAFNMLRHATFGRSLHIRHPQENLSIAENFLYMLKRDYTELDARTLDLLLVLQAEHGGGNNSTFTVRVTSSTGTDTYSAIAAGIGSLKGPLHGGANIQVADMFHHLQENIQDWTNVDEIDTYFTRMLNKEVYNKTGLIYGIGHAVYTISDPRAVLLKELARDLAHEKGREREFAFLELLEERAIATFGKIKNNGKTVSSNVDFYSGFVYEMIGLPQEIYTPLFAMARIVGWCAHRNEELNFEGKRIIRPAYKNVLEEEQYVPLKKR

SEQ ID NO: 46100 - protein, 110 aa, Sulfolobus islandicus
LGPKGLDKMLVEGQDVTITNDGATIVKNMEVQHPTAKLLIETAKTVDTEVGDGTTSVVVLAGLLLEKAEDLLNQKIHPTAIIEGYRKALNSSLDLLKNIADKISPEDRKI

SEQ ID NO: 46101 - protein, 165 aa, ASPERGILLUS NIDULANS FGSC A4
MDQAKLARMQASVRIGGKGTPRRKVKKVHKTSGADDKKLQATLKKMNVQPIQAIEEVNMFKEDGNVIHFAAPKEERALTVGCEIKVHASVPSNTFALYGNGEEKELTELVPGILNQLGPDSLASLRKLAESYQNMQKNQAGEKKDDDEDDIPDLVEGENFEKSVD

SEQ ID NO: 46102 - protein, 546 aa, Enterococcus faecium
MNKFKINIQGMTCTGCEEHVAVALENVGAKNIEASFRRGEAVFELPDDIGVESAKKAIDEAKYQPGEIEEVQSEEKIVLGDEGDYDLLIIGSGGAAFSAAIKSVEYGAKVAMIERGTVGGTCVNIGCVPSKTLLRAGEINHLAKVNPFIGLQTSAGKVELAPLVKHKDELVSELRNQKYVNLIDEYGFELIEGEAIFVDENTVEVNGKKLSAKRFLIATGVSPSLPPISGLEKVDYLTSTTLLELKTVPKRLTVIGSGYIGMELGQLFHNLGSEVTLMQRSERLLKEYDQEISEAVEKALIEQGINLVKGATFERVEQEGQIKKVHVTVDGKKKVVESEQLLVATGRKPNTDALKLSAAGVEVGKRKEILINDYARTSNEKIYAAGDVTLGPQFVYVAAYEGGIVADNAIGGLNKKLDLSVVPGVIFTNPSIATVGLTEEQAKEKGYEVKKSVLPLDAVPRAIVNRETTGVFKLVADAKTSKLLGVHIVSENAGDVIYAATLAVKFGLTVEDLKDSLAPYLTMAEGLKLAALTFDKDVSKLSCCAG

SEQ ID NO: 46103 - protein, 361 aa, Pyrococcus furiosus DSM 3638
MQAVVLAGGKGTRLLPLTVYRPKPMIPFFNRPIMEYIVESLVKFGVDEIIVLVGYLKERIFEYFGNGEEFGVEIKYSNGENLKLGTAGALKKAEKLIQDTFLVVSGDILTNLDFRSLVEYHKKKGGPATIALTKVEDPSAYGVAVLDKEGRISYFKEKPKREEAPSNLVNAGIYVFEPEIFDLIPKGKNFDFSLDLFPKMLNENIPIYGYPFDEYWNDIGRPSTYLQATEDVFLGKLRLPQINVGSLKGNIEKGGSLFTGSRCILRRPRIIGFAVLGNNVEISKDVTIERSVIFSNVTIEEGAEIREAIIGENVYIGKGVVIEPGSVIGDNSIIEDFSKVGANVKIWADSRIGKESIILPD

SEQ ID NO: 46104 - protein, 144 aa, Rubrobacter xylanophilus DSM 9941
MLSPFRGFRDLQSEMDRLFGEAFGRPPRADAEGGWTPAVDVLTRGDDLIIRAELPGVRREDVEVTVSNGVLTLAGERREEEERERAGYLIRERRQGSFRRSMTLPEGVNEDEIKATFRDGVLEVSVPGASAAVEAPPRRIEIEG

SEQ ID NO: 46105 - protein, 362 aa, Bacteroides fragilis NCTC 9343
MFSSERNKTFKTKRKMAQLNFGGVTENVVTREEFPLEKAREVLKNETIAVIGYGVQGPGQSLNLRDNGFNVIVGQRPGKTYEKAVADGWVPGETLFGIEEACEKGTIIMCLLSDAAVMSVWPTIKPYLTAGKALYFSHGFAITWSDRTGVVPQKDIDVIMVAPKGSGTSLRTMFLEGRGLNSSYAIYQDATGRAMERTIALGIGVGSGYLFETTFVREATSDLTGERGSLMGAIQGLLLAQYEVLRENGHTPSEAFNETVEELTQSLMPLFAKNGMDWMYANCSTTAQRGALDWMGPFHDAIKPVVQKLYNSVKTGNEAQISIDSNSKPDYREKLEAELKALRESEMWQTAVTVRKLRPENN

SEQ ID NO: 46106 - protein, 603 aa, Novosphingobium aromaticivorans DSM 12444
MAQETPAQETPAANVEEPPRARTLGPLRMIWGEAAKYPGRVAAASAALIVTSAATLAIPSGFRLIIDKGFAAGADVSAIGRWFQYLLLIVLVLAIGTACRFYFVSWLGERVVADIRLKVQANLLRLPPSFFETNSPKEISSRMTSDTAVIEQVVGTTVSVALRNTITAIGGLGYLFYLAPKLTAILMIGIPLVVGPIVFFGRRVRNVSRSSQDRVAVIGVIVSEVLGAMKIVQAFGQEKRELERFGEKVEATFQTALRRISLRAVMTAIVILLVFGGITMLVWQGAVGVAEGRISGGTIFAIVITAGLVAGALGALSEVYGDLLRGAGAAGRLNELLREQPEIAPPARPTALPIPPRGQIAFQNVSFRYPSRPEVLALDDFSLTVEPGETVAIVGPSGAGKSTLFLLAQRFYDPHGGTIRIDGVPLTSADPAEIRQRSALVPQDATLFAASARDNLRYGNWGASDEAIWEAARAANAEQFLRDLPQGLDTFLGEDGARLSGGQRQRIAIARAVLREAPILLLDEATSALDAESERLVQEALDRLMKERTTLVIAHRLATIRAADRIVVMDAGRIVEQGTHSSLTAADGLYARLARLQFEGLAA

SEQ ID NO: 46107 - protein, 456 aa, Mycoplasma mycoides subsp. mycoides SC str. PG1
MSKSIEKMISHLKNQGFVFQGSEIYGGLANSWDYGPLGCEVKNKLKKVWWDFFVKKNPLNVGLDSSIILNSKVWKASGHIDGFNDPLIDCKNCKSRWRADKLIEEFDSSINTGIMTSAQLEDYINQNNILCKKCQKKDFTQIRQFALMFKTNQGVLEDDSSIVYLRPETAQGIFINFKNVQRSMRKKLPFGIGQIGKSFRNEITPGNFIFRTREFEQMELEFFFDPSDQKDWFKYWLDQIELFLTKKICLDKSNYKIRENLKDELSHYALKTSDIEFNFPFGWGELWGISHRSDFDLKVHQNLSKEDLTVLKEENNQKVLANVIEPSVGVERLMLAIFWQAYTEEQLEENNSRTVLKLPYNLAPYQVAITPLSKQLNQNAHQLFLELLKDFDAVYDETGNIGKRYRRQDAIGTPFVITYDFQTLEDQKVTIRYRDTMKQERILISQLKDFLNSQFN

SEQ ID NO: 46108 - protein, 571 aa, Staphylococcus aureus subsp. aureus COL
MFNEKDQLAVDTLRALSIDTIEKANSGHPGLPMGAAPMAYTLWTRHLNFNPQSKDYFNRDRFVLSAGHGSALLYSLLHVSGSLELEELKQFRQWGSKTPGHPEYRHTDGVEVTTGPLGQGFAMSVGLALAEDHLAGKFNKEGYNVVDHYTYVLASDGDLMEGISHEAASFAGHNKLSKLVVLYDSNDISLDGELNKAFSENTKARFEAYGWNYLLVKDGNDLEEIDKAITTAKSQEGPTIIEVKTTIGFGSPNKAGTNGVHGAPLGEVERKLTFENYGLDPEKRFNVSEEVYEIFQNTMLKRANEDESQRNSLLEKYAETYPELAEEFKLAISGKLPKNYKDELPRFELGHNGASRADSGTVIQAISKTVPSFFGGSADLAGSNKSNVNDATDYSSETPEGKNVWFGVREFAMGAAVNGMAAHGGLHPYGATFFVFSDYLKPALRLSSIMGLNATFIFTHDSIAVGEDGPTHEPIEQLAGLRAIPNMNVIRPADGNETRVAWEVALESESTPTSLVLTRQNLPVLDVPEDVVEEGVRKGAYTVYGPEETPEFLLLASGSEVSLAVEAAKDL

SEQ ID NO: 46109 - protein, 397 aa, Agrobacterium tumefaciens str. C58
MAGRKTGLPQNPAISGLRWRKPFWHGHCTFSGIKCHRGENMRALRFHAAKDLRIEDIAEPKRPGPGQVLVRNRFVGICGTDLHEYSYGPIFIPTEPHPFTGAHGPQILGHEFGGVVEAIGDGVTSVNVGDRVSIQPLIMPRSGDYFADRGLFHLSTQLALVGLSWDGGGMAEAALVNEYNVQKIPDEMTDEEAALVEPSAVAVYACDRGGVTAGNSVLVTGAGPIGMLTLLAARAAGATQLFVSDLNDARLELARNVIRDVITINPKRDNVGDVVRSATEGKVGCDVAIECVGNEHALKACVDAVRKQGVVVQTGLHPHENPIDWFQVTFRDLEIKGSWAYPTHYWPRVIRLIASGLLPATKIVTKRITLDTAVTEGFDALLDPAGTHLKILIDLSK

SEQ ID NO: 46110 - protein, 296 aa, Saccharomyces cerevisiae
MITTPLVHVASVEKGRSYEDFQKVYNAIALKLREDDEYDNYIGYGPVLVRLAWHISGTWDKHDNTGGSYGGTYRFKKEFNDPSNAGLQNGFKFLEPIHKEFPWISSGDLFSLGGVTAVQEMQGPKIPWRAGRVDTPEDTTPDNGRLPDADKDAGYVRTFFQRLNMNDREVVALMGAHALGKTHLKNSGYEGPWGCANNVFTNEFYLNLLNEDWKLEKNDANNEQWDSKSGYMMLPTDYSLIQDPKYLSIVKEYANDQDKFFKDFSKAFEKLLENGITFPKDAPSPFIFKTLEEQGL

SEQ ID NO: 46111 - protein, 370 aa, Streptococcus pneumoniae TIGR4
MSLQSVNAIRFLGVDAINKSNSGHPGIVMGAAPMAYSLFTKHLRITPEQPNWINRDRFILSAGHGSMLLYALLHLTGYKDVSMDEIKNFRQWGSKTPGHPEVTHTSGVDATSGPLGQGISTAVGFAQAERFLAAKYNKDGFPIFDHYTYVIAGDGDFMEGVSAEAASYAGHQALDKLIVLYDSNDICLDGETKDTFSENVRVRYDAYGWHTVLVEDGTDLAAISTAIETAKFSGKPSLIEVKTVIGYGSPNKSGTNAVHGAPLGAEETGATRKFLGWDYDPFEVPEEVYSDFKTNVADRGQEAYDAWASLVSDYKVAYPEVASEIDAIVAGKSPVTITEKTSLSMRMASLKQLVIRPKMLLIQQQFYQPS

SEQ ID NO: 46112 - protein, 201 aa, Xylella fastidiosa Ann-1
MKCSSNNIHSTPCTVHRRIYPQKRDFIQNINNRIDIFHRILSSDLTMNVTFDLTPPSPSQREALIATLNAEERRILLQHGTEAPFCNRLLDNNQLGTYTCRLCGLPLFHSNAKFKSGTGWPSFFEPYTHTHIRKQHDTSHGMIRTEILCARCNSHLGHLFPDGPPPTYERYCLNSVSLTFIPTGTLLPDQLHRGDNTTYRT

SEQ ID NO: 46113 - protein, 274 aa, Streptococcus pneumoniae TIGR4
MTYIKADGLQDKYNPLNRNIQFGVREFAMGTILNGMALHGGLRVYGGTFFVFSDYVKAAIRLSAIQELPVTYVFTHDSIAVGEDGPTHEPVEHLAGLRSMPNLTVIRPADARETQAAWHHALTSTTTPTVIVLTRQNLVVEEGTDFGKVAKGAYVVYDTPGFDTIIIATGSEVNLAIKAAKELVLQGGKVRVVSMPSTELFDAQDATYKEDILPSKTRRRVAIEMAATQSWYKYVGLDGAVIGIDIFGASAPAQTVIDNYGFTVENIVAQVKSL

SEQ ID NO: 46114 - protein, 453 aa, Arabidopsis thaliana
MASLMLSLGSTSLLPREINKDNVKLGTSASNPFLKAKSFSRVTMTVAVKPSRFEGITMAPPDPILGVSEAFKADTNGMKLNLGVGAYRTEELQPYVLNVVKKAENLMLERGDNKEYLPIEGLAAFNKATAELLFGAGHPVIKEQRVATIQGLSGTGSLRLAAALIERYFPGAKVVISSPTWGNHKNIFNDAKVPWSEYRYYDPKTIGLDFEGMIADIKEAPEGSFILLHGCAHNPTGIDPTPEQWVKIADVIQEKNHIPFFDVAYQGFASGSLDEDAASVRLFAERGMEFFVAQSYSKNLGLYAERIGAINVVCSSADAATRVKSQLKRIARPMYSNPPVHGARIVANVVGDVTMFSEWKAEMEMMAGRIKTVRQELYDSLVSKDKSGKDWSFILKQIGMFSFTGLNKAQSDNMTDKWHVYMTKDGRISLAGLSLAKCEYLADAIIDSYHNVS

SEQ ID NO: 46115 - protein, 561 aa, Bacillus subtilis
MSEWWKEAVVYQIYPRSFYDANGDGFGDLQGVIQKLDYIKNLGADVIWLSPVFDSPQDDNGYDISDYKNMYEKFGTNEDMFQLIDEAHKRGMKIVMHLVVNHTSDEHAWFAESRKSKDNPYRDYYFWKDPKSDGSEPNNWGSIFSGSAWTYDEGTGQYYLHYFSKKQPDLNWENEAVRREVYDVMRFWMDRGVDGWRMDVIGSISKYTDFPDYETDHSRSYIVGRYHSNGPRLHDFIQEMNREVLSHYDCMTVGEANGSDIEEAKKYTDASRQELNMIFTFEHMDIDTEQNSPNGKWQIKPFDLIALKKTMTRWQTGLMNVGWNTLYFENHDQPRVISRWGNDGKLRKECAKAFATDLDGMKGTPFIYQGEEIGMVNRDMPLEMYDDLEIKNAYRELVVENKTMSEKEFVKAVMIKGRDHARTPMQWDAGKHAGLTAGDPWIPVNSRYQDINVKESLEDQDSIFFYYQKLIQLRKQYKIMIYGDYQLLQENDPQVFSYLREYRGEKLLVVVNLSEEKALFEAPPELIHERWKVLISNYPQERADLKSISLKPYEAVMGISI

SEQ ID NO: 46116 - protein, 479 aa, Botryotinia fuckeliana
MAQTNGVLQEPAITTMNGAPVLKPASTQRIGNQLRATLLLQDINLLELIQHITHERIPERVVHARGTSAHGYFEVTDDISDVTSAAFLNRVGKQTDIFCRFSTVAGRAESAETVRDTRGFAFKMFTEEGNLDWLFLSTPVFPIRDGAKFPSFTHATKKNPRSGLPDHKAFWDYFTHNQEGIHFLMFLFSDRATPVDFQHADIFSINTYKFTKSDGSFTYVKIHLKTNQGVKNFTQDEANQKAGVDPDFQTRSLYEDIENQKYPTWDVFAQIIDPVKAENYHINIFDATKTFPFSEFPLRKFGKITLNRNVDNFFAEQEQSAFSPTNLVPGWALTPDPIIQTRALAYADTQRYRLGANFVQLPVNAPYKKPFTPLIRDGAATVNGNLGGTPNYFPSSFYNVGAATQYAQPDEEQFQGTVVNFESEVVDADYVQPRIFWEKTLAEEPGQQDNLISNVAGHLSAVTGDKGLGSSTSGLCNVR

SEQ ID NO: 46117 - protein, 493 aa, Zea mays
MASPFSVPSLIMEEEGRFEAEVAEVESWWGTERFRLTKRPYTARDVVLLRGTLRQSYASGEMAKKLWRTLKARMSLPRAERARAPYVDFLKPIIADGDTGFGGATATVKLCKLFVERGAAGVHLEDQSSVTKKCGHMAGKVLVAVSEHVNRLVAARLQFDVMGVETVLVARTDAVAATLIQTNVDARDHQFIVGATNPGLRGQSLAAVLSAGMSAGKSGRELQAIEDEWLAAARLKTFSECVRDAIAGLGVAGQEKQRRLQEWDRATGGYDRCVSNDQARDIAASLGVTSVFWDWDLPRTREGFYRFRGSVAAAVVRGRAFAPHADVLWMETSSPNVAECTAFAEGVKAACPEAMLAYNLSPSFNWDASGMTDAEMAAFIPSVARLGYVWQFITLAGFHADALVTDTFARDFARRGMLAYVERIQREERINGVETLEHQKWSGANFYDRVLKAVQGGISSTAAMGKGVTEEQFKDPRPATGSSGLQVMAKSRI

SEQ ID NO: 46118 - protein, 478 aa, Silicibacter pomeroyi DSS-3
MSIRMSRKLTPSLPAWAAAPALGALLLSSAALPVSADEALADLVEQVAPSVVTVLASQNAAPRPTGAQPSPFEGTPFEEFFHQFGGPRGMPMPDSGPRQGLGSGFILDSEGYIVTNNHVVDGADRVTVRLSDDREFTAQVVGTDPLTDLALLRIEAGEALPAVSLGDSDAIRVGEDVVAVGNPFGLSSTVTTGIVSAKGRNISDGPYAEFIQTDAAINKGNSGGPLFNMAGQVVGVNSVIYSPSGGSVGLGFAVTSNIVDHVISDLREDGQVDRGWLGVSIQNLGADIAAALGLDQTTGALVSEVVADGPSDGTLRPGDVIVAFEGKPVRTSADLPRLVGATEAGTRASIRVMRDGKAQDIAVTIGTHQASAEVIPASADSPADAPGLGLTVAPLSAEARKGAGLDSDTGGVLITDIAPDGPAARAGLRPGDVILRLGGSDTISPAALAKALESEKTDPALMLINRGGNQIFLAVKIT

SEQ ID NO: 46119 - protein, 532 aa, Arabidopsis thaliana
MEMKQMKFLTHQAFFSSVRSGDLSQLQQLVDNLTGDELIDESSPSSAVAELMSVQNDAGETAVYISAAENLEDIFRYLIRFSSLETVKIRSKSDMNAFHVAAKRGHLGIVKELLRLWPELCRICDASNTSPLYAAAVQDHLEIVNAMLDVDPSCAMIVRKNGKTSLHTAGRYGLLRIVKALIEKDAAIVGVKDKKGQTALHMAVKGRSLEVVEEILQADYTILNERDRKGNTALHIATRKARPQITSLLLTFTAIEVNAINNQKETAMDLADKLQYSESALEINEALVEAGAKHGRFIGREDEARALKRAVSDIKHEVQSQLLQNEKTNRRVSGIAKELRKLHREAVQNTTNSITVVAVLFASIAFLAIFNLPGQYFTEGSHVGQANIAGRTGFRVFCLLNATSLFISLAVVVVQITLVAWDTRAQKKVVSVVNKLMWAACACTFGAFLAIAFAVVGKGNSWMAITITLLGAPILVGTLASMCYFVFRQRFRSGNDSQRRIRRGSSKSFSWSYSHHVSDFEDESDFEKIIAL

SEQ ID NO: 46120 - protein, 427 aa, Methylobacillus flagellatus KT
MQQHELSSSRFVSTLTKNTVALILAGGKGSRLRDLTNWTAKPAVPFGGKFRIIDFPLSNCINSGVRRIGVVTQYKAHTLIQHIQRGWGFLRGEFNEFVELLPAQQRIQEEWYKGTADAVFQNLDILRQTNIEFVLILAGDHVYKMDYGQMLAAHVRNKADMTVACINVPLKEASAFGVMGVDENDRVVDFEEKPAHPSSLPDDPDHALASMGIYVFNAAFLYEQLIRDADDPKSSHDFGHDIIPYLIKKYRVFAHRFTDSCVGAADGNYYWRDVGTVDAYWEANMELTKVVPELNLYDRQWPIWTYQEQLPPAKFVFDNEERRGQATDSLISGGCIVSGANVRNSVLFSDVRVNSYSSIEQSVILPKVDIGRHVTLRRVVVDSGARIPDGMEIGVNLELDRKRFHITEQGVVLVTPDMLGQNLHHIR

SEQ ID NO: 46121 - protein, 156 aa, Saccharomyces cerevisiae
MFARLANPAHFKPLTGSHITRAAKRLYHPKVIDHYTNPRNVGSMDKSLANVGTGIVGAPACGDVIKLQIQVNDKSGIIENVKFKTFGCGSAIASSSYMTELVRGMSLDEAVKIKNTEIAKELSLPPVKLHCSMLAEDAIKAAIKDYKTKRNPSVLH

SEQ ID NO: 46122 - protein, 224 aa, Methanosarcina mazei Go1
MAEAKPAPEKEAAVKTESVPVADDEAASAKEGSTSLVSIDEYLAAGVHIGTQQKTQDMMRFVYRVRTDGLYVLDIQSTDERIRVASKLLSHYDPSRILVVSSRQYGQHPARMFSRALGTRAMLGRFIPGSLTNPQIHGFFEPDVIIVTDPAGDAQVLKEASSIGVPVIALCDTNNLTSNVDLVIPTNNKGRKALSLVYWLLAREVSRLNNTPFNYEMTDFETPL

SEQ ID NO: 46123 - protein, 597 aa, Legionella pneumophila subsp. pneumophila str. Philadelphia 1
MRTRLTSKLMKNNLPIKSRLLYKRLLSYVKPFWPVLLLGVLANILYSGIDAGFTYMTKLFLDKSFITIDLNFVKQIPLIVLIGITLRGLVSSLGSYCMTWVARSVVKVLRQTVFSHIIHLPADYYDEATSGQLLSKILYDVEQVAQVSADALTDFIQNICLVIGLLTVMMVICWQLSLMFLLTIPFVGIIVNYTNKRVRRISHKVQKTMGEVTEIASEAIEGYRVVRIFGGERYEITKFNKATEYSRKNDMKVAISKAINVSGVQLVIAIGIATIIMAAIHLSTVITISAGSFLAIIAAMLQLIKPMKTLTTLNATIQRGLAGAESVFNLLDLPLERNNGLILKEKIRGEIEFKHVYHAYRQGQNILHDVNFVIEAGTSVALVGHSGSGKTTIASLLPRFYELSQGMITLDGMPIQQLSLESLRKQMSLVSQNVTLFNDTLANNIAYGRFDASREQIITAAKLAYADEFIKQLPDGYDTRVGENGVLLSGGQRQRIAIARAILKDAPILILDEATSALDSESEHYIQAALEQVMKGRTTLIIAHRLSTIKHAHKIIVLQHGRIVEQGSHQELLDMDGHYAQLYKVQQFGRINEEVVA

SEQ ID NO: 46124 - protein, 537 aa, Streptococcus pyogenes MGAS8232
MKKHWWHKATIYQIYPRSFKDTNGNGIGDLKGITSQLDYLQKLGITAIWLSPVYQSPMDDNGYDISDYEAIADVFGDMADMDELLAAANERGIKIIMDLVVNHTSDEHAWFVEARENSNSPERDFYIWRDEPNDLTSIFSGSAWEYDNASGQYYLHLFSKRQPDLNWENEALRHKIYDMMNFWIAKGIGGFRMDVIDLIGKVPDLEITGNGPRLHDYLKEMNQATFGNHDVMTVGETWGATPEIARQYSRPENKELSMVFQFEHVGLQHKPDAPKWDYAEELDVPALKAIFSKWQTELKLGEGWNSLFWNNHDLPRVLSIWGNDSTYREKSAKALAILLHLMRGTPYIYQGEEIGMTNYPFKDLTEVNDIESLNYAKEAMGNGVSAARVMDSIRKVGRDNARTPMQWSKDTHAGFSKAQETWLPVNPNYQDINVADALADPDSIFYTYQKLIALRKEQDWLVEADYHLLPTADKVFAYQRQLGEETYVIVVNVSDQEQVFAKDLAGAEVVITNTDVDKVLETKHLQPWDAFCLKLKA

SEQ ID NO: 46125 - protein, 532 aa, Daucus carota
MGGCFSKKEYQADGNGYRSAPTAYHTVTDQSYEKSSQRSQPQAQPQPQVQQTGPSLKPRQVHRPESNTILGKPFEDIRGKYTLGKELGRGQFGCVYQCTENSSGQLYACKSILKRKLVSKNDKEDIKREIQILQHLSGQPNIVEFKGVFEDRQSVHLVMELCAGGELFDRIIAQGHYSERAAATICRQIVNVVHVCHFMGVMHRDLKPENFLLSSKDKDAMLKATDFGLSVFIEEGKVYRNIVGSAYYVAPEVLRRSYGKEIDIWSAGVILYILLSGVPPFWAENEKGIFDAILEGVIDFESEPWPSVSNSAKDLVRKMLTQDPRRRITSAQVLDHPWMREGGEASDKPIDSAVLSRMKQFRAMNKLKQLALKVIAESLSEEEIKGLKSMFANMDTDKSGTITYEELKSGLARLGSKLSEVEVQQLMDAADVDGNGTIDYLEFITATMHRHKLESYEHQAFQYFDKDNSGFITKDELESAMKEYGMGDEATIKDIISEVDSDNDGRINYDEFCAMMRRARNRRKLFSVSLTS

SEQ ID NO: 46126 - protein, 311 aa, Zea mays
MAASVALSSGHRMPAVGLGVWRMEKADIRGLIHTALRVGYRHLDCAADYQNEAEVGDALAEAFQTGLVKREDLFITTKLWNSDHGHVLEACKDSLKKLQLDYLDLYLIHFPVATRHTGVGTTSSALGDDGVLDIDTTISLETTWHAMEELVSMGLVRSIGISNYDIFLTRDCLAYAKIKPAVNQIETHPYFQRDSLVKFCQKHGICVTAHTPLGGSTANAEWFGTVSCLDDPVIKSLAEKYGKTPAQLVLRWGLQRDTVVIPKTSKAERLQENFDVFGFDISGEDMERMKAVDRKYRTNQPAKFWGIDLYA

SEQ ID NO: 46127 - protein, 727 aa, uncultured archaeon GZfos12E2
MRRLLIISNRLPVSVERRKNELRFSSSVGGLATGLNALHQRYESVWVGWPGIAINREETDYVESKLSEFNCYPVFLSQGEVEKYYYGFSNKTLWPLFHYFPQYAKYEHSEWSAYEHVNRKFCERVAEIAKPEDIIWIHDYHLMLLPGLIRERFPDATIGFFLHIPFPSADLFRLIPWRRRILEGVLGADLIGFHTYDYAHNFLCSVLRLLGYEHEFGKLAIGDRIVQVDVHPMGVEVQKFVRATSGRGIKREVARLRSRFKNCKIIFSMDRLDYTKGIPERLYAFEHFLETHPEWHEKVVFILKIAPSRTKVGQYRVLKQEIDELVGRINGKYGTPEWVPISYFYRSLPFQTIVAFYLAADVALLTSMRDGMNLIAKEFVASRVDGKGVLILSEMAGAARELGEALVVNPNNKEEVAEALNEALRMPEEEQKSRNEEMQKRLSHYDVFHWGSGFIRSVLETKRLQEELNMKKLSEKIREELKNAYKAADKCLLLLDYDGTLVPFADKPERAKPDKELLYLFRALSEPPENTVVIISGRDKETLERWFGDTGVCLVAEHGVRLKEEEGEWKEIELLKEDWKEKIIPILDLFVDRAPGSFIEEKSFSLVWHYRKVDPELGELRAKELTDQLIDLTACTELQVMKGNKVVEVKDGRVNKGIAASHWLTKGFGFILAVGDDLTDEDMFKVLPEGAYSVKIGFTPSKARFYLGSPKEVRALLDEMELVEVYK

SEQ ID NO: 46128 - protein, 278 aa, Triticum aestivum
  misc_feature (148)..(148): Xaa can be any naturally occurring amino acid
  misc_feature (159)..(159): Xaa can be any naturally occurring amino acid
  misc_feature (175)..(175): Xaa can be any naturally occurring amino acid
  unsure (1)..(278): unsure at all Xaa locations
MASHFVLSTGAKIPSVGLGTWQSEPGVVGDAVYAAVKAGYRHIDCAQVYGNEKEIGFALKKVFDEGITSRQDLFITSKLWCTNHAPEDVPVALDGTLQDLQTDYVDLYLVHWPIRMKKGAGFSPENVIPADIPATWAAMEGLYDSGKXARAIGVSNFSXKKLEELLAVARVPPAXNQVECHPVWQQAKLRDLCASKGIHFSAYSPLGSPGTFKAFSVLEHPVVVSTAEKLGKTPAQVALRWGIQAGHSVLPKSTHEERIRANFDVSTGHPSDCRSFLK

SEQ ID NO: 46129 - protein, 981 aa, Frankia sp. EAN1pec
MTTTPGIPGTASTASPESSNNPASTGNPADGRPDQQAQDPGGFSGGVSSDARHAAVRAGVRRLGALLGEALTRHEGPELLALVERVRMLARGEDGGTELAAVLDGVDARQAILLARAFTAYFQLANITEQLHRAREISDRPRSRLRDLADRIAEAVDEGVVDPGLPAEVMRRLQLRPVFTAHPTEASRRSVLETLRGIADLLDATDDPRRPGADDERLARRLAELVDVLWQTDELRVERPKPADEARSAAYYLTSIATEVLPDLLEELDTAFAGIGVELPVTARPLAFGSWAGGDRDGNPNVTPEVTLEVLNLQYEFGIRVLTALVDRLVRELTASTRVVGEVSGDLLAALAADRAALPEVYDRFIRLNAEEPYRLKCSYILARLAGTRARLAAGAPHVPGKDYLRPTDLVDELELMRVSLAASHGELVANGPLRRAIRTASAVGLSLATLDIREHADAHHAALGAIYDQLAELDVPYRDLDRPARLALLSAELAGRRPLLGAVPPRLPERVARTLELLTTVRHALDQYGDGVIESYIVSMTRDADDILAVAVLAREAGLVGLGRPPGTSSGPGIGTERDGPAVPAVAWARIGFVPLFETVAELRAAGTLLDRLLADPSYRALVAARGDVQEVMLGYSDSSKDAGITASQWEIHKAQRELRDTARAHGVVLRLFHGRGGSVGRGGGPSGEAILAQPFGTLDGPIKVTEQGEVISDKYTLPQLARQNLEITLSAVVEASVLHRTSRLTGQALAGWNGTMTAVADAAKDAYRSLVADPALVPFFLAATPVEELGNLNIGSRPSRRPGGSGGLADLRAIPWVFGWTQARIILPGWFGVGSGLAAAREAGAGGELAEMYRSWHFFRTFLGNVQMTLAKSDLAIAQRYVSALVDPATAALFDVIRDEHERTVREVLAVTGQAGLLETAPVLRHTLLVRDAYLAPLHALQVSLLARTRAAGDIADPQLRRGLLLTINGIAAGLRNTG

SEQ ID NO: 46130 - protein, 309 aa, Mycobacterium tuberculosis H37Rv
MQNATMRVLVTGGTGFVGGWTAKAIADAGHSVRFLVRNPARLKTSVAKLGVDVSDFAVADISDRDSVREALNGCDAVVHSAALVATDPRETSRMLSTNMAGAQNVLGQAVELGMDPIVHVSSFTALFRPNLATLSADLPVAGGTDGYGQSKAQIEIYARGLQDAGAPVNITYPGMVLGPPVGDQFGEAGEGVRSALWMHVIPGRGAAWLIVDVRDVAALHAALLESGRGPRRYTAGGHRIPVPELAKILGGSPAPRCWPSRCPIPRCVSRDRCWIKPGPICLSILRSPRQVCSTTHRCRSPTIRRAKKN

SEQ ID NO: 46131 - protein, 279 aa, Burkholderia pseudomallei K96243
MFRTGMAMNLDNQVLENRKRVLKMLHGADGGHFGGAMSVLDTLVVLYHRVLRRDPARRADGLADRLILSKGHASVALYAVLASIGELPEAELATYGKGGGRLPCHPDMTLLDAVDFSTGSLGQGLSVGLGMAFALRGTGARVWVVLGDGECQEGQVWEAAQFASRYGVDNLHAVVDLNGFQEMGWRGIDGVAPEPLPDAARKWAAFGWHVREVAGHDAARLEAAMRAMTAQRGRPSVLLASTVKGRGIPAFEFDPGLSHCTSLTDDQFRHAVAVAEGVA

SEQ ID NO: 46132 - protein, 111 aa, Brassica napus
  misc_feature (94)..(94): Xaa can be any naturally occurring amino acid
  unsure (1)..(111): unsure at all Xaa locations
MGVPLVCHGHSRPVVDVSYSPVTPDGFFLISASKDSNPMLRNGETGDWIGTFEGHKGAVWSCSLDKHAMRAASASADFTAKIWNALTGDELRSXFEHEHIVSRNSSAIPIP

SEQ ID NO: 46133 - protein, 503 aa, Zea mays
MAAAALAMAEQVVAELRVRCETPPSMLREVAVEMAREMGAGLEKDGGSRVKMLLSYVDKLPTGREEGLFYGLDLGGTNFRVLKVQLGGNAKHVVDRDSREVGIPPHLMSGSSSELFGFIASELAKFVDDDEKCANISNGKKREIGFTFSFPVKQRSVASGTLVKWTKAFSINDAVGEDVVAELQTAMEKQGLDMHVAALINDAVGTLAGARYYDKDVVAGVIFGTGTNAAYVEKANAIPKWEGELPHSGDMVINMEWGNFFSSHLPITEYDQELDKESLNPGEQIYEKLTSGMYLGEIVRRVLLKISLQSAIFGDIDHTKLQTHFLLRTPHISAMHHDETSDLKIVAENFEQNLEITGTSLEARKLVVEIRDIVATRAARLAAAGLAGILMKIGRDHSVEDQRSVIAIDGGLFEHYTKFRRCLETTLGELLGDEASKAVAIKHADDGSGIGAALIAASQSQYKNDLVAVKHADDGSGVKYAEDKRADDGSEIGAALIAASQSQ

SEQ ID NO: 46134 - protein, 423 aa, Wolbachia endosymbiont of Drosophila ananassae
MSRRVVVTGVGLITPLAADVDNTWSRLIKSESGIKAINTDRFDSSDLACKIAGQVPLQSDNIEHHFNPLDYISEKDSKRTDRFIHYGIAAAIQAVDDSLILESQNINRERVGVTIGSGIGGLPSIQENVITMQEKGPRRVSPFFVPASLINLISGHVSIKYEFTGPNDSAVTACATGAHAIINSARTIKLGEADVMIAGGAESALCRVGIAGFASMKALSTKFNDKPEEASRPWDAERDGFVMGEGAGILVLEEYEHAKKRGAKIHAELVGYGLTGDAHHITAPHPEGRGAFKAMQLALKSAQINPNQVGYINAHGTSTPLGDKIEVIAMKQLFGDYVYKIPVSSTKSSIGHLLGAAGSVEAIFSILALNNGIIPPTLNLHKPSEGCDLNFVPLKAQEHKIQYALSNSFGFGGTNASLIFGQV

SEQ ID NO: 46135 - protein, 312 aa, Pyrococcus furiosus DSM 3638
MIYAIGEILIDFIAKEEGKLKDVREFEKHPGGAPANVVVGLRRLGAKSALISKVGDDPFGEFLIEELKKERVETKYIIKDTNKHTGIVFVQLIGAKPEFILYDGVAYFNLRKEEIQWDFMRDAELLHFGSVLFAREPSRSTVFEVLRAVKGKVPISYDVNIRLDLWRGREKEMLKDIEEALKLADIVKIGDGELEYLNKNGIALEDFNFALVAITRGAEGSTIIHKDIRVDVPSFKVEPVDTTGAGDAFMAALLASLFYMGKLDILEFSKEELKELGSFANLVAALSTTKRGAWSVPSLEEVLKHRKFSFLP

SEQ ID NO: 46136 - protein, 355 aa, Zea mays
MAMIDEPLYPIAVLIDELKNEDIQLRLNSIRRLSTIARALGEERTRKELIPFLSENNDDEDEVLLAMAEELGVFIPYVGGVEHAHVLLPPLETLCTVEETCVRDKAVESLCRIGAQMKETDIVDWFIPVVKRLAAGEWFTARVSSCGLFHIAYPSALDQLKTELRTIYGQLCQDDMPMVRRAAASNLGKVAATVEQNHLKTEIMSIFDDLTPDDQDSVRLLAVEGCAALGKLLEPQDCVAHILPVIVNFSQDKSWRVRYMVANQLYELCEAVGPEPTRADLVPAYVRLLRDNEAEVRIAAAGKVTKFCRILNPQLSVQHILPCVKELSSDSSQHVRSALASVIMGMAPVPRPRPR

SEQ ID NO: 46137 - protein, 883 aa, Arabidopsis thaliana
MPWWSKSKDEKKKTNKESIIDAFNRKLGFASEDRSSGRSRKSRRRRDEIVSERGAISRLPSRSPSPSTRVSRCQSFAERSPAVPLPRPIVRPHVTSTDSGMNGSQRPGLDANLKPSWLPLPKPHGATSIPDNTGAEPDFATASVSSGSSVGDIPSDSLLSPLASDCENGNRTPVNISSRDQSMHSNKNSAEMFKPVANKNRILSASPRRRPLGTHVKNLQIPQRDLVLCSAPDSLLSSPSRSPMRSFIPDQVSNHGLLISKPYSDVSLLGSGQCSSPGSGYNSGNNSIGGDMATQLFWPQSRCSPECSPVPSPRMTSPGPSSRIQSGAVTPLHPRAGGSTTGSPTRRLDDNRQQSHRLPLPPLLISNTCPFSPTYSAATSPSVPRSPARAEATVSPGSRWKKGRLLGMGSFGHVYLGFNSESGEMCAMKEVTLCSDDPKSRESAQQLGQEISVLSRLRHQNIVQYYGSETVDDKLYIYLEYVSGGSIYKLLQEYGQFGENAIRNYTQQILSGLAYLHAKNTVHRDIKGANILVDPHGRVKVADFGMAKHITAQSGPLSFKGSPYWMAPEVIKNSNGSNLAVDIWSLGCTVLEMATTKPPWSQYEGVPAMFKIGNSKELPDIPDHLSEEGKDFVRKCLQRNPANRPTAAQLLDHAFVRNVMPMERPIVSGEPAEAMNVASSTMRSLDIGHARSLPCLDSEDATNYQQKGLKHGSGFSISQSPRNMSCPISPVGSPIFHSHSPHISGRRSPSPISSPHALSGSSTPLTGCGGAIPFHHQRQTTVNFLHEGIGSSRSPGSGGNFYTNSFFQEPSRQQDRSRSSPRTPPHVFWDNNGSIQPGYNWNKDNQPVLSDHVSQQLLSEHLKLKSLDLRPGFSTPGSTNRGP

SEQ ID NO: 46138 - protein, 332 aa, ASPERGILLUS NIDULANS FGSC A4
MQSTKPFVLFFNPVKFARPFYEQLQKVAHTEVVTSRNRTEFFQDLQDKYRNIFAIYRTSSSGAVAGKFDTEFINRLPPSCKYICHNGADACAKRGIVVTNAPDPVTDATADLAVFLLLGALRQLNPAMNSLRAGRFKTGVAVGNDPQGKVLGILGMGRIGRAIKKRCDPFGLKTVYHNRTVLAPEQAAGAEYVSFDKLLAESDIISVNVPLTGQTKQLIGAAELAKMKRGVIIVNTARGAILDEAALADALESGHVGAAGLDVYEREPEVNEKLLKQERALMVPHVGTHTAETLAKMETWAMENARRAITGEALLSPVPEHQGLALQARSRV

SEQ ID NO: 46139 - protein, 238 aa, Triticum aestivum
  misc_feature (37)..(37): Xaa can be any naturally occurring amino acid
  misc_feature (138)..(138): Xaa can be any naturally occurring amino acid
  unsure (1)..(238): unsure at all Xaa locations
HFSSRIHTQILTQPPPQSQTPRHIDFSVGSSSKSGVXTSQAALLGGENGSVDGLCKEQVAPAMEGQQPRKRGRKPANGRVEALNHVEAERQRREKLNQRFYALRAVVPNISKMDKASLLGDAITHITDLQKKLKEMEXERDMFLESGMVDRRVQTPRPEVDIQVVQDEVLVRVMSPMDNYPINNVFQAFEEAEVKVGESKITSNNGKVMHSFVIKSPGSEQQTREKLIAAMSRAMNSM

SEQ ID NO: 46140 - protein, 218 aa, Brassica napus
  misc_feature (8)..(8): Xaa can be any naturally occurring amino acid
  misc_feature (58)..(58): Xaa can be any naturally occurring amino acid
  misc_feature (72)..(72): Xaa can be any naturally occurring amino acid
  misc_feature (83)..(83): Xaa can be any naturally occurring amino acid
  misc_feature (97)..(97): Xaa can be any naturally occurring amino acid
  misc_feature (138)..(138): Xaa can be any naturally occurring amino acid
  unsure (1)..(218): unsure at all Xaa locations
MSKLQSEXAVKEAISTIITHCKETKPRKFTETIELQIGLKNYDPQKDKRFSGSVKLPXHIPRPKMKICMLGXAQHSWKEAEKXGFRVIWNLWKLLRXLNKNKKLVKKLAKKFHAFLASESVIKQIPRLLGPGLNKAGXVSHQESLESKVNETKATVKFQLKKVLCMGVAVGNLGMEEKQIFQNVQMSVNFLVSLLKKNWQNVRCLYLKSTMSPPTRVF

SEQ ID NO: 46141 - protein, 222 aa, Zea mays
MAPRNALPAASAVANGMLMEPRFRGVRKRPWGRFAAEIRDPARKARVWLGTFDTAEAAARAYDAAALHFRGPKAKTNFPVAFAALPPPPPPKKPAAVTVSPSSSSTVESSSSSSRDSPATPPRPASPSQQAPSLDLSLGGTPAMVAAQPFLFLDPRLAVTVAVPAPVPYRPTAVAAGANKHAAASCREEEQSDTGSSSSVVDASPAVGVGFDLNMPPPAEVA

SEQ ID NO: 46142 - protein, 317 aa, Escherichia coli
  misc_feature (132)..(132): Xaa can be any naturally occurring amino acid
  unsure (1)..(317): unsure at all Xaa locations
MTDKLTSLRQYTTVVADTGDIAAMKLYQPQDATTNPSLILNAAQIPEYRKLIDDAVAWAKQQSNDRAQQIVDATDKLAVNIGLEILKLVPGRISTEVDARLSYDTEASIAKAKRLIKLYNDAGISNDRILIXLASTWQGIRAAEQLEKEGINCNLTLLFSFAQARACAEAGVFLISPFVGRILDWYKANTDKKEYAPAEDPGVVSVSEIYQYYKEHGYETVVMGASFRNIGEILELAGCDRLTIAPALLKELAESEGAIERKLSYTGEVKARPARITESEFLWQHNQDPMAVDKLAEGIRKFAIDQEKLEKMIGDLL

SEQ ID NO: 46143 - protein, 422 aa, Zea mays
MIRPGSRDSQNYDNNNQRVHPQPVDENMNQNGDSVDTMIGRIFNNISSLKSAYIQLQEAHTPYDPDKIQEADKLVIEELTNLSELKHAYREKHPKPIAASPQDSRLLSEIQEQQNLLKTYEVMVKKFQSQIQTRDTEITHLQQQIDEAKLRKSKLEKKLKQRGLLNRESEESDEEENYFSIELTPSLFTSAVDNAYQSIHEFSKPLINMMKAAGWDLDGAANAIEPGVVYTRRAHKKFAFESYICQRMFSGFQEESFSIKDSNISVSNEAFFHQFLAVRAMDPLDVLSQNPDSVFGKFCRSKYLLLVHQKMEGSFFGNMDQRNYVMSGGHPRTPFYQAFLKLAKSIWLLHRLAYSFDPKAKVFQVKKGSEFSDIHMESVVKNIILEEGAERPKVGLMVMPGFLIGTSVIQSRVYLSDAKCAD

SEQ ID NO: 46144 - protein, 923 aa, Sesbania rostrata
MMELPDIWILRLAVACALCLYIFLRSASASEEFESIACCADSNYTDPLTTLNYTTDYSWFSDKRSCRQIPEAGLNNRSNENVRLFDIDEGKRCYNLPTIKNKVYLIRGTFPFDSTNSSFYVSIGITQLGAVRSSRLQGLEVEGVFRATKDYIDFCLVKGEVNPFISQLELRPLPEEYLHDLPTSVLKLISRNNLGGSKDDIRFPADRSDRIWKATSSPSSAFPLSFNVSNVDLQANVTPPLQVLQTAITHPERLEFIHNGLETEDYGYRVFLYFLEINRTLKAGQRVFDIYVNNEIKKEKFDVLDGGSNYGYTVLNVSANGSLNVTLVKASESEFGPLLNAYEILQVRSWVEETNQTDVEVIQKMREELLLQNQENKALESWTGDPCILFPWKGIACDGSNGSTVITKLDLSLSNLKGPIPSSVTEMTNLKILNLSHNSFDGYIPSFPLSSLLISIDLSYNGLRGTLPESITSPLHLKSLYFGCNQHMSEEDPANLNSSLINTDYGRCKSKEHKFGQGIVIGAITCGSLLVTLAVGILFVCRYRQKLLPWEGFGGKNYPMATNVIFSLPSKDDFFIKSVSIQTFTLEYIEVATERYKTLIGEGGFGSVYRGTLNDGQEVAVKVRSATSTQGTREFDNELNLLSAIQHENLVPLLGYCNENDQQILVYPFMSNGSLQDRLYGEPAKRKVLDWPTRLSIALGAARGLAYLHTFPGRPVIHRDVKSSNILLDHSMCAKVADFGFSKYAPQEGDSNVSLEVRGTAGYLDPEYYKTQQLSEKSDVFSFGVVLLEIVSGREPLNIQRPRNEWSLVEWAKPYIRASKVEEIVDPGIKGGYHAEAMWRVVEVALQCLEPFSAYRPCMVDIVRELEDALIIENNASEYMKSIDSLGGSNRYSIVIEKRVLPSTTSTAESTITAQSLSHPQPR

SEQ ID NO: 46145 - protein, 637 aa, Neurospora crassa
MTSSLAEHPDRARPAGNEGHQQQSEQPKSRREEPASRLSTGRRDGASEDTNQQFLVGEQSPLLSPVDNQDGSSSDQGADSADEFQTTKSVWYMILLTISIGGLQIAWSVEMSNGSPYLLSLGISKSLMALVWIAGPLSGTLVQPYVGMMSDNCRIRWGKRKPFMLGGAAATILSLMFLAWTREIVTGILGLFGADPQSESVKLCIICTAVLWIYILDFAINTVQAAIRAFIVDCAPTHQQEMANAMASSLALGTTVLMTCLFIKERDPRLEGPPAKDKPGVVAFFKKIFTSIKRLPPQTKKVCQVQFCAWIGFFPMLFYTSSYIGEIYAEPYLEENPNMTDKELDDLYERATQVGTFALLIFAITSLATNIFLPFFIAPTYDQSMVTAVAPGEAPAVVIKDYEPEQRSWTRHLIIPGFTLRRAWMFSQILFTGCMLCTVFVRTVTAATVLIGLVGITWALTLWAPWAIISAEISQRDEERRSQQQRLSPSRLDNLDGYSSDGNQDSDLGKDDEEAADQAGVILGIHNMAIAAPQIIATVASSIIFRLFQKPRGTPGDHSIAIVLALGGITVLISALFIHRIRDEPTVTYDEISAVEEGDAAPRPNVHSRSRSFDQPPRASLERATLVRNKSFGGMEY

SEQ ID NO: 46146 - protein, 508 aa, Saccharomyces cerevisiae
MASLFRPPESAKCNPNSPRLKLPLLRNNQVDENNIYLTSNGSSTTAYSSHTPEPLTSSTSTLFSQTRLHPSDSSMTLNTMKKRPAPPSLPSLSINSQSKCKTLPELVPIADVSDGKHDLGLKQRVIAENELSGNSDLTPSSMASPFSHTNTSSPYLRNDLSNSVGSDFSNLISAYEQSSSPIKSSSQPKSSSESYIDLNSVRDVDQLDENGWKYANLKDRIETLGILGEGAGGSVSKCKLKNGSKIFALKVINTLNTDPEYQKQIFRELQFNRSFQSEYIVRYYGMFTDDENSSIYIAMEYMGGRSLDAIYKNLLERGGRISEKVLGKIAEAVLRGLSYLHEKKVIHRDIKPQNILLNENGQVKLCDFGVSGEAVNSLATTFTGTSFYMAPERIQGQPYSVTSDVWSLGLTILEVANGKFPCSSEKMAANIAPFELLMWILTFTPELKDEPESNIIWSPSFKSFIDYCLKKDSRERPSPRQMINHPWIKGQMKKNVNMEKFVRKCWKD

SEQ ID NO: 46147 - protein, 196 aa, Glycine max
MSTARFIKCVTVGDGAVGKTCMLISYTSNTFPTDYVPTVFDNFSANVTVDGSTVNLGLWDTAGQEDYNRLRPLSYRGADVFLLCYSLISKASYENISKKWIPELRHYAPNVPIVLVGTKLDLRDDKQFLIDHPGSARITTAQGEELKKMIGAVTYIECSSKTQQNVKTVFDAAIKVALRPPKPKKKPRKKKTCPFL

SEQ ID NO: 46148 - protein, 465 aa, Arabidopsis thaliana
MVSSQRPVPNKIQKQQYLSISPSNSVLKDDVELEFSDVFGPLPEEANDIAYDEPAVVYSRSHSLVGPCSLDSHSLKLTKLTLLETEDSIDLVECLEGESLKENDDFSGNDDSDNEKALEGDLVKVSGVVGIDDFEVMKVVGKGAFGKVYQVRKKETSEIYAMKVMRKDHIMEKNHAEYMKAERDILTKIDHPFIVQLKYSFQTKYRLYLVLDFINGGHLFFQLYHQGLFRENLARVYTAEIVSAVSHLHEKGIMHRDLKPENILMDTDGHVMLTDFGLAKEFEENTRSNSMCGTTEYMAPEIVRGKGHDKAADWWSVGILLYEMLTGKPPFLGSKGKIQQKIVKDKIKLPQFLSNEAHAILKGLLQKEPERRLGSGLSGAEEIKQHKWFKGINWKKLEAREVMPSFKPEVSGRQCIANFDKCWTDMSVLDSPASSPSSDPKANPFTNFTYVRPPPSFLHQSTTTL

SEQ ID NO: 46149 - protein, 370 aa, Mycoplasma capricolum
MTYLGKFDPLKNEKVCVLDKDGKVINPKLMPKISDQEILEAYKIMNLSRRQDIYQNTMQRQGRLLSFLSSTGQEACEVAYINALNKKTDHFVSGYRNNAAWLAMGQLVRNIMLYWIGNEAGGKAPEGVNCLPPNIVIGSQYSQATGIAFADKYRKTGGVVVTTTGDGGSSEGETYEAMNFAKLHEVPCIFVIENNKWAISTARSEQTKSINFAVKGIATGIPSIIVDGNDYLACIGVFKEVVEYVRKGNGPVLVECDTYRLGAHSSSDNPDAYRPKGEFEEMAKFDPLIRLKQYLIDKKIWSDEQQAQLEAEQDKFVADEFAWVEKNKNYDLIDIFKYQYDKMDIFLEEQYKEAKEFFEKYPESKEGGHH

SEQ ID NO: 46150 - protein, 800 aa, Saccharomyces cerevisiae
MASVPKRHTYGGNVVTDRDRHSLQRNNEILHPIHKNQRKHATFGPYIIGSTLGEGEFGKVKLGWTKASSSNEVPKQVAIKLIRRDTIKKDADKEIKIYREINALKHLTHPNIIYLEEVLQNSKYIGIVLEFVSGGEFYKYIQRKRRLKESSACRLFAQLISGVNYMHYKGLVHRDLKLENLLLDKHENLVITDFGFVNEFFEDNELMKTSCGSPCYAAPELVVSTKAYEARKADVWSCGVILYAMLAGYLPWDDDHENPTGDDIARLYKYITQTPLKFPEYITPIPRDLLRRILVPNPRRRINLQTIKRHVWLKPHEAFLSIQPNYWDEHLQKERPKPPNKGDVGRHSTYSSSASSYSKSRDRNSLIIESTLEQHRMSPQLATSRPASPTFSTGSKVVLNDTKNDMKESNINGERTSASCRYTRDSKGNGQTQIEQVSARHSSRGNKHTSVAGLVTIPGSPTTARTRNAPSSKLTEHVKDSSQTSFTQEEFHRIGNYHVPRSRPRPTSYYPGLSRNTADNSLADIPVNKLGSNGRLTDAKDPVPLNAIHDTNKATISNNSIMLLSEGPAAKTSPVDYHYAIGDLNHGDKPITEVIDKINKDLTHKAAENGFPRESIDPESTSTILVTKEPTNSTDEDHVESQLENVGHSSNKSDASSDKDSKKIYEKKRFSFMSLYSSLNGSRSTVESRTSKGNAPPVSSRNPSGQSNRSNIKITQQQPRNLSDRVPNPDKKINDNRIRDNAPSYAESENPGRSVRASVMVSTLREENRSELSNEGNNVEAQTSTARKVLNFFKRRSMRV

SEQ ID NO: 46151 - protein, 393 aa, Arabidopsis thaliana
MAVHIHNPNFFHTHHLRSSLTSASASPSSYLFHRHSASKYPSFLCKSNNKDDYLIDAPVSVGDGFSFSGGKYSDQPSPSDEWLNQGKWVKAHRVGGSGVEAKDPIFGLTMGASSQASKDLFRWFSVESGSVDSPPIILIHGFPSQAYSYRKTLPVLSKNYRAIAFDWLGFGFSDKPQAGYGFNYTMDEFVSSLESFIDEVTTSKVSLVVQGYFSAAVVKYARNRPDKIKNLILLNPPLTPEHAKLPSTLSVFSNFLLGEIFSQDPLRASDKPLTSCGPYKMKEDDAMVYRRPYLTSGSSGFALNAISRSMKKELKKYAEEMRTSLMDKNWKIPITVCWGQRDRWLSYEGVEEFCKSSGHNLVELPNAGHHVQEDCGEELGGIISRIISKSALF

SEQ ID NO: 46152 - protein, 408 aa, Bradyrhizobium japonicum USDA 110
MPGLNRTRDTTLRARAEKVVPGGMWGHLHAAKLPDGYPQFFRRGEGGVLWDVDGNRYVDFMCSWGPNLLGHHHPEVEEAAERQRREGDCLNGPAEVMVELAELVVDMVGHADWTQFQKNGTDATTTCVTIARAATGRRKILVAKGAYHGAVPWCSPSLLGVTAEDRAHLAYFTFNDVESLEVAAKAAGDDLAGILVSAYRHDLGLDQELPTVEFAHAARRICDDRGAALIIDEVRAGLRLNAAGSWEGLGVRPDLSAWSKAIANGYALAAVTGANWLRGAASQVFVTGSFWAGAVAMAAAVATLKIVRRDNVPSRLAQLGQMLREGLETRSRQFGVSIRQSGPAQMPTLLFDQDPAYRKGSAFCSAMLARGVYFHPKHNMFLCAAHTEADIAEALQAAEHGFAVVAGL

SEQ ID NO: 46153 - protein, 629 aa, Mycoplasma capricolum
MFKVKFADIGEGLTEGTVAEVLVKVGDVVKEGQPLYFVETDKVNSEIPSPVAGKIAIINISTGQEIKVGDVVIEIDDGSSTSTASTSKVEVVEENASVVGATPVSNDVLPSRAPKPKAEAKVEVVEENASVVGATPVSNDVLPSRAPKPKVEAPKVDVQIEDTFDVCVVGAGIGGYVTAIKSAQLGLKTLIIEKEYYGGVCLNVGCIPTKTLLKTSHVYHDIVHKAKELGIVLQNTENVVIDWAQALERKNGVVKKLTGGVKYLLDKNKVTQIKGEAIALDKNTISVNNKNYRVNNLVIASGSTPNHLPLPGFDQGRKDGIIIDSTGILSVPKIPETLVVIGGGVIGIEFSCLFASLGTKVTVLQGLPTILEMLDKDIIDAMTKELKNRYNIQVITNASVKEFKDGSVVYQIDGQDQMIKGEYVLESVGRKTSLTGFENIGLELTPRKGVVVNEYQETNLDGVYAIGDVVGKSMLAQTAVKGAIVAANRIAKKANKAHAEDIVMNYDKVPSCIYTHPEVSMIGKTEQQLKQENIEYKAFKFPFSAIGKALADDDTSGFVKIIVEPKYKTILGAHIIGNRATEMISEITAVIECEGTITEIANTIHPHPTMSEAIGEAAEALETGKAIHF

SEQ ID NO: 46154 - protein, 159 aa, Triticum aestivum
  misc_feature (18)..(18): Xaa can be any naturally occurring amino acid
  unsure (1)..(159): unsure at all Xaa locations
GLLSPSTSRTNALLGALXGLSPKVMVVCEQEPSHNTAGLTERFVKALNYYAALFDCLEVGAARGSVERARVERWLLGEEIKNIVACDGADRRERHERLDRWAARMEGAGFGRVPLSYYALLQARRAAQGLGCDGFKVREEKGTFFLCWQDRALFSVSAW

SEQ ID NO: 46155 - protein, 451 aa, GIBBERELLA ZEAE PH-1
MSHLPHEPEFEQAYGELASALENSSLFNEHPEYRTALAVAAIPERVIQFRIVWEDDKGNLQVNRGYRVQFNSALGPYKGGLRFHPSVNLSILKFLGFEQIFKNALTGLSMGGGKGGADFDPKGKSDAEIRRFCQSFMTELSKHIGAETDVPAGDIGVGGREIGYLFGAYRKLRNRWEGVLTGKGLSWGGSLIRPEATGYGLVYYVDYMLKHANRGSFEGKRVALSGSGNVAQYAALKIIELGGSVVSLSDSKGALVAKEGSSFTPEQIHNIAALKIKHQSLTAFEHQDKFTWIEGARPWVHVGKVDIALPSATQNEVSKEEAQALLEAGAFIVAEGSNMGCTADAIDVFEAHRKENGAQALWYAPGKASNCGGVAVSGLEMAQNSQRIQWSEKEVDDRLKAIMKDAFVAGLETAQKYVEAKEGELPSLVAGSNIAGFIKVAEAMHNQGDWY

SEQ ID NO: 46156 - protein, 812 aa, Arabidopsis thaliana
MGQLALQRLQLLASLPRRPPSLPPPSSATPSLPCATASRRPRFYVARAMSSHIVGYPRIGPKRELKFALESFWDGKSNVDDLQNVAANLRKSIWKHMAHAGIKYIPSNTFSYYDQMLDTTAMLGAVPSRYGWESGEIGFDVYFSMARGNASAHAMEMTKWFDTNYHYIVPELGPDVNFSYASHKAVVEFKEAKALGIDTVPVLIGPMTYLLLSKPAKGVEKSFCLLSLIDKILPVYKEVLADLKSAGARWIQFDEPILVMDLDTSQLQAFSDAYSHMESSLAGLNVLIATYFADVPAEAYKTLMSLKCVTGFGFDLVRGLETLDLIKMNFPRGKLLFAGVVDGRNIWANDLSASLKTLQTLEDIVGKEKVVVSTSCSLLHTAVDLVNEMKLDKELKSWLAFAAQKVVEVNALAKSFSGAKDEALFSSNSMRQASRRSSPRVTNAAVQQDVDAVKKSDHHRSTEVSVRLQAQQKKLNLPALPTTTIGSFPQTTDLRRIRREFKAKKISEVDYVQTIKEEYEKVIKLQEELGIDVLVHGEAERNDMVEFFGEQLSGFAFTSNGWVQSYGSRCVKPPIIYGDITRPKAMTVFWSSMAQKMTQRPMKGMLTGPVTILNWSFVRNDQPRHETCFQIALGIKDEVEDLEKAGVTVIQIDEAALREGLPLRKSEQKFYLDWAVHAFRITNSGVQDSTQIHTHMCYSNFNDIIHSIIDMDADVITIENSRSDEKLLSVFHEGVKYGAGIGPGVYDIHSPRIPSTEEIAERINKMLAVLDSKVLWVNPDCGLKTRNYSEVKSALSNMVAAAKLIRSQLNKS

SEQ ID NO: 46157 - protein, 586 aa, GIBBERELLA ZEAE PH-1
MASAETAPLLGAPGPSTFPDIDSDATPSRPANPKRLSAGVARMEIVSRNITTAHRVWLFIGIFLVGYAYGLESQTRLAYQSYATSSFDLHSYLSTINVLRNVIAVAVQPSAAKIADVFGRFEVIAISTVLYTLGIAIESTAQTVEVFCTGSIIYQTGYTCIVLLLEVLIADFSSMRARVFFSYLPAIPFLINTWISGNITSAVLGSTSWRWGLGMWAIIYPIASLPLLSCLYFLERRTWESDGKESEAVALLSLKTKKGRADLFHQLDVIGLVLLVTAFSLILAPLTVAGGTASHWRSWYIILPLVLGICLMVCFITWEQRGAKHPLVPFHLLRDRGVWSALAVRSLLNLAWCTQGNYLYTILIVAFDFSIENATRILSFFSFFGVITGVLAGLVIFKIRRLKFIIVGGTLLFMAAFGVLIMYPGGASISSKDGIIAAQILLGVAGGFFAYPTQASIQASASREHVAILTGLYLSFYNIGSAFGTCISGAIWTQTLYKSLKHNLAFQPDKGLAKAIYNNPFSIIPDYPVGTEIRDAIISSYSSVQRLLCIAGICFCIPMITFALALRNPRLSEQQVQTEDENNHEA

SEQ ID NO: 46158 - protein, 685 aa, Rhizobium etli
MATKVKENEDAEVERDGATDGPLLDLSDDAVKKMIKAAKKRGYVTMDELNAVLPSEEVTSEQIEDTMSMLSDMGINVIEDEEAEEAGASGGGDDDDAGGDEDSEGGELAPSAGTALATAKKKEPTDRTDDPVRMYLREMGSVELLSREGEIAIAKRIEAGRETMIAGLCESPLTFQALIIWRDELNEGTTLLREIIDLETTYSGPEAKAAPQFQSPEKIEADRKAAEEKEKTRRARSGDDDITDVGGEGLPPEEEEEDEDESNLSLAAMEAELRPQVMETLDIIAETYKKLRKLQDQQVEQRLAATGTLSSAQERRYKELKDELIKAVKSLSLNQNRIDALVEQLYDINKRLVQNEGRLLRLAESYAVKRDSFLEQDQGAELDPNWMKSIGNLAARGWKEFAKAENTTIRDIRQEIQNLATETGISISEFRRIVHMVQKGEREARIAKKEMVEANLRLVISIAKKYTNRGLQFLDLIQEGNIGLMKAVDKFEYRRGYKFSTYATWWIRQAITRSIADQARTIRIPVHMIETINKIVRTSRQMLHEIGREPTPEELAEKLAMPLEKVRKVLKIAKEPISLETPVGDEEDSHLGDFIEDKNALLPIDAAIQANLRETTTRVLASLTPREERVLRMRFGIGMNTDHTLEEVGQQFSVTRERIRQIEAKALRKLKHPSRSRKLRSFLDS

SEQ ID NO: 46159 - protein, 693 aa, ASPERGILLUS NIDULANS FGSC A4
MCGISAVLSLSEGSICPQALASQMNESLQLIKHRGPDARGQWLSSDYRVGLGHARLSVIDLNPAGNQPFHDPEGTVHAVVNGEIYDHKKYRAKLAHQYEFRSNSDCEIVTALYRHYGISFLNKLRGEFALVLWDAKRKLFLAARDRYGIKSLYYTVVNNRLLVATEIKSFLPFGWQPEWSIENLLRKGWLWDTEMYFKGVHRLEPGQYMVSQNYKFPVVKTYWDMDYPDKRTPFPQTEEQIVLELRKRMLESVRLRLRADVGVGFYLSGGLDSSAIAGMAKYLIQQGEPLGNDSSGDISKMSCYTIRFGEGSGVDESGIKDTFVPEVSDRRLTKSELYPVTLTEEDIASRFEDTVWYTETPIPDVNGMGRVAVGELAHSHGKKVILTGEGSDEHFGGYPDMLSKMFVEPDLSWHPPPFKMPNSSKVFEAGREAVPAAVESLASTKRMLNNSSIFARVDSFYMFPLASATVESEEPDPETAFAESLGAQTLSNISENWHPLNSASYQWTKSILANYILRYIGDGADMVYQIETRPPFLDHHVTEYANRIPPSLKIRYDPVKNDLREKYILREAMRPFITDEVMNRTKRAYLGPSNYREDGPLHRVVKSLLTEDNVNKLGFVDWDRLQEHIVKGFRDGDPRYFRSSLFVAQLVVLSQRFGVKVATTTDALPVTSEILDRTQNNDNMTTVQDRSRL

SEQ ID NO: 46160 - protein, 547 aa, Xylella fastidiosa Dixon
MAAKEIIFSEKARSRMVYGVNLLANAVKATLGPKGRNVVLDKNFGSPIITKDGVSVAKEIELADKFENMGAQMLKEVASKTNDHAGDGTTTATVLAQALIREGCKAVAAGMNPMDLKRGIDKAVIAAVTELKKISKPTSDDKAIAQVATISANSDESIGNIIAEAMKKVGKEGVITIEEGTTLENELDVVEGMQFDRGYSSPYFINNQQSQIVELDNPYILLHDKKISNVRDLLTVLDAVAKESKQLLIVAEEVEGEALATLVVNNIRGIIKVCAVKAPGFGDRRKAMLEDMAVLTGGTVISEEVGLSLEKATTSHLGKAKKVRVSKENTTIIDGMGDNDAINGRVKQIKTQIEETTSDYDREKLQERVAKLAGGVAVIKVGAATEVEMKEKKARVDDALLATRAAVEEGVIPGGGVALIRVITAISNLKGANEDQTHGIQIALRAMEAPLREIVANAGEEPSVILNKVKEGKGNFGYNAATGEFGDMVNFGILDPTKVTRSALQNAASIAGLMITTEAMIAEAPKKDEPTPPAAGGGMGGMGGMDF

SEQ ID NO: 46161 - protein, 499 aa, Burkholderia pseudomallei K96243
MRERRRGIAFMRSCDDFLRTSELSIAAVNSLRRTIAPSHRVLDACGSGAACLLASRYGAKQVVALAAAEATLVGARAGANGPGERISFVDAEQAAALVARQGRFDVVLGLAGGGRDGLDPHYGARLDAFARRFGTANVAVVPNGVRYDAQLVEWREAERLEADVAARQRALEARYDLTLGPVLDQVAAGAAPRGRVRADALRALCARLPFLSCRPGDGGDAGTSGTSGTAAPEHVELTAAHGGRADGVLWTQELIHDGIVIERIQGCSWLDERVDLEAGDAIAVPVADMARAGPLDGGEAPPQLAPAPRASGAPAPLVFWLTGISGAGKTTIATRFKQRADADAWPTVVLDGDTLRGGLNADLGFCDADRAENVRRIAEVAALMADTGLVVVVSCISPRRSFRETAREIVGAERFVEVFVDTPPAVAQARDPKGLYRRARAGLIASFTGIDSDYEPPPDPQLRIDTTTHDVEDATQMLRRYYVDARLSGARAGTAECAA

SEQ ID NO: 46162 - protein, 613 aa, ASPERGILLUS NIDULANS FGSC A4
MLRSIPRRVPRRLPIFTTTATAGGPSRLAQRAFTCGYLRMSPSSLPPVQPPVSSTLPSDSYQLLSTADKAGDAEDALYEQQIKDVEAWWNSPRFEGIKRPYSAADVVSKRGSLQQTYPSSLMARKLFNLLNERAAENKPVHTMGAIDPVQMTQQAPNQEVLYVSGWACSSVLTTTNEVSPDFGDYPYNTVPNQVQRLFKAQQLHDRKHWDARRKMTPEQRKSTPYIDYMRPIIADGDTGHGGLTAVLKLAKLFAENGAAAVHFEDQMHGGKKCGHLAGKVLVPIGEHINRLVATRFQWDMMGVENLVIARTDSESGKLLSSAIDVRDHEFILGVTEESEPLAETLQAMEREGAAPSEIDAFELDWVKRHKLVTFDEAVDAHLEAEGAPQAARDAYKKRVKENPDLSITRRRELANDYTKTPVVWSCDIPRTREGFYHYRAGFPAATKRAKEFGPYADLLWVETGDPNVEKAAKLAGEVRAALPGKKLVYNLSPSFNWMGQGFDEASLKSFIWDLAQHGFVLQLISLAGLHSGATITAELSRAFKDEGMLAYVRLIQAREKELGVDVLTHQKWSGAPYMDGIVGAIQSGSSSSKSMGEGNTEKDSEWGTEIHER

SEQ ID NO: 46163 - protein, 446 aa, Glycine max
MVIINLGKKKSEREGMRLGKYELGRTLGEGNFGKVKFARNTDSGQAFAVKIIEKNKIVDLNITNQIKREIATLKLLRHPNVVRLYEVLASKTKIYMVLEYVNGGELFDIIASKGKLTEGECRKLFQQLIDGVSYCHTKGVFHRDLKLENVLVDNKGNIKVTDFGLSALPQHLREDGLLHTTCGSPYYVAPEVLANKGYDGATSDTWSCGVILYVSLTGYLPFDDRNLVVLYQKIFKGDAQIPKWLSPGAQNMIRRILDPNPETRITMAGIKEDPWFKKGYIPANPEDEDVHVDNEAFSSHEEPNEAEQRNSGSPTLINAFQLIGMSSCLDLSGFFEKEDVSERKIRFASILSVKDLIDRIEDTVTEMEFRVEKKNGKLKVMRENKVHKTLGCLSVVVEVFEISPSLYVVELRKSYGDGSVYKQLCKKLLNDLGVPPKQGLVRSAAN

SEQ ID NO: 46164 - protein, 272 aa, Listeria innocua Clip11262
MIDTSLATQFLGEVIGTAILIILGAGVVAGVSLKKSKAENGGWVVVTLAWGLGVTMGVYVSGYMSMAHLNPAVTIGMALAGAFPWNYVLPYIVAQFIGAFIGATLVWLHYYPHWKKTEDKPTKLGVFATAPAIRHFTSNFFGEALGTFMLVFGLLSLGANSFSDGLNPLVVGALIVAIGMSLGGTTGYAINPARDLGPRIAHFVWPISGKGGSDWGYSWVPVIGPIMGGALGALGYNAIINGELGMWFWVFAVLFVLILILTMQLDKKKDLA

SEQ ID NO: 46165 - protein, 341 aa, Glycine max
  misc_feature (157)..(157): Xaa can be any naturally occurring amino acid
  unsure (1)..(341): unsure at all Xaa locations
MEIITPVPATATTTAKNATAKSPEPDVETPTRIHQNPNLNPKPVSFSNGVLKRHHANHRPNAVVYKECLKNHVASLGGHALDGCGEFMPSPAATADDPSSIKCAACGCHRNFHRREPEETPISPATHHVLEYQPHHRHHPPPPAPSHRSPNSASPPXISSYPSAPHMLLALSGGGGFSVARENTGAPAPAHNHSRKRFRTKFTQEQKEKMHEFADKVGWKMQKRDDEMVMEFCNEIGVDRGVLKVWMHNNKNTFAKKDNLNGNSIGNVAIVSANGVAPIGAVGSATVRSSVHVHEHEHGGINGNGSGDNNHNPLGSRDVNEYENDSGTNGGGGTNGSSSSS

SEQ ID NO: 46166 - protein, 511 aa, Kluyveromyces lactis NRRL Y-1140
MGHPTNTADVRKDRVVTNSQGAPINEPFATQRVGQHGPLLLQDFNLLDSLAHFNRERIPERNPHAHGSGAFGYLEITDDITDVCGSAMFDTVGKRTRCLVRFSTVGGEKGSADTARDPRGFAIKFYSEEGNVDWVNNNTPVFFIRDPSKFPHFIHTQKRNPETNMKDADMFWDFLTTEENQVAIHQVMILFSDRGTPASYRNMNSYSGHTYKWSNKQGEWRYVQVHLKTDQGIKNLNNEEATKLAGENPDYCQKDLFENIAKGNYPSWTLYIQTMTEEEAEKLPFSVFDLTKVWPHKQFPLRRVGKMVLNENPENYFAQVEQAAFSPSHTVPYQEASADPVLQARLFSYPDAHRYRLGPNYSQIPVNCPYASKVFNPAIRDGPMNVNGNLGKEPNYLSTSKKYQFIQQSKPIQQHQEVWSGPAMPVHWATSPGDIDFVQARDLYNKVLSKQPGQQKALAHNVAVHVASACPEIQDRVFAMFARVDRGLSENIKKEALSLSPRKAAALNAKL

SEQ ID NO: 46167 - protein, 413 aa, Thermosynechococcus elongatus BP-1
MHPKQNLKDCSMAFHLPQVSCQLRPEVAALQPELVQWRRYLHQRPELGFQEHLTAAFVSEKLRQWGIQHRTGIAETGIVAVIPGSRPGPVLAIRADMDALPVQEENNKPYRSLHEGKMHACGHDGHTAIALGTAKYLATHRDFAGMVKIIFQPAEEGPGGAKPMIEAGVLDAPKVDGIIGLHLWNFLPVGTVGVRSGPLMAAAEFFECEVQGKGGHAALPHFTVDTVLVVAQIITALHTIVSRNVDPLETAVISVGAVHAGTAKNVIADTATFRGTVRYFKPELGDWLPQRIEQVIAGICQSQGATYRFHYERMYPPTVNDAKMAKLVRSVAESVVEVPAGVTSHCQTMAAEDMSFFLKAVPGCYFFLGSANGTLGLDFPHHHPRFDFDETVLSIGVELFIRCVEKYCGLVET

SEQ ID NO: 46168 - protein, 488 aa, Xylella fastidiosa Ann-1
MSERQRRTRILATLGPATDPPGVLDALFKAGVNVVRLNFSHGDVSDQARRVAEVRAAAAHVGVEIGILADLPGPKIRIGRFTGGKVRLVAGARFDLLADSNASLGDATQVGVSYLGLPQDVAAGDVLLLDDGLMQLQVVQVQGARIVTTVLNDGVLSDRKGLNKQGGGLSLGALTDRDRELIRIVARMGIDFIAVSFCRHAEEMHEARRIARECGCDAALVSKIERAEAIVNLAEIVAASDVVMVARGDLGVEIGDAQLPGLQKKIIKEALLQNKVVITATQMLQSMVESPMPTRAEVLDVANAVIDGTDAVMLSAETATGDYPVKAVEAMARICLGAEHQFEFDTDYEMAQRNLQRADHAIAMATMFLSEHICLGGVVALTESGTTPRFLSRFRSHVPIYAFTRHEDVRRRMVLMRGVFPMRFDSRGLTPREAARATIRLLVECGCMSPGDRVVFTSGEHMETLGATNTLRLLEVGADGCVSGLWEL

SEQ ID NO: 46169 - protein, 351 aa, Rhodotorula graminis
MPRPRVLLLGDPARHLDDLWSDFQQKFEVIPANLTTHDGFKQALREKRYGDFEAIIKLAVENGTESYPWNADLISHLPSSLKVFAAAGAGFDWLDLDALNERGVAFANSRGAGDTATSDLALYLILSVFRLASYSERAARTGDPETFNRVHLEIGKSAHNPRGHVLGAVGLGAIQKEIARKAVHGLGMKLVYYDVAPADAETEKALGAERVDSLEELARRSDCVSVSVPYMKLTHHLIDEAFFAAMKPGSRIVNTARGPVISQDALIAALKSGKLLSAGLDVHEFEPQVSKELIEMKHVTLTTHIGGVAIETFHEFERLTMTNIDRFLLQGKPLLTVRLCPNSLRPAFRAY

SEQ ID NO: 46170 - protein, 808 aa, Arabidopsis thaliana
MNFNGFLDDGAGASKLLSDAPYNNHFSFSAVDTMLGSAAIAPSQSLPFSSSGLSLGLQTNGEMSRNGEIMESNVSRKSSRGEDVESRSESDNAEAVSGDDLDTSDRPLKKKKRYHRHTPKQIQDLESVFKECAHPDEKQRLDLSRRLNLDPRQVKFWFQNRRTQMKTQIERHENALLRQENDKLRAENMSVREAMRNPMCGNCGGPAVIGEISMEEQHLRIENSRLKDELDRVCALTGKFLGRSNGSHHIPDSALVLGVGVGSGGCNVGGGFTLSSPLLPQASPRFEISNGTGSGLVATVNRQQPVSVSDFDQRSRYLDLALAAMDELVKMAQTREPLWVRSSDSGFEVLNQEEYDTSFSRCVGPKQDGFVSEASKEAGTVIINSLALVETLMDSERWAEMFPSMVSRTSTTEIISSGMGGRNGALHLMHAELQLLSPLVPVRQVSFLRFCKQHAEGVWAVVDVSIDSIREGSSSSCRRLPSGCLVQDMANGYSKVTWIEHTEYDENHIHRLYRPLLRCGLAFGAHRWMAALQRQCECLTILMSSTVSTSTNPSPINCNGRKSMLKLAKRMTDNFCGGVCASSLQKWSKLNVGNVDKDVRIMTRKSVNNPGEPPGIILNAATSVWMPVSPRRLFDFLGNERLRSEWDILSNGGPMKEMAHIAKGHDRSNSVSLLRASAINANQSSMLILQETSIDAAGAVVVYAPVDIPAMQAVMNGGDSAYVALLPSGFAILPNGQAGTQRCAAEERNSIGNGGCMEEGGSLLTVAFQILVNSLPTAKLTVESVETVNNLISCTVQKIKAALHCDST

SEQ ID NO: 46171 - protein, 593 aa, Neisseria meningitidis
MALVELKVPDIGGHENVDIIAVEVNVGDTIAVDDTLITLETDKATMDIPAEVAGVVKEVKVKVGDKISEGGLIVVVEAEGAATAPKAEAPATPAQEAPKAAAPAPQAAQFGGSADAEYDVVLGGGPGGYSAAFAAADEGLKVAIVERYKTLGGVCLNVGCIPSKALLHNAAVIDEVRHLAANGIKYPEPELDIDMLRAYKNGVVSRLTGGLAGMAKRRKVDVIQGDGQFLDPHHLEVSLTAGDAYEQAAPTGEKKIVAFKNCIIAAGSRVTKLPFIPEDPRIIDSSGALALKEVPGKLLIIGAGIIGLEMGTVYSTLGSRLDVVEMMDGLMQGADRDLVKVWQKQNEYRFDNIMVNTKTVAVEPKEDGVYVTFEGANAPKEPQRYDAVLVAAGRAPNGKLISAEKAGVAVTDRGFIEVDKQMRTNVPHIYAIVDIVGQPMLAHKAVHEGHVAAENCAGHKAYFDARVIPGVAYTSPEVAWVGETELSAKASGRKITKANFPWAASGRAIANGCDNGFTKLIFDAETGRIIGGGIVGPNGGDMIGEVCLAIEMGCDAADIGKTIHPHPTLGESIGMAAEVALGTCTDLPPQKKK

SEQ ID NO: 46172 - protein, 583 aa, Thermoanaerobacter tengcongensis MB4
MRRTKIVCTIGPASEDYNILRKLIEKGMNVARLNFSHGDFEEHGARIDNIKKIREELGLPVAILLDTKGPEIRTGKFKNGGVELKEGQTFTLTTRDVIGDETVVSVSYKGLPQDVSRGTQILIDDGLISLRVVDVKGEDIICVVENSGFLGDHKGVNVPGVKLNLPALTQKDIEDIEFGIKKGIDMIAASFVRKAADVLAIRRLLEDNKADHIQIIAKIENREGVENIDEIIRVSDGIMVARGDLGVEIPLEEIPIVQKMIIKKCNEAGKPVITATQMLDSMMRNPRPTRAEVTDVANAILDGTDAIMLSGETAQGKYPVEAFETMARIAEKTEVYVQYRDIVGVGTERNVSITNAISHATCTTARDIGASAIITCTKSGYTARMVSRYRPSSPIIATTPSEQVARKLSIVWGVYPLVTKEVSTTDEMIDVAIESALKAGLIRNGDIVVISAGIPVAMTGTTNMLKVHIVGDVILRGIGIGSKSTTGTVCIIHDIGKDRDKFREGDIIVTTKTERDFMPLIEKASAIITEEGGLTSHAAIVGLNLGIPVIVGCEGATSKLQDGMTVTVDTTRGLVYKGIVNIK

SEQ ID NO: 46173 - protein, 543 aa, Pseudomonas fluorescens Pf-5
MTRYIFVTGGVVSSLGKGIASASLAAILEARGLKVTMLKLDPYINVDPGTMSPFQHGEVFVTHDGAETDLDLGHYERFIRTTMTQNNNFTTGRVYEHVLRKERRGDYLGATIQVIPHITDEIKRRIIKGAGDADVALVEIGGTVGDIESQPFLEAIRQLRVEVGSKRAMLMHLTLVPYIATAGETKTKPTQHSVKELRSIGLQPDVLICRSDHPVDVSSRRKIALFTNVEERAVISLEDVDTIYKIPAVLHAQGLDDFVVERFGLQCNGADLSEWEKVVDAKLNPEHEVTIAMVGKYMELLDAYKSLIEAMSHAGITNRTKVNLRYIDSEDIENQGTALLEGVDAILVPGGFGLRGVEGKITAVQYARENKVPYLGICLGMQVAVIEFARNVMGWKDANSTEFDRTSGHPVVGLITEWEDATGAVEVRTEASDLGGTMRLGAQECLLEAGSKVHDCYAKDVIIERHRHRYEVNNKLLPQLIEAGLKISGRSGDGALVEVVEAQDHPWFVACQFHPEFTSTPRDGHPLFSGFVKAALAQHQKKA

SEQ ID NO: 46174 - protein, 128 aa, Salmonella enterica subsp. enterica serovar Typhi Ty2
MAYSEKVIDHYENPRNVGSFDNNDDNVGSGMVGAPACGDVMKLQIKVNDEGIIEDARFKTYGCGSAIASSSLVTEWVKGKSLDEAQAIKNTDIADELELPPVKIHCSILAEDAIKAAIADYKSKREAK

SEQ ID NO: 46175 - protein, 466 aa, Shigella flexneri 2a str. 2457T
MGQSSQPHELGGGLKSRHVTMLSIAGVIGASLFVGSSVAIAEADPAVLLAYLFAGLLVVMIMRMLAEMAVATPDTGSFSTYADKAIGRWAGYTIGWLYWWFWVLVIPLEANIAAMILHSWVPGIPIWLFSLVITLALTGSNLLSVKNYGEFEFWLALCKVIAILAFIFLGAVAISGFYPYAEVSGISRLWDSGGFMPNGFGAVLSAMLITMFSFMGAEIVTIAAAESDMPEKHIVRATNSVIWRISIFYLCSIFVVVALIPWNMPGLKAVGSYRSVLELLNIPHAKLIMDCVILLSVTSCLNSALYTASRMLYSLSRRGDAPAVMGKINRSKTPYVAVLLSTGAAFLTVVVNYYAPAKVFKFLIDSSGAIALLVYLVIAVSQLRMRKILRAEGSEIRLRMWLDPWLTWLVIGFITFVLVVMLFRPAQQLEVISTGLLAIGIICTVPIMARWKKLVLWQKTPVHNTR

SEQ ID NO: 46176 - protein, 292 aa, Triticum aestivum
  misc_feature (62)..(62): Xaa can be any naturally occurring amino acid
  misc_feature (66)..(66): Xaa can be any naturally occurring amino acid
  misc_feature (73)..(73): Xaa can be any naturally occurring amino acid
  misc_feature (82)..(82): Xaa can be any naturally occurring amino acid
  misc_feature (85)..(85): Xaa can be any naturally occurring amino acid
  unsure (1)..(292): unsure at all Xaa locations
SIFFREMASKQQHECEQVQDSDTLSMLTSMSARNTNTGSMFPFSKEHHNHNPFEVTSSRPDXRLVXSDSLMSXPHSSLENVXLLXSQGAFSSEQQRSFSLQNFGDGQRPFQKDSAPGGLSWPDAEDMQAHQRTQLSVSAAPMASPDLSSASTSPIHEKLMLSPLKLSREYSPIGLSIAATAAAAKDEGEANWMPMFRDSSMGGPLGEALNKNNGGNMEAKNYLSASLNLMTDAWDSSPLESSPVGVLQRTAFGSVSSSTGSSPRQEYHGVYDGNPRDDLGSIVVNHPSIRLM

SEQ ID NO: 46177 - protein, 767 aa, Glycine max
MVAVDSATLGFPRMGPNRELKFALERFWRNQISEDELFQVAHAVEEANWRKQIDAGVSRVGVGLFSLYDHVLDWTYYLGLAPERFAKVPMGLSQYFAMARGVDGIPALDMTKWFDSNYHYEVPELSAKSTPKANFSSYLSNMKRALAIVGTNKVVPIILGPLTYLALSKYDGATLDDLLVKILPIYTVLLNELAALGVTEVQVHEPSLVGTSADQLAKHLATVYGSKDQKGAIQHEKIALNLTTYFEEINHDVYQWFATSPVSAISLDFTRGDNLSVLQKFGFPAGKRLGAGLVDGRSVWKFNPDTILSQVTEIKKVLAVSDNTSLTIQTSSSLQHVPYTTDPEKTLNAGETDGLLDVLSFAYEKLAELEVVKKIAEFGEEAAKAEIDAAKKAWSVYYEKNPAKTAVQSRLAAVTEADFKRPSPFAERRPLQLKGLPVLPTTTIGSFPQTPQIRALRRKLKAGDITLDHYRGKIDEQIAYNIGIQEALGLDILVHGEPERTDMVEYFAEKLNGFAFTQSGWVQSYGSRCVRPPIIFADLERPVDMTVREFVVAQSFTTKPVKGMLTGPVTILNWSFPRKDISRKEQAFQLALCLRDEVADLEAAKCTVIQVDEPALREGMPLKSSKKDEYLNWAVDAFRLSTGVAKNETSIHTHMCYCEFADCMHAIDAIDADVNSIENARSDDETIREFKSIGYKRDLGPGTYDIHSPVVPPKEEIVKKLKSFLNLLPAEQVVVNPDCGLKTRKWPETIAALRNMVDATLEVRATL

SEQ ID NO: 46178 - protein, 688 aa, Cryptococcus neoformans var. neoformans JEC21
MAPRKNKEPASWEVDADKPKPDGETRVRRAYCVKDLVTQPAPGIDTVHDLLIYAAKTHGSKKGFASRDILKVITEEKEVTKRVGGKEHKETKKWNYFKLSPYNWMSYEGFLGKVKEIGAGLRVLAADDGRESEKFFNIYSQTSRNWMLVAQACAFNAVPISTAYDSLGPEGLKHAIQETEVHSMFTNADLLPTLLKVIGDTETVKVIVYDGEADPKIIEDLKNVREGMKVVTLDEVVEIGKKNPVEAIKAKREEVYCCMYTSGSTGTPKGVLLTHGNVVSAVASVWTLLYEYLTSKDSYLAFLPLAHILEFVVENSFIFAGLPVGYGRVKTLTDASVRECKGDIAEFKPSIMVGVPAVWELIRKGILTKVDQSGALKKSIFNFALKAKQAAHHYSIPFLAGLTDTIVFDAVRAQTGGNLKILFSGGGAVSKSTQQFLCTALVIMIQGYGLTETTAMATILNPAFMQFGAVGGPVPAAEVKLIDAPEAGYFSTNNPPQGEILVRGPAIFKGYYKRPDLDKEAFTEDGWFRTGDVGQWNKDGTLSIVDRLKNLVKLAGGEYIAIEYLESIYKSCPLVANGAILANGDHNQPAMVVVAHPHNLPAFAKKNGLGDGEDLEHLCTDDKVTDAALKELNNIGKKAGLKGMELLEAIVLVADEWTPESGFLTAAQKLQRRVIEKHYEDRIKAVYD

SEQ ID NO: 46179 - protein, 706 aa, Cryptococcus neoformans var. neoformans JEC21
MAPRKNKEPASWEVDADKPKPDGETRVRRAYCVKDLVTQPAPGIDTVHDLLIYAAKTHGSKKGFASRDILKVITEEKEVTKRVGGKEHKETKKWNYFKLSPYNWMSYEGFLGKVKEIGAGLRVLAADDGRESEKFFNIYSQTSRNWMLVAQACAFNAVPISTAYDSLGPEGLKHAIQETEVHSMFTNADLLPTLLKVIGDTETVKVIVYDGEADPKIIEDLKNVREGMKVVTLDEVVEIGKKNPVEAIKAKREEVYCCMYTSGSTGTPKGVLLTHGNVVSAVASVWTLLYEYLTSKDSYLAFLPLAHILEFVVENSFIFAGLPVGYGRVKTLTDASVRECKGDIAEFKPSIMVGVPAVWELIRKGILTKVDQSGALKKSIFNFALKAKQAAHHYSIPFLAGLTDTIVFDAVRAQTGGNLKILFSGGGAVSKSTQQFLCTALVIMIQGYGLTETTAMATILNPAFMQFGAVGGPVPAAEVKLIDAPEAGYFSTNNPPQGEILVRGPAIFKGYYKRPDLDKEAFTEDGWFRTGDVGQWNKDGTLSIVDRLKNLVKLAGGEYIAIEYLESIYKSCPLVANGAILANGDHNQPAMVVVAHPHNLPAFAKKNGLGDGEDLEHLCTDDKVTDAALKELNNIGKKAGLKGMELLEAIVLVADEWTPESGFLTAAQSKFYLFIFTARTMANNIAELQRRVIEKHYEDRIKAVYD

SEQ ID NO: 46180 - protein, 312 aa, Zea mays
MENPASVLVLPAQFTKLTFGNLYIRRAGPGSREITEEGRCDLDKRYVSDFPVYDGRGPDASLVARVQGITSEIGNAHQLFVVVFDTDRLKGSTLVTNGVITAGSDEWAIYGGTGVFAMARGVIRRRYLADRAGGNTDELNMDVFCRPFGSQSELQDKMQVQGQGSSVTKIGLWGGPGGSAQDITAERPPQRLHSVTVRAGVAVDSIEFTYTDSAWQRRAAGRWGGLGGNVRTIDLGDAEDVREVSGTYGAFEGATTLTSLRLVTSSRTWGPWGVENGTRFSVTAPIGSSIVGFYARAGTRLVDAIGVYLRQI

SEQ ID NO: 46181 - protein, 478 aa, Cryptococcus neoformans var. neoformans JEC21
MGFRFLELVRPFMSILPEVTAPEKKVVFNHKIAWTAVTLLIFLVCSQVPLYGIMSSDSSDPLYWLRAILASNRGTLMELGITPIVTSGMIMQLLAGAQLIDVDFSLKDDRALFGAAQKLFAMIISLGQATVYVLTGLYGSPSSLGAGVCLLLILQLVSASLIVILLDELLTKGYGLGSGISLFIATNICESIVWKAFSPNTVNTGRGPEFEGAIIALIHLLFTWNDKTRALKEAFYRDRLPNIMNLLATVAVFAAVIYLQGFRIEIPIKSSKMRGQRGTYPVKLFYTSNMPIMLQSALTSNVFLVSQMLAGRFPDNLLVRLLGVWEPMENNPTQLGAVSGIAYYMSAPHSLTSALKDPFHTVIYIAFIVTACALFSKTWIEVSGSGPRDVAKQLKDQNMTLAGHRDASIYKELKRIIPTAAAFGGATLGLLSVVADMMGALGSGTGILMATTIIYGYFELGIKENSGIDATGLGDLLF

SEQ ID NO: 46182 - protein, 472 aa, Xanthomonas oryzae pv. oryzae KACC10331
MHRHVHEPEILADPAAAQTAEHWRQRDLAVVWHPCTQMREHPHTLPLVPIARGEGAWLVGHDGRRYLDAVSSWWTNLFGHTEPRIGAAIARQAGELEQVMLAGFTHTPAVQLAEQLLEIAPRQAGRAPLSKVFYADNGSAGVEVALKMAFHSFHNRGEHRRTRFIALENGYHGETIGALSVGDIPLYRRVYAPLLLESMFTPSPDAYLAEPGQSAEDYALQAADALQALFEQSPGEICALILEPRVQCAGGMRMHHPAYLRRARALCDAHGAFLIADEIAVGFGRTGTLFACEQAGVMPDLLCLSKGLTGGFLPLSAVLATQQLYDAFLDDSRERAFLHSHSYTGNPLACAAALATLKIFADDDVIARNQPIAARMSELAAQIGEHPAVADVRQAGMIVAFELTRGGDKRTPFASAARVGLKAYRAALDKGVVLRPLGDVLYWMPPYCVDEAQLALLADTTRHAIAEAVACA

SEQ ID NO: 46183 - protein, 1431 aa, Anabaena variabilis ATCC 29413
MAALMRSRDWSQTSLGAVETWSQSLKTAVRIMLTCRQAMFVWWGNNLINLYNDAYRAILGGKHPEALGQRAAVVWQEIWDQVGPRAETALFQNQGTYDEALLLIMERNGYPEETYYTFSYSPVPNDDGGIGGIICANTEDTSRIIGERQLALLKDLAAKTADAQTFDEACIFSTKCLATNPYDLPFAMIYLVDPKQQCVTLAGTCGIERGHQAVPETVALEENSFWRFAEVLTTHKPYLISDLQLQFPDLPTGAWNRPPHQAAVVPIAPSGRMGKAGVLVAALNPFRLFDDNYQGFLNLVSAQIAASIGNAQAYEEERKRAEKLAELDRAKTTFFSNVSHEFRTPLTLMLSPLEELLTADDLSQEQRQEMTLIHRNGLRLLKLVNTLLDFSRIEAGRVQAVYEPTDLSTFTAELASIFRSAIEQAGLQFSVTCEPLPELVYVDRQMWEKIILNLLSNAFKFTFSGAIALTLRQVQHQVEITVTDTGIGIPQAELPHLFERFHRVEGARGRTQEGSGIGLALVQELVRLHGGQVQVDSLEGLGTTFTITVPMGIAHLPPERIQATRTLVSTALGAAPYIEEALSLLPAIKNSEASYLSPLTHNLSSSARILLVDDNADMREYVKRLLSRHYVVETATDGLAALEALADHLPDLVLTDVMMPRLDGFGLLSALRSNNRTREIPIILLSARAGEEAKVEGLEAGADDYLIKPFSARELLARVEATLKLAQLRRDAMEQQQTLRQEAETAKQNVETILSSINDGFYVLDRDWRFTYVNDRLCKIISMEREDILNHSIWDLFADTIGTDIDLQFQRAFNEQTSVQFEYLYVTWNRWYEHRVYPSPDGLTVFAADITERKQAELEREQLLALERHYINQLQGLTRAALAINSALSVEQVLQVITDQAASIIGSHQSVTSMTIGQNWSQAISAIFLSDKYTQWQNYDVKPDRSGIYGCVGHLNRPMRMTQAELEAHPQWRGFGKEAKNHPPLRGWLAAPLVGRNGQNIGLIQLSDKYDGEFTAADEAVLVQLAQMASVSVENVRLYEAEKQARSAAEASREEAEAANRIKDEFLAVLSHELRSPLNPILGWSRLLQNGKLDEAKAKQAVNIIERNAKLQVELIEDLLDISRILQGKLSLTSSPINLASVIKGAIETVRLAAEANSIRIEVNLDGEIGLVSGDSTRLQQVMWNLLSNAVKFTPTGGLVEIRLEQVGNQAQISVSDTGKGISPDFIPYVFDYFRQADSATTRKFGGLGLGLAIVRHLVELHGGTIHAESQGEGMGATFTLKLPLLPTQLTVNPDSPLLELSLGLHGIQVLVVDDDTDTREFVAFLLEQAGARVITAVSALEALQVFTQSPPDILLSDIGMPDMDGYMLMRQIRALPPDQGGKIPAIALTAYAGEIDEKRALKVGFQRHISKPVDPDNLIRAIVNLIDIKI

SEQ ID NO: 46184 - protein, 472 aa, Caulobacter crescentus CB15
MTNMRKLRALLPVFVLLTACSNPAGPSNAQSIPDMPQPTRQVPADAASMKQSFSPVVKKAAPAVVNVASRRLVQRRVDPFWDFFMGGGQGGSQVQSSLGSGAIVRADGVIITNHHNINGMSDITIQLADRREFPAVVLLDDPRADLAVLKIDTKGEKLPVMAIDDQEQLEVGDLVLAMGNPFGVGQTVTNGIVSALARTDVGAADFGSYIQTDAAINPGNSGGPLVDMDGDLVGINTFIISRSGSSSGVGFAIPARVVRQVVNAALGGGHSIVRPWLGVKGQAVTGDIAKSLGMTAPRGVLVAQIYPGSSAERAGLKEGDVILSIDGQPVNDEGGGAFAIGTHKVGDRVPMQIRRGDRELTITVRADAAPETPARDERTLSGNNPFNGATVMNLSPAVAQDLGVDPFAGRGALVTKIGPGYAGNWMRPGDFVRSVNGRQINTVADLASAIAGRSGRWSVTIERGGQLIQAQF

SEQ ID NO: 46185 - protein, 385 aa, Coriandrum sativum
MAMKLNALMTLQCPKRNMFTRIAPPQAGRVRSKVSMASTLHASPLVFDKLKAGRPEVDELFNSLEGWARDNILVHLKSVENSWQPQDYLPDPTSDAFEDQVKEMRERAKDIPDEYFVVLVGDMITEEALPTYMSMLNRCDGIKDDTGAQPTSWATWTRAWTAEENRHGDLLNKYLYLSGRVDMRMIEKTIQYLIGSGMDTKTENCPYMGFIYTSFQERATFISHANTAKLAQHYGDKNLAQVCGNIASDEKRHATAYTKIVEKLAEIDPDTTVIAFSDMMRKKIQMPAHAMYDGSDDMLFKHFTAVAQQIGVYSAWDYCDIIDFLVDKWNVAKMTGLSGEGRKAQEYVCSLAAKIRRVEEKVQGKEKKAVLPVAFSWIFNRQIII

SEQ ID NO: 46186 - protein, 429 aa, Listeria innocua Clip11262
MQNYIKSEKAFKEAKKVLPGGVNSPVRAFNSVDASPVFMDHGKGAYITDVDGNEYIDYVLSWGPLILGHADPSVVNAITNSAMKGTSFGTPTEIETELAKLVIERVPSIEIVRMVSSGTEATMSAIRLARGYTKREKILKFEGSYHGHGDSLLIKAGSGVATLGLPDSPGVTKGLAADTITVPYNDVEGAKLAFEKFGEEIAAVIVEPVAGNMGVVPPIDGFLEGLRELTTEYGALLIFDEVMTGFRVDYYSAQGYYVVTPDITCLGKVIGGGLPVGAYGGKKEIMEQIAPAGSIYQAGTLSGNPLAMNAGFETVRQLTPQHYDVFRSLIKRMEEGLTEISNRHEVPLSINKAGSMFGFFFTDQKVTNFDTAKTSDLEFFRNYYREMLAQGIFLPPSQFEGVFISTMHTEKEIDATLEAFDVTCKMLRG

SEQ ID NO: 46187 - protein, 66 aa, Coffea arabica
PRGLKKYETLSYLPDLTDEQLLKEIDYLIRSGWVPCLEFELEKGFVYREYHRSPGYYDGRYWTMWK

SEQ ID NO: 46188 - protein, 333 aa, Enterococcus faecalis V583
MANILTLGEIMLRLSTDIGVRLNETQQLICHYGGGEANVAISLANFGHQVSFASKVPDNSLGQAAVKHLRRNGVMSDFVQLGGARLGTYYMETGIGERAASVTYDRAGSSFAEVTEFPWSYEKLFSGIELFHISGITAALSVQWCQWTVELVKAAKKFGVLVSFDINYRGKLWSQAAAGKALKEILPYVDYCSAGELDARYLLEIPEDRMNSGFVYYYQQMQQQFPNIKCFYSTKRIVSSASNNQLVGTLWLENTYYESEVHKINPIVDRVGGGDAFAAGILHGLISDFDGQRTVEFATAASALKHTVHGDCNQFSEIEIEQFLTAGSGRIVR

SEQ ID NO: 46189 - protein, 240 aa, Listeria innocua Clip11262
MIKKIVLTREASKNKPWQDYFSQNGFDVESIPLIETDPKKISLSLNQKEADWLFLTSANAVEYFFNEQAGKLNYKIAVIGEKTKEKLAEYGYKPNFVPSVYQSEVFLSEWLSENTSQTSILLPQSNLSRTIIEDTLTQNGHLVFPIELYETSFPENSQTILIEQLQLDEKRIIIFASPSAWKNFYTIAKQFSIKNENWRIASIGNITTEAILADGWEVTYQPKTFTMKHLADLIIQEEFK

SEQ ID NO: 46190 - protein, 690 aa, Wolbachia endosymbiont of Drosophila ananassae
MNHSHLESMANAIRFLSIDAVQKANSGHPGMPLGMADVATVLFAKYLNHNPDDSKWFNRDRFVLSNGHGSMLLYSILYLTGYISIDELKNFRQMGSKTPGHPEFGLTSGVEATTGPLGQGFATAVGMALAESILKEQFGDSLINHYTYVMLGDGCLMEGISHEAASLAGHLKLNKLIALFDDNDISIDGATCLSCSDDVEKRFLAYGWNVDKIDGHDFDAISLAIEQAKKSDKPTMICCKTIIGKFSSRAGTSSVHSGAFSEEDIKQMREKLNWNYEPFHVPEDVKNAWKKTVERAKQNYTMSFQRVTRKEEKEWIPVSSTGMTRESTGMTEENAGMTGYHVELQRRLDKHLPDNIAGVLADLKKQICELMPNEATRSSFGKVMELLTKSMPELIGGSADLTGSNCTKYEHMQVIDSNNYSGSYVHYGVREHAMAACMNGMALHGAILPYGGTFLVFSDYCRPAIRLSALMKQQVMYVMTHDSIGVGEDGPTHQPIEHLASLRAIPNLYVFRPADAVETLECVSIALEKKESPALFALSRQNVSYMRKFYSDIDQSANLSKFGAYILCECSKELKVTIFATGSEVEIAVEAREKLQEKGIGTRIVSMPCWRLFDEQSDEYKAAILNNDSIKVAIEAGSEMGWHKYIGSNGIFIGMKSFGESAPYKTLYEHFNISADHVVKCVCEKLVYIQ

SEQ ID NO: 46191 - protein, 521 aa, ASPERGILLUS NIDULANS FGSC A4
MSRLHIHDIESLRASSAPLPLTVAPATSSEHFKSIHTRQRPVACRLDHHFSAESRDFNGADFKKGASPIGPRKIIPLGTGRPTADYYPWESFTFHGVSPASLASSTANDSGHSVYTVTKRDATYNLSLGMNYGHAAGSPHLLRFITEHIELVHNPPYQDWRTFLSCGATVALEVALRIFCNRGDWILTEQYTYSGTLETATLTCARVYGVEMDADGLRSDVLERTLASWDTSKGRKPRVLYTIPTGQNPTGYSQSLERRAAIYAIAVKHDLIIIEDDPYYFLRLGPYNEASTDAEEPTKISPDAFYSTGDPSYLSLDTSGRVVRLDSTSKILAPGLRAGWVTASSQIIDKFLAYQEVSTIAVSGSSQLMLWSLLDQGWGHTGFSSWLLHLSGEYRQRRNILLRACQQHLPRDIAEWVPPRYGMFLWIKVNWRRHPVIGKFETKATPEEVDSRLQGLEAQIVSDALSRGVLITKGSLFSWNKRPNGELHFRMTFAAAEKADLEEGVRLLGETLRGVFQTCLD

SEQ ID NO: 46192 - protein, 206 aa, Sorghum bicolor
LAEKAALAYAAEHGMELVTIITTLVVGPFLSTGMPPSMITALALVTGNEAHYSILKQVQFVHLDDLCDAHIFLFEHPAAAGRYVCSSCDTTIHDLAAMLRDRYPEYDIPERFPAGIEDDLQMVHMSAKKLQDLGFTFRYTRMEDMYDDAIRTCREKGLIPLAAAGRDDGSASVRAPGERDVTATAGGDVSAPVRAPGGETDVTIGA

SEQ ID NO: 46193 - protein, 52 aa, Shigella flexneri 2a str. 2457T
MGFWRIVITIILPPIGVLLGKGFGWAFIINILLTLLGYIPGLIHAFWVQTRD

SEQ ID NO: 46194 - protein, 473 aa, Triticum aestivum
MDVPLASKTFPSPSPSKREQCNVDGHKSSSKHADLNPHANDSVLGIILGGGAGTRLYPLTKKRAKPAVPLGANYRLIDIPVSNCLNSNISKIYVLTQFNSASLNRHLSRAYGSNIGGYKNEGFVEVLAAQQSPDNPDWFQGTADAVRQYLWLFEEHNVMEYLILAGDHLYRMDYEKFIQAHRETDADITVAALPMDEERATAFGLMKIDEEGRIIEFAEKPKGEQLKAMMVDTTILGLDDARAKEMPYIASMGIYVISKHVMLQLLREQFPGANDFGSEVIPGATSTGMRVQAYLYDGYWEDIGTIEAFYNANLGITKKPIPDFSFYDRSAPIYTQPRHLPPSKVLDADVTDSVIGEGCVIKNCKIHHSVVGLRSCISEGAIIEDTLLMGADYYETEADKKLLAEKGGIPIGIGKNSHIKRAIIDKNARIGDNVMIINVDNVQEAARETDGYFIKSGIVTVIKDALLPSGTVI

SEQ ID NO: 46195 - protein, 574 aa, Thermoanaerobacter tengcongensis MB4
MIKEAIFHKSDIPYAYPVNKDQLKIVLRTAVFDVDRVYILFKDRYDWLGKFKIKPMTLVHTNELFDYYETTLELNKRFLYFFYLVSETGEKLYYTEAGFFKKRPEDSFWGFFHYPYIREKDIFSPPDWANECIVYQIFPDRFNNGDRTNDPENVKPWGEKPTADSFFGGDLQGIIDKIDYLKELGINAIYLTPIFLSPSTHKYDTTDYYTIDPHFGDTEKAKELVRKCHDNGIKVIFDAVFNHCGYDFFAFQDVVKNGPKSKYWDWFNVYEWPIKTHPKPTYETFGENVWRMPKLMTKNPEVQKYLLEVAEYWIKEVDIDGWRLDVANEIDHHFWRKFREVVKNAKKDAIIVGEVWHDASPWLRGDQFDSVMNYPFRNAVVDFFAKRKISAVKFNTLITEQLMRHMDSVNRVMFNLIGSHDTERFLTLANGMVARMKLALVFQFTFVGVPYIYYGDEAGMVGGFDPDCRRCMIWEEEKQNKGLFEFYKKLIRIRKEHEELKYGNFTTLYAVGRVFAFRREYKGNSIVVIINNSSKEEVIFLEEAGGKEDILKMGELKRSGNLLYLKPNTAYILK

SEQ ID NO: 46196 - protein, 165 aa, Saccharomyces cerevisiae [sequence omitted]

SEQ ID NO: 46197 - protein, 338 aa, Paracoccidioides brasiliensis
MVVKVGINGFGRIGRIVFRNAVEHDDVEIVAVNDPFIETKYAAYMLKYDSTHGQFKGDIQHSSSNNLTVNNKTIHFYQERDPANIPWGKHGVDYVVESTGVFTTTEKAKAHLSGGAKKVIISAPSADAPMFVMGVNEKSYRPDISVLSNASCTTNCLAPLAKVIHDNFGIAEGLMTTIHSYTATQKTVDGPSHKDWRGGRTAAQNIIPSSTGAAKAVGKVIPALNGKLTGMAMRVPTANVSVVDLTCRTEKPVTYDQIKAAVKAASEGELKGILGYSEDALVSTDLNGDPRSSIFDASAGIALNDRFVKLISWYDNEWGYSRRVLDLIAYIAKVDAGK

SEQ ID NO: 46198 - protein, 557 aa, Bacteroides thetaiotaomicron VPI-5482
MIKENFIKLYENSFRENWDLPCYTDYGESVHYTYGQVAGEIARMHLLFKHCSLRRGDKIAVIGKNNAHWCIAYMATITYGAIIVPILQDFTPNDVHHIVNHSESVFLFTSDSIWESLEEEKLTGLRGVFSLTDFRCLYQRDGETIQKFLVHLNDEMYAAYPKGFTREDIQYTTLSNDKVMLLNYTSGTTGFSKGVMLTGNNLAGNVTFGIRTELLKKGDKVLSFLPLAHAYGCAFDFLTATAVGTHVTLLGKTPSPKIIMKAFEEVKPNLIITVPLVIEKIYKNVIQPLINKKGMKWALNIPLLDTQIYNQIRKKLIDALGGRFKEIIIGGAAMNQEVEEFFYKIKFPFTIGYGMTECGPLISYAPWNEFILGSSGKVLDIMEARIYKENPEAETGEIQVRGENVMVGYYKNPEATQEVFTEDGWLRTGDLGTMDASGNIFIRGRLKSMILSSSGQNIFPEELEAKLNNLPFILESLVIERNKKLVALVYADYEALDSLGLNNPDNLKTIMDENLKNLNNNVAAYEKVSKIQLYPTEFEKTPKRSIKRYLYNSIAVD

SEQ ID NO: 46199 - protein, 550 aa, Triticum aestivum
  misc_feature (512)..(512): Xaa can be any naturally occurring amino acid
  misc_feature (520)..(520): Xaa can be any naturally occurring amino acid
  unsure (1)..(550): unsure at all Xaa locations
MTTVASLSLVPHLLLKPSLRCLSRKGVGRYGGIKVYAVLRDDSADYLKDNHHWEALFHVDDPGPRVPIEKGQYLEAKQALDVVRFDIQYCDWRARQDLLTIMVLHNKVVEVLNPLARDFKSVGNLRKDLDGLQEELAKAHNQLYLSESRVSSALDKLAQMETVVNERLLSDGSAFANTADCASLDPSTSLDTTTSTSSTVRLGAKKPKRRSLNISGPVKPYSANLKNFWYPVAFSSDLKDDTMVPIDCFEEQWVIFRGKDKRPGCVQNTCAHRACPLDLGSVNEGRITCPYHGWEYSTDGKCEKMPSTKMLNVRIRALPCFEQEGMVWIWPGDDTPTPTIPSLLPPSGFTIHAEIVMELPVEHGLLLDNLLDLAHAPFTHTSTFAKGWSVPSFVKFLTPTSGLQGYWDPYPIDMEFRPPCMVLSTIGISKPGKLEGKSTQQCATHLHQLHVCLPSSTNKTRLLYRMSLDFAPWMKHMPFMHLLWSHFAEKVLNEDLRLVLGQQDRMNNGANXLELASVVXKLGIRYRLWRDAVERGVDRLPFSNEIESGS

SEQ ID NO: 46200 - protein, 311 aa, Pseudomonas fluorescens Pf-5
MDSMSNNEGATPPSVRTKSKSSASLKQHKYIDYTRALDATQLYLNEIGFSPLLSPEEEVHFARLSQSGDPAGRKRMIESNLRLVVKIARRYVNRGLSLLDLIEEGNLGLIRAVEKFDPERGFRFSTYATWWIRQTIERAIMNQTRTIRLPIHVVKELNVYLRAARELTQKLDHEPSPEEIANLLEKPVAEVKRMLGLNERVSSVDVSLGPDSDKTLLDTLTDDRPTDPCELLQDDDLSQSIDQWLSELTEKQREVVVRRFGLRGHESSTLEDVGLEIGLTRERVRQIQVEGLKRLREILEKNGLSSESLFQ

SEQ ID NO: 46201 - protein, 201 aa, Oryza sativa
MGRGRIEIKRIENTTSRQVTFCKRRNGLLKKAYELSVLCDAEVALIVFSSRGRLYEYSNNSSVKATIDRYKKAHACGSTSGAPLIEVNAQQYYQQESAKLRHQIQMLQNTNKHLVGDNVSNLSLKELKQLESRLEKGISKIRARKLDMKCFFPLNLFEAAAQVQAVAAQRQQIIPTELNLGYHHHLAIPGAAAADAPPPHF

SEQ ID NO: 46202 - protein, 402 aa, Amycolatopsis sp. HR167
MRDAVIVEAVRTPVAKGKPTGAYAAVHPVELHAHVLRSAVERVPGLDPSEVDDVIGGAVGQVGEQSGNTTRFAALAAGFPESVAGVTVDRQCGSSQQALSFAAQGIVAGAYDIVLASGVESMSHVPIGSSANVDGVRADVWGPSVEKRYPGGLIPQGVAAELIASKWNLSRTQLDEFAVTSHERAAAAWRDGHFAGQVAPLKVTAADGTVTQLDVDETIRPGTSLEVLAGLRPAFAHEHWTARFGEIDWKVTAGNSSPVNDGAAALVLTTSEIARQRGWRPRARIHTATVTGDDPIYMLTGIIPATAKVLARAGLSVSDIDAFEVNEAFSSVVLAWLAETGADPAKVNVDGGAIAIGHPLGASGARLATTLLGVLERTGGRFGLQTMCEAGGTANATIIERI

SEQ ID NO: 46203 - protein, 455 aa, Geobacter metallireducens GS-15
MNTSDTKTLREYDRAHVWHPFTQMKEWEESDPVVIVRGEGTWIVDSEGNRYLDGVAAIWTNVHGHCKREINEAIKAQVDTLEHSTLLGLANDKAVLLARRLVEIAPPGLCKVFYSDNGSTAVEISVKMAFQYWQHQGKPEKTKFISFKNAYHGDTIGAVSVGGIDLYHAVFRPLLFPTIQAPAPYCYRCEFGERDRANCGMRCLKELERLMEIHAHEVAGLVIEPLVQGAGGMIVQPDGFVRRVRELCDRYDILMIADEVAVGFGRTGAMFACEREGITPDIMALSKGITAGYLPLAATMTTQKIYDAFIGEYREMKTFFHGHTFTGNPIACAAALASLDLFENERLLDSLTNKIGYLAERLQALNEVRHVGEVRQCGMIAGIELVKDAETREPFPWEERVGIQVCLEARNRGIFLRPLGNIIVVFPPLSISLDELAFLMDGIEASIRAITELRT

SEQ ID NO: 46204 - protein, 524 aa, Thermoanaerobacter tengcongensis MB4
MRKNLKAFVALFAAILLFFSGCSSKQEAKAPKSEVIYQVMVDRFYNGDPSNDDPEVSKGMFDPTHTNWRMYWGGDLKGLTEKIPYIKGMGVTAIWISPVVDNINKPAVYNGEINAPYHGYWARDFKRVEEHFGTWEDFDNFVKVAHENGIKVILDFAPNHTSPADEENPDFAENGALYDDGKLLGTYSNDSLKLFHHNGSISNWNNLKELQDKNLFDLADLDQSNPIVDKYLKDSIKLWFNHEIDGVRLDAAKHMPMEWVKSFANTIYSIKKDVLLFGEWMLSGPTDPLYGYNIQFANTTGFSVLDFMLNGAIRDVFGKGYGFERLNDTLEDTNKDYENPYKLVAFIDNHDMPRFLSLNNDKDKLHEAIAFVMTTRGIPVIYYGTEQYLHNDTNGGNDPYNRPMMEKFDESTKAYTLIKELSRLRQLTPALQYGTTTARYISDDVYIYERQYGKDVVLVAINKGEKTTVKAVKTSLRKGIYKDYLKGLLEGVELKVTKGNGENLVQGLTLPGDSVSVWTNVKAK

SEQ ID NO: 46205 - protein, 373 aa, Colwellia psychrerythraea 34H
MTFKSFNPPQRILMGPGPSDVSARVLSALARPTIGHLDPLFISMMDEVKTLLQYAFQTKNEFTIALSAPGSAGMEACFVNLVEAGDKVIVCRNGVFGDRMIQNVTRIGAEAVVVDSPWGRAVETHKVKAALHDHPDAKFLAFVHAETSTGALSDAKALCKMAQEHDCLTIVDAVTSLGGVELKVDEWGIDAIYSGTQKCMSCVPGISPLSFSPKAVAVVQNRKTQIQSWFLDQTLVMGYWSGEGKRSYHHTAPVNSLYALHEALVMLHDEGLENSWARHKEQHEVLAKGLKELGIEFIVPEEERLPQLNAIYIPDGADDAKIRDYLLEHYNLEIGAGLGAFAGKAWRIGLMGHAAKSENVALCLSALKDALHQ

SEQ ID NO: 46206 - protein, 456 aa, Bordetella bronchiseptica RB50
MTTLSSAQQQDIQYQLHSYTNAVKHRDVGPRIITHGEGVYVFDDQGNRYLEGMAGLWSVAVGFGEQRLVEAAARQFQELPYYHTFTHKSHPSVIALAERLIGYTDGRMAQAFFTNSGSEANDTVVKLVWYYNNALGRRDKKKIIARQRGYHGVTVASASLTGLPGNHKDFDLPLPQIRHTACPHYYRYGLPGETEEDFATRMAGELEAMILREGPDTVAAFIGEPVMGAGGVIVPPRTYWQKIQAVCRKYDILVIADEVITGFGRLGQRFGSQVFDIEPDIMVLSKQITSSYQPLGAVLLNARVADVVAEHSGRLGTFGHGYTASGHPVATAVALENLRLIDERGLIEHAAEMGALLHLELQALSSHPLVGEVRGVGLIAGVELVADKATRQPFDPLGKAGGYAYERAHDHGLIVRGIQDTVAFCPPLIITAEQVRDMVARFARTLDDVAAHVAQG

SEQ ID NO: 46207 - protein, 648 aa, Zea mays
  misc_feature (122)..(122): Xaa can be any naturally occurring amino acid
  misc_feature (364)..(364): Xaa can be any naturally occurring amino acid
  misc_feature (523)..(523): Xaa can be any naturally occurring amino acid
  unsure (1)..(648): unsure at all Xaa locations
MAGLPPQPQHVHALPLLLLVVLPCLIPCLRATTEMAPTAATAGASDEGASALLGLLQRVQSEALRTLGPHDFDPKFYVDLPLATDERAAAAALAALPRPSPSRAELDDFLSRYFGDPGCPIXVADVPPDFEPEPRGFLPHVHSPEARAWALEVHALWKRLARRVAPDVAARPDRHTLMPLPGRAVVPGSRFREVYYWDSYWVIRGLLVSKMYDTAKTIVLNLVYLLEKYGFVPNGARSYYTNRSQPPLLSSMVLEIYRATGDVEFVRTVFHSLLKEHSFWMSEIHNVAIADNHGRVHNLSRYQARWNKPRPESATIDEELASKLNSMAAKEKLYCEIASTAESGWDFSSRWMRFGCLLSLKRNXRANSSAAFALVKTSTAIEDTKLPDHYEFIFAPCTTHRLFLTTFTVLFRNSTDMTTLATTYIIPVDLNTFLFKMELDIGALAKVVGDNATSEFFLNASKARHIAIDSILWNSEMEQWLDYWLPGDADCQEVHEWKPNSQNRNIFASNFVPLWLNAYHSEXRVMASLKASGLLHAAGIATSLTNTSQQWDFPNGWAPLQHLIAEGLLHSGSEAKKLAEDIATRWVRTNYAAYKATGAMHEKYDVEACGESGGGGEYKPQTGFGWSNGVVLSFLEEFGWPEGKEIAC

SEQ ID NO: 46208 - protein, 582 aa, Candida glabrata CBS138
MSSIVNKSGVRFAPKARQRRTAAAPPVSSSAKTLATLSSGESSKTNSNVASDNEKSTEEETLHADDPHAVPKNLQVPELGDSSHTLVQDSHDPLNTSTQLHPKNVSRRPSIIAGQVPSIGNHNQRRSSRLDSLSGNSNRVLLKSPFGTGNESQTERRLSTISNDSLNRRMRMNSITAENDPTLQAIKKRRLSSRGSIAKKGGSTHRISIVTKIEPPKEKSASPSDHDIYKKQEKAENDENDEDKKFTIKSLKQLPNKVDDESSSKYQIDEEHFTMAELCKPHLPIGEISENFEKAQEASREKMKRRRERKELREKAKKEFKSIYSLNKEQIEQEREARTKKQQELQAQEESYDSQPAAPSSLQVKLVDGRIELDSESTYIDRHDQARKDNMYKERKYGNPFENLYNSATYGKNNFTDPWTADELVKFYKALSMWGTDFNLIAQMFPYRTRKQVKSKFINEEKKHPIMIELALRSKLPPNFDEYCSDIKKELGTVDEFNKKVEELQKEHEQHFKEIEQAKAKAALEDSEIERKKMENQRSNKKSSGGFMTDDLKVYRKQEVVLGTIDEMKMKRVSKQEDEEEI

SEQ ID NO: 46209 - protein, 127 aa, Triticum aestivum
WIPRAAGIRHQGCFLRECKIEHSIIGVRSRLNSGSELKNAMMMGADSYETEDEISRLMSEGKVPIGVGENTKISNCIIDMNARIGRDVVISNKEGVQEADRPEEGYYIRSGIVVIQKNATIKDGTVV

SEQ ID NO: 46210 - protein, 296 aa, Saccharomyces cerevisiae
MITTPLVHVASVEKGRSYEDFQKVYNAIALKLREDDEYDNYIGYGPVLVRLAWHISGTWDKHDNTGGSYGGTYRFKKEFNDPSNAGLQNGFKFLEPIHKEFPWISSGDLFSLGGVTAVQEMQGPKIPWRCGRVDTPEDTTPDNGRLPDADKDAGYVRTFFQRLNMNDREVVALMGAHALGKTHLKNSGYEGPWGAANNVFTNEFYLNLLNEDWKLEKNDANNEQWDSKSGYMMLPTNYSLIQDPKYLSIVKEYANDQDKFFKDFSKAFEKLLENGITFPKDAPSPFIFKTLEEQGL

SEQ ID NO: 46211 - protein, 254 aa, Photobacterium profundum SS9
MLIGTLMLWGRLVDGLYSPWDKDDAVARKVCETLGDDSYRAPIVLEGGSIHVDGEGTLYTTEECLLHPSRNPDLTREEIEDVLKVTLSIEKVIWIPQGLYNDETNGHVDNLIHVVRPGEIALTWCDDETDPQYLISRKAMDVLLTETDAKGRQIKIHKLPMPGPLYISEDEANGVDVSEGMERVPGERLAGSYANYLISNEHIIYPLLDEKHDKDVAMLLAKLYPNYEVTGVNAREILLGGGNIHCITQQIPKV

SEQ ID NO: 46212 - protein, 185 aa, Zea mays
RRPQVKYAGAPPAAFFPMVLNVVRRAEQMLIQNESRVKEYLPITGLADFNKLSAKLIFGADSPAIQENRVATVQCLSGTGSLRVGGEFLARHYHERTIYIPQPTWGNHPKVFTLAGLTARSYRYYDPATCGLDFQGLLEDLSSAPSGAIVLLHACAHNPTGVDPTLEQWEQIRQLMRSKALLPFF

SEQ ID NO: 46213 - protein, 206 aa, Sorghum bicolor
LAEKAALAYAAEHGMELVTIITTLVVGPFLSTGMPPSMITALALVTGNEAHYSILKQVQFVHLDDLCDAHIFLFEHPAAAGRYVCSSCDTTIHDLAAMLRDRYPEYDIPERFPAGIEDDLQMVHMSAKKLQDLGFTFRYTRMEDMYDDAIRTCREKGLIPLAAAGRDDGSASVRAPGERDVKATAGGDVSAPVRAPGGETDVTIGA

SEQ ID NO: 46214 - protein, 504 aa, Zea mays
MRKPAALVVSTAVFAAAAVAAVMARQRLREARRWARAGAVLRDLQERCAAPVERLRQVADAMVAEMRAGLASNDSEGDSGSSVLLKMLVTYVDSLPSGDEKGLFYALDLGGTNFRVLRIQFGGKEQRIVKQESKTVSIPQHLMSRGSNELFDFIAAALAKFIASEGEGFYLPEGMQRQLGFTFSFPVKQNSVASGTLIKWTKGFAIDEMVGKDVVAELNKAIKRQGVDMEVTVLVNDTVGTLAAGRYVDNDTVAAVILGTGTNAAYIEHMDSIPKWCGPPPESGNMVINMEWGNFRSTHLPLTEFDVALDAESLNPDEQIYEKLISGMYMGEIVRRVLLKMAQDASLFSDNVPLELEVPYILRTYHVLMMHQDTSPDLRTVGNKLKEVFRIEDTCFKTRKLVVDVCEVVASRAARLAAAGIHGILKKLGRDVASPDKQKTVIAVDGGVYKHYTFFAQCMESTLRDLLGEGVASSLVIKLAEDGSGTGAALLSASYSQRLQAVDD

SEQ ID NO: 46215 - protein, 203 aa, Zea mays
  misc_feature (151)..(151): Xaa can be any naturally occurring amino acid
  unsure (1)..(203): unsure at all Xaa locations
MAAIASASPRTLIPPRPRHHGAAPSPSTSDVSSLRLLRAHPRHVRRSRGVSISMPVARSRSFVFSPRAVADSKSSQTCLDPDASTSVLGIILGGGAGTRLYPLTKKRAKPAVPLGANYRLIDIPVSNCLNSNISKIYVLTQFNSASLNRHXSRAYGSNIGGYKNEGFVEVLAAQQSPDNPNWFQGTADAVRQYLWLFEEHNVM

SEQ ID NO: 46216 - protein, 206 aa, Glycine max
MDKKQQCKTSQDPEVRKGPWTMEEDLILMNYIANHGEGVWNSLAKAAGLKRNGKSCRLRWLNYLRPDVRRGNITPEEQLLIMELHAKWGNRWSKIAKHLPGRTDNEIKNYWRTRIQKHIKQAENFQQQSSNNSEINDHQASTSHVSTMAEPMEMYSPPCYQGMLEPFSTQFPTINPDQSSCCTNDNNNINYWSMEDSWSMQLLNGD

SEQ ID NO: 46217 - protein, 158 aa, Kluyveromyces lactis NRRL Y-1140
MPIDQEKLAKLQKLSANNKVGGTRRKFAKKSGSSSKDDSKLQDQLQKLRAVTVDNVQQANFFKDDGTVLHFNKVGVQVAPQHNTSVFYGIPQEKSLQELFPDIIPQMGADAINALTQMASQLQSAQGANQQAAAPEAEGKDIDIPELVEGQTFEADVE

SEQ ID NO: 46218 - protein, 209 aa, Nicotiana tabacum
MGSSSGSDVEAGFAKLQGEDFEYYMQTYSIILGRNSKKSTVDVDLSSLGGGMNISRHHARIFYDFQRRRFNLEVLGKNGCFVEGVLHLPGNPPIKLDSQDLLQIGDKEFYFLLPVRSILGGGPPIGPKQNVNYPVAAHYGGIGKKGGLFRGREREYYDEEEYDDDDDDDDGTGGKKMRRCDGAEGGGGYGGYGSCGSSGKASISGQLGQ

SEQ ID NO: 46219 - protein, 143 aa, Salmonella enterica subsp. enterica serovar Typhi Ty2
MAIERTFSIIKPNAVAKNVIGSIFARFEAAGFKIVGTKMLHLTVEQARGFYAEHDGKPFFDGLVEFMTSGPIVVSVLESENAVQRHRDLLGATNPANALAGTLRADYADSLTENGTHGSDSLESAQREIAFFFGEGEVCPRTR

SEQ ID NO: 46220 - protein, 317 aa, Pichia guilliermondii
MSIKLNSGYDMPSVGFGCWKVDNATCADTIYNAIKVGYRLFDGAEDYGNEKEVGDGINRALDEGLVARDELFVVSKLWNSFHDPKNVEKALDKTLSDLKVDYLDLFLIHFPIAFKFVPFEEKYPPGFYCGDGDKFHYEDVPLIDTWRALEKLVEKGKIRSIGISNFSGALIQDLLRSAKIKPAVLQIEHHPYLQQPRLVEYVQSQGIAITAYSSFGPQSFVELDHPRVKDVKPLFEHDVIKSVAGKVKKTPAQVLLRWATQRGLAVIPKSNNPDRLLSNLKVNDFDLSQEDFQEISKLDIELRFNNPWDWDKIPTFI

SEQ ID NO: 46221 - protein, 609 aa, Arabidopsis thaliana
MIPSYDPNDTEAGLKLLEDLTTNAEAIQQQVLHQILSQNSGTQYLRAFLDGEADKNQQSFKNKVPVVNYDDVKPFIQRIADGESSDIVSAQPITELLTSSGTSAGKPKLMPSTAEELERKTFFYSMLVPIMNKYVDGLDEGKGMYLLFIKPEIKTPSGLMARPVLTSYYKSQHFRNRPFNKYNVYTSPDQTILCQDSKQSMYCQLLCGLVQRSHVLRVGAVFASAFLRAVKFLEDHYKELCADIRTGTVTSWITDSSCRDSVLSILNGPNQELADEIESECAEKSWEGILRRIWPKAKYVEVIVTGSMAQYIPTLEFYSGGLPLVSTMYASSECYFGINLNPLCDPADVSYTLLPNMAYFEFLPVDDKSHEEIHFATHSNTDDDDDALKEDLIVNLVNVEVGQYYEIVITTFTGLYRYRVGDILKVTGFHNKAPQFRFVQRRNVVLSIDTDKTSEEDLLNAVTQAKLNHLQHPSSLLLTEYTSYADTSSIPGHYVLFWELKPRHSNDPPKLDDKTMEDCCSEVEDCLDYVYRRCRNRDKSIGPLEIRVVSLGTFDSLMDFCVSQGSSLNQYKTPRCVKSGGALEILDSRVIGRFFSKRVPQWEPLGLDS

SEQ ID NO: 46222 - protein, 563 aa, Geobacillus stearothermophilus
MNKQPWWKKAVVYQIYPKSFNDTNGDGIGDLQGIIEKLDYLKTLGVDVIWLTPIYQSPQRDNGYDISDYFQIHHEYGTMEDFERLVSEVHRRDMKIIMDMVVNHTSTDHEWFRQARSSKDNPYRDFYIWKDGKADGSAPTNWESKFGGSAWEYDEQTGQYYLHLFDVTQADLNWENEALRRRVYEMMHFWFQKGIDGFRLDVINLLSKDQRILDDDGSVPPGDGREFYTDGPRIHEFLQEMNREVFSKYDIMTVGEMSSTTIDHCIKYTNPERKELNMTFNFHHLKVDYPNGEKWAVADFDFLALKRILSTWQVEMHKGGGWNALFWCNHDQPRIVSRYGDDGKYHKESAKMLATVIHMMQGTPYIYQGEEIGMTDPKFERIEDYRDVESLNMYKILQEKGKSKEEVLDILKRKSRDNSRTPMQWDDSEHAGFTTGTPWIRVASNYKDINVKNALADPTSIFYHYQRLIQLRKQYDIITTGDYQLLLEDHPDIFAYIRNGKNEKLLVVNNFYGKETTFILPSEVDVSGYTSQILLSNYEDSPEQFKTIVLRPYEAIVYYLTKS

SEQ ID NO: 46223 - protein, 229 aa, Nannochloris bacillaris
MAQSFRISSMRCSVSGVHQPAFSGAQTVRTSVKKQPLLNVSPARRLQTQRSVPAHAEAETAPAPATEGWWTVDLPANFVHVESVQELVDELGEGARLDQLVVVDFFAPWCRACKALFPKFKKLCIENPNVRFVGINFEENKGLARSLGVKVLPFFHFYRGAEGRVGAFSASVSKVQLLRDAIADFSSERCFLEEVPEAPLPEFPSILPGGSLGGKNVAIPSGKDAELVA

SEQ ID NO: 46224 - protein, 128 aa, Yersinia pestis KIM
MAYSEKVIDHYENPRNVGSFDSQDPTIGSGMVGAPACGDVMKLQIKVNEAGIIEDARFKTYGCGSAIASSSLVTEWMKGKSLDQAEAIKNTQIAEELELPPVKIHCSILAEDAIKAAIADYKSKHTAK

SEQ ID NO: 46225 - protein, 558 aa, Thermoanaerobacter tengcongensis MB4
MQHLRRYREIIFVFIKYGFGAIIDNIGILKHINVRRKILKQTNDENIAKLSRGERLRLALEELGPTFIKMGQILSTRSDILPKDIIKELEKLQDKAPAFSFDEVKSVIQNEFGESLEEAYAEFEPTPLAAASIAQVHKALLWSGKTVVVKVQRPGIEKIIAQDMRILEDIAKFVDNHTKYGKIYNFTKMVEDFKKRLEEELDFRIEGENAEKFKKNFLKDKKVKIPSIIWTHTTRRVLTMEYIGGIPLNDFNAIDEAGLDRGAIARNLAKSVLNQILRDGFFHGDPHPGNIMVLEDGTIAFLDFGMVGSLSPERKRQFSKMLLGIVYKNSRMIIESIIDLNAVTLNVNMKKLEKDINNLRDRYVEIPLEKLKVGEVLNGIFDLVFSYNIVIPNEFNMLAKSLITLEGIVEKLDPKISVLEVAKPIAKQLIPKMFSTQHMKEEIINATMDYSRLIKELPSFLLNFLRKTEEENYAIELKIRDLENLEKRVDKVFNRLSTSIILLALSIVIAGILIGSGMSANAGAEMYKLNGIILKIGLAIAFVIVLGLAISIFRSGRL

SEQ ID NO: 46226 - protein, 332 aa, Zea mays
THDGRTLADYNIQKLSTLHLVLRLRGGMQIFVKTLTGKTITLEVESSDTIDNVKAKIQDKEGIPPDQQRLIFAGKQLEDGRTLADYNIQKESTLHLVLRLRGGMQIFVKTLTGKTITLEVESSDTIDNVKAKIQDKEGIPPDQQRLIFAGKQLEDGRTLADYNIQKESTLHLVLRLRGGMQIFVKTLTGKTITLEVESSDTIDNVKAKIQDKEGIPPDQQRLIFAGKQLEDGRTLADYNIQKESTLHLVLRLRGGMQIFVKTLTGKTITLEVESSDTIDNVKAKIQDKEGIPPDQQRLIFAGKQLEDGRTLADYNIQKESTLHLVLRLRGGQ

SEQ ID NO: 46227 - protein, 461 aa, Vibrio vulnificus YJ016
MDIYRRRFLQTSLAFSALTLLPACSLSRRTSLHHGRFVYEMTAEPATAEVVPGFATDVLAFNGAIPAPTIRCRQGEEVIIHFTNKLNEPTTIHWHGLRVPIEMDGVPFLSQKPVMPGESFTYRFTPPDAGTFWYHPHMNSVKQLGMGLVGLIIVDEAEPVSFDEDHALMLKHWHLNEKGEWKSLLVPRLSARMGTPGEWGTVNGVHEPSYPLKANAMTRLRIANVDNTITYPIAIEGVDAWVIAIDGNPIKTPYKLSEHKIGPGMRVDLGLIAPAVGERFYVRQMKGKFPFPLCAFESVESDLLNQNILPTLPLNPIAPLDLDMAEQIDFVFEWEGAVTPIDKSGQALPTFWLVNKRAWEGMSQDSIPAPLATLERGQTYIFNLKNVTQYHHPIHLHGHTFTVLELNGQTLAEPFHTDTVLLGKNGSAKAAFVADNPGRWMYHCHVIEHMKTGLMGYIEVK

SEQ ID NO: 46228 - protein, 225 aa, Zea mays
MTVMELKALPLGFRFHPTDEELVRHYLKGKITGQIKNEVEVIPEIDVCKCEPWDLPDKALIRSEDPEWFFFAPKDRKYPNGSRSNRATEAGYWKATGKDRVIKSKGEKKKQHMIGMKKTLVFHRGRAPKGERTGWIMHEYRTTEPEFESGEQGGYVLYRLFQKQLEKTERSIPEEMDRSGYSPTPSRSTPDNMEANEEAITLINKESPESGLHGCPIELPGTIDT

SEQ ID NO: 46229 - protein, 506 aa, Crambe abyssinica
MTSINVKLLYHYVITNLFNLCFFPLTAIVAGKASRLTIDDLHHLYYSYLQHNVITIAPLFAFTVFGSILYIVTRPKPVYLVEYSCYLPPTQCRSSISKVMDIFYQVRKADPFRNGTCDDSSWLDFLRKIQERSGLGDETHGPEGLLQVPPRKTFAAAREETEQVIVGALKNLFENTKVNPKDIGILVVNSSMFNPTPSLSAMVVNTFKLRSNVRSFNLGGMGCSAGVIAIDLAKDLLHVHKNTYALVVSTENITYNIYAGDNRSMMVSNCLFRVGGAAILLSNKPRDRRRSKYELVHTVRTHTGADDKSFRCVQQGDDENGKTGVSLSKDITEVAGRTVKKNIATLGPLILPLSEKLLFFVTFMAKKLFKDKVKHYYVPDFKLAIDHFCIHAGGRAVIDVLEKNLGLAPIDVEASRSTLHRFGNTSSSSIWYELAYIEAKGRMKKGNKVWQIALGSGFKCNSAVWVALSNVKASTNSPWEHCIDRYPVKIDSDSAKSETRAQNGRS

SEQ ID NO: 46230 - protein, 334 aa, Triticum aestivum
NKFVQKSRLGDVKPENLLLTSDGHIKIADFGSVKPTVDTPIKVLPNSTNERACTFVGTAAYVPPEVLNSAPATFGNDLWALGCTLFQMLSGSSPFKDASEWLIFQRIIARDLRFPEFFSDEARDLIDKLLDVDPTKRPGAGPDGYASLKKHPFFRGIDWKNIRKTRAPKPAVEANANEDEDNQDSDWLSHMGSAHANQNVPVGNNGAASSSEVRSHVSRLASIDSFDSRWQDFLEPDESVVLISKLKKINKLSNKKVQLILTNKPQLICVDPAKMVTKGNISWSANPSELNVQVGNSSHFRICTPKKVFVFEDAKQRAWQWKNAIEDLQNCQKI

SEQ ID NO: 46231 - protein, 247 aa, Pseudomonas syringae pv. syringae B728a
MTTPTFLSVVIPAKNEADNLPSLIKEICTALDGERYEILVVDDGSTDDTLKVLTHLKDSGLTVLRILRHERSLGQSTSVYHAALAANGTWLATLDGDGQNDPADIPGMLALVRAHATGSEAIQLVAGHRVNRRDTASKRWASRFANGLRSRLLKDATPDTGCGLKLIERAAFLRLPYFDHMHRFIPALIQRHNGRMVTHPVNHRHRQAGVSKYGNLDRALVGILDLVGVWWLIRRTRLDVQAQELRP

SEQ ID NO: 46232 - protein, 373 aa, Listeria innocua Clip11262
MTLSKGLENVYVAETSISSIIDDMLTYVGYGIDDLMENNASFEEVIYLLWHLRLPNKEEFKKFKLEIQENMAVSETIITSLRMQNHQKLHPMSVLRTTVSMLGVFDTEAELDDGEAVYRKGLRLQAKMPTIVAAFSRIRRGLDPIPPREDLNMAANFLYMITGEEADELSVEAMNKALVLHADHEFNASTFTARVCVATLSDVYSGVTSAIGALKGPLHGGANERVFDMLEEIDAAGDVRNYIQEKIDTKQKIMGFGHRVYRGGDPRAKHLREMSRKLTAEKGEEKWFDISLQVEEAVWELKHLKPNVDFYSASVYHALGIDRDLFTLVFSVSRVSGWLAHIFEQYRDNRLIRPRAIYVGPENRSYLPVEERI

SEQ ID NO: 46233 - protein, 585 aa, Listeria innocua Clip11262
MKKTKIVCTIGPASESVDTLVQLIEAGMNVARLNFSHGDFEEHGARIVNIREASKKTGKQVAILLDTKGPEIRTNDMVGGKLEFQTGDVVRVSMTPVEGTKEKFSVTYGELYDDVEIGSSILLDDGLIGLEVIEKDEANRELVTKVLNPGVLKNKKGVNVPNVSINLPGITEKDAADIRFGLEQGIDFIAASFVRRATDVLEITKILEEHNATHVQIIPKIENQEGVDNIDEILQVSQGLMVARGDLGVEIPAEEVPIVQKELIRKCNKLGKPVITATQMLDSMQRNPRPTRAEASDVANAIFDGTDAIMLSGETAAGDYPVEAVKMMAKIAVRTEEVLVAQDKFALKLHENTDMTEAIGQAVGHTAKNLNVQTIVAATQSGHTARMISKYRPKSHIVAVTFNEHVYRGLALSWGVYPRLATPVSNTDEMFDLAVKESLASGVAKQGDLIIITAGVPVTESGTTNVMKIQLIGEKVVKGQGIGSKSVIGKAVVAKSNAEALQKAEEGGILIVKTTDKEILPAFEKSAAVVVEEGGLTSHAAVVGINLGIPVIVGAKDATSLVKDGEIITVDSRQGVVYNGKTATH

SEQ ID NO: 46234 - protein, 317 aa, Zea mays
MASLTMPPMPAWPRQDAIDLHKAFRGFGCDSTTVTNILAHRDATQRALIQQEYRAVFNQDLARRIASELSGHHKRAMLLWILDPATRDATILKQALTGDITNLRAATEIVCSRTPSQLQIMRQTYRARFGCYVEHDVTERTSGDHQRLLLAYLAIPRAEGHEVDPSTVTLDARDLYKAGERRLGTDERAFIRIFSQRSWAHMAAVARAYHHMYDRPLERAVKSETSGNFGFGLLTVLRCADSPARYFAKELHRAMKGLGTSDSVLIRVVVTRAEIDMQYIKAEYHSMYKRSLADAIHAETSGNYRTFLLSLVGRDRT

SEQ ID NO: 46235 - protein, 642 aa, Caulobacter crescentus CB15
MAQDAKTLDLIAVGRSSVDLYGQQVGGRLEDMGSFAKYLGGSPTNTAAGGARLGLKTGLLTRVGADHMGRFIREQLEREGVDVAGVLSDPDRLTALVILGIRDRVNFPLIFYRENCADMALEPSDVDEAWFAQAGAVLINGTHLSQPNVYETSLKAARAVKAAGGRVAFDIDYRPVLWGLTGKDAGENRFVENQQVTAKLQEVVALCDLIVGTEEEIHILGGSTDTIAALRAIRRASDALLVCKRGPEGCVAFPGAIPDALDEGVSARGFKVEVFNVLGAGDAFMAGFLRGWLRHESVETCCEWGNACGAIVVSRHGCTPAMPTWIELQAFLSERERPFRLREDAELEHIHWATTRERVYDELTVLAIDHRSQFEDLIAETGGDAERIPDFKRLALRAVQMVAGRDETRFGMLLDGRFGFEALAEAADHDYWIARPIELPKSRPLEFECSADVATELLEWPLNQVVKCLAFYHPDDESDLRERQERQLLRLADACRKTRHELLLELILPRGMSSDSRTVARAIRRLYALGIRPDWWKLEPLTDPDAWREIEIAIAENDPLCRGVVLLGLSAPEAELVASFEVVAPFPIVKGFAVGRTIFYDVARAWLSNQIDDDAAVTALAAKFKVLVDAWRRLRGSVEKAA

SEQ ID NO: 46236 - protein, 1359 aa, Candida glabrata CBS138
MESAITGAVNSLSRHSSSDKEDDKPVPESVDHDTFKIPTSLPTLSTTDEGDEKVNTNRDGTNNEHGSEQTNIQLEESSEKIDGMQDLPSLADVQADSNPFEFDFSPRDDQISADVMPLAPHNSTHLENSVENNNNIHEQSDSVGSSQNSEPAHIYENNEHVAEDLQINSATNTDNKTENTRNSIQETTEESNSDNHGNNEITLSINITNNKQNSDSAQTVNDSIFPKDIDQNEKLEQPDNDNTKNAIEGVPRVLEDKVTDASGMDRSSDDKRDGNDNFKPNPIENEHDATEKSFFTVNAEHTKGSSLRRDSNSNNDKDNTAITGDTLKKWKNTDQVNDNEEANNSTDFGFPDLDKSNVSFDSLPNEKEDKHQENVSEMLTGQDGHKDNSLENIGRKELTNEVSSPSKLKSTDQIASPSSNDDISQLEIMNNKNTDDGKKLDHIPEIRAEDSTKNEDKNNTTNINAKTEDDDKKLDLPDALDHDQLVTLLELDDKHSNIFEDSEMLDEEEELEQLESEIPNTKHNSASMETDKVKAFNDIPVNTQDLQENNADNENPQLNKTVAADNHIKVEPSQPGGIIKREESVDSTKDKTQQPVTKTPPLSPINEEDISPNQHVPGIKSDQQNLQKSSSANQTSGSSTTQPNKESATDTPASIINEKNSLLYPKRQNSLTPMVFQPHQIKELIQRPPNADQGNVGSNTTSDTTASQPTIFAYARLDFESFTFYVQTLHAIIGRRSENDYSHKVDVNLGPSKSISRRHAQIFYNFGTGRFELSIIGKNGAFVDDTFVERGNTVPLKNKTKIQIGQIPFQFILPEPDILPTPKKNETKKTQEKAKAKEPMKPDPKKVIKQDVTSANKQAETKPKPKQAAAPKPKKVVKSPKKVYTPEEIPPEYREKPSLSYSAMLTVCIRKFSKEKGMSLSEIYAGIRELYPYFKYCPDGWQSSVRHNLSLNKSFRKISKEGKGWLWGLDEEFIAERDKLKQQQNSAAASRANTPVNKVAKTETTAPKKPSPKPTTSTNAKVTKKQNISQTLAANRATSPKNQATDDHQRTMKYLQEQLVILTKDRKGLSKQVIANILTQALAMTINQVTQAAKNKGISGNPLTALMDKNPQHLNLILAAAVNAATAKITNGEVKQLVNLPSINQNKPATQQVRPTKQENKKPPAKQTTTQKASKPPTPQAKAKSGSSFDPTSLSKFFQPKQAARTISAVPTADVKSIPAKRTIGGSVVNKKVTENESSSSSGSSSSEDDSSSDDSSSSGSDDSDSDSSSGSDDSSSGESDSDDSDSSSDDSNDESSSEDENDEDDAAENERKKLKTQESVIESLLQHDNDGAFDLDEAVAQLDDDAVGELDDVHSLEF

SEQ ID NO: 46237 - protein, 429 aa, Bradyrhizobium sp. BTAi1
MTAPLKAIDGSADLPALMNDLASRARAAARVLALAPAAQKNRALEAMERLIRARVDTIIAANAEDVVEAKAAGITSSFLDRLTLTPARVAAMADGIAAVREVADPIGIVTESWQRPNGMTIERVRVPLGVIGVIFESRPNVAADAGVLCLKSGNAVILRGGSDSFRSCRAIHECLVEGLREAGLPDAAITLVPTRDRAAVGLLLSGLNGGVDVIVPRGGKNLVARVEAEARVPVFAHLEGVNHVYVDGAADLEMAKSIVLNAKMRRTGVCGAAETLLIDRASQDKIKPLVDTLINAGCEVRGDDAVRAADARVKPASNEDWDTEYLDAVIAAKVVDGVEGAIAHIQAHGSHHTDAIVTADVAAADKFLNEVDSAIVLHNASTQFADGGEFGFGAEIGIATGKFHARGPVGVEQLTSFKYRIHGTGQTRP

SEQ ID NO: 46238 - protein, 205 aa, Sorghum bicolor
KAALAYAAEHGMELVTIITTLVVGPFLSTGMPPSMITALALVTGNEAHYSILKQVQFVHLDDLCDAHIFLFEHPAAAGRYVCSSCDTTIHDLAAMLRDRYPEYDIPERFPAGTGIEDDLQMVHMSAKKLQDLGFTFRYTRMEDMYDDAIRTCREKGLIPLAAAGRDDGSASVRAPGERDVTATAGGDVSAPVRAPGGETDVTIGA

SEQ ID NO: 46239 - protein, 286 aa, Arabidopsis thaliana
  misc_feature (221)..(221): Xaa can be any naturally occurring amino acid
  unsure (1)..(286): unsure at all Xaa locations
MQLKVPEHQVAGHIAKDGKPGPLVDDKGRFFKPLQGDSRGEIEVKFYESFSSNTEVPEHIHRYFPVYHGTQAVEGSDGAAMMVLENLLAEYSKPSVMDVKMGSRTWYPDASEEYIQKCLKKDTGTTTVSSGFRISGFEVYDHKESSFWKPERKLLRGLDVDGARLTLRKFVSSNSLSDTGSKPDSAFASSVYGGSHGILTQLLELKTWFENQTLYHFNSCXILMVYENESILKGNDDDARPQVKLVDFAHVLDGNGVIDHNFLGGLCSFINFIREILQSPDESADS

SEQ ID NO: 46240 - protein, 384 aa, Corynebacterium efficiens YS-314
MFSWHRSPISAIIVDISHKSLKEFPMSNTTDDWAGAPQNASPDGEFVRDTNYITDRIVADVPAGSEPVAQEDGAFHWPVEAGRYRLVAARACPWAHRTVITRRLLGLEDVISLGLTGPTHDVRSWTFDLDPNGVDPVLQIPRLQEAYFNRFPDYPRGITVPAIVEESSRKVVTNDYPSITIDFNLEWKQYHREGAPELYPEHLREEMEPVMKRIFTEVNNGVYRTGFAGSQEAHNEAYERLWTALDWLEERLATRRYLMGDHITEADIRLYPTLVRFDAVYYSHFKCSRNKITEMPNLWGYLRDLFQTPGFGDTTDFTEIKQHYFITHAEINPTQIVPVGPDLSGLMSEHGREALGGSPFAEGVTLPGPIPSGEEVKNPEPFQV

SEQ ID NO: 46241 - protein, 486 aa, Arabidopsis thaliana
MPAPTTEIEPIEAQSLKKLSLKSLKRSLELFSPVHGQFPPPDPEAKQIRLSHKMKVAFGGVEPVVSQPPRQPDRINEQPGPSNALALAAPEGSKSTQKGATESAIVVGPTLLRPILPKGLNYTGSSGKSTTIIPANVSSYQRNLSTAALMERIPSRWPRPEWHAPWKNYRVIQGHLGWVRSVAFDPSNEWFCTGSADRTIKIWDVATGVLKLTLTGHIEQVRGLAVSNRHTYMFSAGDDKQVKCWDLEQNKVIRSYHGHLSGVYCLALHPTLDVLLTGGRDSVCRVWDIRTKMQIFALSGHDNTVCSVFTRPTDPQVVTGSHDTTIKFWDLRYGKTMSTLTHHKKSVRAMTLHPKENAFASASADNTKKFSLPKGEFCHNMLSQQKTIINAMAVNEDGVMVTGGDNGSIWFWDWKSGHSFQQSETIVQPGSLESEAGIYAACYDNTGSRLVTCEADKTIKMWKEDENATPETHPINFKPPKEIRRF

SEQ ID NO: 46242 - protein, 471 aa, Solibacter usitatus Ellin6076
MPVGEVSLKVDQFEDQFLAENPEALGLSFEDDPKFFDPEAAHEADFLHPAPVEESIYTDDPVRVYLREMGAVPLLTREGEVDLARRMERGKLRMQKAISRSALVQRVVVDVADQLKRANIEIESVVDLGDVEEGSPADVKVRNEAAKHFADIVVLHKKLQQLEDKVEATPLASKKPRKRLCAKLNRSKVETSLAIRRAPFRLIKWKEFAREIERAVDEISHLDSEIKRLEVRSNPTQQLRLRELKREIKKREIAAGATLPELKHSLTVIRHGEAEAERAKKDLVEANLRLVVSVAKKYVNRGLHLLDLIQEGNIGLMRAADKFEYRRGYKFSTYATWWIRQAITRAIADQSRTIRIPVHMNESMNKFLRATRELEKELGRTPTNDEIGRRMDIPVEKVQKLKTISRDPVSLETPVARDGESALGDLIEDRWVGSPGGCRYRIQCPRRNRRHFEDPLSERGEGDPHAVRYRL

SEQ ID NO: 46243 - protein, 142 aa, Yersinia pestis KIM
MALERTFSIIKPNAVANNDIGAIYARFERAGFKIIAAKMLHLTKEQAEGFYAEHKGRPFFDGLVEFMTSGPIMVQVLEGENAVQRHRDIMGATNPDNALAGTLRADFSDSFTANAVHGSDAVESAQREIAYFFAADEIFPRS

SEQ ID NO: 46244 - protein, 335 aa, Triticum aestivum
  misc_feature (149)..(149): Xaa can be any naturally occurring amino acid
  misc_feature (182)..(182): Xaa can be any naturally occurring amino acid
  misc_feature (190)..(190): Xaa can be any naturally occurring amino acid
  misc_feature (202)..(202): Xaa can be any naturally occurring amino acid
  misc_feature (220)..(220): Xaa can be any naturally occurring amino acid
  misc_feature (280)..(280): Xaa can be any naturally occurring amino acid
  misc_feature (291)..(291): Xaa can be any naturally occurring amino acid
  misc_feature (304)..(304): Xaa can be any naturally occurring amino acid
  unsure (1)..(335): unsure at all Xaa locations
MQIFVKTLTGKTITLEVESSDTIDNVKAKIQDKEGIPPDQQRLIFAGKQLEDGRTLADYNIQKESTLHLVLRLRGGMQIFVKTLTGKTITLEVESSDTIDNVKAKIQDKEGIPPDQQRLIFAGKQLEDGRTLADYNIQKESTLHLVLRXLRGGMQIFVKTLTGKTITLEVESSDTIDNVKAXKIQDKEGXIPPDQQRLIFAXGKQLEDGRTLADYNIQKXESTLHLVLGLWGGMENFWKTLTGRPYLWRVEVRTIDKVKGQDPGTREGIPPDQQRLIFAXGKQLEDGRTLXADYKIQKESTLHXLVLGLRCGMQIFLKTPTGRPPPWGWGAPKQT

SEQ ID NO: 46245 - protein, 267 aa, Zea mays
MGRRACCAKEGVKRGAWTAKEDDTLAAYVKAHGEGKWREVPQKAGLRRCGKSCRLRWLNYLRPNIKRGNISYDEEDLIVRLHKLLGNRWSLIAGRLPGRTDNEIKNYWNSTLGRRAGAGAGGSRVVFAPDTGSHATPAAAGSHEMTGGQKGAAPRADLGSPGSAAVVWAPKAARCTGGLFFHRDTPHAGETETPTPMMMAGGGGGEARSSDDCSSAASVSPLVGSSQHDPCFSGDGDGDWMDDVRALASFLESDEEWLRCHTAEQLV

SEQ ID NO: 46246 - protein, 512 aa, Arabidopsis thaliana
MGALEAERAANNATALETQSSPEDLGQPSPLRKIISVASIAAGVQFGWALQLSLLTPYIQLLGIPHKWSSYMWLCGPISGMIVQPIVGYHSDRCESRFGRRRPFIAAGVALVAVSVFLIGFAADMGHSFGDKLENKVRTRAIIIFLTGFWFLDVANNTLQGPCRAFLADLAAGDAKKTRVANACFSFFMAVGNVLGYAAGSYTNLHKMFPFTMTKACDIYCANLKTCFFLSITLLLIVTFSSLWYVKDKQWSPPQGDKEEKTSSLFFFGEIFGAVRHMKRPMVMLLIVTVINWIAWFPFILYDTDWMGREVYGGNSDGDERSKKLYDQGVQAGALGLMFNSILLGFVSLGVESIGRKMGGAKRLWGCVNFILAIGLAMTVPAAKSAEHHREIAGPLAGPSSGIKAGVFSLFTVLGIPLAITYSIPFALASIFSTNSGAGQGLSLGVLNIAICIPQMIVSFSSGPLDAQFGGGNLPSFVVGAIAAAVSGVLALTVLPSPPPDAPAMSGAMGFH

SEQ ID NO: 46247 - protein, 666 aa, Magnetospirillum magnetotacticum MS-1
  misc_feature (628)..(628): Xaa can be any naturally occurring amino acid
  misc_feature (631)..(631): Xaa can be any naturally occurring amino acid
  unsure (1)..(666): unsure at all Xaa locations
MSVVPIRVLLLEDDPADARLVGQMLRRVKTTPFEVTVAGRLAQALERLSDETQHFDVVLADLGVPDSSGIGTLNALTQAAPRLPVVVLTGNDDDTIALEALKRGAQDYLVKGLGDAFILSRVVRYAIERKMGEEVLREARDSAEQAARAKSVFLAMMGHEIRTPLNGVLGMARLLLETDLDPRQKSFTETLVSSGELLLGLVNDILDFSRLDAEGMTLAVEPFDVLDTVEEVRLVLTSRVAEKDLTLTTRFGTGVRRVVAGDRLRLRQILFNLVGNAIKFTDHGGIEISVEPLAVERGQVLRFLIKDTGIGIGPEIGARLFTEFWQGDSGAARRFDGAGLGLAICKRLTDLMGGEIGYDSLPGQGTTFRVDLPLPPSEAPSAEPGKGVERPCRVLLVDDNEVNREVAAGLLERRGHQVVCARDGLEGVAAAARGGFDLILLDMRMPGMDGIETARAIRALPGAAAKVPIYLLTANPVKEDEARWREAGILGCLAKPFRFEHIGRLLAGLGEENRPPASPDPDLVEVAGLLSDLGDLGRDRMVGLVELFRSSSSADLAALRTHAKAGRLAEAGQLAHRMASAASSLHLGPLAAKCRAVEDATRADDPRTDAQAEELADLWTRSLAAVGXGFXGIFRPLTICPRYVTLRGHVTWASALGGPLCSIRPS

SEQ ID NO: 46248 - protein, 296 aa, Saccharomyces cerevisiae
MITTPLVHVASVEKGRSYEDFQKVYNAIALKLREDDEYDNYIGYGPVLVRLAWHISGTWDKHDNTGGSYGGTYRFKKEFNDPSNAGLQNGFKFLEPIHKEFPWISSGDLFSLGGVTAVQEMQGPKIPWRCGRVDTPEDTTPDNGRLPDADKDAGYVRTFFQRLNMNDREVVALMGAHALGKTHLKNSGYEGPFGAANNVFTNEFYLNLLNEDWKLEKNDANNEQWDSKSGYMMLPTDYSLIQDPKYLSIVKEYANDQDKFFKDFSKAFEKLLENGITFPKDAPSPFIFKTLEEQGL

SEQ ID NO: 46249 - protein, 807 aa, ASPERGILLUS NIDULANS FGSC A4
MSPVLKKYKAAAVNAEPGWFDLEESVRRTIHWINEAGRNRCKLIAFPELWIPGYPYWMWKVNYQESLPLLKKYRENSLLSDSEEMRRIREAARANKIYVSLGYSEVDLASLYTTQVLISPAGNILNHRRKIRATHVERLVFGDGTGDTTESVVQTEIGRVGHLNCWENMNPFMKSYAASLGEQVHVAAWPLYPGKETLKYPDPYTNVAEANCDALANELPQLVTPAYAIETGTYTLAPWQTITEEGIKLNTPPGKPLEDPNIYNGHGRIFAPDGRNLVPHPAKDFQGLLYVDIDLDEIHLTKSLADFGGHYMRPDLIRLLVDGNRKDLVVSEDRINGGIKYTSTMDRVGLTKPLEAPKPTDQKEIALRSGASTSRLAQVKSPMASLLLIGAILIAVKYADEHEKAKQRDKSQFTDAEAGTEPVTTEPASASKRNILSRTYWHERKKSRRELGEAHLPVEAVPLHSEAPPPYERTATLPMLLDDRLSRIGGTSGISLSTALSLARHTVSPTIYLIGQSRQAAESAVRSIRALNPSAEAIFLLSDISLMKNVDQICKQIESRGRYVNIVFMTPGYLTLRGRDETTEGLDRKFALHYYARMRFVNRLLPLLESAADKSFPQSDFGPGIQAEADRPGANGRRPGIFISRVVSVLDPHVSCGHHASLMTNFYLEEMARRYKNTSFVHAYPSGVNTGILRGLPGGQIARSFLSVLLKPFMVPLEESGERHLFAATSRKFPCAARGKGTDGDQEDVAPGSGGRPGSGCYWVNWDGEVFPEHASIKQKRAEGAVERVVEHTEEVLRRVCENSSPQ

SEQ ID NO: 46250 - protein, 329 aa, Bacillus anthracis str. A2012
  misc_feature (17)..(17): Xaa can be any naturally occurring amino acid
  unsure (1)..(329): unsure at all Xaa locations
MMKAIVVTSFGGSEVMXYTDVDIPAISEDQVLIRVVATSVNFADIKSRYGKKGNKALPFILGIDAAGIVERVGSHVKNIYPGQRVIAFPQNGSYAEYVVANENLTFVLPDEVDFQTAAACPIVSFTSYNLLANVARLQQGESVLIHAAAGGIGTTAIQLAKLLGAGTVIGTVGSEAKKEIALDAGADYVIGHQDEDFVEKVNELTNGEGVDVILDSISGTVSERSLKCLAYYGRLIHFGNASGEIGNFQTKDLHASCRSILGFSFGTTRKKRPELLQETANEVFRYLRDGHLQIKATKSFPLQDAGKAHEWVESRKSTGKVILTVQSSS

SEQ ID NO: 46251 - protein, 378 aa, Bradyrhizobium sp. BTAi1
MASPRLENFRRIVVKVGSSLLVDSEAGEVRASWLAALAADIARLHGRGCELLVVSSGSIALGRSRLKLPRGPLKLEESQAAAAVGQIALARIWSEVLGDHGIGAGQILVTLQDTEERRRYLNARSTIAKLLDWRAVPVINENDTVATAEIRYGDNDRLAARVATMASADLLVLLSDIDGLYTAPPAQDPNARLIPVVESITADIEAMAGSAASEFSRGGMRTKIEAAKIATTGGTHMLIASGKIEHPLAAIANGGRCTWFLTPANPVTARKRWIAGSLEPKGTLTIDAGAVTALRAGKSLLPAGVIRVDGQFARGDAVVVRGPDTHEIGRGLVAYDADDAERIKGRSSPDVAVILGISGRAEMIHRDDLVIGPAGAMG

SEQ ID NO: 46252 - protein, 493 aa, Shewanella sp. ANA-3
MSDNQTPAAKHALMWFRQDLRLTDNQALTAACDWVRQAPGAKLRAIYIATPNQWLSHDMAPIQIDFIQRHVNLLAQGLASLGIEFELIQLDSFKEVPAFLASYCEKLGVERVFAGREPEINEQKRDQACLDTGIPLVLSDEHCLLPPGTVLNLSGDMYKVFTPFSRKWREIAAKRAIFPLAVPAPLGPMLPEPKPISFKERFQSTSKLTSSEQWAAGEGQAKRILTAFIKQKVQDYKQDRDFPALDGTSVISPYLALGVLSPRQCIAALLGRFPDVIVDDTSPGRTWLNELIWREFYRHLLVAFPDLSKGHNFNRQADHVQWRNNQAEFLAWCEGKTGYPIVDAAMRQLNQTGWMHNRLRMVVASFLTKHLLIDWRWGERYFRQHLIDGDLAANNGGWQWSAGCGCDAQPYFRIFNPISQSEKFDPDGSFIRKYLPELASWGIKRLHQPNMQKTPSLFEAPMLESDSAYPCAIVEHNAARARALAVLGVLKKA

SEQ ID NO: 46253 - protein, 516 aa, Glycine max
MAGICCGVVGEGDTPAPLEPTPRPSRRRSLDILPLKYIADMPMPPPEALRKRPKLNLRDCDNAIENCDESTGHKVTKKESKVDYDDDVVSETKNVTVSEVEEESPKFGVTSVCGRRRDMEDSVSVRPCFTQGFHYFGVFDGHGCSHVATMCKERLHEIVNEEIESARENLEWKLTMENGFARMDDEVHRRSQSNQTFTCRCELQTPHCDAVGSTAVVAVVTPDKIVVSNCGDSRAVLCRNGVAIPLSSDHKPDRPDELLRVQSKGGRVIYWDGPRVLGVLAMSRAIGDNYLKPYVISEPEVMVTERTEEDECLILASDGLWDVVSNETACGVVRMCLKAQKPPGSPGSDVAADGSDRACSDASILLTKLALARHSSDNDFVKDGKTKSEGGGACGFCLIKWKICVDKGINRPVDTPFLFVHNRIYKLDFPLVRVSTNFYFKFILGNIGSKFIIQFARAFVQLSQDYSSSINFYIFCSVVLLAVQHWIWTTLVICSFTRRAMESFAIVTKFQNQPLH

SEQ ID NO: 46254 - protein, 939 aa, Arabidopsis thaliana
MILITSPTLTYLRHRLHSSQIKSPQIRRHFLRSREISTVDRCYNPWQSTNRFKLRTRDSSFLCCARRKPETATVEVEDDSIRRIVRYLLWTSEAVYILWLFLLPYAPELRTISISLLECFENLVENNLYDQQGDPVWAISSETVNSLLGLSLNFFFVLPLTNAAGIHFLQAPVLHPMAEGLFNFVIAWTLMFAPLLYTDRKRNRYKSSLDVLWSLMMFLTNTFLIPYMALRLNDADPDDKPSKRSQLGEVMTKGAPIVGLTGATVCLISALWSLYGRADGDFGGIMDRWQYLIGYLGSERLAYAFIWDICLYTIFQPWLIGENLQNVKKNKIELVKYLRRKLSRVCVEMSMIDEPLYPIAVLIDELKNDDIQLRLNSIRRLSTIARALGEERTRKELIPFLSENNDDDDEVLLAMAEELGVFIPYVGGVEYAHVLLPPLETLSTVEETCVREKAVESLCRVGSQMRESDLVDHFISLVKRLAAGEWFTARVSACGVFHIAYPSAPDMLKTELRSLYTQLCQDDMPMVRRAAATNLGKFAATVESAHLKTDVMSMFEDLTQDDQDSVRLLAVEGCAALGKLLEPQDCVQHILPVIVNFSQDKSWRVRYMVANQLYELCEAVGPEPTRLKELDDPIYFLLILFTVSSILRTELVPAYVRLLRDNEAEVRIAAAGKVTKFCRILNPEIAIQHILPCVKELSSDSSQHVRSALASVIMGMAPVLGKDATIEHLLPIFLSLLKDEFPDVRLNIISKLDQVNQVIGIDLLSQSLLPAIVELAEDRHWRVRLAIIEYIPLLASQLGVGFFDDKLGALCMQWLQDKVHSIRDAAANNLKRLAEEFGPEWAMQHIVPQVLEMVNNPHYLYRMTILRAVSLLAPVMGSEITCSKLLPVVMTASKDRQVLTVVEKTIRPGLVELSEDPDVDVRFFANQALQSIDNVMMSS

SEQ ID NO: 46255 - protein, 647 aa, Solanum demissum
MDAVSIRVPYKNLKQQEVELTNVDESRFTQLEIRSDSSSPRASNGEMNDSHLPLPPPPVRNSLLTLILSCTVAAGVQFGWALQLSLLTPYIQTLGIEHAFSSFIWLCGPITGLVVQPCVGIWSDKCHSKYGRRRPFIFIGAVMISIAVIIIGFSADIGYLLGDTKEHCSTFKGTRSRAAIVFVVGFWMLDLANNTVQGPARALLADLSGPDQRNTANAVFCSWMAVGNILGFSAGASGGWHRWFPFLTNRACCEPCGNLKAAFLVAVVFLTLCTLVTLYFANEVPLSPKQYKRLSDSAPLLDSPQNTGFDLSQSKRELQSVNSVANNESEMGRVADNSPKNEEQRPDKDQGNSFADSPGAVLVNLLTSLRHLPPAMHSVLIVMALTWVSCSLSTAANYLSFCSFNQLSWFPFFLFDTDWMGREVYHGDPKGEADEVNAYNQGVREGAFGLLLNSVVLGVSSFLIEPMCKWIGSRLVWAVSNFIVFVCMACTAIISVVSISAHTEGVQHVIGATRSTQIAALVVFSLLGIPLAVTYSVPFSITAELTADAGGGQGLAIGVLNLAIVVPQMVVSLGAGPWDALFGGGNIPAFVLASLAALAAGIFAMLRLPNLSIYIGAPTKSGLHTKGSIWGSLPTEFSPWLEPEISD

SEQ ID NO: 46256 - protein, 306 aa, Solanum demissum
MTCTNYEMAFFPTNFMLQTPHHEDEHQPSTSLNPILPSCSPQDFHGIASFLGKRSMSFSGMDGNNACEENHGEDDLSDDGSQAGEKKRRLNMEQVKTLEKNFELGNKLEPERKMQLARALGLQPRQIAIWFQNRRARWKTKQLEKDYEVLKRQFDAIKAENDALQTQNQKLHAEQPTESINLNKETEGSCSNRSENSSEIKLDISRTPAIDSPLSNHHPNISSRPFFPPSMIRSNNNNNSNNGVVVPHQLFHINSSSPRQDLKLMDQNTTTTNNNSSVKEESLSNMFCGIDDQTSFWPWLEQQHFN

SEQ ID NO: 46257 - protein, 526 aa, Malus x domestica
MADRRAEENAVTGGPQNTSIEDFDPPMKPKTSKFAIACALLACTTSVLLGYDIGVMSGASLYIQKNLKISDVQVEVLAGTLNIYSLLGSAFAGRTSDWIGRKYTIVLAGVIFLVGALLMGFATNYAFLMVGRFVAGVGVGYGMMIAPVYTAEISPASFRGFLTSFPEVFVNVGILLGYIANYAFSKLPLHLGWRFMLGVGGVPAIFLTVGVLFMPESPRWLVMQGRLGDAKKVLQRTSESKEECQLRLDDIKEAAGIPPHLNDDIVQVTKSSHGEGVWKELILHPTPAVRHILIAAVGIHFFEQASGIDTVVLYSPRIFAKAGITSSNHKLLATVAVGFTKTVFILVATFFLDKFGRRPLLLTSVGGMVFSLMFLGVGLTIVDHHKGSVPWAIGLCMAMVYFNVAFFSIGLGPITWVYSSEIFPLKLRAQGVSIGVACNRVTSGVVSMTFISLYKAITIGGAFFLYAGISAAAWIFFYTMLPETQGRTLEDTEVLFGKYHRWRKANAMLKERKQVDGDDNNNAQVF

SEQ ID NO: 46258 - protein, 517 aa, Arabidopsis thaliana
MGVVSISSSAARSPLGLGNDLLTHRSSLKKPSIVAFKADDSSNSALIIPPREQVLIPAEKHNEKKREVTRRKPCKTPKKPLSLEHNSAPSCSLGVDYNEAAARLESIYKLSPATTTLVEDDVEDGGSKAKVSRRRKRKESGEEKKVVVRNNVKKEKRMSLDKRIALKRNVQEKPVVASVDKKVTKRQQEEEKIERLVRDYSASNDIVSLDWKKMKIPPVLSSTEHAWLFKLMQPMKALLEVKDVLQKSLGREPREAEIAGEINMTAGEVKKKIEIGRAARNKLIKHNLRLVLFVMNKYFHEFTNGPKFQDLCQAGMRGLITAIDRFEPKRKFRLSTYGLFWIRHAIIRSMTTSNFTRVPFGLESVRVEIYKAKTELWFEMGRPPTEDEVVERLKITPERYREVLRAAKPVLSLNSKHSVTQEEFINGITDVDGVGANNSRQPALLRLALDDVLDSLKPKESLVIRQRYGLDGKGDRTLGEIAGNLNISREMVRKHEVKALMKLKHQARVDYLRQYIV

SEQ ID NO: 46259 - protein, 491 aa, Malus x domestica
MTSILLGYDIGVMSGAAIYIEKDLKVTDTQIEILLGILNLYSLIGSAMAGRTSDWVGRRYTIVISGAIFFTGAILMGLSTNYTFLMCGRFVAGLGVGYALTIAPVYAAEVSPASSRGFLTSFPEVFVNVGILLGYISNYAFSFCALDVGWRLMLGVGAIPSVILAIGVLAMPESPRWLVMQGRLGDARQVLDKTSDSKEESMLRLADIKEAAGIPEDCNDDIVQVTGHSHGEGVWKELFVHPTPTVLHIVIAALGFHFFQQASGIDALVLYSPRVFEKAGITNSNQLLLCTVGVGLSKTVFTFVATFFLDRVGRRPLVLTSMAGMVASLVCLGTSLTIVDQHEGARMTWAVVLCLCCVLAFVGFFSTGIGPIAWVYSSEIFPLRLRAQGCGMGVAVNRVMSGVLSMTFISLYKAITMGGAFFLYAAIGAVGWIFFFTMLPETQGRTLEDMEVLFGKFHKWRKANKLLEKERQVARGDGGTSDPDNRVNLLA

SEQ ID NO: 46260 - protein, 460 aa, Kurthia sp. 538-KA26
MNSHDLEKWDKEYVWHPFTQMKTYRESKPLIIERGEGSYLFDIEGNRYLDGYASLWVNVHGHNEPELNNALIEQVEKVAHSTLLGSANVPSILLAKKLAEITPGHLSKVFYSDTGSAAVEISLKVAYQYWKNIDPVKYQHKNKFVSLNEAYHGDTVGAVSVGGMDLFHRIFKPLLFERIPTPSPYTYRMAKHGDQEAVKNYCIDELEKLLQDQAEEIAGLIIEPLVQGAAGIITHPPGFLKAVEQLCKKYNILLICDEVAVGFGRTGTLFACEQEDVVPDIMCIGKGITGGYMPLAATIMNEQIFNSFLGEPDEHKTFYHGHTYTGNQLACALALKNIELIERRDLVKDIQKKSKQLSEKLQSLYELPIVGDIRQRGLMIGIEIVKDRQTKEPFTIQENIVSSIIQNARENGLIIRELGPVITMMPILSMSEKELNTMVETVYRSIQDVSVHNGLIPAAN

SEQ ID NO: 46261 - protein, 535 aa, Malus x domestica
MADRTTDDNTVSSQPQKTIADFDPPQKPKRNKYAFACAILASMTSILLGYDIGVMSGAAIYIKDDLKISDVEVEVLLGILNLYSLIGSAAAGRTSDWVGRRYTIVLAGAIFFVGALLMGFATNYSFLMFGRFVAGIGVGYALMIAPVYTAEVSPASSRGFLTSFPEVFINSGILLGYVSNYAFSKLPTHLGWRLMLGVGAIPSIFLAVGVLAMPESPRWLVMQGRLGDATRVLDKTSDSKEESMLRLADIKEAAGIPEHCTDDVVQVPKRSQGQDVWKELLLHPTPAVRHILICAIGIHFFQQASGIDAVVLYSPRIFEKAGITNSDKKLLCTVAVGFVKTVFILVATFFVDKVGRRPLLLASVAGMILSLTGLGLGLTIIDQNHERILWAAVLCLTMVLLYVAFFSIGMGPITWVYSSEIFPLKLRAQGCSLGVAMNRVVSGVLSMTFISLYEAITIGGAFFLYAAIASVAWVFFFTMLPETHGRTLEDMEVLFGKFHKWRKANALLKQKKNASHGDGITNNGQVQLGTRGQVN

SEQ ID NO: 46262 - protein, 533 aa, Triticum aestivum
  misc_feature (140)..(140): Xaa can be any naturally occurring amino acid
  misc_feature (430)..(430): Xaa can be any naturally occurring amino acid
  unsure (1)..(533): unsure at all Xaa locations
MERRHRTFWIPDLLETLTPRTSRTSMDGLAAPSPSHSGATSGGGASHRKRKLPPPSLSDATADEDDDTTAPSSPATSLSSPSRPSSPSSSHSDEDDDDSLTTFTAARLDAAPASSSGRPPKPDSSSASAVTAGGLLSPDXASAAAGDGKEDSKGLFTDNIQTSGAYSAREEGLKREEDTGKLKFLCYSNDGVDEHMIWLVGLKNIFARQLPNMPKEYVVRLVMDRTHKSMMVIRNNNVVGGITYRPYASQRFGEIAFCAITADEQVKGYGTRLMNHLKQHARDADGLTHFLTYADNNAVGYFVKQGFTKEITFDKERWQGYIKDYDGGILMECKIDQKLPYVDLATMIRHQRQAIDEKIRELSNCHIVYSGIDFQKKEAGIPRRLMKPEDIPGLREAGWTPDQWGHSKSRSTFSSDYNTYRQQLTSLMRXLLKSLVDHADAWPFKEPVDSRDVPDYYDIIKDPIDLKTMSRRVESEQYYVTLEMFVADLKRMFINARTYNSPDTIYFKCSTRLEAYFTNRIQSHLAQAASTKN

SEQ ID NO: 46263 - protein, 429 aa, Salmonella enterica subsp. enterica serovar Typhi Ty2
MTRRAIGVSERPPLLQTIPLSLQHLFAMFGATVLVPVLFHINPATVLLFNGIGTLLYLFICKGKIPAYLGSSFAFISPVLLLLPLGYEVALGGFIMCGVLFCLVSFIVKKAGTGWLDVMFPPAAMGAIVAVIGLELAGVAAGMAGLLPAQGQSPDTKTIIISMVTLAVTVFGSVLFRGFLAIIPILIGVLAGYALSFALGVVDTTPIAQAHWFALPTFYTPRFEWFAILTILPAALVVIAEHVGHLVVTANIVKKDLVRDPGLHRSMFANGLSTIISGFFGSTPNTTYGENIGVMAITRVYSTWVIGGAAIFAILLSCVGKLAAAIQIIPLPVMGGVSLLLYGVIGASGIRVLIESKVDYNKAQNLILTSVILIIGVSGAKVHIGAAELKGMALATIVGIGLSLIFKLISLLRPEEVVLEANDAESPHQ

SEQ ID NO: 46264 - protein, 406 aa, Streptococcus pneumoniae
MQTQEKHSQAAVLGLQHLLAMYSGSILVPIMIATALGYSAEQLTYLISTDIFMCGVATFLQLQLNKYFGIGLPVVLGVAFQSVAPLIMIGQSHGSGAMFGALIASGIYVVLVSGIFSKVANLFPSIVTGSVITTIGLTLIPVAIGNMGNNVPEPTGQSLLLSAITVLIILLINIFTKGFIKSISILIGLVVGTAIAASMGLVDFSPVAAAPVVHVPTPFYFGMPTFEISSIVMMCIIATVSMVESTGVYLALSDITKDPIDSTRLRNGYRAEGLAVLLGGIFNTFPYTGFSQNVGLVKLSGIKTRLPIYYAAGFLVLLGLLPKFGALAQIIPSPVLGGAMLVMFGFVSIQGMQILARVDFANNEHNFLIAAVSIAAGVGLNNSNLFVSMPTAFQMFFSNGIVVASL

SEQ ID NO: 46265 - protein, 264 aa, Pseudomonas syringae pv. phaseolicola 1448A
MRIALYQCSPLPLDISGNLTRLEKQAQAAAEQGAQLLICPEMFLTGYNIGAQAVSELAQAQDGPAASRIAAIAQASGIAILYGYPERGPDQQVYNAVQLIDSRGTRLCNYRKTHLFSELDRSMFAAGEDYYPVVELNGWRLGMLICYDVEFPENTRRLALAGAELILVPTANMLPYDFVCEVTVRARAFENHCYVVYANYCGSEGAIRYCGLSSLCAPDGSRPLLAGQDEGLLVGTLNKALLAQARTVNDYFVDRRPGLYTSLT

SEQ ID NO: 46266 - protein, 406 aa, Streptococcus pneumoniae
MQTQEKHSQAAVLGLQHLLAMYSGSILVPIMIATALGYSAEQLTYLISTDIFMCGVATFLQLQLNKYFGIGLPVVLGVAFQSVAPLIMIGQSHGSGAMFGALIASGIYVVLVSGIFSKVANLFPSIVTGSVITTIGLTLIPVAIGNMGNNVPEPTGQSLLLSAITVLIILLINIFTKGFIKSISILIGLVVGTAIAATMGLVDFSPVAVAPLVHVPIPLYFGMPTFEISSIVMMCIIATVSMVESTGVYLALSDITKDPIDSTRLRNGYRAEGLAVLLGGIFNTFPYTGFSQNVGLVKLSGIKKRLPIYYAAGFLVLLGLLPKFGALAQIIPSSVLGGAMLVMFGFVSIQGMQILARVDFANNEHNFLIAAVSIAAGVGLNNSNLFVSMPTAFQMFFSNGIVVASL

SEQ ID NO: 46267 - protein, 119 aa, Zea mays
MARSSFKLEHPFERRQAEANRIREKYPDRIPVIVEKAERSDIPDIDKKKYLVPADLTVGQFVYVVRKRIKLSAEKAIFIFVKNTLPPTAALMSAIYEENKDEDGFLYMTYSGENTFGLF

SEQ ID NO: 46268 - protein, 410 aa, Oryza sativa (japonica cultivar-group)
MPPMSMSWWWAGAIGAARKRHDGGGGEQQPPFRSVALVVGSTGIVGTSLVDILPLPDTPGGPWKVYALSRRPPPPWSPPPPAAVTHLCVDLADAAAVAEALAPLTDITHVFYVALAAPHLAEARSREANAGMLRNVLAAVVPTCPALAHVALQTGSKHYIGPPESIGKLPVETPFSEDMPRHDYPNFYYDQEDVLFDAVTSSSSSSSSRRAAAVTWSVHRPSLIFGFSPRSAMNVVCSLCVYAAICRKERRELRWPGSLGAWEGFSNASDADLVAEQQIWAAVADAAAKNEAFNCSNGDIYKWKQLWPVLAGKFGVEWAGYEGEERRVGLTAAMAGKEAVWAEIVAEEKLVATELGEVANWWFVDALFMDKWEFVDTMNKSKEHGFLGFRNTLRSFEAWIDKMKLYRIVP

SEQ ID NO: 46269 - protein, 406 aa, Streptococcus pneumoniae
MQTQEKHSQAAVLGLQHLLAMYSGSILVPIMIATALGYSAEQLTYLISTDIFMCGVATFLQLQLNKYFGIGLPVVLGVAFQSVAPLIMIGQSHGSGAMFGALIASGIYVVLVSGIFSKVANLFPSIVTGSVITTIGLTLIPVAIGNMGNNVPEPTGQSLLLAAITVLIILLINIFTKGFIKSISILIGLVVGTAIAATMGLVDFSPVAVAPLVHVPTPLYFGMPTFEISSIVMMCIIATVSMVESTGVYLALSDITKDPLDSTRLRNGYRAEGLAVLLGGIFNTFPYTRFSQNVGLVKLSGIKKRLPIYYAAGFLVLLGLLPKFGALAQIIPSSVLGGAMLVMFGFVSIQGMQILARVDFANNEHNFLIAAVSIAAGVGLNNSNLFVSMPTAFQMFFSNGIVVASL

SEQ ID NO: 46270 - protein, 283 aa, Physcomitrella patens
MGRGKIEIKKIENTTSRQVTFSKRRGGLLKKAHELAVLCDAEVALVIFSSTGKLFEYASSGSMRDIIERYKKSPNGAMKSGASTDFLGREVVKLQEQVERLKSSQRRMLGEDLSALKVPDLLQLEQQLDLGASRVRARKNQLILEEIEGLQKKEQELMVANEDLRKKIADAEAVARANLSEARPESPRHLARTLSRDVSASSHPAATVYPHPNLRDVQRSQTSLQLGMFSSESYPPSSSRWPSEQQFPSASEGCAGESSMKWDHPHYHIQNRLHANILPSVRI

SEQ ID NO: 46271 - protein, 410 aa, Arabidopsis thaliana
MGSKRKEEKMDYMYGPGRHHLFVPGPVNIPEPVIRAMNRNNEDYRSPAIPALTKTLLEDVKKIFKTTSGTPFLFPTTGAGAWESALTNTLSPGDRIVSFLIGQFSLLWIDQQKRLNFNVDVVESDWGQGANLQVLASKLSQDENHTIKAICIVHNETATGVTNDISAVRTLLDHYKHPALLLVDGVSSICALDFRMDEWGVDVALTGSQKALSLPTGLGIVCASPKALEAAKTSKSLKVFFDWNDYLKFYKLGTYWPYTPSIQLLYGLRAALDLIFEEGLENIIARHARLGKATRLAVEAWGLKNCTQKEEWISNTVTAVMVPPHIDGSEIVRRAWQRYNLSLGLGLNKVAGKVFRIGHLGNVNELQLLGCLAGVEMILKDVGYPVVMGSGVAAASTYLQHHIPLIPSRI

SEQ ID NO: 46272 - protein, 616 aa, Triticum aestivum
  misc_feature (489)..(489): Xaa can be any naturally occurring amino acid
  unsure (1)..(616): unsure at all Xaa locations
NKFVQKSRLVPVRNSRDIVDPRVRYALLHLAGYDAVKEDDLKQFREWGSSTPGHPENFETPGVEVTTGPLGQGIANAVGLALAEKHLAARFNKPDSEIVDHYTYCIVGDGCNMEGILTEACSLAGHWGLGKLIVFYDDNHISIDGDTEIAFTEDVSGRFEALGWHTLWVKNGNDGYDEIRKAIQEAKSVTDKPTMIKVTTTIGFGSPNKANSYAVHGAALGTSEVEATRANLGWPYEPFFVPEDVKSHWSRHIPQGAALEADWDAKFAQYEQKYPEDAATLKSIITGELPAGWADALPQYTTESPADATRNLSQQCLNALAKVVPGLIGGSADLASSNMTLLKMFGDFQKDTPEERNVRFGVREHGMGAICNGIALHTPGLIPYCATFFVFTDYMRGAMRISALSEAGVIYVMTHDSIGLGEDGPTHQPIEHLVSFRAMPNMLMFRPADGKETAGAYKVAVLNRKRPSILALSRQKLPHLPGTSIEGVXKGGYTISDNSTGNKPDYIIMSTGSEVEIAVKAAEELTKEGKTVRVVSFVCWELFDEQSDEYKESVLPEAVTARISIEAGSTLGWQKYVGSKGKTIGIDKFGASAPAPKIYKEYGITAENVIAAAKSL

SEQ ID NO: 46273 - protein, 169 aa, Bacillus anthracis str. A2012
MIVKRGAKTMTVYDFSAKTITGEEKSLKDYEGKVLLIVNVASKCGFTPQYKGLQEVYDKYKEQGLEILGFPCNQFGGQEPGTEADITSFCELNYGVNFPMFAKIDVKGDKAHPLYTYMTEQAPGLLGMKAVKWNFTKFLIGKDGKVVGRFAPQTKPVDLEVEIEKVLGE

SEQ ID NO: 46274 - protein, 173 aa, Oryza sativa
MLHHHYHGEVASLHCLSPPSLPFSSHYHSNMITMAPSPFHFPAATCEPIQELLPVVAGNRPAGSGSTDDAYQMAAEEERRRRRMISNRESARRSRMRKQRQLSELRGQVVHLRDANRRLLDELNQAMRGCSDVHCENARLRKERAELQTKLEHLMQAQKNNTSPSSSQPCENI

SEQ ID NO: 46275 - protein, 293 aa, Saccharomyces cerevisiae
TPLVHVASVEKGRSYEDFQKVYNAIALKLREDDEYDNYIGYGPVLVRLAFHISGTWDKHDNTGGSYGGTYRFKKEFNDPSNAGLQNGFKFLEPIHKEFPWISSGDLFSLGGVTAVQEMQGPKIPWRCGRVDTPEDTTPDNGRLPDADKDAGYVRTFFQRLNMNDREVVALMGAHALGKTHLKNSGYEGPWGAANNVFTNEFYLNLLNEDWKLEKNDANNEQWDSKSGYMMLPTDYSLIQDPKYLSIVKEYANDQDKFFKDFSKAFEKLLENGITFPKDAPSPFIFKTLEEQGL

SEQ ID NO: 46276 - protein, 248 aa, Novosphingobium aromaticivorans DSM 12444
MGRLNGKVAIITGAARGMGESHARTFVREGARVVLTDLSEEAGKALVAELGDNAVFLKQDVTDPQSWNAVVETAVREFGTIDILVNNAGILGPMAPTDSLDDEGYRKVCAVNQDSVFFGMRAVLPVMVKARRGSIVNISSIAGMAANYGFPSLAYVASKFAVRGMTKATAVEFGKHNIRVNSVHPGFIQTPMMVEATDEVGGEALAQIPLGRIADPSEVSNLVLFLASDESSYITGSEHLVDAGMLAH

SEQ ID NO: 46277 - protein, 370 aa, Thermus thermophilus HB27
MRPGLSAKRLVVKVGSAVLTGERGLDLEAMAEIARQVAALREEGREVVLVSSGAVAAGMRRLGLKERPKDMPKKQALAALGQPLLMAFWQEAFAPFGLPVAQVLLTAEDLSSRSRYLNAKATLRALLDLGAIPVINENDTVAFEEIRFGDNDQLSARVAALVEAGLLALLSDVDALYEEDPKKNPQARPIPEVESVEAVLAHAGEENPLGSGGMKSKLLAARIAGRVGIPTLLLPGKRPGVLLQALSGAPLGTYFHARRRYRGEKAWLFGLLRPKGELVLDRGAVRALKERGASLLPAGVKEVRGRFSRGEAVRLLSEEGEEVGVGLANYASEEIARIKGRRSAEIEAVLGYRYTEEVVHRDHLALKEEA

SEQ ID NO: 46278 - protein, 413 aa, Thermus thermophilus HB27
MTATSLWELAERARKRLSEIAKGNRDRALLAMADLLEARWEEVLRANREDLEEAERTGLPKAKLDRLALKEKDLKTLTEGLRQIARLPDPLGRIEGLAKRPNGLRVGRMRVPLGLIGFIYEARPGATVEAVSVALKAGNAMLLRGGKEAFRSNRALVALWHEALEEAGLPEEAVTLVPTTDREAVLEMCRLELLDLLIPRGGEELIRLVQQEARVPVLAHAKGVNHLYVDEKADLSMALRLALNGKTQRPAVCNALEAVLVHEKVAEAFLPRLEKAMREKGVELRACPRALPLLKEAVPAREDEWDREYLDLVLRVKVVSGLEEALAHIARYGSRHTEAICTEDPKAAWRFLEEVDASLVLWNASTRFNDGFELGLGAEIGISTSKLHAYGPMGPLELTTLKWVALGEGQERT

SEQ ID NO: 46279 - protein, 213 aa, Arabidopsis thaliana
  misc_feature (201)..(201): Xaa can be any naturally occurring amino acid
  unsure (1)..(213): unsure at all Xaa locations
MGLKAGTFVLLLLGLILVSDARSFVDSTISEKVSNKEDVCTLCEEYVTDALSYLEKNVTQAEIIEDLHDRCSQLRGYSQQCISLVDYYVPLFFLQLESFQPHYFCKRMNLCGKAVALVVPARLDSCAVCHRFFCEILSRTFATHTHVHIAVRVPFFENKVGPGVIQGKTLGFEYGPLKLVNAKEFLVKNDVCPLLGACPPXKSVLRHPELADF

SEQ ID NO: 46280 - protein, 468 aa, Pyrococcus furiosus DSM 3638
MGARDIIYALERWFPEVERPKRRVPLRERFMWTGVALILYYVLAEIPVYGIPERIQDYFQFLRVVLAGRNGSILTLGIGPIVTAGIILQLLVGSEIIKLDLANPEDRRFYQALQRVFSVFMCFFEAAVWILGGAFGRVGVDVTYAIAVLMILQLAMGGIVLIILDELVSKWGIGSGISLFIAAGVSQTILTRSLNPLTDPNIIDPLTGQPAIVGAIPYFIQHILKGDLWGAIYRGGSAPDMLSVVATIVVFFIVVYFESMRVEIPLGYRGVTVRGSYPIRFLYVSNIPIILTFALYANIQLWARVLDRLGHPWLGRFDPTTGSPISGFVLYVIPPRNIFSVIDNPVRAIVYLILTVIFSLLFGYLWVELTGLDARSIARQLQRAGLQIPGFRRDPRTLEKVLQRYIPYVTFWGSLTVALIAVLADFLGALGTGTGILLTVGILYRFYEEIAREQITEMFPALRKLFGA

SEQ ID NO: 46281 - protein, 387 aa, Kurthia sp. 538-KA26
MIWEKELEKIKEGGLYRQLQTVETMSDQGYAMVNGKKMMMFASNNYLGIANDQRLIEASVQATQRFGTGSTGSRLTTGNTIVHEKLEKRLAEFKQTDAAIVLNTGYMANIAALTTLVGSDDLILSDEMNHASIIDGCRLSRAETIIYRHADLLDLEMKLQINTRYRKRIIVTDGVFSMDGDIAPLPGIVELAKRYDALVMVDDAHATGVLGKDGRGTSEHFGLKGKIDIEMGTLSKAVGAEGGYIAGSRSLVDYVLNRARPFVFSTALSAGVVASALTAVDIIQSEPERRVRIRAMSQRLYNELTSLGYTVSGGETPILAIICGEPEQAMFLSKELHKHGIYAPAIRSPTVPLGTSRIRLTLMATHQEEQMNHVIDVFRTILTNRYK

SEQ ID NO: 46282 - protein, 561 aa, Triticum aestivum
MVGRSSLPDGALFLGLDSSTQSVKATVLSNELIIVASETVNFDSELPHYKTEGGVYRDPTDDGRIYSPTIMWVEALELLLEKLKPKINFSKVVAVSGSGQQHGSVYWKKGSQAVLSSLDPGKSLVSQLKDAFSTMDSPIWMDSSTTKQCREVENAVGGALELSKLTGSRAYERFTGPQIRKIYQTAPHIYENTERISLVSSFMASILVGCYASIDETDGAGMNLMDINKRTWSKAVLEATAPDLEQKLGNLAPACAAAGRISSYFVERHQFDKNCFVIQWSGDNPNSLAGLTLNTPGDLAISLGTSDTVFGITAEAKPSLEGHVFPNPVEPDGYMVMLCYKNGSLTREDVRNQCAEKSWDIFNNYLEKTPPLNGGRLGFYYKDHEILPPLPVGFHRYIVENFSDASSDNLKECEVQEFDPESEVRAIVEGQMLSMRGHAERFGMPNPPKRIIATGGASSNESILKLIAKIFGCPVFTVERPDSASLGAALRAAHGWLCKEEGGFVPISRMYTGNLEKTSLGAKLAVPAPGDEGRELLKKYTVLMKKRMEIERRLVEKIGRA

SEQ ID NO: 46283 - protein, 467 aa, Propionibacterium acnes KPA171202
MSSHFDVVVLGAGPGGYVAAIRAAQLGKKTAIIEKEYWGGVCLNVGCIPTKSLLRNAELAHIVTKEAKTFGIGGDITVDFGKAFSRSREVSARMVKGIHFLMKKNKITEFNGWGEFTGPKAISVKDSDGKVTDEITFDNAIIAVGSVVKTLPGTQLSGRVVTYKEQILSDTVPGSIVIAGSGAIGTEFAYVLANYGCDVTIVEFLDRMVPNEDKEVSAELAKAYKKLGIKVLTSTKVDSIDDSGDKVKVTISPSKGGESKVIEADRVLQAVGFAPRVEGYGLEKTGVKLTERGAIEIDDFMRTNVDGIYAIGDCTAKLMLAHTAEAQGVVAAETIAGAQTMPINYDMIPRATYCQPQVGSFGYSEDQAREKGYDVKVSKFPFAANGKAWGLGDGTGFVKIVADARHGELLGASLVGHDVSELLPELTLAQLWDITAEEIGRNIHAHPSLSEALKDAAEGVEGHMINF

SEQ ID NO: 46284 - protein, 150 aa, Pyrococcus furiosus DSM 3638
MNTLKMQRRIAAEILKCGENRIWIDPERIDDVASAITREDIKRLIKEGVIKKKPIKGQSRYRAKIRHEQKKKGRHRGPGSRKGKKTARMGKKELWIKTIRALRKELRKLKAQKKIDRKTYRMLYIRAKGGQFKNKHQLYLFLEEHGLLKK

SEQ ID NO: 46285 - protein, 217 aa, Nymphaea tetragona
MGRGKIEIKRIENASNRQVTFSKRKQGILKKAREISVLCDAQVSLILFSSAGKLNEYCSPSTSLKELLSRYQKTSGKKLWDARHEYLNTELDRIRKENENMQIELRHLMGEDLSSLSVVELRNLEDSLQFGYDHVRVKQTECLNNDIEILRKNERMLEEENRQLKYILHQQEQMAMRELGDIDIGSNRKGQNYPSQSRVQPFGFCVQPIQPNLQQNK

SEQ ID NO: 46286 - protein, 215 aa, SYNECHOCOCCUS SP. WH 8102
MFGFLKQVGDYTRDAVDAARNLAQGFSVTFDHMKRRPVTVQYPYEKLIPSERYRGRIHYEFDKCIACEVCVRVCPINLPVVDWVMNKATKKKELRNYSIDFGVCIFCGNCVEYCPTNCLSMTEEYELAAFDRHSLNYDNVALGRLPTSVTTDPSVQPLRELAYLPAGEMDPHGVPNDRPRAGQLPSQVLETLAPPAKVGAKNEGQSTGTTQEGEA

SEQ ID NO: 46287 - protein, 396 aa, SYNECHOCOCCUS SP. WH 8102
MAQKQSGDLRHARTGIELRPGLDGVPATQSAICDIDGEQGLLTYRGYPMQDLAANSSFLETAFLLIWGELPSRDQLAEFEHAVQMHRRVSFRVRDMMKCFPASGHPMDALQSSAASLGLFYSRRAIDDPQYVYDAVVRLIAKIPTMVAAFQLIRKGQDPIQPRDDLAYSANFLYMLTEREPDPLAARIFDRCLMLHAEHSLNASTFSARVTASTLTDPYAVVASAVGTLAGPLHGGANEDVLAMLEEVGTAENAGAYLDEAMAAKRKIMGFGHREYKVKDPRAVILQALVEEMFARFGHDELYDVAVAIEREAESRLGPKGIYPNVDFYSGLVYRKLGIPRDLFTPVFAIARVAGWLAHWREQLGANRIFRPSQIYSGSQLRAWMPIDERVTAPAA

SEQ ID NO: 46288 - protein, 271 aa, Zea luxurians
  misc_feature (187)..(187): Xaa can be any naturally occurring amino acid
  unsure (1)..(271): unsure at all Xaa locations
HIMRLTGITGIVNDMDVSEWDPSRDKYIAVKYDVSTAVEAKALNKEALQAEVGLPVDRNIPLVAFIGRLEEQKGPDVMAAAIPQLMEMVEDVQIVLLGTGKKKFERMLMSAEEKFPGKVRAVVKFNAALAHHIMAGADVLAVTSRFEPCGLIQLQGMRYGTPCACASTGGLVDTIIEGKTGFHMGRXSVDCNVVEPADVKKVATTLQRAIKVVGTPAYEEMVRNCMIQDLSWKGPAKNWENVLLSLGVAGGEPGVEGEEIAPLAKENVAAP

SEQ ID NO: 46289 - protein, 214 aa, Cabomba caroliniana
MGRGKIEIKKIENASNRQVTFSKRKQGILKKAKEISVLCDAKVSLILFSSAGKMYEYSSPSTSLQNILAKYQSTSGKKLWDARHEYLNQELERIRKENENMDIELRHLRGEDLSSLSVVDLRNLEDSLQIGYENVILKKTQWMYNELERLKQSGDAIDEENRRLRFILKQQDAALCNPTEFDLGGNKKGKGSSSQLAAMQPFGFHVQHNLHNNK

SEQ ID NO: 46290 - protein, 492 aa, Yersinia pseudotuberculosis IP 32953
MANYFNTLNLRQQLAQLGKCRFMARDEFADEAGYLKGKKVVIVGCGAQGLNQGLNMRDSGLDVAYALRKEAIAEKRASWRKATENGFKVGTYEELIPQADLVVNLTPDKQHSAVVKAVQPLMKEGAALGYSHGFNIVEVGEQVRKDITVVMVAPKCPGTEVREEYKRGFGVPTLIAVHPENDPKGEGMAIAKAWAAATGGHRAGVLESSFVAEVKSDLMGEQTILCGMLQAGSLLCFDKLVSEGTDAAYAEKLIQFGWETITEALKQGGITLMMDRLSNPAKLRAYALSEQLKEIMAPLFQKHMDDIISGAFSSGMMADWANDDVKLLNWREETGRTAFENAPQFEGKISEQEYFDHGVLMIAMVKAGVELAFETMVDSGIIEESAYYESLHELPLIANTIARKRLYEMNVVISDTAEYGNYLFANAAVPLLKEKFMDSLQAGDLGKSIPGSAVDNAQLRDVNEAIRNHPIEAVGHKLRGYMTDMKRIAVAG

SEQ ID NO: 46291 - protein, 162 aa, Arabidopsis thaliana
MVAISEIKSTVDVTAANCLMLLSRVGQENVDGGDQKRVFTCKTCLKQFHSFQALGGHRASHKKPNNDALSSGLMKKVKTSSHPCPICGVEFPMGQALGGHMRRHRNESGAAGGALVTRALLPEPTVTTLKKSSSGKRVACLDLSLGMVDNLNLKLELGRTVY

SEQ ID NO: 46292 - protein, 140 aa, Magnetospirillum magnetotacticum MS-1
MLYPTYLRRSDPFALMRSMMRDLDRGFWPPARAAFPAVNVWQGPEAVGVTAELPGIEPGDIEISVKDNVLTLSGERKAPEVLDGARWHRNERSFGRFSRTIRLPFAASDDKVEARMTNGVLRIVISRPEEEKPKKIEGIL

SEQ ID NO: 46293 - protein, 362 aa, Oryza sativa
MAMVPSGSGGGPPVIAEVEMNGGATSGAATVRATVVQASTVFYDTPATLDKAERLIEEAAGYGSQLVVFPEAFVGGYPRGSTFGFGANISIGNPKDKGKEEFRKYHAAAIEVPGPEVTRLAAMAGKYKVFLVMGVIEREGYTLYCSVLFFDPLGRYLGKHRKLMPTALERIIWGFGDGSTIPVYDTPLGKIGALICWENKMPLLRTALYGKGIEIYCAPTADSRQVWQASMTHIALEGGCFVLSANQFCRRKDYPPPPEYVFTGLGEEPSPDTVVCPGGSVIISPSGEVLAGPNYEGEALITADLDLGEIVRAKFDFDVVGHYARPEVLSLVVNDQPHLPVSFTSAAEKTTAAKSDSTAKPY

SEQ ID NO: 46294 - protein, 582 aa, Shigella flexneri 2a str. 301
MHNDKDLSTWQTFRRLWPTIAPFKAGLIVAGVALILNAASDTFMLSLLKPLLDDGFGKTDRSVLVWMPLVVIGLMILRGITSYVSSYCISWVSGKVVMTMRRRLFGHMMGMPVSFFDKQSTGTLLSRITYDSEQVASSSSGALITVVREGASIIGLFIMMFYYSWQLSIILIVLAPIVSIAIRVVSKRFRNISKNMQNTMGQVTTSAEQMLKGHKEVLIFGGQEVETKRFDKVSNRMRLQGMKMVSASSISDPIIQLIASLALAFVLYAASFPSVMDNLTAGTITVVFSSMIALMRPLKSLTNVNAQFQRGMAACQTLFTILDSEQEKDEGKRVIERATGDVEFRNVTFTYPGRDVPALRNINLKIPAGKTVALVGRSGSGKSTIASLITRFYDIDEGEILMDGHDLREYTLASLRNQVALVSQNVHLFNDTVANNIAYARTEQYSREQIEEAARMAYAMDFINKMDNGLDTVIGENGVLLSGGQRQRIAIARALLRDSPILILDEATSALDTESERAIQAALDELQKNRTSLVIAHRLSTIEKADEIVVVEDGVIVERGTHNDLLEHRGVYAQLHKMQFGQ

SEQ ID NO: 46295 - protein, 279 aa, Zea mays
  misc_feature (270)..(270): Xaa can be any naturally occurring amino acid
  unsure (1)..(279): unsure at all Xaa locations
MDDPSSASNKHKHKRGRKPKASPPSPDHSSPSPSVAPAPAGRRGRKPRRHEALADVDATRPPSPPRRGEPKPVANGGDVVAVAESGPASWDEVVRVVPCMDAVVKVFCVHTEPNISLPWQRKRQYCSSSSGFIISGHHVLTNAHSVEYLATVLAIGTECDIGVSPIEFGTLPVLQDAVTVVGYPIGGDTISVTSGVVSRIEMLLYVHGSIELLGLQIDAAINSGNSGGPAFNDRGKCVGIAFQSLKHEDAENIGYVIPTPVITHFIEDYXKSREYTGCN

SEQ ID NO: 46296 - protein, 406 aa, Streptococcus pneumoniae
MQAQEKHSQAAVLGLQHLLAMYSGSILVPIMIATALGYSAEQLTYLISTDIFMCGVATFLQLQLNKYFGIGLPVVLGVAFQSVAPLIMIGQSHGSGAMFGALIASGVYVVLVSGIFSKVANLFPSIVTGSVITTIGLTLIPVAIGNMGNNVPEPTGQSLLLAAITVLIILLINIFTKGFIKSISILIGLVVGTAIAATMGLVDFSPVAVAPLVHVPTPLYFGMPTFEISSIVMMCIIATVSMVESTGVYLALSDITKDPIDSTRLRNGYRAEGLAVLLGGIFNTFPYTGFSQNVGLVKLSGIKKRLPIYYAAGFLVLLGLLPKFGALAQIIPSSVLGGAMLVMFGFVSIQGMQILARVDFANNEHNFLIAAVSIAAGVGLNNSNLFVSMPTAFQMFFSNGIVVASL

SEQ ID NO: 46297 - protein, 383 aa, Prosthecochloris aestuarii DSM 271
MGKSGAAPITYFDATNFATRFACELKGFNATDYIDQKSAGRMDPFCQYAVAASDQALKDSGLDVSSIDKARIGVVYGSGTGGMTTHDQQMRVYLERGPRRISPFFIPMLIPDIAAGQIAMRHGLMGPNYATASACATSLHAIMDAWMLMQMGMADYMVCGGSEAAITPMSVAGFNAARALSTANDNPTTASRPYDKDRDGFVMGEGAGALVLETLESAQARGATIYGEIAGVGASADAHHLTAPHPEGLGAVNAMNCALQQAGITPDKIDYINTHGTATPLGDLAELKAIKTVLGDHAKTVSISSTKSMTGHLLGAAGVVESIICLLAMKNQIVPPTINLDNLDPEIDVDVTPNTPKEKNLEYVLNNGFGFGGHNATLIFKKI

SEQ ID NO: 46298 - protein, 188 aa, Triticum aestivum
MSFAGMLNRLHGQPESYDKKAKYKFGRTLGAGTYGVVREADGPTGKVAVKIILKRNVKGNEQMVYDELEMLQKLKHPHIVKFVDWFESRDKFYIVTQLATGGELFDRICEQGKFTEKDAAETIKQVLLAVDFLHKNNIVHRDLKPENLLYLNRDPESDLVLGDFGIAKMLDGKGESLKTMAGSFGYAA

SEQ ID NO: 46299 - protein, 324 aa, Zea mays; identical to SEQ ID NO: 1208

SEQ ID NO: 46300 - protein, 193 aa, Triticum aestivum
MAVNDTKLADAENPGVMCRGGGIDSDSDVDFAGRANWLRAAVLGANDGLVSTASLMLGVGAVKHEVRAMVISGFAGLLAGACSMAIGEFVSVCSQRDVEIAQLDRDGKRGGDEERALPSPVQAAAASALAFSVGALLPLLAAGFIVGYKLRVAVVVAVATLALAAFGVDGAVLGRAPVVRSSAGSTRADWPTW

SEQ ID NO: 46301 - protein, 123 aa, Cryptococcus neoformans var. neoformans JEC21
MSHGFRQDMPPPGGYETLRYKRNLPLKGPSGAVLFGGVFAICTLGFYRLGQGNVEKRELKREKAWSRINVVPLLLAEQDRDAYRRQQAALAREKEIMKDYPGWEAGKRTYNSSRYTPNTIVVL

SEQ ID NO: 46302 - protein, 543 aa, Streptococcus pyogenes MGAS8232
MAKDIKFSADARAAMVRGVDMLADTVKVTLGPKGRNVVLEKAFGSPLITNDGVTIAKEIELEDHFENMGAKLVSEVASKTNDIAGDGTTTATVLTQAIVHEGLKNVTAGANPIGIRRGIETATATAVEALKAIAQPVSGKEAIAQVAAVSSRSEKVGEYISEAMERVGNDGVITIEESRGMETELEVVEGMQFDRGYLSQYMVTDNEKMVADLENPFILITDKKVSNIQDILPLLEEVLKTNRPLLIIADDVDGEALPTLVLNKIRGTFNVVAVKAPGFGDRRKAMLEDIAILTGGTVITEDLGLELKDATMTALGQAAKITVDKDSTVIVEGSGSSEAIANRIALIKSQLETTTSDFDREKLQERLAKLAGGVAVIKVGAPTETALKEMKLRIEDALNATRAAVEEGIVAGGGTALITVIEKVAALELEGDDATGRNIVLRALEEPVRQIALNAGYEGSVIIDKLKNSPAGTGFNAATGEWVDMIKTGIIDPVKVTRSALQNAASVASLILTTEAVVANKPEPAAPAPAMPAGMDPGMMGGF

SEQ ID NO: 46303 - protein, 412 aa, Escherichia coli
SKRRVVVTGLGMLSPVGNTVESTWKALLAGQSGISLIDHFDTSAYATKFAGLVKDFNCEDIISRKEQRKMDAFIQYGIVAGVQAMQDSGLEITEENATRIGAAIGSGIGGLGLIEENHTSLMNGGPRKISPFFVPSTIVNMVAGHLTIMYGLRGPSISIATACTSGVHNIGHAARIIAYGDADVMVAGGAEKASTPLGVGGFGAARALSTRNDNPQAASRPWDKERDGFVLGDGAGMLVLEEYEHAKKRGAKIYAELVGFGMSSDAYHMTSPPENGAGAALAMANALRDAGIEASQIGYVNAHGTSTPAGDKAEAQAVKTIFGEAASRVLVSSTKSMTGHLLGAAGAVESIYSILALRDQAVPPTINLDNPDEGCDLDFVPHEARQVSGMEYTLCNSFGFGGTNGSLIFKKI

SEQ ID NO: 46304 - protein, 535 aa, Oryza sativa
MEEGRRGDREGKSAAGWTALSTTKTTLEEKRRLQANGSVGGDAGTSGFRRIVRLFFACMVAGGIQYGWALQLSLLSPYSQTLGISHSYVSLTWICGPIAGFVVQPIVGYYSDRCTMKMGRRRPFILVGCLIICISVMIIGFSADIGRHLGDTKEHCSTYTGPRWSAAMVYIVGFWFLDFANNTVQGPARAMMADLSAGHHGPNVGQSIFSLWMAIGSVLGYLSGADGKWHEWFPWLKTAACCDACANLKGAFFTAVLLIVVSMTVTMYLADEMPLDKQDVDTSGGGGCAVFVDLFKSLRNLPPAMFKVLAVTAVTWLSWFPFIQYNTDWMGREIYHGEPQGTAAKADVYDAGVREGAMGLLFCSVALGVTSFVIPKLCRRLTSKVVWSISNFLVFALMAVMVAVGMVSMRGYRPSLAAGLTGPDPTLKAVALVVFALIGIPQAVLFSVPWAVASEVTAEEGGGQGLAIGVLNIAIVVPQLVIALTAGPIDGAFNKGNTPAFGIGGAFAFICGVLALIWLPKTRGVSNAAVVAGGH

SEQ ID NO: 46305 - protein, 397 aa, Zea mays
GQKESTLHLVLRLRGGMQIFVKTLTGKTITLEVESSDTIDNVKAKIQDKEGIPPDQQRLIFAGKQLEDGRTLADYNIQKESTLHLVLRLRGGMQVFVKTLTGKTITLEVESSDTIDNVKAKIQDKEGIPPDQQRLIFAGKQLEDGRTLADYNIQKESTLHLVLRLRGGMQIFVKTLTGKTITLEVESSDTIDNVKTKIQDKEGIPPDQQRLIFAGKQLEDGRTLADYNIQKESTLHLVLRLRGGMQIFVKTLTGKTITLEVESSDTIDNVKTKIQDKEGIPPDQQRLIFAGKQLEDGRTLADYNIQKESTLHLVLRLRGGMQIFVKTLTGKTITLEVESSDTIDNVKTKIQDKEGIPPDQQRLIFAGKQLEDGRTLADYNIQKESTLHLVLRLRGGV

SEQ ID NO: 46306 - protein, 452 aa, Ashbya gossypii ATCC 10895
MHVPLGLLVAMSWCAGSAATAVQMCNPLKEKKCPENIALAASILEEFKDVPPGFSNYTDTGIVGYGPNGASFTLAKRWDNPAIMSDFYLMYGKVEVTFKAAPGKGIVSSFYLQSDARDEIDLEWLGGDTAQFQTNFFCKGNVTTYTRGAFHNVSRPQEEFHTYTIDWKMDELVFYLDGKPIRRVKNDTSEGYPQSPMRLYMGVWAGGDPTNHPGTVEWAGGQTDYSKVPFTAYIKRIIASDYSSGRSYMYSDVSEKGVTIHSTQGKIYGRYDTAQEEFNRIQREEKLDYSDLPLSAFSPNLASGSSEATSVTSSATSVTSSATSVTSSAGSVTSGVTSSATTGVSSATATGNSTSGTQVSSSARASSDHSLAATLLSSGHSTSQLSSTTSLTPSKSTTPVLTSRGTVETTPSSTVTPDASSIASFPVSENGAKRSYMPLTYVAALGILSLMG

SEQ ID NO: 46307 - protein, 364 aa, Candida glabrata CBS138
MSKQWADGKDGVFRRQVSSFRETISNSHPVFKPAKGRYWLYVCLACPWAHRTLIARALKGLTSAIGVSVVHWHLDEKGWRFLQGDAQELLAGKAYEIAGGIEGANSDVSTRVGDIKNDSERLFVDGSVEPHHHFERLSELYLKSNPDYKDRFTVPVLWDTETQTIVNNESSEIIRILNSDAFDQFRDSDAEVPDLVPKELEAEIDEVNKWTYDNINNGVYKAGFSENGSNYEDEVTNVFTHLDKVESLLADKYKKLEKELGDKAKILSKYFIVGNQITETDIRLYTTIVRFDPVYVQHFKCNFTSIREGYPYIHLWLQNLYWNYPAFGKTTDFNHIKLHYTRSHPRINPLGLTPLGPKPDIRPL

SEQ ID NO: 46308 - protein, 451 aa, Arabidopsis thaliana
MDEKPAGRRVVLVAVPAQGHISPIMQLAKTLHLKGFSITIAQTKFNYFSPSDDFTDFQFVTIPESLPESDFEDLGPIEFLHKLNKECQVSFKDCLGQLLLQQGNEIACVVYDEFMYFAEAAAKEFKLPNVIFSTTSATAFVCRSAFDKLYANSILTPLKEPKGQQNELVPEFHPLRCKDFPVSHWASLESMMELYRNTVDKRTASSVIINTASCLESSSLSRLQQQLQIPVYPIGPLHLVASASTSLLEENKSCIEWLNKQKKNSVIFVSLGSLALMEINEVIETALGLDSSKQQFLWVIRPGSVRGSEWIENLPKEFSKIISGRGYIVKWAPQKEVLSHPVVGGFWSHCGWNSTLESIGEGVPMICKPFSSDQMVNARYLECVWKIGIQVEGDLDRGAVERAVRRLMVEEEGEGMRKRAISLKEQLRASVISGGSSHNSLEEFVHYMRTL

SEQ ID NO: 46309 - protein, 710 aa, Corynebacterium efficiens YS-314
MSANPGIPSSGTPEVNEPTTPVPPLPRKPDQATAEPYSPTGCPMHISPDVNAQQGEYLTTAQGGRLRDTDHSLKAGERGPLLMQDHHFREKITHFDHERIPERVVHARGAAAHGVFKANGAASSICRAGVFAEGKETPVFTRFSTVLGNRGSADTVRDTRGFAVKFYTDEGTWDLVGNNIPVFFIQDGIKFPDVIHAAKPHPDRDIPQAQSAHDTFWDFVTLHTEATHHTIWNMSDRGIPRSYRMMEGFGVNTFRMINDKGETSLVKFHWKPKLGVHSQVWEEAQITGGVDPDFHRRDLADAIESGAFPEWDLGLQVFPDNKEQMFEGIDLLDPTKIVPEELAPVQIVGTMTLNKNVSNFHEETEQVAFHPGHLPPGIDVTADPLLQGRLFSYLDTQISRLGGPNFAQLPINRPHAPVNDMFREGMHQQGQHIGVAPYQPNSLDGGNPFPAEPSNGALIDVPVPVEGEITRSAPASFDDHYSQARLFYVSLSPIEQKHVADAYTFELGKCYEKAIKERAVHVLSNVDHDLASTVAKGLGVPAPEKKDLPEPTPSPALSQVGKTWPIDGRQIGILVTDDLPEDQVADVASLSKAIEDAGMVPLVTSTSGGTIGEPEEATGVAVSRTYVTVRSIEFDAAVVVETPEQPEVSILLSEMIRHGKAVALVGDATAQVPDRMGDAPGVVTVNAAADALDVLTPMLKGHRTWAANPA

SEQ ID NO: 46310 - protein, 671 aa, Bradyrhizobium sp. BTAi1
MNLVAERRAALDEAQMANAIRALAMDAVEAAKSGHPGMPMGMADVATVLFKHFVKIDPTQPNWPDRDRFVLSAGHGSMLLYALHHLLGFHDMPMDQLRRFRQLGSRTAGHPEFGHAAGIETTTGPLGQGIATAVGMALSERMLNARFGDDLVDHHTYVIAGDGCLMEGISHEAIDLAGHLGLGRLIVLWDDNQITIDGPTSLSTSLDQKARFVAAGWHVAAVDGHDGEAVANAIIEARADPRPSLIACRTIIGFGAPNKQGTSATHGAPLGKEEVAAARESLGWIYSPFEVPEAIVHAWRVVGARGTRIRAEWQERLARSPQREEFVAHLAPPDAARLHAALADHRRRLCGERPKVATRKASELALEVVNSTIPNMVGGSADLTGSNNTRTKGMRPVTRSDFTGNYIHYGVREHGMAAAMNGISLHGGLRPYGGTFLAFSDYCRGAIRLSALMGRPVIYVMTHDSIGLGEDGPTHQPVEHLASLRAMPNVYVFRPADAVETAEAWEVALAAAKTPSVLCLSRQDLPTLRTEHGDENMTARGAYLLRDPGEHRDLTIIATGSEVAIAVEAADELSADGLAVAVVSAPCWELFAAQEAGYRAAVLGEGPRVGVEAGVALGWAEWLGPNSIFIGMTGFGASGPAADLYNHFGITAERVAAEGWRLARKPGEEHE

SEQ ID NO: 46311 - protein, 331 aa, Lactobacillus sp. MD-1
MKLIVYNVRDDEIPFVEKWGRDHQIEVTTTTTTLNTETAAEAAGFDGVSCLQTIPYSKELFAALQRLGIHYLALRNVGTDNIDIQAAKANNVKITNVPAYSPESIAEFAVMMALYLSRKVGYMQQQLQEQHEFHFSPAFMGRLISEQTVGVIGTGRIGRHAIQLFRGLGANVIAYDKYPQKITGGAFKYVDHLEDIIKQSDIISLHMPATADNFHLFNHEVFEEMKPNAILINTARGTIVDTNDLIFALESGEIAAAGIDTLEDESIDLQDSRSTKKITDADLIKLSMMPNVILTPHSAFHTTESVKNMVNISLNNLKTMAEGGKPADLVD

SEQ ID NO: 46312 - protein, 113 aa, Pyrococcus furiosus DSM 3638
MMRDIGLRVQPPAEKCDDPKCPWHGNLKIHGRVFEGIVVSDKPRKTVTVERQYYFYLNKYERYELRRSKIHAHNPPCINAKVGDKVLIAETRPLSKTKHFVVVAVLERAEERR

SEQ ID NO: 46313 - protein, 214 aa, SYNECHOCOCCUS SP. WH 8102
MSASPTYGELTNQGASTNIAWHQASVDRAARAEQRGHRSAILWFTGLSGSGKSTLANAVNAALFQRGLATYVLDGDNVRHGLCKDLGFSDADREENIRRIGEVAKLFLDSGVIVLTAFVSPFRADRDKARALVDDGDFIEIHCAADLEVCESRDPKGLYAKARAGQIKEFTGISSPYEAPQAAELKIDTGSQELAESVDLVIKALQERGVIPAA

SEQ ID NO: 46314 - protein, 217 aa, Nuphar japonica
MGRGKIEIKRIENASNRQVTFSKRKQGILKKAKEISVLCDSQVSLILFSSAGKLYEYCSPSSSLKDVLTRYQKSSGKKLWDARHEYLSTELDRIRKENENMQIELRHFMGEDLSSLTVQELRALEDSLQIGFDSVHIKQTECLNNDIQILKKNERILEEENRQLKYILHQQEQSALRELRDIDLGSNKKGKGYPSQSGVQPFGFRVQPIQPNLQQNK

SEQ ID NO: 46315 - protein, 370 aa, Lactococcus lactis subsp. lactis Il1403
MPETTTILYRGGVFMRAARFYDRGDIRIDEINEPIVKAGQVGIDVAWCGICGTDLHEFLDGPIFCPSAEHPNPITGEVPPVTLGHEMSGVVNFIGEGVSGLKVGDHVVVEPYIVPEGTDTSETGHYNLSEGSNFIGLGGNGGGLAEKISVDERWVHKIPDNLPLDEAALIEPLSVGYHAVERANLSEKSTVLVVGAGPIGLLTAAVAKAQGHTVIISEPSGLRRKKAQEAQVADYFFNPIEDDIQAKVHEINEKGVDAAFECTSVQPGFDACLDAIRMGGTVVIVAIWGKPASVDMAKLVIKEANLLGTIAYNNTHPKTIDLVSTGKIKLDQFITAKIGLDDLIDKGFDTLIHHNETAVKILVSPTGKGL

SEQ ID NO: 46316 - protein, 867 aa, Picea abies
MALLSSSLSSQIPTGSHPLTHTQCIPHFSTTINAGISAGKPRSFYLRWGKGSNKIIACVGEGTTSLPYQSAEKTDSLSAPTLVKREFPPGFWKDHVIDSLTSSHKVSAAEEKRMETLISEIKNIFRSMGYGETNPSAYDTAWVARIPAVDGSEHPEFPETLEWILQNQLKDGSWGEGFYFLAYDRILATLACIITLTLWRTGETQIRKGIEFFKTQAGKIEDEADSHRPSGFEIVFPAMLKEAKVLGLDLPYELPFIKQIIEKREAKLERLPTNILYALPTTLLYSLEGLQEIVDWEKIIKLQSKDGSFLTSPASTAAVFMRTGNKKCLEFLNFVLKKFGNHVPCHYPLDLFERLWAVDTVERLGIDHHFKEEIKDALDYVYSHWDERGIGWARENPIPDIDDTAMGLRILRLHGYNVSSDVLKTFRDENGEFFCFLGQTQRGVTDMLNVNRCSHVAFPGETIMQEAKLCTERYLRNALEDVGAFDKWALKKNIRGEVEYALKYPWHRSMPRLEARSYIEHYGPNDVWLGKTMYMMPYISNLKYLELAKLDFNHVQSLHQKELRDLRRWWKSSGLSELKFTRERVTEIYFSAASFIFEPEFATCRDVYTKISIFTVILDDLYDAHGTLDNLELFSEGVKRWDLSLVDRMPQDMKICFTVLYNTVNEIAVEGRKRQGRDVLGYIRNVLEILLAAHTKEAEWSAARYVPSFDEYIENASVSISLGTLVLISVLFTGEILTDDVLSKIGRGSRFLQLMGLTGRLVNDTKTYEAERGQGEVASAVQCYMKEHPEISEEEALKHVYTVMENALDELNREFVNNRDVPDSCRRLVFETARIMQLFYMEGDGLTLSHEMEIKEHVKNCLFQPVA

SEQ ID NO: 46317 - protein, 406 aa, Streptococcus pneumoniae
MQTQEKHSQAAVLGLQHLLAMYSGSILVPIMIATALGYSAEQLTYLISTDIFMCGVATFLQLQLNKYFGIGLPVVLGVAFQSVAPLIMIGQSHGSGAMFGALIASGIYVVLVSGIFSKIANLFPSIVTGSVITTIGLTLIPVAIGNMGNNVPEPTGQSLLLAAITVLIILLINIFTKGFIKSISILIGLVVGTAIAATMGLVDFSPVAVAPLVHVPTPLYFGMPTFEISSIAMMCIIATVSMVESTGVYLALSDITKDPIDSTRLRNGYRAEGLAVLLGGIFNTFPYTGFSQNVGLVKLSGIKKRLPIYYAAGFLVLLGLLPKFGALAQIIPSSVLGGAMLVMFGFVSIQGMQILARVDFANNEHNFLIAAVSIAAGVGLNNSNLFVSMPTAFQMFFSNGIVVASL

SEQ ID NO: 46318 - protein, 266 aa, Ipomoea nil
MMSIREVMESDQWLFRHSVFVLLLIAPPVYIACRFITAPFGKHVRPGWGPTISPPLAWFLMESPAIWLTLLLFPFGRSSSNPLAQILMAPYLLHYAHRTIVYPLRLYLNSDPRRAAAGFPVSVALMAFTFNILNAYLQTRWVSHYADYEGGGLFWWRFACGMAVFLAGMAVNVWADKVLLRLKSEGGGYKIPRGGLYEYVSCPNYFGEILEWLGWFLMTWSAAGFAFFLFTCANLMPRAWSHRQWYLEKFGEDYPRKRKAVIPFLY

SEQ ID NO: 46319 - protein, 476 aa, Cryptococcus neoformans var. neoformans JEC21
MPSFEPAVSSHIAPLPSASKPLPLTTSTEGLQALADKHITKGLGRLRDHVFKEGKGLRVLTTENQKLLDFTSGIGVTSLGHAHPDVTAAIISQAQSIIHVQCAIGLSEPYVQLVESLLTMMPDPSLDSFFFWNSGSEAIEAAIKVSRTKTKRNNIVVMQGGYHGRTSGAAALTRSKTSFFRGTGPLMPCVYTTPFPYWHAMGLPKDTPEEVLIEQAILGIENLLQQQTAPEDTAAIFLEPVIGEGGYIPAPTAYVKHLRKLCDKYGIMLVIDEIQTGFGRTGKTFAIEHTGVTPDIMVYAKGFANGMPISGIVTRKEIMDVMAPGSLGGTYSGNVVACAAALATTRYMRTHDILGNVQARSEQLFKGLREIQEDEANGGWMIEEVRGKGLMIAIEFKDPNSKLTSSHNRGDISLPGNLNKLVQDACYDRGLLVLTTSIYPVLRLIPALVLSEEEVDEALKIIKESVKEVASVIEGN

SEQ ID NO: 46320 - protein, 338 aa, Pasteurella multocida
MAILVTGGAGYIGSHTVVELLNANKDVVVLDNLCNSSPKSLERVAQITGKQVKFYQGDILDTALLQKIFAENQIQSVMHFAGLKAVGESVQKPAEYYMNNVTGSLVLIQEMKKAGVWNFVFSSSATVYGDPEIIPITESCKVGGTTNPYGTSKFMVEQILKDIAKATPEFSITILRYFNPVGAHESGLIGEDPNGIPNNLLPYISQVAIGKLPQLSVFGSDYETHDGTGVRDYIHVVDLAIGQLKALDRHEGDAGLHIYNLGTGSGYSVLDMVKAFEKVNDIKIPYKLVDRRPGDIATCYSDPSLAKTELNWTAARGLEQMMKDTWHWQKKNPKGYRD

SEQ ID NO: 46321 - protein, 675 aa, Mesorhizobium loti MAFF303099
MCGIAGIVALNAAAASPSREALMRMVGTLAHRGPDEHGLYRDKRAGLAHARLSVVDLSSGQQPLADTGDTSWIVFNGEIFNYVELREKLIALGHRFRTRSDTEVALHAYRAWGEAAFERMNGQWAIAIWDSIAGRLVLSRDRFGICPLHFCEHAGRLYFASEVKAIFAADPTIPRAFDPAGLDQTFTLWTVVPPQGVFQGIHELVPGHVRIYQDGTVREQVFWQPSYPENIGALQGEFTGSCDDAVDRVRDALEAATALRMVRADVPVGCYLSGGLDSSLVATLGRRFAGRRFQTFSLRFADAEYDETRFQRLVAEATGSEHHEVVVSRGDIAAIFPEVIHHTERPILRTAPAPLFLLSRLVRERGIKVVLTGEGADEMFAGYDLFREAKVRRFWGRQPASTRRSRLLERLYPYLTRSPVQQQAMARQFFGRGIEAYDAPGFAHDTRWRSTGAIKRLFSADLRAESQRRDAVSELLARLPAAFSRWSHLAQDQYLEVQTLMSGYLLSSQGDRMLMAHSVEGRFPFLDDELVRLANSLPPSYKLRVLDEKHVLKRVAQPIVPSEIVTRKKQPFRAPNALCFAADAAPEYIREALSETAIRKANVFDPVSVTRLLDKCQARTGDGDLSNADNMALVGVLSTQLLHQQFVASCPSATHVRGLSVDVDREHREERLHVA

SEQ ID NO: 46322 - protein, 564 aa, Ashbya gossypii ATCC 10895
MAESKLYLGFDLSTQQLKCLAIDEDLAIKCTAVVDFDRDLAGYETVKGVYTREDNVVESPVEMWLEALDLCFERLAREVDLGAVEAISGSCQQHASVYWTEDVKTRIRELDSRSGLRAQLGPCLSRANAPNWQDHSTEAQREQFEAHCGGPQELAQLTGSKAHFRFTGLQIKKIRDTEPATLTATPSISLASSFLASVLVGKLVPPEEADACGMILYNIAQHRYVEGLLQMVDDALFDKLCGNPVRCDNVRPLGTVSRYFKEKYGINTSCNIYQLTGDNLATICSLPLQKNDLLVSLGTSTTVLAVTEKYSPSPNYHMFIHPTIPGNYMGMVCYCNGALARERIKDTLGDESGWAAFSKALEDDSVDTSAELGVYFPLPEIVPSVDHPLVKRVRISPKGLQEVESFASPAHDAKNIVESQALSCRVRVAPLLSTPPEISDTGGHAAFDGQQRDVAEFTRRPNRVFFVGGASKNDAIVRAMPNILGAKGGNYRLETSNSCALGGCYKAFWSDLLYKQKTNASFADWLDSVFKWDRDCKMLCKTDNRKWAASLGKIAALSRLEETL

SEQ ID NO: 46323 - protein, 500 aa, Cryptococcus neoformans var. neoformans JEC21
MPSLTQTKDLASLLSDASHFKQKGYINGEWVSASDGATFPLYNPATGAKLADMPHMPRSQVAEAINAAKAAFPAWAALTAYQRQNYLLKLFKEMEEHSEDLAIILCTENGKPLAESRVEISYGASFLTWNAAEALRTYGQTIPSPFPGTRNTVIKQPIGVCGLITPWNFPNAMITRKMAPALAAGCTVVIKAPAETPLSALAMCVLCERVGIPPGVVNVVTMDKGQREMAAGLELCENVKVSKISFTGSTPVGRLLMKQSSGTLKKLSFELGGNAAFIIFDDADLDLAVNGVILSKFRAAGQTCICANRIFVHSKIYDDFARRLVERVKAFKVGNGIEEGVTIGPLVSQRGVEKVERHVQDAVGLGAKVLVGGKRIDKGEGSCFYEPTVLVDVPRQCAVSNEETFGPLAPLFKFDDEDDVVERANSSEVGLAAYFFTKDLARTHRVAEKLEVGMVAVNTGAIAQSCVPFGGVKQSGFGREGGPSGIDEFMVEKLITIGGL

SEQ ID NO: 46324 - protein, 1989 aa, Shewanella sp. ANA-3
MHAHPTQQDSTAVPNDQRQSSKAMPKIAIVGLAVQYPDADTPEQFWQNLLDKKDSRSQIDAAKLNANPADYQGVQGQADRFYCDKGGYIRNFHFDPQGYQLPPTAFEGLDESFLWALDCSKKALLDAGVDLTAPLLERTGIVMGTLSFPTASSNELFLPIYHQAVEKALKTKLNQPEFALAPFANGLIAGTQQAANGAIAHTASKLLSDALGLGGAQLSLDAACASSVYALKLACDYLTTGKADMMLAGAISGADPFFINMGFSIFHAYPDHGISAPFDSNSKGLFAGEGAGVLVLKRLEDAERDGDNIYAVVSGIGLSNDGKGQFVLSPNSKGQVQAFERAYAAANTHPSNIEVIECHATGTPLGDKVELTSMERFFEDKLGGTQAPLIGSAKSNLGHLLTAAGMPGIMKMIFAMRSGQLPASINLKAPISSPKGLFSSNNIPTQLQTWPDKTGNERRHAGVSVFGFGGCNAHLLLESYQPTIHSAEKQANKPVYQQQALTVIGMASHFGPLASINALDKALLAQTDAFIPLPPNRWKGLDKHPDILNQFGLNRAPKGAYIEQFDFDFLRFKVPPNEDDRLISQQLLLIKVADEAIRDAKLTAGSKVAVLVAMETELELHQFRGRVNLHTQLADSLKQQGVHLSNDEYLALEAIAMDSVLDAAKLNQYTSFIGNIMASRIASLWDFNGPAFTISAAEQSVARCIDVAQNLLSQERLDGVVIAAVDLSGSIEQIILKNAQIAVDLDANSTNPQWKVGEGAGAIVLTSQQASNSQQASNSSQKGYGQIRGQAFGTHHQLPKLLDSLITETAIANPSVPAAIHMVEQCIAPEERLPAEQLLAQLNLMGTPCSRVANTLGHSFAAAGMASLLRALLSLKNRAAGTDKNADKQALVSTQSQGVSSLLLLSQTATQAAQLEQRLEQDLTLSEQKHLIKPVTLGGRDIYQHIVDTPLPALAAIQGKMRQLQPVAPHATQTKPAEQAALDIRAENVTPFATPLAVESGMSSNAPHQYPAAPLAQDRASQDSAALLQNQQLLQNQQLAREAHLAFLQSREQGLKLADALLKAQLSQTTQMGSVTPHVASSANTAPIAAQQAVSVPELKSELKPELKPDHANVAPYTPPIPAAKPCIWNYQDLVEYAEGDIAKVFGADYAIIDSYTRRVRLPTSDYLLVSRVTKLNAQMNRYQPSTMTTEYDIPVDAPFLVDGQIPWAVAVESGQCDLMLISYLGIDFENKGERVYRLLDCTLTFLGDLPRGGDTLRYDISINHFARNGDTLLFFFSYECFVGDKLILKMDGGCAGFFTDKELADGKGVIRTEAEIKAREQAQIALANEYARNGNKPRFTPLLNCAQTAFSYGQIHRLLSADIGGCFGGEHAAHQAKFGLQPSLCFASEKFLMIEQVSKLEVHGGAWGLGLIEGHKQLAPDHWYFPCHFKGDQVMAGSLMAEGCGQLLQFFMLHIGMHANTQAGGVTNGRFQPLENASQKVRCRGQVLPQSGTLTYRMEVTEIGMSPRPYAKANIDILLNGKVVVDFQNLGVMIKEEADCTRYSQSGYSQSHSSQSNAPQAANIDNQAEQAPLMAQIPDVAAPLNKGVVPLKHVSAPIAPTGSKYANRVPDTLPFTPYHLFEFATGDIENCFGPDFSIYRGLIPPRTPCGDLQLTTRVVAIEGKRGELKKPSSCIAEYEVPSNVWYYAKNSHPSVMPYSVLMEISLQPNGFISGYMGTTLGFPGQELFFRNLDGSGKLLREVDLRGKTIVNDSRLLSTVIAGSNIIQNFSFELSCDGEPFYRGNAVFGYFKADALKNQLGIDNGKITQAWHLERGIKADSQINLLDKNGRSFVAPLGKPHYRLAGGQLNFIDKAEIVKTGGKKGLGYLYAERTIDPSDWFFQFHFHQDPVMPGSLGVEAIIELLQTYAIDQDLGAGFNNPKFGQILSEIKWKYRGQINPLNKQMSLDVHITSIEDKDGKRIIKGDANLSKDGLRIYEVTDIAICIEEA

SEQ ID NO: 46325 - protein, 424 aa, uncultured archaeon GZfos17A3
MKNYKSRITKEGTGEVEPEGVEENKLAPVKILVCDDDPAFRKLVQTYLRSADKGFVLEEAGQKEEIQDALDKGGIDLVLMDILMPEKSGIEWLDEIVEKRIAPVVMVTGFGSEEIAVQSIHEGAIDYIPKDHLTKDRLLSTIKITLETWKRKRAEDEKRRLMEELETKNAELKKAMEHMADLEEVTRMKTDFLSITSHELRTPLTPMKSQLQMLQEGYMGKLDKKQEKSIEVVLRNLTRLENLIGDILDISRIEAGRIKLSFNSMNLNDAVKEAIKMQEAFAKGKNIEIRAKLAEMPNIIGDAERLRQAIGNLLNNAIKFSEKTGKVIIETKRLGKNVRFSITDYGIGISKTDQKKLFKPFTQIDSSMGREHVGTGLGLAITKGIIQAHNGKIWAESELGKGSTFYFVIPTKQKITEKEASYIG

SEQ ID NO: 46326 - protein, 589 aa, Xanthomonas oryzae pv. oryzae KACC10331
MSRRHRRSPAQRRTGHCRCSSRRTDSVVGLHLSAFSFPVIVLDPCCYAGLAPCRPAIGGNLMNHRIRTQMFGLIAMTLPLAACAQQPAPAAKDVAPIAANRSATPAPQLVAGLPDFTNLVEQVGPGVVNVETTITRKDAMARQQRSGPGGRGGGAMPDDDQMPEFFRRFFGPDFQMPGGPRQGPGGPGQGDDDGGIAGKSMGSGFIISADGYVLTNHHVVDGASEVTVKLTDRREFKAKVVGSDEQYDVALLKIEAKGLPTVRLGDSNTLKPGQWVVAIGSPFGLDHSVTAGIVSATGRSNPYADQRYVPFIQTDVAINQGNSGGPLLNTRGEVVGINSQIFSASGGYMGISFAIPIDLAFSAAEQIKATGHVSRGMLGVQVGPIDSLKAQGLGLPDSRGALVNDIPAGSPAGKAGVEVGDVIRAVNGKPIDVASDLPPMIGLMAPGSKVTLDVLRDGKPRKVTVTLAPLQGGSENAAPRTAADEAKPSAPASVELLGLQVADLTAAERSRLGLEAGEGVRIASVTGAAARSTQPPLSPGLIIARVGRTKVGSVAELNRALSSYKKGDVVMLLVTDGKATSYVALKAGG

SEQ ID NO: 46327 - protein, 540 aa, Xanthomonas campestris pv. vesicatoria str. 85-10
MNDPGHGELRAPQISDTRGLPVEKHRSDIFFAAVETTRMPMTVTDPHLPDNPIVFANRAFLEMTGYAADEVIGNNCRFLQGPDTDPASISDVRASIESRSEFATEVLNYRKDGSSFWNALFISPVFDDKGNLVYFFGSQLDVSRRRDAEDALRQAQKMEALGQLTGGIAHDFNNLLQVMSGHLEVIQMMASAGAGNAERIAFSAEHAAAAAAKAATLTQQLLAFSRKQKLRGRVVNLNGLVAGMTNMAERALGGGVTLRQALEEGLWNCQIDTTQAEVALLNVLINARDAMAQAERKEVTVQTQNVEISGHDLAMYHQLSPGRYVSIAVTDTGSGMPPEVVSRVMEPFFTTKEEGQGTGLCLSMVYGFVKQSGGTVRIYSEVGEGTTVRLYFPASSEFENDLQAAKSRAIDKGGNETILVVEDKQDVAVVARMFLENAGYRVLSASSGREAMEILEKTPQVDALFTDLIMPGGMNGVMLAREARRMLPKIKILLTTGYADASIQRTDVGGAEFDVVDKPYTQKELLKRIRMLLDGPTGVG

SEQ ID NO: 46328 - protein, 107 aa, Halobacterium sp. NRC-1
MTVTDQTGAETLAKSSGGSVVKQNRDEASPYAAMQMAEQLAEEVLDQGIEKVHVRVRGPGGNLQRSPGPGAQAAIRALARAGLEIGRIEDVTPIPHDGTRPPKNSGY

SEQ ID NO: 46329 - protein, 471 aa, Solanum tuberosum
MVFYRSVSLLSKLRSRAVQQSNVSNSVRWLQVQTSSGLDLRSELVQELIPEQQDRLKKIKSDMKGSIGNITVDMVLGGMRGMTGLLWKPHYLDPDEGIRFRGLSIPECQKVLPAAKPGGEPLPEGLLWLLLTGKVPSKEQVNSIVSGIAESGIISLIIMYTTIDALPVTAHPMTQFATGVMALQVQSEFQKAYEKGIHKSKYWEPTYEDSMNLIAQVPLVAAYVYRRMYKNGDTIPKDESLDYGANFAHMLGFSSSEMHELLMRLYVTIHSDHEGGNVSAHTGHLVASALSDPYLSFAAALNGLAGPLHGLANQEVLLWIKSVVEECGENISKEQLKDYVWKTLNSGKVVPGFGHGVLRKTVPRYTCQREFAMKHLPEDPLFQLVSKLYEVFLLFLQNLAKLKPWPNVDAHSGVLLNYYGLTEARYYTVLFGVSRALGICSQLIWDRALGLPLERPKSVTMEWLENQCKKA

SEQ ID NO: 46330 - protein, 430 aa, Coxiella burnetii RSA 493
MSNRKAKLSFENQSVEFPIYSPTLGKDVIDVKTLGNHGAYALDVGFYSTAACESKITFIDGEKGILLYRGYPIDQLADKSDYMEVCYLLMYGELPNKGEKEKFVRTIKEHTSVYEQVTKFFNGFHYDAHPMAMVLSTIGALSAFYHDALDITKPADRELSAIRLIAKMPTLAAMSYKYSIGQPFMHPRRAMNYAENFLHMLFGTPYEETEPDPVLARAMDRIFILHADHEQNASTTTVRVAGSTGANPFACISAGISALWGPAHGGANEACLNMLRKIGDEKNIGQYIKKAKDKNDPFRLMGFGHRVYKNYDPRAKVMQKTCYEVLDAVGRHNEPLFKLAIKLEKIALEDDYFIEKKLYPNVDFYSGLTLNAIGIPSNMFTVIFALSRTVGWISHWMEMMSSPDHRLARPRQLYTGETEREVISLDKRQA

SEQ ID NO: 46331 - protein, 217 aa, Nuphar japonica
MGRGKIEIKRIENASNRQVTFSKRKQGILKKAKEISVLCDAQVSLILFSSAGKLYNYCSPSSSLKDILTRYQKSSGKKLWDARHEYLSTELDRIRKENENMQIELRHFMGEDLSSLTVQELRALEDSLQIGFDNVHVKQTECLNNDIHILKKNERILEEENRQMKYILHQQEQMALRELRDIDLGSNNKGKGYPSQSGVQPFGCRVQPIQPNLQHNK

SEQ ID NO: 46332 - protein, 511 aa, Burkholderia sp. 383
MTTPRPTPRADTPLDPIIQLLALAGEQGYLTHADLVDALPPESDSPDALDVVRAALADIGIAVLDEPAAPAPFAGSAPVDVDRDALDEGRAMLGDLARGTGASTDPLALYMRRMQAVPLLTREGEIVLAREIETGRHQILHALAGYPAAVDALLARHRAPVATAAAGSHDDDAADTPAPASYDALQAAVAALRGALHTHGFRSAEYRDARNHIATLLGSIAWVAPAVDDASGIVRALASTPHGTATGEAASFDTVARRALAAALTDGQQKVRDATRAMLEANLRLVLSIARKYMNRGVDLPDLVQDGSLGLMRAIEKFEYRRGFKFSTYATWWIRQAITRAVADRARTIRVPVHVGDQYQRVQRHALRFRQRTGRRATPAELAAETGLDEDKLRAVLALPAEPVSLDAPLPDADTGLVELIEDQASASPFEQLADTRMRECVRSLLRSVTPAEADVLRRRFGLGGTEPDTYDAIAQDAGMSRERVRQIEKRALAALRTAAEAENAQSFLDA

SEQ ID NO: 46333 - protein, 454 aa, Legionella pneumophila subsp. pneumophila str. Philadelphia 1
MTMKTKHFDLIVLGGGSGGIASAVRAAQYGAKVAVIEQNHLGGTCVNLGCVPKKIMYNASSIAETLHKSPDYGFFLENNAKLDWKRLVNKRNAYIERLRENYEKRFSQHKITLIQGKGIFHDQSSITIDHTIYQAEHIIIATGSEPALPAINGIKHAIDSDGFFSLTKLPAKVAVIGSGYIGVELAGILNSLGSETHLLMRGTRPLSRFDHMIGDTLMEIMQKQGICIHQNHKAQAIHLHSDGRKSILCQSGSIIENIDVIISAVGRKPRTGNLNLDKINVNMDDKGLILVDAFQNTSVKGIYAIGDVTNAPALTPVAIAAGRRLADRIFGNQPDACLNYDNICSVVFSHPPSGSVGLTEHEAIEKYGKNKIKIYQTRFIPMYDALSIDKTPTAMKLVTLGKKEKIIGLHVVGYSADEMLQGFGVAIKMGACKKDFDNTIAIHPTSAEEFVTMV

SEQ ID NO: 46334 - protein, 197 aa, Periploca sepium
SVHGQWKSHELRSKDEKTLLFGEKPVKVFGIRNPEEIPWGEAGADFVVESTGVFTDKDKAAAHLKGGAKKVVISAPSKDAPMFVVGVNEHEYKPALNVVSNASCTTNCLAPLAKVINDRFGIVEGLMTTVHSITATQKTVDGPSAKDWRGGRAASFNIIPSSTGAAKAVGKVLPALNGKLTGMSFRVPTVDVSVVDL

SEQ ID NO: 46335 - protein, 271 aa, Glycine max
MACSMNSVFCVPELNESIFGSKTKGVLLPCPSKTANAKSWGCSVLSNAFMGKSIALGEKGSGCCNSKFSSNVPVHAQATICVSKALKWWKKTLKPNMIEIHSAQELVHSLLNAGDSLVVVDFYSPGCGGCKALHPKICQIAELHPNAIFLKVNYEELKTMCHGLRIHVLPFFRFYRGAEGRVSSFSCTNATIKKFKDALTKHGNERCSLGPAKGLEESELKILASIGEINSSPLLSPKQGKLEDLLTESHDFAGVWNMENNSRGLMLDAIY

SEQ ID NO: 46336 - protein, 257 aa, Medicago sativa
MEGMAQHPVPRTVEEVFSDYKGRRAGLIKALTTDVEKFYQLVDPEKENLCLYGFPNETWEVNLPVEEVPPELPEPALGINFARDGMQEKDWLSLVAVHSDSWLLAVAFYFGARFGFGKNDRKRLFQMINDLPTVFELATGTAKQSKDQLTAHNNGSNSKYKSSGKSRQSESQTKGVKMSAPVKEEVDSGEEEEEDDDEQGATCGACGDNYGTDEFWICCDMCEKWFHGKCVKITPAKAEHIKQYKCPGCSIKKPRIG

SEQ ID NO: 46337 - protein, 230 aa, Ipomoea batatas
KRLVFTSSTAAVHIKQTQQLVYDESSWSDLDFIYANKMGGWMHFASKTLAEKEAWKAAKEKEIEFISIIPPLVIGPFLIPTFPLSLVTALSPIMDPVGNGFHHNIIKQGKFVHLDDLCEAQIFLYQHPKAQGRFICSSHHATIHDVANMIRHNWPEYYVPSEFKGIEKELPIVSFSSKKLQEMGFEFKYTLEDMYRGAIETLRKKGLLPYSTKEPADIEQEQHSGKEPKS

SEQ ID NO: 46338 - protein, 197 aa, Periploca sepium
  misc_feature (70)..(70): Xaa can be any naturally occurring amino acid
  misc_feature (72)..(72): Xaa can be any naturally occurring amino acid
  unsure (1)..(197): unsure at all Xaa locations
SVHGQWKSHELRSKDEKTLLFGEKPVKVFGIRNPEEIPWGEAGADFVVESTGVFTDKDKAAAHLKGGAKXVXISAPSKDAPMFVVGVNEHEYKPALNVVSNASCTTNCLAPLAKVINDRFGIVEGLMTTVHSITATQKTVDGPSAKDWRGGRAASFNIIPSSTGAAKAVGKVLPALNGKLTGMSFRVPTVDVSVVDL

SEQ ID NO: 46339 - protein, 119 aa, Zea mays
MARTSFKMEHDLEKRQSESARIRDKYPDRIPVIVEKAGKTDVPEIDKKKYLVPADLTVGQFVYVVRKRIKLSPEKAIFVFVKNTLPPTASLMSAIYEENKDEDGFLYMTYSGENTFGSA

SEQ ID NO: 46340 - protein, 480 aa, Vibrio cholerae O1 biovar eltor str. N16961
MRKVLLTIRKIAMTQPTSRKADLVYQLNDRPPLPQTLFAALQHLLAMFVAVITPSLIICQSLGVPADQTNTIISMSLFASGLSSFIQIRTFGPIGSGLLSIQGTSFNFLGPIIGAGLALKAGGADIETMMAAIFGTILVASSAEILLSRVLQFAQRIITPLVSGIVVTLIGLTLVQVGLISMGGGYAAMADGSFGSLDKLALAGTVLAIIVLLNRAHNPYVRVASIVIAMLVGYVMAYLMGMVNTDNLAETQFIALPIPMQYGLGFDWSLFIPLVLIFLITALEAIGDITATSEVSGEPVKGPVYMKRIKGGVLADGLNSALAAVFNSFPNSTFSQNNGVILLTGVASRYVGYFIAGMLVLLGLFPGVASFVQLIPEPVLGGATIVMFGTIAAAGVRIISRVDLDRRAILIMALSFSMGLGIAQKPEILQFMPEFIKNLFSSGVAAGGITAIVLNLLLPEVRRDEDAASVAKTEAAQESN

SEQ ID NO: 46341 - protein, 271 aa, Zea mays subsp. parviglumis
NIMRLTGITGIVNGMDVSEWDPSRDKYIAVKYDVSTAVEAKALNKEALQAEVGLPVDRNIPLVAFIGRLEEQKGPDVMAAAIPQLMEMVEDVQIVLLGTGKKKFERMLMSAEEKFPGKVRAVVKFNAALAHHIMAGADVLAVTSRFEPCGLIQLQGMRYGTPCACASTGGLVDTIIEGKTGFHMGRLSVDCNVVEPADVKKVATTLQRAIKVVGTPVYEEMVRNCMIQDLSWKGPAKNWENVLLSLGVAGGEPGVEGEEIAPLAKENVAAP

SEQ ID NO: 46342 - protein, 273 aa, Ipomoea batatas
KKLVFTSSAGTLNVQPQQKPVYDESCWSDLDFIYAKKMTGWMYFASKILAEKEAWKATKEKKIDFISIIPPLVVGPFITPTFPPSLITALSLITENQAHYSIIKQGQYVHLDDLCEAHIFLYEHPKAEGRFICSSHHTTIHGLGEMIRQNWPEYYIPSQFKGIEKDLPVVYFSSKKLQDMGFQFKYSLEDMYRGAIETLRKKGLLPYSTKELPAAIEEEQETVPLKVQEPTKQEATTVPLKAAAIEPKQETVPLKLEEPTAIEQKQKVVPLKA

SEQ ID NO: 46343 - protein, 271 aa, Zea mays subsp. parviglumis
  misc_feature (183)..(183): Xaa can be any naturally occurring amino acid
  unsure (1)..(271): unsure at all Xaa locations
NIMRLTGITGIVNGMDVSEWDPSRDKYIAVKYDVSTAVEAKALNKEALQAEVGLPVDRNIPLVAFIGRLEEQKGPDVMAAAIPQLMEMVEDVQIVLLGTGKKKFERMLMSAEEKFPGKVRAVVKFNAALAHHIMAGADVLAVTSRFEPCGLIQLQGMRYGTPCACASTGGLVDTIIEGKTGFXMGRLSVDCNVVEPADVKKVATTLQRAIKVVGTPAYEEMVRNCMIQDLSWKGPAKNWENVLLSLGVAGGEPGVEGEEIAPLAKENVAAP

SEQ ID NO: 46344 - protein, 229 aa, Cicer arietinum
MEFQGSILIKAILVLQCFSILCASQSQDFDFFYFVQQWPGSYCDSKKACCYPTTGKPDADFGIHGLWPNYKDGTYPSNCDPSKPFDESQISGLTSSLQKNWPTLACPSGDGITFWTHEWEKHGTCSESVLNQHDYFETTLNLKQKANLLKALTSAGINADGGSYSLSNIKTAIQDGVGFAPFIECNRDSSGNSQLYQVYLCVDNSGSDFIDCPVFPHGKCGPEIEFPTF

SEQ ID NO: 46345 - protein, 665 aa, Mesorhizobium loti MAFF303099
MCGIAGILLAPDAANTNALRAIGPMMMALRHRGPDGEAFWMSREAGIAFGHRRLAIVDLSEAGRQPMHSASGRYVITFNGEIYNFRDLRRELEGAGHHFRGTSDTEVMLCAIESWGLEAALARFAGMFAFGLWDLKNRTLHLARDRMGKKPLYVASTPEALVFASELKAITCFPGFTPELDVDAAATMLSKGWVPDDRCIWQGVFKLPPGSVLSVTAADFANARGAGSLAHRIRRWWSLADVACKAQRDPIAGSDEDLTTELDSLLRLAVKERMVADVPLGAFLSGGIDSSTVVALMQAQSPTPVRTFTIAFGESGFDEAPHAAAVARHLGTDHTELHLSPAAALEVIPELPRIWDEPFADESQIPTLLVSRLARRHVTVALSGDGGDECFAGYSRHFLATRLRRQHELPSSFRRMLAAGAGLLAQASQKDIFGSLPLSANMRHGLRGDRLNRLARLFAAANEDQLLQRLTESSTNKLIHHKPAASNASATQLDGLLSRLLFDDMTGYLPGDILVKLDRATMANSLEGRCPILDHRVVEFAWRLPTDAKVRSGKGKWILRQLLDRYVPRRLVDRPKQGFDVPVGAWLRGPLRDWATDIIATTRLSGDGVIDCAKVDACWRDHLHGNQDHFRDLWPLLMFQAWRNDAMRPSAPATHASYDIELTGD

SEQ ID NO: 46346 - protein, 531 aa, Ashbya gossypii ATCC 10895
MPQAGELMITPGLMNNNTAGTWPPCDSTILGVPTSNCKYVTTTSKLGDGNFSVVKECMNLQTKVRYAMKLIPKRLVRGRLQLIQREVMVLKHVHARTHQYESGRGEHEKGMERHGTFDGHHHVLQLFDYFETKDNIVLVTQLCEQSDLYDCIINSGSLDIDTQVKPYVACLLSALDFLHQSGVIHRDIKAENILFRLRETVPSTDAKYDVRAHDLIIADFGLAVGKEDRSSLKEYVGTLSYLAPELVRCKDMKTMTPAEAERIPEYGAAVDIWALGVLCYFMMSGYMPFDCEDDAETSDCILKGDYYVDEEARANANESYNSCWNFMQRCFTMDDNIRPRAHELMGHAFMREYFQSAAANDFASIPLLERSRSSNSLHHLAPPSRAPFISSGVPVINERPVPRVGSRERNLDKLRDTLRKTLSLTSLEPMRFVAQANTPNPNKKNSTFVLEPAPPTGSLMNGCFSVTPESKSNLNTPVLSRRSSGQSVIDTAVTTMRSYSTKGQRGKLLAGNVPEIERHRVPQFHFGDDDE

SEQ ID NO: 46347 - protein, 401 aa, Filobasidiella neoformans
MSFSRASSNALKQALKSTASRQVARRSYSLLSGAAPRAAMATRLGATRGIKTLDFAGTKEVVYERADWPLDKLQDYFKNDTLAMIGYGSQGHGQSLNARDNGLKVIVGVRKGGESWKQAQEDGWVPGETLFDIPEAINKGTIIMNLFSDAAQSQTWNEIAPLITKGKTLYFAHGFSVVYKEDTHVVPPKDVDVILVAPKGSGRTVRTLFLEGRGINSSIAVYQDVTGHAKEKAVALGIAVGSGYLYETTFEKEVYSDLYGERGVLMGGIQGMFLAQYEVLRKNGHSPSEAFIETVEEATQSLFPLIGKYGMDYMYNACSTTARRGALDWAPKFKEANLPVFEALYNSVRDGSETRRSLEFNFRKTYREDLQKELDEIDNQEIWRAGKTVRGLRPDANKDEL

SEQ ID NO: 46348 - protein, 249 aa, Halobacterium sp. NRC-1
MSENESDTEAELEENAPDEAAADAESTAQTDEQTPDTEADEPAPESTATEDVMSDEEADLLIPVEDYLGAGVHIGTQQKTNDMDRFIHRVRTDGLYVLDVSRTDDRVRTAADFLANYDPEQILVTSSRQYGRFPAEKFAEAVGARARTGRFIPGTLTNPDYDGYIEPDVLVVTDPIGDSQAVKEAITVGIPVIAMCDSNNQTGNVDLVVPTNNKGRRALSVVYWLLANETLDRRGAEPTYGLDDFEDGL

SEQ ID NO: 46349 - protein, 210 aa, Brassica napus
  misc_feature (172)..(172): Xaa can be any naturally occurring amino acid
  misc_feature (190)..(190): Xaa can be any naturally occurring amino acid
  misc_feature (193)..(193): Xaa can be any naturally occurring amino acid
  misc_feature (197)..(197): Xaa can be any naturally occurring amino acid
  unsure (1)..(210): unsure at all Xaa locations
STHASGDISGVLVPWLYVGMCFSSFCWHVEDHHLYSLNYHHFGEPKVWYGVPGSNATSLEKAMRKHLPDLFEEQPDLLHSLVTQFNPSILKDEGVQVYRVVQNPGEYVLTFPRGYHAGFNCGFNCAEAVNVAPVDWLAHGQNAVELYSKETRKTSLSHDKLLLGAAYEAVKXCGEGKYMKSFCGRTVPLXQAXSARXRMEEERLGDLGKD

SEQ ID NO: 46350 - protein, 135 aa, Thermosynechococcus elongatus BP-1
MTKVVKTDAEWQAQLTPEQYYVTRKKGTERAFTGCYWNNKKPGLYSCVCCGTPLFRSETKYDSGTGWPSFWQPLDPNNIRMERDLSHGMVRTEVLCAVCDAHLGHVFEDGPPPTGLRYCINSAALAFVPESAASS

SEQ ID NO: 46351 - protein, 178 aa, Triticum aestivum
  misc_feature (141)..(141): Xaa can be any naturally occurring amino acid
  misc_feature (145)..(145): Xaa can be any naturally occurring amino acid
  unsure (1)..(178): unsure at all Xaa locations
MAPTVMASSATSVAPFQGLKSTAGLPVSRRSNGASLGSVSNGGRIRCMQVWPIEGIKKFETLSYLPPLSTEALLKQVDYLIRSKWVPCLEFSKVGFIFREHNASPGYYDGRYWTMWKLPMFGCTDATQVINEVEEVKKEYXDAYXRIIGFTTSQVQCVSHRKQRAARSGRLNSHHTAH

SEQ ID NO: 46352 - protein, 519 aa, Solanum tuberosum
MDALCASMKGTAQLVAICNQESAFWGEKISGRRLINKGFGVRSCKSFTTQQRGRNVTPAVLTRDINKEMLPFEESMFEEQPTADPKAVASVILGGGVGTRLFPLTSRRAKPAVPIGGCYRLIDVPMSNCINSGIRKIFILTQFNSFSLNRHLATYNFGNGVGFGDGFVEVLAGTQTPGDGRKMWFQAADAVREFIWVFENQKNKNVEHIIILSGDHLYRMNYMDFVQKHIDTNADITVSCVPMDDGRASDFGLMKIDETGAIIQFAEKPKGPALKAMQVDTSILGLSEQEASNFPYIASMGVYVFKTDVLLNLLKSAYPSCNDFGSEIIPSAVKDHNVQAYLFNDYWEDIGTVKSFFDANLALTKQPPKFDFNDPKTPFYTSARFLPPTKVDKSRIVDAIISHGCFLRECNIQHSIVGVRSRLDYGVEFKDTMMMGADYYQTECEIASLLAEGKVPIGVGPNTKIQNCIIDKNAKIGKDVVILNKEGVEEADRSAEGFYIRSGITVIMKNATIKDGTVI

SEQ ID NO: 46353 - protein, 421 aa, Photorhabdus luminescens subsp. laumondii TTO1
MVTNMQRTQRVVITGMGTVTPIGEDIESCWQSIIEKQHQFRRIEFPNSFINSRFFSFLAPNPSRYQLLPKKLTHMLSDCGKMALKATYQAFTQAFGVNVSPVEYYDKYECGIILGSGWGAVDNAGDHACQYKEVKLAHPMSNLITMPSSMTAACSIMYGLRGYQNTIMAACATGTMAIGDAFEIIRSGRAKCMIAGAAESLIRECNIWSIDVLNALSKEQTDPNLACCPFSLDRSGFVLAEGAAVVCLEDYDSAVARGATILAEIKGYAQYSDAANLTRPTEDIEPKILSITKAIEQAQISLEDIDYINAHGTSTPLNDLYETQAIKAALGQYAYQVPISSTKSYTGHLIAAAGSFETIVCVKALTENCLPATLNLHRADPDCDLNYLPNQHCYTVQPEVVLNISAGFGGHNAALVISKVR

SEQ ID NO: 46354 - protein, 243 aa, Oryza sativa
MGQSKKKFRGGRQRHWGSWVSEIRHPLLKRRVWLGTFETAEEAARAYDEAAILMSGRNAETNFPVARNATGELTPAAAVAGRDGRVGGGSGSSSSMTANGGGNSLSQILSAKLRKCCKTPSPSLTCLRLDPEKSHIGVWQKRAGARADSSWVMTVELNKDTAVSSAATVAAATAVSSSDQPTPSDSTVTTTSTSTTGSPSPPPPAMDDEERIALQMIEELLGRSGPGSPSHGLLHGGEGSLVI

SEQ ID NO: 46355 - protein, 143 aa, Kineococcus radiotolerans SRS30216
MTDTTAQRTLVLVKPDGVRRNLSGEVLRRIEAKGYTLVALELRTADRELLAGHYAEHEGKPFYEPLVEFMLSGPVLAAVVEGHRVIEGFRSLAGTTDPTTAAPGTIRGDLGRDWGLKVQQNLVHGSDSPESAAREIGLWFPNL

SEQ ID NO: 46356 - protein, 271 aa, Zea mays subsp. mexicana
NIMRLTGITGIVNGMDVSEWDPSRDKYIAVKYDVSTAVEAKALNKEALQAEVGLPVDRNIPLVAFIGRLEEQKGPDVMAAAIPQLMDMVEDVQIVLLGTGKKKFERMLMSAEEKFPGKVRAVVKFNAALAHHIMAGADVLAVTSRFEPCGLIQLQGMRYGTPCACASTGGLVDTIIEGKTGFHMGRLSVDCNVVEPADVKKVATTLQRAIKVVGTPAYEEMVRNCMIQDLSWKGPAKNWENVLLSLGVAGGEPGVEGEEIAPLAKENVAAP

SEQ ID NO: 46357 - protein, 266 aa, Zea luxurians
PSADPSTDSAREPKRMRTGGGSTSSSSSSSSSMDGGRTRSSVVEAAPPAKQASAAANGPAVPVVVVDTQEAGIRLVHALLACAEAVQQENFSAAEALVKQIPMLASSQGGAMRKVAAYFGEALARRVYRFRPPPDSSLLDAAFADLLHAHFYESCPYLKFAHFTANQAILEAFAGCRRVHVVDFGIKQGMQWPALLQALALRPGGPPSFRLTGVGPPQPDETDALQQVGWKLAQFAHTIRVDFQYRGLVAATLADLEPFMLQPEGD

SEQ ID NO: 46358 - protein, 364 aa, Hydrilla verticillata
SDSGKDAGRLSAAWQLYKAQEELIKVAKQYGVKLTMFHGRGGTVGRGGGPTHLAILSQPPDTINGSIRVTVQGEVIEQSFGEERLCFRTLQRFTAATLEHGMHPPLSPKPEWRALMDEMAVVATDEYRSIVFKDPRFVEYFRSATPELEYGRMNIGSRPSKRRPSGGIESLRAIPWIFAWTQTKFHLPVWLGFGSAFKHVIGKDPKNLQMLQEMYNEWPFFRVTIDLVEMVFAKGDPVIAAIYDKLLVSKDLQPFGECLREKYTETKDLLLKVAGHKDLLEGDPYLKQRLQLRDSYITALNACQAYTLKRIRDPGYNVQARPHLSKDMVNNGKSAAELVKLNPGSEYAPGLEDTLILTMKGVRA

SEQ ID NO: 46359 - protein, 271 aa, Zea mays subsp. mexicana
NIMRLTGITGIVNGMDVSEWDPSRDKYIAVKYDVSTAVEAKALNKEALQAEVGLPVDRNIPLVAFIGRLEEQKGPDVMAAAIPQLMEMVEDVQIVLLGTGKKKFERMLMSAEEKFPGKVRAVVKFNAALAHHIMAGADVLAVTSRFEPCGLIQLQGMRYGTPCACASTGGLVDTIIEGKTGFHMGRFSVDCNVVEPADVKKVATTLQRAIKVVGTPAYEEMVRNCMIQDLSWKGPAKNWENVLLSLGVAGGEPGVEGEEIAPLAKENVAAP

SEQ ID NO: 46360 - protein, 305 aa, Hydrilla verticillata
SDSGKDAGRLSAAWQLYKAQEELIQVAKKYGVKLTMFHGRGGTVGRGGGPTHLAILSQPPETINGSIRVTVQGEVIEQSFGEERLCFRTLQRFTAATLEHGMRPPISPKPEWRALMDEMAVVATDDYRSIVFKDPRFVEYFRSATPELEYGRMNIGSRPSKRKPSGGIESLRAIPWIFAWTQTKFHLPVWLGFGSAFKHVIGKDPKNLQMLQEMYNEWPFFRVTIDLVEMVFAKGDPVIAAMYDKLLVSKDLQPFGECLREKYTETKDLLLKVAGHKDLLEGDPYLKQRLQLRDSYITALNACQA

SEQ ID NO: 46361 - protein, 564 aa, Prosthecochloris aestuarii DSM 271
MARPKNVKHIFVTGGVVSSLGKGILSASLGLLLKSRGLRVAIQKYDPYINVDPGTMSPYQHGEVYVTDDGAETDLDLGHYERFLDEATSQQSNLTMGRVYKSVIDKERQGEYLGGTVQVVPHVIDEIKERMGELAKNSNLDILITEIGGTIGDIESLPFLEAMRQLKLDFGPKNMLNIHLTLVPYIKAACELKTKPTQHSVKMLLETGIQPDILVCRSEKPLSREIKNKVGHFCNLHELDVIGLSDCDTIYGVPLMLLNEKLDIRVLKKLGLKKYKEPDLAYWKEFCNKVQHPTDGEVTIAICGKYTEYPDAYKSILESLVHAGADNNVRVHVRLIRAEDAEENGSDVKTALEGVHGVLVAPGFGDRGIEGKIRFVQYARENNIPFLGICLGMQCASIEFARNVCGLSEANSTEFSKRCRQPVIDLMEHQKKVKEKGGTMRLGSYPCILKEGTKAHQAYDKFLINERHRHRYEFNNEYRRLFEDNGMVFSGTSPNGELVEIVEISNHRWFVAVQFHPEYKSRVHCVHPLFSGFVAAAKEFAHGARQLSFEPEAPSFQVMPGAEN

SEQ ID NO: 46362 - protein, 266 aa, Zea mays subsp. parviglumis
PSADPSTDSAREPKRMRTGGGSTSSSSSSSSSMDGGRTRSSVVEATPPATQASAAANGTAVPVVVVDTQEAGIRLVHALLACAEAVQQENFSAAEALVKQIPMLASSQGGAMRKVAAYFGEALARRVYRFRPPPDSSLLDAAFADLLHAHFYESCPYLKFAHFTANQAILEAFAGCRRVHVVDFGIKQGMQWPALLQALALRPGGPPSFRLTGVGPPQPDETDALQQVGWKLAQFAHTIRVDFQYRGLVAATLADLEPFMLQPEGD

SEQ ID NO: 46363 - protein, 465 aa, Arabidopsis thaliana
  misc_feature (451)..(451): Xaa can be any naturally occurring amino acid
  unsure (1)..(465): unsure at all Xaa locations
MAATRQLRTLQSQPENKVCVDCAQKNPQWASVSYGIFMCLECSGKHRGLGVHISFVRSVTMDSWSAIQIKKMEAGGNERLNKFFAQYGIAKETDIISKYNSNAASVYRDRIQALAEGRPWNDPPVVKEANKKPPLAQGGYGNNNNNNNGGWDSWDNDDSYKSDMRRNQSANDFRASGNREGAHVKSKSSEDIYTRSQLEASAAGKESFFARRMAENESKPEGLPPSQGGKYVGFGSSSAPPPRNNQQDDVFSVVSQGFGRLSLVAASAAQSAASVVQTGTKEFTSKVKEGGYDHKVSETVNVVANKITEIGHRTWGIMKGVMAMATQKVEEFTKEGSTSWNQQSENEGNGYYQNFGNGNKAANSSVGGGRPQSSSTSGHYNNSQNSNSWDSWGENENKKTEAVAPKGSSASNDDDGWTGWDDHDAKDDGFDGHYQSAGDKKSAGHNGKSDXWTGGGFSKGDSECR

SEQ ID NO: 46364 - protein, 530 aa, Arabidopsis thaliana
  misc_feature (322)..(322): Xaa can be any naturally occurring amino acid
  misc_feature (345)..(345): Xaa can be any naturally occurring amino acid
  misc_feature (410)..(410): Xaa can be any naturally occurring amino acid
  unsure (1)..(530): unsure at all Xaa locations
MRRFLINQAKGLVDHSRRQHHHKSPSFLSPQPRPLASSPPALSRFFSSTSEMSASDSTSSLPVTLDSINPKVLKCEYAVRGEIVNIAQKLQEDLKTNKDAYPFDEIIYCNIGNPQSLGQLPIKFFREVLALCDHASLLDESETHGLFSTDSIDRAWRILDHIPGRATGAYSHSQGIKGLRDVIAAGIEARDGFPADPNDIFLTDGASPAVHMMMQLLLSSEKDGILCPIPQYPLYSASIALHGGSLVPYYLDEATGWGLEISDLKKQLEEARSKGISVRALVVINPGNPTGQVLAEENQRDIVNFCKQEGLVLLADEVYQEXNVYVPDKKFHSFKKVARSLGYGXKDISLVSFQSVSKGYYGECGKRGGYMEVTGFTSDVREQIYKMASVNLCSNISGQILASLVMSPPXERDGILSSMAKRAKTLEDALNSLEGVTCNRAEGAMYLFPRINLPQKAIEAAEAEKTAPDAFYCKRLLNATGVVVVPGSGFGQVPGTWHFRCTILPQEDKIPAIVNRLTEFHKSFMDEFRN

SEQ ID NO: 46365 - protein, 416 aa, Anabaena variabilis ATCC 29413
MPATSFYADAAYNTQKSRQALDPDIAIDDSDLSVDEIQELEIAAADPATFGASANRRSTDLVRLYLQEIGRVRLLGRDEEVSEAQKVQRYLKLRVVLANAAKQGDEVATPYLHLIEVQERLASELGHRPSLERWAATAGINLCDLKPILSEGKRRWAEIAKMTVEELEKMQSQGLQSKEHMIKANLRLVVSVAKKYQNRGLELLDLVQEGTLGLERAVEKFDPTKGYRFSTYAYWWIRQGITRAIATSSRTIRLPVHITEKLNKIKKAQRKIAQEKGRTPTLEDLAIELDMTPTQVREVLLRVPRSVSLETKVGKDKDTELGELLETDGVTPEEMLMRESLQRDLQHLLADLTSRERDVILMRFGLADGHPYSLAEIGRALDLSRERVRQIESKALQKLRQPKRRNLIRDYLESLS

SEQ ID NO: 46366 - protein, 333 aa, Streptomyces coelicolor A3(2)
MTRPVVEGGPAVVCLGETMAQIVPIDGLRLHEASACAFGVAGAESNVAISLSRLGTAAFWAGFVGDDPMGLRVLGELRRHGVVTKLARTMPGRRTGVYFKDPAPEGSDIYYYRSGSAATLMDGEYAERIAAVRPRWIHLTGVTPALSENCREAVISLIELAGDTGASVSFDVNYRPSLWPARDAAAQSLMAIADRCNVVFVGLDEAQTLWKSCTAGAVRDHLPSPDVVVVKDGGREAVAFRGGRRTAVPALPVDVVEPVGAGDAFAAGWIHGALVGLDEAGCLRLGHLLAGAAMTSLSDVADLPTAPAALVARAKHGNEWPGHGSPAEASPHP

SEQ ID NO: 46367 - protein, 344 aa, Streptomyces coelicolor A3(2)
MTGGMSAVVWAGVNDVRVEEVPMPEVPPGWALVRVACTGICGTDLGIVHGKHPRARQGLILGHEISGWVEVTAPGGPPEGALVVAEPLISCKDCRACREGHSHVCARLGLFGIDAPGGAAQFVALPTSTLHQVPSRVEPTQAALTEPLAVAVHAVSRSGMEAGDVVAVFGAGPIGILTALVARHEGASHVVVAEPNARRRAVASDMGLIAVPDGAQLRDMVAELSQGDGADTTFDSAAHPAVAAELADVTRVLGRVVIVGVYKEPAAVDLQAVCFKEQSVVGVRVYTREDFRTAIDLVAQNALGLDRFPVSVYGFDRISDAFDAAATGSGGLKVLISTHRDEAT

SEQ ID NO: 46368 - protein, 161 aa, Halobacterium sp. NRC-1
MTDHDERTFVMVKPDGVQRGLIGDIVTRLETKGLKMVGGKFMRIDEELAHEHYAEHEDKPFFDGLVSFITSGPVFAMVWEGADATRQVRQLMGATDAQDAAPGTIRGDYGNDLGHNLIHGSDHEDEGANEREIALFFDDDELVDWDRDASAWVYEDLADHD

SEQ ID NO: 46369 - protein, 486 aa, Kineococcus radiotolerans SRS30216
MSQENGRGPDRADAEERQRTTTKVVLISVVAAIGGFLFGFDTAVVNGAVDAVAEEFRLAAGLKGFAVSCALLGAAVGAWFAGRLADRFGRKAVMVIAGALFAVSAVGSAFAFGVWDLILWRVVGGVGVGIASVIAPTYIAEVAPAHIRGRLASLQQLAITVGIFAALLSDAFIANTAGGASETTWFGWDAWRWMFVVGVIPSLVWALLALQIPESPRYLIAQGKTQRAGEVLREVLGTRSLEAVQRKVADIKNSMRREDEPSLRDLRGPRFGLLPIVWVGILLSVLQQGIGINVIFYYSTTLWKAVGFDESDAFTTSVITSVTNVVVTFIAIATVDRIGRKPLLTVGSAGMFLSLTVMAIAFSQASGSGQDVSLPQPWGTIGVIAANVYVISFGATWGPVVWVLLGEMFPNRIRAAGLAVAAAAQWLANFAISTSFPSLAKLGLQYAYGLYAVIALLSFVFVRRAVQETKGRELEEIGAETTSTAP

SEQ ID NO: 46370 - protein, 95 aa, Pseudoalteromonas sp. PS1M3
MNIRPLQDRVIVKRLEEETKSAGGIVLTGSAAEKSTRGEVVAVGNGRILDNGDVRALEVKAGDTVLFGSYVEKTEKIEGQEYLIMREDNILGIVG

SEQ ID NO: 46371 - protein, 549 aa, Pseudoalteromonas sp. PS1M3
MAAKEVLFAGDARAKMLTGVNILANAVKVTLGPKGRNVVLDKSFGSPVITKDGVSVAKEIELEDKFENMGAQMVKEVASKANDAAGDGTTTATVLAQSIVNEGLKAVAAGMNPMDLKRGIDKAIIAAVAELKALSVPCADTKAIAQVGTISANSDKEIGDIIAEAMEKVGRNTGVITVEEGQSLENELDVVEGMQFDRGYLSPYFINNAEKGAVELDNPFILLVDKKVSNIRELLPTLEAVAKASKPLLIIAEDLEGEALATLVVNNMRGIVKVSAVKAPGFGDRRKAMLQDIAVLTGGTVISEEIGLELEKATVEDLGTAKRVVITKDDTTIIDGAGEEEGITGRVSQIKAQIEEATSDYDKEKLQERMAKLAGGVAVIKVGAATEIEMKEKKDRVEDALHATRAAVEEGVVPGGGVALVRAASKLVELLGDNEDQNHGVKVALRAMEAPLRQIVTNAGDEASVVINAVKGGEGNYGYNAATGEYNDMIEMGILDPTKVTRSALQFAGSIAGLMITTEAMVAEIPKEEAAGAPDMGGMGGMGGMGGMM

SEQ ID NO: 46372 - protein, 271 aa, Zea mays subsp. mexicana
NIMRLTGITGIVNGMDVSEWDPSRDKYIAVKYDVSTAVEAKALNKEALQAEVGLPVDRNIPLVAFIGRLEEQKGPDVMAAAIPQLMEMVEDVQIVLLGTGKKKFERMLMSAEEKFPGKVRAVVKFNAALAHHIMAGADVLAVTSRFEPCGLIQLQGMRYGTPCACSSTGGLVDTIIEGKTGFHMGRLSVDCNVVEPADVKKVATTLQRAIKVVGTPAYEEMVRNCMIQDLSWKGPAKNWENVLLSLGVAGGEPGVEGEEIAPLAKENVAAP

SEQ ID NO: 46373 - protein, 263 aa, Zea mays subsp. parviglumis
PSADPSTDSAREPKRMRTGGGSTSSSSSSSSSMDGGRTRSSVVEAAPPATQAANGPAVPVVVVDTQEAGIRLVHALLACAEAVQQENFSAADALVKQIPVLASSQGGAMRKVAAYFGEALARRVYRLRPAPDGSLLDAAFADLLHAHFYESCPYLKFAHFTANQAILEAFAGCRRVHVVDFGIKQGMQWPALLQALALRPGGPPSFRLTGVGPPQPDETDALQQVGWKLAQFAHTIRVDFQYRGLVAATLADLEPFMLRPEGG

SEQ ID NO: 46374 - protein, 203 aa, Torenia hybrida
AHLKGGAKKVVISAPSKDAPMFVVGVNEKEYKPELDIVSNASCTTNCLAPLAKVINDRFGIVEGLMTTVHSITATQKTVDGPSSKDWRGGRAASFNIIPSSTGAAKAVGKVLPVLNGKLTGMAFRVPTVDVSVVDLTVRLEKEATYDEIKAAIKEESEGNLKGILGYTEDDVVSTDFVGDSRSSIFDAKAGIALSKTFVKLVS

SEQ ID NO: 46375 - protein, 281 aa, Bacillus licheniformis ATCC 14580
MMSVREIDMERFRDQIRLLTLKQLHHLGFGHYGGSLSIADVLAVLYGKVMKIDPANPSWEDRDFFILSKGHGGPALYAALHLSGYFEEDVLYTLNQNGTALPSHPDRNLTPGVDMTTGSLGQGISAAAGVALSHKLSGRANRTFVIVGDGELNEGQCWEAIQFAAHHKLRNLYVFVDDNKQQLDGPTKEIIDPLDFVSKFRAFGFYSERVNGHEPEAIYRAVKRGEAQRERPVAVILDTVKGKGIPYFEKMENSHHIRANEEQNRMIERIILTLEEKEVRA

SEQ ID NO: 46376 - protein, 524 aa, Bordetella parapertussis 12822
MAPPGHVVPSPANGHRHDARPATRLPEPTSLRRTLSARHLTMIAVGGSIGTGLFVASGATIAQAGPGGALLAYLLVGIMVYFLMTSLDELAASMPVAGSFSTYGAKYVDEGFGFALGWNYWYNWAVTVAVDLVAAQLVMAYWFPEMPGVLWSAAFLALIVGLNALSARGFGEAEFWFALIKVIAVLAFIAMGVLMLLGIIRGGEHGGLAYWTLDDAPFAGGFAALIGVAMVVGFSFQGTELIGIAAGESKDPARNLPRAVRQVFWRILLFYVLAIAVIGLLIPYTDPQLLRNEVSDVSVSPFALIFERAGLLAAASIMNAVVLTSVLSAGNSGMYAATRMLYSLARDGKAPARFGRLSRSGVPLWALLATTAVAALCFLSFLFSPKAVYIWLLNTSGMTGFIAWLGIAISHYRFRRGYVAQGNNLADLPYVSPFFPFGPLFAFVLCLVITLGQNYHAFLQDRIDWTGAAATYVGIPLFLAIWAGYRLVRGSRFVRYRDMQFPDLRMRNRELNAMLSGDCAEPRR

SEQ ID NO: 46377 - protein, 485 aa, Desulfovibrio vulgaris subsp. vulgaris str. Hildenborough
MDKKRLTTNAGAPVADNQNVMTAGPRGPQLLQDVWFLEKLAHFDREVIPERRMHAKGSGAFGTFTVTHDITRYTRAAIFSEVGKKTDLFVRFSTVAGERGAADAERDIRGFAVKFYTEQGNWDMVGNNTPVFFLRDPLKFPDLNHAVKRDPRTNLRSARNNWDFWTSLPEALHQVTVVMSDRGIPATYRHMHGFGSHTFSFINAKGERFWCKFHFKTQQGIKNLTDAEAEAIVGKCRESHQRDLYDSIERGDFPRWTMYVQVMTEEKAAALPYHPFDLTKVWYHDDAPLIEVGVLELNRNPENYFAEVEQAAFNPANVVPGIGFSPDKMLQGRLFSYGDAQRYRLGVNHHLIPVNMPRCPFHSYHRDGMMRVDGNHGSTLAYEPNSYGEWQEQPGFAEPPLELSGAAAHWNAREDDADYFTQPGKLFRLMTPAQQEELFGNTARALGDAPDAIKLRHIGNCLKADPAYGNGVAKALGLDPAKALG

SEQ ID NO: 46378 - protein, 258 aa, Streptococcus pneumoniae R6
MPKTLTEKLNAIKATGKGIFVPYIMAGDHEKGLDGLGETIHFLEDLGVSAIEVGIPFSDPVADGPVIEEAGLRSLAHGTSTQALVETLKTIETEIPLVIMTYFNPLFQYGVENFVKDLADTAVKGLIIPDLPHEHANFVEPFLADTDIALIPLVSLTTGIERQKELIEGAEGFVYAVAINGVTGKSGNYRADLDKHLAQLHQVADIPVLTGFGVSSQADLERFNAVSDGVIVGSKIVKALHQGEPIQDFIRQAVAYQK

SEQ ID NO: 46379 - protein, 264 aa, Escherichia coli CFT073
MAMLVAAGQFAVTSVWEKNAEICASLMAQAAENEVSLFVLPEALLARDDHDADLSVKSAQLLEGEFLDRLRRESKRNMMTTILTIHVPSTPGRAWNMLVALQAGNIVARYAKLHLYDAFAIQESRHVDAGNEIAPLLEVEGMKVGLMTCYDLRFPELALAQALQGAEILVLPAAWVRGPLKEHHWSTLLAARALDTTCYMVAAGECGNKNIGQSRIIDPFGVTIAAASEMPALIMAEVTPERVRQVRAQLPVLNNRRFAPPQLL

SEQ ID NO: 46380 - protein, 373 aa, Bacillus clausii KSM-K16
MADKPLRPVTEGDLTIDQVKEQLVETGKKRGTLTYAEITEKMAAFEQDSDQMDEFYEYLGEQGVELLNESEDDVPSLAQVAKDEEEFDLNDLSVPPGIKINDPVRMYLKEIGRVPLLSAEEEIDLAKRIEQGDEEAKKRLAEANLRLVVSIAKRYVGRGMLFLDLIQEGNMGLIKAVEKFDYDKGFKFSTYATWWIRQAITRAIADQARTIRIPVHMVETINKLIRVQRQLLQDYGREPTPEEVGKEMDLSPDKVREILKIAQEPVSLETPIGEEDDSHLGDFIEDQEALAPSDAAAYELLKEQLEDVLDTLTDREENVLRLRFGLDDGRTRTLEEVGKVFGVTRERIRQIEAKALRKLRHPSRSKRLKDFLD

SEQ ID NO: 46381 - protein, 265 aa, Lactobacillus plantarum WCFS1
MMTDLTTIFKNHKAFIAFVVAGDPNFEATVDQVVALAEAGCDLVEIGIPFSDPVADGPEIQAADLRAFDQHITPQRVFELVVAIREKTTIPLVFLTYANIVYQFGYAAFAQQCQSLNVAGLIIPDMPLEASGELRPTLDHYGIALIPLIAPTSDDARIAAIAQQARGFIYVVSSLGVTGTRRHITTDLATLVAKIRHATTLPVAIGFGIHEPAQAQAMAQIADGVIVGSAVVHLIATHQPATAVLRDYTRRMRRALDGRTADTVD

SEQ ID NO: 46382 - protein, 316 aa, Lactobacillus plantarum WCFS1
MKALFFNDFGDASVLQYGEVADPIVTANTVLVKTTYIGLNFADIYRRRGTYHLEKHQPYIDGYEGVGTVVAVGKQVANFKRGDRVLFVDVPFANASLVAVPADQAIKVPRAINDQQVASIGLQGMTAEFLVHDLAQNQPHDRVLIHGISGGVGQLLTQLLVANEVAVYGVASTPAKAELAYQAGATTVFMRHDPWDTTHHNFFDTVFDGVGKTLPVSLATTKHRGRVIFYGMAAGNPPVIDPVKLMSESKSLMTGDLWDYLDSAVARQCRANQLFDDVLTHRVTIRPATVYSLAEGAVAHWALETGQVAGKILLRP

SEQ ID NO: 46383 - protein, 460 aa, Corynebacterium efficiens YS-314
MSSQPLPPPTTYLDYMEEGIARRKAEAEALMAAAEGVLADYPGQTVLWRDLQERGEALRDDLRDIAFDLHDHPEEAFEEFHARQVIVDKLAARGFTAETGVYGVETALEASWTTRGYDATRHPTIAILAEYDALPEIGHACGHNIIAAAGVGAFLTATAVLADAERTAPDGLGFEGRLVLLGTPAEEGHSGKEYMIAGGAFEGIDAAIMIHPFAYDIAEHVWVGRRTMTATFHGVSAHASAQPFMGRNALDAASLAYQGLGVLRQQMPPSDRLHAIVTEGGNRPSVIPDEARMAVYVRSLLPEALVELSTRVNDVMEGAAKMAGVGLELNWDIHPASLPVRNNHVLATRWARTQQLRGRTALPAGILPDTLAASTDFGNVSHIIPGIHPMVKISPENVALHTREFAVYARTEEAVDAAVDSSIGLAQVAVDALADPRLLAAARAEFEATGGVLKVADYLG

SEQ ID NO: 46384 - protein, 1041 aa, Photobacterium profundum SS9
MFNAADVLQPSFIERPLNEIWTLISPLYSVDESLWLEQLLPLAEPSDIERKHTTDKAAELIQRVRADKNAIQMIDALLLEYSLDTKEGILLMCLAEALMRIPDAATADALIRDKLSVADWKSHLKNSDSLFVNASTWGLMLTGKVVTMDAKEDGKPSHVINRLVNKMSEPVIRQAMNQAMKIMGHQFVLGRTISEAMKNGKSNRDKGFTYSFDMLGEAALTAQDAQKYFKDYIMAVESVGRDEYASQKGSNQQSPDPTVSIKLSALHPRYDVANEARVLDEMYESVLTLLSRARELNVGITIDAEEADRLELSLKLFEKLYRSDAVKGWGRFGIVVQSYSKRALPVLAWLAALSKAQGDIIPLRLVKGAYWDSELKLSQQSGFSDYPVFTRKESTDSAYLACARFLLSEHLRGVIYPQFASHNAHTISAIVAMTDHRDFEFQRLHGMGDALYNHAMDMYQANVRIYAPVGSHKDLLPYLVRRLLENGANSSFVHRLVDANCPIESLTEHPVDTLRSRPSLNNSLIPLPPQIFGESRKNSASINIDIESEWTPFNAAIQAFSQHQWQAGPIVNGVTLDGEQHAITAPYNRSESVGQVAFSSASQVAQAIDVASEAYPAWSQVAASERGECLQRLADLLELHTGELVALCHREAGKTIQDSIDEIREAVDFCRFYGEQASSELASAKSIKSFDGSTKQLTYQGRGVFACISPWNFPLAIFLGQVSAALAAGNTVVAKPAEQTSLIAYRAIELMLEAGIPAGAIQLLPGTGAEVGATLTTDVRIAGVAFTGSTETAQRINRSLVARDCEAVPFIAETGGQNAMIVDSTALPEQVVRDVVRSAFASAGQRCSALRVLFVQADIADRIITLIKGAMAELSVGRPELHSTDVGPVIDIAAKEKLLTHIESLKNQSTLVAQTQLSDECKLGDFVAPTAFEINSIDILKNENFGPILHIVRFKANEIDQVVDQINHTGFGLTLGVHSRNERTYCRIEQRARVGNCYINRDQVGAVVGVQPFGGQGLSGTGPKAGGPHYLYRFTKDVLSA

SEQ ID NO: 46385 - protein, 377 aa, Lactobacillus plantarum WCFS1
MMTTTLAAWMTTLRHQLHAHPELALQEVATTALIKQTLTELNIRLVDYPGETGVVAEIGHGAPIIALRADIDALPIQEDNELSFRSTIPGRMHACGHDFHTAALLGGARLLKVHEADLNGTVRLIFQPAEEGHRGAKMMIDNGVLAGVRAIAGFHNMPNLPVGTLAMKSGPLMASNDNFDVTILGQGAHAAMPEASHDPIVTLGELISNLQTIRSRNIAPDAALVLTIAAVQAGTTFNVIPNTANLRGTIRTFNTANRDLAKVRFYDIVRATAKMNQQTATIDWDRGPSCVNNNAALTAVLSRVLKDDFDIVPAQLCNADDDFALYQECIPGFYGFLGSGGNGTLHQSNYRCDDAGLTYGARFHELAATALLKWVRA

SEQ ID NO: 46386 - protein, 163 aa, Coxiella burnetii RSA 493
MRRLKQIIKSFTLWELLKGLSLTLRYFYRKKVTIHYPDEEVPSSFRFRGMLALRRYPNGEERCIACKLCEAVCPACAITIEAGPREADGSRRTTLYDIDAFKCINCGFCEEACPVDAIVLTPEMHYSIKDRGENILTKEKLLMIGDRYEEQIARDRAKDKKYR

SEQ ID NO: 46387 - protein, 172 aa, Glycine max
LHKMGLQGYRNVMENCRDNMLVLKEGLEKTGRFSIVSKDNGVPLVAFTLKDHTHFDEFQISDFLRRFGWIVPAYTMPPDAQHVTVLRVVIREDFSRTLAERLVADVEKVLHELDSLPARVISSTSVTVTAEENGKVVVAKKSAMETQREITAIWKKFVLERKKNNDKMNGVC

SEQ ID NO: 46388 - protein, 482 aa, Staphylococcus epidermidis RP62A
MEDNNMKRGLNSRHISMIAIGGAIGTGLFVATGSVISQAGPGGAILAYILIGIMLYFLMSSIGELATFYPVSGSFSSYSTRFVDSSLGFTMGWLYWGMWSLVTSVDIIVASNVLQYWDVFKVLNPLTWSLIFLTLLFLINIFSVKAFGETEFWLSLIKVITIIVFIIFGIMMIFGILGGHTYGFENYTKGQAPFVGGISGILSVLLVAGFSVGGTEVVAVTAGESNNPEKSMPKAIKQVFWRILLFYVLSIAVIAAIIPYTDPLLLNENESVSQSPFTIVFDRIGIAFAASVINAVILTSLLSAANSGIYTTSRMLFSLSADKQAPKFFGKLNDKTKLPMRALITTYIIIVLVIVYANFNANAVFNLLNIIGSMVIVVWGSSIWSQIRLRQAIKKQGKNPDKLLPYKAPFYPVGPIIVLFTLLFLLLGSSFGSIASGDILGVIRNFTPLFILAIIYIAHKLIKRTHFVKLEEIDLTPHNYKN

SEQ ID NO: 46389 - protein, 384 aa, Rickettsia bellii
DISKVYSEADCFTYDPGFMSTASCRSTITYIDGDQGILRHRGYDIKDLAEKSDFLEVAYLLIYGELPNNKLYNDFTKKVAHHALVNERLHYLFQTFCSSSHPMAIMLAAVGSLSAFYPDLLNFFKEADYELTAIRMIAKIPTIAAMSYKYSIGQPFVYPDNSLDFTENFLHMMFATPCEKYKVNPVIKNALNKIFILHADHEQNASTSTVRIAGSSGANPFACVSTGIASLWGPAHGGANEAVINMLKEIGSVENIPKYIAKAKDKNDNFRLMGFGHRVYKNYDPRAAVLKETCKEVLKELGQLDNNPLLQIAIELEAIALKDEYFIERKLYPNVDFYSGIIYKAMGIPPQMFTVLFATARTVGWMAQWKEMHEDPEQKISRPR

SEQ ID NO: 46390 - protein, 415 aa, Bacillus cereus E33L
MNEVLAKGKKAKEIARELVLKSTEQKNEALSAIADQLILETAYILEENKKDIEEGKAKGFSDSLLDRLMLNEQRIVDMTEGIKQLIELRDPVGDCVSAWERPNGLSIQEMRVPLGVVGMIYEARPNVTVDAATICLKTGNAVILRGSSSAIHSNKAIVAVIHRALKQTSLPQESVQLIEDTTRDSAKQLFTMNDYLDVLIPRGGKQLIDTVVREASVPVLETGAGNCHVFIDETADKQMAFDIIINAKTQRPSVCNAIETIVLHEKWAEQYGSELFSSLKKRGVELRGDQKALAMDSSIVLASEEDWGTEFLSLTLAVKLVSSIEEAIHHINTYGSMHSEAIISENEENVSKFFVSVDAAALYHNASTRFTDGYEFGFGAEIGISTQKLHVRGPMGLPALTSIKYVIRGNGQIRK

SEQ ID NO: 46391 - protein, 194 aa, Mirabilis jalapa
MMKNDMNKSGGGVIAKDVNDNTKVNGANNNADLAKPPAKAQVVGWPPVRSYRKNMLAVQKSTGAPESESEKPAANGGLVKVSMDGAPYLRKVDLKLYKSYQDLSDALGKMFSSFTLGNYGSQGMIDFMNESKLMDLINGSDYVPTYEDKDGDWMLVGDVPWEMFVESCKRLRIMKGKEAAGLAPRAMEKCKNRI

SEQ ID NO: 46392 - protein, 274 aa, Staphylococcus epidermidis RP62A
MNAYLAEFLGTAILILFGGGVCANVNLKRSAGNGADWIVISFGWGFAVTMGFYAVGTFSGAHLNPAVTVALAMDGGFSWAQVPGYIVCQMLGGIVGGVFVWLMYLPHWKVTEDPAVKLGVFSTAPAIKNYFANFLSEIIGTMALTLGILFIGVNKIADGLNPIIVGSLIIAIGLSLGGTTGYAINPARDLAPRIAHAILPIHGKGKSNWSYAIVPVLGPMAGGMLGAIVYEVFYKQTFNFSCFIGLIVLIFTLILGVILNKISQNKNNDIESIY

SEQ ID NO: 46393 - protein, 292 aa, Nicotiana tabacum
MSQRTVPAPFLTKTYQLVDDATTDDVVSWNESGTTFVVWKTAEFAKDLVPTYFKHNNFSSFVRQLNTYGFRKIVPDKWEFANENFKRGQKELLTAIRRRKTVTPTPAGGKSVVPGTSASPDNSGEDLGSSSTSSPDSKNPGSVDTPGKSQFADLSDENEKLKKDNQMLSSELAQAKKQCDELVAFLNQYVKVAPDMINRIISQGTSGSSYGELVKEVIGGVNDLEAQGSDDDEKGDTLKLFGVLLKENKKKRGPDENADISGSRGKMMKTMDYNLPWMKMSSAPGESNKVCN

SEQ ID NO: 46394 - protein, 408 aa, Nicotiana tabacum
MDEATCSTNALPPFLTKTYEMVDDPSSDAIVSWSSSNKSFVVWNPPDFARDLLPRYFKHNNFSSFIRQLNTYGFRKVDPEKWEFANEDNFFRGQPHLLKNIHRRKPVHSHSAQNLHGLSSPLTESERQGYKEDIQKLKHENESLHLDLQRHQQDRQGLELQMQVFTERVQHVEHRQKTMLSALARMLDKPVTDLSRMPQLQVNDRKRRLPGNSCLYNETDLEDTRAISSRALTWENMNPSSLLTINAELLNQLDSSLTFWENVLQDVDQAWIQQNCSLELDESTSCADSPAISYTQLNVDVGPKASDIDMNSEPNANTNPEVAAPEDQAAVAGTTTNVPTGVNDIFWEQFLTENPGSVDASEVQSERKDIGNKKNESKPVDSGKFWWNMKSVNSLAEQLGHLTPAEKT

SEQ ID NO: 46395 - protein, 580 aa, Lotus corniculatus var. japonicus
METATQLTSPPPPSAFDGTLGHHLARRLVEIGVRDVFSVPGDFNLTLLDHLIGEPQLNVIGCCNELNAGYAADGYARAKGVGACVVTFTVGGLSVLNAIAGAYSENLPVICIVGGPNSNDYGTNRILHHTIGLPDFSQELRCFQTVTCFQAVVNNLEDAHELLDTAISTALKESKPVYISISCNLPAIHHPTFARDPVPFFLSPKVSNQEGLEAAVEVAAAFLNKAVKPVIVGGPKLRAPKAQKAFLEFAEASGYAIAVMPSGKGFVPEDHPHFIGTYWGAVSTGYCGEIVESADAYIFVGPIFNDYSSVGYSLLVKKEKAIMVQPNRVTIGNGPSLGWVFMADFLTALSKKVKTNKAAMENYQRIFVPPGIALTREKGEPLRVNVLFKHIQAMLSGDSAVIAETGDSWFNCQKLRLPANCGYEFQMQYGSIGWSVGATLGYAQAATNKRVIACIGDGSFQVTAQDISTMIRCEQKTIIFLINNGGYTIEVEIHDGPYNVIKNWDYTRFVEAINNGQGKCWTAKVRTEDDLTEAIAAATGPQKDSLCFIEVFVHKDDTSKELLEWGSRVAAANGRPPNPQ

SEQ ID NO: 46396 - protein, 233 aa, Ralstonia solanacearum
MSSPSLAAPALARARDRLARRRTAGVLSRHHLLIIAIAIVIAIIALLLPRTCHAAAGAQAAPAPQPAAAGPCPTALDFRVRRLQDDAPQNLCQYAGRVVLVVNTASYCGYTYQYEGLEALYARFRDKGLTVLGFPSNDFEQEPGTGKQIADFCYNTYGVKFPMFSKTSVVGPAASPLYHWLAQQTGQPPKWNFHKYLLDRSGRVVAVYPSKVEPGDPALIKRIDALLAEPAPR

SEQ ID NO: 46397 - protein, 212 aa, Pseudomonas syringae pv. phaseolicola 1448A
MIKAVIFDMDGVLIEAKEWHYDALNKALSLFGYNISRHEHLTAYDGLPTSRKLDMLSVERDLPVALHAFINEMKQQYTMEIVYAQCKPTFVHQYALSSLKTMGYKLAVASNSIRNTVEVMMNRADLERYLDLQLSNEDVKHAKPAPDIYTKAIRQLGLMPEECLIVEDNENGIKAARDSGAHVLIVAETCDVNLNNILGKVDEINVDKVASL

SEQ ID NO: 46398 - protein, 228 aa, Desulfovibrio vulgaris subsp. vulgaris str. Hildenborough
MPCYPTYPTDGQDMKSCNTFFCDGRIRRPDRERLNGHPARAFWFTGLPSAGKSTLAHIAEEVLHQRGIRTYVFDGDNVRHGLCGDLGFSEHDRKENVRRIAETVRLFLDAGILCLCAFVSPLRANRQAVRDIIGPCDFFEVYVKCPVTVCESRDVKGLYGKARQGLVENYTGISAPYEEPESPDIVVDTSRNTIEESVQSLTDFILQVMTVPCAQKDAQAPGKAVRFP

SEQ ID NO: 46399 - protein, 230 aa, Dunaliella salina
DRNCKVIVVGNPCCTNALIAMENAPNLPRKNFNALTRLDENRAKSQLALKAGKFYTSVNRVAVWGNHSTTQVPDFLNAKIGGLPAMNVIRDNQWFKEEFTPKVALRGGALIKKWGRSSAASTAVSVADSIRSLITPTPPGDCFSSGVCSDGNLYGIQEGLNFSFPCRSKGDGDYEICNDFIIDDWLRMKIKAAEEELIQERDCVSHLIGREGGACQIGPGAPDTSVPGEN

SEQ ID NO: 46400 - protein, 592 aa, Prosthecochloris aestuarii DSM 271
MCGIAGELRFDSAAASSTTVDAMLGILEPRGPDAQGVFAHNRICFGHRRLKIIDLSDCASQPMVDSALGLVLVFNGAVYNYRELCTELVGKGYSFFSQSDTEIIIKAYHAWGEDCVGHLQGMFAFAIWERDTGRTFFARDRLGIKPLYFTEDNASMRFASSLPALLKSGAVDTAIDPAALDCYMSFHSVVPAPWTIFRGIRKLPPATTMMVEPDGRKQQRTYWQPDYSRSDEERRRSAGEWIDAVHDALKLAVQRRLVADVPVGVLLSGGLDSSLVVGLLSELVQRHLSTFSVGFEDVAEEEGNEFRYSDIIAERYSTDHHKIFVDHRELQTHLSDCVRAMSEPMVSHDVIGFYLLSREVSQHVRVVQSGQGADEVFAGYHWYPPMMNTPPTEAYSTYSGVFFDRDFNEYRQAVNSSFITEDHAAAFVRNHFAMPGAEEPIDKALRLDSTIMLVDDPVKRVDNMTMAWGLEARVPFLDHELVELAAKIPAEYKVKDGGKYVLKEVGRRIIPHEVIDRPKGYFPVPALKYLEGEYLDMAKNILNQDAAKQRKIFNREYVDMLLNAPQDHITPLRGSKLWQITLLEYWLQEQGL

SEQ ID NO: 46401 - protein, 889 aa, Desulfovibrio vulgaris subsp. vulgaris str. Hildenborough
MCGIAGIISRKDRNVSSQPLNRMLTSQEHRGPDAGYGVSFRRQSTGAFAAGRRHSADALAAGLEPAPVWLGHRRLSILDLSDKSAQPLRRGDLHIVFNGELFNYIELRSELTALGEHFETSGDTEVLLASYRHWGAGCLERFNGIFAFAIFDASRGSLFAARDPFGVKPFHYGVKPFHYAVTHDFLIFASEIKAISASGLVLRKWDPDVASAYLSYALTTAPQGRTFFENIRQIPPGHCLTLASPDDEPSVTRYYAPRITETPRSLHELVDEGAGLIRQSCRIRMRSDRDVGLCLSSGIDSANVAAALVAEGIAPECYSIDAASSSMLDEFPLITALADKLGLHVNPIRHPDAIPTADIVRYMLFNDEPSLFWGSYNQFHLYREMRKLGVIVSMSGHGGDELFCGYQRYYPAVVRDMLAQRRIMSLIWWCLRQSRHLMQDRRTIRSTWDSYSHPLGWANDYAHDIAALHLKHTIADPEEWISTFVGASSWGEQQQKSLFTYELQYLLRDADRNSMAHGIEERVPLLDTRLYEFCASVPLKDLCQDGYLKGLARQLFPAIPESLRFHQIKRGLYTDISSKLPQLQADLMPLVHRSPLLRELVDLQKLPQQLPGIVWWRLCSLAVLDVSGIEEWTAQTPLPRLVDDEMAERIGGVPSGTGRTAVIRHVLDEGLSYLEPGALHGLAETVGLIESAAIPGCIIEAGCALGGSTMVLATAKAKERPLHVFDVFGCIPPPGSNDGEEARARFAVIAAGESTGLNGKRYYGYEPDLLKNVQDNFVALGLPPAEHGITFVPGLYENTLYPSGPVALAHIDCDWYQSVKTCLERIAPHISPGGRMIIDDYDHYSGCRRAVDEFLEASNGQFIRERYARVHLVRTKADGQETDVHRPGD

SEQ ID NO: 46402 - protein, 187 aa, Glycine max
MVNPLVERATSSMLVGPDWALNMEICDILNRDPGHAKDVVKGLKKRIGSKVPRVQILALTLLETIIKNCGDIIHMHVAERDVLHEMVKIVKKKPDYHVREKILILIDTWQEAFGGPRARYPQYYAAYQELLHAGAAFPQRSKQSAPVFTPLQTQPLSSYPQNIRDTVAQQDAAEPSAESEFPALSLA

SEQ ID NO: 46403 - protein, 99 aa, Cryptococcus gattii
WHGMRQKNTPYMDGIPGITQCPIPPGGSYTYNFTISDQSGTYWWHSHYSNAMADGLWGPLIVHSVDEPIQRGRDYDEDRIVFVSDWMHDNSEIIIAALA

SEQ ID NO: 46404 - protein, 326 aa, Streptococcus pneumoniae R6
MAILVTGGAGYIGSHTVVELLNLGKEVIIVDNLSNSSILVLDRIEAITGIRPVFYELDVCDKPALRKVFEQESIDAAIHFAGYKAVGESVQKPVMYYKNNIMSTLALVEVMSEFNVKKIVFSSSATVYGINNQSPLIETMQTSATNPYGYTKVMLEQILKDVHVADSEWSIALLRYFNPIGAHESGLIGEDPSGIPNNLMPYIAQVAVGKLSELSVFGNDYDTLDGTGVRDYIHVVDLAIGHIKALEKVSEKTDVYIYNLGSGEGTSVLQLVNTFESVNKIPIPYKIVPRRSGDVATCYANADKAYKELNWRTTKSIEDMCRDTWN

SEQ ID NO: 46405 - protein, 177 aa, Halobacterium sp. NRC-1
MGTETATLGGGCFWCTEAAMEELAGVTDVTSGYAGGDTADPSYRDVCSGTTGHAEVVQVEYDTAELAYEDVLEVFFTVHDPTTVDREGPDVGSQYRSIVLPHDDQQHERATAFVDELAAADAFDGSIVTEIEPLETFYPAAEKHQNYFEKNPDAAYCTVNVAPKVSKVREQFGARTE

SEQ ID NO: 46406 - protein, 2032 aa, Bacillus sp.
MVKGRWRKYVAYFSIFLLFAQLFSFSAIVRANEPMQSPVVNGNDVTFRYVGTGEEQSVLLAGSFNDWQTIELTKESDYIWSVTKTLPDGTYMYKFVVDGNWVADPLNANQADDGHGGKNSVVVVGQPAQQQERVVTLVGNLQKELGHEKEWDPTATATVMKHEGNGLYTFTGTLPAGTYEYKIAINGSWDENYGAGGRNGGNISFTLEKETEVTFYYHDSTHAIADSTWYTPIPKEKQPRLVGTILPAIGYEKEVDGWTPETSTAFFTDDDFDSVYTFSARVPKGTYEYKVVLGNSWDENYPQDNNAKLNVLEETTITFFFNAKTKELYTDYSPTGSDGNVDKDRLKHNTWDSLYRQPFGAVKAGTEVTLRLAAKKGDVTKANVYVKNTTTGTAKLYEMSKVGVIGDDEYWEATFTPEEKGLYGYKFIAMDGAAKAEYGEDTQEGQWGRAVDKNAELFQLTVYDPNYKTPDWMKQAVVYQIFPDRFFNGNPNNDKVKEYGRGNEPIEYREWSQLPDNPRMKDTPGYDGDGFWNNDFFGGDIAGIEQKLDYLQSLGVNTIYLNPIAHAPSSHKYDAQDFKEIDPMFGTPEEFESFVQAIASRGMHLILDGVFNHVSDDSIYFDRYGKYPTVGAYEYWSAVYDLMNEKGLSEEQARAQVEQKFKDEGQQFSPYGFHLWFNIENEKVNGVYKYQSWWGFDSLPEFKSVTGTKVPYPSELNNEQLANYIFYERDSVAKSWITRGASGWRLDVANEVDTEFWREFRKELLQSDYDRGPTLKNGQQPLILGEIWDDASKYFLGDQYDSVMNYRFRGAVLDFLRNGKAEEIDARLTAVREDYPEEAFYALMNLIGSHDTARAIFLLGNGTDSYERAELDPNYNEQLGKQRSKVAVIFQMGYPGAPTIYYGDEAGVTGSKDPDNRRTYPWGSEDKELIAHYQKVGKIRTKHQDVLAKGTIETVYAKGDVYVFARQYGKDVALIAMNRGDSAQTVQLDVSSIIPNGTSFVDELHGEYEVTVSDGKVQLNIPALDGRMLFGKVTVNMPNEVTNVQATAGVGQVTLAWEGDASTYRIYQSTLKGAGYELVKETNEKTAVIDNLKNGTAYYFAITAVDENGNESAKVETNRVVPHYPLAEEHVALLSEVNGGVLDLAALITVEAKVQIDNVTKHGLADGLQAVLQVKKPNSDKWEDIQATYDRQDGDANVFRASFTPLQAGTYTYRYGFTTNLGDSWVYTEEKTFTLTANEADQQAPAKGIHLLQPDVESGQVNLSWSFIERDDHDAYMVVIERDGQVIHTTTTISTSFTDYDVENGKTYTYVVKLYDRAGNVVASKDVQITPDIVMVQVTFKVKAPSYTPLDTRITIPNSINGWNTGAWEMTRGGAVTPDWEFTTELQEGETITYKYVKGGSWDQEGLADHTRDDQTDDDVSYYGYGAIGTELKVTVHNQGNNKMVIQDYILRWIDMPVVVEDVTKDGDRVTIKGNAIKDGVLTINKERVTIQDDMSFTYTFTPAANQKEIAIHIEPSERSKSDIFKNDGGAIAKNTKDYVLNLDTKQLREGVLQEDTGSGTTPGSGTTPGSGTTPGSGTTPGSGTTPGSGTTPGSGTTPGSGTTPGSGTTPGSGTTPGSGTTPGSGTTPEKGAVVLQPQVETKEKDGKIVEKVATISSNEVTSIVNSLSNENKQVVVSLGSLAKGVTTKVDVPATLFTQAANKQGEATIVSATEQATYKLPAKEVQASLAAIAKTLGATVEQVNISIEMRVKDAPQLRAKALSDAVEFHVVAKANGKEQVIDRFTQYVEREIVLKQAVNASRSIVVRVNDDGSITPVPTTFVGNKAVIKSLTNSTYVVVEGTHTFSDIEKHWAKGYIETLAAKQLVKGMTETAYRPNEQMTRAQFAVLLVRALALPHETYDGRFADVKGTEWFNKNGELAAAVKLGIIQGKTANTFAPNEPITRVQAAVMIERALKLSFVGYDEATNDKTKKATDFRDAKQLPTWAKQAIEAVYQAGIMQGRDNGSFDPTGHMTRAEMAKVLAEFLGKVKLM

SEQ ID NO: 46407 - protein, 99 aa, Cryptococcus gattii
WHGMGQKNTPYMDGIPGITQCPIPPGGSYTYNFTISDQSGTYWWHSHYSNAMADGLWGPLIVHSVDEPIQRGRDYDEDRIVFVSDWMHDNSEIIIAALA

SEQ ID NO: 46408 - protein, 326 aa, Streptomyces coelicolor A3(2)
MTDSRAGLGPQAAGGLLTFGETMGLVTATTIGTLEYARDFTFGIGGAESNVAIGAARLGAPVTWIGRVGSDAAGDLVGRRMRAEGIQTVAVRDTSFTGLMVRHHRAATVVHVDYHRAGSAGSRLTAHDIPVGEIRRAAILHLTGITPALSASARQATWDAVAAAKANGVRVSLDVNHRSKLWDRDTARRELRRLVAEADIVFAGIEEAQLVLDSEADAPESLADALAATGPGETVVKTGARGCTAHIDGAIHEEPALSVPVVDTVGAGDAFVAGYLAEHLRGAGPVQRLRTACAMGAYAVSVPGDCELLPTRSELETFLTTGDVLR

SEQ ID NO: 46409 - protein, 360 aa, Pisum sativum
MDFSTNGSEESELYHAQIHLYKHVYNFVSSMALKSAMELGIADAIHNHGKPMTLPELSSSLKLHPSKVNILYRFLRLLTHNGFFAKTTVKSNEGEEETAYVLTPSSKLLVSGKSTCLSSLVKGALHPSSLDMWGVSKKWFHEDKEQTLFECATGENYWDFLNKDSDSLSMFQDAMAADSRLFKLAIQENKHVFEGLESLVDVAGGTGGVAKLIHEAFPHIKCTVFDQPQVVGNLTGNENLNFVGGDMFKSVPSADAVLLKWVLHDWNDELSLKILKNSKEAISHKGKDGKVIIIDISIDENSDDRGLTELQLEYDVVMLTMFLGKERTKKEWEKLIYDAGFSRYKITPICGFKSLIEVYP

SEQ ID NO: 46410 - protein, 315 aa, Streptococcus pyogenes MGAS10394
MIILFIILLPLHSSISLLKWYLLYFIIWRKPENMEMTWTVKYITEFIATAFLIILGNGAVANVDLKGTKGHNSGWLVIAFGYGLGVMMPALMFGNVSGNHINPAFTVGLAVSGLFPWAHVLQYVVAQLLGAIFGQLVVVMVYKPYFMKTENPNHVLGSFSTISSLDNGQKDSHKASYINGFLNEFVGSFVLFFGALALTKNYFGVELVGKLIEAGYDQTTAATQISPYVTGSLAVAHIGIGFLVMVLVTSLGGPTGPALNPARDFGPRLLHHFLPKSVLGQAKGDSKWWYAWVPVVAPILAAIVAVAAFKYLYIR

SEQ ID NO: 46411 - protein, 339 aa, Brassica napus
  misc_feature (117)..(117): Xaa can be any naturally occurring amino acid
  misc_feature (133)..(133): Xaa can be any naturally occurring amino acid
  unsure (1)..(339): unsure at all Xaa locations
MVRPPCCDKGGVKKGPWTPEEDIILVTYIQEHGPGNWRAVPTNTGLLRCSKSCRLRWTNYLRPGIKRGNFTEHEEKMIVHLQALLGNRWAAIASYLPQRPDNDIKNYWNTHLKKKLXKASQDSHQELDQSKRXRSSISSSPSSSSANSNSYIPRGQWERRLQTDIHLAKKALSEALSPAVAPIVTSTLATTATTSSSSESRRSSSSTCGFLRVQETSTTYASSTENIAKLLKGWVKTSPKTQNSADQKNPPDSETKELMKSDDVQKDCAGGFQAFSGLDHSNDCDSPYHQTKLSPDHETKQAITGCSNQSQLSLFEKWLFEDFGGQIGDILLDENPNFF

SEQ ID NO: 46412 - protein, 410 aa, Lactobacillus plantarum WCFS1
MTERVVVTGMGAVTPLGNSVDEFLTGLFAGQVGIKPITKFDATPTGITVAGEVKDFQPEERIEKKLAKRLDLFSVYGLYSASEAMAQAGLNEANIDPERLGVIYGSGIGGLTTIEAQVIKMHDKSPKRVSPLFVPNSIINMVVGNIAMQFNAQNTSQAIVTACASATNAIGDAFEYLRQGKADVIITGGSEASVNEIGIAGFASLTALSKATDPTLASLPFDRQRNGFVMGEGGATLVLETLAHAQARGAQILGEVVGYGTTSDAYHMTAPRPDGAGAKRAMQQAVAEAGIQPRDVDYINAHGTATHANDSAEAQAISALFGQDVQVSSTKGMTGHLLGAAGAIEAVATIGALQAGQLPANIGCTDQDPECPVNLVTPATQHQAATYALSNSFGFGGHNAVVAFKKWVNV

SEQ ID NO: 46413 - protein, 284 aa, Azospirillum brasilense
MSALNDKSVDNGRIARRFAALKAEGRAGLVTFITAGDPDLETCRAVLHGLPAAGADLIELGLPFSDPMADGPAIQAASLRALHAGTTARKTLDLVRGFRETDADTPVILMGYYNPIHAYGVDRFLADAIEAGVDGLIVVDLPPEEDEELCIPALKAGVNFIRLATPTTDDKRLPAVLQNTSGFVYYVSIAGITGAASADNAAVGAAVERLKRHTDLPVAVGFGIKTPEQAAEVARVADAAVVGSAIVTRLAGGLDADGKARPGLAEDVLGFVRELAGGVRGAAF

SEQ ID NO: 46414 - protein, 230 aa, Oryza sativa
MYHHHHGGHGEVASLHLLSPPNPPFFGAAAHHHHHHHGLINMALPPQAYFVPAAPPPPFQEATAALAAGDDATAALAVFELERILEEAAAAGGGGGNGSPSSGSDGCCYGLQGVAPAAEEERRRRRMVSNRESARRSRMRKQRQLSELWAQVEHLRGANRRLLDELNHALRGCADVRRENSRLRDEKAELAGKLQLLLPRQPAPEKNAADDQSSCSSEPCKNSTTTTAAE

SEQ ID NO: 46415 - protein, 444 aa, Daucus carota
MREILHIQGGQCGNQIGSKFWEVVCDEHGIDPTGQVLSESDLQLDRINVYYNEASGGRYVPRAVLMDLEPGTMDSVKTGPHGQIFRPDNFIFGQSGAGNNWAKGHYTEGAELIDSVLDVVRKEAENCECLQGFQVCHSLGGGTGSGMGTLLISKIREEYPDRMMLTFSVFPSPKVSDTVVEPYNATLSGHQLVENADECMVLDNEALYDICFRTLKLSTPSFGDLNHLISGTMSGVTCCLRFPGQLNSDLRKLAVNLIPFPRLHFFMVGFAPLTSRGSQQYRTLTVPELTQQMWDSKNMMCAADPRHGRYLTASAMFRGKMSTKEVDEQILNVQNKNSSYFVEWIPNNVKSSVCDIPPRGLSMSSTFIGNSTSIQEMFRRVSEQFTAMFRPKAFLHWYTGEGMDEMEFTEAESNMNDLVSEYQQYQDATAEEDDYDDGEGSTGD

SEQ ID NO: 46416 - protein, 492 aa, Xanthomonas campestris pv. vesicatoria str. 85-10
MTAKPRLNFWQIWNMCFGFLGIQFGFALQNANASRIFQTLGAQVDDVPGLWIAAPLTGLIVQPVIGYLSDRTWTPWGRRRPYFMVGAVFTTLALLVMPNAPMLWVAAGTLWVLDASINISMEPFRALVGDQLPPSQRPTGYAMQSFFIGIGAIVASFLPWLLTHWGIANTAPPGQLPDSVRYTFYLGAAVLFLSITWTVLRTREYSPEQLAGFDDAHPPLAQVASTGMAPTPMASVLWCGLGVLLATAIAWQHGDRMLYVLAGLCLAYGVLLALARMLPATSMLVAIVQDVRSMPMTMRRLAWVQFFSWFALFAMWIYTTAAVTQVHFGANDTASAAYNDGANWVGVLFGAYNGFAALAAVVIPLLVRAIGLRWGHLCNLWLGAAGLLSMLVIRDPQWLLLSMVGVGFAWASILSLPYALLSDSVPAPKMGVYMGIFNFFIVIPQLVAASALGFVLRVWLGGQPIYALAIGGLSLLIAGVCVVRVPVASGGQ

SEQ ID NO: 46417 - protein, 383 aa, Rickettsia amblyommii
DISRVSAEADCFTYDPGFMSTASCQSTITYIDGDQGILRHRGYDIKDLAEKSDFLDVAYLLIYGELPSGEQYNNFTKQVAHHSLVNERLHYLFQTFCSSSHPMAIMLAAVGSLSAFYPDLLNFKEADYELTAIRMIAKIPTIAAMSYKYSIGQPFIYPDNSLDFTENFLHMMFATPCTKYKVNPIIKNALNKIFILHADHEQNASTSTVRIAGSSGANPFACISTGIASLWGPAHGGANEAVINMLKEIGSSEYIPKYIAKAKDKNDPFRLMGFGHRVYKNYDPRAAVLKETCKEVLKELGQLDNNPLLQIAIELEAIALKDEYFIERKLYPNVDFYSGIIYKAMGIPSQMFTVLFAIARTVGWMAQWKEMYEDPEQKISRPR

SEQ ID NO: 46418 - protein, 223 aa, Glycine max
  misc_feature (151)..(151): Xaa can be any naturally occurring amino acid
  misc_feature (210)..(210): Xaa can be any naturally occurring amino acid
  unsure (1)..(223): unsure at all Xaa locations
RRCRVVAISLEPELGEPWVLPCVRKTELLMAQNDSLNHEYLPVLGFEPFCKAAVTLLLGDVETSTPLAEGRAFGVQTLSGTGALRVAAEFLSKILKYTTFYVSNPTWENHRLVFFNGGFKQCMEYRYWNEEKRGLDIEGMIEDLRAALTYXLIILHDSAHNPTGCDPTKDQWKIIADIGQEKKLFPLFDYVYQGFATGDAENDAWAVRYXANERNIELICCPS

SEQ ID NO: 46419 - protein, 329 aa, Aquaspirillum arcticum
MAKTPMRVAVTGAAGQICYSLLFRIANGDMLGKDQPVILQLLEIPNEKAQKALQGVMMEIDDCAFPLLAGMTAHADPMTAFKDADVALLVGARPRGPGMERKDLLEANAQIFTVQGKAIDAVASRNIKVLVVGNPANTNAYIAMKSAPSLPAKNFTAMLRLDHNRALSQIAAKTGKPVSSIEKLFVWGNHSPTMYADYRYAQIDGASVKDMINDDAWNRDTFLPTVGKRGAAIIDARGVSSAASAANAAIDHIHDWVLGTAGKWTTMGIPSDGSYGIPEGVIFGFPVTTENGEYKIVQGLSIDAFSQERINVTLNELLEEQNGVQHLLG

SEQ ID NO: 46420 - protein, 538 aa, Xanthomonas campestris pv. vesicatoria str. 85-10
MLQTPWWRGAVIYQIYPRSFLDSNGDGVGDLPGIIAKLDYIAGLGVDAIWISPFFKSPMADFGYDIADYRAVDPLFGTLDDFDRLLDKAHALGLKVMIDQVLSHTSIEHAWFQESRQDRTNAKADWYVWADPREDGTPPNNWLSLFGGVAWQWEPRREQYYLHNFLVDQPDLNFHNAEVQQATLDNVRFWLDRGVDGFRLDAINFCFHDAQLRDNPAKPADKRVGRGFSADNPYAYQYHYFNNTQPENLAFLERLRALLDRYPNAVSLGEISSEDSLATTAEYTAKGRLHMGYSFELLVQDYSAAYIRETVSRLEATMLEGWPCWAISNHDVVRAVTRWGGDDASPAFARMVVALLCSLRGSVCLYQGEELGLGEADVAFEDLQDPYGITFWPTFKGRDGCRTPMPWTDAPSAGFTSGKPWLPLSEPHRLAAVSVQQDDAQSVLSAVRAFLSWRKSMPALREGAIAFYDTAEPVLMFRREHAGQVMLLAFNLSADITELAVPAGAWRQIDVPGVERGVIDHGRLRLPGHAVVCAMGGE

SEQ ID NO: 46421 - protein, 496 aa, Solanum chacoense
MKKATVAAVVVGTAAAVAVAALIMRHRMGKSSKWARARAILKEFEEKCATPDGKLKQVADAMTVEMHAGLASEGGSKLKMLISYVDNLPTGDEGGVFYALDLGGTNFRVLRVQLGGKDGGIIHQEFAEASIPPNLMVGTSEALFDYIAAELAKFVAEEGEEFHPPPGRQRELGFTFSFPIMQTSINSGTLIRWTKGFSIDDTVGKDVVAELTKAMQKREIDMRVSALVNDTVGTLAGGRFTNKDVSIAVILGTGTNAAYVERAQAIPKWHGPLPKSGEMVINMEWGNFRSSHLPLTEYDHAMDTDSLNPGEQIFEKICSGMYLGEILRRVLLRMAEEAGIFGEEVPPKLKNSFILRTPEMSAMHHDTSSDLRVVGDKLKDILEISNTSLKTRRLVVELCNIVATRGARLAAAGILGIIKKMGKDTPRESGPEKIVVAMDGGLYEHYTEYSKCLENTLVELLGKEMATSIVFKHANDGSGIGAALLAASNSVYVEDK

SEQ ID NO: 46422 - protein, 493 aa, Cucumis melo
MGFHQTHETNQVLLSKIAISDGHGEDSPYFDGWKAYDNDPFHPENNPLGVIQMGLAENQLSPDLIVDWIRKHPKASICTDEGLLNFKDIANFQDYHGLPEFRNAIASFMGKARGGRVKFDPSRIVMGGGATGASETVIFCLADPGDAFLIPSPYYAAFDRDLQWRTRAQIIPVHCNSSNNFQITREALEVAYKKAEESNIKVKGLIITNPSNPLGTIYDRDTLKSLVNFVNDNNIHLICDEIYSATVFKSPSFTSIAEIIEEMDHCKKELIHILSSLSKDMGLPGFRVGILYSYNDTVVSIARKMSSFGLVSSQTQHLLAAMLSDEEFVDNFLVENSKRLAKRHARFTEELEKMGITCLNSNAGLFVWMDLRKLLKDQSFESEMELWRVIINEVKLNVSPGSSFHVTEPGWFRVCFANMDDNTVGVALDRIHSFVGKIDKKENSTIPMPPKKKHRENKLRLSFSFSGRRYEEGNVLKSPHMMSPHSPLVRAKT

SEQ ID NO: 46423 - protein, 420 aa, Lotus corniculatus var. japonicus
MVLSNTASSGSESDLSIHSTFASRYVRTSLPRFKMPQESIPKEAAYQIINDELMLDGNPRLNLASFVTTWMEPECDKLIMASINKNYVDMDEYPVTTELQNRCVNMIAHLFNAPLGDSDTVGTVGSSEAIMLAGLAFKRTWQNRRKAEGKPHDKPNIVTGANVQVCWEKFARYFEVELKEVKLSEGYYVMDPQKAVDLVDENTICVAAILGSTLNGEFEDVKRLNDLLIEKNKETGWDTPIHVDAASGGFIAPFIYPELEWDFRLPLVKSINVSGHKYGLVYAGIGWVIWRNKEDLPEELIFHINYLGADQPTFTLNFSKGSSQIIAQYYQLIRLGYEGYKHVMENCRDNMLVLKEGLQKTGRFEIVSKDNGVPLVAFTLKDHTHYNEFQISDSLALRVDSAGIQHAPKYSARDRGPCSH

SEQ ID NO: 46424 - protein, 490 aa, Cucumis melo
MVLVSSNDNGNAKKVLSKLAKGNGHGEDSSYFDGWKAYDSDPFHPIINPRGVIQMGLAENQLSFEFVEKWMKNNPQASICSVEGIDEFKDIAIFQDYHGLPEFRNAVANFMGKVRGNRVKFDPDRVVMSGGATGAHETMAFCLADPGEAFLVPVPYYPGFDRDLRWRTGVEIVPVKCESSNNFKLTREALETAYEEAEKSNIRIKGLLITNPSNPLGTVYDRQTLETAVSFINEKNIHLVCDEIYAATVFSEPGFISISEVIDNMNDVECDRNLIHVVYSLSKDMGFPGFRVGIIYSYNDAVVACARKMSSFGLVSSQTQYLIASMLLDDVFVDNFLAGSAEKLAVRHRNFTKGLAQVGIGYLKGSGGLFLWMDLRHLLKEKTLEAEMALWKVIINEVKLNVSPGSSFHCSEPGWFRVCFANMDDSTMDISITRIRNFVLQNKEVTTKVKKQKFCWRQSSLELRLSSRRLEDVMSPHSPLPQSPMLRATT

SEQ ID NO: 46425 - protein, 516 aa, Oryza sativa
MDQNHSGLSRRFIYPVSIVKGVKYLVFEFRGVIRLTAIAHGVVGDVFLGSEAPVVTSSISKYAGLVFGGAHRDVSALGEEKLSFFGKSSQQKRISTNQLYNSGIPVTVPSPLPAIPATLDENIPRIPDGQNVPRERELRSTPMPPHQNQSTVAPLHGHFQSSTGSVGPLRSSQAIRFSSVSSNEQYTNANPYNSQPPSSGSSSTLNYGSQYGGFEPSLTDFPRDAGPTWCPDPVDGLLGYTDDVPAGNNLTENSSIAAGDELAKQSEWWNDFMNYDWKDIDNTACTETQPQVGPAAQSSVAVHQSAAQQSVSSQSGEPSAVAIPSPSGASNTSNSKTRMRWTPELHERFVDAVNLLGGSEKATPKGVLKLMKADNLTIYHVKSHLQKYRTARYRPELSEGSSEKKAASKEDIPSIDLKGGNFDLTEALRLQLELQKRLHEQLEIQRSLQLRIEEQGKCLQMMLEQQCIPGTDKAVDASTSAEGTKPSSDLPESSAVKDVPENSQNGIAKQTGMRIH

SEQ ID NO: 46426 - protein, 621 aa, Pseudomonas syringae
MSGMAGWVNLRHGVGQQANLPHSKVTKVILDMIAAMAGRGPDGQAVWLGPDLALGHCSTVASRYDFNEQPWIGEIRGATVAIMYTGQIYNMWQLQQELASFGPAPDRWSYAEIIRRAYGRWGTGFVQHLEGMFAIALWDGQKRELLLARDRLGLQPLYYTLTDGGIIFASVPTAIQAHPQFTAKLDRSALAIVLQPRMAMPGETPLKGLHELPPANVLSFSKRGHTQVRYWQLESAPHTDNFEQTSDHVRALLEGVVARQFEDQVPSAAMLSGGIDSTSVAALVMKQLATRGAGPALDTFCLKFDTDEDAFTSSELRPDIDAPFAALAAEYMGTRHTTLSATMQDLLNVIPATRTARGLPGWGQFDASMYLLFERMRDNFSVALTGEAADEIFGGYPYYFKPDLLARAQFPWLGDGPKLADYLSPALITAQQVAEDERARYDYWLSQVPRLPGESGEAARMREVLFLGMSGPLSVILDRKERMSMSQGLEVRVPFCDPELIQYVWNVPWEMKSRGGVKGLLKSAMRDILPPTTLSRKKSAYPHIQDTEYDRVLISEARWIATDPKSPIGWMFDTPRLSALIDQIAANQLNASMLPGGASPAHLLIQLVEMHRWIVDNRVAV

SEQ ID NO: 46427 - protein, 226 aa, Rickettsia conorii str. Malish 7
MHTYKAHILIVDDDSRILALLKQFLNKNAFLVSTASSVIEAKNLLKTSNYDLIILDVMLPEITGLDFATTIRDAGNNIPIVMLTALSEADDRVKGLEAGASDYITKPFEPRELLLRINNLINNYNNFTKETNIIKFGNNFYNSDTKEFTKNNQIVSLSSTEQKLLEILIKNSGKSTSRFELSKIMGGLSMRSIDVQITRIRSKIEDNPKEPKYLKTVRNEGYALYI

SEQ ID NO: 46428 - protein, 235 aa, Oryza sativa (indica cultivar-group)
MAPRAATVEKVAVAPPTGLGLGVGGGVGAGGPHYRGVRKRPWGRYAAEIRDPAKKSRVWLGTYDTAEEAARAYDAAAREFRGAKAKTNFPFASQSMVGCGGSPSSNSTVDTGGGGVQTPMRAMPLPPTLDLDLFHRAAAVTAVAGTGVRFPFRGYPVARPATHPYFFYEQAAAVAAAEAGYRMMKLAPPVTVAAVAQSDSDSSSVVDLAPSPPAVTANKAAAFDLDLNRPPPVEN

SEQ ID NO: 46429 - protein, 450 aa, Prosthecochloris aestuarii DSM 271
MTKKTRSIEYGFNDLPPAGHLIILSLQHVLLMFVSVGLPIIFVSQINETTQFAATLVTLSMLAAGIGSIVQSASLPFIGSGYLCPNVCGPSYLSLSLSAAWAGGIPLMRGMIIIAGLVEMSLAPLVHKLKQVFPTFIVGLVVAMVGVSVIKMSVTSLFGLEFRGDAVRSADIVIGMVTLLVMVLCNIWGSGFVRIYCLLIGMLSGWGLAVVLVPEYGHTLAVVRHSPVFALPSIGPEFRQISFRMDMVIPFVVIAVSGSLKSFGNLLAAQKISEPELDEVNFTPIRKGLLADGFSTALAGLIGGMAVDTSSSNIGLAGSTKVLSRWISVAAGVIFIVLAFCPKITVALSLMPKPVLGASIIFAGCFMICTGFQEMFSEAWDARNTFSVGISLFFGLSTAFLPGLYARAPELIKIFFTDPLPTTTILAVLLNLLFNLDRTYEGLVRRFRSS

SEQ ID NO: 46430 - protein, 303 aa, Oryza sativa (indica cultivar-group); identical to SEQ ID NO: 796

SEQ ID NO: 46431 - protein, 653 aa, Prosthecochloris aestuarii DSM 271
MTEQSNEHHTIERRLDQIDLNELCRGRSFHPSPVSWGDEVLYFLFLDRFSDAKEYGGFTDREGRPVDSGENGRSTPLFNFEDDAARASRSEWFESGKGWCGGTLAGLRDKLGYLKRLGITALWISPVFKQVTGSNDYHGYGIQNFLDVDPHFGTRQELRELVQAAHAEGIRVILDIIVNHAGDVFAYSGNERRNYNNGVEFPVQGFRRFSGEEGSIPFRTVSPEEEQELWPDGAVWPAELQEPGNWRKKGEIGNWDGFPDYVEGDFLSLKDLHLGNGISDPSAGQDIGRRISGFSPSETLAHLIKVYRFWIAYADIDGYRLDTVKHMEPGAVRLFVNAIHEFAQSVGKENFTVIGEITGGRALAFETLETTGLDAALGINDVSDKLEFLAKGWRSPGHPETPEQEGYFDIFRNSLQDCKSSHQWYGNHIVTMFDDHDQVGVRHKFRFCGQGEQSYTLLPAALGLNLATMGIPCLYYGTEQAFNGADHRDNDDSYSDVFLRECMFGGAFGSMQSTGRHFFNESHEIYRFISRLSALRSQHLALRRGRQYLRQVSASGHDNDFHYPQPLGGELRWIIAWSRIFADREYLCACNTDPRHPLTLWATVDSSLHRSGETMSCLFSSDREQEGTSSDIEARNGKAIAVTVPPGGFVVYH

SEQ ID NO: 46432 - protein, 393 aa, Mesorhizobium loti MAFF303099
MMRYPEHADPVITLTAGPVNAYPEVLRGLGRTVLYDYDPAFQLLYEKVVDKAQKAMRLSNKPVILHGEPVLGLEAAAASLISPDDVVLNLASGVYGKGFGYWAKRYSPHLLEIEVPYNEAIDPQAVADMLKAHPEITVVSVCHHDTPSGTINPIDAIGALVSAHGAYLIVDAVSSFGGMKTHPEDCKADIYVTGPNKCLGAPPGLTMMGVSERAWAKMKANPLAPRASMLSIVDWENAWSRDKPFPFTPSVSEINGLDVALDLYLNEGPEAVWARHALTAKAMRAGVTAMGLSVWAASDSIASPTTTAVRTPDGVDEKALRQAARARYGVVFSSGRGETLGKLTRIGHMGPTAQPIYAIAALTALGGAMNAAGRKLAIGKGIEAALAVIDADA

SEQ ID NO: 46433 - protein, 329 aa, Pyrococcus furiosus DSM 3638
MRKVKLGLVGCGIAAKTLHIPALKKLSELFEVTAVTSRTRAHAQECSKLLGGVEVFESYDELLKSGEVDAVDLALPVELNLPFIKKAVESGVHVICEKPISTDTKTGKEIVKIAESSDVVVYIAENFRHIPVFWKAKELIEKGKIGDPIFMSWHIWVGMDESNPYVHTEWRKKPKHIGGYLSDGGVHHVAAMRLIFGDIVWVSAVVRDISPLLGGPDFISSILEFESGVVGSYTAGYPIKGKDRFEVVGTEGRMVIEWDRIVLNGESIYVKPEDSYKLEFKDFYYVVKGKRENVLGSPLEALKDLAVIEAAVNSNGQKVNVGDLLDLEK

SEQ ID NO: 46434 - protein, 300 aa, Glycine max
MKKRSCSSSSSVFEEANGVEDEAEPQQPSSCAAAALDELHKEKNENGEETLVPPNPNLDDGFYEIETIRRKRLRKGQLQYLIKWRGWPETANTWEPLGNLQSVPDLIDAFEESLLKSGKHHKRKRKHADVVQLTQLKKRSERSTTSYSLRHFPPQVPTLTNDYDPKLSELKEAPTNTGVQLDNLAIHFQHPIPSRGAKRRKSASSVKRFKRDPDAAAIQPIAAPIHMPDATNTACNIVKIIKPIGYSASLSDNMHDVLVTFMAMRSDGTEVMVDNRYLKAYNPLLLINFYEMHLRYTPTA

SEQ ID NO: 46435 - protein, 99 aa, Cryptococcus gattii
WHGMRQKNSPYMDGIPGITQCPIPPGGSYTYNFTISDQSGTYWWHSHYSNAMADGLWGPLIVHSVHEPIQRGRDYDEDRIVFVSDWMHDNSEIIIAALA

SEQ ID NO: 46436 - protein, 664 aa, Oryza sativa (japonica cultivar-group)
MWRRQHALLRRISLPKPPAATGIGCYYATEPEGRKPKTAPLQSRGMVDRFRLRAKGGDGGNGCISLRRSRSDRQGKPDGGNGGRGGDVILECSRSVWDFSGLQHHMKASRGANGVSKNQIGTRGSDKIAQVPVGTVIHLVEGEQPSLSVNKPTRALDPWDIPDAVEHSPFSSSRIGSKMMKGLDSSRSSQHISSKKNTAENDCERGNRNHRGKEPYYMTEFVRTEDYDGTSYPHQVGVDENDQFDDEDDEFWEDDEEELDMEEVTEEKEEEEDVRYSVAEMTKPGQRLIIARGGEGGLGNACILKEMWLSKAHKEEEMASLSTGHPGTETYLILELKSIADVGLVGMPNAGKSTLLSALSRARPEIADYAFTTLRPNIGSLTYEDYFSVKVADIPGLIKGAHENRGLGHAFLRHIERTKVLAYVLDLAATLNGRKGVPPWEQLRDLVVELEHYQEGLTKRPSLIVANKIDEEGADEMYEELKKRVQGVPMFPICAILQEGVPDLRVGLRDLMDASDPQDVGKQRHIILLEISSELDFTMNRQAEALQHLASFYVLKELEDDGPVTGHTSGQLKQTSWQRSIKPIVVSVPLKDSKFSHDECYKEETVRRKKYPDLEEKSSSTKATVVLGVAPEKKAQQFEAAAESGETAHGCSCGSSCRCNPCNC

SEQ ID NO: 46437 - protein, 260 aa, Pyrococcus furiosus DSM 3638
MPCYNLKNKVAIVTGGGQGIGAAIAQLFAENGAKVVLAEIDEEAGLEREAMLRERGLDVTFIKTDVADEESVKNMVKKTVELYGGVDILVNNAAIMSVKSIFERTLEEWERVIRVNLTGPYICSRYAAEEMIKRGGGVIINIASTRALMSEPDTEPYSASKGGLLALTHSLAISLAKYRIRVVAVSPGWIETSRWKKSKLRSEPKLRPIDHEQHPAGRVGDPMDIAHICAFLADNEKAGFITGVNFVVDGGMTVKMIYAD

SEQ ID NO: 46438 - protein, 480 aa, Escherichia coli O157:H7 EDL933
  misc_feature (284)..(284): Xaa can be any naturally occurring amino acid
  unsure (1)..(480): unsure at all Xaa locations
MSRRLRRTKIVTTLGPATDRDNNLEKVIAAGANVVRMNFSHGSPEDHKMRADKVREIAAKLGRHVAILGDLQGPKIRVSTFKEGKVFLNIGDKFLLDANLGKGEGDKEKVGINYKGLPADVVPGDILLLDDGRVQLKVLEVQGMKVFTEVTVGGPLSNNKGINKLGGGLSAEALTEKDKADIKTAALIGVDYLAVSFPRCGEDLNYARRLARDAGCDAKIVAKVERAEAVCSQDAMDDIILASDVVMVARGDLGVEIGDPELVGIQKALIRRARQLNRAVITAXQMMESMITNPMPTRAEVMDVANAVLDGTDAVMLSAETAAGQYPSETVAAMARVCLGAEKIPSINVSKHRLDVQFDNVEEAIAMSAMYAANHLKGVTAIITMTESGRTALMTSRISSGLPIFAMSRHERTLNLTALYRGVTPVHFDSANDGVAAASEAVNLLRDKGYLMSGDLVIVTQGDVMSTVGSTNTTRILTVE

SEQ ID NO: 46439 - protein, 803 aa, Magnetococcus sp. MC-1
MTPEQDPSCGRHYLKYLYMLWVGSFLLMLGGYWWADYQQKQEQTLAMSNRPVISAQVNAPAPDTAGNATTAQMGVSAVPVALNQPMMGAGNTALSIPQNVSGTFPFAHVVKLMMPSVVNVSATIMTTTADPNADPKRGLQFANPFSGIATESIGSGIVVTEDGYILSNFHVVENAKQVFVTLFNDQGTVKLPADVIALDSRRDLALLKVEADTPLQPAPFGDSKIVDIGDPVIAIGSPFGLDQTVSKGIISGKRKAVNIGGTVHKNLLQTDAAINRGNSGGPLVAADGSVVGVNTAIYTTTSAFAGVGFAVPSNTAREFLEEQIQLPVLTPLNATMLPVAAPNAPPIAADAVLTHGDKGPCENCHQILPAANAQPVAARPPPPIPANAVMPHGDRGPCENCHQILPAANGQPVAARPPPPIPANAVMPHGDRGPCENCHQILPAANGQPVAMQQGMGQGGGGQGGGGQGMGRHRNRADRMFSFDPNGAFALPAAATLPVDSGMAVPAEIMAIVNSKMGVTFQVLNVELAAQVGSPYPKGLLVDQVSVGSTSDQAGLQKGDVVIKADGKWLDSLAALAELVQAGNEQIRLSVVRGGRREELVIGLAQLQAGPGAQMQPVAMNQTQGMTQPNLGYNLQQPMQQPMQQPSMQQPMQQPSMQQPMQQFSMQQPQEPMQAQNWNNPAQNGATPAWQGNNRAPNMNGAPPKPAPTEFEWMGMEIMPITPARISRQPMLKGKSGGVITDLGAASPAMRAGVQRGDVVVAINGQAVSDGRTIDQAIKAAKGKQWALLEIERNGTRMFVKVQ

SEQ ID NO: 46440 - protein, 421 aa, Shigella flexneri 2a str. 2457T
MSNNEFHQRRLSATPRGVGVMCNFFAQSAENATLKDVEGNEYIDFAAGIAVLNTGHRHPDLVAAVEQQLQQFTHTAYQIVPYESYVTLAEKINTLAPVSGQAKTAFFTTGAEAVENAVKIARAHTGRPGVIAFSGGFHGRTYMTMALTGKVAPYKIGFGPFPGSVYHVPYPSDLHGISTQDSLDAIERLFKSDIEAKQVAAIIFEPVQGECGFNVAPKELVAAIRRLCDEHGIVMIADEVQSGFARTGKLFAMDHYADKPDLMTMAKSLAGGMPLSGVVGNANIMDAPAPGGLGGTYAGNPLAVAAAHAVLNIIDKESLCERANQLGQRLKNTLIDAKESVPAIAAVRGLGSMIAAEFNDPQTGEPSAAIAQKIQQRALAQGLLLLTCGAYGNVIRFLYPLTIPDAQFDAAMKILQDALSD

SEQ ID NO: 46441 - protein, 443 aa, Photorhabdus luminescens subsp. laumondii TTO1
MSKTHYSESLNLKSHWMPFSANRSFQRDPRLIVAAEGQWLKDDKGRQIYDSLSGLWTCGAGHTRTEIQQAVAAQLSTLDYSPGFQFGHPLSFQLAEKIANLTPGDLNHVFFTSSGSESVDTAVKMVRAYWRVKGQPEKTKLIGRALGYHGVNIAGTSLGGIGGNRKMFGQLMDVDHLPHTLQTDMAFTPGMAETGGAELANEMLKLIELHDASNIAAVIVEPVSGSAGAIIPPKGYLQRLREICDQHNILLIFDEVITGFGRMGRWTGAEYFGVTPDLLNFAKQITNGAIPLGGVVASSEIYEAFMSQSLPEHSVEFSHGYTYSAHPVACAAGLATLDLLDKNHLIQRSAELAPHFETALHALRNCPNVTDIRNCGLVGAIELAARDGDTAVRPFDASMALWKAGFYVRFGGDTLQFGPMFNAERADLDRLFDAVGEVLHHID

SEQ ID NO: 46442 - protein, 459 aa, Arabidopsis thaliana
METLKKNPSVRRKSKLARTFQKVCNLRTTSTKVSSNNGIGICMLKSQNPNFDDEDDDGDSVFDLKSTSSSRSGEIKVRERNRAVLQAVVAKIFASTTSIKAAYAELQMAQRPYDNDAIQAADTAVVEELRALSELKRSFLRKELNLSPQVAIMLAEIQEQQSLMRTYEITIKKLEFEVTEKQLKIDELKMSFEESLVVNKSLEKKLSASGSVSVFDNIEIRNLNLSSFVQVLGFTLRSVRSFVKLIVKEMESASWDLDAAASAAVSVNVKNASTVFARPSHRCFAFESFVCGKMFENFGAPDFSRREEFEKLRSVDPIQYLTRNPGSSFARFVVHKYLSVVHAKMECSFFGNLNQRKLVNSGGFPDSGFFATFCEMAKRIWLLHCLAFSLSGNVTVFQLKRGCRFSQVYMESVKSGDESLFSGDNSDIRVGFTVVPGFKIGENVIQSQVYLTPVNGFTS

SEQ ID NO: 46443 - protein, 591 aa, GIBBERELLA ZEAE PH-1
MPSLGFLKKKRTREGNSDPSASSPTSPVTPTTSRSKSISKAFHLPRNNRHSTSAPTAQPTNAQQQSQQQPEHQHQEGAAPQSNQPPAQNQQTAGASDGQQDHDMDTIKLHKPEYGTNSMSPHDHQNLPSINNLINQPQQQQNAQGNSYNNAQSNPQFLAATIDNHRPQTVSPGTDPATLQQQQQQAMPQPPQQQQPSDNQQSQQRYQHQQQPQAQQQQQQQQPQQQSQQFQQQQHQEQNQNQNQNEAQQQPQQQPRQPGHQYTNSVMRVTKGKYSLGDFDILRTLGTGSFGRVHLVQSKHNQRFYAVKVLKKAQVVKMKQVEHTNDERRMLADVKHPFLITLWGTFQDSKNLYMVMDFVEGGELFSLLRKSGRFPNPVAKFYAAEVTLALEYLHSKNIIYRDLKPENLLLDRHGHLKITDFGFAKRVPDKTWTLCGTPDYLAPEVVSNKGYNKSVDWWSLGILIYEMLCGYTPFWDSGSPMKIYENILKGKVKYPAYVNADAQNLLERLITADLTKRLGNLYGGPADVKNHPWFAEVTWDRLARKDIDAPYTPPVKAGAGDASQFDRYPEDPEKYGMVGGTDEYGHMFTEF

SEQ ID NO: 46444 - protein, 129 aa, Haloarcula marismortui ATCC 43049
MSEETEDIWGIAHVHASFNNTIITITDQTGAETLAKSSGGTVVKQNRDEASPYAAMQMAEVVAEKALDRGVEGVDVRVRGPGGNLQTSPGPGAQATIRALARAGLEIGRIEDVTPTPHDGTRAPKNSGF

SEQ ID NO: 46445 - protein, 223 aa, Emiliania huxleyi
  misc_feature (47)..(47): Xaa can be any naturally occurring amino acid
  unsure (1)..(223): unsure at all Xaa locations
MALRSLTLLCAAAGASAGAIELTPDNFDELVLKSGKAAFIKFLAPWXGHCKKMKPDWDSLASTFEDSKKVLIADVDCTTGGKPLCEKYGVRGYPTIKYFNPPDEEGEDYKGGRSLDELKKFAENELGPGCSVDLMDNCSEEQKGKLKEYIDMAPEKRTEMLETLKKELADAESTHEALLKELQATYKESMDKLEKLKEESAPKIKLLKAATPAPKAEGAKDEV

SEQ ID NO: 46446 - protein, 187 aa, Triticum aestivum
  misc_feature (156)..(156): Xaa can be any naturally occurring amino acid
  unsure (1)..(187): unsure at all Xaa locations
MSDLRAPEHQVAGHRAAPDKLGPLVDGAGLFYKPLQALDRGEQELAFYTAFSAHPDVPPRIRDAFFPRFHGTRLLPTAASPGESHPHLILDDLLKGLAAPSVTDIKIGACTWPPRAPEPYVAKCLAKDRGSTSVLLGFRVSGVMVSDPSGAVWRPXRSELKGTGLPGVRRNAPAINWSPTGQRPGGG

SEQ ID NO: 46447 - protein, 477 aa, Bacillus anthracis str. 'Ames Ancestor'
MKIVLRKESNIPYYKQIYMQIVERIQSGMLSHGDSLPSLRSMAEDLQINLLTVRKAYKHLEKKEYIRIEQGKGAYIHKHVKKDSKPIPYKWQQTKTINVMRSQYAMNQHRKYYDFSQAILYPRLLPNPFLADEMHKILNKDKMILATYGPVQGDYELRVEIANYLNEHQKLVTDPSQLLITSGAQQGIDLIAQTLLKPGDIVLVESPCYSAALDIFINKGAQIIPVSLDNHGVRSDLIDDICQSKNPVLLYTNPTFQNPTGTVMSKERRMELIELAELYEFFIIEDDSFGEIYFEDAIVPPPIKNFDTNGHVLYIKGFSKTLAPGLRIASLIADGPIFAWLYAVKGSMDIGSPLLTQKALLPFLRAERMKHHLEKLRTALQIRRDITIDMLSPLKEIQFEIPDGGFNLWITLPNSIDPFTLLQKANEVDVSFLPGTACLLHNDINNNQFRISYSMLNEKDMLIGLEKLHDTIRKFKL

SEQ ID NO: 46448 - protein, 368 aa, Papaver rhoeas
MATYVDPPNGTGSPGKHYYSMWQTVFEIDTKYVPIKPIGRGAYGIVCSSVNRETNDKVAIKKIQNAFENRIDALRTLRELKLLRHLRHENVIALRDVMMPTHRRSFKDVYLVYELMDTDLHQIVKSSQPLSNDHCQYFLFQLLRGLKYLHSANILHRDLKPGNLLVNANCDLKICDFGLARTCSGKGQFMTEYVVTRWYRAPGLLLCCDNYGTSIDVWSVGCIFAELLGRKPIFPGTECLNQLKLIINVLGSQSEADLEFIDNPKARKYIKSLPYSPKTPFARIYPNASPLAIDLLQKMLVFDPSKRISVTEALQHPYMSPLYDPNADPPAQVPVDLDIDEEDLGEETIREMMWTEMLHYHPEAVSSN

SEQ ID NO: 46449 - protein, 461 aa, Cryptococcus neoformans var. neoformans JEC21
MFFHDPEKEPVTGDSIDPVTLIDNQVDEENEVFRVTSSGEQYRTVSWYKSFALMFKILFSVGVLSIPSVFSYVGALPGALLLIGWGAFNAYSAFLLGAFRLRHSGIHGMQDMAYIVGGVWYRELVGVLFIIGYDLVAGSGYIGVATALNTLSDHGACTVWFSFVAFVLSTAIAMFPKLAQVGVAAWAGVITLFISIFILVVAVAVNDRPALAPPTGDFDLGYHVIGSPNFTEGMTAALTIFISSGGISAFVPIIAEMKNPKEYKKPIAVSMGFLNACYLAFALVIYRYCGTWISSPALGSAGPLIKKLTYGIALPGLIMSSTVNQHLAAKYIFVRLLRGTKHLQSKTMVHWATWFGVSLLCGVAAFVIGEAVPFFGTLISLLAAIAYAPMAIVIPMHLWLYDFADYRKQGLVKKLQWLFHLVMLVVGLFMTVAGAYTSIKSIADQYAAGTVSSAFSCADNS

SEQ ID NO: 46450 - protein, 319 aa, Staphylococcus aureus subsp. aureus Mu50
MVKIVVSRKIPDKFYQQLSKLGDVVMWQKSLVPMPKDQFVTALRDADACFITLSEQIDAEILAQSPNLKVIANMAVGYDNIDVESATANNVVVTNTPNVLTETTAELGFTLMLAIARRIVEAEKYVEADAWQSWGPYLLSGKDVFNSTIGIYGMGDIGKAFARRLQGFNTNILYHNRSRHKDAEADFNATYVSFETLLAESDFIICTAPLTKETHHKFNAEAFEQMKNDAIFINIGRGQIVDETALIDALDNKEILACGLDVLANEPIDHTHPLMGRDNVLITPHIGSASVTTRDNMIQLCINNIEAVMTNQVPHTPVN

SEQ ID NO: 46451 - protein, 359 aa, Glycine max
MAANNAFQTNPAAICFYLRSFHLRRTMSEAPPSQPPPPTANASPPPYWCYHCEKRVSIETLANLPDVVCGECKNGFVESIHTPSRSRSPSASSDDPYFGSQFLQVLRLIAQSARDDDASPPPPPSRSPENDFLRIELGGWDNDEENDNDNNDDEEFEEHEEAEDRSGNEDPHGRDDEDLRRRRRELLRLRIRDLATRTRSMRNRILDWAEILMGLEDNSIEFRLQLPESDRYVGNPEDYVDAAEYEALLHTLAESDGGGRRGAPPASKAAVEALPTVKVASESEAVACAICKDLLGVGDLAKRLPCGHGYHGDCIVPWLSSRNSCPVCRYELPTDDKEYEEERVVNSASSSGGDGSAIA

SEQ ID NO: 46452 - protein, 136 aa, Glycine max
MVSSMKQCRDEAQEVPLSLSLSLGVMADRSKKQRRGGADGEFVCKTCSRAFPSFQALGGHRTSHLRGRHGLALGLTSGSDQPGTKKTTDQKQAHQCHVCGLEFEMGQAMGGHMRRHREQEAATTAQAPPVLLQLFV

SEQ ID NO: 46453 - protein, 326 aa, Glycine max
MRPILMKGHERPLTFLKYNRDGDLLFSCAKDHNPTVWFADNGERLGTYRGHNGAVWTCDVSRDSARLITGSADQTAKLWDVQSGLQLYTFNFDSPARSVDFSVGDKLAVITTDPFMELPSAIHVKRIANDPSQQIGESVLLIKGPQGRINRAIWGPLNTTIISAGEDAVIRIWDSETGKLLQESDKESGHKKTVTSLAKSADDSHFLTGSLDKSARLWDTRSLTLIKTYVTERPVNAVTMSPLLDHVVIGGGQDASAVTTTDHRAGKFEAKFFDKILQEEIGGVKGHFGPINALAFNPDGKSFSSGGEDGYVRLHHFDPDYFNIKI

SEQ ID NO: 46454 - protein, 267 aa, Oryza sativa (japonica cultivar-group)
MATAMTNLIPAITFLMAASAGQERVNVRERGTMAKISGTIVCVGGATAMAFFKGPKLLNYTLGDLNMLLHSPAISKWVLGALCLVVSSSCWSLRLILQVPICKFYVDPLSLSAWTCFFSTLQCAALAVFLVPDANAWKIHSLFELSSYAFAGVFGSGVCFYLQSWCISVRGPLYSAMFTPVCTVVTTIVAAAVLQEELHIGSLMGAAAVITGLYVVLWGKADDMKRGSEPATAAAAAKPCTDSCRDVERTAAEEPLLLADAVSSEQL

SEQ ID NO: 46455 - protein, 542 aa, Pseudomonas aeruginosa PAO1
MTRYIFVTGGVVSSLGKGIASASLAAILEARGLKITMLKLDPYINVDPGTMSPFQHGEVFVTQDGAETDLDLGHYERFVRTTMTQNNNFTTGRVYMDVLRKERRGDYLGATVQVIPHITDEIKRRIIKGAGDADVALVEIGGTVGDIESQPFLEAIRQLRVEIGAKRAMLMHLTLVPYIATAGETKTKPTQHSVKELRSIGLQPDVLVCRSDHPIDVSSRRKIALFTNVEERAVIALEDVDTIYRIPSVLHAQGLDDIVVERFGLECGQADLSEWDRVVDAKLNPEREVTIAMVGKYMELLDAYKSLIEAMTHAGIQSRTKVNLRYIDSEDIEQQGTSLLEGVDAILVPGGFGLRGVEGKISTVQYARENKIPYLGICLGMQVAVIEYARNVLGWSDANSTEFDKSSGHPVVGLITEWQDATGATEIRTEASDLGGTMRLGAQECQLQTGTLVHDCYAKDVIVERHRHRYEVNNNLLPQLEQAGLKISGRSGDGALVEVVEAPEHPWFVACQFHPEFTSTPRDGHPLFSGFVNAALKYSGKA

SEQ ID NO: 46456 - protein, 228 aa, Arabidopsis thaliana
MSSNFIVESCSVDSEEGVKLHTRIFKPRNEGEEVSDDENLVIVLVHPFSLLGGCQALLKGIASELASKGFKSVTFDTRGAGKSTGRATLTGFAEVKDVVAVCRWLCQNVDAHRILLVGSSAGAPIAGSAVEQVEQVVGYVSLGYPFGLMASILFGRHHKAILSSPKPKLFVMGTQDGFTSVSQLKKKLKSAVGRTETHLIEGVSHFQMEGPEYDSQVTDIICKFISSL

SEQ ID NO: 46457 - protein, 268 aa, Zea mays
PRVRAAASAAAVNFNRHDASTTLQSAATCIPPPTTVRSVSMRDMGTEMTPIASQEPSRTGTPVRATSPNCSQPTTPRRTLGGPSAVGSFISHGGECSSSELSEQELQTKTRREIMLLGTQLGKTSIAAWASKKEEEKDASLSLKPVPMDQSTQNITAIRAAAWEEAEKAKYLARFKREEIKIQAWEDHQKAQIEAEMRKIEVEVERMRARAQDKLMTKLASARHSADEKRAAAELKRNRAAARTAEQAEHIRRTGRVPPSFGCWNWCS

SEQ ID NO: 46458 - protein, 632 aa, Escherichia coli CFT073
MVSYFYPSLKSPHSIKPVKNYRSINKYTQKPSPFSSISNRHYVFYFSTAKSLAHRAALRHFFNKQTQHAVNTRLTEKVMCSIFGVFDIKTDAVELRKKALELSRLMRHRGPDWSGIYASDNAILAHERLSIVDVNAGAQPLYNQQKTHVLAVNGEIYNHQALRAEYGDRYQFQTGSDCEVILALYQEKGPEFLDDLQGMFAFALYDSEKDAYLIGRDHLGIIPLYMGYDEHGQLYVASEMKALVPVCRTIKEFPAGSYLWSQDGEIRSYYHRDWFDYDAVKDNVTDKNELRQALEDSVKSHLMSDVPYGVLLSGGLDSSIISAITKKYAARRVEDQERSEAWWPQLHSFAVGLPGSPDLKAAQEVANHLGTVHHEIHFTVQEGLDAIRDVIYHIETYDVTTIRASTPMYLMSRKIKAMGIKMVLSGEGSDEVFGGYLYFHKAPNAKELHEETVRKLLALHMYDCARANKAMSAWGVEARVPFLDKKFLDVAMRINPQDKMCGNGKMEKHILRECFEAYLPASVAWRQKEQFSDGVGYSWIDTLKEVAAQQVSDQQLETARFRFPFNTPTSKEAYLYREIFEELFPLPSAAECVPGGPSVACSSAKAIEWDEAFKKMDDPSGRAVGVHQSAYK

SEQ ID NO: 46459 - protein, 99 aa, Cryptococcus gattii
WHGMRQKDTPYMDGVPGITQCPIPPGGSYTYNFTISDQSGTYWWHSHYSNAMADGLWGPLIVHSVDEPIQRGRDYDEDRIVFVSDWLHDDSEIIIAALA

SEQ ID NO: 46460 - protein, 182 aa, Prosthecochloris aestuarii DSM 271
MLRLFFLLFLLAVVVVSCRPGDHSPSTSGVTAMSKEPLPSNPYYSRTDTTKLDLPDSVWEKVLSPEVYEVARQAATERAFSGKYWDYEGIGTYYCAVCGNALFRSDSKFASSCGWPSFFETVRPGSVEYRADSSFGMRRTEVLCGRCGSHLGHLFDDGPPPTGKRFCMNSIVLEFDSDDGGQ

SEQ ID NO: 46461 - protein, 54 aa, Nicotiana clevelandii
VICDAYTPAGEPIPTNKRHKAAQIFSDPKVVSQVPWFGIEQEYTLLQQNVKWPL

SEQ ID NO: 46462 - protein, 540 aa, Thermoplasma acidophilum
MTGGVISGLGKGTITSSIGHILKDSGIKVSAVKIDPYINYDAGTMNPYQHGEVFVLDDGGEVDLDLGNYERFMNINLSRDNNITTGKVYLEVIQKERHGDYLGKTVQIIPHITDEIKRRIREVARTSGADVVLIEVGGTVGDIESMPFLEALRQLKREEQNVVFAHVTLVPEIGPTMEQKTKPTQHSVKALREIGIQPDIIFARSKQKLTEETKSRISLFTDVPVEGIISVSDVENVYLLPQMMVNEGLITRLSKLLNMNIEYRDSWTSYAENIRHPRDRVKVAIVGKYVDLHDAYISHKEAFSHVTGNTGIAVDIMWIDSEKVKNDQSVLSEADAILIPGGFGYRGVEGKIAATRYAMENGVPFLGICLGFQVAVIAVARYVLGLDGANSTEFDEKTKYPVVDILPEQRGVKDMGGTMRLGSKKVVIKKGTLAHRIYGADVIYERHRHRYEVNPDYIDMIEKAGFKFSATDEEGIRMEILERPGDESFIATQYHSEFKSRPLDPSKVHLHLVEQALIFKHRRMGENHEGYATAASSQGQ

SEQ ID NO: 46463 - protein, 420 aa, Streptococcus pneumoniae R6
MQTQEKHSQAAVLGLQHLLAMYSGSILVPIMIATALGYSAEQLTYLISTDIFMCGVATFLQLQLNKYFGIGLPVVLGVAFQSVAPLIMIGQSHGSGAMFGALIASGIYVVLVSGIFSKVANLFPSIVTGSVITTIGLTLIPVAIGNMGNNVPEPTGQSLLLAAITVLIILLINIFTKGFIKSISILIGLVVGTAIAATMGLVDFSPVAVAPLVHVPTPLYFGMPTFEISSIVMMCIIATVSMVESTGVYLALSDITKDPIDSTRLRNGYRAEGLAVLLGGIFNTFPYTGFSQNVGLVKLSGIKKRLPIYYAAGFLVLLGLLPKFGALAQIIPSSVLGGAMLVMFGFVSIQGMQILARVDFANNEHNFLIAAVSIAAGVGLNNSNLFVSMPTAFQMFFSNGIVVSSLLAIVLNAVLNHKKK

SEQ ID NO: 46464 - protein, 164 aa, Glycine max
DRQCALAEIWAILTVVCETHSLPLAQTWVPCKHRSVLAHGGGHKKSCSSFDGCCMGQVCMSITEVAFYVIDAHTWGFHEACVEHHLQQGQGVAGRAFLSHNMCFCGNIAQFCKTEYPLVHYALMFGLTSCFAVCLQSSHTGNDDYVPDRFRPPGATDFNEQIDC

SEQ ID NO: 46465 - protein, 277 aa, Staphylococcus aureus subsp. aureus MRSA252
MEVKTFYNGNTMPQIGLGTFRVENDENCMESVKYAIEQGYRSIDTAKVYGNEEQVGAGIRAGLESTGIAREDLFITSKLYFEDFGRENVAAAYEASLSRLGLKYLDLYLVHWPGTNEAVMVDTWKGMEDLYKNNKVKNIGVSNFEPEHLEALLAQVSIKPVINQVEYHPYLTQHKLKLYLAAQHIVMESWSPLMNAQFLNDETIKDIAQELGKSPAQVVLRWNVQHGVVTIPKSVTPNRISENFRIFDFELSDEQMTRIDGLNQDKRIGPDPKTFEG

SEQ ID NO: 46466 - protein, 416 aa, Halobacterium sp. NRC-1
MTESGPLENMLAQMEQAREYVDIDDGIYERLKSPERTLSVSLPVRMDDGSVEVFDAYRCQFDSARGPYKGGIRYHPTVSEEEVSALAGWMTWKTALVDLPFGGAKGGIVCNPKELSDNEIEQLTRRYTEGIRRMIGPETDIPAPDMNTDPRTMAWVMDTYSVYQGYAVPEVVTGKPPEIGGTDGRVEATGRGVSIITEETFEYFDTDIQDADVAIQGFGNVGSVTADLLSERGANIVAVSDVTGAIHDPTGLDIADVQAYADANGGRLEGYDAEPISNDDLLTLDVDALIPAAIEDVITVDVAERLAADVIVEAANGPTTFDAAQVLSDRGVPVVPDILANAGGVIVSYLEWVQNSQQYSWDVEEVNRDLRQRLTGAFDEMLVAYEDRNIPTLRTAAYTIALERSADAHEFRGLFP

SEQ ID NO: 46467 - protein, 54 aa, Nicotiana clevelandii
VICDAYTPAGEPIPTNKRHKAAQIFSDSKVVSEVPWFGIEQEYTLLQQNVKWPL

SEQ ID NO: 46468 - protein, 760 aa, Bordetella parapertussis 12822
MTKSTGKSPSAIDAATAQSTTAKRAASMAAEKAPAKTAVKVAKPAAKTAAKKTATKTVAAKTAAADKPAKTTKARAKKAEDKLADLVGAARPAPSGRRPGRPAKNANNDSDAFDDSMDGEGEVLPDLKPPKRGGKRGKADPKDLIVRGPVSPEEYEARRNRLKQLIKLGKDRGYLTYGEINDHLPDDLVDAEAIDGIISTFSDMGIAVYDQAPDAETLLMSENAPVASNDDDVEDEAEAALTTVDSDFGRTTDPVRMYMREMGSVELLTREGEIEIAKRIEDGLKHMVMAISACPTTINEILAHITRVREGQAQIDEVVDGLVDPEDGEEYAGAGVTADEDEADDGPAGGMSSKQLEDLRVKALAKFDEVSKQFEKMRQSYEKEGYKSDAYLKAQDIIQTELMGIRFTAKMVEKLADTLRAQVEEVRQLERAVLHTCVDRAGMPRSHFLKAFPGNETNLQWVLDEVAAAHAYSETLERQIPAVQELQQKLIDLQTRVVLPLKDLKDVNKRMATGEAKARKAKREMTEANLRLVISIAKKYTNRGLQFLDLIQEGNIGLMKAVDKFEYRRGYKFSTYATWWIRQAITRSIADQARTIRIPVHMIETINKMNRISRQILQETGAEPDPATLAQKMDMPEDKIRKILKIAKEPISMETPIGDDDDSHLGDFIEDTATLAPSDAALHGSMRDVVKEVLDSLTPREAKVLRMRFGIEMSTDQTLEEVGKQFDVTRERIRQIEAKALRKLRHPSRADKLKSFLEGQ

SEQ ID NO: 46469 - protein, 333 aa, Streptococcus salivarius
MAILVLGGAGYIGSHMVDRLVEKGQEKVVVVDSLVTGHRAAVHPDAIFYQGDLSDQDFMRKVFKENPDVDAVIHFAAYSLVGESMEKPLKYFDNNTAGMVKLLEVMNECGVKYIVFSSTAATYGIPEEIPILETTPQNPINPYGESKLMMETIMKWSDQAYGIKYVPLRYFNVAGAKPDGSIGEDHGPETHLLPIILQVAQGVREKIMIFGDDYNTPDGTNVRDYVHPFDLADAHLLAVEYLRKGNESTAFNLGSSTGFSNLQILEAARKVTGKEIPAEKADRRPGDPDTLIASSEKARTVLGWKPQFDNIEKIIASAWAWHSSHPKGYDDRG

SEQ ID NO: 46470 - protein, 216 aa, Oryza sativa
MSKLQTEALKEAISQVVADCKEKNRKFTETVELQIGLKNYDPQKDKRFSGSVKLPHIPRPKMKVCMLGDAQHVEEAEKIGLDYMDVEALKKMNKNKKLVKKLAKKYHAFLASEAIIKQIPRLLGPGLNKAGKFPTLVTHQESLESKVNETKATVKFQLKKVLCMGVAVGNLSMEEKQIQQNIQMSVNFLVSLLKKNWQNVRCLYIKSTMGKPYRVF

SEQ ID NO: 46471 - protein, 135 aa, Triticum aestivum
MAAILARKSLLALRARQLAVSGQGLHSSQNYGLRLSAHSYSTKREDEEREQLAKEISKDWSSVFERSINTLFLTEMVRGLMLTLKYFFETKVTINYPFEKGPLSPRFRGEHALRRYPTGEERCIACKLCEAICPA

SEQ ID NO: 46472 - protein, 423 aa, Arabidopsis thaliana
MDAVAANLFQSPSLLRQTSERLIFSTPNCPGFMRISSGPQFRLRQNSSLKFSRPFQSGTTCVKSRRSFVVKASASGDASTESIAPLQLKSPVGQFLSQILVSHPHLVPAAVEQQLEQLQIDRDAEEQSKDASSVLGTDIVLYRRIAEVKEKERRRALEEILYALVVQKFMDANVTLVPSITSSSADPSGRVDTWPTLDGELERLHSPEVYEMIQNHLSIILKNRTDDLTAVAQISKLGVGQVYAASVMYGYFLKRIDQRFQLEKTMRILPGGSDEGETSIEQAGRDVERNFYEEAEETYQAVSSNQDVGSFVGGINASGGFSSDMKQSRLKTYVMSFDGETLQRYATIRSRESVGIIEKHTEALFGRPEIVITPQGTIDSSKDEHIKISFKGLKRLVLEAVTFGSFLWDVESHVDSRYHFVLN

SEQ ID NO: 46473 - protein, 615 aa, Arxula adeninivorans
MKLLSLVPMALAAVATAKTVEYDFHVNWTTANPDGLYERKVIGINGQWPLPRIEVDKGDRLVVNMYNDMPDRNASIHFHGMYQNGTNYMDGPVGVTQCPVPPGGKFTYNFTVDQNGTYWYHSHVDGQYPDGYRAPFIVHDKNFPYDYDEELVLTMSDWYHDLIDYLNKEEFLTLYNPTGAEPVPQAMLFNDTQKLSVSVKPNTTYLVHLMNIGALGAQYFYIEDHNVTVVEIDGVYTEPAETDILYLAVAQRYTFLLKTKDTTDKNYPMVSIFDENLFDVIPSDLGMNMTNWLEYNSDADHPEADIPWESSVDIEYFDDMDLVPYDHKPLYTNVSKRIELEVVMTNLDNGVNYAFFNNITYTAPKVPTLMTALSAGDLVTNELVYGEYTHTVVVNHLDVVEIVVNNNDAGFHPFHLHGHEFQVVERSPEYEGFVPYNPDNHTDSDFAEYPMRRDTAWVPPNGNMVLRFVADNPGAWFFHCHIDWHLTQGLAMVFVEAPEKLKDMTLPQSHKDTCDAVGMPWKGNAAANDDDFLDLTGQNAQAPDLPAGFTARGIVALVFSCISAFLGMGMITWYGLSDISNTERKVLEREGVISEGEQVDPIDPSTVAHPHHHEN

SEQ ID NO: 46474 - protein, 167 aa, Actinosynnema pretiosum subsp. auranticum
MLVALTGARLVVEVGTFTGCSTLCLASALPDGGRVITCELSPKWPAIARPHWERAGVADRIEVLVGDAAGSLAGLTGELAGRVDLVFVDADKAGYPRYYELAVELVRPGGLVVVDNTLFSGRVADPAAVDPDTEGVRELNRRIAADDRVQAVLLAHADGMTLARRTR

SEQ ID NO: 46475 - protein, 662 aa, Staphylococcus epidermidis RP62A
MFNEKDQLAIDTIRALSIDAIEKANSGHPGLPMGAAPMAYTLWTRHLNFNPQSKDFFNRDRFILSAGHGSALLYSLLHVSGSLELEELKQFRQWGSKTPGHPEYRHTDGVEVTTGPLGQGFAMSVGMALAESHLAGKFNKDQFDIVNHYTYVLASDGDLMEGISHEAASFAGHNQLDKLIVLYDSNDISLDGDLDKSFSEDTKQRFEAYGWNYILVENGNDLDEIDNAITQAKSQQGPTIIEVKTIIGFGSPNKAGSNGVHGAPLGEEERALTFKEYGLDPEKRFNVPEDVYEIFKSTMLKRANENEEAWNNMLKNYSEAYPELAEEFKLAMSGKLPNNYADALPEYDLNHSGASRADSGEIIQKLSEFVPSFFGGSADLAGSNKSNVKEAKDYNKDTPEGKNVWFGVREFAMGAAINGMAAHGGLHPYAATFFVFSDYLKPALRLSSIMGLNSTFIFTHDSIAVGEDGPTHEPIEQLAGLRAIPNMNVIRPADGNETRVAWEVALESEQTPTSLVLTRQNLPTLDVDKQTVENGVRKGAYIVFETEQQLEYLLLASGSEVNLAVEAAKELEQQGKGVRVISMPNWYAFEQQSSEYKESILPSDVTKRIAIEMASPLGWHKYVGIEGKVIGINSFGASAPGDLVVEKYGFTKENILKQVRSL

SEQ ID NO: 46476 - protein, 492 aa, Raphanus sativus
MDPYKYRPSSAYNAPFYTTNGGAPVSNNISSLTIGERGPVLLEDYHLIEKVANFTRERIPERVVHARGISAKGFFEVTHDISNLTCADFLRAPGVQTPVIVRFSTVVHERASPETMRDIRGFAVKFYTREGNFDLVGNNTPVFFIRDGIQFPDVVHALKPNPKTNIQEYWRILDYMSHLPESLLTWCWMFDDVGIPQDYRHMEGFGVHTYTLVSKSGKVLFVKFHWKPTCGIKNLTDEEAKVVGGANHSHATKDLHDAISSGNYPEWKLFIQTMDPADEDKFDFDPLDVTKIWPEDILPLQPVGRLVLNRTIDNFFNETEQLAFNPGLVVPGIYYSDDKLLQCRIFAYGDTQRHRLGPNYLQLPVNAPKCAHHNNHHEGFMNFMHRDEEINYYPSKFDPVRCAEKVPIPNKSYTGIRTKCIIKKENNFKQAGDRYRSWAPDRQDRFVKRWVEILSEPRLTHEIRSIWISYWSQADASLGQKLASRLNVRPSI

SEQ ID NO: 46477 - protein, 267 aa, Haloarcula marismortui ATCC 43049
MSGNEKEGLDASDSDFDPSDEDDEAVDAETETEAEQPADDAEEATEAEPTDDESEADEAAGPQLDEDVMPDEQSEADLLIPVEDYLGAGVHIGTQQKTQDMERFIHRVRTDGLYVLDVSMTDERIRTAADFLSNYEPEQILAASSRQYGRFPAEKFAEAIGARVRTGRFIPGTLTNPDYDGYIEPDIVVVTDPIGDAQAVKEAITVGIPVIAMCDSNNTTSNVDLVVPTNNKGRKALSVVYWLLANETLDRRGAEPTYGLDDFESDI

SEQ ID NO: 46478 - protein, 726 aa, Haloarcula marismortui ATCC 43049
MTPETAGVGDARVRVLYVGTDSDDTETLSTALERENNRFTVETARTVDEAMARLAAEPVDCLVSDYRLSNGNGIELLETVRDEYPALPFIIYTAQGSEAVASEAISAGVTDYLRKEPGAKQYAGLANRISDAVDHSRSQQAVSERNRALQSYERMVNSMQEAACIYDAEDRFEIVNETIAEWYDTTRNELEGQTSRLVPRIRAEGETDCYQELLDGTREKLSGEIETEFPGHGHAVVAYQLTPLVVDGTIDGIVGVARDVTEQKERERELLRNKRAIDEAPVGVTITDPNQPDNPLIYANDHYRELTGYSLPELLGKNCRILQGENTDPEPVDALRDAIDAGEQVSVELRNYRKDGTEFWNRVRIAPVRDDDGTVVNYVGFQQDTTERKRREKRLEETSSRLEALFENSPDMIDVLDADGTICEVNQRFCAELGYDESEVLGRSIWEFDLMFDAEDVQTQLSGFSVDERRKFEGLYERRDGSTMSVEVHLLRFNLEGEDRFLAISRDITERKEREQELEQQNEQLEQFASVVSHDLRNPLTVARGQLELLREESDSEHIDAIDTAHQRMDTLIDDLLTLARDGASPASPVVVDLEQFVQTCWQNVDTKAATLRTDIDRPIRADESRLRQLFENLVRNAVEHGGDDVSVTVGELADGFYVEDNGAGIPEPERGDVFSAGYSTAVEGTGFGLSIVKQVADAHGWTVRVVSGADGGARFEFTDVDAVSE

SEQ ID NO: 46479 - protein, 334 aa, Triticum aestivum
MSQRAALLIGKLSHAQKEWQQCSEVASKLHEYPDGNREDFLSKCKSGEFDGIYALYRSNDSNPITGDFNAELLDALPKSLKYVCHNGAGYNNIDVAACTKRGISVSSTPIAVNDATADVAIWLMLGALRNIKQSYMAVNNGKWRGNFSLGHDPKNKTLGILGMGGIGSAVAHRAKAFGMKIQYHNRHQLPASEENGAKYVTFDELLKTSDVLSLNLALNPSTTHIIGKEQFNTMKDGVIIVNTARGALIDEAALVDALKSGKVWTCGLDVFEEEPKIHPGLLECENAVLLPHVGTATYETQRDMEILVLDNLKSAIKSDKLLTQVPEQKGKANL

SEQ ID NO: 46480 - protein, 213 aa, Oryza sativa (japonica cultivar-group)
MAMAFFKGPKLLNYTLGDLNMASSKWVLGALCLVASSSCWSLWLISQVPMCKSYADPLSLSAWTCFFSALQSAALAVFLAPDLDAWKIHSLFELSGYIFAGAFGSGVNFYLQSWCTSVRGPLYPAMFTPVCTVLTTAVAAAVHREALHIGSLLGAAAVIAGLYVVLWGKADDMKQPATGTTKPCSSDSRRDDVATEPLLGDASSRAFDPAAER

SEQ ID NO: 46481 - protein, 287 aa, Mesembryanthemum crystallinum
MAMPPVVDSVYLKEIDKARRDLRALISNRSCAPIMLRLAWHDAGTYCAKTKTGGANGSIRNEEEYAHGANNGLKKAIDWCEEVKAKYPKITYADLYQLAGVVAVEVTGGPTIEFVPGRKDSKVSTNEGRLPDAKKGPPHLRDIFYRMGLTDKDIVALSGAHTLGRAHPERSGFDGPWTQEPLKFDNSYFVELLKGESEGLLQLPTDKALVEDPAFRPYVELYAKDEDAFFRDYAVSHKKLSELGFTPSGSKSGPKDSTILAQGAVGVAVAAAVVILSYIFEVRKRLK

SEQ ID NO: 46482 - protein, 161 aa, Pseudomonas fluorescens PfO-1
MSDNLLNIPCTTIKGEQKTLADFAGKAVLVVNTASKCGFTPQYKGLEELWQTYKDQGLVVLGFPCNQFGKQEPGNEGAISEFCELNYGVSFPLFKKIEVNGTGAHPLFVQLKKRAPGVLGSQGIKWNFTKFLIGKDGQLVKRFAPATKPQDLSREIEALLK

SEQ ID NO: 46483 - protein, 351 aa, Oryza sativa (japonica cultivar-group)
MGAGWEEYKPCAAMVAAQCIYAALALWAKAVFTGGMSTMVFVVYRQAIATVFLVPIAIIANRATVNQYVYYQGLHLGSSSMATAMSNLIPAITFVMAASVGLEKVDLRRVRSLAKIFGTTVCVGGAMAMAFFKGPRLLNSSSLIVDLNFLLHSSASSKWVMGALFLICSSCCWSLWLILQVPICKSYMDPLTLSAWMCFLSTLQSAVLVSFLVPDINAWKIHSLFELGCCLFAGVFGSGVTFYLQSWCISVRGPLYSAMFNPLCTVIATVVAAAFLHEELHIGSLFGATAIVAGLYIVLWGKAADGGGKSGGSVPEHSHDVEKAAMRSESQLDVGEGITEPLLEAGNTAEK

SEQ ID NO: 46484 - protein, 131 aa, Pseudomonas fluorescens PfO-1
MEKIEKTLEEWRAMLDPEQFNVCRLSATERPFSGKYNATKTDGVYHCICCNEPLFDSKTKFDSGCGWPSFYAPIGDNAMTEIRDTSHGMIRTEVKCAKCDAHLGHVFPDGPPPTGLRYCINSVCLDLVPRE

SEQ ID NO: 46485 - protein, 151 aa, SYNECHOCOCCUS SP. WH 8102
MAERTFIAIKPDGVQRGLVGEILGRFERKGFKLVGLKQITPSRALAEQHYGVHKERPFFAGLVDFITSGPVVAMVWEGDGVIASARKLIGATKPLEAEPGTIRGDLAVNIGRNVIHGSDAPETAEFEIGLWFDAAELNDWTPSDQTWRVEA

SEQ ID NO: 46486 - protein, 403 aa, Pseudomonas fluorescens PfO-1
MQFSKSNKLANVCYDIRGPVLKHAKRLEEEGHRILKLNIGNPAPFGFEAPDEILQDVIRNLPTAQGYSDSKGLFSARKAVMQYYQQKQVEGVGIEDIYLGNGVSELIVMSLQALLNNGDEVLVPAPDYPLWTAAVSLAGGNAVHYLCDEGADWFPDLADIKAKITPNTKAMVIINPNNPTGAVYSKEVLLGMLELARQHNLVVFSDEIYDKILYDDAVHICTASLAPDLLCLTFNGLSKSYRVAGFRSGWIAISGPKHNAHSYIEGIDMLANMRLCANVPSQHAIQTALGGYQSINDLVLPQGRLLEQRNRTWELLNDIPGVSCVKPMGALYAFPKIDPKVCPIHNDEKFVLDLLLSEKLLVVQGTAFNWPWPDHFRVVTLPRVDDLDMAIGRIGNFLKSYRQ

SEQ ID NO: 46487 - protein, 476 aa, Arabidopsis thaliana
MAGGGAPAPKADEPQPHPPKDQLPNISYCITSPPPWPEAILLGFQHYLVMLGTTVLIPTALVPQMGGGYEEKAKVIQTILFVAGINTLLQTLFGTRLPAVVGASYTFVPTTISIILSGRFSDTSNPIDRFERIMRATQGALIVASTLQMILGFSGLWRNVVRFLSPISAVPLVGLVGFGLYEFGFPGVAKCIEIGLPELLILVFVSQYLPHVIKSGKNVFDRFAVIFAVVIVWIYAHLLTVGGAYNGAAPTTQTSCRTDRAGIIGAAPWIRVPWPFQWGAPSFDAGEAFAMMMASFVALVESTGAFVAVSRYASATMLPPSILSRGIGWQGVAILISGLFGTGAGSSVSVENAGLLALTRVGSRRVVQIAAGFMIFFSILGKFGAVFASIPAPIIAALYCLFFAYVGAGGLSFLQFCNLNSFRTKFILGFSVFLGLSIPQYFNEYTAIKGYGPVHTGARWVCRTKSLLFLLLFPLK

SEQ ID NO: 46488 - protein, 466 aa, Solanum tuberosum
MAAHSSTLTISLLLMLIFSTLSSASDMSIISYDETHIHHRSDDEVSALYESWLIEHGKSYNALGEKDKRFQIFKDNLKYIDEQNSVPNQSYKLGLTKFADLTNEEYRSIYLGTKSSGDRRKLSKNKSDRYLPKVGDSLPESVDWRDKGVLVGVKDQGSCGSCWAFSAVAAMESINAIVTGNLISLSEQELVDCDKSYNEGCDGGLMDYAFEFVINNGGIDTEEDYPYKERNDVCDQYRKNAKVVKIDSYEDVPVNNEKALQKAVAHQPVSIAIEAGGRDLQHYKSGIFTGKCGTAVDHGVVAAGYGSENGMDYWIVRNSWGAKWGEKGYLRVQRNVASSSGLCGLATEPSYPVKTGANPPKPAPSPPSPVKPPTECDEYSQCPVGTTCCCVLEFRRSCFSWGCCPLEGATCCEDHSSCCPHDYPVCNVRQGTCSMSKGNPLGVKAMKRILAQPIGAFGNGGKKSSS

SEQ ID NO: 46489 - protein, 217 aa, Arabidopsis thaliana
  misc_feature (125)..(125): Xaa can be any naturally occurring amino acid
  misc_feature (137)..(140): Xaa can be any naturally occurring amino acid
  misc_feature (143)..(143): Xaa can be any naturally occurring amino acid
  unsure (1)..(217): unsure at all Xaa locations
MSKLQSEAVKEAISSIITHCKETKPRNFTETIELQIGLKNYDPQKDKRFSGSVKLPHVPRPKMKICMLGDAQHVEEAEKIGLESMDVEALKKLNKNKKLVKKLAKKFHAFLASESVIKQIPRLLXPGLNKAGKFPTXXXXQEXLESKVNETKATVKFQLKKVLCMGVAVGNLSMEEKQIFQNVQMSVNFLVSLLKKNWQNVRCLYLKSTMGPPQRIF

SEQ ID NO: 46490 - protein, 629 aa, Xanthomonas oryzae pv. oryzae KACC10331
MARALMANERPAQQSDIKLLISKGLEQGYLTYAEVNDHLPDDLVDPEQIEDIISMINGMGIDVHEVAPDAETLLLNDGNTGNREVDDTAAEEAAAALTALDTEGGRTTDPVRMYMREMGTVELLTREGEIAIAKRIEEGLSQVQAALGVFPLSTEMLLADYEAHKEGKKRLAEIVVGFNDLIEEADAAAAALAAAGPVAVDEDALDEDDDEDGDDAAAEEEVGPTGPDPVEVATRMQNLANEYAKFKKVYAKNGAEHKLVVKAREDMAAIFTTLKLPLPLTDALVTQLRGVVNGIKDHERKVLHLATTVARMPRKDFIRSWEGNQTNLEWVEDALKRKQKWSSALRDVKDQIISEQQGSMEMEKASYLTLGEIKEISRAMAYGEAKARKAKKEMVEANLRLVISIAKKYTNRGLQFLDLIQEGNIGLMKAVDKFEYRRGYKFSTYATWWIRQAITRSIADQARTIRIPVHMIETINKLNRISRQMLQQFGREATPEELAKEMDMPEDKIRKVMKIAKEPISMETPIGDDEDSHLGDFIEDTNVESPIDNTTNINLSETVRDVLAGLTPREAKVLRMRFGIDMNTDHTLEEVGKQFDVTRERIRQIEAKALRKLRHPSRSEQLRSFLDID

SEQ ID NO: 46491 - protein, 593 aa, Schizosaccharomyces pombe
MVKRHKNTIGVWRLGKTLGTGSTSCVRLAKHAKTGDLAAIKIIPIRYASIGMEILMMRLLRHPNILRLYDVWTDHQHMYLALEYVPDGELFHYIRKHGPLSEREAAHYLSQILDAVAHCHRFRFRHRDLKLENILIKVNEQQIKIADFGMATVEPNDSCLENYCGSLHYLAPEIVSHKPYRGAPADVWSCGVILYSLLSNKLPFGGQNTDVIYNKIRHGAYDLPSSISSAAQDLLHRMLDVNPSTRITIPEVFSHPFLMGCTSLSSMDSTTPPTPSLSIDEIDPLVVDCMCVLWKKSSSKKVVRRLQQRDDNDEKYVYKVLSEILRDDMLKKQRFDENKYLSLYDLIHDNNLFTKASISTTSLVKSNVSTNSRKSSNFEDELARRVSSPLSALNQMSQSPIPIRVSSDKDYDSYACHEVVSNPSTLDDDYNYMFVCPPEEYTYSTDNVRTDSLDLQSLPTPTLEQLESVPFNRYGYVRIFPSTTLSSTASGYYTPDSLSTPEPSIDGLTNLDDVQVGGFVQGSGNQNRRPISFPVISNMQPNITNVRSASAPLCSSPVPSRRYSQYATNARYTPRKVSSGSVLRKISSFFRKD

SEQ ID NO: 46492 - protein, 76 aa, Nicotiana acuminata
GNNILVICDAYTPAGEPIPTNKRHKAAQIFNDSKVVSEVPWFGIEQEYTLLQQNVKWPLGWPVGGYPGPQGPYYCG

SEQ ID NO: 46493 - protein, 406 aa, Magnaporthe grisea 70-15
MAYHHHSRADGTFFVESDDIAMSRMSAREAAKILARNRREVIGNELSRLAGEEYLEDIMQHMRHMEDETLPDASLIDMQREIQWFMRPYLIDFLVEAHAAFQLLPETLFLTVNLLDRYCSKRVVYKQHYQLVGCAALLIAAKYGDKKDRVPQINELNNMCCGLYDAGMFTQMEMHVLNTLDWTVGHPTVDFFAQLIVAEERDDKEVEYMAAYISEISLYYRDFVSTKPSTMARASLALARAILGRQEVNDGEWDHDQNATLVTLSQHVHQPSVTLSRKYASTHYLQVSNKLSDFLAHQAAINRAAALPENPLTPTTNELMAAKANIYSTPQKGLGSVPGVADGYLTPPITPDGQYGAPNPHGLPPRCPVTPTPQHQQQQHQQQQRYYPNCYQPTQQQQTSNHGSYL

SEQ ID NO: 46494 - protein, 219 aa, Brassica napus
  misc_feature (169)..(169): Xaa can be any naturally occurring amino acid
  unsure (1)..(219): unsure at all Xaa locations
MHCSRHNNMSLLWITGLCVTALVVVRISNWWYRWSNPKSNGKLPPGSMGFPIIGETFDFFKPHRFYEISPFLKKKMLRYGPLFRTSILGVNTVISTDMDVNLDILRHENEYFNLSYPDGLVKPLGKESMFLKTGNIHKHIKKICMRLLGSENLKRKIIKDMDHVTCEHXSLKVGQGRFDLRDLASSVFFLSFFICLLSSTNINWLLSNLVKILINNLSL

SEQ ID NO: 46495 - protein, 478 aa, Rickettsia sibirica 246
MISNFFNLIRIFRIISKKQILIDSRSPKYCRFIGYILALFFAPVSLIKKSREDYGKRLIDCLSDLGPIYIKFGQTLSTRADLVGTEIAGYLRLLQDNLPPFDGGVARRLITSLRGDIYVDEAISASKQKIATQSMTVSHDALPFLHLDDTPIAAASISQVHKAQLITGEYVAVKILRPGIHKKYNRDIKLLYFLAKIISKFSKAKRLKPIKVVDKFHETMKFELDLRLEAAAASELTDNMRNDINVIIPKIYWDLTSENILTTEWLDGTSIYDTLLLKEMGLEPAKISQDFAVMFFNQAYRDGFFHADLHAGNILVNKQGKIILLDFGIMGRLKEKDRLAVAESLFGFLRRDYKLVAKVHLRAGYIPSNTDLALFAQSCRAVTEPIVGTPIKNISIGKLLAHLFKITEDFGMEVQPELLLLQKTLIMVEGIGRQLDGNVNMWQLAEPWIKKWAVKNLSPEAKLLRLVKHDLDSLEDII

SEQ ID NO: 46496 - protein, 309 aa, Triticum aestivum
  misc_feature (218)..(218): Xaa can be any naturally occurring amino acid
  unsure (1)..(309): unsure at all Xaa locations
MLSGQTAVSGSSSSIIIVSRGVEQGSGSGEQNQWRPIEEEEVEPEFRDIHALSPPRALSLYRRSQPGSRDSWGSAAGAGGSRHTSIRSVGSDTAPSELFPTMSREFSAMVAAAASANASSSAAAGHRESVDRVANEDALERIGEEELEETNPLAIVPDSNPIPSPRRGLSPRPVAGGEVAVPGAGQGDEVSVGQVKKDEVETKIAAWQIAEVAKVNNXRFKREEVVINGWEGDQVEKASAWLNKYERKLEEKRAKAMEKAQNEVARARRKAEDKRASAEAKRGTKVARVLELANFMRAVGRAPTKRSFF

SEQ ID NO: 46497 - protein, 1234 aa, Magnaporthe grisea 70-15
MTVDHWESIVQIRRSPIVAEHPAGRNPIRSFAWLLRVFMVIVVIAVSLVCLPYDGHSSPSREGYHANLQQPSSNVATQRSSRRPSSHDHQNQHQPQEHSPPIASQSNSPMSSRAAIASPVAVAPAGAPEYYQPTSSDRRRHHAPIAPPRTSSSHQTSAPVNGAQTSRRPVSASHQPQNSSSRRAPDHHGSSADQQTDQSSSSRRRDRHHAPATGDYPPQRQGSTRDPRTATTTTMPIRTNTGGSATASSSKQPSREASEILNSMLVSQPEVDIEREKERLALAQPTSSAHDASEVASPPVVPTQRSRQDHSSKREKHTKFGEYILGNTIGEGEFGKVKLGWKSEGGVQVAIKLIKKDALGSNPNRMQKIMREVSILKQLTHPNIVRLHKMEESERHFGIILEYASGGELFDYILNNRYLKDNAARRLFAQLVSGVGYLHKKGIVHRDLKLENLLLDRNRNIIITDFGFANTFDPALELTEEEEAGLSNREFVKRLGLDKIGANGSRKGDLMQTSCGSPCYAAPELVVSDSLYTGRKVDVWSCGVILYAMLAGYLPFDDDPANPEGDNINLLYKYIVSTPLTFPEYVTPHAKDLLRRILVPDPRRRADLFEVARHSWLSEYAHVVEFITSSTTTHTEIQNTTVPAEDSENPNLARSASVREASRRTPVSPTIGGLASKQGGIDQETEYAARQQKDNKRRTVQVEYVAPTTQTQRGEPAQQQATSGKTRARSGSEGPVEVDPRLSSDKPLPRDPPVSKESYSKPSVRGDPRKPPSSHRNQPSISRPPQSGRVPSDSYVTTMAPGSRPGTSGSMNTAGARPVAGASRSSYGQPLPPTVAGTNVHGRIQQPTDQQSEFGRPSAGGVPSKFAHVPGVAGHDQPDSREGSAKGHRRSNTLGEITGKMFGRSGSIFGNKNRKSSKVDQPQTPTEAKNRDSRKYPPVSMSAAPNPNGEYEPRKSVDSKRSRRSFSFGLGPRKKSGSIHNGSQTSVDKQNKRFSFIPGSISLKAIGIGKETPPGSTQGGGNDSQVDLGYQQEHLREPYRPDSQQQHQRQQSHYVDQRVNEQDLEAAGMDGMYAQLHSPSAPTFSTQQPHQQQQQQHYPAHYTSGQYGDRQMATAVPGYMQSGAHLQTSESESSVNMLSPEQQQFQAHGLRSVSVDHHQKLMEAQGGLGPAGRTGSSVGADGRQARVLQKNKRFVDAYDTDHSGGADHAGSSGAARRVMDFFRRRGKARGGDDR

SEQ ID NO: 46498 - protein, 74 aa, Nicotiana miersii
GNNILVICDAYTPAGEPIPTNKRHKAAQIFSDSKVVSEVPWFGIEQEYTLLQQNVKWPLGWPVGGYPGPQGPYY

SEQ ID NO: 46499 - protein, 382 aa, Pinus radiata
MDSNMNGLAKSNGCEISRDGFFESEEEELQGQAEAWKCTFAFAESLAVKCVVLLGIPDMIAREGSRATLSLGEIVAKLPTESPDAACLFRIMRFLVAKGIFRASKSAREGGAFETRYGLTPASKWLVKGRELSMAPMLLMQNDETTLAPWHHFNECVLEGGVAFQKANGAEIWSYASDHPDFNNLFNNAMACNARIVMKGILSKYQGFHSLNSLVDVGGGTGTAVAEIVRAYPFITGINYDLPHVVATASSLSGVQHVGGDMFETVPTGDAIFMKWIMHDWNDEDCIKILKNCRKAIPDTGKVIIVDVVLDADQGDNTDKKRKKAVDPIVGTVFDLVMVAHSSGGKERSEKEWKRILLEGGFSRYNIIEIPALQSVIEAFPR

SEQ ID NO: 46500 - protein, 477 aa, Vibrio parahaemolyticus RIMD 2210633
MQQIKNETLKEVFKQWASDDGVVVINPATEQELIRLKPSSIEELDCLIEACSAEQVRWAKLSAKERSSCLKNWHQLLMEHAEDIATIITLEQGKPLSESRGEVSYGASFVEWFAEEARRAYGEVIPAPAIDRRLSTIKQPVGVCAAITPWNFPIAMITRKAAPALAAGCGMIIKPSELTPLTALAVVELAYQAGIPKPLLPVVISEQAAEFGQVLSMDPRIKKISFTGSTRVGKILMKQASETVKAVSMELGGNAPFIVFEDADLESAADGLIASKFRNAGQTCVCTNRLYVHQNAKERFMEKVLAKMTELNVGNGLESGVTVGPVITMASKHRLEAVIDQALQEGATIANRPQKLAGRFMEPVILDNVDQGMAIVQQELFGPVLPVLTFEDDEQVLAMANDTEYGLACYFYTDSLKRIIKFTEGLEYGMVGVNEGIISTEVAPFGGIKESGVGREGAKQGLDEYLETKYICLGGLN

SEQ ID NO: 46501 - protein, 76 aa, Nicotiana linearis
GNNILVICDAYTPAGEPIPTNKRHKAAQIFSDSKVVSEVPWFGIEQEYTLLQQNVKWPLGWPVGGYPGPQGPYYCG

SEQ ID NO: 46502 - protein, 210 aa, Brassica napus
PPPRPLSFSLLLISFLLVSVSSSSDGDDAVIRQVVDGAAEPNVLTSEDHFSLFKRKFGKVYASGEEHDYRFSVFKANLRRARRHQKMDPSARHGVTQFSDLTRSEFREKHLGVRGGFKLPKDANKAPILPTENLPEDFDWRDHGAVTPVKNQGSCGSCWSFSATGALEGANFLATGKLVSLSEQQLVDCDHECDPEEAGSCDSGCNGGLM

SEQ ID NO: 46503 - protein, 838 aa, Zea mays
MGNCCVTPNGAADAGGGKKPKEPKQKKGKKPNPFSIEYNRSTPASAPRLVVLREPTGRDIAERYELGAELGRGEFGVTYLCTDRASGEALACKSISKKKLRTPVDVEDVRREVEIMRHLPKHPNIVTLRDTYEDDNAVHLVMELCEGGELFDRIVARGHYTERAAALVTRTIVEVVQFSVTSMIAFSKFDSIGYVLNMCHKHGVMHRDLKPENFLFANKKESAALKAIDFGLSVFFTPGERFTEIVGSPYYMAPEVLKRNYGPEVDVWSAGVILYILLCGVPPFWAESEQGVAQAIIRSVIDFKRDPWPRVSDNAKDLVRGMLNPDPKRRLTAQQVLDHPWLQNIKKAPNVNLGETVKARLQQFSVMNKFKKHALRVIAEHLSVEEAADIKDMFEKMDLNKDQMLNFDELKLGLHKFGHQIPDADVQILMEAADADGNGSLDYGEFVTLSVHLRKIGNDEHLHKAFAYFDRNQSGYIEIDELRESLADDLGQNHEEVINAIIRDVDTDKDGKISYDEFAAMMKAGTDWRKASRQYSRERFTSLSLKLQKDGSLQMENNCIRPSSCKMVLCQGVSVGNAQLLAFPGRSSSLKSTQFLVKTNHFPARALRESCLSKVCKNQLFSFIILLSLYNMAIWLVLILFIMPCLHHPQGKILSGESHHYQDSTISIQGVFSVVHLHRYHDSVSWVALSGDIYDSVLLRCEAEVVAALSEVPCDPSNPSGHWLPSSGHHVYMDAKHRLSGEANAVPLDVYCIHTDLHSARVFAIGVYKVRDSRRVIFFEMATYHRTSWYNSIRTTLRLIFVPKMLFNKCSHTWIKAAASCSEQLNMTKTHVQYDNML

SEQ ID NO: 46504 - protein, 519 aa, GIBBERELLA ZEAE PH-1
MTVSNPCAPAPPGIHANRKAASASPTASAAAAGFQSPGKFDYETFYNTELEKKHKDKSYRYFNNINRLAKEFPRAHMSDKEDRVTVWCANDYLGMGRNPHVLNTMHKTLEEYGAGAGGTRNISGHNKHAVELEATLAKLHAKDSALVFSSCYVANDATLATLGSKLPECVILSDSLNHASMIQGIRHSGTKKIVFKHNDVQDLEAKLASLPLHVPKIIAFESVYSMCGSIGPIEEICDLADKYGAITFLDEVHAVGMYGPHGAGVAEHLDWEAHANGAPGGTIMDRIDIITGTLGKAYGCVGGYIAGSAKFIDMIRSLAPGFIFTTSLPPATMAGAQTSIEYQMEYDGDRRLQQLHTRAVKEAMNARDIPVIPNPSHIIPVLVGNAETAKAASDMLLNDYGIYVQSINYPTVPVGQERLRITPTPGHVKEYRDQLVQAVDEIWTRLNIKRTSDWAAEGGFIGVGEESNVQNPLWTDKQLNIEQATKEIKATGQAVNGITEALLELEIKQSSEVAAAAAA

SEQ ID NO: 46505 - protein, 321 aa, Geobacter metallireducens GS-15
MGTGRNGGRAIVATGLGQCCWDTLAVVDSYPSPDSKAEAAVWAEQAGGPTATALVALARLGIPCRFAGVVGDDDAGSRIRQALDSEGVDGAFLVTRRRGASQRAFIMIERGSGRRTIVWRRPTGDPLDPREVPDAFLAGSSLLLLDGLMADASLHAAGRARSLGIPVMVDAGRMRPGMLDITRQCDYVVAAEQFFLDLGWDRTPEHFRGLAADLGAPVVTVTLGAAGSLTWSGHEPFHVPAFTVDAVDTTGAGDVFHGGYGYGILQGWSVRETVVFASAMAAMKCRQVGAQQGIPRLPDVLEFLTRRTITVLSNPQTEVSP

SEQ ID NO: 46506 - protein, 534 aa, Streptococcus pyogenes MGAS10394
MTKYIFVTGGVVSSIGKGIVAASLGRLLKNRGLKVTIQKFDPYINIDPGTMSPYQHGEVYVTDDGAETDLDLGHYERFIDINLNKYSNVTTGKIYSEVLRKERKGEYLGATVQVIPHITDALKEKIKRAASTTDSDVIITEVGGTVGDIESLPFLEALRQMKADVGSENVMYIHTTLLPYLKAAGEMKTKPTQHSVKELRGLGIQPNMLVIRTEEPVEQGIKNKLAQFCDVNSEAVIESRDVEHLYQIPLNLQAQSMDQIVCDHLKLNAPQADMTEWSAMVDKVMNLRKTTKIALVGKYVELPDAYLSVVEALKHSGYANDTAIDLKWVNANDVTVDNAADLLGDADGIIVPGGFGQRGTEGKIQAIRYARENDVPMLGICLGMQLTCVEFARHVLNMEGANSFELEPSTKYPIIDIMRDQIDIEDMGGTLRLGLYPCKLKPGSKAAMAYNNQEVVQRRHRHRYEFNNKFRPEFEAAGFVFSGVSPDNRLVEIVELKEKKFFVAAQYHPELQSRPNRPEELYTAFVTAAIKNSN

SEQ ID NO: 46507 - protein, 84 aa, Oryza sativa
  misc_feature (14)..(14): Xaa can be any naturally occurring amino acid
  unsure (1)..(84): unsure at all Xaa locations
MSCCGGSCCCCSGXQCGGCCCGCKMIPAVEATVTTKTLVLAAPSNKASSGGMDMAVASRQNGGCGCNTCKCGTRCNGCYCCYCN

SEQ ID NO: 46508 - protein, 644 aa, SYNECHOCOCCUS SP. WH 8102
MQVADSEGWSIQDSAALYGLDRWGEPYFTINGRGHISVQPQGERGGSLDLVELVSELRGRNLGLPLLIRFDDILEDRLERLHAAFERAIAQYSYTGRYQGVFPVKCNQQRHVVEELVICGKRWNFGLEAGSKAELLIALSLLDDPEALLICNGYKDRLYIETAILARRLGRQPVVVIEQPDEVDRIIEASKSLGAAPYIGVRAKLSSRSTGRWGSSVGDKAKFGLSIPELLATVERLRESNLLPDLRLLHFHIGSQINDIAVLKDALQEAGQIYVELTRLGAPMGFLDVGGGLGIDYDGSRTASAASTNYSLQNYANDVVATVRECCEPNAVAVPTLVSESGRAIASHFSLLVFDVLGSSALSASIPNASGDEPLTVRNLRDTLVTIQELSGTADAQLVRLQEAWNDALKFKQDALAAFRLGYMGLPDRASAEQLTWACADAIAQRLPKEQAIPEELAALSKALAGTYYANLSIFRSAPDTWAIDQLFPVVPIQKLNQRPTRLANLADLTCDSDGRLDRFIGDGQPKQLLELHELDDNNPYLIGLFLSGAYQEVMGNLHNLFGTTNAVHIRLSPGGSYRIDHVVRGDTNADVLEAMEHDPRVLLERLRVAAEAAINDGQLRIDESRRLLDHLESSLRQTTYLQD

SEQ ID NO: 46509 - protein, 482 aa, Hordeum vulgare subsp. vulgare
MAATVAVDNLNPKVLKCEYAVRGEIVIHAQRLQEQLKTQPGSLPFDEILYCNIGNPQSLGQQPVTFFREVLALCDHPDLLQREEIKTLFSADSISRAKQILAMIPGRATGAYSHSQGIKGLRDAIASGIASRDGFPANADDIFLTDGASPGVHLMMQLLIRNEKDGILVPIPQYPLYSASIALHGGALVPYYLNESTGWGLETSDVKKQLEDARSRGINVRALVVINPGNPTGQVLAEENQYDIVKFCKNEGLVLLADEVYQENIYVDNKKFHSFKKIVRSLGYGEEDLPLVSYQSVSKGYYGECGKRGGYFEITGFSAPVREQIYKIASVNLCSNITGQILASLVMNPPKASDESYASYKAEKDGILASLARRAKALEHAFNKLEGITCNEAEGAMYVFPQICLPQKAIEAAKAANKAPDAFYALRLLESTGIVVVPGSGFGQVPGTWHFRCTILPQEDKIPAVISRFTVFHEAFMSEYRD

SEQ ID NO: 46510 - protein, 315 aa, Digitalis purpurea
MAEEIRFFKLNTGAKIPSVGLGTWQSSPGDAAQAVEVAIKCGYRHIDGARLYENEKEIGVVLKKLFDDGVVKREDLFITSKLWSTDHAPEDVPVALDKTLEDLQLDYIDLYLIHWPVRLKKGSVGLDPENFIPTDIPGTWKAMEALYDSGKARAIGVSNFTLKKLSDLLDVARIPPAVNQVGCHPSCAQTKLRAFCKSKGVHLSGYSPLGSPGTPWVKHDVLENPILVDVAEKLGKTPAQVAIRWGLQMGHSVLPKSVHESRIKENIDVFSWCIPDDLFAKFSEIEQVSPGKPEFPVHPEISQYKTVEEMWDGGI

SEQ ID NO: 46511 - protein, 208 aa, Magnetococcus sp. MC-1
MLFMKKKITMVAPQEALPGRGIPMPVEDQHWVLKTPMRGPWPGMQQLLVGMGCFWGAERRFWQQPGVHMTAVGYAAGYTPNPTYEEVCANKTGHNEVVLVVYDPQQTDLERLLRLFWEAHNPTQGMQQGNDVGTQYRSGIYLAHEAELALALATRDAYQQRLSGAGLGTITTEILPMPPFYYAEAYHQQYLAKNPGGYCGLGGTGVVF

SEQ ID NO: 46512 - protein, 1005 aa, Actinosynnema pretiosum subsp. auranticum
MVATGTRIPGPKPLPLVGNLLDVLTSDLDTDVDFLDRCHREHGGIVALTFAGQRQVFASSHELVARMCSDPSWGKAVHPALEQVRDFAGDGLFTARGDEPNWGKAHRLLMPAFGPTAMRDHFPAMLDIAEQMLVRWRRFGPDHRIDVADDMTRLTLDTIALCAFGARFNSFYRDRAHPFVDAMVRSLVEAGERAERLPGVQPFLVGRNQRYRDDIATMNRIADGIVAARAALPAGERPDDLLERMLTCADPVTGERLSARNVRYQLATFLIAGHETTSGLLSFAVHRLLAHPEVLRKAKDAVDGVLGDRVPAFEDLARLDYLGQVLRETLRLHPTAPAFALAPDEPAELGGHAIGAGEPVLVMLPTLHRDPAVWRDPDVFDPERFAPERMDEIPACAWMPFGHGARACIGRPFALQEATLVLALVLQRFDLALADPDHRLTIKQTLTLKPDSLVVRARPRADRPGATATVETVVPHQVPATHRHGTPLHVFYGSNGGSGEGLARTIAGDGAARGWATSVAPLDDAVRALPASGPVVIVSSSYNGAPPDNAAHFVRWLTQDGPDLSGVDYLVLGCGNLDWSATYQRVPTLIDEAMAAAGARRLRERGATDARADFFGDWERWYEPLWPLLSAECGVEVGEIGPRFRVVESDAADGLGDLASAVVLENRELVRGPDAGSKRHLELRLPDGTSYRTGDYLSVLPQNHPDLVRRAVARLGTRAERVVTVESSAPTGLVPVGRALRVDELLTRCVDLSAPAGAGVVARLAERCPCPPERAELAATTGATLLELLERFPSCAVDLALALELLPAPRTRLYSISSAAEEQRAEVALTVSVTGVTSGYLSRVRPGDRVAVGIASPPESFRPPADNTVPVVLIAAGTGIAPFRGFLRARAALGGEPGPALLLFGCRGPELDDLYAEEFAALGDWLEVDRAYSRHPDGEVRHVQHRLWQRRDRVRELVDAGARVYLCGDATRVGPAVEEVLGRIGPGAGWLDALRAGGRYATDVF

SEQ ID NO: 46513 - protein, 1041 aa, GIBBERELLA ZEAE PH-1
MGETPFKWAKEDDPESPDSWSEEAEMSDTTVPRNETFVGRWMRLVVALLTVLSIFMLTAFIFFQQSSFTHHQDSHSEHFQTTKPQATQASNSVEYKEDIPSIPQLRDTKEYILLQTWDFDASPTTREHFWTINQETLNPDGVYRPMLLINNQFPGPLVECNEGDTIIVHIKNDAPNATAIHFHGMFQNGTNGMDGTVGVTQCPIAPNSTFTYKFDVRGQHGTYWYHAHHSAQASDGLLGPMVVHSKKEHNLQKIDYATDRVVMVQDHYHNLTSELLMEYLAPDQENNEPVPDNGLINGRGLRDCLDFRGWDCNSTDREMPNINLEAGQRHRLRIINVGAFAEFQVQFDEHPFYVTEVDGTDVHPESVHRLNILPAQRYSVILETNATTGSAFWMRARMVTHCFKNENERLEPEAKAIIRYEGHNKTSSNEKPTSKEWPDAIEVICRDLNTSSLRPVEVISPPPSDKVIILRANFEIGDWRLARGFFNESTWHPNITSPSLHRFLDSGVQSTSKKTPIAINERVFDRNKELVLETTGIQTVDISINNFDDGAHPFHLHGHKFFVLLQGRDGYPPSPAELPEYLEKHNLLENPLRRDVVTVEGYAWAIIRVVLDNPGLWAFHCHNTWHAESGMVMQMLVRPEVMKDWKSTSEERDMCLRDGVMSGMRPDDSLCQLLQVRLLTLPVTRVASVQYNSIVDYNALFDQMFNILLLFTITSYIFPPQPSSIFLMPSLSQLLAYANQEFTDVYNRGPYTSYKQIEFLLLISDACIAASADVEATWKGKAGRCTATSLKVSDQLMRKYPGQFEFEYFSVRRGKVSHRFSRCALTGIVIDVICSMGAFILPDNELRTITTMYTLSWGHQDGNVYMIDEDGMDQFCEKVSHVRAQALCLYEVSRSGQLVVLFRELNPRFLNQNISGYEYKTAMFPHGCIKFKLKPDSASGPGLKQLHLTPNPDDPGDKTIIVWSQDHTDQDRGEAQNEVHYFLATWTGCHANRQWPADGINWFYRELFWQLCLGYGNPKILTKADAEYSLPDKGGLGLCTC

SEQ ID NO: 46514 - protein, 406 aa, Synechococcus elongatus PCC 7942
MRHRRSGQRRLSVRAILSHTLAISLGVLVTVGGLQARPSLAQAAPVEIAQATPANTAAPNSNPDSFVAAAVRQIGPAVVRIDTERTVTRRAAPMFDDPFFREFFGSDFFGNVNPPARQEVQRGQGSGFVVDGNGLIMTNAHVVANADQVRVTLRDGREFTGRVRGADSVTDLALVEVDTKGERLPTARIGNSSNVEVGDWAIAIGNPLGLDNTVTLGIVSSLGRRSSAVGIPDKRLDFIQTDAAINPGNSGGPLVNSRGEVIGINTAIRQAPGAGIGFAIPVNTAKQIETQLLKNGKVSHSYLGVQLLSLTPQMARDNNRDPNSTVRLPEVQGVLIMGVQRNAPAATAGLRRGDVVIAIDGQAVTTADEFQRRVEASQVGQSLNLSVIRDGNRQQIAVRTGELQAG

SEQ ID NO: 46515 - protein, 383 aa, Staphylococcus epidermidis RP62A
MNELEFVTLHRRHLHQYPELSLHEFETTSYITSFLEDLGVPYDRPLKTGVIAYLEGNSHHTIAFRADIDALPIYEENDIDFKSKNDHVMHACGHDGHTTALMLFVKRCKALYDKSELPHNVVFIFQPAEETGGGANRLIKAGAFDKYPIEAVFGFHVNPFEKEGKIVIRDEEITASATEYRFFLKGLSSHVADKEQGHSCGEGLQHVLSQIGQIQQFHLNGLKRNIIHMGHFEAGEAINTVPSHGYLEGTIRTYDTEDLAIVKHQMHKIAESVQLLFNVECEVKFEEGYPPTMNHPQLRQAVENAIEGANLEVVEKKLPFLFGEDFSFYGQQLAPSYFVFVGTQNKEKGFVTGLHTAHLNFDEKILIDVVNYYEHLLRNYKEV

SEQ ID NO: 46516 - protein, 315 aa, Digitalis purpurea
MAEEIRFFELNTGAKIPSVGLGTWQSSPGDAAQAVEVAIKCGYRHIDGARLYENEKEIGVVLKKLFDDGVVKREDLFITSKLWSTDHAPEDVPVALDKTLEDLQLDYIDLYLIHWPVRLKKGSVGLDPENFVPTDIPGTWKAMEALYDSGKARAIGVSNFTLKKLSDLLDVARIPPAVNQVGCHPSCAQTKLRAFCKSKGIHLSGYSPLGSPGTPWVKHDVLENPILVDVAEKLGKTPAQVALRWGLQMGHSVLPKSVHESRIKENIDVFSWCIPDVLFAKFSEIEQVSPGKPEFPVHPEISQYKTVEEMWDGGI

SEQ ID NO: 46517 - protein, 348 aa, Actinosynnema pretiosum subsp. auranticum
MWIGYSADGRRRRPVRWWGVTEAFTWETDEDIKLAATLRRDAEAANAADSTRAYLKAIGRVRLLTADQEVELARRVEAGLYAEHLLDLPPAARGSRRPVELRRVVRDGQRAKDHLLEANLRLVVSIAKRYTGKGMALLDVIQEGNLGLVRAVEKFDYAKGFKFSTYATWWIRQAITRALADQSRTIRLPVHMVEVVTKLARIERDLLHRNGREATAEEVAVELDVTPEKVVELRQHARTPVSLDQTIGAEADTSIGDLIADENAVAPLEAVSSALLSADLRAVLETLTPREAGVVRMRYGFPDGVLHTLDEVGRVYGVTRERIRQIESRTMAKLQHPARSRGLEGYLD

SEQ ID NO: 46518 - protein, 964 aa, Amaranthus hypochondriacus
MASGKVEKMASIDAQLRLLAPKKVSEDDKLVEYDALLLDRFLDILESLHGSGIRETVQELYEHAAEYERTHDTKKLEELGNLITSLDAGDSIVIAKSFSQMLNLANLAEEVQLAYRRRIKKTKKGDFADESSAITESDFEETLRRLVDLKKSPEEIFATLKNQTVDLVLTAHPTQSVRRSLLQKHGRIRDCLSQLYAKDISPDDKQELDEALQRAIQAAFRTDEIRRVQPTPQDEMRMGMSYFHETIWKGVPKFLRRVDTALKNIGINERVPYNVPLIQFSSWMGGDRDGNPRVTPEVTRDVVLLARMMAANMYFTQITDLMFELSMWRCNDEVRARAQELHSQSKSDAKHYIEFWKQIPLSEPYRVILGDVRDKLYNTREHAHKLLANGSSDVPEESTFTHIDQFLEPLELCYKSLCASGDQPIADGSLLDFMRQVSTFGLSLVKLDIRQESDRHTEVMDAITTHLGIGSYRSWSEEKRQEWLLSELRGKRPLFGSDLPMSYEVADAIGTFRVLAELPNDSFGAYIISMATAPSDVLAVELLQRECGIKKPLRVVPLFEKLADLQSAAASMTRLFSIDWYKNRINGTQEVMIGYSDSGKDAGRLSAAWQLYKVQEQLIQVAKEYGVKLTMFHGRGGTVGRGGGPTHLALLSQPPDTIHGSLRVTIQGEVIEQSFGEEHLCFRTLERYTAATLEHGIDPPTSPKPEWRALMDEMAVITTKEYRSVVLQEPRFVEYFRSATPELEYGRMNIGSRPAKRKPGGGIETLRAIPWIFSWTQTRFHLPVWLGCGAAFKHVIEKDIKNLAMLKDMYNQWSFFRVTIDLLEMVFAKGDPGIAALYDKLLVKDELKPFGENLRKSYLEAQKFLLEIAGHKDPLDADPYLKQILRLRDPYTTTLNVFQVYTLKRIRDPSFHVTVRPHLSKEMDANSLAADLVKLNPTSEYPPGLEDTLILTMKGIAAGMQNTG

SEQ ID NO: 46519 - protein, 480 aa, Salmonella typhimurium LT2
MSRRLRRTKIVTTLGPATDRDNNLEKVIAAGANVVRMNFSHGSPEDHKMRADKVREIAAKLGRHVAILGDLQGPKIRVSTFKEGKVFLNIGDKFLLDANLGKGEGDKEKVGIDYKGLPADVVPGDILLLDDGRVQLKVLEVQGMKVFTEVTVGGPLSNNKGINKLGGGLSAEALTEKDKADIQTAALIGVDYLAVSFPRCGEDLNYARRLARDAGCDAKIVAKVERAEAVCDQNAMDDIILASDVVMVARGDLGVEIGDPELVGIQKALIRRARQLNRAVITATQMMESMITNPMPTRAEVMDVANAVLDGTDAVMLSAETAAGQYPSETVAAMARVCLGAEKIPSINVSKHRLDVQFDNVEEAIAMSAMYAANHLKGVTAIITMTESGRTALMTSRISSGLPIFAMSRHERTLNLTALYRGVTPVHFDSAADGVVAAHEAVNLLRDKGYLVSGDLVIVTQGDVMSTVGSTNTTRILTVE

SEQ ID NO: 46520 - protein, 141 aa, Triticum aestivum
PTVKGINFDLPHVISEAPPFSGVTHVGGDMFQKIPSGDTILMKWILHDWSDEHCATLLKNCYDALPAHGKVVLVECILPVNPEATPEAQGGFHLDMIMLAHNPGGRERYEREFEALAKGAGFGAIKTTYIYANIWVIEFTK

SEQ ID NO: 46521 - protein, 72 aa, Pisum sativum
LKFLQAPYGKHHRPGWGPNLSPPLAWFLMESPTLWFTLYLFPFGNNSSNPKSIILITPFLIHYFHRTIIYPL

SEQ ID NO: 46522 - protein, 309 aa, Pseudomonas syringae pv. tomato str. DC3000
MTSKLDQLKKFTTVVADTGDFGAIKSLKPQDATTNPSLLLKAASSESNDQMLADAFSGAKGDIGLACDRFAVAIGQEILKVVPGRVSTEVDARLSFDTDALIERSERIIGLYDTAGISRDRVLIKLAATWEGIRAAEKLEKDGIQTNLTLLFSFAQAVACAEAGVFLISPFVGRIYDWYKKSSGTDYVGADDPGVQSVTRIYNYYKANDFKTVVMGASFRNLNQIEQLAGCDRLTISTELLKQLAEDTGTLEQKLAPGNAGEARQSLTESQFRWASNEDAMATEKLAEGIRQFARDQEKLEALLSAKKS

SEQ ID NO: 46523 - protein, 335 aa, Glycine max
MYRFASNLASKARIARSSSHQIGSRLSSSRNYAAKDIRFGVEARALMLKGVEELADAVKVTMGPKGRNVVIEQSFGAPKVTKDGVTVAKSIEFKDKVKNVGASLVKQVANATNDVAGDGTTCATVLTRAIFTEGCKSVAAGMNAMDLRRGISMAVDAVVTNLKSRARMISTSEEIAQVGMISANGEREIGELIAKAMEKVGKEGVITISDGKTLYNELEVVEGMKLDRGYISPYFITNDKNQKCELEDPLILIHEKKISSINAIVKVLELALKRQRPLLIIAEDVESDALATLILNKLRAGIKVCAIKAPGFGENRKAGLQDLAVLTGGAVSLLF

SEQ ID NO: 46524 - protein, 475 aa, Rickettsia conorii str. Malish 7
MNLLKNITGKNYINGEFIEFGKQISVINPATLKEIATVPNLGLSEINSAINNTVTSFSLWSQSSFEARIAILRRWYNLVIENIEELSYILTLEQGKVLAESKKEILYGASFIDWYTYAIHNIHSTIKPGNSNTHKIVTQYEPVGPSAAITPWNFPNAMITRKVVPAIAAGCSVILKPSSLTPLSALVLAKFASDAGLPAGVFNVITGSSDIIGKAFCEDFRLRKLSFTGATNVGKILYQNAANTLKRLSLELGGNAPFIITADNNLEKVVSDLVIAKTRNSGQSCTSPNRIFIEESIYEKFIEILKAKFTKLKAGDGFDKESDIGPLINSAAIEKIQKLLADAQSKGAKLICGGKTVDNFIEPTIIIDCLDNMDIFRIEIFGPVVACYKFKDLDEVIEHANNTEYGLQGYVYSNNISVAQMIASKLDFGMVSINDPLPANAKAPFAGRKASGFGVEGSFEGIFEYLNTKYINLQN

SEQ ID NO: 46525 - protein, 244 aa, Lycopersicon esculentum
MYQLPTSTELTFFPAEFPVYCRSSSFSSLMPCLTESWGDLPLKVNDSEDMVIYGFLQDAFSIGWTPSNLTSEEVKLEPREEIEPAMSTSVSPPTVAPAALQPKGRHYRGVRQRPWGKFAAEIRDPAKNGARVWLGTYESAEEAALAYGKAAFRMRGTKALLNFPHRIGLNEPEPVRVTVKRRLSESASSSVSSASESGSPKRRRKGVAAKQAELEVESRGPNVMKVGCQMFQLASSYWLVKIWS

SEQ ID NO: 46526 - protein, 436 aa, Ralstonia solanacearum
MPNKGDTAWLLVSTAFVILMTLPGLALFYGGLVRKKNMLSVLMQCTGIFSLIMILWAIYGYSIAFTEGNAFFGGLDRLFLKGLTPDSVAATFSKGVVVPEYAYFAFQGAFAAITCALIIGAFAERAKFSAVLVFVVLWFTFAYLPIAHMVWFWPGPDGFTDAKAAEVMTAKGGWLFQKGALDFAGGTVVHINAAVAGLVGAFLFGKRIGFGREALKPHSLTLTMVGASLLWFGWFGFNAGSALEANGSAALAFVNTLLATAAAVLSWSFGEWIGKSKPSMLGAASGAVAGLVAITPAAGFVGPMGAIAMGILAGVLCLWGVNGLKRMLGMDDTLDVFGVHGVGGIMGALLTGVFASPSLGGTGIYDYVANKVADGYSIGGQLWIQLQGVLTTIVWSAVVAFVAYKIVDAIIGLRVPEEEEREGLDITSHGETAYED

SEQ ID NO: 46527 - protein, 151 aa, Casuarina glauca
ALTEKQEALLKQSWEVLKQNIPAHSLRLFALIIEAAPESKYVFSFLKDSNEIPENNPKLKAHAAVIFKTICESATELRQKGHAVWDNNTLKRLGSIHLKNKITDPHFEVMKGALLGTIKEAIKENWSDEMGQAWTEAYNQLVATIKAEMKE

SEQ ID NO: 46528 - protein, 502 aa, Brassica rapa subsp. pekinensis
MARKMLSDGELNKAAAAGEEATTETHYDFDLFVIGAGSGGVRAARFSANNGAKVGICELPFHPISSEEIGGVGGTCVIRGCVPKKILVYGATYGGELEDARNYGWEINGNVDFNWKKLLQKKTDEILRLNNIYKRLLANAAVKLYEGEGRIVGPNEVEVRQIDGTKISYTAKHILIATGSRAQKPNIPGHELAITSDEALSLEEFPKRAIVLGGGYIAVEFASIWRGMGATVDLFFRKELPLRGFDDEMRALVARNLEGRGINLHPQTSLAELIKTDDGIKVISSHGEEFVADVVLFATGRIPNTKRLNLEAVGVELDQAGAVKVDEYSRTNIPSIWAVGDATNRINLTPVALMEATCFANTVFGGKPAKADYTNVACAVFCIPPLAVVGLSEEEAVEKATGDILVFTSGFNPMKNTISGRQEKSLMKLIVDEKTDKVIGASMCGPDAAEIMQGIAIALKCGATKAQFDSTVGIHPSSAEEFVTMRTVTRRIAYKAKPQTSL

SEQ ID NO: 46529 - protein, 199 aa, Oryza sativa
MGRGKIVIRRIDNSTSRQVTFSKRRNGLLKKAKELSILCDAEVGLVVFSSTGRLYEFSSTNWACCKPRMGQRGQIAADANSIWQREAASLRQQLHNLQESHKQLMGEELSGLGVRDLQGLENRLEISLRNIRMRKGSLIHQENIELSRSLNVMSQQKLELYNKLQACEQRGATDANESSSTPYSFRIIQNANMPPSLEL

SEQ ID NO: 46530 - protein, 486 aa, Ralstonia eutropha JMP134
MQIQNPSLFRQQCHVNGQWVDAADGEVVPVTNPATGQQLGTVPRMTAADVQAAIAAADRALPAWRATSSRERSRLLRRWFDLCMAHQEDLATILTLEQGKPLKESRGEIAYGSGFIEWFSEEARRIYGDVIPAPSSDRRIIVIKQPVGVVAAITPWNFPNAMITRKAGAALAAGCTIVIKPASATPFSALALAALAKEAGIPDGVLNVVTGSASVVGGELTSSPVVRKLSFTGSTDVGKTLLEQCAGTVKKVSMELGGNAPFLIFDDADLDAAVAGVMASKFRNAGQTCVCANRIFVQDGVYDAFAEKLRIAVEAQVVGDGMAPGVDLGPLIDDAAIEKVREHIYDAVSLGAQVFTGGRAHALGGRFFKPTILTDVSPKAKLMNEETFGPLAPLIRFKTEEEAVAMANDTPFGLAAYFYTTNYARSWRVAEALECGIVGLNEGLISTEVAPFGGVKESGVGREGSKYGIEDYVEVKYICAGGLALR

SEQ ID NO: 46531 - protein, 327 aa, Ralstonia eutropha JMP134
MMAQDHNQSRENAYVCRRMPAEIEAALKERFVVKLNESDELTDSATIIERAKGASVLLVTATERIDGNVLRALSPTLKTVATLSVGYDHIDLATAGELGIEVLHTPDVLSDACAEVALMLLLNAARRGYEADRMVRSGQWPGWAPTQLLGKGLVGKRLGIFGMGRIGRAIATRARAFGMQIHYHNRSQLGPEDAEGAIYHATLDGLCRHSDMLLVAAPGSPQLKGALNQVHIRALPRGAVVANISRGDIVDDDALIEALNNGHVFAAGLDVFANEPNVDPRYRALDNVFLSPHIGSATEETRNAMGWLLIDGIEALRRGERPANRLS

SEQ ID NO: 46532 - protein, 575 aa, Ipomoea batatas
MASPFTAPSMIMEEERRFEAEVGEVQAWWNSERFKLTRRPYTARGVVALRGHLRQGYGSNEMAKKLWRTLKNHQANGTASRTFGALDPVQVTMMAKHLDTIYVSGWQCSSTHTTSNEPGPDLADYPYDTVPNKCQHLFFAQQYHDRKQREARMNMSREERARTPFIDYLKPIIADGDTGFGGTTATVKLCKLFVERGAAGVHIEDQSSVTKKCGHMAGKVLVAVSEHINRLVAARLQFDIMGTETVLVARTDAVAATLIQTNVDTRDHQFILGVTNPNLKGKGLATILSEAMAAGKTGLELQAIEDNWIAMAELKTFSETVVDAINRLNIGEPEKQRRLNEWMKHSSYEKCLSNFQAREIAENLGLNNLFWDWDLPRTREGFYRFKGSVMAAIVRGWAFAPHSDLIWMETSSPDLVECTKFAQGVKSVHPEMMLAYNLSPSFNWDASGMNDNQMMDFIPGIAKLGYCWQFITLAGFHGNALIIDTFAKDFASRGMLAYVEKIQREERNNGVDTLAHQKWSGANYYDRVLRTVQGGITSTAAMGKGVTEEQFQESWTRPGTTNMGDGGVVIAKARM

SEQ ID NO: 46533 - protein, 393 aa, Nostoc sp. PCC 7120
  misc_feature (13)..(13): Xaa can be any naturally occurring amino acid
  misc_feature (53)..(53): Xaa can be any naturally occurring amino acid
  misc_feature (69)..(69): Xaa can be any naturally occurring amino acid
  misc_feature (98)..(98): Xaa can be any naturally occurring amino acid
  misc_feature (127)..(127): Xaa can be any naturally occurring amino acid
  misc_feature (234)..(234): Xaa can be any naturally occurring amino acid
  misc_feature (256)..(256): Xaa can be any naturally occurring amino acid
  misc_feature (372)..(372): Xaa can be any naturally occurring amino acid
  unsure (1)..(393): unsure at all Xaa locations
MGSDKIHHHHHHXAQIISINDNQRLQLEPLEVPSRLLLGPGPSNAHPSVLQAXNVSPVGHLDPAFLALXDEIQSLLRYVWQTENPLTIAVSGTGTAAXEATIANAVEPGDVVLIGVAGYFGNRLVDXAGRYGADVRTISKPWGEVFSLEELRTALETHRPAILALVHAETSTGARQPLEGVGELCREFGTLLLVDTVTSLGGVPIFLDAWGVDLAYSCSQKGLGCSPGASPFTXSSRAIEKLQRRRTKVANWYLDXNLLGKYWGSERVYHHTAPINLYYALREALRLIAQEGLANCWQRHQKNVEYLWERLEDIGLSLHVEKEYRLPTLTTVCIPDGVDGKAVARRLLNEHNIEVGGGLGELAGKVWRVGLXGFNSRKESVDQLIPALEQVLR

SEQ ID NO: 46534 - protein, 385 aa, Synechococcus elongatus PCC 6301
MTDSFFKRTLGLGSLVLLGLGGCSQVAQLPTPPNPLAVNRSEAASPNRPPLPLPENANFIVAAVERDGAAVVRINASRRVSNGDPFGGLFGGPPAGGNRVERGSGSGFIFDSNGLLMTNAHVVEGADRVQVRLKDGRTYDGQVLGADPVTDVAVVKIDAKDLPTVRIGNSDNLRPGEWAIAIGNPLGLDNTVTVGIISATGRSSSEVGIPDKRVGFIQTDAAINPGNSGGPLLNAAGEVIGINTAIRADGQGIGFAVPINTARRIADQIIQTGKASHPLLGVQMLPLTPEIARENNRNPNASIDLPETDGALIVQVLPNSPAAAAGIRRGDVITAAEGQPIRSASDLQTAVEKKKVGDRLALELLRQQQKRQVTVQLAEIPQQQG

SEQ ID NO: 46535 - protein, 287 aa, Solanum tuberosum
MGNANAREDGAAVDGDGEVSGRRSNVESGIVEDHHALTSRVPSVDLMVNSPPQSPHRSASPLLFGPQVPVVPLQGGDGNPVSNQMWGNECEDASDHSLEGGIPTLITWSYGGNNVAIQGSWDNWTSRKILQRSGKDYTVLLVLPSGIYHYKFIVDGEVRYIPELPCVANETGVVFNLLDVNDNVPENLESVAEFEAPPSPDSSYAQALMGDEDFAKEPVAVPSQLHLTVLGSENSEEAPSSPKPQHVVLNHLFIEKGWASQSVVALGLTHRFQSKYVTVVLYKPLKR

SEQ ID NO: 46536 - protein, 510 aa, Gossypium hirsutum
MPSFDTILLRDLVAAACLFFITRYFIRRLLSNPKRTLPPGPKGWPIVGALPLLGSMPHVELAKLAKKYGPVMYLKMGTCNMVVASTPDAARAFLKTLDLNFSNRPSNAGATHIAYNSQDMVFAEYGPRWKLLRKLSNLHMLGGKALEDWSQVRAVELGHMLRAMCESSRKGEPVVVPEMLTYAMANMIGQVILSRRVFVTKGSESNEFKDMVVELMTSAGLFNIGDFIPSIAWMDLQGIEGEMKKLHNRWDVLLTKMMKEHEETAYERKGKPDFLDIIMDNRENSAGERLSLTNVKALLLNLFTAGTDTSSSIIEWALAEILKNPKILNKAHEEMDKVIGRNRRLEESDIPKLPYLQAICKETFRKHPSTPLNLPRVSTQACEINGYYIPKNTRLSVNIWAIGRDPDVWGNPLDFTPERFLSGRFAKIDPRGNDFELIPFGAGRRICAGTRMGIVLVEYILGTLLHSFDWMLPPGTGELNMDEAFGLALQKAVPLSAMVRPRLAPTAYVS

SEQ ID NO: 46537 - protein, 75 aa, Nicotiana trigonophylla
GNNILVICDAYTPAGEPIPTNKRHKAAQIFSDPKVVSQVPWFGIEQEYTLLQQNVKWPLGWPVGGYPGPQGPYYC

SEQ ID NO: 46538 - protein, 340 aa, Pseudomonas fluorescens
MRALQLVDKQRLALRELVLPARPAPGHARVRMAFMTLNHLDLFGYRGMAFARRTLPVTVGAEGAGFVQDVGPGSDPELIGQAMAIYPSVFCGCCPACLAGRENLCADSPGVMGFHCDGVAAEYVDVPLRMLVPIPAGVPMDMAACAPVTFATVHHMLIDNARLMSGETLLVHAGGSGIGSIAIRLARHLGVTVFATVGRADKVERARALGAEYVIDYREERFLRVIREQTARRGVDVVFEHVGADTWEQSLLSLARGGRLVICGSTTGVEAPTNLMHLFNQQIHIHGSFGAPLSGLRDALALIQQGVLPVIDCVMPVAGFESGLQRLRERDVFGKIVLQF

SEQ ID NO: 46539 - protein, 131 aa, Pyrus communis
MADQLTDDQISEFKEAFSLFDKDGDGCITTKELGTVMRSLGQNPTEAELQDMINEVDADGNGTIDFPEFLNLMARKMKDTDSEEELKEAFRVFDKDQNGFISAAELRHVMTNLGEKLTDEEVDEMIREADV

SEQ ID NO: 46540 - protein, 363 aa, Solanum tuberosum
MSCYKGKYADELIKNAAYIGTPGKGILAADESTGTIGKRLSSINVENVESNRRALRELLFCTPGCLQYLSGVILFEETLYQKTAAGKPFVEVMKEAGVLPGIKVDKGTVELPGTDGETTTQGLDGLAERCQKYYEAGARFAKWRAVLKIGANEPSQLAINDNANGLARYAIICQQNGLVPIVEPEILVDGAHDIQKCADVTERVLAACYKALNDHHVLLEGTLLKPNMVTPGSESPKVAPEVIAEYTIRALQRTMPPAVPAVVFLSGGQSEEQATVNLNAMNKLQNQKAMVAFLLLWTCSSAEYPQGVGRKRRECAESTSCIPYQVQGQLRCYTRKVCRSFQLKRGRFREPPCQGLQVLDQSF

SEQ ID NO: 46541 - protein, 488 aa, Erwinia carotovora subsp. atroseptica SCRI1043
MKRKSLVLSALALSLAMAMGSTTANAAESAASAASSGQLPSLAPMLENVMPSVVSIYVEGHTTNAGKESNAGKEGIPPQLQPFFGENSPFCQEGSPFQSSPMCQGDSDDDDSGQPQPKQENFQALGAGVVINAEKGYVVTNSHVVDNADKIQIRLSDGRKYDGKVLGKDPRSDIALVQLKDFKNLTAIKVADSDQLRVGDYTVAIGNPYGLGETATSGIVSALGRSGLNIENYENFIQTDAAINRGNSGGALVNLNGELIGLNTAILAPDGGNIGIGFAIPSNMVKSVVAQIIEFGEVKRGELGITGTELNSELAQAMKVDAQRGAFVSQVRPKSAADAAGIKAGDVIVTLNGKAVSSFSALRAQVGSLPVGSKVALGLLRDGKPLTVDVTLQQSNQAQVASGNLYSGIEGAELSNTQIDDKKGVKVDNVKPGSAAAKVGLKKDDIILGVNQQVVQNIGELRKILDSKPAVLALNVRRGDSTIYLLAQ

SEQ ID NO: 46542 - protein, 76 aa, Nicotiana quadrivalvis
GNNILVICDAYTPAGEPIPTNKRHKAAQIFSDPKVVSQVPWFGIEQEYTLLQQNVKWPFRLACWRLPRTSGPYYCG

SEQ ID NO: 46543 - protein, 177 aa, Zea mays
  misc_feature (53)..(53): Xaa can be any naturally occurring amino acid
  misc_feature (63)..(63): Xaa can be any naturally occurring amino acid
  unsure (1)..(177): unsure at all Xaa locations
MAASSTATSVHDFIVKDASGKDVDLSAYKGKVLLIVNVASQCGLTNSNYTEPXQLYEKYQDQXLYPVQMPRLGEILAFPCNQFGGQEPGTNEEIAQFACTRFKVEYPIFDKVDVNGNNAAPIYKFLKFSKGGLFGDSIKWNFSKFLVDKEGRVVDRYAPTTSPLSIEKDIKKVLGSF

SEQ ID NO: 46544 - protein, 581 aa, Oryza sativa
  misc_feature (420)..(420): Xaa can be any naturally occurring amino acid
  unsure (1)..(581): unsure at all Xaa locations
MKYVLVTGGVVSGLGKGVTASSIGVVLKACGLRVTTIKIDPYLNTDAGTMSPFEHGEVFVLDDGGEVDLDLGNYERFLDIKLTRDNNITTGKIYQSVINKERRGDYLGKTIQVVPHITDEIQDWIERVAMNPVDGKEGPPDVCVIELGGTIGDKIFSSHNDSGILDAGDIESMPFIEALGQFSYRVGPGNFCLVHVSLVPVLNVVGEQKTKPTQHSVRGLRGLGLAPDILACRSTEPLEENVKAKLSQFCHVPVSSIINLHDVTNIWHIPLLLRDQRAHEAILKVLDLQFVGKVPREPKLVEWTERASKFDKLKATVKIAMVGKYTGLSDSYLSVLKALLHASVAMGRKLVVEWVPSCDLEDSAAKETPEAHKKAWKLLKGAEGILVPGGFGDRGVQGKILAAKYARENNVPYLGICLGXSKTHMGATMRLGSRRTYFHATACKSAKLYGNARFVDERHRHRYEVNPEMVPEFEKAGLSFVGKDESGRRMEIIELPSHKFFIGVQFHPEFKSRPGKPSPLFLGLIAAASGQLETLLQPSSNIVNPNPMPRFPIPKKTIYHAKKPLDSLVNGYFANGNVIHT

SEQ ID NO: 46545 - protein, 336 aa, Pseudomonas fluorescens
MPRHICITGASGFLGSHIVEKLLHHGCTVDALLRRPTAHLQGLAARHAQLRLHVVDLAQPGACNALFSECDTVIHCAASVTNNARPGSRLWQQTLEMNVNGTQNVIDGIRQAASVRTFVYTSSMAAILSPDMPAGHAFSEADWNHASLEASDPYWYSKTAAERLVTDAFQPWPCEPRVVCINPSVIIGPVLDPRHAATSIAILHDLHTGKTPACPDLNFHFVDVRDLAELHVRAALDDVIEGRFIVPGHEASMLELATMIKQRFPDSKAPQRRAPDWLMYLSAMLNPRLSRRYLRQNLGVRRVFDDQRARRAFQLSYRPLEHSVADTLQSLSPTAP

SEQ ID NO: 46546 - protein, 85 aa, Populus alba x Populus tremula var. glandulosa
MSQTVVLKVGMSCEGCVGAVKRVLGKMEGVESYDIDLKEQKVTVKGNVQPDAVLQTVSKTGKKTAFWEAEAPAEPAKPAETVAAA

SEQ ID NO: 46547 - protein, 412 aa, Pseudomonas fluorescens
MASSDTQGLLISGLGVASSIGTGQHDFIQALLAGNHAFSMMRRPGRQLESTFIGAEIDVDEQAGANLESGSRGMSFSARIALATLAEAWADAQLDQCDPTRIGLVVGGSNFQQRAIEQAHAPCALTPYFIKPSYATQFLDTDLCGVCTERFPIRGFAYTLGAASASGQMAIINAAQAVRAGDVDVCIALAPVMDLSYWECHGFRSLGAMGSDRFAESPALACRPFDRDRDGFIYGESSAVVVIESEASVRRRGVSPYARIAGWSVAMDGNRNPNPSFDGESCVIRQALDKSGWQARQVDYINPHGSGSVLGDETELRALAHCGLREASINATKSLIGHGLASAGLVETIATVLQMKAGQLHPNRNLDHPLDTGFAWVCDRAEQHALRCALNLSYGFGGINTALCLENSGRLQ

SEQ ID NO: 46548 - protein, 122 aa, Brassica napus
MSPEKDGVSIPLHVDITDVASPLPMPLDILHGNPIPPFLSKTFDLVDDPSLDPVISWGLTGASFVVWDPVEFARIILPRNFKHNNFSSFVRQLNTYGFRKIDTDKWEFANEAFLRGQKHLLK

SEQ ID NO: 46549 - protein, 233 aa, Streptococcus pneumoniae R6
MTKTILVTGGTSYIGSHTVKALLNAGYQVHILDNLSTGNRAAVDSRASFKELDVYDASALKAYLEENQIDAVLHYTGEIVVSESIENPSKYFTANVAGMNQVLKVLSEVGIQKIMFSSTASLYGNNCIDKPVTEDTLLDPVNPYAETKLMGERMIYWMANRYDWKYVIFRYFNVAGAEMDASNGLRVKNPTHIIPNINKTALGQNDSLKIFGDDYDTRDGSCIRDYIYVLDLA

SEQ ID NO: 46550 - protein, 704 aa, Triticum aestivum
  misc_feature (152)..(152): Xaa can be any naturally occurring amino acid
  unsure (1)..(704): unsure at all Xaa locations
MAACTPATAAVSFSLPSYPRRLRRRPSLLRAASTAAPPSPDLSIQLSPRPSPRTSPPVVPSLARDRAEDLQAESRAMTRAAAATVYTPELLASRYGSQPFQVAMRAAEVLSKLGAFGLKLLLDQQRGESSSSAKRRARAVELRTVLTRLGPXTFVKIGQGLSTRPDLCPTEYLEELSELQDSLPTFPDEEAFACIERELGFPLDSMYSAMSPSPIAAASLGQVYKARLKYSEQLVAVKVQRPGIEDAIGRDFYLLRGLGFLINKYVDIITTDAVALIDEFARRVFQELNYVQEGQNARRFKKLYADKQDILVPDIFWDYTSAKVLTMEWIEGVKLNQQAAIEGQGLKVLDLVNIGIQCSLRQLLEYGYFHADPHPGNILATPEGKLAFLDFGMMSETPEDARVAIIGHVVHMVNRDYEAMARDYYALDFLKPEVDVSPIVPALKIFFDDALDSTVSELNFKTIVDGLGAVLYQYPFNVPAYYALILRSLTVLEGLALYADPNFKVLAASYPYFAKRLLTDPNPYLRDALIELLFKDEKFRWNRLENLLVQGRQDREFVAKDALQPVLKLLLGPDGENLRVLVVKEAVRVTEAITFGTLIDSYNAAPEFLKPLISNGNPAGPFKISDVEREQMLELRDTVLRIWGLLRSSDTPDPSLLQPIVQVLQEREARVFGSRIAGGVSQRLAARLLQQLLRIPPAPVPGSS

SEQ ID NO: 46551 - protein, 216 aa, Arabis pumila
MSSFSAFSEMFGSDYESMISSVGDYSPTLATSCPKKPAGRKKFRETRHPVYRGVRQRNSGKWVSELREPNKKTRIWLGTFQTAEMAARAHDVAAIALRGRSACLNFADSVWRLRIPESACAKDIQKAAAEAALAFQNELMSDTATTDHGLDMEETLVEAIVTAEQIDTFYIDEETMFGMPSLMANMAEGMLLPLPSIQWINNYDVEGDADMPLWSY

SEQ ID NO: 46552 - protein, 199 aa, Euglena longa
AGGIAEMAHLNASVRTSTDQLDAVGNTTKAVTKGYAIGAAGLAALVIYSTYIEDLHHYFPNLNIDFNLQDPFVIVGLFAGGILPYLFCSFGMMAVSRAGGKIVEEVRRQFKEIKGIMTGENKPQYSLAVDILAKAAIYEMIIPSLLPVVAPIILYFVMKHIVGQAAAFTALGAMILGCLLTGMFLAISMTSGGGAWDNA

SEQ ID NO: 46553 - protein, 204 aa, Agrobacterium tumefaciens
AGGIAEMAGLDPDVRKATDALDAVGNTTKAVTKGYAIGSAGLGALVLFAAYANDLSYFAANGDTYPYFKDIGEISFSLANPYVVAGLLFGGLIPYLFGGIAMTAVGKAASAIVEEVRRQFREKPGIMAGTEKPDYGRAVDLLTKAAIREMVIPSLLPVLAPLVVYFGVLLISGSKASAFAALGASLLGVIINGLFVAIPCTSGG

SEQ ID NO: 46554 - protein, 328 aa, Geobacter metallireducens GS-15
MKVFVTGATGFIGASIARELLKDGCHVRVLARPGSDRRNLDGLDVEVCEGDLCSPESLDRGVKGCEVLYHAAADYRLWTRNPAAMYAANVEGTRHVLDAALRHGVSRVVYTSSVGTLGNPGDGTPGTEATPVTFADMVGDYKKSKFLAEREAETFLARGLPLVIVNPSTPVGPHDVKPTPTGKIIVDFLNRAMPAYLDTGLNIIDVEDCAQGHILAAQHGRIGEKYILGHENLTLRQIFSLLETVTGLAAPKVRLPYLPILAAAYANEALSRITGREPLIPLAGVQMARKFMYFDSSKAVKELGLPQRPAVEALGRAVEWFRANGYVR

SEQ ID NO: 46555 - protein, 189 aa, Agrobacterium tumefaciens
AGGIAEMAELGPEVRKTTDKLDSVGNTTAAIAKGFAIGSAALTALALFTAFAEEIAKNPKLTGLLVDGHLVVNLTEPGVIIGIFLGATLPFLVCAFTMEAVGKAAFEMIEEVRRQFREIPGIMEGTGRPDYAKCVDISTKAAIREMMLPGVFAVGAPLIVGFLLGAKALAGFLAGVTASGVLLAIFSPS

SEQ ID NO: 46556 - protein, 363 aa, GIBBERELLA ZEAE PH-1
MTSTQSVKAVRYHGQQDIRLESVPVKPLDPTTVRIAPKFCGICGTDVHEYLGGNNLIPKPGTPHGITGETSPLTLGHEFSGIVEEVGSEVTRLQKGDRVCVQPIIYDNECRSCKRGLQNCCDQNGFIGLSGWGGGLAESTVVPQDAVKKLPDNVSLEVGALVEPLAVGWHATKISPYEDGNSAFVVGGGPIGLAVVQALVGRGCKNIMLTEVSSKRREFAKKFGAHHVFDPTKDDVVAMVKKLTGGLGADVGFDAAGSQHAIDVAFDCLKARAVLVNIAVWEKRAQLNMNQIVFRERSYVGCATYALGDFEEVIDALSNGKIKPEGMITKVIKMDKVVEEGFQTLINDKDNHVKILVDVSAGV

SEQ ID NO: 46557 - protein, 260 aa, Lycopersicon esculentum
MCGGAILADIIPPRDRRLSSTDLWPTDFWPISTQNVPLNPKRARPSTGGEQMKKRQRKNLYRGIRQRPWGKWAAEIRDPRKGVRVWLGTFNTAEEAARAYDREARKIRGKKAKVNFPNEDDDHYCYSHPEPPPLNIACDTTVTYNQESNNCYPFYSIENVEPVMEFASYNGIEDGGEEMVKNLNNRVVEEEEKTEDEVQILSDELMAYESLMKFYEIPYVDGQSVAATVNPAAETAVGGGSMELWSFDDVSRVQPSYNVV

SEQ ID NO: 46558 - protein, 685 aa, Magnetococcus sp. MC-1
MQELDPQLMLAGINDGALGSIFLDDQEQIVFWNRWMERASGLKRAEVLGRPLREVFPELVGGRLLRAVATALETGLPALLSHKLNLWPLPLYPSYAVRPHGPRLCQQIMINALRPHGEKRFVLIQIQDISHTVQREQLLQEQTRVLMQREEELTASRLKADQANQAKSEFLANMSHEIRTPMNAIIGMADLLLETELNKDQRRYVQIFARAGASLLELINDVLDLSKVEADRLELEHRPFDLWALVEGAVEIFTLRTQEKGVKLDFELSARAPRYVISDQKRLRQILVNLLGNAVKFTQSGQIQLWVDVRDCEDAGGWLYFRVQDSGIGMSKAQQKSIFEPFVQADASVTRQHGGTGLGLAICKKLVELLSGDIWLESELGQGSRFHFTARFTHTALVAESERAFTSAKLHGRHVLLLGSQPQNRVLLESVLRRAGCQITTVTHQAQLAGHLLEPPAGLRPFHAVLVDCYNSMARVHQQIASVRANGSVMPMVLLVGEARQEDIQIAADLGVLLLERPVSHGRLLEALGATMEQGEAALLSSSLSPTAAIEMLKQVPLKILLTEDSVDNAVLFKAYLKQYPLEITHAANGAEALTLFEQHHYDLVFMDLQMPVMDGYSATRAMRFFEKQQRRPPTPILALTAYALSGDADKSRDVGCDAHLVKPIKKLELLSSIAQYGLKISLES

SEQ ID NO: 46559 - protein, 222 aa, Lycopersicon esculentum
MAPKEKIGAVTAMAMVNLNGISKEVHYRGVRKRPWGRYAAEIRDPGKKSRVWLGTFDTAEEAARAYDNAAREFRGAKAKTNFPKLEMEKEEDLKFAVKNEINRSPGQTSTVESSSPVMVDSSSPLDLSLCGSIGGFNHHTVKFPSSGGGFTGSVQAVNRMYYIEALARAGVIKLEQIGRKRLDYLGGGDSDSSTVIDFMRVDVKSTTAGLNLDLNFPPPENM

SEQ ID NO: 46560 - protein, 337 aa, Shewanella sp. MR-4
MTILVTGGAGYIGTHTVVELLNAGSEVIVLDNLSNSSIEALNRVERITGKAVTFYQGDILNKALLQKVFSDHNIDAVIHFAGLKAVGESVAKPLKYYENNVTGTLILCQVMAEFKVKNLVFSSSATVYGDPASLPITEDFPTGATNPYGQSKLMVEHILADLHHSDPSWNIARLRYFNPVGAHASGLIGEDPNDIPNNLMPFIAQVAVGKRKALSVFGNDYPTHDGTGVRDYIHVVDLALGHLKALEKLATKPGLVTYNLGTGQGYSVLDMVKAFEKACGKSIAYQIAPRRPGDIAACYANPDHAKTDLGWQATHSLEDMANSSWHWQSTNPNGYKG

SEQ ID NO: 46561 - protein, 534 aa, Arabidopsis thaliana
MGAVSMESLPLGFRFRPTDEELVNHYLRLKINGRHSDVRVIPDIDVCKWEPWDLPALSVIKTDDPEWFFFCPRDRKYPNGHRSNRATDSGYWKATGKDRSIKSKKTLIGMKKTLVFYRGRAPKGERTNWIMHEYRPTLKDLDGTSPGQSPYVLCRLFHKPDDRVNGVKSDEAAFTASNKYSPDDTSSDLVQETPSSDAAVEKPSDYSGGCGYAHSNSTADGTMIEAPEENLWLSCDLEDQKAPLPCMDSIYAGDFSYDEIGFQFQDGTSEPDVSLTELLEEVFNNPDDFSCEESISRENPAVSPNGIFSSAKMLQSAAPEDAFFNDFMAFTDTDAEMAQLQYGSEGGASGWPSDTNSYYSDLVQQEQMINHNTENNLTEGRGIKIRARQPQNRQSTGLINQGIAPRRIRLQLQSNSEVKEREEVNEGHTVIPEAKEAAAKYSEKSGSLVKPQIKLRARGTIGQVKGERFADDEKFVVVTGTGAEQKETRREAMEGGCNGNGGCDGWGRDGYMEDTGEFMTHETQRERERESNVV

SEQ ID NO: 46562 - protein, 285 aa, Triticum aestivum
  misc_feature (196)..(196): Xaa can be any naturally occurring amino acid
  misc_feature (204)..(204): Xaa can be any naturally occurring amino acid
  misc_feature (232)..(232): Xaa can be any naturally occurring amino acid
  misc_feature (239)..(239): Xaa can be any naturally occurring amino acid
  misc_feature (256)..(256): Xaa can be any naturally occurring amino acid
  unsure (1)..(285): unsure at all Xaa locations
MAAATSHNVIVSAQSHRWNSKNSRLDRRGVYVRLVSVGSCCSGNRKLGLVCASGSQSSVIDPVHLPSNGKGDHSPKKSSESSLILIRHGESMWNEKNLFTGCVDVPLTPKGVDEAIEAGKRICNIPIDVIFTSAMIRSQMTAMLAMMQHRRKKVPIITHKESEQAQSWSKIYSEDTKEQPIPVITVWKLNERMYGXWNGLIKQXTDNRFGKDKVLKGAGITNIPPPNGETLXMCANRAXSYLKDQGCPHLHGWKDXMVVGIAKSLRTNIMALKKLLPRKVNGFNC

SEQ ID NO: 46563 - protein, 267 aa, Ralstonia solanacearum
MTQRVPATAQVFSLLIMAVMHKLVLIRHGESTWNLENRFTGWVDVDLTDTGIAQARQGGRLLREAGFTFDLAYTSVLKRAIRTLWHVQDEMDLMWIPTRTEWRLNERHYGGLSGLNKAETAAQYGDQQVLVWRRSYDTPPPALEAGDERDAYGNPRYAGLPREQVPLTECLKDTVARVLPLWETSIAPDIKSGKRVVIAAHGNSIRALVKYLDNISDDDIVGLNIPNGTPLVYELDANLKPIRHYYLGDQEAIAASLAAVAGQGKAK

SEQ ID NO: 46564 - protein, 324 aa, Glycine max
MNLAKGVGGNIDKSQVLSAVEKYEKYHASYGGQEEERKANYVDMVNKFYDLATSFYEYGWGQSFHFAPRWKGESVREGIKRHEHFIALQLCLKPGQKVLDVGCGIGGPLREISRFSSTSITGLNNNEYQITRAKADFMKMPFPDNNFDAVYAIEATCHAPDVYACYKEIFRVLKPGQLFAAYEWCMTEAFDPNNEEHQKIKEEIEVGDGLPDIRLTTKCVEALKQAGFEVIWEKDLAVNSPVPWYFHLDASHFSLSTFPLTSIGRFFTRSLIRALEFVRLAPRGSLKVQEILQRAADGLLEGGKKEIFTPMYFFLARKPNFGGQ

SEQ ID NO: 46565 - protein, 261 aa, Oryza sativa
  misc_feature (260)..(260): Xaa can be any naturally occurring amino acid
  unsure (1)..(261): unsure at all Xaa locations
ERAARTAEYATLTRHYYNLATDLYEYGWGQSFHFCRYSHGESFYQAIARHEHYLAAQIGIKEGMKVLDVGCGVGGPAREIAKFTGAHITGLNNNDYQIKRATHYAQKQELSHQLKFVKGDFMQMSFPDNSFDAVYAIEATCHAPTLEGIYSEIFRVLKPGGVFGVYEWLMTEEYDNDNLRHREIRLGIEQGDGISNMCKVSEGLAAMKAAGFEMLHNEDLADRPDPFPWYWPISGGLRYIQSIYDVFTIVRMTKWGRWAXH

SEQ ID NO: 46566 - protein, 359 aa, Solanum tuberosum
MGRSQICSALAILALFFFSSALADDVVVLTEENFDKEIGHDRAALVEFYAPWCGHCKKLAPEYEKLGASFKKAKSVLIGKIDCDEHKSICSKYGVQGYPTIQWFPKGSLEPKKYEGARSAEGLAEYVNSEAGTNVKIASIPSSVVVLSSDNFDEIVLDETKDVLVEFYAPWCGHCKSLAPIYEKVATAFRQEEDVVIANLDADNHKDLAEKYGVSGYPTLKFFPKGNKAGEDYDGGRDTDDFVNFINEKCGTSRDSKGQFTSKAGIIESLDTLVKEFVSATNEEKKAVFSKMEDEAGKLKGSSARYGKIYLKAAKSSMVKGADYANNEIQRLERILAKSISPTKADEFTLKKNILATFA

SEQ ID NO: 46567 - protein, 751 aa, Cryptococcus neoformans var. neoformans JEC21
MGPNTRPAPQAPTHYSRHRPQSITGNNAPQSRTKPRIGQYIVERTLGTGSFGKVKLATHAVTGHQVALKLINRSKITTPDMNARVKREIQYLKVLRHPHIIKLYEVITTPTDVIMVMEYAGEELFNYIVQKGKHGMTEDEARRFFQQMIGAIEYCHKHHIVHRDLKPENLFLDSRRNIKIGDFGLSNLMTDGDFLKTSCGSPNYAAPEVISGKLYSGPEIDVWSAGVIMFVLLCGKLPFDDEHIPTLFKKIENGVFHIPSHVSEPARHLLKRMLEVDPLKRCTIAEIRQMPFFQENLPRYLQPLPELADMERYPSLTMDDMTTLLLINEGQADPKKVAEDKGLVFSEDLGVIDPDIVEELLEKITTYSEGMVWEALKMPGDNQVKVAYQLVRDHRRILKDSNAYEDEDSSAMEEFMASSPPAWNADIAPPIDVQQNGADEYPDLEDVDLEIQDIPNAHFDVLDSSLPGWMTPPSSSTSAMSTPTTTHPTSAQNSANPSFSSVTSDTTASGSTAEEAARALLSPAPSSASQSVTSFSSPTPQPQPQRRLDKSMTKPKWHFGIRSRSPPMEVMLEIYRTLNVLGMQWRLKDIPLPDIGGAPPGGYSEEVELVLEDLKEKNGERPVMGRKPPSKKDAMAQEKLAQGLYHVETRARYGDVMVRMDLQLYRVDDQHYLVDFRNLGYYMVSEKDMSLPDVSRQGHSHEEGASNAGGSVPSATSATAAGAKEAGIGGVSGPFHFLEMACQLIAELASG

SEQ ID NO: 46568 - protein, 426 aa, Erwinia carotovora subsp. atroseptica SCRI1043
MNKSESLYAAAQQLIPGGVNSPVRAFNGVGGTPLFIERADGAYLYDVDEQAYIDYVGSWGPMVLGHNHPSIRDAVIAAAERGLSFGAPTEMEVQMARLVTSLVPSMDMVRMVNSGTEATMSAIRLARGYTGRDKIIKFEGCYHGHADCLLVKAGSGALTLGQPNSPGVPADFARHTLTCVYNDLSSVRTTFEQYPDEIAAIIVEPVAGNMNCVPPLPDFLPGLRALCDEFGALFIIDEVMTGFRVALAGAQSHYGVVPDLTCLGKIIGGGMPVGAFGGKREVMQALAPTGPVYQAGTLSGNPIAMAAGFACLTEVAKPGVHEKLTALTNQLADGLLAAAKAENIPLVVNQAGGMFGLFFTDAESVTCYQDVMKCDVERFKRFFHMMLEEGIYLAPSAFEAGFMSLAHTPQDIERTIEAAQICFSRL

SEQ ID NO: 46569 - protein, 223 aa, Bacillus pumilus
MSYRVKRMLMLLVTGLCLSLSTFTAGASAQTGGSSYEPFNNYNTGLWQKADGYSNGNMFNCTWRANNVSMTSLGEMRLSLTSPSYNKFDCGENRSVQTYGYGLYEVSMKPAKNIGIVSSFFTYTGPTDGTPWDEIDIEFLGKDTTKVQFNYYTNGVGNHEKIVNLGFDAANSYHTYASDWQPNSIKWYVDGQLKHTATTQIPQTPGKIMMNLWNGAGVDEWLG

SEQ ID NO: 46570 - protein, 400 aa, Solanum tuberosum
MNKRSFKYAWVLDKIKAERERGITIDIALWKFETTKYYCTVIDAPGHRDFIKNMITGTSQADCAVLIIDSTTGGFEAGISKDGQTREHALLAFTLGVKQMICCCNKMDATTPKYSKARYDEIVKEVSSYLKKVGYNPDKIPFVPISGFEGDNMIERSTNLDWYKGPTLLDALDQINEPKRPTDKPLRLPLQDVYKIGGIGTVPVGRVETGVIKPGMVVTFGPTGLTTEVQSVEMHHEALLEALPGDNVGFNVKNVAVKDLKRGFVASNSKDDPAKGAASFTAQVIIMNHPGQIGNGYAPVLDCHTSHIAVKFAEILTKIDRRSGKELEKEPKFLKNGDAGMVKMIPTKPMVVETFAEYPPLGRFAVRDMRQTVAVGVVKNVDKKDPTGAKVTKAAQKKGK

SEQ ID NO: 46571 - protein, 238 aa, Paenibacillus polymyxa
MMKKKSWFTLMITGVISLFFSVSAFAGNVFWEPLSYFNSSTWQKADGYPNGQMFNCTWRANNVNFTNDGKLKLSLTSPANNKFDCGEYRSTNNYGYGLYEVSMKPAKNTGIVSSFFTYTGPSHGTQWDEIDIEFLGKDTTKVQFNYYTNGVGGHEKIINLGFDASTSFHTYAFDWQPGYIKWYVDGVLKHTATTNIPSTPGKIMMNLWNGTGVDSWLGSYNGANPLYAEYDWVKYTSN

SEQ ID NO: 46572 - protein, 606 aa, Mycobacterium avium subsp. paratuberculosis K-10
MTAERPATLCEAFQRNAAIDPDAVVLRTPGATQTLTWRELAEQVRKFAAGLAGLGVRRGDTVSLMMANRIEFYPLEIGAQHLGATSFSVYNTLPAEQLTYLFDNAGTKVAICEQQYVDRIRASGAPVEHIVCIDGAPPGTISVEQLYAAAPRDFDFESTWRSVRPDDVVTLIYTSGTTGNPKGVEMTHANLLFECHALNAVLPSKFGDRVTSYLPSAHIADRAMGLYGLEVFGAQVTVVDDPRAIAAALPDVRPTVWAAVPRIWEKLKAGIEFTVANEQDESTRAALQWAMSVAAQRAAALVAGEQIPDELAAEWARADELVLSKLRERLGFGELRWAVSGAAPIPKETLAFFAGIGIPIAEVWGMSELSCVAAVSHPRDARLGSVGKLLPGLEGKIADDGEFLVRGPLVMKGYRKEPAKTAEAIDADGWLHTGDILEADAQGYLRVVDRKKELIINAAGKNMSPANIENAILAACPMIGVMITIGDGRPYNTALLVFDADSVGPYAARHGLSDASPAALAADPDVIAQIAAGVAAGNAKLSRVEQIKRFRILPTLWEPGGDEITLTMKLKRKPIMAKYAEEIEQLYADPPPPEVHEPAATAVQPA

SEQ ID NO: 46573 - protein, 467 aa, Listeria monocytogenes str. 4b F2365
MLYSEDDKRKQESYRIPLFGSEEESTSIPKYVLKKEPMEPRIAYQLVKDQLMDEGNARQNLATFCQTYMEKEAEILMAETLEKNAIDKSEYPQTAELENRCVNILADLWNAPKDMSYLGTSTVGSSEACMLGGLAMKFRWRNHAEKRGLDIQAKRPNLIISSGYQVCWEKFCVYWDVDMRVVPMDKEHLSIDVDKVFDLVDEYTIGIVGILGITYTGKFDDIQLLDEKVEAYNEANEHQLVIHVDGASGAMFTPFVNPELPWDFRLKNVVSINTSGHKYGLVYPGVGWILWKDKEYLPKELIFEVSYLGGSMPTMAINFSRSASQIIGQYYNFLRYGFEGYREIHEKTKKTALYLAKSVEKSGYFEIINDGANLPIVCYKMKEGLDVEWTLYDLADQLLMKGWQVPAYPLPADLSDTIIQRFVCRADLGYNVAEEFAVDFADALHNLEHARVLYHDKERNDSYGFTH

SEQ ID NO: 46574 - protein, 752 aa, Chlamydomonas reinhardtii
MDKAERAAGGPNAASEDDWLLEFWPEPAADFPAPVAPMLSQHQDAAQLPEAMPQQQGLALGGYGLTQQPSDFMQTGMPGFDAFSSGKAATLGLPLLADPQRASTDGASALMNAAQQSSEYMLAPGMGGMPHLLAPSVGTALPGTGHTGFADLSMGGMAGGIPGLGGPGIMHGQYFMQPQRAATGPAKSRLRWTPELHNRFVNAVNSLGGPDKATPKGILKLMGVDGLTIYHIKSHLQKYRLNIRLPGESGLAGDSADGSDGERSDGEGGVRRATSLERADTMSGMAGGAAAALGRAGGTPGGALISPGLAGGTSSTGGMAAGGGGGGGLVTEPSISRGTVLNAAGAVATAAPAAAAPAGGSAAVKRPAGTSLSSGSTASATRRNLEEALLFQMELQKKLHEQLETQRQLQLSLEAHGRYIASLMEQEGLTSRLPELSGGAPAAAPVAAGGAAGGMIAPPPPQQQLQHQPQLLQPQGSLPAGGSSEAHAAAGAGTMVVHQQQQQHVHHHHQQQQVQMQQHARHCDTCGAGGAGGAPSGGSSMQQLQAAEQQRTELVVAGRLGSMPAPASSSPLAGQAHQQQPLAGGAAHLVHVHSHTPGGQPHVQHQDAFAGAATAAAHASPGLPQSHSHLLPADLSSNAGPDTSAGQIKPEPDMSQQQQQQEQQEAEQLAQGLLNDSSAGAGAVSGSDGGGLGDFDFGDFGDLDGGAQGGLLGPGDLIGIAELEAAAAHEQQQEQEHDPLDADRAKRQRVEP

SEQ ID NO: 46575 - protein, 350 aa, Oryza sativa
DKEGIPSDQQRLIFAGKQLEDGRTLADYNIQKESTLHLVLRLRGGMQIFVKTLTGKTITLEVESSDTIDNVKAKIQDKEGIPPDQQRLIFAGKQLEDGRTLADYNIQKESTLHLVLRLRGGMQIFGKTLTGKTITLEVESSDTIDNVKAKIQDKEGIPPDQQRLIFAGKQLEDGRTLADYNIQKESTLHLVLRLRGGMQIFVKTLTGKTITLEVESSDTIDNVKAKIQDKEGIPPDQQRLIFAGKQLEDGRTLADYNIQKESTLHLVLRLRGGMQIFVKTLTGKTITLEVESSDTIDNVKAKIQDKEGIPPDQQRLIFAGKQLEDGRTLADYNIQKESTLHLVLRLRGGQ

SEQ ID NO: 46576 - protein, 216 aa, Glycine max
MGNSEEEKSVKTGSPSSSPATTEQTNQPNIHVYPDWAAMQYYGPRVNIPPYFNSAVASGHAPHPYMWGPPQPMMQPYGPPYAAFYSHGGVYTHPAVAIGPHLHGQGVSSSPAAGTHSSIESPTKFSGNTDQGLMKKSKGFDGLAMSIGNCNSESAEHGAENRIRLEVDTEGYSDGSDGNTAGANQTKRKRCREGTLTTGMTLIHCCILTNKRVVLD

SEQ ID NO: 46577 - protein, 543 aa, Oryza sativa
MVAAAVAAAEQVVAALREECATPAARLDGVAAAMAGEMAAGLAEEGGSKIKMIVSYVDNLPNGSLLLGNFLVIVWFLDAMNTLISAATDDSDTLIENKNCGKYLLLFSLLKQQNSGTAMCAVLYFCIKRTEEGLFYALDLGGTNFRVLRVQLAGKEKRVVKRESREVSIPPHLMSGNSSELFGFIASALAKFVADEGHNAVFNDRQRELGFTFSFPVRQTSIASGTLIKWTKAFSIDDAVGEDVVAELQMAMEKQGLDMRVSALINDTVGTLAAGSYYDEDIVVGVILGTGSNAAYLEKANAIPKLEGELPKSGNMVINTEWGNFSSSCLPITEYDEALDKESLNPGEQASFSRRLHTPHMSKIFEKLISGMYLGEIVRRVLLKISLQSSIFGNLDQTKLKTRFILRTPDISVMHHDGTPDLRIVAEKLADNLKITDTSLETRKMVVEICDIVTRRSARLAAAGIVGILRKIGRGVPGDKRKSVIAIDGGLYEHYTEFRQCLETTLTELLGEEASKSVAVKLANDGSGLGAALIAAAHSQYLN

SEQ ID NO: 46578 - protein, 309 aa, Vibrio sp. Ex25
MNPISRVAIIGECMVELKKHDGVLQQGFGGDTLNTAVYLSRLTKQHGVETSYVTGLGHDPFSREMLTAWREEGINTDMVYLSEGKLPGIYAIETAEDGERSFFYWRNDAAAKYWLRERALLSLVKDLCQHQMIYLSGISLAIISDDCRQMLIELLTMCRKEGVKIAFDNNFRPKLWPNIEQARDFYSKILSVTDMAFLTFDDEVMLWGDKHEDEAISRTKNFGVKEIIVKRGADDCFVVTQDQQHTVAALKVDAVVDTTAAGDSFSAGYLAKRILGGDVAESALAGHKVAGTVIQHRGAIIPSQAMPTI

SEQ ID NO: 46579 - protein, 573 aa, Streptomyces avermitilis MA-4680
MTTDRNKTAERDTTHKPLRVTARGRAVLADPRLNRGTAFTDEERRALGLVGLVPPRVLTQDEQADRAYAQFREQPGDLAKNVYLTALHDRNEVLFYRLVGDHLEEMLPIVYTPTVGTAIKRYSYEYRRPRGIYLSVNAPDDIERSLRAAGLGADDVDLIVATDGEGILGIGDWGVGGIDIAVGKLAVYTAAAGVDPRRTLPVMLDVGTNRQELLDSPLYLGNRHPRVDRDTYDAFIDAYVTAATKLFPRALLHWEDFGPANARRIFNHYRDDVFTFNDDIQGTGAVNLAAVLSGAKAGDLPLRDHRIVVLGAGSAGIGVADQLRDALVAEGLSSDEATARFWCVDRYGLLTADQGDKLRDFQVPYARPADEVSDWQRDDDLPGIPLDEVVRRVHPTILIGTSGQGGAFTETVVREMAAHTPRPIILPMSNPTDLAEAKPADLLAWTDGKALVATGSPFDPVELNGTTYRIGQANNALIFPGLGLGAIVARATRVTDRMLRAAADAVANQTDVTDPGAPVLPPVRDLRETSFAVAVAVARAAAEDDVARAGTDDIEAAVRAVTWEPVYPPVQAV

SEQ ID NO: 46580 - protein, 360 aa, Gloeobacter violaceus PCC 7421
MDGNKPMDVPQLMHAAVFYGVGDLRYEQVPVPEVAADEVLVQVRACGLCQSDIKKLRYPLLDPPRIFGHETSGTIVRAGEAVEHWRVGERVVVLHHIPCFHCPYCLNENYSMCRVYKEVTTTAGFAPAGGGFAEYVKVPGHIVRSGGLMAIPDGVSFEEASFVEPTNCCLKAVKKAQVQPGQWVLITGAGPIGLMFAMLCRQFGAKPIVTDLLASRVERARALGAEAALDARSADLTARIHALTGGLGVDVALLAVPSVQAFSQALDATRKGGKILFFAEFAESVQIPLDPNVLYRREIDLMGSYSSSFKVQHLAADLVFGRRIDVQALISDFYPLAELAAAVEQAVHPTPETCKILIRP

SEQ ID NO: 46581 - protein, 756 aa, Cryptococcus neoformans var. neoformans B-3501A
MSRLLSWAALSLLSLTAAQNITQTTSFSFSPTPVSTSVPSPTAPLNSTVPGQGIYPPVQALCAGGANVPFCPGVLLQDVQLSGIFSDSKPTAKTLNETLSAWEALGDNVTVGDVETFVEQYFKGEGLELSQVELENFVEDPAILDNIADPVFRAWVKIVNGYWTLLARETNQSALCNGDCESSLIPLNHTVIVPGGRYREIYYWDSFWVLEGLLKSELYDYAWDLLQNFMDLIDIYGYLPNGGRKYYLNRSQPPVFVQMIDAYIKATNNITLLERALPVASSELEWWANNRTSNFTSPFTNQSRTIAQYSVTNSAPRPEGYVEDFETVMGASPALNETEQAELYSELATGAESGWDYSARWCEQPLLNTTDNNPALRTLKVKSIIPVDLLSLMAGDHALLANLYELYANSTGGGEGTGNEEMSKRDGESDDAVSKIAYHRQMAQEFSDSILDLCWDPEKSWFYDFNVTSNSRSNIFHAGGTWPLWQNITPSEIMGNESAALSLVSGFRFLLGHYSGVPSVATLLFTGLNWDFPNAWPPHAYTAIKAFETLGRVLPNATVLSNLTIPFDSVTENQLGLSESELQPQPQSTIGNVSLNTETSQDKPWPLALSIEFANRYLGAAFCSWYSTGGQISGLLTQLPLSDLNATGTYTSEQSGVMFEKFNVTDTDAAGGGGEYTVQVGFGWTNGVALWAAGEYGQYIPAPTCPLIPIIEVNGTAGSNTSDSSVYKSTDKDGGPTASDTTTSKSLFVGYRIPRE

SEQ ID NO: 46582 - protein, 913 aa, GIBBERELLA ZEAE PH-1
MSCLPSCFIASKIREFLEEYESQSNREGSSQGTFNLGFTFSFTCEQTSISRGTLVHWDKGWDIPSAIDQDPCSLLQEAVDETGLPVRVCVLANDAVGTLLTKAYTAEKSSSALAAIILGTGTNAAYVEDITNIQRLNTDEKWTEKDHEGVMVINTEWGSWDDDLKVLPQTRFDKLIDESSSDPGCGLLEKMVSGMYLGELLRLIILELVLNGSLSITFEEDSPIHQFTGIETSFLTKITAFGLEDTAGSLDYLTKTLAVKDVTIEEMLKIQALSKAIIKRSARLVGTGLAAIIIQSGRLQPSTTQKTTTTAQTQEIAQKPVKQQKGGAISSLAKFIRSIFGCMRPEDDTSIPVVKSPYGSEEIIESTILVEEDINIAVDGSLFEYHAEFEELMRSALRDVAEIGSVNERRIKIELTKDGSVTSEGQDSYLPQGLFQVSLTLTLTNTSYHYSVSVDDVVTMVKAKSWAITKGLLFLSTLLSTSSVVNADNPIVQTVYTADPAPIVHNGRVYLFTSHDEDGSTNFNMKDWRLFSSNDMVNWQHHPSPMGLTTFSWANDRAWAGQVASRNGKFYYYVPVAMKNGRMAIGVGVSDNILGPYRDALGKPLVENNEIDPTVFIDDDGQAYLYWGNPGLWYVKLNQDMISYSGGVNKVQLTTAGFGSRPNSAERPTNYEEGPWLYKRNGMYYMIYAANCCSEDIRYSTGPTATGPWTYRGVLMAHEGKSFTNHPAVIDFENKSYFFYHNGALPGGSGYTRSVAVESFQYNSNGLIPQLRMSTTGPAQVRSLDPYTRQEAETIAWTNGVETEACSEGGLAVSFINNGDYIKVKGVAFGNGAQSFSARVASANSKGGKIELRLGSETGKLVGTCTVPSTGGWQTWKTVDCPVSGATGTSDLFLRFTGEGSDYLFNVNWWQFK

SEQ ID NO: 46583 - protein, 154 aa, Haloarcula marismortui ATCC 43049
MSEHERTFVMVKPDGVQRGLIGDIVSRFEDRGLKMVGGKFMQIDQELAEEHYGEHEDKPFFDGLVDFITSGPVFAMVWEGQDATRQVRTMMGETDPAESAPGTIRGDYGLDLGRNVIHGSDHEDEGANEREIELFFDEAELVDWDQIDSSWLYE

SEQ ID NO: 46584 - protein, 134 aa, Haloarcula marismortui ATCC 43049
MSESEEELPDNDEEWREILSDEEYRILRESGTEPRFSSDLIDVEDEGVFTCAGCGTELFDSDRKFESETGWPSFWDVYQEGNVETRADNSHGMERTEVVCAECGGHLGHVFDDGPEPSGKRYCINGAALDFESE

SEQ ID NO: 46585 - protein, 171 aa, Staphylococcus epidermidis RP62A
MNINTAYFAGGCFWCMTKPFDTFDGIEKVTSGYMGGHLVNPSYEEVKTGSTGHYEVVKIEYDVALFSYHKLLEIFFSVIDPLDDGGQFQDRGSQYKTAIFYSNEHQRQLAEQYICELQDSFNADKAIATKILPASTFYEAEVYHQDFYKKNPERYEQEQQDRANYVKDNHM

SEQ ID NO: 46586 - protein, 332 aa, Bacillus anthracis str. 'Ames Ancestor'
MLKTTESKENEITKEQARWMYEKMLEIRKFEDKVHELFAQGVLPGFVHLYAGEEAVAVGVCAHLTDSDSITSTHRGHGHCIAKGCDLNGMMAELFGKATGLCKGKGGSMHIADLDKGMLGANGIVGGGFPLACGSALTAKYKGTKDVSVCFFGDGANNEGTFHEGVNLAAIWKLPVIFIAENNGYGEATTFEYASSCDSIADRAKAYNIPGVQVDGKDLLAVYKAAEEAVERARNGDGPTIIECMTYRNYGHFEGEAQTYKTSEEKEEHLNEKDAIVNFRKHLIHEALLTESELVDMEKAVDEAVQKSIEFSENSPYPEDEELLKDVYVSYK

SEQ ID NO: 46587 - protein, 850 aa, Arabidopsis thaliana
MAAARRLRTLQSQPENKVCVDCSQKNPQWASISYGIFMCLECSGKHRGLGVHISFVRSVTMDSWSEIQIKKMDAGGNERLNNFLAQYGISKETDIISKYNSNAASVYRDRIQALAEGRQWRDPPIVKESVGGGLMNKKPPLSQGGGRDSGNGGWDNWDNDDSFRSTDMRRNQSAGDFRSSGGRGAPAKSKSSEDIYSRSQLEASAANKESFFAKRMAENESKPEGLPPSQGGKYVGFGSSPGPAPRSNQQSGGGDVFSVMSEGFGRLSLVAASAANVVQTGTMEFTSKVKEGGLDQTVSETVNVVASKTTEIGQRTWGIMKGVMAIASQKVEEFTKEEASTWNQQNKTEGNGYYQNSGIGNKTANSSFGGSQSSSSGHNNSYRNSNSWDDWGEENNSKKEAAPKVSTSNDDDDGGWAGWDDNDAKDDDFYYQPASDKKSVGHNGKSDTAWTGGGIAEPVVFSCSVTRESRVVISTIKPPLRSWSMKDDRESMSLSRFMFYRSNRTSSHFHSIIRHPEPGQRKREREREIMGIYGVMTGKKGKSGFGSASTAEDVTQAIDASHLTAIITGGTSGIGLEAARVLAMRGAHVIIAARNPKAANESKEMILQMNPNARVDYLQIDVSSIKSVRSFVDQFLALNVPLNILINNAGVMFCPFKLTEDGIESQFATNHIGHFLLTNLLLDKMKSTARESGVQGRIVNLSSIAHTYTYSEGIKFQGINDPAGYSERRAYGQSKLSNLLHSNALSRRLQEEGVNITINSVHPGLVTTNLFRYSGFSMKVFRAMTFLFWKNIPQGAATTCYVALHPDLEGVTGKYFGDCNIVAPSKFATNNSLADKLWDFSVFLIDSISK

SEQ ID NO: 46588 - protein, 150 aa, Solanum tuberosum
MSKRRTREPKEETVTLGPSVREGELVFGVAHIFASFNDTFIHVTDLSGRETMVRITGGMKVKADRDESSPYAAMLAAQDVSQRCKELGINALHIKLRATGGNKTKTPGPGAQSALRALARSGMKIGRIEDVTPIPTDSTRRKGGRRGRRL

SEQ ID NO: 46589 - protein, 694 aa, Arabidopsis thaliana
MSSAPPPGGTPSPPPQPLPIPPPPQPLPVTPPPPPTALPPALPPPPPPTALPPALPPPPPPTTVPPIPPSTPSPPPPLTPSPLPPSPTTPSPPLTPSPTTPSPPLTPSPPPAITPSPPLTPSPLPPSPTTPSPPPPSPSIPSPPLTPSPPPSSPLRPSSPPPPSPATPSTPPRSPPPPSTPTPPPRVGSLSPPPPASPSGGRSPSTPSTTPGSSPPAQSSKELSKGAMVGIAIGGGFVLLVALALIFFLCKKKRRRDNEAPPAPIVPPPKSPSSAPPRPPHFMSSGSSGDYDSNYSDQSVLPPPSPGLALGLGIYQGTFNYEELSRATNGFSEANLLGQGGFGYVFKGMLRNGKEVAVKQLKEGSSQGEREFQAEVGIISRVHHRHLVALVGYCIADAQRLLVYEFVPNNTLEFHLHGKGRPTMEWSSRLKIAVGSAKGLSYLHENCNPKIIHRDIKASNILIDFKFEAKVADFGLAKIASDTNTHVSTRVMGTFGYLAPEYASSGKLTEKSDVFSFGVVLLELITGRRPIDVNNVHADNSLVDWARPLLNQVSELGNFEVVVDKKLNNEYDKEEMARMVACAAACVRSTAPRRPRMDQVARVLEGNISPSDLNQGITPGHSNVYGSSGGSTDYDSSQDNEGMNKFRKVGLETQDLYSNPISEYDLYPSWSSTDGQTTQGKATGNIKRPGQGYG

SEQ ID NO: 46590 - protein, 653 aa, Malus x domestica
QIKTQLEPHENSLLRQENNKLRAENMSIREAMRNPICSNCGGPAIIGDISLEEQHLRIENARLKDDLDRVCALAGKFLGRPISSLGASMGPPLPSSTLELGVGSNGFGGMSNVATSMSMGNDFGGGIGSAMSVVSHGRPSVTGLDRSMERSIFLELALAAMDELVKMAQTDEPLWLRSLEGGREVLNHEEYMRNFTPCIGLKPNGFVSEASRESGTVIINSLTLVETLMDSNRWLEMFPGVLARTSTTDVISSGMGGTRNGALQLMHAELQVLSPLVPVREVNFLRFCKQHAEGVWAVVDVSVDAIRDTTGVPTFMNCRTLPSGCVVQDMPNGYSKVTWVEHAEYDESQVHHLYRPLLSSGMGFGAQRWVSTLQRQSECQAILMSSCVTSRDHTAITASGRRSMLKLAQRMTDNFCAGVCASTVHKWTKLNAGNVDEDVRVMTRESLYHPGEPPGVVLSAATSVWLPFSPQRLFDFLRDERLRSEWDILSNGGPMQEMAHIAKGQDPGNCVSLLRARANANQGSMLILQETCIDAAGSLVVYAPVDIPAMHVVMNGGDSAYVALLPSGFAIVPDGPGSRGPMFGKGGSHGSGNSGGGVDDGGHRVSGSLLTMTFQILVNSLPTAKLTVESVETVNHLISCTVQKIKAALHCES

SEQ ID NO: 46591 - protein, 472 aa, Escherichia coli CFT073
MTTHLVWFRQDLRQHDNLALAAACRNSSARVLALYIATPRQWAAHNVSPRQAELINTQLNALQIALAEKGIPLLFREVDDFAASVEIVKQVCAEYRVTHLFYNYQYEVNERARDVQAERTLRNVVCEGFDDSVILPPGAVMTGNHEMYKVFTPFKNAWLKRLREGMPECVAAPKVRSSGSIEPAPSITLNYPRQSFDTAHFPVEEKAAIAQLRQFCLNGAGEYEQQRDFPAVEGTSRLSASLATGGLSPRQCLHRLLAEQPQVLEGGPGSVWLNELIWREFYRHLMTYYPSLCKHRPFIAWTDRVQWQSNPAHLKAWQEGKTGYPIVDAAMRQLNSTGWMHNRLRMITASFLVKDLLIDWREGERYFMSQLIDGDLAANNGGWQWAASTGTDAAPYFRIFNPTTQGEKFDREGEFIRQWLPELRDVPGKAVHEPWKWAEKTGVTLDYPQPIVDHKEARLRTLAAYEEARKGA

SEQ ID NO: 46592 - protein, 541 aa, Streptococcus pneumoniae R6
MTLDKGKVVYQIYPKSYKDTTENGIGDFRGIIEKIPYLAKLGVDMVWLNPFYPSPQRDNGYDISDYMAVDPLFGDMADFEEMVCVGKEHKIDFMLDMVLNHCSTEHEWFQKALAGDKYYQDFFFIQDQPTDWQSKFGGSAWAPFGDTGKYYLHLFDETQADLNWRNPNVRKELFKVVNFWRDKGVKGFRFDVINLIGKDEVSVDCPENEGKPAYTDKPIVHNYLRMMNQATFGSDDSFMTVGEMSSTTMENCVLYSSPDRQELSMTFNFHHLKVDYKDGQKWTLAPFDFEELKSLYHSWGKEMSDKDGWSALFWNNHDQPRALNRFVDIQNFRKEGATMLAASIHLSRGTPYIYMGEEIGMIDPDYDSMADYVDVESLNAYQMLLEEGKSQQEAFQIIQAKSRDNSRIPMQWDASENAGFSTGTPWLKAGKSYKYINVENEIQGPIFTFYQDLIRLRKEMPIISEGSYKPAFEDSKQVYAFERQFEDQKLLVLNNFYAKEVEIDLPAVYQNGQILISNYEDAEVSEKILLKPYQTLAIYVN

SEQ ID NO: 46593 - protein, 345 aa, Yarrowia lipolytica CLIB122
MSGFRAEIFAKDAHLPALTTVDAKVVAAFNRTSSKAEDFATHAKQSGHEVTVEPTFDALLKNPKVDVVDMLLPVQHNYANLKLALDAGKPVSFEKPIAASLDEAKKVVELTDASPIPVIVLEQYVYHKGVAKVQELISKIGKPVSFIFQGTGAYNPSNKYAATAWRLNPEHVGGYLSDGGVHQVTVVTECLQSKVAQVNAYTTQLRETSGDVDVLSASFKFENGVFGTFTYGSTFGAIKKTNSLQIFGTEGSIIYDWSPGSPDTVTLQVGPDSNNMGEPQVFTVEESKHFSVDSEFKNFFEAVEKKDKSLVVSNPRKAFHQFAVIVACVESSKKDGQQVKVAQLD

SEQ ID NO: 46594 - protein, 775 aa, Photorhabdus luminescens subsp. laumondii TTO1
MTKYSLRIRMMSLILVPILLVGMFFSISFLCYHYRELENQIVRSGISIIEPLSIASEIGINLHNRESVNSLITRLHRRNSEIVRAIAIFNDDNQLFDISNYKYNSAQLQISPDMPLPTTLTKTEVKNSIILRMPIISEHHLSQNQPHSDTPSLRPIGYIAIDLDLRSAHLQQYKEIVIFILLLLICLGWASLFAYHLVRKITKPISDIVSTVDRIRQGQLNSRVSGKYFGELDMLKNGINAMAKSLSSYKEEMQNDIDQATSDLRETMEQFEIQNVELAIAKKRAQDAARIKTEFLANMSHELRTPLNGVIGFTRQTLKTPLTIQQTEYLYIIERSANHLLNIINDILDFSRLEADKLVLENVPFLLQDTIDEVMVLLTLSAKSKNIQLTHHVDPQIPNLVVGDPTRLQQIFTNIIGNAIKFTDQGSVEIKINLLQQKHHKINLEITVSDTGIGISPEQQPHLFQAFHQANASISRHYGGTGLGLVITRKLIQEMGGNISFTSEPKKGSVFRFDLWLGKDDFILTGSVVPQKTLIHPPRLPMTVMAVDDNPANLKLIGSLLDEIVEKTVLCNSGEEALQSAASHHFDLILMDIHMPGMDGICTSNHIHQLPQHYSTPIIAVTAYTCRPKSDTHSPFEDFLTKPLDEHRLRVVLDRYVKTPKSQHINWPLALQQATGKEPLAIDMLQMLVDLLPTIKTITEKVLSGETVENYQQQIHKLHGSCCYSGVPQLKALCQLIEQQLQQGVQLTDIEPELLELTDEIDHVLTAAQKILSRG

SEQ ID NO: 46595 - protein, 508 aa, Arabidopsis thaliana
MEIVIASLALVVVLWCIWRILEWVWLKPKMLESYLRRQGLVGTRYTPLVGDVRRSFSMLKEARSKPMKPTDDLISLVMPYSFHMLNTYGKTFFTWSGPIPAITIMNPQLIKEVYNKFYDFEKTHTFPLTSLLTDGLANADGDKWVKHRKIINPAFHFEKIKNMVPTFYKSCIEVMCEWEKLVSDKGSSCELDVWPWIVNMTGDVISRTAFGSSYKEGQRIFILQAELAHLIILALGKNYIPAYRHFPTKNNRRMKTIVKEIQVILRGIISHREKARDAGEAPSDDLLGILLKSNSEQSKGNGLNMEEIMEECKLFYFAGQETTSVLLAWTMVLLSQHQDWQARAREEVMQVFFFFFFNFVLMILFLQMTMIIYEVLRLYPPVIQMNRATHKEIKLGDMTLPGCIQVHMPVLLIHRDTKLWGDDAAEFKPERFKEGIAKATKNQVCFLPFGWGPRICIGQNFALLEAKMALALILQRFSFELSPSYVHSPYRVFTIHPQCGAHLILHKL

SEQ ID NO: 46596 - protein, 444 aa, Lycopersicon esculentum
MAQSNSKPPMSSQNFGVGAVSHVRSLSQSSIFSNSCLPPLSPFPPSEPGMVSGHSSLKDISMEEADVNSQGVGVVSSFTRDGLPPRKGHRRSNSDVPLGFSAMIQSSPQLMPISGQKVLGRAVSLGDSNGKIDERKPKGEVTDELLFSYMNLENIETLNGSGTKDRDKDSIVSGTKVTGSESSNNEAESVMKGNNVSIQPTNLREGTKRSADANIAPAARHFRSLSMDSAIGNFHYGDESPNLPTSLMMRSGQLSPSNSGNESSSKHNLDFGNSEFSEAEMKKIMADERLAEIAVLDPKRAKRILANRLSAARSKERKTRYISELEHKVQKLQTETTTLSTQVTILQKNFVEISSLNSELKFRIQAMEQQAQLRDALHEALTAEVQRLKLAAGEHREEGRLPNNMTQQTPVKHNIFQMQRQQPSQMQQLSVGKASAASATPASA

SEQ ID NO: 46597 - protein, 545 aa, Photorhabdus luminescens subsp. laumondii TTO1
MKTNYIFVTGGVVSSLGKGIAAASLAAILEARGLNVTIMKLDPYINVDPGTMSPIQHGEVFVTEDGAETDLDLGHYERFIRTKMTRRNNFTTGRVYSEVLRKERRGDYLGATVQVIPHITNEIKDRIISGGEGHDVVLVEVGGTVGDIESLPFLEAIRQMAVEVGREHTLYLHLTLVPYLAAAGEVKTKPTQHSVKELLSIGIQPDILICRSDRVIPANERAKIALFCNVPEKAVISLKDVDSIYKIPGLLKSQGLDDYICKRFSLDCPEANLSEWEQVIYEEANPSGEVTIGMVGKYVELPDAYKSVIEALKHGGLKNRLTVNIKLLDSQDVETRGVELLKGLDAILVPGGFGGRGVEGKIMTARYARENNIPYLGICLGMQVALIEFSRHVAGLEKASSTEFEPDCRLPVVGLITEWRDEDGNLEVRSEESDLGGTMRVGGQPCHLTKDSLVRTLYGADTIVERHRHRYEVNNLLLKRIEDAGLRVAGRSVDNKLVEIIEIPDHPWFVACQFHPEFTSTPRDGHPLFTGFVKAAGKYQKGQLK

SEQ ID NO: 46598 - protein, 284 aa, Vitis berlandieri x Vitis rupestris
MTKDVEVAEHGSFSAKDYHDPPPAPLFDSVELTKWSFYRALIAEFIATLLFLYITVLTVIGYKSQTAGGDPCGGVGILGIAWSFGGMIFILVYCTAGISGGHINPAVTFGLFLARKVSLIRAILYMVAQCLGAICGVGLVKAFQSAYYDRYGGGANELSTGYSKGTGLGAEIIGTFVLVYTVFSATDPKRSARDSHVPVLAPLPIGFAVFMVHLATIPITGTGINPARSLGAAVIYNNEKAWDDQWIFWVGPFIGAAIAAFYHQFILRAGAIKALGSFRSTPRV

SEQ ID NO: 46599 - protein, 366 aa, Gloeobacter violaceus PCC 7421
MADCHTQCKICRSGDMATGSRSRCAGSDSSFFSPKPLQCPHRFPEGEVMDTLHTRRASGPPVWSSLFALAFVVAASGLGTPAALAQALSPANAQRLYVFGDSLVDLGNVFIISRGTFPPSPPYFEGRLSNGPLWIEDLAARLNLPLQPSLEGGTGYAFGGATTGFKPSQPPPPGIPPGIPGVLAQVATFAETRPPVAPEDLFFVVAGSNDILLFGESDIDLLLDNVATALSELYAQGARTIVVTNLPPLSRTPLAGSDPQQVAALGVLTRTYNRKLERRLQLLEQTQPGLKPILLDAYALVLALIDNPARFGLTNVTEPCLTETAVCPDPEQYLFWDEVHPTAAVGRILADYAYAVLARSTLPAAR

SEQ ID NO: 46600 - protein, 961 aa, Sesbania rostrata
MANRNLEKMASIDAQLRLLVPAKVSEDDKLVEYDALLLDRFLDILQDLHGEDLKETVQEVYELSAEYEGKHDPKKLEELGNLITSLDAGDSIVVAKSFSHMLNLANLAEEVQIAHRRRNKLKKGDFADESNATTESDIEETLKKLVGEMKKSPQEVFDALKNQTVDLVLTAHPTQSVRRSLLQKHGRVRNCLTQLYAKDITPDDKQELDEALQREIQAAFRTDEIRRTPPTPQDEMRAGMSYFHETIWKGVPKFLRRVDTALKNIGINERVPYNAPLIQFSSWMGGDRDGNPRVTPEVTRDVCLLARMMAANLYYSQIEDLMFELSMWRCNDELRVRADELNRSSKKDAVAKHYIEFWKIIPPSEPYRVVLGEVRDRLYQTRERSRHLLAHGYSDIPEEETFTNLEEFLEPLELCYRSLCACGDRAIADGTLLDFLRQVSTFGLSLVRLDIRQESDRHTDVLDAITKHLEIGSYQEWSEEKRQQWLLSELSGKRPLFGPDLPQTEEIRDVLDTFHVIAELPPDNFGAYIISMATTPSDVLAVELLQRECHIKHPLRVVPLFEKLADLEAAPAALARLFSIEWYRNRINGRQEVMIGYSDSGKDAGRFSAAWQLYKAQEELIKVAKKFGVKLTMFHGRGGTVGRGGGPTHLAILSQPPDTIHGSLRVTVQGEVIEQSFGEQHLCFRTLQRFTAATLEHGMHPPISPKPEWRAMMDQMAVIATEEYRSIVFKEPRFVEYFRLATPELEYGRMNIGSRPAKRRPSGGIETLRAIPWIFAWTQTRFHLPVWLGFGAAFKKVIEKDVRNLHMLQEMYNQWPFFRVTLDLVEMVFAKGDPGIASLNDRLLVSKDLWPFGEQLRNKYEETKKLLLQVAGHREILEGDPYLKQRLRLRDSYITTLNAFQAYTLKRIRDPNYNVKVKPRISKESAVELVTLNPTSEYAPGLEDTLILTMKGIAAGMQNTG

SEQ ID NO: 46601 - protein, 167 aa, Lactobacillus delbrueckii subsp. lactis
QARTIRIPVHMVETINKLIRIQRQLLQDLGRDPEPEEIAAEMDLPVKKVREVLKVAQEPVSLETPIGEEDDSHLGDFIEDKDATSPEQHAASEMLKDQLAEVLDTLTDREENVLRLRFGLDDGNPRTLEEVGRVFGVTRERIRQIEAKALRKLRHPSRSNQLRDFLE

SEQ ID NO: 46602 - protein, 339 aa, Cryptococcus neoformans var. neoformans JEC21
MVVKVGINGFGRIGRIVLRNAIEHGDLEVVAVNDPFIDLDYMVYMFKYDSTHGRFKGSVEVKDGKLYINNKAIAVFGEKDPANIKWGEAGAEYVVESTGVFTTTEKAGVHLKGGAKKVVISAPSADAPMFVCGVNLDAYKPEYQIVSNASCTTNCLAPLAKVIHDNFTIIEGLMTTVHATTATQKTVDGPSHKDWRGGRGAAANIIPSSTGAAKAVGKVIPSLNGKLTGMSFRVPTSDVSVVDLVCRIEKGASYEEIKNVIKKASESPELKGILGYTEDAVVSTDFIGSTESSIFDAQAGIALNANFVKLVSWYDNEYGYSRRVCDLISYIAGVDAKAQ

SEQ ID NO: 46603 - protein, 109 aa, Ipomoea batatas
CWQFITLAGFHGNALIIDTFAKDFASRGMLAYVEKIQREERNNGVDTLAHQKWSGANYYDRVLRTVQGGITSTAAMGKRVTEEQFQESWTRPGTTNMGDGGVVIAKARM

SEQ ID NO: 46604 - protein, 381 aa, Mycobacterium avium subsp. paratuberculosis K-10
MKAPIEVSPLAWLDAVEQQRRAAGLRRSLRPRPPVATELDLASNDYLGLSQHPDVIDGGVAALRMWGAGATGSRLVTGDTELHQQFESELADYVGAASGLLFSSGYAANLGAVVGLSGRGALVVSDAYSHASLVDACRLSRARVVVTPHRDVDAVRAALQDRDEERAVVITESVFSTDGALAPLRELHEVCRRHRALLIVDEAHGLGVRGGGRGLVFEAGLAGAPDVVMTTTLSKALGSQGGAVLGPAAVRAHLIDAARTFIFDTGLAPAAVGAARAALGVLRAEPWRSGAVLRHAGVLAEVCRVREAPQSAVVSVILGDPDVAVAAATACLDGGVRVGCFRPPTVPAGTSRLRLTARASLDDAELEVARRVLTDVLAGLG

SEQ ID NO: 46605 - protein, 213 aa, Erwinia carotovora subsp. atroseptica SCRI1043
MKEIETLIANNQLWSKTMVEEDPGYFERLAQAQRPRFLWIGCSDSRVPAESLTSLEPGELFVHRNVANLVIHTDLNCLSVVQYAVEVLEVEHIIICGHYGCGGVQAAVENPELGLINNWLLHIRDLWYKHSSLLGELPPEQRLNTLCEINVVEQVYNLGHSTIMQSAWKRGQKVTIHGWVYGIQDGRLRDLEVTATNRETLEQRYRRAISTLS

SEQ ID NO: 46606 - protein, 295 aa, Zea mays
IHQIVQRRSPRPPYTPQAFDNQYGSQNSPRAEFGTRPRAESARGTLADYNIQKESTLHLVLRLRGGMQIFVKTLTGKTITLEVESSDTIDNVKAKIQDKEGIPPDQQRLIFAGKQLEDGRTLADYNIQKESTLHLVLRLRGGMQIFVKTLTGKTITLEVESSDTIDNVKAKIQDKEGIPPDQQRLIFAGKQLEDGRTLADYNIQKESTLHLVLRLRGGMQIFVKTLTGKTITLEVESSDTIDNVKAKIQDKEGIPPDQQRLIFAGKQLEDGRTLADYNIQKESTLHLVLRLRGGQ

SEQ ID NO: 46607 - protein, 106 aa, Zea mays
LRLYTLYLSDTHNTLHSIPFHSISKDRIMGGLSTKLFVVLFLLVCYTGTQGGPVTMASARKCESQSFRFKGPCSRDANCANVCLTEGFTGGVCKGLRHRCFCTRDC

SEQ ID NO: 46608 - protein, 480 aa, Streptococcus pneumoniae R6
MPIQNKTMLITYSDSLGNNLKDLYDNLEEHFGDAIGGVHLLPFFPSTGDRGFAPVDYDEVDSAFGDWEDVKRLGERYYLMFDFMINHISRQSKYYKDYQEKHEASEFKALFLNWDKFWPENRPTQSDVDLIYKRKDRAPKQEIVFEDGSVEHLWNTFGEEQIDLDVTKEVTMEFIRKTIQHLASNGCDLIRLDAFAYAVKKLDTNDFFVEPDIWDLLDKVRDIAAEYGTELLPEIHEHYSIQFKIADHDYYVYDFALPMVTLYTLYSSRTERLAKWLKMSPMKQFTTLDTHDGIGVVDVKDILTDEEIDYASNELYKVGANVKRKYSSAEYNNLDIYQINSTYYSALGDDDVKYFLARLIQAFAPGIPQVYYVGLLAGKNDLKLLEETKEGRNINRHYYSNEEIAKEVQRPVVKALLNLFSFRNRSEAFDLEGTTEIETPTAHSIVIKRQNKDKSVTAVVEIDLQNQTYRVIENGVEVTF

SEQ ID NO: 46609 - protein, 99 aa, Cryptococcus gattii
WHGMRQKDTPYMDGVPGITQCPIPPGGSYTYNFTISDQSGTYWWHSHYSNAMADGLWGPLIVHSVHEPIQRGRDYDEDRIVFVSDWLHDDSEIIIAALA

SEQ ID NO: 46610 - protein, 778 aa, Yarrowia lipolytica CLIB122
MHFSSILTLTAIASVVQGFAPPSEQYLHNRPDQKAKRDAPKPVLMSSNRKVVVAQQPVNLEAYTNYYKKVQNEHHKRQLFKLKRHLENEEELAKRDQWNGGGYHAPISPGGFSPFAVVDENNNELTERGDILNIIGDILGGEKDTDANSAEDSSLWAKDAPPVIHIPSPGLLDQKRYAYRNDYKADYLKVPESDHTVGGILGVVSDVLDKAASGAVQHNDIFSQIFNGLLGDKLGGDHEKRDQVEVETVTLTRLHTEYKVVCGTEVSTCTKTASATGGSNNGGNNGGNNGNNGNNGNNGNNGNNGNNGNNGNNGNNSESGSTAASATQSGAFSTGYGNATSPITTGSASPSSTTAAPGSSRTGSSESASSSAASSGAASSASSTVTSSAATPTATGDKYFEAEVYAFSLYYFVDAYLGTPGQKNSLLVDTGSSDLWVIDEANGGHFNKNDSSTWKHLNWDFKNAYQAGQISGEWGTDSVTIDNATVHDLVMGVANTSALTSGDNVMGLLGLGFEGLEGTQQTDIGQYKNYPRRLVDSGLTDVAAYSVWLNSRQTGQGNFLFGGVDTAKYEGELQTIDMPDVVVGNMRGYLTTHMTNIAINNPNGSVSNLPKDLYAMFDTGAPSTLLPDDVGLAFKDQFNLSYNSAWGLYYGDCNQGGTFTFTLGGKDFTMDVKDFVVDWVSATIPEGQCFFGIGPTRGKMAMFGDTFLRSFYAVFDLDNRKASLAKAKTDIQESNIIAIPAGGVEQMNLGKRDQLAPAEEVETVSIPAAAATASIPAF

SEQ ID NO: 46611 - protein, 237 aa, ASPERGILLUS NIDULANS FGSC A4
MANDEYDVSPRPLTFLFKVVLIGDSGTGKSNLLSRFTRNEFNLDSKSTIGVEFATRSIQVDSKTIKAQIWDTAGQERYRAITSAYYRGAVGALLVYDISKHQTYDNVNRWLKELRDHADSNIVIMLVGNKSDLRHLRAVPTEEAKQFASENNLSFIETSALDASNVELAFQNILTGIAPVGISKRRSLTAILFFVEIYRIVSSKALEGESGGASVGERRQIIDIEKTQDTENKGGCC

SEQ ID NO: 46612 - protein, 99 aa, Cryptococcus gattii
WHGMRQKNTPYMDGVPGITQCPIPPGGSYTYNFTISDQSGTYWWHSHYSNAMADGLWGPLIVHSVHEPIQRGRDYDEDRIVFVTDWMHDDSEIIIAALA

SEQ ID NO: 46613 - protein, 465 aa, Vigna radiata
MAVARSDSNSEPCTSYNCYNVAALTETILETSQVSNLKDRYVLGEQLGWGQFGVQDCSDKLTGEVLACKSIAKDRLVTSDDLRSVKLEIEIMARLSGHPNVVDLKAVYEEEGFVHLVMELCAGGELFHRLEKHGWFSESEARVIFRHLMQVVLYCHENRVVHRDLNPENILLATRSSSSPIKLADFGLATYIKPGQSLHGLVGSPFYIAPEVLAGAYNQAADVWSAGVILYILLSGTPPFWGKTKSRIFEAVKAASLKFPLEPWDRISESAKDLIKGMLCTDPSRRLTAQEVLDHCWMESNQTNQEQLGENQIQSCKQWDVGGSSFSASFSPGIRTLAFSLALLHVMLNRPTFTCRSSFSSFLEEPVTPCVLSAGFSFKSVGDSSGLEFSSPIPSMLSFSFLSPSPVVEHKSCKLGCSANMSDVDAIAGEASLESYFYYKILNLCIEHDAKETNRKPTEAKRSIE

SEQ ID NO: 46614 - protein, 615 aa, Pinus pinaster
MPQAKREEGIESVQESIIIATTERNRKALDFIEHATIHAAEVQAEVLLEILTRNAYTEYLERYQLTGRTDRKSFKERLPVITYEDLQPEILRIANGDMSPILSAHPISEFLTSSGTSAGERKIMPTIHEELKRRTLLYSLLMPVMNQYMKGLDKGKGMYFLFVKSETRTPGGLLARPVLTSYYKSQDFIERPYDPYNVYTSPMEAILCSDSYQSMYCQLLCGLAQNHEVLRVGAVFASGLLRAIRFLEEHWQSLCQDIRSGTVNDEEVTDPCLRESVMKILHPNTQLADLIRTECSKESWQGIITRLWPNARYLDVIVTGAMAQYIKTLDFYSGGLPQVCTMYASSECYFGINLKPLCQPWEVSYTLMPNMAFFEFLPVYRNKNEDAGPVTTATEQPAELVDLVDVKVGQEYELVITTYSGLYRYRVGDVLRVTGFHNAAPQFQFVCRKNVMLSIDADKTDEAELHNAVMNAVKHLEPLEATLVEYTSYTDTSTIPGHYVLYWELRTSALPVPPSVFEDCCLTVEESLNSVYRQCRVADKSIGPLEIKVVEMGTFDKLMDYAISRGSSINQYKAARCVKFAPMVDILNSRVSASYFSPRCPKWTAGRTQWGALPR

SEQ ID NO: 46615 - protein, 272 aa, Lactococcus lactis subsp. lactis Il1403
MKLNNQIEIPELGLGVFQIPNDETADVVKNAIVNGYRLIDTAKIYENEEGTGQGIKEGLAMTGLSRDDLFITSKLWGDNHSYEETVQNFEKSLKKLDLDYLDLYLIHWPGTHYAYKEAWNAMEDLYKAGKIKAIGVSNFQKSHLEELLSYAKITPVLNQIELHPKLSQEELRNFLELHDIKVQAWSPLMQGQLLDNEVLKKIADKHGKSVAQIILRWDIQQDILVNVKSIKSERMIANRQIFDFSLDSEDMKAINSLNEELRVGPDPEHFNF

SEQ ID NO: 46616 - protein, 692 aa, Triticum aestivum
MEIVDKIAEPEDPLVVTARKVQSLEPPLPIPIKASWKGKTSQQQDEKDLPDDGEESFQSVDSSDEGGRSSFSGASHPLEPIDMDLMKTVYVAIDEEKPERPVCLVRGLSAKGPFMDDLSLRVTGLKANAVVCAGSGEGLAEERKVSGAAVASLATARSSQATETVSLPPDSEEKDCVWDASLPPSGNVSPHSSIDSMGVVTAMSIASNRSNTYKSEAIAGGTMLTVERNFGSVKSSVRGDSLESAKTSMSRASDSSGVSDDSSWSHITGGTSKPHKGNDPRGKAIHAVRIRDGVLGMSHFRLLKRLGCGDIGSVYLSELSGTRCYFAMKVMDKASLASRKKLNRAQTEREILQLLDHPFLPTLYTHFETDRFSCLVMEFCPGGDLHTLRQKQPGKYFSEYAARFYAAEVLLAIEYLHMLGVVYRDLKPENVLVRDDGHIMLSDFDLSLRCAVSPTLIRTSAFDSDPRRAGGSFCVQPTCMEPTSACIQPACFIPKLFGQKSKKKTRKTRSELGQSAINLPELLAEPTSARSMSFVGTHEYLAPEIIKGEGHGSAVDWWTFGIFLHELLYGKTPFKGSGNRATLFNVVGQQLKFPESPSTSYAGRDLIRGLLAKEPQQRLGVKRGATEIKQHPFFEGVNWALIRCSTPPEVPRPVEAELPVKYGVSEAVASTNKRVVGADAKSGGKYLDFEFF

SEQ ID NO: 46617 - protein, 233 aa, Lactococcus lactis subsp. lactis Il1403
MPKLVFARHGESEWNLANLFTGWADVDLSENGTKQAIEAGKLIKEAGIEFDIAYTSVLKRAIKTTNLALEYSDQLWVPVVKSWRLNERHYGGLTGLNKADAAAKHGDEQVHIWRRSYDVLPPAMDHDDKYTAHGDRRYAGLEDSLIPDAENLKVTLERALPFWEDQIAPALKEGKNVFVGAHGNSIRALVKQIKKLSDDEIMDVEIPNFPPLVFEFDDNLNVQNEYYLAPKKA

SEQ ID NO: 46618 - protein, 206 aa, Triticum aestivum
MFSGTQQKCKVCTKTVYPMDQLSTDGAVFHRACFKCHHCKSTLSFSSYSSFEGVPYCKPHFAQLFKETGSYNKSFQSQSPAKSATEKLTPELTRSPSKAAGMFSGTQDKCATCGKTAYPLEKVTVEEKSYHKSCFKCSHGGCALSPSNYAALEGILYCKHPFLPAFSGRRGSYTLLIKCASVKRAAEGQTAQAAATGSARRQLNPS

SEQ ID NO: 46619 - protein, 267 aa, Salmonella typhimurium LT2
MAEPLTVSPELTANYAYFFDLDGTLAEIKPHPDQVVVPHKILQLLDRLAAHNAGALALISGRSMTELDALAKPFRFPLAGVHGAERRDINGKTHIVRLPEAVVREVEALLRSTLVALPGTELESKGMAFALHYRQAPEHEAALLALAQHVTQHWPQLALQPGKCVVEIKPKGTNKGEAIAAFMQEAPFAGRIPVFVGDDLTDEAGFGVVNHAGGISVKVGVGATQAAWRLESVPDVWRWLEQINYPQQEQQVMNNRRDGYESFSRSI

SEQ ID NO: 46620 - protein, 398 aa, Pseudomonas syringae pv. tomato str. DC3000
MSLFSAVEMAPRDPILGINEAFNADTRTTKVNLGVGVYCDEDGRIPLLRAVAEAEKIRVAQHAPRGYLPIDGIAAYDQAVQKLLLGADSPLIASGRVLTTQSVGGTGALKIGADFLKQLLPNAVVAISDPSWENHRALFETAGFPVQNYRYYDAATHDVNRAGMLEDLHNLPNNSVVVLHACCHNPTGVDLSLDDWKKVLEVVKAKGHVPFLDMAYQGFGQGIQEDALAVRLFAESGLTFFASSSFSKSLSLYGERVGALSIITESKEETARVLSQVKRVIRTNYSNPPTHGAIISAAVLNDPALRAMWEEELGEMRVRIQGMRKAMVERLADNPAGQDFSFVGRQCGMFSYSGLTAAQAQRLRSEFGIYALDTGRICVAALNQKNIDAVCEAIKKVL

SEQ ID NO: 46621 - protein, 380 aa, Dechloromonas aromatica RCB
MWQIFAQTVTVALAILFVVSTLKPEWLPQRQGVVALQEAPTTGDEIKSTPGSYRDAARAALPSVVHIYTTQEIKQQRHPLFDDPIFRHFFGDRPEGQPQRNSGLGSGVIVSPNGYILTNYHVIEGADDIQVSLNDTKTYKAKIVGSDPESDLAILQIKADKLPAITFGQMDNLRVGDVVLAIGNPFGVGQTVTMGIVSALGRSHLGINTFENFIQTDAAINPGNSGGALVDIHGNLVGINSAIYSRTGGSLGIGFAIPVSSARSIMEQIIRTGTVTRGWIGVEAQEITQELAESFGLPDNEGALIAGVVRSSPADTAGIRPGDVLLSVDGKPVQDPQVMLDLIAALTPEERSAFRLRRGKNIVEVQVRIGKRPAMRAEQE

SEQ ID NO: 46622 - protein, 392 aa, Oryza sativa (japonica cultivar-group)
MLAAAASVKLSTAGTATAPKMALFKPLHLPPLFAAAAAAAGPRPLSLSARPLYRQQDPLFLASRVASPAPPPPSATADGARPVEAAPAGAAPEEAARRAKIGVYFATWWALNVIFNIYNKKVLNAFPYPWLTSTLSLAAGSAIMLASWATRIAEAPATDLDFWKALSPVAIAHTIGHVAATVSMAKVAVSFTHIIKSGEPAFSVLVSRFFLGEHFPAPVYFSLLPIIGGCALAAITELNFNMIGFMGAMISNLAFVFRNIFSKKGMKGKSVSGMNYYACLSMLSLVILLPFAFAMEGPKVWAAGWQKAVAEIGPNFVWWVAAQSVFYHLYNQVSYMSLDEISPLTFSIGNTMKRISVIVASIIIFHTPVQPINALGAAIAILGTFIYSQAKQ

SEQ ID NO: 46623 - protein, 592 aa, Escherichia coli CFT073
MGCVMKLPVREFDAVVIGAGGAGMRAALQISQSGQTCALLSKVFPTRSHTVSAQGGITVALGNTHEDNWEWHMYDTVKGSDYIGDQDAIEYMCKTGPEAILELEHMGLPFSRLDDGRIYQRPFGGQSKNFGGEQAARTAAAADRTGHALLHTLYQQNLKNHTTIFSEWYALDLVKNQDGAVVGCTALCIETGEVVYFKARATVLATGGAGRIYQSTTNAHINTGDGVGMAIRAGVPVQDMEMWQFHPTGIAGAGVLVTEGCRGEGGYLLNKHGERFMERYAPNAKDLAGRDVVARSIMIEIREGRGCDGPWGPHAKLKLDHLGKEVLESRLPGILELSRTFAHVDPVKEPIPVIPTCHYMMGGIPTKVTGQALTVNEKGEDVVVPGLFAVGEIACVSVHGANRLGGNSLLDLVVFGRAAGLHLQESIAEQGALRDASESDVEASLDRLNRWNNNRNGEDPVAIRKALQECMQHNFSVFREGDAMAKGLEQLKVIRERLKNARLDDTSSEFNTQRVECLELDNLMETAYATAVSANFRTESRGAHSRFDFPDRDDENWLCHSLYLPESESMTRRSVNMEPKLRPAFPPKIRTY

SEQ ID NO: 46624 - protein, 664 aa, Escherichia coli
MSSRKELANAIRALSMDAVQKAKSGHPGAPMGMADIAEVLWRDFLKHNPQNPSWADRDRFVLSNGHGSMLIYSLLHLTGYDLPMEELKNFRQLHSKTPGHPESGVTPLGVETTTGPLGQGIANAVGMAIAEKTLAAQFNRPGHDIVDHYTYAFMGDGCMMEGISHEVCSLAGTLKLGKLIAFYDDNGISIDGHVEGWFTDDTAMRFEAYGWHVIRDIDGHDAASIKRAVEEARAVTDKPSLLMCKTIIGFGSPNKAGTHDSHGAPLGDAEIALTREQLGWKYAPFEIPSEIYAQWDAKEAGQAKESAWNEKFAAYAKAYPQEAAEFTRRMKGEMPSDFDAKAKEFIAKLQANPAKIASRKASQNAIEAFGPLLPEFLGGSADLAPSNLTLWSGSKAINEDAAGNYIHYGVREFGMTAIANGISLHGGFLPYTSTFLMFVEYARNAVRMAALMKQRQVMVYTHDSIGLGEDGPTHQPVEQVASLRVTPNMSTWRPCDQVESAVAWKYGVERQDGPTALILSRQNLAQQERTEEQLANIARGGYVLKDCAGQPELIFIATGSEVELAVAAYEKLTAEGVKARVVSMSSTDAFDKQDAAYRESVLPKAVTARVAVEAGIADYWYKYVGLNGAIVGMTTFGESAPAELLFEEFGFTVDNVVAKAKELL

SEQ ID NO: 46625 - protein, 431 aa, Bacillus licheniformis ATCC 14580
MRSYEKSKAAFEEAQRVMPGGVNSPVRAFKSVNMDPIFMERGKGSKIYDIDGNEYIDYVLSWGPLILGHSNEKVVKEIQKAAEHGTSFGAPTELETELAELVIDRVPSIEIVRMVSSGTEATMSALRLARGYTGRNKIVKFEGCYHGHGDSLLIKAGSGVATLGLPDSPGVPESIAKNTITVPYNDLESMKLVFQEFGDDIAGVIVEPVAGNMGVVPPVKGFLEGLRELTETHGALLIFDEVMTGFRVDYNCAQGYFGVTPDLTCLGKVIGGGLPVGAYGGKAEIMEKIAPSGPIYQAGTLSGNPLAMTAGLETLKQLTPESYREFSRKADRLEKGISEAAEKNGIPCTFNRAGSMIGFFFTNGPVINYDTAKQSDLGLFAEYYKGMADEGVFLPPSQFEGLFLSTAHTDDDIEHTIKAAERVFERISRSR

SEQ ID NO: 46626 - protein, 332 aa, Bacillus cereus E33L
MNPLIFKEDCPLDLIAVGRLCVDLNANETQRPMEATRTFTKYVGGSPANIAIGATRLGLQTGFIGKVSDDQMGRFITRYLQDNNINTDQICIDRTGAVTGLAFTEIKSPEDCSILMYRDNVADLNLDPTEVSEDYIKQSKALLISGTALAKSPSREAVFLALEYARKHDVVVFFDVDYRPYTWQSEAETAVYYNLAAEKSDVIIGTREEFDMMEKLLNYEESNDQVTAERWFSHHAKIVVIKHGGDGSIAYTRDGQSHRGGIFKTKVLKTFGAGDSYASAFIYGLMQGLEIPQAMRLGGASASIVISKHSCSDAMPTRAEISAFMEIAEEIV

SEQ ID NO: 46627 - protein, 97 aa, Mirabilis jalapa
KSYQDLSDALGKMFSSFTLGNYGSQGMIDFMNESKLMDLINGSDYVPTYEDKDGDWMLVGDVPWEMFVESCKRLRIMKGKEAAGLAPRAMEKCKNRI

SEQ ID NO: 46628 - protein, 93 aa, Mirabilis jalapa
VKVSMDGAPYLRKIDLKVYQSYAELLRGLENMFKVRIGSYSERDGYNGSDYVPTYEDKDGDWMLVGDVPWEMFISSCKRLRIMKSSEAKGLGS

SEQ ID NO: 46629 - protein, 191 aa, Triticum aestivum
  misc_feature (132)..(132): Xaa can be any naturally occurring amino acid
  unsure (1)..(191): unsure at all Xaa locations
ELHSFVVGLEGSPDLKAAREVADYLGTIHHEFHFTVQDGIDAIEEVIYHDETYDVTTIRASTPMFLMARKIKSLGVKMVLSGEGSDELLGGYLYFHFAPNKEEFHRETCRKVKALHQYDCLRANKATSAWGXEVRVPFTRSHNVRWHGPEWKCPQELGRSRMGQRKGPHDSTYCQDISTGEEIMTGKWLPI

SEQ ID NO: 46630 - protein, 152 aa, Triticum aestivum
MLSNRESARRSRMRKQRHLDDLAAQAAHLRRENAHVAAALGLTARGLQAVDAENAVLRTQAAELAARLHSAQRHHRLHERQQQHRRRRRVTVAAATATTADRRFRRGSFRSNSPPNISQACKVPTAWNTRRGNKRISLFMSGFKLGGPDHPL

SEQ ID NO: 46631 - protein, 476 aa, Zea mays
MGSDLFGSYAESSCAALVVASISSFGITHQFTPMVYPLLVSSVGIIACLITTLFATDFFEIKAVNEIEPALKKQLIISTVVMTIGIALISWLGLPYTFTIYNFGTQKTVQSWQLFLCVAVGLWAGLVIGFITEYYTSNAYSPVQVVADSCRTGAATNVIFGLALGYKSAFIPIFAIAFSIFLSFSLAAMYGVAVAALGMLSTIATGLAIDAYGPISDNAGGIAEMAGMSHRIRERTDALDAAGNTTAAIGKGFAIGSAALVSLALFGAFVSRAAISTVDVLTPKVFIGLIVGAMLPYWFSAMTMKSVGSAALKMVEEVRRQFNTIPGLMEGTTKPDYATCVKISTDASIKEMIPPGALVMLTPLIVGILFGVETLSGVLAGALVSGVQIAISASNTGGAWDNAKKYIEAGASEHARTLGPKGSDPHKAAVIGDTIGDPLKDTSGPSLNILIKLMAVESLVFAPFFAAHGGIIFKWL

SEQ ID NO: 46632 - protein, 265 aa, Glycine max
ETKGINKPLERKRGKTEKCIRLEDLQRYCAGSLKDAAKSLGVCPTTVKRICMQHGISRWPSRKINKVNRSLSKLKRVIESVQGAEGAFGLNSLSKSPLPIAVGSFPEPSTPNKFSLPASLSINPSEPQIKENELNASKALETNSQAVMEEDRLLGGRTPHLEKVINDKGRHTREVGKEPKRTRTGSGSSEDSTNPTSHGSCHDSPPNESSPVKNIFITSNNDQCAGLKRSPESTLQLTTNTPNRPAAYPMPDFVAAELQSHLVGC

SEQ ID NO: 46633 - protein, 419 aa, Zea mays
MAEAATSSSSSGSFAPRRLHDAGVVRESLPYSVLAAPPPPSLSPVQVQVAGGGGGGGGKINPAVLFIIVILALVFFISGLLHLLVRVLSKKQHRRGGPRDTASAAAPRTGVEAGGVDVALQRQLQQLFHLHDSGLDQAFIDALPVFAYRDIVVGGGGDGDKEPFDCAVCLCEFDAEDRLRLLPLCGHAFHLNCIDTWLLSNSTCPLCRGVLFIPGLMGEGNPMFDFEERLEEGRLSEDCDDGFGLPGLKASGLAQTPVAEKKVFPVRLGKFKNVGTQGAVEGGHANANANANANASVLSRDQVESSSSSSLDGRRCFSMGTYQYVLGTSELRVALQPGRIRNGTGGAMMGRPPGLSSINADIMEGKKICTRNKGESFSVSKIWQWSHIKGKLPAGSDECSDAGSLPWMKRGGAADTSNL

SEQ ID NO: 46634 - protein, 48 aa, Mirabilis jalapa
EDRDGDWMLVGDVPWEMFVNSCKRLRIMKGSEAIGLAPRAVEKCKSRS

SEQ ID NO: 46635 - protein, 179 aa, Yarrowia lipolytica CLIB122
MGKDTKEAKDGKDKKEKKEKSMKAREGRDNQVYSASGSRVVAGCVCVNNDSSQVLMISSAAHPNRWILPKGGVEKDELSVEGDFSESAVRETWEEAGVTGKISKYLGKYDDMRKPIEYKDSLIPKTEFHFYEMEVENLADVWPENRKRKWAGFEEAKADLTKAKRLELIEALKDSSLKR

SEQ ID NO: 46636 - protein, 273 aa, Vibrio parahaemolyticus RIMD 2210633
MERVGIIQMTSGPDIQANLDFIDQQCTLAANQGVKLVLTPENAVLFASREEYHQHAEPLGSGAIQERLANIAKSHQLTLVVGSMPIQTARGVTTTTLVLPPHGKCIAHYDKLHMFDVDVEDGHGSYRESDTFTAGNQIVVAETDIGSVGLSICYDVRFPELYKALRLAGADTIVVPAAFTAVTGQAHWEVLLRARAIETQCWILASGQAGTHSCGRKTWGHSMVIDPWGRIHKQLQDQVGLLVAEIDLSQTQQVRQNMPLTQHSRFQNELRRK

SEQ ID NO: 46637 - protein, 351 aa, Oceanobacillus iheyensis HTE831
MKAAVWYGKHDIRVENKEEPIIKPGKVKIKVAWTGICGSDLHAYHGAEGVVQVGEPHPVTGEMAPLTLGHEFSGVIHEIGEGVSGLSVGDRVAIEPAIKCGKCENCVRGNYNLCEHNGFVGLQSDGAFAEYAIVDPHMVHKLPDNISFEEATAIEPTAVSFHALKLSNMKAGDTVAVFGVGPIGLTAILCAKAAGASRIYAIDVSNERLEMAQKLGATTVINAIEENAAEKIYAETGSGVTIAFDCAGAEATVNSAIDSLAKGGQLVIVSIIPEPIKVNLLQANLKEINILATIGYRDVYKDVIAMVESGQLDLKPIITKKIGLDDIIEEGFHALTNDKSQAKILVSPTGV

SEQ ID NO: 46638 - protein, 629 aa, ASPERGILLUS NIDULANS FGSC A4
MDAKPQRIRVRGDENAPFPLAATKTLHQRTKSTTALSATFQNGASKNGARRAAFGDVSNTASLVHGNRDDASLAGRKPSKLLEKGSMATEKKSTALSQPAQRPVSMSGFKGLLNNVTNPKPLEVTKQAAGQQQSTNSRKTLNKRATVFKDHLEPLTESKELTSKESKPEPKEGNMKGHSKPSLGEHLQKDGKVEGTVSLNEKLESEMCKLEVLLSQPGAEEDEKEFPDLEDDDCKVQPMPKQTGEAHIAADSNGPAISSRVTCKSTTVSRASQDDLPHQSEPEEYWDDDDEENEEDDYITARSYRSRSENTTGGATTLLFPRYNQQVKRELALAKQIVEATRTVEDIEDDYCDTSMVAEYSEEIFEYIREQEIKMLPNAHYMDNQAEIQWSMRSVLMDWLVQVHHRFSLLPETLFLCVNYIDRFLSCKIVSLGKLQLVGATAIFIAAKYEEINCPSVQEIVYMVDGGYTVDEILKAERFMLSMLQFELGFPGPMSFLRRISKADDYDLETRTLAKYFLEVTIMDERFVGSPASFLAAGAHCLARLMLKKGTWSPAHVHYAGYTYSQLYPLVSLIVECCEMPRKHHSAIYDKYNDRRFKLASAYVEAEMRKNFRLPEPAIDRKTTLGQGH

SEQ ID NO: 46639 - protein, 250 aa, Desulfovibrio vulgaris subsp. vulgaris str. Hildenborough
MARLILLRHGQSAWNLENRFTGWTDVDLSPAGEAEALAAARLIRDEGLDFSVCHTSMLTRAIRTLHLVQQELDRLWTPVRKHWRLNERHYGALQGLDKRETAARHGEDQVFVWRRSYDVPPPVIAPDDPKHPVHDPRYADVPPDVLPCGESLEATVARVLPYWYDAIAPDLMAGRDVLVAAHGNSLRALVMHLDGLDREDVSRLDIPTGLPRLYELDAALRPVSYRYLGDPAEAEERARAVAAQGRLEKN

SEQ ID NO: 46640 - protein, 669 aa, SYNECHOCOCCUS SP. WH 8102
MVAAPASLDTLCINSIRMLAVDAINKSKSGHPGLPMGCAPMGYALWDKFLKHNPKNPKWFNRDRFVLSAGHGCMLLYALLHLTGYDSVSIDDIKQFRQWGSKTPGHPETFETPGVEVTTGPLGAGISNAVGLAIAESHLAAKFNKPGATLVDHYTYVVMGDGCNQEGIASEACSLAGHLKLGKLIAFYDDNHITIDGRTDVSFTEDVLKRYEAYGWHVQHVADGNTDVDAIAKAIEAAKAVTDKPSIIKVTTTIGYGSPNKGDTAGVHGAPLGEDETVLTRQQLGWEYGPFEVPQEAYDQFRQAIERGASLEAEWNQTLATYRTQFPAEAAEFERMLRGELPEGWDKDLPTAGPDEKGLATRKHSQICLGALGPNLPELIGGSADLTHSNYTDIKGETGSYQPETPEKRYLHFGVREHAMAAILNGIAYHDSGLIPYGGTFLVFADYMRGSMRLSALSELGVIYVLTHDSIGVGEDGPTHQPIETIPSLRAMPGMLVFRPGDANETSGAYKLAIQNRKRPSALCLSRQGMANQANSSIDKVAKGGYVLEDCDGTPELILIGTGTELDLCVQAAKQLTEAGKKVRVVSMPCVELFDEQSDAYKEKVLPNAVRKRMVVEAAESFGWHRFIGLDGDSVTMNRFGASAPGGTCLKEFGFTVENLVAKASALLA

SEQ ID NO: 46641 - protein, 556 aa, Cryptococcus neoformans var. neoformans B-3501A
MSYRPSQQQQPGPSNFQQQQQNMLNPQNMAGPGRTSPMPTVPQVSQPNIGQPGSMRPGEGPTPAVAQANAGGQIQGNGAEGLGSLASDKGPDYVYFERKPGQFSEAVQGKAMGAKMKLELFYKEAVEGVVGRKERRTALEKQLAADALTPDSLKARQLINLGRRESNYLRLRRTRIGLDDFRTVKVIGKGAFGEVRLVQKADTGKIYAMKTLRKNEMFKKDQLAHVRAERDVLAESNSPWVVQLYYSFQDTQYLYLVMEFLPGGDLMTMLIKYDTFSEDVTKFYMAECILAIEAVHNLGFIHRDIKPDNILIDSLGHIKLSDFGLSTGFHKQHDSAYYQRLLGGGDVSGSNRHSQTAAGARNSVMVNAINLTMTSKQDIATWKANRRKLAYSTVGTPDYISPEIFLQQGYGKECDWWSLGAIMFECLVGYPPFCSENAHDVYKKIIDWRNYLFFPDDVHLSREAEDLIRRMLCEADRRYTVEQLKAHPFFYGVDWATIREIDAPFVPHLRSITDTSYFPTDELDQVPDIPVGAETGSDAKKDLAFLGYTFRRYEML

SEQ ID NO: 46642 - protein, 199 aa, Arabidopsis thaliana
MSFTGTQQKCKACEKTVYAVELLSADGVGYHKSCFKCTHCKSRLQLSSYSSMEGVLYCKPHFEQLFKESGSFNKNFQSPAKSADKSTPELTRTPSRVAGRFSGTQEKCATCSKTVYPIEKVTVESQTYHKSCFKCSHGGCPISPSNYAALEGILYCKHHFAQLFKEKGSYNHLIKSASIKRSAAAAVAAGVPAASVPES

SEQ ID NO: 46643 - protein, 415 aa, SYNECHOCOCCUS SP. WH 8102
MVDGLHRVVVTGLGAVTPIGNTVQDYWSGLISGRNGVDAITLFDASAHACRFAAEVKDFDPAGLIEPKEAKRWDRFCKFGVVAAKQAIADAGLTISDANADRIGTMIGSGVGGLLTMETQAHVLEGKGPGRVSPFTVPMMIPNMATGLAAIALGTKGPSSAVATACAAGSNAIGDAFRLLQLGKADAMVCGGAESAITPLGVAGFASAKALSFRNDDPATASRPFDKERDGFVIGEGAGVLVLETLEHAQARGATILGEVVGYGMTCDAHHITSPTPGGVGGAEAMRLALADGGIDPSEIDYVNAHGTSTPANDKNETSAIKSALGDRALQIPVSSTKSMTGHLLGGSGGIEAVACVLALQHGVVPPTINHTNPDPDCDLDVVPNQARDQTLGTVLSNSFGFGGHNVCLAFKRAS

SEQ ID NO: 46644 - protein, 614 aa, Phaseolus vulgaris
DTLQHRLQALIEGARESWTYAIFWQHSYDYSGSALLGWGDGYYKGDDDKAKAKAKAKATSAAEQDHRKKVLRELNSLISGSSAASSDDVDEEVTDTEWFFLVSMTQSFVNGAGLPRRPSSTPTPSGSPERPPLHLPLRESPPGQVFGLQTLVCIPSANGVVELGSTELIYQNPDLMNKVKVLFNFSNNNFDMGSSWPATSADQGENDPSTLWLNDPEVRDSINTAAATPSVSVSVPPHNSTHGISKTMQLESSIQTPGSSTLTETPSSIHAVPQNQSVFSRELNFSEYGFDPKSGNTHNQHSLKPESCEILSFSDSKRTSYGGGGGGGGVNGNSNSNSNFFSGQSPFVAVADENNNNNNGKRRSPNSRGSNDDGMLSFTSRAILPATNLKSAGGGDSDHSDLEASVVKDPVVEPEKRPRKRGRKPANGREEPLNHVEAERQRREKLNQRFYALRAVVPNVSKMDKASLLGDAISYITELKSKLQNLESDKDGLQKQLEGVKKELEKSSDNVSSNHTKHGGNSNIKSSNQALIDLDIDVKIIGWDAMIRIQCSKKNHPAARLMAALMELDLDVHHASVSVVNDLMIQQATVKMGSRFYTQEQLRSALSAKVGDVR

SEQ ID NO: 46645 - protein, 324 aa, Geobacillus kaustophilus HTA426
MKFVQFVEYGGPDVLRVCEGERPKPTGRQVVIEAEAIGVNYADTARREGRYVVPTPLPFIPGTEVAGVVREVGPEVQTIRPGQRVVALIESGGYAEFVAVDERAVVPLPDGMDARQAAALPVQGLSAYHILKTMGRLEEGETVLVHAAAGGVGTIAVQLAKRFGAKMVIATASTEEKRALAKQLGADVTIDYTKDSWAADVMEATGGRGVDVALEMAGGDVFHQTLDCLAPFGRLVVYGAASGEMTRLNPVRLMAKNWSVIGFFLPQIMKKRALYEQSLRELLAWVQEGSLKLMIGGVYPLEQASEVHRLLQGRKTHGKLLLVP

SEQ ID NO: 46646 - protein, 603 aa, Cryptococcus neoformans var. neoformans JEC21
MMLPRLPRRTVSAGSLAIVEGKGLFSFRPGAKLPRVFSTSIRQVPRQEKSKFTIWARRLAILGAGGGVVYIYDKEVNASALTRSLRTGYIGILCTLDYKINFAPSKADEIEALHTRVANRLRWVIDINQGLYLKLGQALGLQAALLPKPYREAFGHVFDRAPAVSYDEVVGVFIKDLGVKPEDIFQEFSRDPFASASVAQVHKAILKPGVGDERPGKIVAVKVQKPAIEKQMEWDLFSYRSLMWLSEKLFDMPMYFVAKYVSNQMRFETSFIHEASNARRCAEFLERTTELRGDVYVPRVYGKDEGCQESDRVMIMEWIDGCRLNDKEQLENWGLNLREVMDLAISTMSAMTFSWGFVHCDPHPGNILVRPHPTKKGKPQIVLIDHGLYIELPQQFREDYCRLWRSLFVIDIPTIESIAKKWGIALDPNLFASAILLRPFQVRKDKSRPKNDPKPTEEDKYQQQLELKRRLKTMLENERLIPRELIFLSRCQRMMQANNQILGSPSSRINLTAKWASIGYTRSLTNSRSLHNVGLTMWLRDRWDTFVFRFTLSIVNIAFWLTTLRQKLIPREKGSWEDRIQAQFEAMAKEEFGIEIDDQVFLG

SEQ ID NO: 46647 - protein, 578 aa, Bifidobacterium longum DJO10A
  misc_feature (16)..(228): Xaa can be any naturally occurring amino acid
  unsure (1)..(578): unsure at all Xaa locations
MFTTCTGQRRTTYTYXXXXXXXXXXXXXXXXXXXXXXXXXXXXXXXXXXXXXXXXXXXXXXXXXXXXXXXXXXXXXXXXXXXXXXXXXXXXXXXXXXXXXXXXXXXXXXXXXXXXXXXXXXXXXXXXXXXXXXXXXXXXXXXXXXXXXXXXXXXXXXXXXXXXXXXXXXXXXXXXXXXXXXXXXXXXXXXXXXXXXXXXXXXXXXXXXXXXXXXXXXXXXXXXXXXXXTICADKGYGAVVGAVMVGGLLELVLGLTAKYWRRFVPPIVSAIVVTSIGFSLLNVGATSFGGGSGAKDFGSWQNLTLGLISLVACLAFQLLMKGTAKQLSVLFGLVVGYVAAICMGKVDFSGFQNLAIVSVPQFMPFKPEFDWGSIISIGLLYVVSSVEVLGDTAALTKVGLNRTPTERETAGAIAGDGLISTVSGLFGCLPLTSFAQNIGLVAMTKVVNRKVILSGGLILVLASFVPAIAEVFNSLPQAVLGGCTIMMFGNIILSGFQMIAEAGFTQRNITIAALSLTIGIGFTQVSDIFTQFPALFQQIFASNCIAVAFVVAVILNAVLPSEEHFLSAPKEAPAADAE

SEQ ID NO: 46648 - protein, 85 aa, Oryza sativa
  misc_feature (34)..(34): Xaa can be any naturally occurring amino acid
  unsure (1)..(85): unsure at all Xaa locations
MSCCGGNCGCGSGCQCGGGCGGCKMFPDVEATAXTTKTFVLAAPSNKASSGGMEMAVESGENGGCGCNTCKCGTSCSGCSCCSCN

SEQ ID NO: 46649 - protein, 461 aa, Agrobacterium tumefaciens str. C58
MNIMQPLRADATAVADPQADISARLERLPITREVFWARNIVGAATFFDGYTVIAIAYAMPVLVREWGLTPSQTGMILSMGYLGQLIGAILFGWLAERIGRLKVLLFTILLFVSMDVACLFAAGAGMMMAFRFVQGIGTGGEVPVASAYINELIGSKGRGRFFLLYEVMFLLGLVGAGLIGYFMVPLYGWKAMFIVGLVPAMLMIPLRWFLKESPRWLAATGRYDEANVIVKRMEESARAAGKALPEPRIIATPAKRVSDWRELFQGIYLKRTLSIWAMWFCAYMVANGTITWLPTLYRQTFNLPLETSILYGFMTSAAGVVAAVICALLIDKVGRKRWYAGALLLAPVPLAILAWLGATSPMQVLIFAGLAYAIVQTVTFSLYLYSAEIYPTRMRAIGTGAGSAWLRLGSSAGPMLVGFVMSSMGIQYVFATFAFILIIGAVVTMLFAVETKGKVLEELSP

SEQ ID NO: 46650 - protein, 449 aa, Bacillus cereus ATCC 10987
MKTKQTDELLAKDEQYVWHGMRPFSPNSTMVGAKAEGCWVEDIQGKRYLDGMSGLWCVNSGYGRKELAEAAYKQLQTLSYFPMSQSHEPAIKLAEKLNEWLGGEYVIFFSNSGSEANETAFKIARQYYAQKGEPHRYKFMSRYRGYHGNTMATMAATGQAQRRYQYEPFASGFLHVTPPDCYRMPGIERENIYDVECVKEVDRVMTWELSETIAAFIMEPIITGGGILMPPQDYMKAVHETCQKHGALLISDEVICGFGRTGKAFGFMNYDVKPDIITMAKGITSAYLPLSATAVKKEIYEAFKGKGEYEFFRHINTFGGNPAACALALKNLEIMENENLIERSAQMGSLLLEQLKEEIGEHPLVGDIRGKGLLVGIELVNDKETKEPIDNDKIASVVNACKEKGLIIGRNGMTTAGYNNVLTLAPPLVISSEEIAFVVGTLKTAMERI

SEQ ID NO: 46651 - protein, 585 aa, ASPERGILLUS NIDULANS FGSC A4
MDKDFLKGNPERSTSSDSTPVYGESTSRRASLGQRVLGSFQRDPNAHVTAFASFSDGKTYDIENATEKAANSPLHRSLRGRHLQMIAIGGSIGTGLFVSSGRVLATGGPASLLIAYALIGCMLYCAVHALGEMAVIFPVAGSFAHYSTRFIDPAWGFAMGWNYALQWLAILPLEIVAAAITVDYWESNISSAVWVALFWAAIVSINLFGVKGYGEAEFVFSSIKVIAVIAFIILGVILNCAGGQNGSYIGVKYWHDPGAFHHGFKGLCDVFVNAGFAFAGTELVGLAAAETANPRKSLPTAIKQVFWRITLFYIVSLTLVGLLIPYTEPRLINGTSTVDTKASPFVIAIKNAGIEVLDSVMNVVIMIAVLSVGNSAVYGSSRTLAALAEQQQAPRFLGYIDRKGRPLWAICIASAMGLLGFLAATDKQEVAFEWMIAISGLSSIFTWGSICLAHIRFRRAWKVQGNSLHDLAFRSQPGIIGSWIGFAFNCLVLVAQFWVGFAPIDYETMSASMLARNFFSKYLAAPVVLLFYIPYKLRFKTKILRAKDMDLRTGRRELNIQWLMKEERAQQAAWPAWKKIYKFFC

SEQ ID NO: 46652 - protein, 785 aa, Yarrowia lipolytica CLIB122
MVDDVFKRNRSTSASAALTLGPGDDTTTAKDSGKEITFPQRLKSFFKFNNTNSPVANSGNGPDEEIAFPKYDPTPTIHVQGVPGASNTSPPPDDKETKSSFKQRFLRGRSPSTPSTKDTNTPDQHNQHHGSVPTVPDIPSEFAPKLHYPKHLAAHTPEDEAVDPMDSTKPVPVVDEWPVQPAHMSGSASPNSPNFHSPPSSPSPNNNSNNYNYNNNNSSNYGGLGVPGQHPRKNIRRVASEPNVKNAISNSHSHSGGHHQQHLPIIPAGSEDVRLQDLVREEQQHPSDPITDRDRTHSAPLNDGINHGNGSHGQNSRSGSATPQSRSRTNSKSFARTYSSNSIKVCDVEVGPSSFEKIRLLGRGDVGKVYLVKEKKSTKLYAMKVLSKKEMIKRNKIKRAFAEQEILATSNHPFIVTLYHSFQSNDYLYLCMEYCMGGEFFRALQTRERKCVAEADAQFYAAEVTAALEYLHLMGYIYRDLKPENILLHQSGHIMLSDFDLSKQSEQLGAPTIQSSTNVPQLDTKSCIANFRTNSFVGTEEYIAPEVIRGNGHTSAVDWWTLGILIYEMLFGMTPFKGKNRNLTFSNVLKQEVNFPSGSGYQSISSSCKNLIRKLLIKDEHKRMGSKAGASDIKNHPFFKNTQWALLRNQTPPLVPVPSRGADAVNFRTMKDSSSVDFVTDKKQDKSISSVLSVNTDRSSTNSVAGPRSYGREGDYDPFQNFNSVTLHHVGADSEGEDDDGDITITNQDIPHTFQPNPAKSPNMKNSSGFFFGGQKDKLWKTNRT

SEQ ID NO: 46653 - protein, 137 aa, Mirabilis jalapa
DSLSIPFVGSTFRSAIGNELPPGSEMSTTSCIDESGYLQSIENVDQTNQPTRTFVKVHKMGSFGRSLDISQFSSYQELRSELARLFGLENELKDSPRSGSQLVFVDRENDVLLLGDDPWQEFVKTVGHIRILSPQEV

SEQ ID NO: 46654 - protein, 137 aa, Brassica napus
PSLYNESYYRPEKPRRYGVTEMRGPRYSVLSQNVLQEIFESMGQFVDGLKFSGGSNSLIPKSFIKQAIEMAHEHDVYVSTGDWAEHVLRSGGPSAFKEYVEECKQLGFDTIELNANSLEVPDDTPLRYIRMIKNGGL

SEQ ID NO: 46655 - protein, 464 aa, Bartonella quintana str. Toulouse
MVSSELKRGMSKRQVIFLALGSAIGTGLFYGSAQAIKLAGPSVLIAYCVAGLAIFMVMRALGEMIIHNPLPGSFARYAANYISPLAGFLTGWTYVFEMVLVGLADITAFATYMGFWYPDVAPWIWALSITLIITGINLAAVEVYGELEFWLSSIKIIAIIAIIVLGIAIIFCGWSISTVSSTVSIHNLWKNGGIFPHGWFGFLACFSVVIFAFGGIEIIGMAVMEVQDPTQTVSKAINSTPIRILLFYIMTLTILMSLYPWNEIGFMESPFVSIFERLGISSAAHILNIVVVTAAISAMNSGMYGAGRMIYGLSQEGYASKKFQYLSKNGIPIFVILLIFAIFLFGVVLNYFYHDRLFFLIAAMATFATVFVWMMILLSQVFMRLKMPKEVQCSLKFPIPFWPIGSIFSVLFIVFIFVLLWFFDDTRPVLIVGVSWISWLVICFYALQFYNSKKNKMHPYTNKD

SEQ ID NO: 46656 - protein, 164 aa, Zea mays
INKNRIFEIAPGAKQMFSFLRDAGDAPLEKHPKLKAHAVTVFVMACESATQLRSTGDVKVREATLKRLGATHARAGVADAHFEVVKTALLDTIRDAVPDMWTPEMKAAWEEAYDQLAAVIKEEMKNAAAAEEQTKNAATAEEEIKNAAAAEEETTNAAAAVDGS

SEQ ID NO: 46657 - protein, 327 aa, Listeria monocytogenes str. 4b F2365
MSIVVLGGAGYIGSHAVDELITRGYEVVVIDNLRTGHKESIHTKAKFYEGDIRDKAFLSSVFEKEKVDGVIHFAASSLVGESMEVPLVYLNNNVYGTQIVLEVMEQFGVKHIVFSSSAATYGEPERVPITEDMPTNPESTYGETKLIMEKMMKWCDKAYDMKYVALRYFNVAGAKADGSIGEDHKPESHLVPIILQVALGQREKLAIYGDDYNTPDGTCIRDYVQVEDLIDAHIKALEYLKNGGESNIFNLGSSNGFSVKEMLEAARTVTGKEIPAEVVPRRAGDPGTLIASSDKAREILGWEPTYTDVKDIIATAWKWHVSHPNGY

SEQ ID NO: 46658 - protein, 474 aa, Ureaplasma parvum serovar 3 str. ATCC 700970
MFSKTRIIATVGPATTKLFSNWLEFNDLNNINDAQQVCINIKDLILSGVNIFRMNLSHGDQKIHLFRTQLIKKIADELKIKVEILFDTKGPEIRVCEMSDNNFIIKNSEVIIHCKEKVLGSFNEFSVTDATGQYNMISDVKINHRILIDDGKLILIVKKIDFLKNIIYTTAKNSYSLKTNKRLNLPDANYSLPFLSKKDIDDINLAVKLKIPYLALSFISNIKQINEVKQLLKKSSFIPKLIAKIETQEAIDNLEEIIKNTDGIMVARGDLGLEVPFYKIPIYQNKIVELCHKYNKYCIIATQMLDSLERNIIPTRAEVTDVYYAVKQKVNATMLSGETAAGIDPINAVQVMKSIILETENNNIENEITFKKNELLIPKEVKLKILSFHKLKINKHKLLVVNLISKNSKHLVYDILKYDFNFNILFVIDKNQEHDLLLKNANFIISENKMLKQEELLKSFNIDFNNHEFLFISI

SEQ ID NO: 46659 - protein, 365 aa, Synechococcus elongatus PCC 7942
MTVVIYYMTVLCKAFDCFNSSAVENTMIRIRNRWFRWLAIALASLVASIGIATVGFAATGVTPDQVLSAIEGTFGVNVGQRRNHIKGTCAVGNFVATTEAKTYSRSPLFSGQSIPVVARFSLAGGNPKAPDTAKNPRGLGLQFQLPNNRFLNMALLNTPVFGVASPEGFYENILAIRPDPTTGKPDPEKVKAFREKYPENKAQAAFLASNNPPTSYANTSYFGLHAFKFINQTNQTRLVRWQFVPQDGEKRLTDAELQAAPANFLEQKLIERTQDSPVKWDFWITLGQPGDAEDNPTIAWPSDRQQVKVGTLTLTAASPQPGAACEGINYDPLVLSDGIEPTNDPVLQFRSGVYALSYSKRTRGL

SEQ ID NO: 46660 - protein, 664 aa, Photorhabdus luminescens subsp. laumondii TTO1
MTTRKTLANAIRFLSMDAVQKAKSGHPGAPMGMADIAEVLWRDYLNHNPTDPHWVDRDRFVLSNGHGSMLIYSLLHLTGYDVSVDDLKNFRQLHSKTPGHPEYGYTPGVETTTGPLGQGIANAVGFAIAERTLAAQFNRPGHEIVDHNTYVFMGDGCMMEGISHEVCSLAGTLKLGKLVAFYDDNGISIDGHVEGWFTDDTASRFEAYGWHVIRGVDGHNADSVKAAIEEARKVTDKPSLLMCKTIIGFGAPTKAGTHDSHGAPLGDAEIAATREALGWNYPAFEIPAEIYSEWDAKEAGNVKQAAWNEKFAAYEKAYPELAAEFKRRTSGELPANWEVESKAFIEQLQKNPANIASRKASQNALEAFGKVLPEFMGGSADLAPSNLTMWSGSNPLNEDQAGNYIHYGVREFGMSAIMNGIALHGGFVPYGATFLMFVEYARNAVRMAALMKIRSIFVYTHDSIGLGEDGPTHQPVEQLASLRVTPNLSTWRPCDQVESAVAWKYAIDRKAGPSALIFSRQNLAQQERTAEQLANIEKGAYILKDCQGQPELILIATGSEIELAVSAYHQLTEEGRQVRVVSMPSTDAFDKQDAAYREAVLPAAVSARVAVEAGIADYWFKYVGMNGAIVGMDTFGESAPADQLFKTFGFTVENVVAKAKALLK

SEQ ID NO: 46661 - protein, 463 aa, Bartonella quintana str. Toulouse
MGSFDFDLFVIGSGSGGVRAARLAGGLGKRVGIAEEYRIGGTCVIRGCVPKKLYVYASQYAQEFKKSVGFGWEYADPIFSWKKLVAAKNKEISRLEELYRKGLQNNNVHIYESRAVFVDEHTLELSVTGERISAEKILIATGAKIVPNTAIKGSDLCLTSNEIFDLEKLPKSIIIVGGGYIGVEFANIFHELGVKTTLLHRGNLILRNFDYDLRQLLNDAMIEKGISILYGASISQVQAIGSSYNIVLSSGQMISADQVMFATGRVPNTTGLGLEQAGVKLNEFGAVIVDERMTTNIPHIGAVGDVTGHIQLTPVAIHDAMCFVKTVFENTPTKPDYDLITTAVFSQPEIGTVGLSEEDAARRYKHLEIYRTVFRPMRNVLAGSSEKMFMKLVVDSESRIVVGAHILGENAGEMAQLIGISLKGKLTKDIFDETMAVHPTMAEELVTMYKPSYLYENGEKVEK

SEQ ID NO: 46662 - protein, 540 aa, Oryza sativa
  misc_feature (246)..(246): Xaa can be any naturally occurring amino acid
  misc_feature (295)..(295): Xaa can be any naturally occurring amino acid
  unsure (1)..(540): unsure at all Xaa locations
MDRARLAVLSAHLASPAAACGEADAAGPLERSAASAGARGGALAVVDGRTGKRYEVKVSDEGTVRATDFKKVWRFLIVILVDFDEVAAYPFVHNEVILNLLVLACDFVVVITTGKDDKGLKIYDPGYLNTAPVRSSICYIDGDEGILRYRGYPIEELAESSSFVEVAYLLMYGSLPTQSQLAGWEFAISQHSAVPQGLLDIIQAMPHDAHPMGALASAMSTLSVFHPDANPALRGQDLYKSKQVRXDKQIVRVLGKAPTIAAAAYLRLAGRPPILPTNSLSYSENFLYMLDSLGXKEYSQTPRLARVLDILFILHAEHEMNCSTAAARHLASSGVDVFTALSGAVGALYGPLHGGANEAVLKMLNEIGSVENIPDFIEGVKNRKRKMSGFGHRVYKNYDPRAKVIRKLAEEVFSIVGRDPLIEVAVALEKAALSDDYFVKRKLYPNVDFYSGLIYRAMGFPTEFFPVLFAIPRMAGWLAHWKESLDDPDTKIMRPQQVYTGVWLRHYTPVRERVPASQGEQLGQIATSNATRRRRAGSAL

SEQ ID NO: 46663 - protein, 530 aa, Lactococcus lactis subsp. lactis Il1403
MCGFLFMETSDLTIEEFKSNLELIEHRGPDDQQHVRDTLGNDFGFCRLSIMDLSDLGRQPFGLNGKRVMCNGEIYNFLSLRKFLETKGYKFTGDSDCEVLLPLFETTGIETMVKMLDAEFAFVLVDENTAEIFAARDPFGIRPLFYGYNKVTGKISFSSEAKALISTCNDVTPFPPGYYYANGEFHVFNDIAEVSTIVEEPLAEISGHIRRKLERAVKKRLHADAPMGYLLSGGLDSSLVCAIAAKELESPIKTFAIGMETDPIDLKYAREVADFLRTDHTEILMTKEDVLSAVREVIWHLETWDITTIRASIGMYLICKYIHENTELKVLMTGEVSDEMFGYKYTDFAPSAGAFQKEAQKRVHELYMYDVLRADRCLAAHSLEARVPFADLDFAAYVMSINPSRKLNTYGKGKYLLRHAFEGTELLPDEILFREKAAFSDAVGHSMVDYLKEFADEKYSDEDLAKASEKYPKHTPFTKESLMYREIFEEFYPGYEDWILDFWMPNRDWVGAEVTDPSARVLSNYGDSGK

SEQ ID NO: 46664 - protein, 457 aa, Lactococcus lactis subsp. lactis Il1403
MNTNQNEENKPSQRGLKNRHIQLIAIAGTIGTGLFLGAGKSIHLTGPSIIFVYLIIGALMYILLRAIGEMLYQDPNQHSFLNFVSRYLGEKPGYFIQWSYLLVVVFVAMAELIAIGTYINFWLPDLPIWMTEVFVLVLLTLLNTLNPKFFGETEFWFGMIKIVAIIGLILTAIILIFSHYHTGTDTVSVTNITKGFEFFPNGLSNFFESFQMVMFAFVSMEFIGMTAAETDNPRPTLKKAINQIPIRIVLFYVGALLAIMSIYQWRDIPADKSPFVTIFQLIGIKWAAALVNFVVLTSAASALNSALFSITRNLYSLSKLNNDKILKPFTKFSKAGVPVNALLFTSLLILFTPFISMIPAISNSFVFITSVATNLFLVVYLMTLITYLKYRKSSDFDPKGFVLPAAHIFIPLAIAGFVLIFISLFCFKDTIVPAIGSVIWVLIFGLFTFFKKIKTAE

SEQ ID NO: 46665 - protein, 459 aa, Lactococcus lactis subsp. lactis Il1403
MENLQEKHEAQRGLQNRHIQLIAIAGTIGTGLFLGAGKTIQMTGPSVIFAYILIGIAMFFFLRTIGEMLYNDPSQHSFLNFVTKYSGVRTGYFTQWSYWLVIVFVCISELTAIGTYIQFWLPQVPLWLIEIVMLALLFGLNTLNSRFFGETEFWFAMIKVAAIIGMIVTAIILVAGNFHYSTVLSGKTVHDSASLSNIFDGFQLFPHGAWNFVGALQMVMFAFTSMEFIGMTAAETVNPKKSLPKAINQIPVRILLFYVGALLAIMAIFNWHYIPADKSPFVMVFQLIGIKWAAALINFVVLTSAASALNSSLFSATRNMYSLAQQHDKGRLTPFTKLSKAGIPINALYMATALSLLAPVLTLIPQIKNAFDFAASCTTNLFLVVYFITLYTYWQYRKSEDYNPKGFLTPKPQITVPFIVAIFAIVFASLFFNADTFYPALGAIVWTIFFGLYSHYKKI

SEQ ID NO: 46666 - protein, 384 aa, Oenococcus oeni PSU-1
MQKVFILSAVRTPIGKFGGVLKNKTAVELGATVIKSLLKRSEISAEEIDEIYMGNVIQAGVGQNPARQSARLAGIPFSIPSTTINDVCGSGLHSINLAAKLIAGGFDDIIVAGGMESMSNAPFLLKNHRFGHKLGNEKIDDTLLRDALIDPIGNFHMGITAENIAERYSISRQSMDRYALESHSRAVRAEKKGLFNDEIVAVDQVKQDQAPRADTSLEQLSKLKAVFKEGGKVTAGNASGINDGAAGVILASERKVGELNLNPLAEWKFGNAVGVNPEIMGIGPVFAINDLYKKNNLSDQDIDLYELNEAYASQMLVDTSELHLNLNKVNPNGGSIALGHPVGASGARILVTLLYDLIHEEKKRGIASLCVGGGMGVSTMIEKI

SEQ ID NO: 46667 - protein, 603 aa, Methanosarcina acetivorans C2A
MSKKTDVVKEYTRIDSKRGLSITTGANRMKLFDRRVLELGRGEYGKLWNVIILGLLISFSYIVQGLLIAVILNGVFAGTPLHESRLYFAAVALLIVLRWIMIRENDRIAARTASNIAMSLRRRMYHKLYELGPGWIMTQKSGVIQATLVDGAEALQNYYGRFLPQVVVSIAAGISIVAILFYVDMTIGLVIGGMMIAALIQPLAIYKGVGKGIRIWFVAMPRLFAEYVDNIQGIVTLKSFNASQRQGKILYQRTNDLYDAEIGILRDEILWSVPPGLVAAICGTVAIIIGAIRMDAGALSAAGLLFVLLLVREALRPVTDLRQTIHFSFSGMGAAEGVLDILEATPLAAVTARPTPSSIPHSFAFEDVTFRYRKTDASAVENLSFKVEPGDKVALVGRSGSGKTTVTSLLMRYFDPQAGIIRLGGEDIRHIPADELHAMYSIVSQDTFLFHGTVRDNLLMAKPEASQEELERAARAAAAHKFIATLPDSYDTLIGERGVRLSGGERQRIAIARAILKDAPILILDEATSSVDVANETLIREAIAGLAHDRTTLLISHRLSAVRDADRIYVLEKGRLMEAGTHSKLVGCNGNYSALVRAEEECI

SEQ ID NO: 46668 - protein, 142 aa, Oryza sativa
  misc_feature (118)..(118): Xaa can be any naturally occurring amino acid
  unsure (1)..(142): unsure at all Xaa locations
MSNIDAEDAQFQKEVQEVKQWWSDSRWRFTRRPFTAEDIVSKRGNLKITYPSNSQSKKLWQIVEGRFKNKDVSFTYGCLDPVMVTQMAKYLDTVYVSGWQASSTASSTDEPGPDLADXPYTTVTKKVGHLLLGQIFHERKHA

SEQ ID NO: 46669 - protein, 290 aa, SYNECHOCOCCUS SP. WH 8102
MDTYCWSHLGHAVHTVHQQPEQDYSDRPALLLVHGFGASTDHWRYNIPVLAKTHAVHAIDLLGFGRSSKPAELAYGGPLWRDQLVAYVQERIGRPTVIAGNSLGGFAALAAGAELKQDCAGVVLLNAAGPFSDEQQPPKGWAAIARQSIGSALLKSPVLQRLLFENLRRPATIRRTLNQVYVDKTNVDDWLVESIRRPSLDPGAFGVFRTVFDIPRGQPLDELFAELTAPLLLLWGMRDPWINAPGRRATFQRHAPAATTEVVLDAGHCPHDEVPDQVNASLLDWLAGLT

SEQ ID NO: 46670 - protein, 387 aa, Conidiobolus coronatus
VGVKFWDVISSEHGIDPSGEFHGDSDLQLDKINVYYNEVENNRYVPRAVLVDLEPGTMDAVRTGPLGSLFRPDNFVYGQNGAGNNWAKGHYTEGAELVDSVLDVVRKEAENCDCLQGFQITHSLGGGTGAGMGTLLISRIREEFPDRMMCTFSVLPSPKVSDTVVEPYNATLSVHQLVENSDETFCIDNEALYDICFRTLKLSTPTYGDLNHLVSLVMSGVTTCLRFPGQLNADLRKLAVNLIPFPRLHFFMVGFAPLTAAGSKDYRSLSVPELTQQMFDSRNMMAASDPRHGRYLTVSAMFRGRLSMKEIDDQMLAIQNKNSAYFVEWIPNAVKTAVCDIPPKDLKMCSTFIGNSTAIQELFKRIAEQFTAMFRRKAFLHWYTGEG

SEQ ID NO: 46671 - protein, 387 aa, Basidiobolus ranarum
IGNKFWDTISAEHGIDKDGAYVGDSDLQLERIDVYYNEAAQGKYVPRAVLVDLEPGTMDNIRASDLGTLFRPDNYIYGQSGAGNNWAKGHYTEGAELVDSVLDVVRKEAEGCDSLQGFQITHSLGGGTGSGMGTLLISKIREEFPDRMMCTFSVVPSPKVSDTVVEPYNATLSVHQLVENSDLTFCIDNEALYDICFRTLKLTNPTYGDLNHLVSNVMSGTTTSLRFPGQLNGDLRKLAVNMVPFPRLHFFMVGFAPLTARGSQGFQALTVPELTQQMFDAKNMMAASDPRHGRYLTVAAMFRGRMSTKEVENQMINVQNKNSSYFVEWIPNNIKTSVCDIPPKGLKMSATFVGNSTAIQELFKRVGEQFTAMFRRKAFLHWYTGEG

SEQ ID NO: 46672 - protein, 645 aa, Candida glabrata CBS138
MKDSDMTNMEEIQRNNSYPSNSDKDYEDEKGSGSPVINEFSKVDQISTAQSEMDEKMAEQTEQQRTMTGVKNIIIRKTEIMAEVYDKWYYHAILLFTAFVCGYGYGLDGNTRYIYTGYATSSYAQHSLLSTINVINAVISAASQIVYARLSDVYGRFALFCVSIVLYSVGTIIQSQAYDVQRYAAGSIFYNTGYVGVILVLLLILSDFSSLRWRLVYQFVPTWPFIINTWISGNVTSRANPLKNWSWDIGMWAFIFPLSCVPLLCVMIHMWWLARKTEEWQELSKEKTFYQKHGLKDTIVELFWKIDAMGVFIMTISLGCILVPLTLAGGTKSKWNNSHVIGPFVLGFVLIPILVLWEYKFARDPIIPYKLVKDRGVWASFAISFLIDFIYYMAADYLYTVLIVGVNESVKSATRISSLSTFVSTVGSPIFSLLITRFSRLKPFIICGCGLWMLAMGLLYHYRGGAESHSGIIGALCVWGVGTTLFTYPVNVSVQAATSHEHMATVTALNYTFYRIGSAVGAAVSGAIWTQTLYKQLLKRVGDAALATEAYASPYKFIVTYTWDTPERQAVVQAYRYVQRLETIVALVFCAPLLIFSLCLRDARLTDKVAHDNIAEGEYVDAKDDDPIYEWFKGATTRFRRKSKE

SEQ ID NO: 46673 - protein, 553 aa, Oenococcus oeni PSU-1
MKDGTISDFANKVVYQVYPKSFKDSNNDGIGDLQGIIENLPYLAKLGIDYLWLNPIFPSPQRDNGYDISDYRAIDPIFGTMNDFKELVSKAAEHKISIMMDMVFNHTSIAHQWFQKALAGDKKYQAYYILRPKKADGSTPNNWQSKFGGSAWASFGDSDLDYLHLYDISQADLNWRNPEVVSEVNHVLKFWLDKGVKAFRFDVINVIGKDRKLLDDPTGGDGKAMYTDKPIVHDYLQNMYRDVFAKENNIMTVGELSSTSVENAVEYTAPGRHELSMAFTFHHLKVDYQNGNKWTKVPYDFQKLRQVLHQWGKGLSDGNGWPAWFWNNHDQPRAINRFVSNPKYYRLGAEMLAAVVHLNRGTPYIYMGEEIGMINPDFKSIDSYVDVESHNAYKELLKKGTSASEAFQIVKSKSRDNSRIPMQWNSEKYAGFSRHKPWLANGNYKDINVAKDLSDPNGLFSFYQRLILLRKQEKVIAKGDYQPFFPDIPEIIAFKRQFQEDSLLVINHFGEEKITLSLPVESLGGKIILSNYSNTKIARQITLKPYETLAIKY

SEQ ID NO: 46674 - protein, 380 aa, Arabidopsis thaliana
MLPNEELVPVKRITPQSSWSWISIDATGKKTVLDVDKYVIMHRVQIHARDLRILDPNLFYPSAILGRERAIVLNLEHIKAIITAKEVLIQDSSDENLIPTLEEFQTRLSVGNKAHGGQLDGDVVEEDESAFEFRALEVALEAICSFLAARTIELEKSAYPALDELTLKLTSRNLLRVCKLKSSMTRLTAQVQKIKDELEQLLEDDEDMAELYLSRKLAGASSPAIDSGEHINWYPTSPTIGAKISRAKSHLVRSATVRGDDKNDVEEVEMLLEAHFMQIDRTLNKLTELREYVDETEDFLNIQLDSSRNQLIKFEIILTAGSICVSVYSVVVGILGMNIPFPWNIKKHMFKWVVSGTATVCAILFVTIMSFARYKKLFGF

SEQ ID NO: 46675 - protein, 387 aa, Basidiobolus ranarum
IGNKFWDTISSEHGIGKDGTYHGDSDLQLERIDVYYNEAGNGKYVPRAVLVDLEPGTMDNIRASDIGSLFRPDNFIYGQSGAGNNWAKGHYTEGAELVDSVLDVVRKEAEGCDGLQGFQITHSLGGGTGSGLGTLLISKIREEFPDRMMCTFSVVPSPKVSDTVVEPYNATLSVHQLVENSDMTFCIDNEALYDICFRTLKLTNPTYGDLNHLVSNVMSGTTTSLRFPGQLNADLRKLAVNMVPFPRLHFFMVGYAPLTSRNSEGFQALTVPELTQQMFDAKNMMAASDPRHGRYLTVAAMFRGRMSTKEVENQMINIQNKNSSYFVEWIPNNIKTSVCDIPPKGLKMAATFVGNSTSIQELFKRVGEQFTVMFRRKAFLHWYTGEG

SEQ ID NO: 46676 - protein, 342 aa, Bacillus licheniformis ATCC 14580
MVKVYYNGDIKENVLAGKKVAVIGYGSQGHAHALNLKESGVDVIVGVRKGKSFAKAEEDGHQVFTVREAAEQADIVMVLLPDEQQQKVYEAEIKDGLQAGNSLVFAHGFNVHFHQIVPPADVDVFLVAPKGPGHLVRRTFEQGAGVPALFAIYQDVTGEAKDKALAYAKAIGGARAGVLETTFKEETETDLFGEQAVLCGGLTSLVKAGFETLTEAGYQPELAYFECLHELKLIVDLMYEEGLAGMRYSISDTAQWGDFVSGPRVVDEKVKESMKEVLKDIQNGTFAKEWIVENQVNRPRFNAINASENEHQIEVVGRKLREMMPFVKQGKKKEAVVAGAKN

SEQ ID NO: 46677 - protein, 387 aa, Capniomyces stellatus
IGVKFWETISAEHGIQNNGVYAGDNELQLERVDVYYNEANQGKYVPRAVLVDLEPGVMDVVRSGPFGQLFRPDNFVFGQNGAGNNWAKGHYTEGAELVDQVLDVVRKEAENSDSLQGFQITHSLGGGTGAGMGTLLISRIREEYPDRMMSTFSVVPSPKVSDTVVEPYNATLSVHQLVENSDMTFCIDNEALYDICFKTLKLRDPGYDDLNALVSMVMSGVTTSLRFPGQLNSDLRKTAVNLVPFPRLHFFMVGFAPLGDTKNASFRNITVPELTQQLFDSRNMMAASDPRHGRYLAVAAMFRGRVSTNEVENQMLQVQNKNASMFVEWIPNNVKTAVCDIPPVGMSMAATFVGNSTAIQELFQRVNEQFTLMFRRKAFLHWYTDEG

SEQ ID NO: 46678 - protein, 200 aa, Brassica napus
  misc_feature (29)..(29): Xaa can be any naturally occurring amino acid
  misc_feature (48)..(48): Xaa can be any naturally occurring amino acid
  unsure (1)..(200): unsure at all Xaa locations
KYDPKEEYIRQWLPELARLPTEWIHHPWXAPLPVLKASGVELGTNYAXKPIVDIDTARELLTKAISRTREAQIMIGAAPDEIVADSFEALEAANTVKEHGYCPSSNDQQVPSDVRYSGSKRVKPAEEEEEREMKKLRGFNEVIREEEERGLFSTAESSSSSSVRSVFMVSHSCSLVSEGKNLEGIQDSSDQIATSLGKNG

SEQ ID NO: 46679 - protein, 387 aa, Entomophaga maimaiga
IGAKFWEVISTEHGINPTGIYEGSDDQQLERINVYYNEANDGRYVPRAVLVDLEPGTMDVIRSSTYGACTRPGNFVYAQSGAGNNWAKGYYTEGAELVDNILEIVRKETENCDSLQGFQVAHSLGGGTGSGLGSLLISKIREEFPDRMMCTFSVVPSPKVSDTVVEPYNATLTVHHLVENADETFCIDNEALYDICFRTLKLTNPSYGDLNHLVSQVMSGVTTSLRFPGQLNADLRKLAVNLIPFPRLHFFMVGFAPLTAKDSKQYQSLTVPELTAQMFDAKNMMAASDPRHGRYLTVAAFFRGRLSMKEVEQQMVDVHKKNSNYFVEWIPHNIKTSVCNIPPSGLKMSATFIGNNTAIQELFKRVNEQFTSMFRRKAFIHWYTNEG

SEQ ID NO: 46680 - protein, 387 aa, Furculomyces boomerangus
IGNKFWETISAEHGINNDGTYVGDNELQLERIDVYFNEANQGKYVPRAVLVDLEPGVMDTIRSGKLGQLFRPDNYVFGQNGAGNNWAKGHYTEGAELVDQVLDVVRKEAENSDSLQGFQITHSLGGGTGAGMGTLLLSRIREEYPDRIMSTFSVVPSPKVSDTVVEPYNATLSVHQLVENSDMTYCIDNEALYDICFKTLKLKDPGYDDLNSLVSMVMSGVTTSLRFPGQLNADIRKTAVNLVPFPRLHFFMVGFAPLGDSKNASFRNITVPDLTQQLFDSRNMMAASDPRHGRYLAVAAMFRGRVSTNEVENQMLQVQNKNSSLFVEWIPNNVKTAVCDIPPVGLPMSATFIGNSTAIQELFQRVNEQFTLMFRRKAFLRWYTDEG

SEQ ID NO: 46681 - protein, 333 aa, Burkholderia vietnamiensis G4
MKAALDVVTYGEAMAMFVATEPGHLAHATQFTKRVAGADLNVAIGLSRLGFRVGWMSRVGRDSFGGYVLDTLAREGIDASCVTVDPQYPTGFQLKSRNDDGSDPTVEYFRKGSAASHLCCDDYVADYVLGARHLHLTGVAPAISATSCELAFKLAREMRAAGKTISFDPNLRPTLWPSAEAMATTLNALAALADWVLPGLAEGQQLTGRDAPADIAGFYLAQGARGVVIKLGPDGAYFRTADGREGTVAGERVANVVDTVGAGDGFAVGVVSALLEGKPIEQAVARGNRIGALAIQVIGDSEGLPTRAALDRLEGADAGAAHAERQEETVTAQ

SEQ ID NO: 46682 - protein, 179 aa, Oryza sativa
VYCLVSWTVGLPKRAPINSTLLKLLFPVALCHALGHVTSNVSFATVAVSFAHTIKALEPFFNAAATQFVLGQQVPLPLWLSLAPVVLGVSMASLTELSFNWTGFINAMISNISFTYRSIYSKKAMTDMDSTNVYAYISIIALIVCIPPAVIIEGPQLLQHGFNDAIAKVGLTKSFLTFF

SEQ ID NO: 46683 - protein, 387 aa, Rhizopus microsporus var. oligosporus
VGQKFWETISQEHSLEANGTYAGDNDLQLERINVFFNEGSQGQYVPRSVLVDLEPGTMDAVRSSPYGKLFRPDNLIFGQSGAGNSWARGYYTEGAELVESVMDVLRKEAENTDCLQGFQLCHSLGGGTGSGLGSLLLSKIREEYPDRMLCTYSVVPSPKVSDTVVEPYNAVLSVHQLVENCDATFCIDNEALYDICFRTLKLTNPGYPELNQLVSTVMSGVSTSLRFPGQLNSDLRKLFVNMVPFPRLHFFMVGFAPLTAFGSQQYRNLSVPELTAQMFDARNMMAASDPRHGRYLTVATIFRGRLSTKEVENQMLAVQQKNSSYFVEWIPNGVKTSLCDIPPVGLKMSGTFIGNSTAIQELFKRVNDQYSAMFRRKAFLHWYTGEG

SEQ ID NO: 46684 - protein, 460 aa, Bacillus licheniformis ATCC 14580
MHTLEKMEQTNFQTARDYVTQAYETVQKRNFYESEFLQAVKEIFDSLVPVLARHPKYIEHRILERIAEPERMITFRVPWVDDEGNIRVNRGFRVQFNSAIGPYKGGIRFHPSVNASIIKFLGFEQIFKNSLTGLPIGGGKGGADFDPKGKSDREIMSFTQSFMNELYRHIGPDTDIPAGDIGVGAREVGFMFGQYKKIRGRYDAGVLTGKGLEYGGSLTRKEATGYGLVYFVEEMLKDQGMRFENSTVVVSGSGNVALYAMEKAAQFGAKVVACSDSDGYVYDEKGICLETVKRLKEDGNGRIREYVSEHPEAHYFEGCTGIWSIPCDIALPCATQNEIDEEAAEVLISNGVKAVGEGANMPSEEGAVKRFLDAGVLFGPAKAANAGGVAVSALEMAQNSARLHWTAEETDAKLRAIMADIHKRSVEAASEYGRPGNLLDGCNIAGFIKVADAMIAQGVV

SEQ ID NO: 46685 - protein, 308 aa, Zea mays
MAASAGGGAVRALSQKEQDIQMMLAADVHLGTKNCDFQMERYVFKRRTDGIYIINLGKTWDKLQLAARVIVAIENPQDIIVQSARPYGQRAVLKFAQYTGAHAIAGRHTPGTFTNQLQTSFSEPRLLILTDPRTDHQPIKESALGNIPTIAFCDTDSPMRYVDIGIPANNKGRNSIGCLFWLLARMVLQMRGTILPGHKWEVMVDLFFYRDPEEAKEQEEEAAAAPEFAAVTDYQGADQWGGDQWTSDVAAPPVAPTGADWGAAPAPVPTGDGWDQTVAPVPVDGTVPPVVAPTGWESAAQPTAQGWE

SEQ ID NO: 46686 - protein, 361 aa, Trametes cervina
MAFQTLFALATLATTVLAVPSPLVSCGGGRSVKNAACCAWFPVLDDIQANLFNGGKCEEEAHEAVRLTFHDAVGFSLAAQKAGKFGGGGADGSILAFSDIETAFIPNFGLGFTTEGFIPFALAHGVSFGDFVQFAGAVGAANCAGGPRLQFLAGRSNISQPSPDGLVPDPTDSADKILARMADIGFSPTEVVHLLASHSIAAQYEVDTDVAGSPSDSTPSVFDTQFFVESLLHGTQFTGSGQGGEVMSPIPGEFRLQSDFALSRDPRTACEWQALVNNQQAMVNNFEAVMSRLAVIGQIPSELVDCSDVIPTPPLAKVAQVGSLPPGKSMADVQVACTNGMPFPSLPTSPGPVQTVAPVLG

SEQ ID NO: 46687 - protein, 438 aa, Bartonella quintana str. Toulouse
MSENKAHITVNNKKIELSVRKGTLGPGVIEIASLYKETDTFTYDPGFTSTASCESKITYIDGDKGILLYCGYPIDQLAEKGDFLESCYLLLYGELPTKQEKIDFDRCIMQHMMVHEQFTRFFHGFRRDSHPMAVMVACLGAMSAFYHDSIDIKDAQQRMIAAIRLISKVPTLAAMAYKYSIGQAFVYPRNDLSYAANFLHMCFSVPCEEYKINPVLSRAMDRIFTLHADHEQNASTSTVRLVGSSGANPFACIAAGVACLWGPAHGGANEACLKMLQKIGSVERIPEFIARAKDKNDPFRLMGFGHRVYKNYDPRAKIMQQTCHEVLKELNIQDDPLLDIAIALENTALNDEYFIEKKLYPNVDFYSGITLKALGFPTEMFTVLFALARSIGWVAQWKEMIEDPAQKIGRPRQLYTGYAAREYVSIDKRISKNKMTTQ

SEQ ID NO: 46688 - protein, 722 aa, Bordetella bronchiseptica RB50
MKVAKPAAKTAAKKTATKTVAAKTAAADKPAKTTKARAKKAEDKLADLVGAARPAPSGRRPGRPAKNANNDSDAFDDSMDGEGEVLPDLKPPKRGGKRGKADPKDLIARGPVSPEEYEARRNRLKQLIKLGKDRGYLTYGEINDHLPDDLVDAEAIDGIISTFSDMGIAVYDQAPDAETLLMSENAPVASNDDDVEDEAEAALTTVDSDFGRTTDPVRMYMREMGSVELLTREGEIEIAKRIEDGLKHMVMAISACPTTINEILAHITRVREGQAQIDEVVDGLVDPEDGEEYAGAGVTADEDEADDGPAGGMSSKQLEDLRVKALAKFDEVSKQFEKMRQSYEKEGYKSDAYLKAQDIIQTELMGIRFTAKMVEKLADTLRAQVEEVRQLERAVLHTCVDRAGMPRSHFLKAFPGNETNLQWVLDEVAAAHAYSETLERQIPAVQELQQKLIDLQTRVVLPLKDLKDVNKRMATGEAKARKAKREMTEANLRLVISIAKKYTNRGLQFLDLIQEGNIGLMKAVDKFEYRRGYKFSTYATWWIRQAITRSIADQARTIRIPVHMIETINKMNRISRQILQETGAEPDPATLAQKMDMPEDKIRKILKIAKEPISMETPIGDDDDSHLGDFIEDTATLAPSDAALHGSMRDVVKEVLDSLTPREAKVLRMRFGIEMSTDQTLEEVGKQFDVTRERIRQIEAKALRKLRHPSRADKLKSFLEGQ

SEQ ID NO: 46689 - protein, 185 aa, Arabidopsis thaliana
  misc_feature (144)..(144): Xaa can be any naturally occurring amino acid
  unsure (1)..(185): unsure at all Xaa locations
LIDDTGKVRSSYRKIHLFDVDVPGNMVYKESRFTAAGDTIVAVDSPFGRLGLTVCYDLRFPELYQILRFKHQAQVLLVPSAFTKITGEAHWEILLRARAIETQCYVIAAAQAGKHNEKRESYGDSIIIDPWGTVIARLPEKCGXDRLSTGFAVADLDLSKVEAVRTRMPISEHRKFDSDWKPTPL

SEQ ID NO: 46690 - protein, 130 aa, Brassica napus
FGMLETENQENNVVKPDSPVNYQTYMKKTPRTRWSKQDTELFYEGIQDFGGDLSMVQLLFSDRTHQQIKLKFKLEERRNPLKLNDALSTRPKDLTRFHTLIKKLQQEAPAERAGEEEGEAGEEAETTTDV

SEQ ID NO: 46691 - protein, 679 aa, Zea mays
MLVLRRVSFLLSSPSPRAPLAKPLLLLRPPQTLAPTARQLVAMAASVPSAGGAGTMSRDAFRAAVTNTLERRLFFVPSFKIYGGVAGLYDYGPPGCAVKANVLAFWRQHFVLEEGMLEVDCPCVTPEVVLKASGHVDKFTDLMVKDEKTGNCYRADHLLKDFCKDKLEKDHTLSPEMAEEYNRVLAILDDLTAEQLGAKIREYKIVAPDTKNSLSDPYPFNLMFQTSIGPSGLSPGYMRPETAQGIFVNFKDLYYYNGNKLPFAAAQIGQAFRNEISPRQGLLRVREFTLAEIEHFVDPEDKSHPKFGDVSDLEFWMFPREDQMAGRSATRLKLGNSISEGTVNNETLGYFIGRVYLFLTQLGIDKDRLRFRQHLPNEMAHYAADCWDAEIECSYGWIECVGIADRSAYDLRAHSDKSGEKLEAHEKFAEPREVEKLVITPSKKELGLAFKGNQKLVVESLEAMTETEALDMKAALESRGEVEFKVCTLGKDVTIKKNMVSINIEKKKEHQRKFTPSVIEPSFGIGRIIYCLFEHCFYQRPGKTEDEQLNVFRFPPLVAPIKCTVFPLVKLEKFEAVAKKISKALTAAGISHIIDMTGNTIGKRYARTDEIGVPLAITVDHTTSVTVRDRDSKDQIRVDVDEVASVVKEVTDGQSTWADIMWRYPAHTASAADEDGAQP

SEQ ID NO: 46692 - protein, 324 aa, Pseudomonas aeruginosa UCBPP-PA14
MSTLSTDQLLHAYRVMRTIRAFEERLHVEFATGEIPGFVHLYAGEEASAAGVMAHLRNDDCIASTHRGHGHCIAKGVDVHGMMAEIYGKKTGVCQGKGGSMHIADLEKGMLGANGIVGAGAPLAAGAALAAKLKGSDAVAVAFFGDGGSNEGAVFEAMNLAAVWNLPCLFVAENNGYAEATAANWSVACDHIADRAAGFGMPGVTVDGFDFFAVHEAAGAAIERARAGEGPSLIEVKLTRYYGHFEGDAQTYRDPDEVKHYRETRDCLKQFRERTCHAGLLSASDLDAIDAEVEARIEDAVQRAKNDPKPEPDDLLRDVYVSYP

SEQ ID NO: 46693 - protein, 475 aa, Solanum tuberosum
MVNYFEIFFYISIFLLGILSYYFCFSKKYNSSSKKNAYKLPPGSMGWPYIGETLQLYSQDPNAFFINRQRRFGEIFKTKILGCPCVMLASPEAARFVLVNQANLFKPTYPKSKENLIGQSALFFHQGDYHNHLRKLVQASLNPESIRNQIPYIEELSISALNSWVGGHVVNTYHEMKKFSFEVGILAIFGHLDGHVKEELKKNYSIVDKGYNSFPINLPGSLYRKSLQARKRLGKILSEIIRERKEKKVLEKGLLSCFLNAKEEKGLLVLNEDQIADNIIGVLFAAQDTTASVLTWILKYLHDNPKLLECVKAEQKVILQSNEQENHGLTWTQTRKMPITNKVVLETLRMASIISFAFREAVADVEYKGYLIPKGWKVMPLFRNIHHNPEFFPDPQKFDPSRFENAPKPNTFMPFGSGVHACPGNELAKLEILIMTHHLVTKFRWEVVGSGSGIQYGPFPVPLGGLAARFWKEST

SEQ ID NO: 46694 - protein, 477 aa, Lactococcus lactis subsp. lactis Il1403
MENQNQVKRNLKQRHITMIALGGTIGTGLFLTSGATISQAGPWGAVLAYCFIGIMVYFVMTSLGEMATYLPTSGSFSDYGGRYVDPAFGFALGWNYWLNGAITIAVDLTTAGLITQFWFPHLPSWIFSGIATVLIFIINVMAVGAFGETEYWLSTIKVITIVLFLAIGLLTIFGVLGQGNVDVVANLSAGNHGFVGGISGFVGVLLIAGFSFQGTELLGITAGESEDPGKSIPKAMNSIFWRILLFYIFSIIVIAAIINFKDPRLLNPNSTAVMSPFTIVFKNIGFAVAASVMNAVILTSVISSANSVMYASTRILYSLGQEKGAPKFFGRTAKNGIPFYALLATTIICFIAFLTGIFGTQIYLFLVDLSSLTGFLAWLGISISHIRFRRAYIAQGKKLEDLPYKAKWFPFGPIVALLMTAAIAINLDPAMLFSEHWGEGLALYAAIPIFIILYFGYKWKYNTKIIPLEEVDLSREK

SEQ ID NO: 46695 - protein, 392 aa, Cryptococcus neoformans var. neoformans B-3501A
MTIAATSIPTTKYEAHYDPAKVIQHPEFQTLSEDAPELSDPKLNIACAYNPAHEIHMVKKPRFEPGPGEVTIHVRATGICGSDVHFWKHGHIGPTMIVTDECGAGHESAGEIVAVGEGVAQWQVGDRVAVEAGVPCGLASCDPCRTGRYNACPAVVFFSTPPYHGTLTRYHNHPAAWCHRLADNVSYEEGSLCEPLAVALAGLDRAGVRLGDPIAICGAGPIGLVTLLAAHAAGCTPIVITDLFPSRLEFAKKLLPTVKTVQIEKTAKPEEVAKQIKGAAGMQLSLAFDCTGVESSIRSAIFSVKFGGKVFVIGVGPSEQSYPFGYCSANEIDLQFQYRYNNQYPKAIRLVAGGLVDLKPLVTHRFALKEAVKAFHVAADPSQGAIKVQIRD

SEQ ID NO: 46696 - protein, 377 aa, Geobacillus kaustophilus HTA426
MSAISPFVAIRRDLHQIPELGFQEFKTQQYLLRYIQSLPQERLQVRTWKTGIFVKVNGTSPRKTIGYRADMDGLPIREETGLPYRSKHEGRMHACGHDVHMSIALGVLTHFAHHPLKDDLLFVFQPAEEGPGGAKPMLESDIMREWKPDIIVALHIAPEYPVGTIATKEGLLFANTSELFIDLKGKGGHAAFPHLANDMVVAACALVTQLQSIVARNVDPLDSAVITIGKIAGGTVQNVIAEHARLEGTIRTLSTAAMQKVKRRIEAIVHGIEVAYECEASIDYGAMYHEVYNDPDLTAEFMKFAKAHGGVNVIRCKEAMTGEDFGYMLADIPGFMFWLGVASPYGLHHAKLAPNEEAIDRAIAFLIDYFSWKGNAE

SEQ ID NO: 46697 - protein, 707 aa, Chlamydomonas moewusii
MALYFALARGTEGCTALDMSKHLDSNYHSLVPELELDFTPEPDFSLLIDRVEAGQKLLGKEAAVPLVVGPLTLVLLARLAPGLSPSAALHRILPAYSCTSPASAPTPATAPWTSSRPHTATWLPRAAPSTWSSRTATSRQPYWERQLACLWRHSAWTSWASGGGDANRTAELVAELAKAGGWPAGLRLGAGIVDGRAVWKDDADTLLALLAGAVLPGHQAHQRPEQRLPAAPALGRRGGALVEDPNHATHAASGEPGAAPRAAMSRGLTAELRAKSGVCGAEGEADRGGHASRSRVSALACALSMARRGGVAAIPADCFRRSEAFAVRRSKQPQFRAFPTSTIGSFPQTAEVRRARAQLTKGLLTLEQYQARMDALITHAIGVQEGLDIDVLVHGEAERTDMVEYFGEQLEGLTAFTANAWVQSYGSRYVRPHHCVDVACAPMTVREWRSSQTPACTGRFVKGMLTGPVTILNWSFPRKDVSRRVQAMQLALACARRWTRCRIVQVDEPALREGLPLKNERWQSYLTWAVDAFRLSTAVARPDVQIVTHLCYSNFEDILQAVDDMDADVLTIENSRSGDEMVRALSNAGYCKDLGPGVYDVHSPVVPPVEWFVDKIASFVATCEQFKDCPDRLWVNPDCGLKTRAWSEVIPALRNMVQAAQIMRERHAKQQPVAGSGAATPTGVRRSALASAAAPLAAAAEGPPQAS

SEQ ID NO: 46698 - protein, 387 aa, Rhizopus microsporus var. oligosporus
IGQQFWETISREHGIDTNGNYIGDNDLQLERINVFYNEGSEGKYVPRAVLVDLEPATMDGIRNSAYGKIYRPDNFVNAQSGAGNSWAKGYYTEGAELVESIMDVVRKEAENTDCLQGFQLAHSLGGGTGSGLGSLLLSKIREEYPDRILSTYSVVPSPKVSDTVVEPYNAVLSVHQLVENCDATYCIDNEALYDICFRTLKLTNPDYPDLNQLVSAVMSGVSTSLRFPGQLNSDLRKLCVNKVPFPRLHFFMVGFAPLTAFGSQQYRNLSVPELTAQMFDARNMMAASDPRHGRYLTAGTIFRGRLSTKEVENQMLAVQQKNSSYFVEWIPNSVKASLCDIPPVGLKMSGTFIGNSTAIQELFKRVNEQFTAMFRRKAFLHWYTGEG

SEQ ID NO: 46699 - protein, 429 aa, Pseudomonas syringae pv. tomato str. DC3000
MADKKAQLIIEGAAPVELPILTGTVGPDVIDVRGLTATGRFTFDPGFMSTASCESKITYIDGDNGILLHRGYPIEQLAEQSDYLETCYLLLNGELPTAEQKAQFVAVVKNHTMVHEQLKTFFNGFRRDAHPMAVMCGVVGALSAFYHDSLDINNPQHREISAVRLVAKMPTLAAMVYKYSMGQPMMYPRNDLSYAENFLHMMFNTPCEIKPISPVLAKAMDKIFILHADHEQNASTSTVRMAGSSGANPFACIAAGIAALWGPAHGGANEAVLTMLDEIGDVSNIDTFIAKAKDKNDPFKLMGFGHRVYKNRDPRATVMKQTCDEVLKELGIKNDPQLELAMRLEEIALTDPYFIERSLYPNVDFYSGIILKAIGIPTSMFTVIFALARTVGWISHWKEMLSSPYKIGRPRQLYTGNVQRDIIALKDRK

SEQ ID NO: 46700 - protein, 590 aa, Pseudomonas syringae pv. tomato str. DC3000
MANINSLSFDAIIIGGGGAGMRAALQLAQGGHKTAVVTKVFPTRSHTVSAQGGITCAIASADPNDDWRWHMYDTVKGSDYIGDQDAIEYMCSVGPEAVFELEHMGLPFSRTEQGRIYQRPFGGQSKDFGKGGQAARTCAAADRTGHALLHTLYQANLKAGTVFLNEYYGVDLVKNQDGAFVGIIAICIETGETSYIRANATVLATGGAGRIYSSTTNALINTGDGIGMALRAGVPVQDIEMWQFHPTGIAGAGVLVTEGCRGEGGYLINKHGERFMERYAPNAKDLAGRDVVARSMVKEIIAGNGCGPDGDHVMLKLDHLGEEVLHSRLPGIMELSKTFAHVDPATAPIPVVPTCHYMMGGVATNIHGQAITQDADGVDHIIPGLFAVGEVACVSVHGANRLGGNSLLDLVVFGRAAGIHLEKALSEGIDYTRASESDIDAALARLAGLNERTTGEDVATLRKELQSCMQNYFGVFRTGEYMQKGIAQLADLRVRIANVKINDKSQAFNTARIEALELQNLLEVAEATAIAAEHRKESRGAHAREDFEDRDDENWLCHTLYFPGDKRVTKRAVNFSPKTVPTFEPKIRTY

SEQ ID NO: 46701 - protein, 173 aa, Oryza sativa
HSSHMYHEAKSSFAHHGVKFSNLEVDLPAMMAQKDKAVAGLTKGIEGLFKKNKVTYVKGFGKLASPSEVSVDLSDGGSTVVKGKNIIIATGSDVKSLPGVTIDEKKIVSSTGALCLSEIPKKLVVIGAGYIGLEMGSVWNRLGSEVTVVEFAPDIVPSMDGEVRKQFQRMLEN

SEQ ID NO: 46702 - protein, 739 aa, Triticum aestivum
  misc_feature (499)..(499): Xaa can be any naturally occurring amino acid
  misc_feature (650)..(650): Xaa can be any naturally occurring amino acid
  misc_feature (710)..(710): Xaa can be any naturally occurring amino acid
  unsure (1)..(739): unsure at all Xaa locations
AYLGDTLEQVCTKKQAGTGPEFPGYRRPTRPLDTTAMLGAVPDRYSWTGGEINLSTYFSMARGNATVPAMEMTKWFDTNYHFIVPELAPSTKFSYSSHKAINEYKEAKALGVDTVPVLVGPVSYLLLSKAAKGVEKSFSPLSLLSSILPVYKEVIAELKAAGASWIQFDEPTLVKDLESHQLSAFSAAYAELESALSGLNVLVETYFADVPADSYKTLTSLSSVTAYGFDLERGTKTLELVKSGFPAGKYLFAGVVDGRNIWADDLAASLATLQSLEAVVGKDKLVVSTSCSLMHTAVDLVNETKLDDEIKSWLAFAAQKVVEVNALAKALAGQKDEAYFAANAAALASRRSSPRVTNEEVQKAATALKGSDHRRATTVSARLDAQQKKLNLPVLPTTTIGSFPQTVELRRVRREYKAKKISEEEYTNAIKEEISKVVKIQEELDIDVLVHGEPERNDMVEYFGEQLSGFTFTANGWVQSYGSRCVKPPIIYGDVSRPXPMTVFWSKMAQSMTARPMKGMLTGPVTILNWSFVRNDQPRFETCYQIALAIKKEVEDLEAGGIQVIQIDEAALREGLPLRKSEHAFYLDWAVHSFRITNCGVQDTTQIHTHMCYSNFNDIIQSIINMDADVITIENSRSDEKLLSVFREGXVVYGAGIGPGVYDIHSPRIPSKEEIADRVNKMLAVLDTNILWVNPDCGLKTRKYAEVKPXALTNMVEAAKQIRAELRQGAVSRIAAPPF

SEQ ID NO: 46703 - protein, 349 aa, Solanum tuberosum
MSPPLLGVGEEEGQSNVTLLASSTSLGSICKKGSALKERNYMGLSDCSSVDSCNISTSSEDNNGCGLNLKATELRLGLPGSQSPERGEETCPVSSTKVDEKLLFPLHPAKDTAFSVSQKTVVTGNKRGFSDTMDGFSEGKFLSNSGVKSGDAKETSRVQPSKMKDANTQSTVPERPSAVNDASNRAGSGAPATKAQVVGWPPIRSFRKNTLASASKNNEEVDGKAGSPALFIKVSMDGAPYLRKVDLRTYSAYQELSSALETMFSCFTIGQYGSHGAPGKDMLSESKLKDLLHGSEYVLTYEDKDGDWMLVGDVPWEMFIDTCKRLRIMKGSDAIGLAPRAMEKCRSRN

SEQ ID NO: 46704 - protein, 196 aa, Magnetospirillum magnetotacticum MS-1
  misc_feature (163)..(163): Xaa can be any naturally occurring amino acid
  unsure (1)..(196): unsure at all Xaa locations
MKLDQVARSLLLKEFVSGFFLAMKYFFKPKATINYPFEMGHRGPRFRGEHALRRYPNGEERCIACKLCEAICPAQAITIEAGPRRNDGTRRTTRYDIDMVKCIYCGMCQEACPVDAIVEGPNFEFSVETREELLYDKEKLLANGDRWEREIARNIALDAPYRXPERLRRLCAHRRILLSIVRRRLGFEKRCEQSRG

SEQ ID NO: 46705 - protein, 541 aa, Streptomyces avermitilis MA-4680
MAKIIAFDEEARRGLERGMNQLADAVKVTLGPKGRNVVLEKKWGAPTITNDGVSIAKEIELEDPYEKIGAELVKEVAKKTDDVAGDGTTTATVLAQALVREGLRNVAAGANPMALKRGIEKAVEAVSGALLEQAKDVETKEQIASTASISAADTQIGELIAEAMDKVGKEGVITVEESQTFGLELELTEGMRFDKGYISAYFATDMERMEASLDDPYILIANSKISSVKDLLPLLEKVMQSGKPLLIIAEDVEGEALSTLVVNKIRGTFKSVAVKAPGFGDRRKAMLGDIAILTGGEVISEEVGLKLENASIDLLGRARKVVITKDETTIVDGAGSADQVAGRVNQIRAEIENSDSDYDREKLQERLAKLAGGVAVIKAGAATEVELKERKHRIEDAVRNAKAAVEEGIVAGGGVALIQASSVFEKLELTGDEATGANAVRLALEAPLKQIAVNGGLEGGVIVEKVRNLPVGHGLNAATGEYVDMIAEGIIDPAKVTRSALQNAASIAALFLTTEAVIADKPEKAAAGGAPGGMPGGDMDF

SEQ ID NO: 46706 - protein, 597 aa, Candida albicans
MTTPLSSYSTTVTNHHPTFSFESLNSISSNNSTRNNQSNSVNSLLYFNSSGSSMVSSSSDAAPTSISTTTTSTTSMTDASANADNQQVYTITEEDSINDINRKEQNSFSIQPNQTPTMLPTSSYTLQRPPGLHEYTSSISSISSTSSNSTSAPVSPALINYSPKHSRKPNSLNLNRNMKNLSLNLHDSTNGYTSPLPKSTNSNQPRGNFIMDSPSKKSTPVNRIGNNNGNDYINATLLQTPSITQTPTMPPPLSLAQGPPSSVGSESVYKFPLISNACLNYSAGDSDSEVESISMKQAAKNTIIPPMAPPFALQSKSSPLSTPPRLHSPLGVDRGLPISMSPIQSSLNQKFNNITLQTPLNSSFSINNDEATNFNNKNNKNNNNNSTATTTITNTILSTPQNVRYNSKKFHPPEELQESTSINAYPNGPKNVLNNLIYLYSDPAQGKIDINKFDLVINVAKECDNMSLQYMNQVPNQREYVYIPWSHNSNISKDLFQITNKIDKFFTNGRKILIHCQCGVSRSACVVVAFYMKKFQLGVNEAYELLKNGDQKYIDACDRICPNMNLIFELMEFGDKLNNNEISTQQLLMNSPPTINL

SEQ ID NO: 46707 - protein, 141 aa, Triticum aestivum
MGRLFLTSLAPATGTIYCCKHCDSHLAYAQHIISKMFRCKHGKAYLFDKVVNVVAGESEDDRMMTTGLHTVRDIFCVACGAILGWKYVSAFDKDQRYKEGKFILERCKIHSGGGGPPDRIQLWAERDARISSSEDDDQGAV

SEQ ID NO: 46708 - protein, 373 aa, Vibrio parahaemolyticus RIMD 2210633
MPIQSFIPPHRILMGPGPSDVYPQVLQALSRPTVGHLDPLFIAMMDELKQLLKYAFQTENEFTIAVSAPGSAGMETCFVNLIEKGDKVIVCRNGVFGERMRENVIRAGGEVVLVDDEWGAPVSVDKVEQALQQHPDTKILAFVHAETSTGAVSDAQTLGKLAKQYNVLSIVDAVTSLGGVPLKVDEWQLDAVYSGSQKCLSCVPGLSPVTLSPAAIEKIQSRTTPVQSWFLDQSLVLGYWSGEGKRSYHHTAPVNSLYALHEALLVLQNEGLENAWARHQLMHEKLKDGLQKLGFEFVVEEAYRLPQLNAIYVPEGIDEAKVRAHLLETYNLEIGAGLGVLAGKAWRIGLMGYGARAENVALCLKALEESLTE

SEQ ID NO: 46709 - protein, 488 aa, Methylococcus capsulatus str. Bath
MTRGIRRTKIIATLGPASESPEMLERILKAGADVVRLNFSHGTAEEHRIRAERVREISRRMQRYVAILADLQGPKIRIARFKGDRQVVLEEGQPFDLDTAFPPDQGDETQVGCAYEALPTDVEAGDTLLLNDGLIELKVKSVEGTRVRCVVTVGGVLSNHKGINKLGGGLSAPALTEKDKADLKTAVEIGADYLAISFPRSKEDMLEARELLHRAGSHMGLVAKVERAEAIKDGVIEGIIDASDAIMVARGDLGVEIGDARLPHEQKRLIRLARSRNKVVITATQMMESMIENPLPTRAEVSDVANAVIDGTDAVMLSAETATGKFPDRTVAAMVRVCKEAEKYPRTRQSSHRMDEKFHRIDEAIAMSAMYIANHLPVRAIGALTESGSTPLWMSRISSGIPIFALTPHEAVCRRVTLFRGVYPIFFNERAISDHHVLNRAIAEEFLKRNLVKMDDLVIMTKGDLTGRTGGTNALKISRISDVIAAAP

SEQ ID NO: 46710 - protein, 961 aa, Saccharum hybrid cultivar
MASERHHSIDAQLRALAPGKVSEELIQYDALLADRFLDILQDLHGPSLREFVQECYEVSADYEGKKDTSKLGELGTKLTGLAPADAILVASSILHMLNLANLAEEVELAHRRRNSKLKHGDFSDEGSATTESDIEETLKRLVSLGKTPEEVFEALKNQSVDLVFTAHPTQSARRSLLQKNARIRNCLTQLSAKDVTVEDKKELDEALQREIQAAFRTDEIRRAQPTPQDEMRYGMSYIHETVWKGVPKFLRRVDTALKNIGINQRLPYNVPLIKFCSWMGGDRDGNPRVTPEVTRDVCLLSRMTAANLYIDQVEDLMFELSMWRCNDELRARAEEVQSTPASKKVTKYYIEFWKQIPPNEPYRVILGAVRDKLYNTRERARHLLATGFSEISVDSVFTNIEEFLEPLELCYKSLCDCGDKAIADGSLLDLLRQVFTFGLSLVKLDIRQESERHTDVIDAITTYLGIGSYRSWPEDKRMEWLVSELKGKRPLLPPDLPMTEEIADVIGAMHVLAELPSDSFGPYIISMCTAPSDVLAVELLQRECGIRQTLPVVPLLERLADLQAAPASVERLFSTDWYFDHIKGKQQVMVGYSDSGKDAGRLSAAWQLYVAQEEMAKVAKKYGVKLTLFHGRGGTVGRGGGPTHLAVLSQPPDTINGSIRVTVQGEVIEFMFGEDHLCFQSLQRFTAATLEHGMHPPVSPKPEWRKLMEEMAVVATEEYRSVVVKEPRFVEYFRSATPETEYGKMNIGSRPAKKKPGGGITTLRAIPWIFSWTQTRFHLPVWLGVGAAFKWAIDKDIKNFQKLKEMYNEWPFFRVTLDLLEMVFAKGDPGIAGLYDLLLVADDLKPFGKQLRDKYVETEKLLLQIAGHKDILEGDPYLKQGLRLRNPYITTLNVLQAYTLKRIRDPSFKVTPQPPLSKEFADENKPAGLVKLNPASEYPPGLEDTLILTMKGIAAGMQNTG

SEQ ID NO: 46711 - protein, 366 aa, Bacillus cereus E33L
MALEIFEYLEKYDYEQVVFCQDKESGLKAIIAIHDTTLGPALGGTRMWTYDSEEAAIEDALRLAKGMTYKNAAAGLNLGGAKTVIIGDPRKDKSEAMFRALGRYIQGLNGRYITAEDVGTTVDDMDIIHEETDFVTGISPSFGSSGNPSPVTAYGVYRGMKAAAKEAFGTDNLEGKVIAVQGVGNVAYHLCKHLHAEGAKLIVTDINKEAVQRAVEEFGATAVEPNEIYGVECDIYAPCALGATVNDETIPQLKAKVIAGSANNQLKENRHGDIIHEMGIVYAPDYVINAGGVINVADELYGYNRERALKRVESIYDTIAKVIEISKRDGIATYVAADRLAEERIASLKNSRSTYLRNGHDIISRR

SEQ ID NO: 46712 - protein, 244 aa, Arabidopsis thaliana
MNGFSDLNPSESKPSLSQLAPLEAILFDVDGTLCDSDPIHLIAFQELLQEIGFNNGVPIDEKFFVENIAGKHNSEIALLLFPDDVSRGLKFCDEKEALYRKIVAEKIKPLDGLIKLTKWIEDRGLKRAAVTNAPKENAELMISKLGLTDFFQAVILGSECEFPKPHPGPYLKALEVLNVSKEHTLVFEDSISGIKAGVAAGMPVIGLTTGNPASLLMQAKPAFLIENYADPKLWAVLEELDNKS

SEQ ID NO: 46713 - protein, 465 aa, Oryza sativa
MGMLLLSRLMPTRRPRRRRPHKSRRSGLIAKSAKRKRSHCQQDDDDSQGGKRMRNSVPTLPEDIWCHIHSLMPMRDAARVACVSRAFLSSWRCHPNLTFNERTLGLDEYVFETDFISKVDHILEKHSGIGVKTFNLQVPYELDVCDHVDHWLQFAITPRIEELNLMLYGTVQEYNFPCSLLSDGIANYIRFLDLGHCAFRPTVELGSWRSLKRLCLSFVHITGDELGCVLSNLFALEWLELIYCDKIASLKIPCTLQQLSYLKVSECSRMRVIESKAPKVSNFYFTGYKVVNTPMLTTKFLYLKYLSISLSGLTVSPSYDYFSLVSFLDASPFLETFFLAISKEQMKRESKFRDSSHMRQIQEHRHEHLKSVTIIGFCSAKSLVELTCHILENAVSLECLTLNTTLGFASRSEHSPGTCFPMGKAVLMGVPKALSAIQTYIVGKVPSTVRLNVMEPCNLCNGIGH

SEQ ID NO: 46714 - protein, 463 aa, Streptomyces avermitilis MA-4680
MASTRGAQILVASNRGPVSYTLDETGTLTSKRGGGGLVSGLSAIGPDAGALWVCSALGEGDREAVRRGVGEPGVRMLDVDAEVHADAYNGIANSVLWFVHHMLYQTPLEPVFDAEFRRQWAAYETYNHAFAAALAEEAAEGAAVLVQDYHLTLVPRMLRELRPDLRIGHFSHTPWAPSEYFRMLPDDIAAQVLGGILGADRAAFLTQRWADAFTDCCHAVLGPGIPSGTRIGVHGLGADADFLRERAHRPDVEERMAALREEVGEGRKTIVRVDRTELSKNIVRGLLAYRELLASRPDWRERVVHVAFAYPSRQDLAVYRDYTAAVQRLADEINAEYGTPGWTPVVLHVKDDFARSLAAYRLADVALVNPIRDGMNLVAKEVPVVSDEGCALVLSREAGAYEELGEDAITVNPYDVVGTAVALHEALSMPAGERAERTKRLAGAATALPPARWFLDQLHALDT

SEQ ID NO: 46715 - protein, 237 aa, SYNECHOCOCCUS SP. WH 8102
MSVALATQLREGTKKSHTMAENTGFVSCFLKGVVDKASYRKLVADLYFVYTAMEEEISKLGDHPVVGPVGMQELNRRDALEQDLVFYFGAGWKDQIQPSPSAAAYVERIHAVAQESPELLVGHHYTRYLGDLSGGQILKNIAQKAMNMDGDDGLNFYVFNDIADEKAFKTTYRSTMDELPIDQAMADRIVEEANHAFHLNMNMFKELEGNLVAAIGKVLFGFLTRRQRAGSTEAAAA

SEQ ID NO: 46716 - protein, 369 aa, Geobacillus kaustophilus HTA426
MGVKTSQFRFAEQLEKVAEQFPTFQILNEEGEIVNEEAMPELSDEQLKELMRRMVYTRILDQRSISLNRQGRLGFYAPTAGQEASQIASHFALEKEDFILPGYRDVPQIIWHGLPLYQAFLFSRGHFHGNQIPEGVNVLPPQIIIGAQYIQAAGVALGLKMRGKKAVAITYTGDGGTSQGDFYEGINFAGAFKAPAIFVVQNNRFAISTPVEKQTIAKTLAQKAVAAGIPGIQVDGMDPLAVYAAVKAARERAINGEGPALIETLCFRYGPHTMSGDDPTRYRSKELENEWAKKDPLVRFRKFLEAKGLWSEEEENRVIEQAKEDIKEAIKKADETPKQKVTDLISIMFEELPANLKEQYEIYKEKESK

SEQ ID NO: 46717 - protein, 156 aa, Fragaria x ananassa
MALSLFGNSRRSNVFDPFSLDTWDPFQGFGPLMNSSSTAGDTSAFAQTRIDWKETPEAHVFKADLPGLKKEEVKVELEEGNVLQISGERSKEQEEKNDKWHRVERSSGKFVRRFRLPDNAKVDQVKAAMENGVLTVTVPKAPEPKPQVKSIDISGA

SEQ ID NO: 46718 - protein, 470 aa, Geobacillus kaustophilus HTA426
MVVGDFAIETETLVVGAGPGGYVAAIRAAQLGQKVTIVEKGNLGGVCLNVGCIPSKALISASHRYEQAKHSEEMGIKAENVTVDFSKVQEWKASIVKKLTGGVEGLLKGNKVDIVKGEAYFVDANTVRVVNGDSAQTYTFKNAILATGSRPIELPNFKFSGRILDSTGALNLGEIPKSLVVIGGGYIGIELGTAYANFGAKVTILEGAGEILSGFEKQMVSIIKRRLKNKGVEVVTNALAKGAEERADGVTVTYEANGETKTIDADYVLVTVGRRPNTDELGLEQIGIKMTNRGLIEVDQQCRTSVPNIFAIGDIVPGPALAHKASYEGKVAAEAIAGHPSVVDYIAIPAVVFSDPECASVGYFEQQAKEEGIDVITAKFPFAANGRALSLNDTDGFLKLVVRKEDGVVIGAQIIGPNASDMIAELGLAIEAGMTAEDIALTIHAHPTLGEIAMEAAEVALGTPIHIIAK

SEQ ID NO: 46719 - protein, 645 aa, Arabidopsis thaliana
MDTNTSGEELLAKARKPYTITKQRERWTEDEHERFLEALRLYGRAWQRIEEHIGTKTAVQIRSHAQKFFTKLEKEAEVKGIPVCQALDIEIPPPRPKRKPNTPYPRKPGNNGTSSSQVSSAKDAKLVSSASSSQLNQAFLDLEKMPFSEKTSTGKENQDENCSGVSTVNKYPLPTKQVSGDIETSKTSTVDNAVQDVPKKNKDKDGNDGTTVHSMQNYPWHFHADIVNGNIAKCPQNHPSGMVSQDFMFHPMREETHGHANLQATTASATTTASHQAFPACHSQDDYRSFLQISSTFSNLIMSTLLQNPAAHAAATFAASVWPYASVGNSGDSSTPMSSSPPSITAIAAATVAAATAWWASHGLLPVCAPAPITCVPFSTVAVPTPAMTEMDTVENTQPFEKQNTALQDQTLASKSPASSSDDSDETGVTKLNADSKTNDDKIEEVVVTAAVHDSNTAQKKNLVDRSSCGSNTPSGSDAETDALDKMEKDKEDVKETDENQPDVIELNNRKIKMRDNNSNNNATTDSWKEVSEEGRIAFQALFARERLPQSFSPPQVAENVNRKQSDTSMPLAPNFKSQDSCAADQEGVVMIGVGTCKSLKTRQTGFKPYKRCSMEVKESQVGNINNQSDEKVCKRLRLEGEAST

SEQ ID NO: 46720 - protein, 399 aa, Spinacia oleracea
MALNLNPVSTPFQCRRLPSFSPRQTPSRRSPKFFMASTLSSSSPKEAESLKKPFSPPREVHVQVTHSMPQEKIEIFKSLEGWAEENLLVHLKPVEKCWQPQDYLPDPASEDFRDQVKEIQERAKEIPDDLYVVLVGDMITEEALPTYQTMLNTLDGAKDETGASPTSWAVWTRAWTAEENRHGDLLNKYLYLSGRVDMRSIEKTIQYLIGSGMDPRTENNPYLGFVYTSFQERATFVSHGNSARLAKEHGDLKMAQICGIIASDEKRHETAYTKIVEKLFEIDPDATVLAFADMMKKKISMPAHLMYDGRDDNLFDHFSAVAQRLGVYTAKDYADILEFLVGRWEVEKLTGLSSEGQKAQDYVCSLPPRIRRLEERARERAKQAPSMPFSWIFDRQVKL

SEQ ID NO: 46721 - protein, 502 aa, Triticum aestivum
  misc_feature (223)..(223): Xaa can be any naturally occurring amino acid
  misc_feature (261)..(261): Xaa can be any naturally occurring amino acid
  misc_feature (283)..(283): Xaa can be any naturally occurring amino acid
  misc_feature (302)..(302): Xaa can be any naturally occurring amino acid
  misc_feature (420)..(420): Xaa can be any naturally occurring amino acid
  unsure (1)..(502): unsure at all Xaa locations
MQIFVKTLTGKTITLEVESSDTIDNVKAKIQDKEGIPPDQQRLIFAGKQLEDGRTLADYNIQKESTLHLVLRLRGGMQIFVKTLTGKTITLEVESSDTIDNVKAKIQDKEGIPPDQQRLIFAGKQLEDGRTLADYNIQKESTLHLVLRLRGGMQIFVKTLTGKTITLEVESSDTIDNVKAKIQDKEGIPPDQQRLIFAGKQLEDGRTLADYNIQKESTLHLVXLRLGGGMQIFVKTLTGKTITLEVESSDTIDNVKAKIRXKEGIPPDQQRLIFAGKQLEDGXRTLADYNIQKESTLHLVLXRLRGGMQIFVKTLTGKTITLEVESSDTIDNVKAKIQDKEGIPPDQQRLIFAGKQLEDGRTLADYNIQKESTLHLVLRLRGGMQIFVKTLTGKTITLEVESSDTIDNVKAKIQDKEGIXRTSSASSLLVSSSRTAAPSLTTTSRRSPPSTWCSVSVVASKCLAMELLMSVGSQVGCLSVSSDRIVSVSSSGLVLCCYRAVV

SEQ ID NO: 46722 - protein, 591 aa, Listeria monocytogenes str. 4b F2365
MKKLWLKIGLSFFILFFVVMVIVGVFSGELMKSTYLNMKENQLEDDAKILLQTTNMENLDLDKDAATIQKSLDPLGEDIDARITVIDSKGDVVADTKKDPEKLDNHMNRPEVTDILKKGESVGISIRESDSLGYSMLYVAVPVKHQGKTDGVLRISISLESVDAAVAKLWGNLALIFGIALVIIAAISVFIARKITRPVREIIEVSTDLANHKYDSRIHGKISGELQDLSISVNTLAESLETQMFEIKQNEQRLNAIVQNLVSGVMLINVDKQVIMTNRTMYQILGETEITGKPFYEVIKSFALSQLIEATFETKTIQQKEIILYFPREMILDASVSPILGENGEITGIILLLHDITQIRHLENVRSEFVTNVSHELKTPVTALKGFAETLLDGAMYDEVLLKKFLTIIKEESDRLHRLIMDILALSRIEQNPVAENVELVDVDEVIEQSARTIFEMATEKNIRVTIPEKTSASVMIETDRDKLQQIVINLLSNAINYTPVDGKVEVKLIEQEAEVIIEVTDNGIGIPAKDIDRVFERFYRVDKARSRHSGGTGLGLSIVKHLVENCGGRIEVESQEEVGSTFRVTLPKKA

SEQ ID NO: 46723 - protein, 413 aa, Salmonella enterica subsp. enterica serovar Typhi Ty2
MSKRRVVVTGLGMLSPVGNTVESTWKALLAGQSGISLIDHFDTSAYATKFAGLVKDFNCDDIISRKEQRKMDAFIQYGIVAGVQAMQDSGLEVTEENASRIGAAIGSGIGGLGLIEENHSSLVKGGPRKISPFFVPSTIVNMVAGHLTIMYGLRGPSISIATACTSGVHNIGHAARIIAYGDADAMVAGGAEKASTPLGVGGFGAARALSTRNDNPQAASRPWDKERDGFVLGDGAGMLVLEEYEHAKARSAKIYAEIVGFGMSSDAYHMTSPPENGAGAALAMVNALRDAAIEPAQIGYVNAHGTSTPAGDKAETQAVKSVFGDAASRVMVSSTKSMTGHLLGAAGAVESIFSILALRDQAIPPTINLDNPDEGCDLDFVPHEARQVSDLEYALCNSFGFGGTNGSLIFKKI

SEQ ID NO: 46724 - protein, 140 aa, Merremia tuberosa
TQEWNPATDKYLGVKYDITTVMQAKPLLKEALQAAVGLPVDRNIPLIGFIGRLEEQKGSDILYAAIPKFISMNVQIVILGTGKKKFEQQIKQLEVMYPDKARGVAKFNVPLAHMITAGADFMLIPSRFEPCGLIQLHAMR

SEQ ID NO: 46725 - protein, 595 aa, Spinacia oleracea
MAATAATTFSLSSSSSTSAAASKALKQSPKPSALNLGFLGSSSTIKACRSLKAARVLPSGANGGGSALSAQMVSAPSINTPSATTFDFDSSVFKKEKVTLSGHDEYIVRGGRNLFPLLPDAFKGIKQIGVIGWGSQAPAQAQNLKDSLTEAKSDVVVKIGLRKGSNSFAEARAAGFSEENGTLGDMWETISGSDLVLLLISDSAQADNYEKVFSHMKPNSILGLSHGFLLGHLQSLGQDFPKNISVIAVCPKGMGPSVRRLYVQGKEVNGAGINSSFAVHQDVDGRATDVALGWSIALGSPFTFATTLEQEYKSDIFGERGILLGAVHGIVECLFRRYTESGMSEDLAYKNTVECITGVISKTISTKGMLALYNSLSEEGKKDFQAAYSASYYPSMDILYECYEDVASGSEIRSVVLAGRRFYEKEGLPAFPMGKIDQTRMWKVGEKVRSVRPAGDLGPLYPFTAGVYVALMMAQIEILRKKGHSYSEIINESVIEAVDSLNPFMHARGVSFMVDNCSTTARLGSRKWAPRFDYILSQQALVAVDNGAPINQDLISNFLSDPVHEAIGVCAQLRPSVDISVTADADFVRPELRQA

SEQ ID NO: 46726 - protein, 411 aa, Zea mays
MNALAATSRNFKQAAKLVGLDSKLEKSLLIPFREIKVECTIPKDDGTLASYVGFRVQHDNARGPMKGGIRYHHEVDPDEVNALAQLMTWKTAVANIPYGGAKGGIGCSPGDLSISELERLTRVFTQKIHDLIGIHTDVPAPDMGTNSQTMAWILDEYSKFHGYSPAVVTGKPVDLGGSLGRDAATGRGVLFATEALLAEHGKGIAGQRFVIQGFGNVGSWAAQLISEAGGKVIAISDVTGAVKNVDGLDIAQLVKHSAENKGIKGFKGGDAIAPDSLLTEECDVLIPAALGGVINKDNANDIKAKYIIEAANHPTDPEADEILSKKGVLILPDILANSGGVTVSYFEWVQNIQGFMWDEEKVNAELRTYMTRAFGDVKQMCRSHSCDLRMGAFTLGVNRVARATVLRGWEA

SEQ ID NO: 46727 - protein, 126 aa, Ipomoea plebeia
  misc_feature (4)..(4): Xaa can be any naturally occurring amino acid
  unsure (1)..(126): unsure at all Xaa locations
TQEXNPATDKYFGVKYDIATVMQAKPLLKEALQAAVGLPVDRHIPLIGFIGRLEEQKGSDILYAAIPKFISMNVQIVILGTGKKKFEQQIEQLEVMYPDKARGVAKFNVPSAHMITAGADFMLIPS

SEQ ID NO: 46728 - protein, 276 aa, Trichodesmium erythraeum IMS101
MTTVVKTETARPVTPLGILVEQLERIVKMAETAEIPPELSNAIKQAYQLGAGLDPYLEENTTQESPALTALAEKTRQEPWSSRFSNSETVRQLEQEMLSGHIEGQTLKMFVHMIGAKSILEIGMFTGYSALAMAEALPQNGRMVACEVDEYVSNFAKSCFDGSPHGSKISVEVAPALETIKKLADAGETFDLVFIDADKKEYIEYFKILLDTSLLATNGFICVDNTLLQGEPYLPKEKRNLNGEAIAQFNRFVAEDPRVEQVLLPLRDGLTIIRRK

SEQ ID NO: 46729 - protein, 363 aa, Pseudomonas aeruginosa UCBPP-PA14
MNSSPQANAAMRAAVWHGRHDIRVEDVPLPAEPPPGWVQIRVHWCGICGSDLHEYLAGPVFIPVEAPHPLTGLKDQCILGHEFSGEIVRLGNGVTGFALGQAVAADACQHCGTCYYCRHGLYNICENLAFTGLMNNGAFAEYVNVPANLLYALPAGFPSEAGALIEPLAVGMHAVKKAGSLLGQNVVVVGAGTIGLCTIMCARAAGAAQVIALEMSSARKAKALEVGASQVLDPSRCDALGEIRALTGGLGADVSFECIGNKHTAKLAIDAIRKAGKCVLVGIFEEPSEFNFFELVSTEKQLLGALAYNGEFADVIAFIADGRLDIAPLVTGRIGLEEIVERGFEELVNNKEHNVKIIVSPGG

SEQ ID NO: 46730 - protein, 510 aa, Ureaplasma parvum serovar 3 str. ATCC 700970
MRIVSTIITTSWGVDPNIYFSKHELTWVPATADANTLALTNFNPTSTLLVALAIAFVLLMTPGLALFYGGLTRRKSTLTIINQCVASLGITTLIWIFGGFSLAFGPSVGKGIIGDISTYFAFRNLLFADGWSGDVGIVFANFTNGVPLILFFAYQLAFAIITPPLMVGAFADRMKFKNYLVFLVLWQYLIYIPFAHWIWGQGFLAAAGVIDFAGGIVIHTTAGFGALAASLVLGKRVLLKNDKSRPHNIPMTIIGATLLFFGWFGFNVGGSGFVAGGNAATWSAATSAWINTIIALAIGMVGWAVLETIFNKNHKATGVGLVTGAIAGLATITPAAGYVPIWASVPIGVAAVLVCYTSAKTLHHFHKIDDTLEVWGVHGMGGVTGSLLIGAFASKSVNPSIMYEAIGPTTTGVLFGVQLGAVLLAAVYGFVFTILLVYITRPRLSARQQLGHIDYINHGEDAYSFDIEIPSEKEMEQYELADSTWHSSTGVKYSLLNNKNQQNHKVANDH

SEQ ID NO: 46731 - protein, 521 aa, Ureaplasma parvum serovar 3 str. ATCC 700970
MKIVSTWGLNKDIYFSTHELTWVPADASQSTLNAIGFNPTNTLLVALAIAFVLLMTPGLALFYGGLVRRKSALTIINQCVASLGITTLIWIFGGFSLAFGPSVGKGIIGDISTYFAFRNLLFADGWSGGAVLVFANFTNGVPLILFFAYQLAFAIITPPLMVGAFADRMKFKNYLVFLVLWQYLIYIPFAHWIWGQGFLAAAGVIDFAGGIVIHTTAGFGALAASFMLGKRTTLITDKKRANNLPMVVLGAALLFFGWFGFNVGGAGFVKENTNHISQAISSWLNTIIALAIGMIGWVTLETIVNKNHKPTTVGLVTGAVAGLATITPAAGFVPVWASVPIAIMGVLVCYSVSRLLDYFRFDDSLEVLPVHGMGGVIGSLLIGAFATNTVAHGIKYDAVGLDNNGNPIYGILFGLQLGAVLLAATWAFAFTCLIVYITKPRLSVRQQLGHIDYINHGEDAYKFDFIIPSESEMFEYESFDQTWECKASGCKKSNLAAKKNPVFIENENDCTWQSKSRECTK

SEQ ID NO: 46732 - protein, 490 aa, Glycine max
MASSKTTNPTTTTTQLEPLPPPQQRHPPPPHHQLQQHHHHHHHHQQIHDHHQISFGMMQSSSSFSSIPGNYLSKDSGAYDLGELDQAFFLYLDGQADPSSVQDQRQNSSSGMRPPTLNIFPSKPMHVEPSSSKAKANIELVSPQTSGSKRPSEPSMELANPRNETASAPQPPKPVKRESNRKGPTSSSEHEGPKTPDPKTLRRLAQNREAARKSRLRKKAYVQQLESSRIRLNQLEQELQRARTQGMFLGGGALLGGEQGLPVTMNTISTEAAMFDVEYARWQEEHHRIVCELRAAVQEHLPENELRLFVDNCLAHYDQVMNLKSLVAKTDVFHLVSGTWKTPAERCFMWIGGFRPSELIKIIVRQIEPLTEQQILGICGLQQSTQEAEEALSQGLEALNQSLSDTITSDSLSYPPNMANYMGQMAVAMNKLSTLEGFVRQADNQRHQTIHRLHQILTTRQAARCFLAIAEYFHRLRALSSLWLARPRQE

SEQ ID NO: 46733 - protein, 123 aa, Brassica napus
MDQERNMDIEKESTTTLDYSKRAQWLRAAVLGANDGLVSTASLMMGVGAVKHDVKAMILSGFAGMVAGACSMAIGEFVSVYSQYDIEVAQMERESGEVEKEKLPSPLQAAAASALAFSAGAIV

SEQ ID NO: 46734 - protein, 594 aa, ASPERGILLUS NIDULANS FGSC A4
MRFRLPYKHDELPVDENNQRPADNEGFVEKRTESQPAEVGIKEQKQDDIVSPDFQHGVQAAQAMTQVWSFSHIVAAYTLIWVIHFIMAFASGMIGNLTPFVTSSFAEHSLTATTSIISSLASGLIKLPYAKLIDIWGRPQGFALMVGSMTIGLIMMAGCNNVETYCAAQVFYQVGYTGLDFTMTIFIADTSKLKNRAFWIAFVASPYIATVWAYGPAAQSALGTIGFRWGFGIWAIVIPVVSAPLFFLFYYNQRKAEKMGLLPMIESNRTTLQSIVHYVREFDLIGIFIFALGMALFLLAFNLYTKQADEWRSPLIICFLVFGGLLIISFILYERYLAPITFIPWELLKNRTVIFTYTMAASIYIAWYIWDNYFYSMLLVVYNQDVTKASYISNIYTVGSSFWSIVMGVVIRYNGRLKWQALYFGVPITILGVALMIHFRHAGANIGYIVMCHIFIAFGGGTLVICEQMTVMAVSRQQDIPAILAAESMFIYIGSAVGSSIAAAMWTGIFPAKLKENLPADALPNLATIYGDITAQYGYAVGTPERDAINLSYSQTQRLMLITATCLYSVTLVSVLLWKDVNVKNIHQVKGRIF

SEQ ID NO: 46735 - protein, 241 aa, Glycine max
  misc_feature (223)..(223): Xaa can be any naturally occurring amino acid
  unsure (1)..(241): unsure at all Xaa locations
MAMDAERRQAELIEQFSAQAAALSSAPQLAALVLEATSHPALFAFSELLTLPALSKLTGTQYASSLDLLRLFAYGTLKDYKSNSSALPALLPDQARKLKQLSVLTLAESTKVLPYDQLMQELDVSNVRELEDFLINECMYSGIVRGKLDQLRRCFEVQFAAGRDLTHDQLTNMIETLSDWLGTSDNLLHQIQEKIKWADTTSESNKKHQKEFEDRVEEAKKSXRQTMTYGGMTTFSLNLEE

SEQ ID NO: 46736 - protein, 199 aa, Triticum aestivum
LQASGANAGYWTTNSGAPVWNNNNALTAGQRGPILLEDYHLIEKLAQFDRERIPERVVHARGASAKGFFEVTHDVSQLTCADFLRAPGVQTPVIVRFSTVVHERGSPETLRDPRGFAVKFYTREGNFDLVGNNMPVFFIRDGMKFPDMVHAFKPSPKTNMQENWRIVDFFSHHPESLHMFTFLFDDIGIPLNYRHMDSF

SEQ ID NO: 46737 - protein, 330 aa, Silicibacter sp. TM1040
MTKTYQLVGIGNAVVDVISQCDDSFLDHMGIEKGIMQLIERERGEVLYAAMKERVQTPGGSVANTIAGAGALGLSAAFIGRVHDDALGRFYAEAMQDDGVDFVNPPVAGGELPTSRSMIFVSPDGERSMNTYLGISSELSSADVSNAVAGQAQIMFLEGYLFDKDKGKSAFMEAARDCRAGGGKPGIAISDPFCVERHRADFLKLIETELEFVIGNEDEIRSLFETDDLEAALAKTAAICPLVVCTRSGDGVTVVSQEGRIDVPVIKVVPVDATGAGDQFAAGFLFGLAEGRDLETCARMGNACAAEVISHIGPRPKADMRAVLKQAGLL

SEQ ID NO: 46738 - protein, 1130 aa, Gloeobacter violaceus PCC 7421
MIAKFKSQRKGSIARRLLLTLGSLLLVFLLVFGFNYGLVFNQVENLRQSYRLSRELNINVYRMQEGMTDQETGVRGFLLARQEEFLAPFYQGRVQYLRSLEEARRVVQLITVRIEDPQMRSQMLSALDAAGQAAESWYEFVRAGEIESLRRGDVAAALDLGRSRQGKERFDRFRQAAAEVRRRNDLLFAQLEARISERQNQSEILSIGLLAMAGLLAGAISLGLVRSLRRPFAALEAAAVALGEGNFQTRVPAEVIENDDELAVLARSFNQTAERLGRQNLELRERDILGSLRVLDAVIVEEIDLDCLCGRLLESLGELTGSQLGALYLLEGERLLLQSSLGLSAPAPAIRLGEGMVGLAASRCAPVVLQSPPTGEPLSLETPAGALQPRSLSAWPLLSKQQLVGVLFVAGLEPLAPMARNLLESVSSQLAVALLNSRSVRAVEEARARLEATFEQMSDGVSIADARGNPQLINPAGLRILGLPADQDLTDSDWQNRFEVFTLEGEPLEAQEVPVRRAVRFGTTVRADLQIRIRQGRSVLLSVSASPLKDGRGNIYGVVAVFRDVTVERERERRLVQQARELEALNTELAATNEELEAQQSELEAINAELEQQRLQIESQNQELVEADRQKNNFLASMSHELRTPLNAIIGFSQLLLRNKNLQEQPQVLLQLDRVYQNGKIQLRLVNDILDLAKIKAGKVELRYQPVALEPFVREVYAALESLALQKNLSVRIAVDPSIGSVETDPQQLRTILINLLSNAFKYTERGEVEVRARRPAADRFELEVRDTGVGIDPDQQQKVFDEFSRLEGAATRQASGTGLGLAICKRLVTLMGGEISLVSTPGVGSTFTVRLPCGPAVIPAGRSAGEPPKVLFIEHDLQVQQLVATRLAERSYRLLFAPDSIEGIQIAKAERPDAIVLDPTLPRTDLWGVLFELRTDPTTAGIPILLQSIAGERGLAIPLGLADFLTRPVGQESLLAVLKRRRVAPEGDAILIVDDSADNREYLAACLRDEGYRVQPAASGHEALAYLESHRPQLVILDLMMPQMDGFEVLRRLRRMPGGRQLPVLILSAMDLTEQQRQTLLAEQTEQILKKGDQNIDELLSLLDDTLRRQLETARAAGAERLTPDTRSL

SEQ ID NO: 46739 - protein, 261 aa, Glycine max
MEFQKHHEEAELGLPIAVAATSYEEFGMPLNHGEQEPVVEVIPMAVPMAVPVAPPTNIVAQNSGKGKYQECLKNHGVSIGKHIIDGCIEFLPGGQEGTLEALKCVVCNCHRNFHRKETHDTYSVPFHHHHPPLPPPVPFAAYYRTPPGYPHMTGHQRAMLAHPSLSGGGGPQPPLEDLEDSDPTSGATTHDGSGSSSKKRFRTKFTQHQKDKMLVFAEKLGWRMQKNDDSVVQEFCSEIGVQRHVLKVWMHNNKHTLGKKP

SEQ ID NO: 46740 - protein, 304 aa, Kluyveromyces lactis
MVAPSQFKQLEKVGNGTYATVYKGLNKTTGVYVALKEVKLDSEEGTPSTAIREISLMKELKHDNIVRLFDVIHTENKLTLVFEFMDNDLKKFMDNRNKGNPHKGLEMDLVKYFQWQLLQGVAFCHENRILHRDLKPQNLLINNRGQLKLGDFGLARAFGIPVNTFSSEVVTLWYRAPDVLMGSRNYCTLIDIWSCGCILAEMIMGKPLFPGSNDEEQLKLIFDTMGTPVEQTWPQVTQLAKYNPLLPPHMPRDLKQLLQNNTEEVLDDNVVDLLHGLLQLNPDARLSAKDALNHPWFAEYNHAN

SEQ ID NO: 46741 - protein, 416 aa, Legionella pneumophila str. Paris
MSNTEYQTIDNETQYINGKEKHQNHAYPEYINHSMEKYYEGRVNKSWQGKHILKGKTPTANSLIFSSNDYLSISQHPQLIKAQIAAMQKYGNGQMQSAVFLNNSSFLLSQCEKKFSSFLNYSAALLTQSGWSANVGLIQTLAKYNTPVYLDFYAHMSFWSGVKAARAKPIPFLHNSVDSLKKRIEHHGPGIIAVDSIYSTLGTISPLADYADIARKFKCLLIVDESHSLGTHGSQGKGMVAKLGLSSQIDIITASLAKALSGRGGIITGDRQLIEYIRYSSLPSIFSSALMPHDLAGFSASLEIITQEEWRRAKLQTNADFLREALSYEGINIGSSGSQIVPLVTGSEANTLWLRDELEKEDLFGAVFCSPATPKNKCLIRLSISANHEKSDLLRVIECLAKLARKRPDIPLFKGN

SEQ ID NO: 46742 - protein, 450 aa, Oenococcus oeni PSU-1
MTDKKQTKYIFVTGGVVSSLGKGIVAASLGRLLKSRGLAVTVQKFDPYLNPDPGTMSPYQHGETFVTQDGVETDLDLGHYERFMDINTNKYSNVTSGKIYQEVIDRERTGDYMGRTVQVIPHVTDAIKDKIFRGAKESEADVIITEIGGTIGDIESMAFIEAIRQMKKEVGSDNTFYIHVSLVPFLRAAGELKTKPTQHSVHELRGMGIQPDMIVVRSEKAITDSMKEKLSEFTDVPTEAIIQSIDSDVLYSVPLNLAAQNMDQVVLEKLGLGSQPKANLSQWGALVDRIRHLSKEIKIALVGKYTDLPDAYISVHEALKHAGYAVDSKITLKSINSEMLTDNNVAEKLAGIDGVIVPGGFGPRGIEGMISAIKYARENNIPFFGVCLGMQMASVEFARDAVGMSNANSTEMNPDTPYPVVGLMDSQKKITKIGGTMRLGFLPGNIESRH

SEQ ID NO: 46743 - protein, 283 aa, Oryza sativa
MEFEDRCHKVQEPKFDCLLFDLDDTLYPLSSGIASHVKKNIGDYMVEKLGIEESKIENLGNLLYKNYGTTMAGLRAIGYSFDYDEYHSFVHGRLPYENIKPDPVLKHILKNLRIRKLIFTNGDKDHAVRALKRLGLEDCFEGIICFETLNPPCPSPPCDGEASIFDIAGHFSMPGAAADELPRTPVLCKPNVDAMEEALRIANVNPHKAIFFDDSVRNIQAGKRIGLHTVLVGTPQRVKGADHALESIHNIREALPELWEEAEKAEDVLIYSDRVAIETSVTA

SEQ ID NO: 46744 - protein, 323 aa, Glycine max
MHFNPNTALVDHSIFLLTMQIFVKTLTGKTITLEVESSDTIDNVKAKIQDKEGIPPDQQRLIFAGKQLEDGRTLADYNIQKESTLHLVLRLRGGMQIFVKTLTGKTITLEVESSDTIDNVKAKIQDKEGIPPDQQRLIFAGKQLEDGRTLADYNIQKESTLHLVLRLRGGMQIFVKTLTGKTITLEVESSDTIDNVKAKIQDKEGIPPDQQRLIFAGKQLEDGRTLADYNIQKESTLHLVLRLRGGMQIFVKTLTGKTITLEVESSDTIDNVKAKIQDKEGIPPDQQRLIFAGKQLEDGRTLADYNIQKESTLHLVLRLRGGF

SEQ ID NO: 46745 - protein, 245 aa, Bdellovibrio bacteriovorus HD100
MYKILFACPIRWYRNPMALQERTLKKEILKMVVGFHRFQQRFFNNQDSHLYEHLSSIGQSPKTLMIACSDSRVDPAILFSSSPGEMFVVRNVANLVPPYESNMGFHGVSAAIEFAVANLKVENIVVLGHRQCGGIRSLFQPENVLKGGFVAQWMTIAETAKLKVLEKDPHGDLDTHCRDCEKESIVISLQNLRSFPFIQDAIKNRGLELFGVYFDLENGHLWNYNDATHVFDEVTLNGLRATNLP

SEQ ID NO: 46746 - protein, 226 aa, Oenococcus oeni PSU-1
MNLAEKINVVRASVMGANDGIISVAGIVLGVFAATQGRTNDNWVIFVAGFSGTIAGMISMAAGEYVSVHGQRDAENAAIEKEEIANQESFNQQISLVKDFLIKDDISKELAQRAASEMMKTKPIETAVRVKHGFNISDKINPYHAALASFISFPIGATLPMLAILMVNRSYKVASTYFGVLLALIITGYLAARIGNNDRKKGITRNVLSGLFTMTATYLIGRLLHK

SEQ ID NO: 46747 - protein, 140 aa, Ipomoea pes-tigridis
  misc_feature (5)..(5): Xaa can be any naturally occurring amino acid
  unsure (1)..(140): unsure at all Xaa locations
TQEWXPATDKYVGVKYDITTVMQAKPLLKEALQAAVGLPVDRDIPLIGFIGRLEEQKGSDILYAAIPEFISMNVQIVILGTGKKKFEQQIEQLEVMYPDKARGVAKFNVPLAHMITAGADFMLIPSRFEPCGLIQLHAMR

SEQ ID NO: 46748 - protein, 599 aa, Nicotiana tabacum
MGHCCSKGVTADNDGHVVSVVDGNSSVSTNNRPKPSPSPARPQSVGNGTSYTNNNTPAHSFTTSPFQSPYPAGIPPSPSPVGTARRKFKWPFPPPSPAKPILSAILKRQGTTSAKPKEGPIPEDEGGEGERQLDKSFGYPKNLTAKIELGKEVGRGHFGHTCWAKGKKGELKNQPVAVKIISKAKMTTAISIEDVRREVKILKALSGHQNLVKFYDAFEDANNVYIVMELCEGGVLLDRILSRGGRYTEEDAKSILVQILNVVAFCHLQGVVHRDLKPENFLFTKKEEDAPMKVIDFGLSDFIRPDQRLNDIVGSAYYVAPEVLHRSYSIEADMWSIGVITYILLCGSRPFWARTESGIFRSVLRADPNFEDSPWPSVSAEARDFVKRLLNKDHRKRMTASQALAHPWLRTENPVLPLDILIFKLVKSYTRASPLKRAALKALSKALTEEELIYLRAQFNLLEPKDGRVSLNNFKMALTKQMTDAMRESRVFDILNLMEPLSYKPLDFEEFCAAAISTYQLEALENWEQIASAAFEHFEQEGNRVISVEELAQEMNLGPTAYAFLKDCIRPSDRKLSFLGYTKYLHGVTIRGSSTRHHR

SEQ ID NO: 46749 - protein, 140 aa, Ipomoea ochracea
PQEWNPATDKYLGVKYDITTVMQAKPLLKEALQAAVGLPVDRDIPLIGFIGRLEEQKGSDILYAAIPKFISMNVQIVILGTGKKKFEQQIEQLEVMYPDKARGVAKFNVPLAHMITAGADFMLIPSRFEPCGLIQLHAMR

SEQ ID NO: 46750 - protein, 140 aa, Ipomoea obscura
  misc_feature (5)..(6): Xaa can be any naturally occurring amino acid
  unsure (1)..(140): unsure at all Xaa locations
TQEWXXATDKYLGVKYDITTVMQAKPLLKEALQAAVGLPVDRDIPLIGFIGRLEEQKGSDILYAAIPKFISMNVQIVILGTGKKKFEQQIEQLEVMYPDKARGVAKFNVPLAHMITAGADFMLIPSRFEPCGLIQLHAMR

SEQ ID NO: 46751 - protein, 358 aa, Prunus armeniaca
MARVTLVLSAALVLVAISCGAAASSFDESNPIRLVSDGLRELEQQVVQVLGNSRRALHFARFAHRYGKKYESVEEMKLRYEIFSENKKLIRSTNKKGLPYTLAVNRFADWSWEEFRRQRLGAAQNCSATTKGSHELTDAVLPESKNWREEGIVTPVKDQGHCGSCWTFSTTGALEAAYVQAFRKQISLSEQQLVDCAGAFNNFGCHGGLPSQAFEYIKYNGGLDTEAAYPYVGTDGACKFSAENVGVQVLDSVNITLGDEQELKHAVAFVRPVSVAFQVVKSFRIYKSGVYTSDTCGSSPMDVNHAVLAVGYGEEGGVPFWLIKNSWGESWGDNGYFKMEFGKNMCGVATCASYPIVA

SEQ ID NO: 46752 - protein, 602 aa, Nicotiana tabacum
MGACTSKPSNFSVDDITVAGDGAIFPVKSGPSNDDDVNSHQTKNDEPSVGKKSPFFPFYSPSPAHYLFSKKSPATNASSNSTPMRFFKRPFPPPSPAKHIRSLLARRHGTVKPNESAIPEGNESEVGDGGGAGLDKSFGFSKNFVNKYEMGEEVGRGHFGYTCKAKFKKGEVKGQEVAVKVIPKSKMTTAIAIEDVRREVKILRALTGHNNLVKFYDAYEDPNNVYIVMELCEGGELLDRILSRGGKYTEDDAKSVMIQILKVVAFCHLQGVVHRDLKPENFLFTSKDENAQLKAIDFGLSDFVKPDERLNDIVGSAYYVAPEVLHRSYSTEADVWSIGVIAYILLCGSRPFWARTESGIFRAVLKADPSFDEQPWPTLSSEAKDFVKRLLNKDPRKRMTAAQALGHPWIKNSHNMEEPLDILIFKLMKAYMRSSALRKAALRALSKTLTVDELFYLKEQFALLEPNKNGTISFNNIKTALMKHATDAMKEARMHDFLASLNALQYRRMDFEEFCAAALSVHQLEALDRWEQHARCAYEIFEKEGNRAIMIEELASELGLSPSVPVHAVLHDWLRHTDGKLSFLGFAKLLHGVSSRSITKVQ

SEQ ID NO: 46753 - protein, 209 aa, Zea mays
  misc_feature (10)..(10): Xaa can be any naturally occurring amino acid
  unsure (1)..(209): unsure at all Xaa locations
GKGIAGQRFXVIQGFGNVGSWAAQLISEAGGKVIAISDVTGAVKNVDGLDIVQLVKHSAENKGIKGFKGGDAIAPDSLLTEECDILSKKGVLILPDILANSGGVTVSYFEWVQVSSSLLPTNIQGFMWDEEKVNAELRTYMTRAFGDVKQMCRSHSCDLRMGAFTLGVNRVARATVLRGWEACPPSVSSVCPSLLYPLGLGLGPLFFFG

SEQ ID NO: 46754 - protein, 140 aa, Ipomoea wrightii
TQEWNPATDKYLAVKYDITTVMQAKPLLKEALQAAVGLPVDRNIPLIGFIGRLEEQKGSDILYAAISKFISMDVQIVILGTGKKKFEQQIEQLEVMYPDKARGVAKFNVPLAHMITAGADFMLIPSRFEPCGLIQLHAMR

SEQ ID NO: 46755 - protein, 216 aa, Campylobacter upsaliensis RM3195
MKNYYLVDEKRRNPQNTWEKITRALKRSVKLELFVGLWVVMRELLKKGNSATIKYPFEKVQIDNRYRAVHRLMRFIESENERCIGCGLCEKICISNCIRMETSLDENGRKKANNYSINLGRCIYCGFCAEVCPELAIVHGKEYENAAEQRSYFGYKEDFLTPIDKLKNQVEFEGAGSLRKDADRFVKKTPQYYEILQKREQGLRDDTNCTLPKGEA

SEQ ID NO: 46756 - protein, 340 aa, Rubrobacter xylanophilus DSM 9941
MSGFEGLGLLGEEKLVGMLRLMLRIRRFEEKLAELFKRGKLPGFVHLYIGEEAVAVGACSALREDDRITSTHRGHGHVIAKGADVSRMMAELLGKEAGYCRGKGGSMHTVDFSLGIMGTNGIVGGGIPIAVGSAWGDRQLGRDTVTVSFFGDGASNQGVFFEGMNLAAIWKLPVIFLCENNGYTEWTPTEKLTAGRISDRGVPFGIPSVQVDGNDVISVHEAVSEAVGRARAGEGPSLIEARTYRWHGHNEGEEAFSGPYRPEEEIEEWKGKDPITTFAARLVEQGVFAREEIERVDAEEKERIEDAVRFAVESAYPDPEEALMHLFYDERPRLQQEVNR

SEQ ID NO: 46757 - protein, 490 aa, Photorhabdus luminescens subsp. laumondii TTO1
MTNNVNTELLRQQAYINGQWVDADNQATFKVTNPANGEVIAHVSNMGAAETERAIAAAQQALPAWRTMTAKQRSQILQRWFQLMMANQPALAELLSREQGKSQTEAMGEIAYGASFIEWFAEEGKRTYGETIPSPLPGRRIVTIKQPIGVVAAITPWNFPNAMITRKVGPALAAGCTVILKPASETPLSALALAALAEQAGIPAGVFNVVTGIDAKAIGGAMTQSPIVRKLSFTGSTRVGKLLMAQSADTVKKLSLELGGNAPFIVFDDANIDAAVQGALIAKFRNSGQTCVCANRILVQETIYDTFAERLAQAVNQLQVGPASDAKSQQGPLINQAAVDKVEEHISDAISHGARILAGGKPHALGGLFFEPTVLADVNKSMLISQEETFGPIAPLFKFRDEAEAIHLANETEFGLAAYFYSRDIGRIYRVAEALESGMVGINEGLISNEAAPFGGIKQSGLGREGSRYGIEDYLEVKYLCFGGIEDTGV

SEQ ID NO: 46758 - protein, 373 aa, Arabidopsis thaliana
MSASSSPPPPTTATSKSKKGTKKEIQESLLTPRFYTTDFEEMEQLFNTEINKNLNEAEFEALLQEFKTDYNQTHFVRNKEFKEAADKLQGPLRQIFVEFLERSCTAEFSGFLLYKELGRRSKKTNPVVAEIFSLMSRDEARHAGFLNKGLSDFNLALDLGFLTKARKYTFFKPKFIFYATYLSEKIGYWRYITIYRHLKENPEFQCYPIFKYFENWCQDENRHGDFFSALMKAQPQFLNDWQAKLWSRFFCLSVYVTMYLNDCQRTNFYEGIGLNTKEFDMHVIIETNRTTARIFPAVLDVENPEFKRKLDRMVVSYEKLLAIGETDDASFIKTLKRIPLVTSLASEILAAYLMPPVESGSVDFAEFEPNLVY

SEQ ID NO: 46759 - protein, 468 aa, Rhizobium etli
MSRLIVVSNRVPVPSKDGGAAAGGLAVALQAALQERGGIWMGWSGESSGEREPGALSLQQKGNITYALTDLTDTDVEEYYRGFANRVLWPICHYRLDLAEYGRKEMAGYFRVNRFFAHRLAPMIEPDDIIWVHDYHLIPLAAELRQMGLKNRIGFFLHIPWPPADILVTMPVHEEIMRGLSHYDLVGFQTDYDLQNFAGYLRREGIGDDLGNGLFDSHGRTFKAGAYPIGIETAAFAEFAERAADNVMVQKTRRSIEGRDMIIGVDRLDYSKGIIQRLEAFERFLTSNPAYQNKVTYLQVTPKSRSEVPEYEHMQKMVAEQAGRVNGAIGTVDWVPIRYVNRSISRNVLAGLYRLATIGLVTPLRDGMNLVAKEYVAAQDPDRPGVLVLSRFAGAARELKGALLVNPYDVEGTANALARGLAMSLEERRDRWSMMMEHLLSHDVSLWCKDFLRDLVAVPSSDGSGAHG

SEQ ID NO: 46760 - protein, 161 aa, Oryza sativa
  misc_feature (15)..(15): Xaa can be any naturally occurring amino acid
  misc_feature (155)..(155): Xaa can be any naturally occurring amino acid
  unsure (1)..(161): unsure at all Xaa locations
MASSSVFAGLAQCAXSDPILGVTVAYNKDPSPVKVNLGVGAYRTEEGKPLVLNVVRRAEQMLINNPSRVKEYLPITGLADFNKLSAKLIFGADSPAIQENRVATVQCLSGTGSLRVGGEFLARHYHERTIYIPQPTWGNHPKVFTLAGLTVRSYXYYDPEP

SEQ ID NO: 46761 - protein, 325 aa, GIBBERELLA ZEAE PH-1
MVLHNPNNWHWVNKDVSGWARSYLDEAVAKVQVEDGEVKAKIDKIQSMDGDVDVSQRKGKVITIFDVKLVLQYSGSAPGEDDVSGTITVPELAHDTEEDEYVFDVDIFAESKEKQPVKDLVRSKIVPQLRQEFQKLAGALIAEHGKDIQHAPGSNPSSGFSTPKVHPQSSTPKPAATTSTQSKTGSVVNTTTVTDNEEFRTTAEELYQTFVDPQRIAAFTRSPPKVFDGAKVGGKFELFGGNVSGEYLELEQPKKITQSWRLNQWPAGHFSKLHMEFDQNDVDHVTVMRVKWEGVPIGQEDVTKRNWLEYYVKSIKQTFGFGTIL

SEQ ID NO: 46762 - protein, 471 aa, Nocardia farcinica IFM 10152
MPLSHPSFPQDPGPSEVAVNPVFTREPVSVPRDRLPAGELDADIAYQVVHDELMLDGNARLNLATFVTTWMEPSARVLMAECFDKNMIDKDEYPRTADLEQRCVRMLADLWHAADPAHATGCSTTGSSEACMLAGLALKRRWQHRRRAAGLSTERPNLVMGANVQVCWEKFADYWDVEARLVPMAGDRFHLTAEAALPHCDENTIGVVAVLGSTFDGSYEPVAEICAALDELERQRGWDIPVHVDGASGAMVAPFCDPDLVWDFRLPRVASVNTSGHKYGLVYPGVGWVVWRDAAALPEDLIFRVNYLGGQMPTFALNFSRPGAQVVAQYYTFLRLGRSGYTRVQQYCRDVATRLADRIAALGAFRLLTDGRQLPVFAFTLAEGETGYSVFDVSAALREQGWLVPAYTFPADREDLAVLRIVVRNGFSHDLADMLLDALAAVLPRLRAQDRPQHGPDTATFAHGAQAPSGH

SEQ ID NO: 46763 - protein, 94 aa, Lactococcus lactis subsp. lactis Il1403
MLKPLENRVVLRVKEEEEKSMGGIVLTSASQEKPQTAEVVAVGEGKTNHHGTLISPLVKVGDTVIFEKFAGTTVKMDGEEFLILKDSDLLAIVE

SEQ ID NO: 46764 - protein, 542 aa, Lactococcus lactis subsp. lactis Il1403
MSKDIKFSSDARTAMMRGIDILADTVKTTLGPKGRNVVLEKSYGSPLITNDGVTIAKEIELEDHFENMGAKLVSEVASKTNDIAGDGTTTATVLTQAIVREGLKNVTAGANPVGIRRGIELAAETAVASIKEMAIPVHDKSAIAQVATVSSRSEKVGEYISDAMERVGSDGVITIEESKGMQTELDVVEGMQFDRGYLSQYMVSNTEKMVAELDNPYILITDKKISNIQEILPLLEQILKTNRPLLIVADDVDGEALPTLVLNKIKGVFNVVAVKAPGFGDRRKAQLEDLAILTGGTVITEELGLDLKDATLEALGQAAKATVDKDHTTIVEGAGSADAISDRVAIIKAQIEKTTSDFDREKLQERLAKLAGGVAVVKVGAATETELKAMKLLIEDALNATRAAVEEGIVSGGGTALVNAIAALDKLSEEGDIQTGINIVRRALEEPVRQIAANAGYEGSVIIDKLRSEEVGTGFNAATGQWVNMIEEGIVDPAKVTRSALQNAASVAGLILTTEAVVANKPEPAAPAMPPMDPSMGMGGMM

SEQ ID NO: 46765 - protein, 344 aa, SYNECHOCOCCUS SP. WH 8102
MTCRILITGGAGFIGSHTCLVLLEQGHSLVVVDNFDNSSPEALRRVQELAASDALQLVEGDLRNPDVLDRAFRSGRPVDGVIHFAGLKAVGESVADPLRYWDVNLNGSRVLAAVMERHGCRTLVFSSTSTVYGEPEQFPLHEGMATAPVHPYAQTKLAVEQMLGALCRSGSWRVACLRYFNPVGAHPSGRIGEDPLGIPNNLFPFITQVAAGRRDKLRVFGQDYPTPDGTGIRDYLHVMDLAEAHGVTLTHLLNQEPPTQLTVNIGTGTGLSVLDVIKGFEQATGITIPYEVVARRPGDVPRLQACPRQAEAVLGWTARRGLVEMCRDGWAWQQANPMGYRSAP

SEQ ID NO: 46766 - protein, 307 aa, Legionella pneumophila str. Paris
MSKHSHDGAYHHEHGEVTYDRAFIIAITANGLFVVMQIIFAYLANSTSLLADAFHNLGDVLGLILAWVATGLMKRKPTHKATYGFKKTSILAALANGALLVFTCGIIATDAMYKLFSPTEVQAVSVMIVAAIGIVVNFSTALLFLRGSDDLNIRGAYLHLFYDALISVGVVLSAGVLYLTGWLWIDPVVGLLIALVILKGTWSLFADSFRLIIDGVPRDISWIKVSDFLLAIPGVKSIHDLHIWAISTKENALSVHLFMPEESLSDDLRRELVEKLKHDFSIQHVTIQVEKTEAECNDACHNPRIII

SEQ ID NO: 46767 - protein, 501 aa, Centaurium erythraea
MEITDFSTFLLAFLLLSYLLVTGRRLISKKSTGKLPPGPKKFPIVGNLPQLALAGTLPHRAMRDLAKTYGPLMHLRLGEVSQLVVSSPEMAKEVLKTLDPMFASRPDLILADIMLYDNAGLTFAKYGDYWRQLKKIFATELLSAKRVKSFRSLREEETLNTIRWISSNEGKPINMTNTLLNLVFGVLSRATFGKKSPEQDKLVYIVNKAAELATGGNISDLFPSIKFFRLISVVNYKLKSMFAESNRLLDMIMKEHKKGNGSGESKDLVDVLLGYQRENAEFSLTDENIKAVLLDIFIGGTDGSFTTLDWAMSELMRAPTVLKRAQEEVRQAFETDGYIDEEKFEDLKYVTSIIKETLRLHPPAPLLVPRSNDETAHILGYEVPAKSKILVNVWAINRDPRYWEDAESFKPERFLGSSVGYKGTDFHFLTFGAGRRMCPGMVYGYANIVHPLVKLLYYFDWNLPSGIKPEELDMTEEHGLSVKRKADLYLIPSVRNSISHL

SEQ ID NO: 46768 - protein, 332 aa, Mesembryanthemum crystallinum
MAVEPLRVLVTGAAGQIGYALVPMIARGIMLGANQPVILHMLDIPPAAEALNGVKMELVDAAFPLLKGVVATTDAAEACKGVNVAVMVGGFPRKEGMERKDVMSKNVSIYKAQASALEQHAAPNCKVLVVANPANTNALILKEFAPSIPEKNISCLTRLDHNRALGQISERLNVQVSDVKNVIIWGNHSSTQYPDVNHATVKTQGVDKPVRELVADDAWLNGEFITTVQQRGAAIIKARKLSSALSAASSACDHIHDWVLGTPEGTWVSMGVYSDGSYNVPAGIIYSFPVTCKNGEWTIVQGLPIDDDSRKKMDATAAELVEEKTLAYSCLT

SEQ ID NO: 46769 - protein, 972 aa, SYNECHOCOCCUS SP. WH 8102
MTQSPPFPLLKHPAFKGVSDAALLRLQDSSSLLRFELGQQLCEPDDIPARILVLLQGQARLVGRHNGRLTTVGKFGPGSLIGAASLLCGSPCENVIASDEVIACAISDEQWTQLYSEEESFRQWCDQQLWPQELLALLEVLEEGTAETDSSALEKLEQALKSVKRCLPDAEAIDAALATGGRLYLTSCWGHASLGQSIQAVSDIPDSDRFRQRLVLFPGLSADSAEKEPGGDLVPANAVKKAELLPPVSRYSPERNVVDSLRLIRAEGPIQETLACFQMLAQLMKLPFRRDSIEKVLQDNLRRGLTPNLQLCGQLAASLGLHVMAAKVPSVSGTRLQVPSMLPWKQGFALVVASSEQGLRLASPKHGMVTVAPDQLAESFPEGIELLLMERSNATPDQKFGPGWFWPALKRYRGVLIQVLAASFVVQLFTLANPLLIQVIIDKVISQRSLDTLQVLGIALVMVTILEGVLGSLKTFLFAETTNRIDQRLGAEVIDHLLRLPLGYFDRRPVGELGTRVAELEKIRNFLTGQALTTILDAAFSVIYIMVMVIYSWLLTLIALSVLPIQIGLTVLGAPLFRRQFRAAAEENAKTQSHLVEVLTGIQTVKAQNVEMVSRWRWQEFYSQYIARTFEKTITGTALNQTSQVLQKISQLMVLWIGASMVLSGDLTLGQLIAFRIISGYVTQPLLRLSTIWQNIQELRVSFERLADVIDTPEESDEVDKSKVMLPPLHGEVRFEGLSFRFRPGQPEVLKDINLEIKAGTFVGIVGQSGSGKSTLMKLLPRLYEPGEGRILIDGYDIAKVELYSLRRQIGIVPQDPLLFSGTVSENIALTNPEASSEEIVRAARLANAHDFIMDLPSGYSTPVGERGASLSGGQRQRVAIARTLLSNPKLLVMDEATSALDYETERKVCDNLLENLDDQTVFFITHRLSTIRQADVIVMLHQGAVVEVGTHEDLMKHRGRYYALYRQQEST

SEQ ID NO: 46770 - protein, 597 aa, Arabidopsis thaliana
MKYVLVTGGVVSGLGKGITASSVGVLLQSCGLRVTCIKIDPYLNYDAGTISPYEHGEVFVLDDGSEVDLDLGNYERFLDTTLTRDNNITYGKIQRYVMEKERKGDYLGETVQIVPHVTDTIREWVERVAMIPVDGKEGPPDVCIIELGGTIGDNESRPFADALSQLSYSVGRENFCLIHVTLVPVLSVVGEQKTKPTQHSIKDLRGFGLTPNIIACRSTKALEENVKAKLSRFCYVPIQNIFSLCDVPNIWHIPLLLKEQKAHEAISKVLNLSGIAKEPSLEKWASMVEISDGLNVPVRIAIVGKYTDLSDAYLSVLKALLHASVAFHKKLEVDMVPSCDLEKTKKQEDSRAYEAAWKLLKDANGVLLPGGFGDRGVEGMILAAKYARENNIPFLGICLGMQIAVIEFARSLLCLPDANSTEFEPETKHPCIIFMPEGSITHMGGTMRLGSRRAYFHDKESKSARLYGNKEFVDERHRHRYEVNPDMVASLEQAGLSFAAKDETGERMEIVELPSHPFFIGAQFHPEYKSRPRKVSPLFLGLIAASCGELDAVLNPVSIHQHNQTMFLEKKQHIGWSKKCFGDKNQQEEISETSFPM

SEQ ID NO: 46771 - protein, 1987 aa, Arabidopsis thaliana
MNSRADPGDRYFRVPLENQTQQEFMGSWIPFTPKKPRSSLMVDERVINQDLNGFPGGEFVDRGFCNTGVDHNGVFDHGAHQGVTNLSMMINSLAGSHAQAWSNSERDLLGRSEVTSPLAPVIRNTTGNVEPVNGNFTSDVGMVNGPFTQSGTSQAGYNEFELDDLLNPDQMPFSFTSLLSGGDSLFKVRQYGPPACNKPLYNLNSPIRREAVGSVCESSFQYVPSTPSLFRTGEKTGFLEQIVTTTGHEIPEPKSDKSMQSIMDSSAVNATEATEQNDGSRQDVLEFDLNKTPQQKPSKRKRKFMPKVVVEGKPKRKPRKPAELPKVVVEGKPKRKPRKAATQEKVKSKETGSAKKKNLKESATKKPANVGDMSNKSPEVTLKSCRKALNFDLENPGDARQGDSESEIVQNSSGANSFSEIRDAIGGTNGSFLDSVSQIDKTNGLGAMNQPLEVSMGNQPDKLSTGAKLARDQQPDLLTRNQQCQFPVATQNTQFPMENQQAWLQMKNQLIGFPFGNQQPRMTIRNQQPCLAMGNQQPMYLIGTPRPALVSGNQQLGGPQGNKRPIFLNHQTCLPAGNQLYGSPTDMHQLVMSTGGQQHGLLIKNQQPGSLIRGQQPCVPLIDQQPATPKGFTHLNQMVATSMSSPGLRPHSQSQVPTTYLHVESVSRILNGTTGTCQRSRAPAYDSLQQDIHQGNKYILSHEISNGNGCKKALPQNSSLPTPIMAKLEEARGSKRQYHRAMGQTEKHDLNLAQQIAQSQDVERHNSSTCVEYLDAAKKTKIQKVVQENLHGMPPEVIEIEDDPTDGARKGKNTASISKGASKGNSSPVKKTAEKEKCIVPKTPAKKGRAGRKKSVPPPAHASEIQLWQPTPPKTPLSRSKPKGKGRKSIQDSGKARGPSGELLCQDSIAEIIYRMQNLYLGDKEREQEQNAMVLYKGDGALVPYESKKRKPRPKVDIDDETTRIWNLLMGKGDEKEGDEEKDKKKEKWWEEERRVFRGRADSFIARMHLVQGDRRFSPWKGSVVDSVIGVFLTQNVSDHLSSSAFMSLAARFPPKLSSSREDERNVRSVVVEDPEGCILNLNEIPSWQEKVQHPSDMEVSGVDSGSKEQLRDCSNSGIERFNFLEKSIQNLEEEVLSSQDSFDPAIFQSCGRVGSCSCSKSDAEFPTTRCETKTVSGTSQSVQTGSPNLSDEICLQGNERPHLYEGSGDVQKQETTNVAQKKPDLEKTMNWKDSVCFGQPRNDTNWQTTPSSSYEQCATRQPHVLDIEDFGMQGEGLGYSWMSISPRVDRVKNKNVPRRFFRQGGSVPREFTGQIIPSTPHELPGMGLSGSSSAVQEHQDDTQHNQQDEMNKASHLQKTFLDLLNSSEECLTRQSSTKQNITDGCLPRDRTAEDVVDPLSNNSSLQNILVESNSSNKEQTAVEYKETNATILREMKGTLADGKKPTSQWDSLRKDVEGNEGRQERNKNNMDSIDYEAIRRASISEISEAIKERGMNNMLAVRIKDFLERIVKDHGGIDLEWLRESPPDKAKDYLLSIRGLGLKSVECVRLLTLHNLAFPVDTNVGRIAVRMGWVPLQPLPESLQLHLLELYPVLESIQKFLWPRLCKLDQRTLYELHYQLITFGKVFCTKSRPNCNACPMRGECRHFASAYASARLALPAPEERSLTSATIPVPPESYPPVAIPMIELPLPLEKSLASGAPSNRENCEPIIEEPASPGQECTEITESDIEDAYYNEDPDEIPTIKLNIEQFGMTLREHMERNMELQEGDMSKALVALHPTTTSIPTPKLKNISRLRTEHQVYELPDSHRLLDGMDKREPDDPSPYLLAIWTPGETANSAQPPEQKCGGKASGKMCFDETCSECNSLREANSQTVRGTLLIPCRTAMRGSFPLNGTYFQVNELFADHESSLKPIDVPRDWIWDLPRRTVYFGTSVTSIFRGLSTEQIQFCFWKGFVCVRGFEQKTRAPRPLMARLHFPASKLKNNKT

SEQ ID NO: 46772 - protein, 331 aa, Xenorhabdus nematophila
MSQSTLKVNELYDDADLDENSMEADDFDEALLKNGDDVTNLDEDLDLLQGVNQRMLDATQLYLGEIGFSPLLTAEEEVLFARRALRGDIAARQRMIESNLRLVVKISRRYSNRGLALLDLIEEGNLGLIRAVEKFDPERGFRFSTYATWWIRQTIERAIMNQTRTIRLPIHIVKELNVYLRTARELAHKLDHEPTVEEIAERLDKPVEDISRMMRLNERITSVDTPISGDSDKALLDILSDENDSGPETTIQDDDMKQSIVKWLFELNAKQREVLARRFGLLGYEAETLEDVGREIGLTRERVRQIQVEGLRRLRDILHTQGLNLESLFRT

SEQ ID NO: 46773 - protein, 401 aa, Zea mays
MAFPPWAALLFAGVLVVVLAAAGAEAGGGSVCFDRMFSFGDSLTDTGNFLLSVPDDFPDPARNLPYGQTFFGRPSGRYSDGRNLLDFFAEAFGLPYVPPYLGGGDFQNGANFAVGGATALNGSFFRERGVEPTWTPHSLDEQMQWFKKLLTSIAPLETEQNKIISKSLFFVGEVGGNDYNHLIVRDKSVDELHEVVPNVVGAISSAITDLINLGAKKLVVPGNFPIGCVPLYLAIFQSQKEDYYEEQTGCIKWLNDFAEYHNKMLQEELEKLRNLHPDVTIIYADYYGAALNIFRAPLQFGFTVPLNACCGSDAPYNCSPSILCGRPGSTVCPDPSKYISWDGLHFTEASYKVVIQGVLGGYAKPPLSETCKGAEFKVSQLHQCTDNPTNTVSYDALSSFI

SEQ ID NO: 46774 - protein, 371 aa, Streptococcus pneumoniae TIGR4
MTFATLRRNREAYIDRARSSYDGSFKRNGVDLIEGHAEFVDSHTVSVNGELIRAKHIVIATGAHPSIPNIPGAELGGSSDDVFAWEELPESIAILGAGYIAVELAGVLHTFGVKTDLFVRRDRPLRGFDSYIVEGLVKEMERTNLPLHTHKVPVKLEKTTDGITIHFEDGTSHTASQVIWATGRRPNVKGLQLEKAGVTLNERGFIQVDEYQNTVVEGIYALGDVTGEKELTPVAIKAGRTLSERLFNGKTTAKMDYSTIPTVVFSHPAIGTVGLTEEQAIKEYGQDQIKVYKSSFASMYSACTRNRQESRFKLITAGSEEKVVGLHGIGYGVDEMIQGFAVAIKMGATKADFDATVAIHPTASEEFVTMR

SEQ ID NO: 46775 - protein, 108 aa, Brassica napus
MAMAKSSFKLSHPLEARMGEATRIREKYPDRVPVIVEKAGQSDVPDIDKKKYLVPADLTVGQFVYVVRKRIKLGAEKAIFVFVKNTLPPTAALMSAIYEEHKDEDGFL

SEQ ID NO: 46776 - protein, 338 aa, Leuconostoc mesenteroides
MEALVLTGTKKLEVKDIDRPKVLPNEVLIHTAFAGICGTDHALYAGLPGSADAVPPIVLGHENSGVVAEIGSAVTNVKVGDRVTVDPNIYCGQCKYCRTARPELCENLSAVGVTRDGGFEEFFTAPASVVYPIPDNVSLKSAAVVEPISCAVHGIQLLKVTPYQKALVIGDGFMGELFVQILQAYGIHQVDLAGIVDEKLAMNKEKFGVKNTYNTMKGDKIPEGEYDVIIEAVGLPQTQEAAIEASARGAQVLMFGVGGPDAKFQMNTYEVFQKQLTIQGSFINPNAFEDSLALLSSGKLNVEALMSHELDYKTVDDFVNGKLGVVSKAVVKVGGEEA

SEQ ID NO: 46777 - protein, 241 aa, Bdellovibrio bacteriovorus HD100
MLKVSVVIPAYNEEDRLPGTLQRLRELSDRGELKAEICEVLVIDDGSRDRTREVVESGRDQWPLLRLCSLQENRGKGAAVKKGLIEARGDWILVADADMATPWEELNKLLVYSDSADLIMGSRALPDSLIEVRQHWIRQTMGKIFNRIMRFFIGLPYKDTQCGFKLVRNEEVFRTKILPLLSVERFAWDVELILFMEKFRLRVREVPIRWQHKESSRVRIVHDSIEMLFAIRQMRRRLKKA

SEQ ID NO: 46778 - protein, 64 aa, ASPERGILLUS NIDULANS FGSC A4
MTKCIYCGYCQESCPVDAIVETANAEYATETREELLYNKEKLLANGDKWEPEIAAAARADAPYR

SEQ ID NO: 46779 - protein, 140 aa, Ipomoea imperati
TQEWNPATDKYLAVKYDITTVMQAKPLLKEALQAAVGLPVDRNIPLIGFIGRLEEQKGSDILYAAISKFISMDVQIVILGTGKRKFEQQIEQLEVMYPDKARGVAKFNIPLAHMITAGADFMLIPSRFEPCGLIQLHAMR

SEQ ID NO: 46780 - protein, 110 aa, Symbiodinium microadriaticum
FDKDGDGTITTKELGTVMRSLGQNPTEAELQDMINEVDADGNGTIDFPEFLSLMARKMKDTDTEEELIEAFKVFDRDGNGFISAAELRHVMTNLGEKLTDEEVDEMIREA

SEQ ID NO: 46781 - protein, 220 aa, Rhodopseudomonas palustris CGA009
MVVEAAKRGAESVVTALYVRTRQLHLEAEKSGILSEILHGTAGRDGYTLLLRNLHPAYRAIEAGIERHRDNPILAPLAAHPLARTPAIESDLAALAGADWHERLPVLPAAEAYAQRIAEVSEGDGSRLIAHAYTRYLGDLNGGQIVRRLLEKTMQLSAGELAHYDFSAIGDPATLKTDYREALERAGAAAPDAAAVIEEGAVAFTCNIALSVAVQQHLDA

SEQ ID NO: 46782 - protein, 209 aa, Pseudomonas putida KT2440
MSNPIKLYNFPKSGHAHRIELMLSLLNLPTELVFVDLAKGAHKQPDFLALNPFGQVPVIDDNGTVIADSNAILVYLAKKYDNGTWLPEEPAAAARVQRWLSVAAGPLAFGPAAARLVTVFGASFNTDEVISRAHTLLKVIDAELANTPFLTGSTPTIADIANYSYIAHAPEGNVSLEPYANVRNWLARIEALPRFVPMPRTVIGLQTHA

SEQ ID NO: 46783 - protein, 140 aa, Ipomoea aquatica
PQEWNPATDKYLGVKYDITTVMQAKPLLKEALQAAVGLPVDRNVPLIGFIGRLEEQKGSDILYAAISKFISMDVQIVILGTGKKKFEQQIEQLEVMYPDKARGVAKFNVPLAHMITAGADFMLIPSRFEPCGLIQLHAMR

SEQ ID NO: 46784 - protein, 664 aa, Zea mays
MSPSNPLPPPGETRVGCSLPSPVTPQAMGGGPARHVAMRALRARFLSRQREGGPAAASTWWWCASGSAKGDMESTLKGIRGSDAPCVLDLDDAATVAGGVEDTYGEDRATEEQLVTPWTVSVASGYNLLRDPRYNKGLAFTERERETHYLRGLLPPAIVSQELQERKIMNNIRQYQLPLQRYMALMDLQEGNERLFYKLLIDNVEELLPIVYTPTVGEACQKYGSIFSRPQGLYISLKEKGKILEVLKNWPERSIQVIVVTDGERILGLGDLGCQGMGIPVGKLSLYTALGGVRPSACLPITLDVGTNNEELLNDEFYIGLRQRRATGQEYTDFLQEFMSAVKQNYGEKVLIQFEDFANHNAFDLLARYGTTHLVFNDDIQGTASVVLAGLIAAQTLLGGSLADHTYLFLGAGEAGTGIAELIALEISRQTKAPIEECRKKIWLVDSKGLIVSTRKESLQHFKKPWAHEHKPLSNLLDAVNAIKPTVLIGTSGKGQTFTKDVVEAISSFNERPIILALSNPTSQSECTAEQAYTWSKGQAVFATGSPFDPVEYNGKIHVPGQANNAYIFPGFGLGVVMSGAIRVHDDMLLAASEALAQQVTEENFEKGLIYPPFSNIRKISAHIAASVAAKAYELGLASRRPRPKDLVKYAESCMYSPIYRNYR

SEQ ID NO: 46785 - protein, 139 aa, Ipomoea carnea
  misc_feature (4)..(4): Xaa can be any naturally occurring amino acid
  unsure (1)..(139): unsure at all Xaa locations
QEWXPATDKYLAVKYDITTVMQAKPLLKEALQAAVGLPIDRNIPLIGFIGRLEEQKGSDILYAAISKFISMNVQIVILGTGKKKFEQQIEQLEVMYPDKARGVAKFNVPLAHMITAGADFMLIPSRFEPCGLIQLHAMR

SEQ ID NO: 46786 - protein, 1315 aa, Botryotinia fuckeliana
MEDSTIAHTTAILQTLALSSIDLPLTNVYGNKGIRLPGADTAEKLALERELAALVSRVQRLEARAITVNNQTLPDTPNELGAPSAFADVLTGAPSRASKSTTSRQQLVNSLLAAREAPTGGERPPKFTKLSDEELEALREHVDHQSKQLDSQKSELAGVHAQLFEQKQRQEQALNVLEVERVAALERELKKHQQANEAFQKALREIGEIVTAVARGDLSKKVQIHSVEMDPEITTFKRVINTMMDQLQIFSSEVSRVAREVGTEGILGGQAKISGVDGTWKELTDNVNVMAQNLTDQVREIASVTTAVAHGDLTQKIERPAQGEILQLQQTINTMVDQLRTFAAEVTRVARDVGTEGILGGQAEIEGVQGMWNTLIVNVNAMANNLTTQVRDIAIVTTAVAKGDLTQKVQAECKGEIKQLKETINSMVDQLQQFAREVTKIAREVGTEGRLGGQATVHDVEGTWRDLTENVNGMAMNLTTQVREIAKVTTAVARGDLTKKIEVEVQGEIASLKDTINTMVDRLSTFAFEVSKVAREVGTDGTLGGQAQVDNVEGKWKDLTENVNTMARNLTTQVRGISTVTQAIANGDMSQKIEVAAAGEILILKETINNMVDRLSIFSNEVQRVAKDVGVDGKMGGQADVAGIGGRWKEITTDVNTMANNLTTQVRAFGDITNAATDGDFTKLITVEASGEMDELKRKINQMVYNLRDSIQRNTLAREAAEFANRTKSEFLANMSHEIRTPMNGIIGMTQLTLDTDLTQYQREMLNIVHNLANSLLTIIDDILDLSKIEANRMIMEEIPYTLRGTVFNALKTLAVKANEKFLDLTYRVDSSVPDHVVGDSFRLRQVILNLVGNAIKFTEHGEVSLTIQKAEQDHCAPNEYAVEFCVSDTGIGIQADKLNLIFDTFQQADGSMTRKFGGTGLGLSISKRLVNLMRGDVWVKSQYGKGSSFYFTCTVRLATSDISFIQKQLKPYQGHNVLFIDKGQTGHGKEIITMLTQLGLVPVVVDSEQHTILLGNGRTKEKIASTYDVIVVDSIESARKLRSIDEFKYIPIVLLAPVIHVSLKSALDLGITSYMTTPCLTIDLGNGMIPALENRAAPSLADNTKSFDILLAEDNIVNQRLAVKILEKYHHVVTVVGNGQEALDAIKEKRYDVILMDVQMPIMGGFEATAKIREYERSLGTQRTPIIALTAHAMLGDREKCIQAQMDEYLSKPLKQNHLIQTILKCATLGGALLEKGREVRQSANEESPNSQNGPRGAQHPASSPTPAHMRPAIEPRAYTTTGPINHGSAESPSLVTADAEDPLARLLMRAHSS

SEQ ID NO: 46787 - protein, 362 aa, Lolium perenne
MTIAEVVAAGDTAAAVVQPAGNGQTVCVTGAAGYIASWLVKLLLEKGYTVKGTVRNPDDPKNAHLRALDGAADRLVLCKADLLDYDAIRRAIDGCHGVFHTASPVTDDPEQMVEPAVRGTQYVIDAAAEAGTVRRMVLTSSIGAVTMDPNRGPDVVVDESCWSDLDFCKKTRNWYCYGKAVAEQAASELARQRGVDLVVVNPVLVIGPLLQPTVNASIGHILKYLDGSASKFANAVQAYVDVRDVADAHLRVFECAAASGRHLCAERVLHREDVVRILAKLFPEYPVPTRCSDETNPRKQPYKMSNQKLQDLGLEFRPVSQSLYETVKSLQEKGHLPVLSEQAEADKETLAAELQAGVTIRA

SEQ ID NO: 46788 - protein, 127 aa, Ipomoea muelleri
  misc_feature (6)..(6): Xaa can be any naturally occurring amino acid
  unsure (1)..(127): unsure at all Xaa locations
TQEWNXATDKYLAVKYDITTVMQAKPLLKEALQAAVGLPVDRNIPLIGFIGRLEEQKGSDILYAAISKFISMNVQILILGTGKKKFEQQIEQLEVMYPDKARGVAKFNVPLAHMITAGADFMLIPEQ

SEQ ID NO: 46789 - protein, 138 aa, Magnetospirillum magnetotacticum MS-1
MRANPKLTEGVNRYWIRFFLLAVFATMYVRDHCRPAFHKALGVDPTDYDFKVFRITSEISKQTFPITLDLDDPRFKAGLDRLLDCADKIAAARAQGGVAGKLKHGVQAARAAATFARLYLLPVKQNAMPADIRLRPVW

SEQ ID NO: 46790 - protein, 501 aa, Glycine max
  misc_feature (202)..(202): Xaa can be any naturally occurring amino acid
  unsure (1)..(501): unsure at all Xaa locations
MAMANLARRKGYAVVLSSRSSLCLTRWRGFASGSDENDVVVIGGGPGGYVAAIKAAQLGLKTTCIEKRGTLGGTCLNVGCIPSKALLHSSHMYHEAKHAFANHGVKFSSVEVDLPAMMAQKDKAVSNLTKGIEGLFKKNKVNYVKGYGKLVSPSEVSVDTTEGGNTVVKGKHIIIATGSDVKSLPGITIDEKKVVSSTGALXALTEIPKRLIVIGAGYIGLEMGSVWGRLGSEITVVEFASEIVPTMDAEVRKQFQRSLEKQGMKFKLKTKVVGVDTSGDGVKLTLEPAAGGDQTTLEADVVLVSAGRTPFTAELGLDKIGVETDKIGRILVNERFATNVSGVYAIGDVIPGPMLAHKAEEDGVACVEYIAGKVGHVDYDKVPGVVYTMPEVASVGKTEEQVKELGVEYRVGKFPFLANSRAKAIDNAEGLVKILAEKETDKILGVHIMAPNAGELIHEAAIALQYDASSEDIARVCHAHPTMSEAVKEAAMATYDKPIHI

SEQ ID NO: 46791 - protein, 103 aa, Gloeobacter violaceus PCC 7421
MATITLATTTLRPLGDRVLVKVVEQEERTAGGIFLPDTAKEKPQTGEVVAVGPGRLKDDGTRVDPEVKVGDTVLYGKYSGTDLKLGDAEYMLVAEKDILAIVA

SEQ ID NO: 46792 - protein, 390 aa, Arabidopsis thaliana
  misc_feature (164)..(164): Xaa can be any naturally occurring amino acid
  misc_feature (340)..(340): Xaa can be any naturally occurring amino acid
  unsure (1)..(390): unsure at all Xaa locations
MQIFVKTLTGKTITLEVESSDTIDNVKAKIQDKEGIPPDQQRLIFAGKQLEDGRTLADYNIQKESTLHLVLRLRGGMQIFVKTLTGKTITLEVESSDTIDNVKAKIQDKEGIPPDQQRLIFAGKQLEDGRTLADYNIQKESTLHLVLRLRGGMQIFVKTLTGKXTITLEVESSDTIDNVKAKIQDKEGIPPDQQRLIFAGKQLEDGRTLADYNIQKESTLHLVLRLRGGMQIFVKTLTGKTITLEVESSDTIDNVKAKIQDKEGIPPDQQRLIFAGKQLEDGRTLADYNIQKESTLHLVLRLRGGMQIFVKTLTGKTITLEVESSDTIDNVKAKIQDKEXVFLRTSSVSSSLESSLRMDVLWPTTTSRRSLLFTWSCVFVVVSKSRLCYA

SEQ ID NO: 46793 - protein, 407 aa, Rhodobacter sphaeroides
MDYNLALDTALNRLHTEGRYRTFIDIERRKGAFPKAMWRKPDGSEKEITVWCGNDYLGMGQHPVVLGAMHEALDSTGAGSGGTRNISGTTLYHKRLEAELADLHGKEAALVFSSAYIANDATLSTLPQLIPGLVIVSDKLNHASMIEGIRRSGTEKHIFKHNDLDDLRRILTSIGKDRPILVAFESVYSMDGDFGRIEEICDIADEFGALKYIDEVHAVGMYGPRGGGVAERDGLMDRIDIINGTLGKAYGVFGGYIAASSKMCDAVRSYAPGFIFSTSLPPVVAAGAAASVRHLKGDVELREKHQTQARILKMRLKGLGLPIIDHGSHIVPVHVGDPVHCKMISDMLLIHFGIYVQPINFPTVPRGTERLRFTPSPVHDSGMIDHLVKAMDVLWQHCALNRAEVVA

SEQ ID NO: 46794 - protein, 519 aa, Centaurium erythraea
MDIRENQFLQALAADPLLILLLFITPLLFLFLLSRFRLKPYPPGPRGWPLIGNMTMMDQLTHRGLAKLAGKYGGILHLRMGFVHTVAVSSPDIARQVLQVQDNIFSNRPATIAISYLTYDRADMAFADYGPFWRQMRKLCVMKLFSRKRAESWDSVRDEVERMTHIVATNIGSPVNIGEMVFGLTKDVIYRAAFGTSSHEGQDEFIKILQEFSKLFGAFNLADFIPWLSWFDPQGLNKRLEKARASLDGFIDSIIDDHMNRKKIKSGSNDVVESDMVDELLVFFSDEAKVLESEDLQNSIKLTRDNIKAIIMDVMFGGTETVASAIEWAMAELMRNPDDLKRVQQELSDVVGLHRKVQESDFEKLTYFKCCLKETLRLHPPIPLLLHETAEASEIAGYRIPAKSRVMINAWAIGRDKDSWKDPDTFRPARFLEEGVPDFKGSNFEFIPFGSGRRSCPGMQLGLYALEVAVAHLLHCFTWELPDGMKPSELDMGDVFGLTAPRASRLVAVPSPRLLCPLY

SEQ ID NO: 46795 - protein, 340 aa, Mycobacterium tuberculosis CDC1551
MPACPAPARAGTARSSPGASWIARLLRAPVRRARRRAQAGLPGSCARRCGALVAGPRLARMRIALAQIRSGTDPAANLQLVGKYAGEAATAGAQLVVFPEATMCRLGVPLRQVAEPVDGPWANGVRRIATEAGITVIAGMFTPTGDGRVTNTLIAAGPGTPNQPDAHYHKIHLYDAFGFTESRTVAPGREPVVVVVDGVRVGLTVCYDIRFPALYTELARRGAQLIAVCASWGSGPGKLEQWTLLARARALDSMSYVAAAGQADPGDARTGVGASSAAPTGVGGSLVASPLGEVVVSAGTQPQLLVADIDVDNVAAARDRIAVLRNQTDFVQIDKAQSRG

SEQ ID NO: 46796 - protein, 330 aa, Escherichia coli
MSQNTLKVHDLNEDAEFDENGVEVFDEKALVELEPSDNDLAEEELLSQGATQRVLDATQLYLGEIGYSPLLTAEEEVYFARRALRGDVASRRRMIESNLRLVVKIARRYGNRGLALLDLIEEGNLGLIRAVEKFDPERGFRFSTYATWWIRQTIERAIMNQTRTIRLPIHIVKELNVYLRTARELSHKLDHEPSAEEIAEQLDKPVDDVSRMLRLNERITSVDTPLGGDSEKALLDILADEKENGPEDTTQDDDMKQSIVKWLFELNAKQREVLARRFGLLGYEAATLEDVGREIGLTRERVRQIQVEGLRRLREILQTQGLNIEALFRE

SEQ ID NO: 46797 - protein, 217 aa, Oryza sativa
MLSLHDAMPLDFGLPDMDVGFGLFGVDAAAFGYDGVASDAAAGLSPVVGAGDGSGGGGDVLLYCDGGGGGGGGGEDGEEERRRRLRRKISNRESARRSRARRRQRVEELERAADELRAERRALASRLDATARRALAVRGANARHHAEAGVLRRRLGEAQRNAAVLIGLSRLLRSTANGAHGGAAPAQLSNGGVASLMTNLDVYLFMGALSQRPATVV

SEQ ID NO: 46798 - protein, 557 aa, Bdellovibrio bacteriovorus HD100
MSEVQKNWWKEAVVYQVYPRSFKDSNGDGMGDLQGLISKLDYLKELGINVIWICPMYKSPQDDNGYDISDYQDIHHEFGTMKDFDQLLQQVHARGMKLIIDLVVNHTSDEHPWFIESRSSRNNPKRDWYIWRDGKNGKEPNNWESIFSGSAWKYDELTQQYFMHIFSSKQPDLNWENLDMRKAVYDMINWWLDKGIDGFRVDAISHARKEPGLADMPNPNNLEYVPSYDKHMNVNGIQEYLKDLCTNTFNKYDIMTVAEANGVSAENAEEWVGREQKKFNMIIQFEHVGLWDANPERRVDLAKLKSVLGRWQKGLEGRGWNALFVENHDVPRITSKWGDIQNFWRESTTSIATMYFMMQGTPFIYQGQEIGMTNTVFNGPEDFNDVSAKNIFTIRRKQGATDAEITADLASASRDNARTPMQWDSSEQGGFTTGRPWLKVNPNYKNINVAAQDKDPTSVLNFYRNLIRLRKAHSVFIYGVYDEVLSKHDQIYAYTRTDGNEKMLVMANMTGKPAKFDLPGFSLSSANLLMANYAVADHSSITGGELRPFESRIYKIN

SEQ ID NO: 46799 - protein, 218 aa, Actinidia deliciosa
ETGRHVRMLTHEIRSTLDRHTILKTTLVELGRTLALEECALWMPTRTGLELQLSYTLRHQKPVGFTVPIQLPVINQVFSTNRAAKISPNCPVARLRPLAGKYMPGEVVAVRVPLLHLSNFQINDWPELSTKRYALMVLMLPSDSARQWHVHELELVEVVADQVAVALSHAAILEESMRARDLLMEQNVALDLARREAETAIRARNDFLAVMNHEMRTP

SEQ ID NO: 46800 - protein, 153 aa, Brassica napus
RAAAKPSSSSTMSGLYNPSYSPSRAASPQIRTSSDVDSQYLSQLLAEHQKLGPFMQVLPICSRLLNQEIFRVSGMMSNQGFTDFDRLRHRSPSPMASPNHMSNVPGAGYGGWNGLPPERMVGPHGMAMEWQGAPASPSAYTVKRILRLDLPVD

SEQ ID NO: 46801 - protein, 536 aa, Methanosarcina mazei Go1
MASKQIMFDESARKALLSGVDKVANTVKITLGPKGRYVVLDKSTKPVVTNDGVTIAKEIELHDKFENMGAKLVKEVASKTQDNTGDGTTTATLLAQSMIREGLKNISAGANPIEVKKGIEIATEKVVGYLKGKSVEVKGKDKIIQVATISANNDEEIGNLIADAMERVGYNGVITVEDSKTMETSLDVVEGMQFDRGFVSPYMALDTEKMVCEFEDPYILITDKKINSMKQIVPVLEKVASEGRSLLIIAEDVDGDAQAALILNIIRGALRVCAVKAPGFGNERKEMLEDIAVLTGGQVISEEKGMKLEEFSDYMLGNARKVTVDNHKTIIVEGRGDKADIDERVRVIEAQINIAEADYRKTELKKRMAKLGGGVAVIKVGAATETELKEKKMRIDDALNATKAAVEEGVVTGGGISLFRAAATLDSLDLDGDRQIGVKIVQRAIEDPVRQIAANAGREGAEVVAAIKAESSEHFGYNAKTDVFEDLFEAGVIDPTKVVRSGLQNAASIAGMVLTTEALVTDFDEEKDERTAAIII

SEQ ID NO: 46802 - protein, 548 aa, Neurospora crassa
MAANNMVNPAVDPALEDELFAKEVEEVKKWWSDSRWRQTKRPFTAEQIVSKRGNLKIEYASNAQAKKLWKILEDRFAKRDASYTYGCLEPTMVTQMAKYLDTVYVSGWQSSSTASSSDEPGPDLADYPYTTVPNKVGHLFMAQLFHDRKQRQERLSVPKDQREKLANIDYLRPIVADADTGHGGLTAVMKLTKLFIEKGAAGIHIEDQAPGTKKCGHMAGKVLVPIQEHINRLVAIRAQADIMGSDLLCIARTDAEAATLITTTIDPRDHAFILGCTNPDLEPLADLMMKAEAEGKTGAQLQAIEDDWLAKADLKRFDEAVLDVIAKGKFSNAKDLAAKYQAAVKGKQISNREARAIARQLLGQEIFFDWESPRTREGYYRLKGGCDCSINRAISYAPYCDAIWMESKLPDYAQAEEFAKGVHAVWPEQKLAYNLSPSFNWKTAMGRDDQETYIRRLAKLGYCWQFITLAGLHTTALISDQFAKAYSKIGMRAYGELVQEPEIDNGVDVVKHQKWSGATYVDELQKMVTGGVSSTAAMGKGVTEDQFH

SEQ ID NO: 46803 - protein, 133 aa, Ipomoea polpha
TQEWNPASDKYLAVKYDITTVMQAKPLLKEALQAAVGLPVDRNIPLIGFIGRLEEQKGSDILYAAISKFISMNVQIVILGTGKKKFEQQIEQLEVMYPDKARGVAKFNVPLAHMITAGADFMLIPSRFEPCGL

SEQ ID NO: 46804 - protein, 399 aa, Burkholderia sp. 383
MRDAFLAQVRGTLDQIRADGFYKTEREIASPQAADVRLAGGAGVLNFCANNYLGLANDSRLIDAAKAGLDQDGFGMASVRFICGTQTVHKQLESALAAFLGTEDSILYSSCFDANGGLFETLLDENDAVISDELNHASIIDGVRLCKAKRFRYKNNDLADLEAKLKEADAAGARHKLIATDGVFSMDGIIADLKGICDLADRYGAIVMVDDSHAVGFIGAHGRGTPEHCGVEGRVDIITGTLGKALGGASGGYVAARREVIELLRQRSRPYLFSNTLTPSIAAASLKVLELLGSEEGAKLRERVRENGARFRKQMTEAGFTLVPGAHPIIPVMLGDAQLATNMADKLLDEGVYVIGFSFPVVPRGRARIRTQMSAAHTPEQIDQTVAAFVRVGKSLGII

SEQ ID NO: 46805 - protein, 335 aa, Pseudomonas putida
MALSKEVPEFDIDDDVLLMETGIVLETDVVSDEPAVSSVRTRAKSGSSLKQHKYIDYSRALDATQLYLNEIGFSPLLSPEEEVHFARLSQKGDPAGRKRMIESNLRLVVKIARRYVNRGLSLLDLIEEGNLGLIRAVEKFDPERGFRFSTYATWWIRQTIERAIMNQTRTIPLPIHVVKELNVYSRAARELTQKLDHEPSPEEIATLLEKPVAEVKRMLGLNERVSSVDVSLGPDSDKTLLDTLTDDRPTDPCELLQDDDLSQSIDQWLGELTDKQREVVVRRFGLRGHESSTLEDVGLEIGLTRERVRQIQVEGLKRLREILEKNGLSSESLFQ

SEQ ID NO: 46806 - protein, 130 aa, Ipomoea costata
  misc_feature (125)..(125): Xaa can be any naturally occurring amino acid
  misc_feature (128)..(128): Xaa can be any naturally occurring amino acid
  unsure (1)..(130): unsure at all Xaa locations
TQEWNPAIDKYLAVKYDITTVMQAKPLLKEALQAAVGLPVDRNIPLIGFIGRLEEQKGSDILYAAISKFISMNVQIVILGTGKKKFEQQIEQLEVMYPDKARGVAKFNVPLAHMITAGADFMLIXSRXEP

SEQ ID NO: 46807 - protein, 126 aa, Ipomoea arborescens
TQEWNPATDKYLAVKYDITTVMQAKPLLKEALQAAVGLPVDRNIPLIGFIGRLEEQKGSDILYAAISKFISMNVQIVILGTGKKKFEQQIEQLEVMYPDKARGVAKFNVPLAHMITAGADFMLIPS

SEQ ID NO: 46808 - protein, 408 aa, Glycine max
MDSGSVISSTSACSITTGGNLWRRKHSTNNIYYASSCASKASKYKKKTQIECNILRSQQSSLNHHYKRIEGGATYQDCDKKYVVKAIPEPTFDSEPCASNPENVVDSAKKILDVFYHFCYPYSMIAIILCAISSSLLAVEKPSDISSSFLIGVLQALVPHLFVAVFANVVNQVFDYDIDKIHRPYLPLASGQLSFTAAVFIAASLLIMSFWLSLVIGSWPLIWNVVLTSSVWNVYSINVPLLRWKRHPLLATICTISVWAFILPITFFLHMQTFVLKRPIVFPRSLIFYVVFMIFYSLGMALSKDISDVKGDKAYGIDTLAIRLGQKWVFWICIILFEMAFGVALLAGATSSYLWIKIVTGLGHAILASILLYQAKSIYLSNKVSTISFYMLIWKLLYAAYFLMALIR

SEQ ID NO: 46809 - protein, 133 aa, Maclura pomifera
GVTFDDGAYTGIREINFEYNSETAIGGLRVTYDLNGMPFVAEDHKSFITGFKPVKISLEFPSEYIVEVSGYVGKVEGYTVIRSLTFKTNKQTYGPYGVTNGTPFSLPIENGLIVGFKGSIGYWLDYFSIYLSL

SEQ ID NO: 46810 - protein, 547 aa, Magnetospirillum gryphiswaldense
MAAKEVKFSTEARAKMLRGVDILADAVKVTLGPKGRNVVIEKSFGAPRITKDGVSVAKEIELSDKFENMGAQMVREVASKTADLVGDGTTTATVLAQAIVREGNKAVAAGMNPMDLKRGIDLAVEAVVADVKSRAKKVSTNEEIAQVGTISANGERDIGAKIAEAMSKVGNEGVITVEEAKGFETELDVVEGMQFDRGYSSPYFVTNAEKMTCELDSPYILLFEKKLSGLQPLLPVLEAVVQSGRPLLIIAEDVEGEALATLVVNKLRGGLKVSAVKAPGFGDRRKAMLEDIAILTGGQVISEDLGIKLESVTLEMLGTAKRVTITKEDTTIVDGAGARGDIEARCKQIRAQIEETTSDYDREKLQERLAKLAGGVAVIKVGGATEVEVKERKDRVDDALHATRAAVEEGIVPGGGTALLYSVRALDGIAVANNDQKVGIDIVRRALQSPVRQIAENAGHDGAVVAGKLLEATDTNFGFDAQTGTYVDMIKAGIIDPVKVVRTALQDAASVAGLLITTEAMIAEKPKKDSGPSMPGGGMGGMGDMDF

SEQ ID NO: 46811 - protein, 296 aa, Rubrobacter xylanophilus DSM 9941
MAVDRFPRPGETRIGHGFVQGPGGKGSNQAIQAARLGARVELVACVGDDAYGREALDLWCREGISTEHVVQVGDHPTGVGFILVDESGQNSIAIDPGANDALGPRMIDAAQGAFDRSAVCLVQLEISLESAAHALRKAKEAGCITVLNPAPARRIPDEVWGYVDVITPNEGEAAVVLGEEGNEENLGKLLLERVNLAAVVTLGEKGALVLEKSGAVQRVPAFPVPTRDTTGAGDAFSGALGLRLAQGSDVVEAARWGAAAGALTCTVPGVVPALPDRKALLRLLSGNEELAVRGGA

SEQ ID NO: 46812 - protein, 205 aa, Magnetospirillum magnetotacticum MS-1
YAVALGADIEPSTSAGTRLFGHELVVWRDAGGAVHVWEDRCPHRGMRLSFGFVRGDHIACLYHGWRYDTAGQCRFIPAHPDLEVSPMIRTRTYPCRERAGLIWVRWGAPAEEAEPAPVAASPLRSLYLEAPAARLAAALGEAGPDGLVRFDLAGSPVLVAVQPLAGEASAAHIVVPDTPEAPEADLGRLAAACVTLRRSIEGAAP

SEQ ID NO: 46813 - protein, 332 aa, Oryza sativa
  misc_feature (284)..(284): Xaa can be any naturally occurring amino acid
  unsure (1)..(332): unsure at all Xaa locations
MAQLPPKIPVAAPGHHQHWASAGGAGDAAWADEFAEFAASRRGAHRRSLSDSVAFVEVAPAGCGAGGEFDRLDDDQLMSMFPDEGGSSAPGSDNGGSDSDGGGDKHAAAQSDDGQHAAGEPTQEQAAATSPTELIRDPKRVKRILANRQSAQRSRVRKLQYISELERSVTTLQKWRQFETDRWTQPHWLAGNSTQCGEEMSESNEVSVLSPRVAFLDQQRTILTVGNSHLKQRIAALAQDKIFKDAHQEALRKEIERLRQAVLACYRLTAPDLLCMIWFPLLGXETTGGEKPAQHIVIVEHRYCSSFKDKSHSVQYNICIIQNLQYMDLDQR

SEQ ID NO: 46814 - protein, 552 aa, Methylococcus capsulatus str. Bath
MTKYIFITGGVVSSLGKGIAASSLAAILEARGLKVTLTKLDPYINVDPGTMSPFQHGEVFVTEDGAETDLDLGHYERFVRTTMGRANSFTTGQIYENVIRKERRGEYLGATVQVIPHITDEIKRGIRLSAEGYDVALIEIGGTVGDIESLPFLEAIRQMRVDLGEERSLFIHLTLVPYISSAGELKTKPTQHSVKELRTIGIQPDILICRSDRPIPKSECRKIALFTNVQEDAVIASVDADTIYRIPALLHEQQLDEIVVRKLRLDAGPADLSEWHRVVDALQNPERSVTVAMVGKYVNHSDAYKSLSEALVHAGIHTRTRVDIRFIESEEIEDHGTGALEGVDAILVPGGFGERGIEGKIAAVKYAREHRVPYLGICLGMQVAVIEFARNVAGLEGAHSTEFLPSSPHPVIALITEWKTEAGGIEYRSGDSDLGGTMRLGGQKCRLVPNTLAHATYGKDVITERHRHRYEFNNHYLKTLEAAGLRVSGKSLDGRLVEMVEIPEHPWFLACQFHPEFTSTPRGGHPLFSGFVRAARARSEGTSPPESGGAQP

SEQ ID NO: 46815 - protein, 556 aa, Cicer arietinum
MGCQGSKEKNKPTPDFTARHHGSSATAASASGVATNNHQYHSVQPSSTHVQTPPPKPDSNPKPTVTTQNVKTVHKTDTTILGKPFDDIKKHYTLGQELGRGQFGITYFCTENSTGNTYACKSILKRKLVSKSDREDIKREIQILQHLSGQPNIVEFKGAYEDRFSVHLVMELCAGGELFDRIIAQGHYSERAAASICRAVVNVVHICHFMGVLHRDLKPENFLLSSKDEGATLKATDFGLSVFIEEGKVYRDMVGSAYYVAPEVLRRSYGKEIDIWSAGIILYILLSGVPPFWAETEKGIFNAILEGELDFASEPWPSISDSAKDLVRKMLNHDPKKRITSAQVLEHPWMREGGEASDKPIDSAVLSRMKQFRAMNKLKKLALKIIAENLSEEEIKGLKAMFANMDTDNSGTITYEELKTGLARIGSRLSETEVKQLMELADVDGNGSIDYLEFISATMHRHRLERDEHLYKAFQYFDKDNSGHITREELETAMTQHGMGDEATIKDIISEVDTDHDGRINYEEFCAMMRSGMPPPGTTIINLQSEFDFICSCNSL

SEQ ID NO: 46816 - protein, 237 aa, Glycine max
EAQEGSSQKKMGRGKIEIKRIENTIFMQVTFCKRRNGLLKKAYELSVLCDAEVALVVFSTRGRLYEYANNSVRATIERYKKANAAASNAESVSEANTQFYQQESSKLRRQIRDIQNLNRHILGEALGSLSLKELKNLEGRLEKGLSRVRSRKHETLFADVEFMQKREIELQNHNNYLRAKIAEHERAQQQQSNMMSGTLCESLPSQSYDRNFFPVNLIASDDQQQYSSQDHTALQLV

SEQ ID NO: 46817 - protein, 1233 aa, Methanosarcina acetivorans C2A
MEEPEFQAYVGPRPFEQEDKFIFFGRDREARDLLSLVIAHNLVLVYAQSGAGKTSLINAGLIPLLKENRFEVFPVARVKGTPLRNIKTDEISNIYVLNTLTSWAEDEYDVERLTKMKLVDFLNEQERLQDEDGIPLPRAVIFDQFEEIFSLYQDRWKDREGFFEQISAALETDPLLRVVFVIREDFIAQLDPYVELLPERLRTRFHIERLRREAALLAIKEPLRDTGRSFAEGVAEKLVDDLLKIRVETTPGETTEVTGEFIEAVQLQVVCQNLWRELPPDVKQITFHHLKTYGNVEQELYRFYEEAIRTAAATAHIDEESLRRLFGEVLITTMGTRGMVYRAQESTGGIPNTAIDVLESMHLIRAEWRAGARWYELTHDGFIKPILSSNRVFNDELAEKERAEKERIEKERIEKEWAEKEWAEKERLEKERAEKERLEKELRAEKELAESKQLFYKRLAAISFLAILLALVAVFEWHQAKENAEEARASDLNLNSALLQGDPRNLDKSVLLAIESLKIHITSTADHLIRQGLLSMPHRVVILKHYSDVNNVVFSPDGKYVATASNDNTSRLWDVSTGKQIFVLNHTDPVRNVVFSPDGKYVATASADKTAGVWNTTTGEGISVLNHTGRVNNVVFSPDGKYIATASDDNTSRLWDTATGKQIFVLNQTDPVRNVVFSPDGKYIATASADNTSRLWDTTTGKQIFDMKHDGPVNIVVFSPDGKYVATASADKKARLWNATTGKKIFDMKHDSGINTVVFSPDGKYIVTASDDKTAGVWNTTTGKKIFDMKHDGSVNTVVFSPDGKYIATASADNTSRLWDTATGEKIFFLNHYGWVNTVVFSPDGKYVATASADKTAHLWDVSTGKQISYLRHDSGVNNVVFGPDGKYVVTASADKTADVWNTTTGEKIFVLNHTGRVNNAVFSPDGKYIATASADNTSRLWDTTTGKQIFVLNQTDPVRNVVFSPDRKYIATASDDNTSRLWDTATGKQILVLNHDGPVNTVVFSSDGKYIATASDDNTSRLWDTATGEEIFVLNHTDRVNNVVFSPDGKYIATAGDDNTSRLWGTATGEKIFDMKHDGPVNNVVFSPDGKYVATAGYDNTACLWDTATGEKIFVLNHAGRVNTVVFSPDGKYIATASADKARLWNATTGKQISYLRHDSGVNNVVFSPDGKYIATASVDKTARLWTAKLWISDTEDLIDEANNRLTRNLKPEEWKEYMGDKPYHKRFPNLP

SEQ ID NO: 46818 - protein, 540 aa, Cicer arietinum
MGNCCATPPVTGEETNNNKKKNNKKPKKENPFAIDYNFNANNTNSKLTVLKDPTGREIEVRYELGRELGRGEFGITYLCTDKENGEELACKSISKKKLRTLVDIEDVRREVEIMKHMPKHPNIVTLKDTYEDDNAVHLVMELCEGGELFDRIVARGHYTERAAAAVTKTIVEVVQMCHKHGVMHRDLKPENFLFANKKETAALKAIDFGLSVFFTPGEKFNEIVGSPYYMAPEVLKRNYGPEVDIWSAGVILYILLCGVPPFWAETEQGVAQAIIRSVVDFKRDPWPKVSDNAKDLVKRMLNPDPKRRLTAQEVLDHPWLQNAKKAPNVSLGETVRARLKQFSVMNKLKKRALRVIAEHLSVEEAAGLKEGFKLMDTSNKGKINIDELRIGLHKLGHQIPDADVQILMEAGDVDRDGHLDYGEYVAISVHLRKMGNDEHLHKAFDFFDQNQTGYIEIEELRNALSDEIETNSEEVISAIMHDVDTDKDGKISYEEFASMMKLGTDWRKASRQYSRERFNSLSLKLMRDGSLQLTNENQCQ

SEQ ID NO: 46819 - protein, 462 aa, Bacillus cereus E33L
MTFSKSTTDKPSYTYEELSEKNKAYVWHPFTQMKDYLEEDPVIIERGEGRKLYDVNGNEYWDGVSSIWLNVHGHQVPELDEAIREQLNKIAHSTMLGLANVPSILLAEKIIEVVPEGLKKVFYSDSGSSAVEIAIKMAFQYWQHKGKPKKQRFVTLKEAYHGDTIGAVSVGAIDLFHQVYSSLLFEAIKMPYPYTYRSPYGNDKAEIVKKHLEEMEELLKDKHEEIAAIIVEPLMQGAGGMITMPKGYLRGLRNLCTKYNVLFITDEVATGFGRTGKMFACEHENVTPDILTAGKGLTGGYLPVAITVTTDEIYNAFLGGYEEQKTFFHGHSYTGNPLGCAVAIANLELYEKTNLIEEVARKTEYVAMQLDELFACKHVGDIRQCGLMVGIELVKNKETKEAFEWTERVGVQVCKRSRELGMILRPLGNTIVFMPPLASTIDEIDEMLRILYKAISDITEGE

SEQ ID NO: 46820 - protein, 480 aa, Desulfovibrio vulgaris
MTKHKLTTNAGAPVPDNQNAMTAGPRGPMLLQDVWFLEKLAHFDREVIPERRMHAKGSGAYGTFTVTHDITSYTKAALFSKIGKKTDLFVRFSTVAGERGAATAERDIRGFAIKFYTEQGNWDLVGNNTPVFFLRDPLKFPDLNHAVKRDPRTNMRSAKNNWDFWTSLPEALHQVTVVMSDRGIPASYRHMHGFGSHTFSFISPDNQRYWVKFHLRTQQGIKNLTDAEAEAIVARDRESHQRDLYDSIERGDFPRWTNYVQVMPEKDAEKLPYHPFDLTKVWFHKDCPLIEVGVLELNRNPENYFAEVEQAAFNPANVVPGISFSPDKMLQGRLFSYGDAHRYRLGVNHHLIPVNAARCPVHSYHRDGAMRVDGNHGSTLAYEPNSYGEWQEQPDFAEPPLAIRGDAAHWNFREDDADYYDQPGRLFRLMTPQQQDELFQNTARAMGDAPEEIKRRHVGNCAKADPAYGAGVARALGLKM

SEQ ID NO: 46821 - protein, 708 aa, ASPERGILLUS NIDULANS FGSC A4
MAARDRFGGAYADLGFTPLQRAIRNACDLSHYEPNLALNLEVADLVNSKKGNAPREAAFEIVRLINSRNQNVSLLALALLDICVKNCGYPFHLQISTKEFLNELVRRFPERPPLRPTRVQHRILESIEEWRQTICQTSRYKDDLGHIRDMHRLLLYKGYVFPEIRREDAAVLNPSDNLRSAEEMEEEEREAQSAKLQELIRRGTPADLQEANRLMKVMAGYDTRHKTDYRAKAAEEVAKVQEKAKILEEMLQSQAPGDRIAEGDVFEELANALQSAHPKIQKMCEEESDDPEAVRKLLEINDSIHRTIQRYKLVKSGDFDAATRIPKGTLGTTTGVSKNANNELSLIDFDPEPSSNGAGQPAQGSSSIENDLLGLSIDEPVPSGGISLGQTSSPAPQIPQNPSAFQANYDILGSLNSSQPASFSSTPAPAFHQPPVTATPPPAVDPFASLVSASPRNNSPLPSSSASPRPPASSSLLDLAGAAEQKPKTTDDDEWNFTSSLPENSLPSTQRVQVLNSSLKIDFVARRHPQQQRQIHIVAYFSNATSLPLSDLHFQVAVEKAYTLHLRPQSGRDIAPLQQNGVQQEMLLDGIDMGKGNTVKIRFRVSYRLGSDSKEEQGMPVNCTPVGKALLVYICEFIYLHAPYLVRLDYRVHSGYLGVKFYKWREDDGLRKRHPLALVGIPENPANDANPKPAWAAWVQNRGCDIGQ

SEQ ID NO: 46822 - protein, 477 aa, SYNECHOCOCCUS SP. WH 8102
MTTPRVLFWHRRDLRLTDNLGLAAAAAISPAVTGVYVLDPQVISPSEHLLPMAPARLWFLIESLIELQQRWRDAGSRLLVVEGDPVQLLPQLAERIAAEAVVWNRDVEPYARERDRQVAQRLQADGRKVVVDWDQLLIAPELLKTGGGDPYRVYGPFLRNWRGQVQAKQPVTVPAPAGLVDLDPAAVPSGEPLMARRDSHGFKGTELCPCRPGEAAAMQQLTSFCDGALFGYEPDRNFPGVVGTSYLSAALSVGTLSPRQAWSAAQEAREQARSEEQLHAIAVWEQELCWREFYQQALFHFPELSDGPYREQWRRFPWENNEDWFDFWREGQTGMPIIDAAMRQLNQTGWMHNRCRMIVASYLVKDLICDWRWGERAFMELEVDGDLAANNGGWQWSASSGMDPKPLRIFNPATQASKFDAAGDYIRQWVPELRHVNTKDLLSGEIGALERRDYPEPLVNHKTQQAKFKALYATIRS

SEQ ID NO: 46823 - protein, 365 aa, Rhodopseudomonas palustris CGA009
MIPMEGGAQGALRTRPDIKGSVDSLNIAKQDTILTPRFYTTDYAAMDKLDVSLVRAEWTAMMNELRADYNKSHFKKTDEFVNSDLDKLPPELRAEFKDFLVSSLTAEFSGCVLYAEIKKRIKNPEIRELFGLLSRDEARHAGFINEILKDHGIGVDLSFLTKVKKYTYFRPKFIFYATYLSEKIGYARYITIYRQMERHPERRFHPIFKWFERWCNDEFRHGEAFALLMRADPSLLSGVNKLWIRFFLLAVFSTMYVRDHMRPAFYEALGVDATDYGMQVFRITTEISKQVFPVTINLDDPRFLQNLERLRIAAEKIDRSHSQGLLGKLKRPFYAASAALAFGRLFLLPAKRNELPRVIGLRPAW

SEQ ID NO: 46824 - protein, 356 aa, Zea mays
  misc_feature (24)..(24): Xaa can be any naturally occurring amino acid
  unsure (1)..(356): unsure at all Xaa locations
MESCVPPGFRFHPTDEELVGYYLXKKVASQKIDLDVIRDIDLYRIEPWDLQEHCGIGRYEEQSEWYFFSYKDRKYPTGTRTNRATMAGFWKATGRDKAVHDRSRLIGMRKTLVFYKGRAPNGQKTDWIMHEYRLETDENAQPQEEGWVVCRAFKKRTAYPARSMAMAWDPSYSYYRESSAMGAAAFVDPNAASYTQTRRQPNKSERFKQELAELDGAAALLHYSASHLLELPQLESPSAPLAPANPSQASAADEAAVDAADSGRRPGKKARADKAATDWRALDRFVASQLSPAAASTTAAASSVACSQVDHVEDDDMAALLFLNSDDGRDEAERWTGLLGPAAGGDGDFGLCVFEK

SEQ ID NO: 46825 - protein, 403 aa, Rhodopseudomonas palustris CGA009
MNYEAYFKRQIEGLHREGRYRVFADLERHAGSFPRATHHRPEGTNEVTVWCSNDYLGMGQHPAVLSAMHEALDSCGAGAGGTRNIAGTNHYHVLLEQELAALHGKEAGLLFASGYVSNWATLSTLASRMPGCVILSDELNHASMIEGIRHSRSETRIFAHNDPRDLERKLADLDPHAPKLVAFESVYSMDGDIAPIAEICDVADAANAMTYLDEVHGVGLYGPNGGGIADREGLSHRLTVIEGTLAKAFGIVGGYITGSAALCDFVRSFASGFIFSTSLPPAVAAGALASVRHIRSSSAERERHQDRVARLRMRLDQVGVAHMPNPSHIVPVMVGDAVLCKQISDELINRYGIYVQPINYPTVPRGTERLRITPSPQHTDADIEHLVQALSEIWARVGLAKAA

SEQ ID NO: 46826 - protein, 903 aa, Rhodopseudomonas palustris CGA009
MNDFKDAKRKFEGAPVPAPRRPVRRGGRALIRLFGVAVIVSLSVMAGRIASQHTRAWEPPGVGHGLDVPWWIFVISLAVGLSIAGLIELQLSRYERRNAHKLRQAHLAAIVEGSSYAIVGQSIDGTVLSWNKTAERLFGYTAEQAIGQNATELMVPDDLRDEEQQMLSGISDGTAFAYLWTKRKRANGTLVDVAVSISPIRADDGRLIGMAASMRDITDLVQAEREVHDLNAALERQVAERTCQLEKTLTLQTAILERAAYAVIATDVTGTITLFNPAAERMLGYKAEDLIGRASAMLFHDSDELAARAEAMRKEGISVSSNLGVLQARLARNDPDTAMWTYIDAMGNRIPTRLTLSRLRTKTGVNLGVLGIAVDLTEQLKYEDELKAARASAEQASAAKADFLANMSHEIRTPLNGIIGYADLVLEDETLAPDTRRQVMRIFEASDSLRVIIDDILDFSKIEACGLTLESKPLYINELIANCASIIEPKADEKGLKLIATAQATPPVLIGDAGRLRQVLLNLMNNAVKFTTAGSVELIVSCIGRVDHLVRLRISVADTGIGISPEAQKGLFKRFSQADETISRKFGGTGLGLAISQRIVQAMHGELKIDSQPGVGSTFYFEVELPVAERLDIERLDAQVHCSRSVKILVVDDVEMNRDLCKTMLTRAGHDVDLADSGATAIAMVASRTYDLVFMDVQMGEMDGLEATRRIRALGHAYRDVPIIALTANVLPEQVERYKAAGVDGHLGKPINRAELLACVARWIDGDIAHVPSEPLAPVELGSEPEHPVRDQAALEDLRMFASEHDIAGFAEQLRDTITRIRAQWPHHIDAMKLDHEARTALGAAAHKTVSLAGQLGFKQLAAACRRMEAACAPHRDIHDAFAALHAALDNAEPVLDAPHELT

SEQ ID NO: 46827 - protein, 340 aa, Zea mays
  misc_feature (157)..(157): Xaa can be any naturally occurring amino acid
  misc_feature (196)..(196): Xaa can be any naturally occurring amino acid
  unsure (1)..(340): unsure at all Xaa locations
MAAPTPTTTTRRDYRLRPRCFSSPRSCPMAKRLAGIDKEVLVEVVRFTHKSGLRGCDGGWKDFLARNDRKFGASVSDPRKRSRDVLFAFLQTFPKDFQKVGHSFASSDFSSACPVSLPAAVVETLDATSPTRATGRQRRHSSVPKIIGITSVSLLPXKSLDDFMLIAIWGFLEALAAALCMNVYVVGLNKFRITFXKVNKPTLPLASGEFSVPTAVLLVVAFLVMSISIGIRSKSAPLMCALLVCFLLGSAYSIDVPLLRWKRHAFLAAFCIIFVRAVVVQLAFFAHMQCLMVLFAATCSEEALGTYKDIPDVDGDRDFGIQSMTVRLGPTESKSMPIQQ

SEQ ID NO: 46828 - protein, 410 aa, Geobacter metallireducens GS-15
MRRVVVTGVGAISPLGTGNGKNWDALVAGRSGIDLITRFDASELPVKIAGEVKDFTPEDFIEKKEVKKMDLFIQYALAAAQFAMEDSGLQITDENAERVGVIVGAGLGGLPTIEKYHAAMLEGGYKKISPFFIPMLIINLAPGHISIKYGAKGPNLSSVSACATGTHSIGDAYHMIKRGDADAMIAGGTESTVTPLGIGGFAVMKALSTRNDDPKGASRPFEKSRDGFVLAEGAGIVILEEYESAKKRGAKIYAEVVGYGLSGDAYHLTAPAPEGEGAARCIKMALNNAGINADQVDYINAHGTSTHFNDYYETLAIKKVFGDHAKKIMVSSTKSMTGHLLGAAGGVEAVFSLMAMDKGVVPPTINYQEQDSECDLDYVPNTARDAKITYAMSNNFGFGGTNASLLFKKI

SEQ ID NO: 46829 - protein, 139 aa, Ipomoea amnicola
  misc_feature (4)..(4): Xaa can be any naturally occurring amino acid
  unsure (1)..(139): unsure at all Xaa locations
QEWXPATDKYLAVKYDITTVMQAKPLLKEALQAAVGLPVDRNIPLIGFIGRLEEQKGSDILYAAISKFISMNVQIVILGTGKKKFEQQIEQLEVMYPDKARGVAKFNVPLAHMITAGADFMLIPSRFEPCGLIQLHAMR

SEQ ID NO: 46830 - protein, 460 aa, Triticum aestivum
  misc_feature (72)..(72): Xaa can be any naturally occurring amino acid
  unsure (1)..(460): unsure at all Xaa locations
MAARAHNNVAAAQQQNRALGGGGGGGVPAMGKQQKAAMAGRPDPKNTRRALGDIGNFEANNRRAPPGATSPXVVNVRAAEGKPQPHEPVNRPVTRNFGAQLLKNAQEKAKNPVARPAVRRAHHVKPAPPPPEHVIEISSDSDVTKSEAGSVSSVRKYSRKKVVTTLSHVLSARSKFAAGITEEPAIQDIDKLDGDNQLAVVDYIEDIYKFYKVAENECRAKDYMDSQVEINAKMRGILIDWILEVHQKFDLMPESLYLTVYIIDMYLSLQSVLRRELQLVGVSALLIACKYEEIWAPEVNDFILISDSAYTREQILKMEKAILNRLEWNLTVPTPYVFLVRFAKAASSSDHKNDKEMENTVFFFAELALLQYGLVQSKPSMVAAAAVYAARLTLKKTPLWTDTLKHHTGFTEAQLMDAAKILVASHSTAPDSKLKVVYKKYSSEKLGGVALRPPATDLCK

SEQ ID NO: 46831 - protein, 137 aa, Ipomoea leptophylla
  misc_feature (8)..(8): Xaa can be any naturally occurring amino acid
  unsure (1)..(137): unsure at all Xaa locations
TQEWTLAXDKYLAVKYDITTVMQAKPLLKEALQAAVGLPVDRNIPLIGFIGRLEEQKGSDILYAAISKFISMNVQIVILGTGKKKFEQQIEQLEVMYPDKARGVAKFNVPLAHMIIAGADFMLIPSKFEPCGLIQLH

SEQ ID NO: 46832 - protein, 404 aa, Spinacia oleracea
MESRVLSRTTAIAALPKLFRPSREAASFGFATGVKTPVGLVKDGGSLTWGRQLRPVLLLEPVQTGPVCSRREKTAVQPCRAASGSSGEAKTGFLEKYPALVTGSFFFMWYFLNVIFNILNKKIYNYFPYPYFVSVIHLFVGVVYCLASWSVGLPKRAPMDSKLLKLLIPVAVCHAIGHVTSNVSFAAVAVSFTHTIKALEPFFNAAASQFVLGQSIPITLWLSLAPVVIGVSMASLTELSFNWLGFISAMISNVSFTYRSLYSKKAMTDMDSTNIYAYISIIALFVCLPPAIIVEGPQLMKHGFNDAIAKVGLTKFISDLFWVGMFYHLYNQLATNTLERVAPLTHAVGNVLKRVFVIGFSIIAFGNKISTQTAIGTSIAIAGVALYSLIKAKMEEEKRQMKST

SEQ ID NO: 46833 - protein, 458 aa, Saccharomyces cerevisiae
MGKEKSHINVVVIGHVDSGKSTTTGHLIYKCGGIDKRTIEKFEKEAAELGKGSFKYAWVLDKLKAERERGITIDIALWKFETPKYQVTVIDAPGHRDFIKNMITGTSQADCAILIIAGGVGEFEAGISKDGQTREHALLAFTLGVRQLIVAVNKMDSVKWDESRFQEIVKETSNFIKKVGYNPKTVPFVPISGWNGDNMIEATTNAPWYKGWEKETKAGVVKGKTLLEAIDAIEQPSRPTDKPLRLPLQDVYKIGGIGTVPVGRVETGVIKPGMVVTFAPAGVTTEVKSVEMHHEQLEQGVPGDNVGFNVKNVSVKEIRRGNVCGDAKNDPPKGCASFNATVIVLNHPGQISAGYSPVLDCHTAHIACRFDELLEKNDRRSGKKLEDHPKFLKSGDAALVKFVPSKPMCVEAFSEYPPLGRFAVRDMRQTVAVGVIKSVDKTEKAAKVTKAAQKAAKK

SEQ ID NO: 46834 - protein, 134 aa, Ipomoea pandurata
ATDKYLAVKYDITTVMQAKPLLKEALQAAVGLPVDRNIPLIGFIGRLEEQKGSDILYAAISKFISMNVQIVILGTGKNKFEQQIEQLEVMYPDKARGVAKFNVPLAHMITAGADFMLIPSRFEPCGLIQLHAMR

SEQ ID NO: 46835 - protein, 281 aa, uncultured Flavobacteriaceae bacterium
MPSTQHLNDLTIQVRRDILRMVHKVNSGHPGGSLGCTEFLVALYNVIMTRKEGFNMDGIGEDLFFLSNGHISPVFYSVLARAGYFPVEELNTFRLIDSRLQGHPTTHEGLPGVRIASGSLGQGMSVALGAAQAKKLNNDHHIIYSLHGDGELQEGQNWEAIMYASAKNVDNIIATIDLNGQQIDGSTDTVLPMGSIKEKFEAFGWIVFEIEEGNNLVAILNGMSEAKSKTGQGKPVCVLLKTVMGHGVDFMMHTHAWHGKAPNDEQLAIGLSQNPETLGDY

SEQ ID NO: 46836 - protein, 140 aa, Ipomoea asarifolia
YPGVEPATDKYLAVKYDITTVMQAKPLLKEALQAAVGLPVDRNIPLIGFIGRLEEQKGSDILYAAISKFISMDVQIVILGTGKKKFEQQIEQLEVMYPDKARGVAKFNVPLAHMITAGADFMLIPSRFEPCGLIQLHAMR

SEQ ID NO: 46837 - protein, 317 aa, uncultured Flavobacteriaceae bacterium
MKTYTYTEKKDTRSGFGAGLAELGKTNKNVVALCADLIGSLKMDKFIEENPERFFQVGIAEANMMGLAAGLTIGGKIPFTGTFANFSTGRVYDQIRQSIAYSGKNVKICASHAGLTLGEDGATHQILEDMGLMKMLPGMTVINTCDYNQTKAATIAIAGHEGPVYLRFGRPAVPVFTPADQKFEIGKAVKLTEGKDVTIVATGHLVWEALEASKVLFERGISAEVINIHTIKPLDEKAILESVSKTGCIVTAEEHNIIGGLGESVARVLSLHKPTPQEFVGTNDTFGESGTPAQLMEKYGLNSVSIVSKAETVVKRK

SEQ ID NO: 46838 - protein, 328 aa, Mycobacterium tuberculosis H37Rv
MTIMRAVVAESSDRLVWQEVPDVSAGPGEVLIKVAASGVNRADVLQAAGKYPPPPGVSDIIGLEVSGIVAAVGPGVTEWSAGQEVCALLAGGGYAEYVAVPADQVLPIPPSVNLVDSAALPEVACTVWSNLVMTAHLRPGQLVLIHGGASGIGSHAIQVVRALAARVAITAGSPEKLELCRDLGAQITINYRDEDFVARLKQETDGSGADIILDIMGASYLDRNIDALATDGQLIVIGMQGGVKAELNLGKLLTKRARVIGTTLRARPVSGPHGKAAIAQAVAASVWPMIAANRVRPVIGTRLPIQQAAQAHELMLSGKTFGKILLTV

SEQ ID NO: 46839 - protein, 339 aa, Bacillus sp. OxB-1
MSNYPKYRVAAVQASPVLLDLDATIDKTCRLVDEAAANGAKVIAFPEAFIPGYPWWIWLGNADYGMKYYIQLYKNSVEIPSLAVQKLSSAGTNKVYFCVSVTEKDGGSLYLTQLWFDPNGDLIGKHRKLKATNAEKTIWGDGDGSMMPVFETEFGNLGGLQCWEHFLPLNVAAMASMNEQVHVASWPIGMPQEGHLFGPEQCVTATKYYAISNQVFCLLSSQIWTEEQRDKICETEEQRNFMKVGHGFSKIIAPNGMEIGNKLAHDEEGITYADIDLEQIIPGKFLIDSAGHYSTPGFLSLSFDRTEKKPIKHIGESAQETVTYEEIQYGNKANVKVHS

SEQ ID NO: 46840 - protein, 100 aa, Glycine max
  misc_feature (69)..(69): Xaa can be any naturally occurring amino acid
  misc_feature (78)..(78): Xaa can be any naturally occurring amino acid
  unsure (1)..(100): unsure at all Xaa locations
DTVEVDAITHRMTCKTGVVNIPYGGTKGGIGCYPAELTISELDRLTRDFTLTNHDQIGSHTDVPAPDMXTGPQTMSWXILYQFSKFLRYFSAVVYWKTFI

SEQ ID NO: 46841 - protein, 321 aa, Nocardia farcinica IFM 10152
MRAIQVSEHGGPEVLTYTELPEPSIGAGGLLVETEAIGINFIDTYIRTGTYPQDVPYVPGAEGTGVVTAVGDGVTEFAVGDRVAWAAAPGSYAEQVAVPADVAIPVPDGVSAPIAASVLLQGMTAHYLIESVYRPEPGETVLVHAGAGGVGLILTQLAVARGVRVITTVSSDEKEALSREAGAAEVLRYGDDLAERVRALTDGVGVAAVYDGVGKDTFDASLAALRIRGTLALFGAASGPVPPVDPQRLNSGGSLFLTRPTLAHYTRDRAELLWRAGDVFRAVADGTLRIRVGAQYPLAEAERAHRDLEGRKTTGSIVLIP

SEQ ID NO: 46842 - protein, 323 aa, Oceanobacillus iheyensis HTE831
MENDARTPVTIVTGYLGAGKTSFLNHILHQTSEKLAIIVNEYGDIGIDDQLIEKTKEEIIEINKGCICCNVRKDLIDTLSMLLFTREQGMIEFDRVLIETTGLADPAPIVQTFLMDPKMIESYDIDSVCTIVDSKHISMHLDQKDESLSQIAFSDNILLNKIDLISSEQLEKLKERITKINPFANIYETTKSNIDINKVFNLYSFDLKDKLRISPTFLHDTHHHHDNVTSLSLIETKPLDLEKLNLWFSYLVQILGESLYRYKGILYINGKRRKYIFQGVHMLFAAEEQAEWGDMSPRSEIVFIGKDLNKQKLKEQFHKCISR

SEQ ID NO: 46843 - protein, 91 aa, Zea mays
MGQAWGNLQDRLQGRRWKEHQVRKITDKVFDRLTEDAQKRDKEALRFEEVYIAVLCVYNDINKYLPGPHHDPPSKEKLRAMMEVTTSFPFV

SEQ ID NO: 46844 - protein, 713 aa, Nocardia farcinica IFM 10152
MSVTDDIRALTQPNYPDDWTDLDTKAVDTVRVLAADAVQRAGNGHPGTAMSLAPLAYTLYQRVLRHDPSHPSWVGRDRFVLSCGHSSLTQYIQLYLAGFGLELDDLKNLRKWGSLTPGHPEFRHTDGVEITTGPLGQGLASAVGMAMAARRERGLFDPHAAPGTSPFDHHIYVIASDGDLQEGVTAEASSIAGTQQLGNLIVFYDDNKISIEDDTTIAFTEDVAARYEAYGWHVQTVQGGEDVVAIEAAIEAAKAVLDKPSIIVLRTIIGYPAPNKMNTGSAHGAALGADEVAATKKVLGFDPEQTFQVADEVIAHTRKAVERGRAAHRAWQEQFDAWAAANPEHKALFDRLAERRLPEGWTANLPVHEPDPKGMATRKASGKVLAALAPVLPELWGGSADLAESNNTTMPGQPSFGPESISTGMWKAEPYGRTLHFGVREHAMGAILNGIALHGPTRPYGGTFLVFSDYMRPAVRLAALMRVPAVYVWTHDSIGLGEDGPTHQPIEHLAALRAIPGLNVVRPGDANETTYAWRTILERDSAEHTSHFRVSEPPHQDGPSALALTRQDLPILEGTSYEGVAKGGYVLADSSTETPQVILIATGSELQMAVAARTTLEAQGIGTRVVSMPCVEWFDAQDKAYRDEVLPPAVRARVVVEAGIAMPWHRFVGDAGEIVSIEHFGASADYQTLFREFGFTEEAVVAAAQRTLENVKG

SEQ ID NO: 46845 - protein, 380 aa, Nocardia farcinica IFM 10152
MAQNENIAALAAAGVSVWLDDLSRDRIRSGNLAELVRTRGVVGVTTNPTIFQGALSKGHAYDAQLKELAAQGADADAAIRTITTDDVREACDVLAPVYEATGGLDGRVSIEVDPRFAFDADKTVAQAVDLWKTVDRPNLFIKIPATEEGLPAITAVIAEGISVNVTLIFSVRRYRAVMGAYLDGLRKARVAGHDLAKIHSVASFFVSRVDTEIDKRLAAIGTPEALELRGKAGIANARLAYAEYQDVFDGGAHTSTYQHLAAAGARRQRPLWASTGVKNPDYPDTMYVTELVAPNTVNTLPEKTLEAVADHGEIRGDTVSGTAAEAAEVFERLRAVGIDLDDVFAVLEREGVEKFEASWAELLSATAEELRAAASGSEGN

SEQ ID NO: 46846 - protein, 706 aa, Stigmatella aurantiaca
MPTQKPSKGSVKPKKKVDPVIRKKKAPDSVTAKGTKAAAAAEELASAEATEKALEKLKKRKAVTEASADDIDPEEAAEEAAAAVEVDPDAVEDEVEEEAIAERKEVKDLLAAGREKGFLTYDEVNDALPADIVSSDQIDDVMSMFGDNDIEIVDAQKAAQSNEIKPTVAVEEESKQDADADDDDEDDEPGGKSNDPVRLYLRKMGSVSLLTREGEVEIAKRIEDGEKEVLRAMLACRVAVADILDIGNKLKTGKLRVRDVIKDAPEEAQAEGAEEAPEEGVEGEQPQQLAQSELNKIEQINKQIERFRKFAKDCEVLEEELSGKKKLTDVKKKEVKQEVKDLRTKMMEVLEEMRLNKKQVDRIVLNLKQLIERVDKAEEELRDLERRNGVSMKELRPQLKESRDNPNTAKKLQKQLNFTPEQLEALDRDVRTAVRKIKRVEEEANLPVDALRRNYDAIRLGERRAERAKSELVEANLRLVVSIAKKYTNRGLQFLDLIQEGNIGLMKAVDKFEYKRGYKFSTYATWWIRQAITRAIADQARTIRIPVHMIETINKLIRTSRYLVQEIGREPTPEEIAEKMELPLDKVRKVLKIAKEPISLETPIGEEEDSHLGDFIEDKSLVSPADAVINMNLAARTRKVLATLTPREEKVLRMRFGIGEKSDHTLEEVGQDFEVTRERIRQIEAKALRKLRHPSRSKRLRSFVES

SEQ ID NO: 46847 - protein, 262 aa, Nocardia farcinica IFM 10152
MSETPAERYADQQRRVAAGFPANTVQIFPDADALVTAGARRFVEVVVAAQAERGSASVVLTGGGTGIDMLAKVREAPGEVDWSRLDLFWGDERYVPAGDPERNELQARQALLDHVPLDPHRVHPVATSDGEYPDPVEAAAAYSATVHAHLAEHGSFDLHLLGMGGDSHINSLFPHSDAVLEEHELVLAVTDSPKPPPVRVTLTLPAVRRARHVLLVVGGAAKADAVAAALGGADPVEVPAAGAHGSESTTWLLDDGAASAVR

SEQ ID NO: 46848 - protein, 731 aa, Nocardia farcinica IFM 10152
MSAADTAAAVLDAQFRAGVAQAAPAALPPGISADDLWELFEAQATSRQLDLAARRLGAQGRGFYSIGSAGHEGNAALAAATRPSDPALLHYRSGAFFVHRLRRVGGSDPVRDVLLGVVAAAADPISGGRHKVFGSKAAHIVPQTSTIASQLPRAVGLAFALERAARLGLPTEWPADAIVLCSFGDASANHSTATGAINAALHTAFQGVPMPILFVCEDNGLGISVPTPPGWIAHAYGARPGLHYLHADGCDPADALTTCARAVDWVRTHRGPAFLHLSTVRLLGHAGSDAESAYRRPAELAADLRRDPLLGTAGLLVAAGADPGTVLARYDSIADRVAATAESVCAEPKLDTAEAVLAPLARSRPAAVRADVLRDTPTSPTRAHPGVRAGRDPGADVPVTLAQAVNTTLAALLARDPDVLVFGEDVGRKGGVYGVTKGLRARFGPRRVFDTLLDEQSVLGTALGAALAGFVPIPEIQYLAYLHNAADQVRGEAATLRFFSAGRYRNPMVVRIAGLAYQRGFGGHFHNDNSVAALRDIPGVVLAVPARADDAAALLRTCVSAARVDGRVCVFLEPIALYHTRDLHPDDGAWAVPAAAPEHVPIGRARAYGDGTDLTIVTFGNGVPMSLRVAARLARQGVATRVLDLRWLAPLPVDDLVHHARATGRVLVADETRRSGGVSEAVCTALVDAGFRGRLTRVTSADSFVPLGPAAAAVLLSEAAIESAALALVRD

SEQ ID NO: 46849 - protein, 358 aa, Corynebacterium efficiens YS-314
MSVSCGGHFYHRLSRKVRFSPMAIELFYDADADLSIIQGRKVAIIGYGSQGHAHAQNLRDSGVEVVIGLREGSKSAEKAKEAGFEVKTTAEAAAWANLIMILAPDTSQASIFTNDVEPNLNEGDALFFGHGLNIHFDLIKPADNIIVGMVAPKGPGHLVRRQFVDGKGVPCLIAIDQDPTGDAQALALSYASAIGGGRAGIIPTTFEAETVTDLFGEQAVLCGGTEELVKTGFEVLTEAGYEPEMAYFEVLHELKLIVDLMFEGGITNMNYSVSDTAEFGGYLSGPRVINADTKERMKDILTDIQDGTFTKRLIANVENGNTELEGLRAKYAEHPIEETGAKLRDLMSWVKNPLTETA

SEQ ID NO: 46850 - protein, 166 aa, Legionella pneumophila str. Paris
MKKVYHYIIHYVRTYLLLELLAGLWLTVKYFFRKKITVQFPEEQTPLSPRFRGLLALRRYPNGEERCIACKLCEAVCPALAITIESEQREDGSRRTTRYDIDMFKCINCGLCEESCPVDSIVVTPIHHYHISERGQNIMTKEKLLAVGDLMETQLAADRAADEKYR

SEQ ID NO: 46851 - protein, 520 aa, Trametes versicolor
MGRFSSLCALTAVIHSFGRVSAAIGPVTDLTISNADVSPDGFTRAAVLANGVFPGPLITGNKGDNFQINVIDNLSNETMLKSTSIHWHGFFQKGTNWADGAAFVNQCPIATGNSFLYDFTATDQAGTFWYHSHLSTQYCDGLRGPMVVYDPSDPHADLYDVDDETTIITLSDWYHTAASLGAAFPIGSDSTLINGLGRFAGGDSTDLAVITVEQGKRYRMRLLSLSCDPNYVFSIDGHNMTIIEADAVNHEPLTVDSIQIYAGQRYSFVLTADQDIDNYFIRALPSAGTTSFDGGINSAILRYSGASEVDPTTTETTSVLPLDEANLVPLDSPAAPGDPNIGGVDYALNLDFNFDGTNFFINDVSFVSPTVPVLLQILSGTTSAADLLPSGSLFALPSNSTIEISFPITATNAPGAPHPFHLHGHTFSIVRTAGSTDTNFVNPVRRDVVNTGTAGDNVTIRFTTDNPGPWFLHCHIDFHLEAGFAIVFSEDTADVSNTTTPSTAWEDLCPTYNALDSSDL

SEQ ID NO: 46852 - protein, 305 aa, Linum usitatissimum
IPPDQQRLIFAGKQLEDGRTLADYNIQKESTLHLVLRLRGGMQIFLKTLTGKTITLEVESSDTIDNVKAKIQDKEGIPPDQQRLIFAGKQLEDGRTLADYNIQKESTLHLVLRLRGGMQIFVKTLTGKTITLEVESSDTIDNVKAKIQDKEGIPPDQQRLIFAGKQLEDGRTLADYNIQKESTLHLVLRLRGGMQIFVKTLTGKTITLEVESSDTIDNVKAKIQDKEGIPPDQQRLIFAGKQLEDGRTLADYNIQKESTLHLVLRLRGGMQIFVKTLTGKTITLEVESSDTIDNVKAKIQDKEGI

SEQ ID NO: 46853 - protein, 545 aa, Caulobacter crescentus CB15
MAAKDVYFSSDARDKMLRGVNILANAVKVTLGPKGRNVVIEKSFAAPRTTKDGVSVAKEIELADKFENLGAQMIREVASKTNDKAGDGTTTATVLAQAIVQEGLKSVAAGMNPMDLKRGIDKAVAIAIEDIKTSSKKVTTNAEIAQVGTISANGDKEVGEMIAKAMDKVGNEGVITVEEAKTAETELDVVEGMQFDRGYLSPYFITNADKMEVQLEEPLILLSRKKLSSLQPLPVLEAVVQSGRPLLIIAEDVEGEALATLVVNKLRGGLRVAAVKAPGFGDRRKAMLEDIAILTGAQVVSEDIGIKLENVSLEMLGRAKKVSITKDDTTIVDGVGEKADIEARIAQIKRQIEDTTSDYDKEKLQERLAKLAGGVAVIRVGGSTEVEVKEKKDRVDDALNATRAAADEGIVPGGGTALLKASKASAVVGDNDDQTAGIAIVRRALQAPIRQIAENAGVEGSIVVGKILENDNSAFGFNAQTEQYVDLVVDGVIDPAKVVRTALQNAASVAGLLITTEAAIVVSPQEGRRRPAGGGMPGGMGDMDF

SEQ ID NO: 46854 - protein, 349 aa, Rhodopseudomonas palustris CGA009
MLPHFKAAAIHAAPVFLDKAATTKKAISLIREAVAAGAELVAFPETYIPAFPVWAALWAPIDNHDLFVRMADQSVLIDGPEVKAIRDEARRLGVVVSIGISEKSPASVGGIWNSNLLIGEDGEILNHHRKLVPTFYEKLIWSVGDGAGLRVVDTRLGKIGQLICGENTNPLARYALMAQGEQFHISSWPPVWPTRRPAEGGNYHIAAATRIRASAHCFEAKVFGLVTSGVLDKAARDMLVARDPSAAAVLDGTPRAATFFLDPTGEQIGEALCEDEGILYADIDLNRCVEPKQFHDVVGYYNRFDVFAVSISRRRLSPATFIDDLPLPAVVDDVEDKVGRAPNAAPVVL

SEQ ID NO: 46855 - protein, 311 aa, Vitis vinifera
MRNASSASAPPSSSSKTPCCIKVGLKRGPWTPEEDEVLANYIKKEGEGRWRTLPKRAGLLRCGKSCRLRWMNYLRPSVKRGQIAPDEEDLILRLHRLLGNRWALIAGRIPGRTDNEIKNYWNTHLSKKLISQGIDPRTHKPLNPNSSSVDVKASSSKAKAVMNPNPNPNPSPSEKAAANKEAGNFKSDNQYQIGAAGNDGSANIQNSDGSGTGLRSSNNEEDDDLNCGTDDVFSSFLNSLINEDVFPGQHHLQQQHHGGLIAPGSDALISTSSVQSFGFGTSWEAAAMTSTSVFSQIDHSKRFNDQPDKRF

SEQ ID NO: 46856 - protein, 139 aa, Ipomoea pes-caprae
QEWNPATDKYLAVKYDITTVMQAKPLLKEALQAAVGLPVDRNIPLIGFIGRLEEQKGSDILYAAISKFISMDVQIVILGTGKKKFEQQIEQLEVMYPDKARGVAKFNVPLAHMITAGADFMLIPSRFEPCGLIQLHAMR

SEQ ID NO: 46857 - protein, 824 aa, Geobacter metallireducens GS-15
METLSDVFATFSQRGDTTAFVHRTGVRRYVFTYLDLHALSLRMNRWLADQGVGEGDRVVLWGPNSPWWAVAFWGIVTRGAVAVPVDFMSGAERAEIIAGLTDAKLVIQSRDKLDRLTGRPSVLLEELGFLLEAVEPLATTHRPAPDDMAELIYTSGTTGNPKGVILTHRNLVANILQVNRHIPVVTPDFSFLSLLPLSHMFEQMGGFFTPLYRGAAIVYIRTLKPSAIMEALGEEDIYAIIAVPRLLQLLKGSVERELEAKGLGSIFRWLLKVGERMSRGGRSVLFRPIQRKFGRNFALFVSGGAPLDPEVFRFWNGLGFRVVEGYGLTECSPVLTANTMERQVMGSVGTPLDGVELRLEEGEILARGDNIFPGYFRNEEATRGAFVDGWFRTGDLGELDPDGWLRIKGRSKELIVTGAGVNVYPDEIEAILNRTQGVREGCVIGLDRGKGEEVHGVLILDGSGRPTEEIVNEVNAKFDELHRITSFSVWPEAEFPKTTTLKIRKFQVKERIEQGGGALGDGRGADRLTALVATITGSPLEQVTEGALLVNDLGLTSIARLELVNALEMEFRLDLEDSVIGPQTRVADLREIVSRREKVHIREHFRIWAMGGVALAVRRLLDTVLHGPLLRAFVTLKSLGIENLEAADGPVMFVSNHLSYLDQPAIMCVLPDAWRYNTATAAWEEFFFRNFKNLPQRLWKRFTYEYASVAFTVFPLPQSRGFRGALHFMGTLADQGMNILLFPEGERSRDGRLLPFQQGLGVMIRELGVPVVPVRIRGLEKVLPRGASWPQKGEVSITFGKPIHFRGESPTEIVDRARRAVEDL

SEQ ID NO: 46858 - protein, 491 aa, Saccharomyces cerevisiae
MSNPIENTENSQNTSSSRFLRNVQRLALNNVTNTTFQKSNANNPALTNFKSTLNSVKKEGSRIPQFTRESVSRSTAAQEEKRTLKENGIQLPKNNLLDDKENQDPSSQQFGALTSIKEGRAELPANISLQESSSAKEIIQHDPLKGVGSSTEVVHNSVENEKLHPARSQLQVRNTESETDSGKKRPISTIVEQELPKKFKVCDENGKEEYEWEDLDAEDVNDPFMVSEYVNDIFEYLHQLEVITLPKKEDLYQHRNIHQNRDILVNWLVKIHNKFGLLPETLYLAINIMDRFLGKELVQLDKLQLVGTSCLFIASKYEEVYSPSIKHFASETDGACTEDEIKEGEKFILKTLKFNLNYPNPMNFLRRISKADDYDIQSRTLAKFLLEISLVDFRFIGILPSLCAAAAMFMSRKMLGKGKWDGNLIHYSGGYTKEELAPVCHMIMDYLVSPIVHDEFHRKYQSRRFMKASIISVQWALKVRKNGYDIMTLHE

SEQ ID NO: 46859 - protein, 138 aa, Ipomoea gracilis
TQEWNPATDKYLAVKYDITTVMQAKPLLKEALQAAVGLPVDRNIPLIGFIGRLEEQKGSDILYAAISKFISMNVQILILGTGKKKFEQQIEQLGVMYPDKARGVAKFNVPLAHMITAGADFMLIPSRFEPCGLIQLHA

SEQ ID NO: 46860 - protein, 140 aa, Ipomoea argillicola
TQEWNPATDKYLAVKYDITTVMQAKPLLKEALQAAVGLPVDRNIPLIGFIGRLEEQKGSDILYAAISKFISMNVQIVILGTGKKKFEQQIEQLEVMYPDKARGVAKFNVPLAHMITAGADFMLIPSRFEPCGLIQLHAMR

SEQ ID NO: 46861 - protein, 139 aa, Ipomoea setosa
QEWNPATDKYLGVKYDITTVMQAKPLLKEALQAAVGLPVDRNIPLIGFIGRLEEQKGSDILYAAISKFISMDVQIVILGTGKKKFEQQIEQLEVMYPDKARGVAKFNVPLAHMITAGADFMMIPSRFEPCGLIQLHAMR

SEQ ID NO: 46862 - protein, 160 aa, Zea mays
  misc_feature (102)..(102): Xaa can be any naturally occurring amino acid
  unsure (1)..(160): unsure at all Xaa locations
MAEQTEKAFLKQPKVFLSSKKSGKGKKPGKGGNRFWKSIGLGFKTPREAIEGTYIDKKCPFTGTVSIRGRIIAGTCHSAKMNRTIIVRRNYLHFVKKYQRYXEKRHSNIPAHISPCFRVKEGDHVIIGQCRPLSKTVRFNVVKVIPAGSAAAGKKAFTAA

SEQ ID NO: 46863 - protein, 139 aa, Desulfovibrio desulfuricans G20
MAERTFAIIKPDATRRNLEGPILSVIQQNGLRVVAMKKMRLTREQAEGFYHVHKERPFFASLTDFMTSGPIVAMVLEGDNAVARWRELMGATNPENAAEGTIRRQFAEGLEANSVHGSDAAETAAFEMGYFFNAMEITG

SEQ ID NO: 46864 - protein, 126 aa, Ipomoea umbraticola
  misc_feature (2)..(2): Xaa can be any naturally occurring amino acid
  misc_feature (87)..(87): Xaa can be any naturally occurring amino acid
  unsure (1)..(126): unsure at all Xaa locations
NXNHATEQYRAVRYDITTVMQAKPLLKEALQAAVGLPVDRNIPLIGFIGRLEEQKGSDILYAAISKFISMDVQILILGTGKKKFEQXIEQLEVMYPDKARGVAKFNVPLAHMITAGADFMLIPSRF

SEQ ID NO: 46865 - protein, 445 aa, Entosiphon sulcatum
MREIVHIQAGQCGNQIGSKFWEVISDEHGVDPTGTYQGDSDLQLERINVYYNEATGGRYVPRAILMDLEPGTMDSVRAGPYGQIFRPDNFVFGQTGAGNNWAKGHYTEGAELIDSVLDVVRKEAESCDCLQGFQIAHSLGGGTGSGMGTLLISKIREEYPDRMMLTFSVIPSPKVSDTVVEPYNTTLSVHQLVENADEVMCIDNEALYDICFRTLKLTTPTFGDLNHLVSAVMSGVTCCLRFPGQLNSDLRKLAVNLIPFPRLHFFLVGFAPLTSRGSQQYRALTVPELTQQMFDAKNMMAASDPRHGRYLTASAMFRGRMSTKEVDEQMLNVQNKNSSYFVEWIPNNIKSSVCDIPPKGLKMAATFIGNNTAIQEMFKRVSEQFTAMFRRKAFLHWYTGEGMDEMEFTEAESNMNDLVSEYQQYQDATVEEEGEFDEEEDAEQY

SEQ ID NO: 46866 - protein, 204 aa, Dunnia sinensis
MARGNASVPAMEMTKWFDTNYHFIVPELGPDVKFTYASHKAVNEYKEAKALGADTVPVLVGPFTFLSLSKPAKGVEKTFPKLSLLDKILPVYKEVIADLKAAGASAIQFDEPVLVMDLESHQLEAFANAYSELESSLAGLHVIIETYFADVPQEAYKTLTSLNAVSGFGFDLVRGAKTLDLIKGGFPAGKFLYAGVVDGRNIWA

SEQ ID NO: 46867 - protein, 328 aa, Lolium perenne
VYYNEASCGRFVPRAVLMDLEPGTMDSVRTGPYGQIFRPDNFVFGQSGAGNNWAKGHYTEGAELTDSVLDVVRKEAENCDCLQGFQVCHSLGGGTGSGMGTLLISKIREEYPDRMMLTFSVFPSPKVSDTVVEPYNATLSVHQLVENADECMVLDNEALYDICFRTLKLTTPSFGDLNHLISATMSGVTCCLRFPGQLNSDLRKLAVNLIPFPRLHFFMVGFAPLTSRGSQQYRALTVPELTQQMWDSKNMMCAADPRHGRYLTASAMFRGKMSTKEVDEQMINVQNKNSSYFVEWIPNNVKSSVCDIPPTGLSMASTFIGNSTSIQE

SEQ ID NO: 46868 - protein, 299 aa, Glycine max
MAEVLTKASLVSSSSSSWHGVGQRHHRRVSTVSNTCSFGSGVGKFSSLKMNSQVLRSWSSSSEFQGKKLVFHVNRGLPNRVNSRLRASTGTQMNLRLGKVQKWWEKGLQPNMKEVTSAQDFVDSLLNAGDKLVVVDFFSPGCGGCKALHPKICQFAEMNPDVQFLQVNYEEHKSMCYSLNVHVLPFFRFYRGAHGRLCSFSCTNATIKKFKDALAKHTPDRCSLGPTKGLEEKELEALAANKDLSFTYSPKPLQPSHENEELATETASAPALGSGSLPSPSMTLNAVASNERTLTTSGR

SEQ ID NO: 46869 - protein, 321 aa, Lolium perenne
VYYNEASCGRFVPRAVLMDLEPGTMDSVRTGPYGQIFRPDNFVFGQSGAGNNWAKGHYTEGAELIDSVLDVVRKEAENCDCLQGFQVCHSLGGGTGSGMGTLLISKIREEYPDRMMLTFSVFPSPKVSDTVVEPYNATLSVHQLVENADECMVLDNEALYDICFRTLKLTTPSFGDLNHLISATMSGVTCCLRFPGQLNSDLRKLAVNLIPFPRLHFFMVGFAPLTSRGSQQYRALTVPELTQQMWDSKNMMCAADPRHGRYLTASAMFRGKMSTKEVDEQMINVQNKNSSYFVEWIPNNVKSSVCDIPPTGLSMASTFIG

SEQ ID NO: 46870 - protein, 563 aa, Physcomitrella patens
  misc_feature (265)..(265): Xaa can be any naturally occurring amino acid
  unsure (1)..(563): unsure at all Xaa locations
MMAVALPGQLNLDETPTWGSRSVDVYEKIEHIGEGTYGQVYMAKDKSTGEVVALKKVRMDNEKEGFPITAIREIKILKKLQHANVIKLKEIVTSKGPEKEDNIKPGDASKFKGSIYMVFEYMDHDLTGLADRPGMRFSIPQIKCYMKQLLTGLHYCHVNQVLHRDIKGSNLLIDNNGILKLADFGLARSFSNDQNGQPLTNRVITLWYRPPELLLGSTKYTPAVDMWSVGCIFAELLNGKPILPGRNESEQFQKICELCGSPDEXNWPRVSQLPYYNQFKPERLMKRRVKDVFKHFDRHALELLERMLTLDPDHRISAKDALDAEYFWVEPFPCQPSSLPKYEASHEYQTKKKRQQQRQQQEEQAKRMKVLHHPAPHTRLPPIQQQPLRPGPHQPGHNLGPPIHANGMANQHNNYNRGQGASNQGRAPGGGRPPHGGPNQNGGYGGPNRGGPGGAYGGPAQPGGFAAPNMGHQGGRGGAYGGPAGGVYPAGPYGGGRGPPVGGRGQQFGGMPGGPQPPAYGGQHYMQQPTAQYVDIDGAYARASHSGFQPPSPHRPDYRQQQR

SEQ ID NO: 46871 - protein, 572 aa, Oceanobacillus iheyensis HTE831
MLKWFFSYYKPHKRLFIIDFSAAVFVALLELAFPVAVQWFIDRLLPGEDWDAIVTVAILLLVVYIISTYLQYVVAYLGHKLGINIETDMRRDLFYQVQRQSFRFFDNTKTGHIMSRITNDLFDLGELAHHGPEDFFISIMTFIGAFIIMFTINPLLAMIILILVPILIFLITYGNIRMNKAWKKMYGNIADVNARVEDAVSGVRVVQSFTNETFEKERFQNDNEKFRLAKVGAYKVMGIVHSNIYFLMRLMTLSVLVIGAWLTYQGLMTAGELVSFILFVNVLTTPINKITALLELYPKGMAGFKRFTDLMKVNPDVQDKEDAVEVDQLKGNIQFQDVTFGYEESHRAVLNNMNFTVKPGETVAFVGPSGAGKTTISALIPRFYDVTEGSITIDGIDIRDMTKESLRSQIGVVQQDVFLFTGTLRENIAYGKLDATNEEIELAAKRAHMEDFINELPNGYETQVGERGLKLSGGQKQRIAIARMFLKNPPILILDEATSALDTETEMIIQTALNELAESRTTIVIAHRLATIKEADRIMVVTKNGIEEEGSHEDLLQKRGLFAHLHDVQMKK

SEQ ID NO: 46872 - protein, 708 aa, Magnaporthe grisea 70-15
MAEGGEREPREVKNHILFEIATEVAHRVGGIYSVIKSKAPVTTAEYGDRYTLIGPLNHTSAAVEVEELEPKDPALTATIQSMKDRGIGILYGRWLIEGAPRVLLIDTKTAYKHLDEWKTDLWNVASIPSPPGDDETNEAIVFGYLVAWFLGEYVCHEKKKAVIAHFHEWLAGVGLPLCKKRRIDVTTIFTTHATLLGRYLCAGSVDFYNNLQWFDVDAEAGKRGIYHRYCIERAAAHSCDVFTTVSHITAYESEHLLKRKPDGVLPNGLNVTKFAAMHEFQNLHAQSKEKIHDFVRGHFYGHYDFEPENTLYFFTAGRYEFRNKGCDMFIESLARLNHRLKASGSKTTVVAFVIMPAQTSSLTVEALRGQAVVKSLRDTVDVIEKSIGRRIFERSLKWHDGDPLPDEKELITSQDRVLLRRRLFAMKRHGLPPIVTHNMVNDSEDPILNQIRRVQLFNHPTDRVKIVFHPEFLNSANPVLPLDYDDFVRGTHLGVFASYYEPWGYTPAECTVMGVPSITTNLSGFGCYMEELIENSSDYGIYIVDRRTKGVDDSVNQLTNCMLEFCQKSRRQRINQRNRTERLSDLLDWKRMGLEYIKARQLALRRAYPNSFDGDDTADFMNSSDLKISRPFSVPGSPRDRAGMMTPGDFASLQEGREGLSTEDYVSWKLPEEEDPDEYTFPLTLGAKQRPSGPASPLDGVHLNGNGN

SEQ ID NO: 46873 - protein, 530 aa, Oryza sativa
MAAAPPPKADELQPHPPKEQLASVSFCITSPPPWPEAIILGFQHFIVMLGTTVIIPSALVPQMGGGNDEKARVIQTLLFVAGINTLFQTFFGSRLPVVMGGSYTFVAPTISIILAGRYNNEADPREKFLRTMRGTQGALIIASTIQMILGFSGLWRNVVRLLSPLSAVPLISLVGFGLYELGFPGVAKCVEIGLPELILLVAFSQYLPQVLHFGKPIFGRFGVLFTVSIVWLYAYILTISGAYKNAPPKTQVHCRVDRSGLISGAPWIRVPYPFQWGAPTFDAGEAFAMMMTSFIALVETTGAFIAASRYASATMIPPSIISRGIGWQGISILIDSFFGTANGTSVSVENVGLLALTHVGSRRVVQISAGFMIFFAILGKFGALFASIPLPIFAGMYCIFFAYVGACGLSFLQFCNLNSFRTKFILGFAFFMGISVPQYFNEYTAVAGYGPVHTGARWFNDMINVPFSSKPFVAGLVAYFLDNTIETHNNTVRKDRGYHWWDKFRSFKKDARSEEFYSLPFNLNKFFPAV

SEQ ID NO: 46874 - protein, 227 aa, Coccomyxa sp. PA
MSAKDTADLSPLLEANRKWADECAAKDSTYFSKVAGSQAPEYLYIGCADSRVSPAQLFNMAPGEVFVQRNVGNLVSNKDLNCMSCLEYTVDHLKIKHILVCGHYNCGACKAGLVWHPKTAGVTNLWISDVREVRDKNAAKLHGLSADDAWDKMVELNVEAQVFNVCASPIVQAAWARGQPLSVHGIVYTPGTGLVKELIKPITGMEDAGALLRADLKQHCFFSESLA

SEQ ID NO: 46875 - protein, 517 aa, Arabidopsis thaliana
MAFTHVCLWTLVAFVLTWTVFYLTNMKKKATDLADTVAEDQKDGAADVIIVGAGVGGSALAYALAKDGRRVHVIERDMREPERMMGEFMQPGGRLMLSKLGLQDCLEDIDAQKATGLAVYKDGKEADAPFPVDNNNFSYEPSARSFHNGRFVQQLRRKAFSLSNVRLEEGTVKSLLEEKGVVKGVTYKNKEGEETTALAPLTVVCDGCYSNLRRSLNDDNNAEIMSYIVGYISKNCRLEEPEKLHLILSKPSFTMVYQISSTDVRCGFEVLPENFPSIANGEMSTFMKNTIVPQVPPKLRKIFLKGIDEGAHIKVVPAKRMTSTLSKKKGVIVLGDAFNMRHPVVASGMMVLLSDILILRRLLQPLSNLGDANKVSEVINSFYDIRKPMSATVNTLGNAFSQVLIGSTDEAKEAMRQGVYDYLCSGGFRTSGMMALLGGMNPRPLSLVYHLCAITLSSIGQLLSPFPSPLRIWHSLKLFGLAMKMLVPNLKAEGVSQMLFPANAAAYHKSYMAATTL

SEQ ID NO: 46876 - protein, 371 aa, Pyrococcus furiosus
LAKGLEDVYIDQTNICYIDGKEGKLYYRGYSVEELAELSTFEEVVYLLWWGKLPSLSELENFKKELAKSRGLPKEVIEIMEALPKNTHPMGALRTIISYLGNIDDSGDIPVTPEEVYRIGISVTAKIPTIVANWYRIKNGLEYVPPKEKLSHAANFLYMLHGEEPPKEWEKAMDVALILYAEHEINASTLAVMTVGSTLSDYYSAILAGIGALKGPIHGGAVEEAIKQFMEIGSPEKVEEWFFKALQQKRKIMGAGHRVYKTYDPRARIFKKYASKLGDKKLFEIAERLERLVEEYLSKKGISINVDYWSGLVFYGMKIPIELYTTIFAMGRIAGWTAHLAEYVSHNRIIRPRLQYVGEIGKKYLPIELRR

SEQ ID NO: 46877 - protein, 536 aa, Neurospora crassa
MPLPSLGFLKKKRTKEGNTDPSSTSHPTSPVTPTSASSLDRNSIQSSIARISSHSSASQATSQSVATGTTTIDTTHMPTLLPHENPVNMNSVPVQQHAYPPQHTPSPGVAEQQNLPSISNLIHQPQYDQPATYKQSSRYVPSVSPANGGLPAPHTPQPSMPQPQQATLQPPHNHHQQSQAQQQQQQQQQQQPQQQQQQQQQQQQQLQPQPSQPRATKGKYSLADFEILRTLGTGSFGRVHLVQSRHNSRFYAVKVLKKAQVVKMKQVEHTNDERRMLAEVKHPFLITLWGTFQDAKNLYMVMDFVEGGELFSLLRKSGRFPNPVAKFYAAEVTLALEYLHSRDIIYRDLKPENLLLDRHGHLKITDFGFAKRVPDKTWTLCGTPDYLAPEVVSNKGYNKSVDWWSLGILIYEMLCGYTPFWDGSSPMKIYENILKGKVRYPQWVNPDAQDLLERLITADLSKRLGNLYGGPQDVKSHPWFAEVTWDRLARKDIDAPYTPPVKAGAGDASQFDRYPEETERYGQGGPDEYGHLFPDF

SEQ ID NO: 46878 - protein, 219 aa, Zea mays
MSLLSKLRLVTVDVTGTLLAYKGRLGDYYCMAAKAAGKPCPDYDRMHEGFKLAYTEMARKYPCFGFAAKMPTIEWWRICVKDSFVKAGYDYDDETFEKVFKRIYSAFGSSAPYSVFPDAQPFMRGLREKGITVGIVSNAEYRYKEVILPALGLNQGSEWDFGVFSGIVGVEKPDPTIYKIALEMAGNVAPEEALHIGDSYRKDYVPARSIGMHALLLDR

SEQ ID NO: 46879 - protein, 256 aa, Pseudomonas fluorescens Pf-5
MHPYFSLQGRTALVTGGTRGIGKMIAKAFVEAGARVYICARDPDACQQVAEELAAFGECRGLAANLANEEGVQQLAATLGQQLDSLDLLVNNAGTTWGAPLESYPAKGWEKVMQLNVTSVFSCIQQLLPLLRRAGSAAHPARIINIGSVAGISSFGEQAYAYGPSKAALHQMSRILARELVSQHINVNVIAPGRFPSKMTQHIGNDEQALAEDVALIPMKRWGREEEMAALAISLASTAGAYMTGNIIPLDGGFSL

SEQ ID NO: 46880 - protein, 163 aa, Bartonella henselae str. Houston-1
MLGLIQAAKSLLLLEFMSAFFLAMRQFFSPKPTINYPYEKGVVSQRFRGEHALRRYPNGEERCIACKLCEAICPAQAITIEAGPRRNDGTRRTVRYDIDMVKCIYCGFCQEACPVEAIVEGPNFEFATETREELYYDKEKLLMNGDRWEREIARNILMDAPYR

SEQ ID NO: 46881 - protein, 123 aa, Arabidopsis thaliana
MNALAATNRNFRHASRILGLDSKIERSLMIPFREIKVECTIPKDDGTLVSYIGFRVQHDNARGPMKGGIRYHPEVDPDEVNALAQLMTWKTAVADIPYGGAKGGIGCSPRDLSLSELEMLTRV

SEQ ID NO: 46882 - protein, 135 aa, Ipomoea lacunosa
  misc_feature (4)..(4): Xaa can be any naturally occurring amino acid
  misc_feature (134)..(134): Xaa can be any naturally occurring amino acid
  unsure (1)..(135): unsure at all Xaa locations
QEGXPATDKYLAVKYDITTVMQAKPLLKEALQAAVGLPVDRNIPLIGFIGRLEEQKGSDILYAAISKFISMDVQILILGTGKKKFEQQIEQLEVMYPDKARGVAKFNVPLAHMITAGADFMLIPSRFEPCGLIXL

SEQ ID NO: 46883 - protein, 575 aa, Staphylococcus aureus subsp. aureus MRSA252
MKRENPLFFLFKKLSWPVGLIVAAITISSLGSLSGLLVPLFTGRIVDKFSVSHINWNLIALFGGIFVINALLSGLGLYLLSKIGEKIIYAIRSVLWEHIIQLKMPFFDKNESGQLMSRLTDDTKVINEFISQKLPNLLPSIVTLVGSLIMLFILDWKMTLLTFITIPIFVLIMIPLGRIMQKISTSTQSEIANFSGLLGRVLTEMRLVKISNTERLELDNAHKNLNEIYKLGLKQAKIAAVVQPISGIVMLLTIAIILGFGALEIATGAITAGTLIAMIFYVIQLSMPLINLSTLVTDYKKAVGASSRIYEIMQEPIEPTEALEDSENVLIDDGVLSFEHVDFKYDVKKILDDVSFQIPQGQVSAFVGPSGSGKSTIFNLIERMYEIESGDIKYGLESVYDIPLSKWRRKIGYVMQSNSMMSGTIRDNILYGINRHVSDEELINYAKLANCHDFIMQFDEGYDTLVGERGLKLSGGQRQRIDIARSFVKNPDILLLDEATANLDSESELKIQEALETLMEGRTTIVIAHRLSTIKKAGQIIFLDKGQVTGKGTHSELMASHAKYKNFVVSQKLTD

SEQ ID NO: 46884 - protein, 213 aa, Saccharomyces cerevisiae
MSVEEVSKKFEENVSVDDTTATPKTVLSDSAHFDVKHPLNTKWTLWYTKPAVDKSESWSDLLRPVTSFQTVEEFWAIIQNIPEPHELPLKSDYHVFRNDVRPEWEDEANAKGGKWSFQLRGKGADIDELWLRTLLAVIGETIDEDDSQINGVVLSIRKGGNKFALWTKSEDKEPLLRIGGKFKQVLKLTDDGHLEFFPHSSANGRHPQPSITL

SEQ ID NO: 46885 - protein, 278 aa, Magnaporthe grisea 70-15
MDETTPQHHKGAMLGHADGQAGPHRQTLRHHLVAALGEFVGTFLFLFFGYASHSMIATAERPTPEGLRDGYSAQATVFIALAYAMAILVTVWAMYRISGGLFNPAITLGLGLAGQLPWIRIAVLFPTQLVASICAGAVIEAMLPGPISRVNTKLAPDVSVTQGVFLEMFFTAYLLFVVLMVAAEKSKDTYIAPVAIGLAAFVALIPGAYYTGASLNPARSFGCAVAGLQFPENHWIYWVGPFLGSALGAGFYRLLKFLNYEEANPGQDSDYPLYNQRV

SEQ ID NO: 46886 - protein, 331 aa, Synechocystis sp. PCC 6803
MARMYYDQDANLDLLAGKTVAIIGYGSQGHAHALNLKDSGVNVVVGLYSGSKSVAKAEGAGLKVLSVAEAAKAADLIMILLPDEVQKTVYEAEIAPNLVAGNVLLFAHGFNINFAQIVPPADVDVVMAAPKGPGHLVRRTYEQGQGVPALFAVYQDASGQARDYAMAYAKGIGGTRAGILETTFREETETDLFGEQVVLCGGLTALIKAGFDTLVEAGYQPELAYFECLHEVKLIVDLIVEGGLAKMRDSISNTAEYGDLTRGPRIVTEETKAEMRQILDEIQSGQFAREFVLENQAGKPGFTAMRRRESEELIEEVGKDLRAMFSWLKDR

SEQ ID NO: 46887 - protein, 129 aa, Ipomoea lobata
TQEWNPATDKYLAVKYDITTVMQAKPLLKEALQAAVGLPVDRNVPLIGFIGRLEEQKGSDILYAAISKFISMDVQIVILGTGKKKFEQQIEQLEVMYPDKARGVAKFNVPLAHMITAGADFMLIPSRSE

SEQ ID NO: 46888 - protein, 140 aa, Ipomoea coccinea
  misc_feature (11)..(11): Xaa can be any naturally occurring amino acid
  unsure (1)..(140): unsure at all Xaa locations
PQEWNPATDKXLAVKYDITTVMQAKPLLKEALQAAVGLPVDRNVPLIGFIGRLEEQKGSDILYAAISKFISMDVQIVILGTGKKKFEQQIEQLEVMYPDKARGVAKFNVPLAHMITAGADFMLIPSRFEPCGLIQLHAMR

SEQ ID NO: 46889 - protein, 581 aa, Penicillium chrysogenum
MEEKKFEAVQTGAEAPPAYGDSSPTRGGIGQRIFDSFKRDPNHTVTGHVGADGSGFDAETAAHNTAHSPLQRRLKGRHLQMIAIGGSIGTGLFVGSGSVLATGGPASVLIAYILIGCMLYCTVHALGEMAVLFPVAGSFAHYSTRFVDPAWGFAMGWNYALQWLIVLPLEIVAASITVDYWNPGVSNAAWVTIFWVMIVSINLFGVRGYGEAEFVFSLIKVIAVIGFIILGIILNCGGGPQGGYIGARYWYDPGAFRNGFKGLCSVFVNAAFAFAGTELVGLAAAETTNPRKSLPTAVKQVFWRIALFYIVSLTLVGLLVRYDDERLISGSSSADAKASPFVIAIENAGIKALPSIMNVVIMIAVLSVGNSSVYGSSRTLAALAEQGQAPKFLAYIDRKGRPLPAIIIASILGLLSYLAASDVQTTAFEWMMAISGLSSIFTGVPCVRAHILFRRAWKKQGHSLDELAFRSQPGVIGSWVGFIFNCLVLVAQFWVGFAPIGYADMTSQEIAYKFFSVYLAAPVVLICYIGYKIMYKTKFVRTSEVDLVTGRRDLDIQHLIEQEMAEQREWPKWKKVYKFFC

SEQ ID NO: 46890 - protein, 208 aa, Saccharomyces cerevisiae
MSSRKKNILKVIILGDSGVGKTSLMHRYVNDKYSQQYKATIGADFLTKEVTVDGDKVATMQVWDTAGQERFQSLGVAFYRGADCCVLVYDVTNASSFENIKSWRDEFLVHANVNSPETFPFVILGNKIDAEESKKIVSEKSAQELAKSLGDIPLFLTSAKNAINVDTAFEEIARSALQQNQADTEAFEDDYNDAINIRLDGENNSCSC

SEQ ID NO: 46891 - protein, 557 aa, Bacteroides fragilis NCTC 9343
MIKENFIKLYENSFRENWDLPCYTNYGEPESYTYGEVAEEIAKLHLLFKHCSLRRGDKIAVIGKNNARWCIAYMATITYGAIIVPILQDFNPNDVHHIVNHSESVFLFTSDTIWENLEEERLTGIRAVFSLTDFRCLHQRDGETVQKFLKHIDQYMTDTYPKGFRKEDVLYTTLSNDKVMLLNYTSGTTGFSKGVMLTGNNLAGNVTFGIRTELLKKGDKVLSFLPLAHAYGCAFDFLTATAVGTHVTLLGKVPSPKIIMKAFEEVKPNLIITVPLVIEKIYKNVIQPIISKKGMKWALSIPLLDNQIYGQIRKKLIDALGGRFKEIIIGGAAMNPEVEEFFHKIKFPFTIGYGMTECGPLISYAPWDKFVPSSSGKILDIMEARIYKENPEAETGEIQVRGENVMTGYYKNPEATQEVFTKDGWLRTGDLGTMDDEGNIFIRGRLKTMILSSSGQNIFPEEIEAKLNNLPFILESLVIERNKKLVALVYADYEALDSLGLNHEDNLKTIMDENLKNLNNNVAAYEKVSQIQLYPTEFEKTPKRSIKRYLYNSIAED

SEQ ID NO: 46892 - protein, 862 aa, Taxus wallichiana var. chinensis
MAQLSFNAALKMNALGNKAIHDPTNCRAKSEGQMMWVCSKSGRTRVKMSRGSGGPGPVVMMSSSTGTSKVVSETSSTIVDDIPRLSANYHGDLWHHNVIQTLETPFRESSTYQERADELVVKIKDMFNALGDGDISPSAYDTAWVARVATISSDGSEKPRFPQALNWVFNNQLQDGSWGIESHFSLCDRLLNTTNSVIALSVWKTGHSQVEQGTEFIAENLRLLNEEDELSPDFEIIFPALLQKAKALGINLPYDLPFIKYLSTTREARLTDVSAAADNIPANMLNALEGLEEVMDWKKIMRFQSKDGSFLSSPASTACVLMNTGDEKCFTFLNNLLVKFGGCVPCMYSIDLLERLSLVDNIEHLGIGRHFKQEIKVALDYVYRHWSERGIGWGRDSLVPDLNTTALGLRTLRTHGYDVSSDVLNNFKDENGRFFSSAGQTHVELRSVVILFRASDLAFPDEGAMDDARKFAEPYLRDALATKISTNTKLFKEIEYVVEYPWHMSIPRSEARSYIDSYDDDYVWERKTLYRMPSLSNSKCLELAKLDFNIVQSLHQEELKLLTRWWKESGMADINFTRHRVAEVYFSSATFEPEYSATRIAFTKIGCLQVLFDDMADIFATLDELKSFTEGVKRWDTSLLHEIPECMQTCFKVWFKLIEEVNNDVVKVQGRDMLAHIRKPWELYFNCYVQEREWLDAGYIPTFEEYLKTYAISVGLGPCTLQPILLMGELVKDDVVEKVHYPSNMFELVSLSWRLTNDTKTYQAEKARGQQASGIACYMKDNLGATEEDAIKHICRVVDRALKEASFEYFKPSNDIPMGCKSFIFNLRLCVQIFYKFIDGYGIANEEIKDYIRKVYIDPIQV

SEQ ID NO: 46893 - protein, 1184 aa, Magnaporthe grisea 70-15
MPNEGRTNQQGDARSKDEQRAFSTDTSKAMSSSRRSPSPLSSFAPPRRPDSRPRPPREQQQPHPPLPRDNLGRGRSIERPLEPFESRSQRPEPSNNSTAQGSAEGPRQGPRQNRRSRHRSRDRPRRPSRHRSPPRPPQEPRRGFAPDSIFDRPARSGHLDQPDTAKEKERDLPHRNTAAREPSRLASSPASTSKRQRSPGPPVADQDHSAKRPRRGPSPQADEPYHFDSRAAPDKTGPGREERPQRPFSPGRPRSRSPGYGRDFDRREKRKKKKKKNKNRRDRSRSPNRDRDEFGGPAPSGRKPLPQPGRESGGRRRSRSPLAPDRPRSFSRGGSPHSQPHGAEHPPFSPSQQVPPRGRGHNPSRDFDIPPERRHYDGRATPPPPEASRSRKKGRGREERHSRKSQAPRVSGANSVEVNMSARGSGYRGGYGPGGGYQMQAPYSQGPPTGPRRFSHSSGHATPSSFHGTPPPQSPYGGSQGWGGQQQYQSPSYAHQYPPNGGYTPNGPHNPGNFTPTGPHGQYHQSPSYAPPSGPNSQYSYPQGPARGGHRGGFRGGNAFNQVGRAGYHGNSFKSTSHNGSVHGGSVHGGSVHGGSVHGGSGHASPAATSNNGDSGIQQAHGHPNEQAKDDENPFRPSKDLQVEDNTQSGHGEDNSQPQQDQPQITVPQTERQPPSGPSNPKIKFQFKSSSKVPATIPKPEISSKFNALPPTQPKAQQQQQRQEAINKERNLPQDVPTGPASTRSRHDRGPRPPHDAPRQPSGQQPLPQPRFRMVKKTMRRPIRKEGLPTEMANSDSVYYRKPGNESVVGAGTYGKVFKAINVYTNNLVALKRIRMEGERDGFPVTAVREVKLLQSLRHINIVKLQEVMVEKNDCFMVFEYMSHDLTGLLNHPSFKLEAPQKKDLARQLFDSLDYLHRRGVLHRDIKAANILVSNDGILKLADFGLARFYAKHHQLDYTNRVITIWYRSPELLLGETRYGPAVDIWSAACVMVEILTQYAIFPGEGGEISQLDKIWAVLGTPSRSEWPGLLEMPWFELLRPAFKRPNNFAKLYQHRVTPAAFDLLEAMFRFDPAKRPSAAEILEHPYFTEEEPAPRQAVELATIEGDWHEFESKQLRRKNEAKEKEARRAARAEKEKEAAGAGGSEKKRSHDQTAVASEQSQPDAKRQNVDGRPPAQEKASDAG

SEQ ID NO: 46894 - protein, 1733 aa, Mycobacterium tuberculosis H37Rv
MADVAESQENAPAERAELTVPEMRQWLRNWVGKAVGKAPDSIDESVPMVELGLSSRDAVAMAADIEDLTGVTLSVAVAFAHPTIESLATRIIEGEPETDLAGDDAEDWSRTGPAERVDIAIVGLSTRFPGEMNTPEQTWQALLEGRDGITDLPDGRWSEFLEEPRLAARVAGARTRGGYLKDIKGFDSEFFAVAKTEADNIDPQQRMALELTWEALEHARIPASSLRGQAVGVYIGSSTNDYSFLAVSDPTVAHPYAITGTSSSIIANRVSYFYDFHGPSVTIDTACSSSLVAIHQGVQALRNGEADVVVAGGVNALITPMVTLGFDEIGAVLAPDGRIKSFSADADGYTRSEGGGMLVLKRVDDARRDGDAILAVIAGSAVNHDGRSNGLIAPNQDAQADVLRRAYKDAGIDPRTVDYIEAHGTGTILGDPIEAEALGRVVGRGRPADRPALLGAVKTNVGHLESAAGAASMAKVVLALQHDKLPPSINFAGPSPYIDFDAMRLKMITTPTDWPRYGGYALAGVSSFGFGGANAHVVVREVLPRDVVEKEPEPEPEPKAAAEPAEAPTLAGHALRFDEFGNIITDSAVAEEPEPELPGVTEEALRLKEAALEELAAQEVTAPLVPLAVSAFLTSRKKAAAAELADWMQSPEGQASSLESIGRSLSRRNHGRSRAVVLAHDHDEAIKGLRAVAAGKQAPNVFSVDGPVTTGPVWVLAGFGAQHRKMGKSLYLRNEVFAAWIEKVDALVQDELGYSVLELILDDAQDYGIETTQVTIFAIQIALGELLRHHGAKPAAVIGQSLGEAASAYFAGGLSLRDATRAICSRSHLMGEGEAMLFGEYIRLMALVEYSADEIREVFSDFPDLEVCVYAAPTQTVIGGPPEQVDAILARAEAEGKFARKFATKGASHTSQMDPLLGELTAELQGIKPTSPTCGIFSTVHEGRYIKPGGEPIHDVEYWKKGLRHSVYFTHGIRNAVDSGHTTFLELAPNPVALMQVALTTADAGLHDAQLIPTLARKQDEVSSMVSTMAQLYVYGHDLDIRTLFSRASGPQDYANIPPTRFKRKEHWLPAHFSGDGSTYMPGTHVALPDGRHVWEYAPRDGNVDLAALVRAAAAHVLPDAQLTAAEQRAVPGDGARLVTTMTRHPGGASVQVHARIDESFTLVYDALVSRAGSESVLPTAVGAATAIAVADGAPVAPETPAEDADAETLSDSLTTRYMPSGMTRWSPDSGETIAERLGLIVGSAMGYEPEDLPWEVPLIELGLDSLMAVRIKNRVEYDFDLPPIQLTAVRDANLYNVEKLIEYAVEHRDEVQQLHEHQKTQTAEEIARAQAELLHGKVGKTEPVDSEAGVALPSPQNGEQPNPTGPALNVDVPPRDAAERVTFATWAIVTGKSPGGIFNELPRLDDEAAAKIAQRLSERAEGPITAEDVLTSSNIEALADKVRTYLEAGQIDGFVRTLRARPEAGGKVPVFVFHPAGGSTVVYEPLLGRLPADTPMYGFERVEGSIEERAQQYVPKLIEMQGDGPYVLVGWSLGGVLAYACAIGLRRLGKDVRFVGLIDAVRAGEEIPQTKEEIRKRWDRYAAFAEKTFNVTIPAIPYEQLEELDDEGQVRFVLDAVSQSGVQIPAGIIEHQRTSYLDNRAIDTAQIQPYDGHVTLYMADRYHDDAIMFEPRYAVRQPDGGWGEYVSDLEVVPIGGEHIQAIDEPIIAKVGEHMSRALGQIEADRTSEVGKQ

SEQ ID NO: 46895 - protein, 204 aa, Dunnia sinensis
MARGNACVPAMEMTKWFDTNYHFIVPELGPDVKFTYASHKAVNEYKEAKALGVDTVPVLVGPFTFLSLSKPAKGVEKTFPKLSLLDKILPVYKEVIADLKAAGASAIQFDEPVLVMDLESHQLEAFANAYSELESSLAGLHVIIETYFADVPQEAYKTLTSLNAVSGFGFDLVRGAKTLDLIKGGFPAGKFLYAGVVDGRNIWA

SEQ ID NO: 46896 - protein, 208 aa, Sorghum bicolor
LAEKAALAYAAEHGMELVTIITTLVVGPFLSTGMPPSMITALALVTGNEAHYSILKQVQFVHLDDLCDAHIFLFEHPAAAGRYVCSSCDTTIHDLAAMLRDRYPEYDIPERFPAGTGIEDDLQMVHMSAKKLQDLGFTFRYTRMEDMYDDAIRTCREKGLIPLAAAGRDDGSASVRAPGERDVTATAGGDVSAPVRAPGGETDVTIGA

SEQ ID NO: 46897 - protein, 374 aa, Polaromonas sp. JS666
MTTDAILLTPGPLTTSSRTKQSMLRDWGSWDTDFNAITARLRQGLLRIVHGEGTHECVPLQGSGTFSVEAAIGTLVPPGEKGGHVLVPVNGAYCQRIAKICKVLGRKLTTFEYAEDAQIRPEDIDRLLAKDPSITHVALVHCETSTGILNPLHEIALVVQRHGKGLIVDAMSSFGALEIDARKTPFDAVVAASGKCLEGVPGMGFVLARRAALERCEGNCHSLAMDLYDQWVYMNKTTQWRFTPPTHVVAALDAALTQYFEQGGLAARGGAYAKNCRELISGLAGLGLRSFLPAAIQAPIIVTFHAPASPAYEFKAFYNAVRQRGYILYPGKLTAVETFRVGCMGQLGARGMAGAVEAVRDALQEMGLELANAE

SEQ ID NO: 46898 - protein, 204 aa, Dunnia sinensis
MARGNASVPAMEMTKWFDTNYHFILPELGPDVKFTYASHKAVNEYKEAKALGVDTVPVLVGPFTFLSLSKPAKGVEKTFPKLSLLDKILPVYKEVIADLKAAGASAIQFDEPVLVMDLESHQLEAFANAYSELESSLAGLHVIIETYFADVPQEAYKTLTSLNAVSGFGFDLVRGAKTLDLIKGGFPAGKFLYAGVVDGRNIWA

SEQ ID NO: 46899 - protein, 304 aa, Arabidopsis thaliana
MPLEAVVYPQDPFGYLSNCKDFMFHDLYSQEEFVAQDTKNNIDKLGHEQSFVEQGKEDDHQWRDYHQYPLLIPSLGEELGLTAIDVESHPPPQHRRKRRRTRNCKNKEEIENQRMTHIAVERNRRKQMNEYLAVLRSLMPSSYAQRGDQASIVGGAINYVKELEHILQSMEPKRTRTHDPKGDKTSTISLVGPFTDFFSFPQYSTKSSSDVPESSSSPAEIEVTVAESHANIKIMTKKKPRQLLKLITSLQSLRLTLLHLNVTTLHNSILYSISVRVEEGSQLNTVDDIATALNQTIRRIQEET

SEQ ID NO: 46900 - protein, 303 aa, Rubrobacter xylanophilus DSM 9941
MSAPRVIVVGDVLYDMVARVEGGLPVGADSFVRIQDSPGGSGANVAAWLASLGVEAHLVGRVGEDPLGDHLEAGLREAGVRTHLPRDPSLPTGRVFVLVDGSGERTMITDRGAGEALGPRDIPARLFAPGAHLHLTGYLFSGGGRREAALEALRLARSAAMSFSVDPSSVTLLRAVGVERFAGWTSGADLLFPNLSEAALLSGRAEPEEAARRLLERYRAVVLKLGPEGALYADREGRRARLPAPRVRRADATGAGDALCAAFLASWVRGEPPARALREGVRLAARVVGRTGARGFRRTRGPC

SEQ ID NO: 46901 - protein, 231 aa, Nocardia farcinica IFM 10152
MAIEAVLFDFSGTLFRLEEDPSWTDELVDADGRAFDVHEKAEILRRMTAPVQQLVEFDEAGQYAWDNRDLDPALHRRAYLEVLRKSGVPTEEQAARLYGRLIDPLAWTPYPDTGTVLEFLAGHGVRTAVVSNIAFDVRPAFATRGWDALLDAVTLSYEVGAIKPDPRIFRAALDKLGVAPEAALMVGDSAVADGGASALGCRFALVDPLPTAERPDALVDALRAHGLAVPR

SEQ ID NO: 46902 - protein, 207 aa, Sorghum arundinaceum
LAEKAALAYAAEHGMELVTIITTLVVGPFLSTGMPPSMITALALVTGNEAHYSILKQVQFVHLDDLCDAHIFLFEHPAAAGRYVCSSCDTTIHDLAAMLRDRYPEYDIPERFPAGIEDDLQMVHMSAKKLQDLGFTFRYTRMEDMYDDAIRTCREKGLIPLAAAGRDDGSASVRAPGERDVTATAGGDVVSAPVRAPGGETDVTIGA

SEQ ID NO: 46903 - protein, 178 aa, Zea mays
MAEAPASPGGGGGSHESGSPRGGGGGGSVREQDRFLPIANISRIMKKAIPANGKIAKDAKETVQECVSEFISFITSEASDKCQREKRKTINGDDLLWAMATLGFEDYIEPLKVYLQKYREMEGDSKLTAKSSDGSIKKDALGHVGASSSAAQGMGQQGAYNQGMGYMQPQYHNGDISN

SEQ ID NO: 46904 - protein, 514 aa, Broussonetia papyrifera
MDTKSITLLQEALKPLPMAIFLVIPLLFLLGHILRSRGRLPYPPGPKGLPIIGSMSMMDQLTHRGLAALAKQYGGIFHLKMGYLHMVAISSPETARQVLQLQDNIFSNRPANIAIRYLTYDRADMAFAHYGPFWRQMRKLCVMKLFSRKRAASWESVRGEVEKTVLSVAGSTGTAVNVGELVFKTTMDIIYRAAFGASNKEGQDEFISILQEFSKLFGAFNMADFIPWLTWVDPQGLNGRLKRARKALDAFIDKIIDEHVVKKNEAAETDMVDDLLAFYSNEEAKVNDAEDLHNAIRLTRDNIKAIIMDVMFGGTETVASAIEWAMTEMMRCPEDLKKVQQELADVVGLDRRLEESDFEKLTYLRCAIKETLRLHPPIPLLLHETAEDAAVAGYHIPKGSRVMINAWAIGRDKNSWADPDSFKPARFLRDGVPDFKGSNFEFIPFGSGRRSCPGMQLGLYALELTVGHLLHCFTWNLPDGMKPSELDMNDVFGLTAPRATRLVAIPTKRVVCTI

SEQ ID NO: 46905 - protein, 475 aa, Escherichia coli K12
MSIRLEGYMQTTQQNAPLKRTMKTRHLIMLSLGGVIGTGLFFNTGYIISTTGAAGTLLAYLIGALVVWLVMQCLGELSVAMPETGAFHVYAARYLGPATGYTVAWLYWLTWTVALGSSFTAAGFCMQYWFPQVPVWVWCVVFCAIIFGLNVISTRFFAEGEFWFSLVKVVTIIAFIILGGAAIFGFIPMQDGSPAPGLSNITAEGWFPHGGLPILMTMVAVNFAFSGTELIGIAAGETENPRKVIPVAIRTTIARLIIFFIGTVFVLAALIPMQQVGVEKSPFVLVFEKVGIPYAADIFNFVILTAILSAANSGLYASGRMLWSLSNERTLPACFARVTKNGVPLTALSVSMLGGVLALFSSVVAPDTVFVALSAISGFAVVAVWLSICASHFVFRRRHLQQGKALSELHYRAPWYPLVPVLGFVLCLVACVGLAFDPAQRIALWCGLPFVALCYGAYFLTQPRNAKQEPEHVAE

SEQ ID NO: 46906 - protein, 280 aa, Zea mays
MEFEDRCHKVQEPKFDCLLFDLDDTLYPLSSGIAGHVKKNIEDYMVEKLGIDESKIENLGNLLYKNYGTTMAGLRAIGYSFDYDEYHAFVHGRLPYDNIKPDPVLKHILKNLPIRKLIFTNGDKVHAVRALERLGLEDCFEGIICFETLNPPCPPQGDQEPEIFDIAGHFARSGTADELPKTPVLCKPNVDAMEEALRIANVNPHKAIFFDDSVRNIQAGKQIGLHTVLVGKSQRVKGADHALESIHNIREALPELWEEAEKAEDVLYPERVAMETSVTA

SEQ ID NO: 46907 - protein, 420 aa, Lupinus angustifolius
MASVNQSVSVSPTASSDSVFAHLLPAPEDPILGVTVAYNKDPSPVKLNLGVGAYRTEEGKPLVLNVVRRVEQQLVNEASRNKEYLPIVGVADFNKLSARLIFGADSPAIQENRVTTVQCLSGTGSLRVGGEFLARHYHQRTIYIPQPTWGNHPKIFTLAGLSVKTYRYYAPATRGLDFEGLLEDLGSAPSGSIVLLHACAHNPTGVDPTTEQWEQIRKLLRSKALLPFFDSAYQGFASGSLDIDAQAVRLFVADGGELLLAQSYAKNMGLYGERVGALSIVSKSADVASRVESQVKLVVRPMYSNPPIHGASIVAAILRDRDLYNEWHIELKAMADRIIKMRQQLFDALQSRGTPGDWSHIIKQIGMFTFTGLNAEQVSFLTKEYHIYLTSDGRISMAGLSSKTVPHLADAIHAAVTRVV

SEQ ID NO: 46908 - protein, 587 aa, Cryptococcus neoformans var. neoformans
MLSADQRQRAPFAHKSSCANLTATQPSALRSPFPPQSHWPTPPSAEGHQLQLTSDRSKWAQYPSPRKISNETCQAGFSDHPYAFGGIGATYSLDTPTSRRHSLPSLFNPNTHRRAFTFPSMSLPNPATVRFISLCFLWYACSAISNNTGKVILNHFKYPVTLTIVQFFFVAFYCAISSQKMLGWTGRLRQPTKNILKGTLPLAAFQVGGHIFGSMAISRVPVSTVHTIKALSPLFTVMAYALLFGVSYSPATYLSLLPLTLGVMLACSFDISFSNIFGLVCALGSTIVFVSQNIFFKKIMPTTSTNEVNSSSKLDKINLLYFSSSMAFILMIPLWIYSDARRLIDLWINPAASESGTSVLFYFFLNGTVHFAQSIIAFALLASTSPVTYSIASLVKRIAVICLAIIWFKQPVHTVQALGIVLTGAGLWMYNNAKRDVDRGEIKMRHVEALREGVLPSTKMDQCILEGSGIELSYKSAHNSPKPTYPNNYIDLPSSTTTAVNKTTFQVPPILDHTSHIEAPYPSPPASISSSPPADITYLGISKGRQHWLSGEGERFRPPVLNSIRSSVMEEARETGVNEGMAAVVTT

SEQ ID NO: 46909 - protein, 157 aa, Cuscuta japonica
MSLIPSFFEGRRSNAFDPFSLELWDPFFSNTVANLSGSSSAREASAFANARIDWKETPEAHIFKADVPGLKKEEVKVEVEEGKVLQISGERSKEKEEKNDTWHRVERSSGKFLRSFRLPENAKVDQVKAAMENGVLTVTVPKVEEKKAEVKSIQISG

SEQ ID NO: 46910 - protein, 94 aa, Lupinus luteus
ASAHAGKVFKLVYEAAIQLQVTGVVVTDATLKNLGSVHVSKGVADAHFPVVKEAILKTIKEVVGAKWSEELNSAWTIAYDELAIVIKKEMNDAA

SEQ ID NO: 46911 - protein, 452 aa, Mycobacterium leprae
MTNHPRYSPPPQQPGYRSAPNQPVSSSYTEEQQPYHQQQVDWCYQQSPSLQQYHRPYEPFGGAGTVPLQSMIPPGRVADRRPRAGMLAVSALAIAVVSAGIGGVAATVVALGTRVAGGNGAGPVTGPAASVPAANMPSGSVEQVAVKVVPSVVMLETDLGRQSEEGSGVILSADGLILTNNHVVAVAAKPGGGPGGGLSPKTTVTFFDGRTASFTVVGADPTSDIAVVRVQSISGLTPITMGSSADLRVGQPVVAVGSPLGLAGTVTSGIVSALNRPVSTTGESGNQNTVLDAIQTDAAINPGNSGGALVNMGGQLVGVNSAIATLGADSGDAQSGSIGLGFAIPVDQAKRIADELISTGKATHASLGVQVATDKGTPGAKVMDVVAGGAAANAAVPKGVVLTKVDDRLISSADALVAAVRSKAPGDKVSLTYQDQSGSSRTVQVTLGKAEQ

SEQ ID NO: 46912 - protein, 543 aa, Arabidopsis thaliana
MDFLDNEMLDIEIHDIGSLHHLLHVDCCFRFAFFKLIGLEDKLKLASSLSIFRSIEFIPGEGDDSVLIENDEDDVTGPSRLWNKTILHDIMTSCIIMHNMIIEDERDIDAPIEERVEVPIEEVEMTVLWLEMPLEEILSRLPLKSTRAVRSTCKKWDSLFKNRSFISKAAAAREGESQMVVLMDHNLHLVSFFFGSDTSVEIKGKRICLNDDSDSEQVKISQVFHCEGLLLCILKDDNFSLVVWNPYWGQTRWIKPRCSFEIPQGCDMYRYAIGYDNKRRNHKILRFIDYEFHYPRDNVVLWYEIYDFESDLWTTLDVTTPHWLINCGNRGVTLKGNTYWCAKKRNSDLFLNADHIICFDFTSERFGPLLLLPFSDLDGVVTLACVREEKLAALVCHEDVVEVWITIKIEANEVLWSKFLTVNVDLGDEIPSSLTYGSFFIDEEKKVAMIFDKTLDRGDTVHIMGEAGYGGQVDLGEPVNKRRCPLVCSYVPSLVQIKKPAGFQRKQQSKLEKRQYVRNISKLRALKTQSSWTLSMSLECHQQ

SEQ ID NO: 46913 - protein, 589 aa, Oryza sativa
MKYVLVTGGVVSGLGKGVTASSIGVVLKACGLRVTTIKIDPYLNTDAGTMSPFEHGEVFVLDDGGEVDLDLGNYERFLDIKLTRDNNITTGKIYQSVINKERRGDYLGKTIQVVPHITDEIQDWIERVAMNPVDGKEGPPDVCVIELGGTIGDIESMPFIEALGQFSYRVGPGNFCLVHVSLVPVLNVVGEQKTKPTQHSVRGLRGLGLAPDILACRSTEPLEENVKAKLSQFCHVPVSSIINLHDVTNIWHIPLLLRDQRAHEAILKVLDLQFVGKVPREPKLVEWTERASKFDKLKATVKIAMVGKYTGLSDSYLSVLKALLHASVAMGRKLVVEWVPSCDLEDSAAKEGAEGILVPGGFGDRGVQGKILAAKYARENNVPYLGICLGMQIAVIDFACSIMKLPGANSTEFDPDTMSPCVIFMPEGSKTHMGATMRLGSRRTYFHATACKSAKLYGNARFVDERHRHRYEVNPEMVPEFEKAGLSFVGKDESGRRMEIIELPSHKFFIGVQFHPEFKSRPGKPSPLFLGLIAAASGQLETLLQPSSNIVNPNPMPRFPIPKKTIYHAKKPLDSLVNGYFANGNVIHT

SEQ ID NO: 46914 - protein, 139 aa, Ipomoea quamoclit
  misc_feature (11)..(12): Xaa can be any naturally occurring amino acid
  misc_feature (85)..(85): Xaa can be any naturally occurring amino acid
  unsure (1)..(139): unsure at all Xaa locations
QEWNPATDKYXXVKYDITTVMQAKPLLKEALQAAVGLPVDRNVPLIGFIGRLEEQKGSDILYAAISKFISMDVQIVILGTGKKKXEQQIEQLEVMYPDKARGVAKFNVPLAHMITAGADFMLIPSRFEPCGLIQLHAMR

SEQ ID NO: 46915 - protein, 498 aa, Medicago truncatula
MGILSYLCYSLFYLSIFFIIRLLFQSRKFKNLPPGPTSLPIIGNLHHLKRPLNRTFKALTEKYGNVISLWFGSRLVVVVSSLSEFQECFTKNDVVLANRPRFLSGKYIFYNYTTLGSTSYGEHWRNLRRITSLDVLSNHRINNFAPIRRDETQRLIKKLAEDSSTKFAEVELTFRFFDMTFNNIMRMISGKRYYGDDCDISEVQEASQFRDMVSELLQLSGANNKTDFMPLLKFLDFENLEKRVKRIGEKNDVFLSGLLQEQRSKKERTNTMIDHLLNMQESQPEYYTDTIIKGLCLAMLLAGTDSSAVTLEWTMSNILNYPEVLKKVRDEVDTHVGQDRLVDESDLPKLTYLRNVIYETLRLYTPAPLLLPHSTADECIMGGYKVPRDTIVLINAWAIHRDPETWSEATTFKPERFDKKGELEKMIAFGMGRRACPGEGLALRAISMTLALLVQCFDWKRINDEKIDMSERDGFTMTKLLPLKAMCKTRPVVNKVFK

SEQ ID NO: 46916 - protein, 127 aa, Ipomoea lindheimeri
TPEWNPATDKYLAVKYDITTVMQAKPLLKEALQAAVGLPVDRNVPLIGFIGRLEEQKGSDILYAAISKFISMDVQIVILGTGKKKFEQQIEQLEVMYPDKARGVAKFNVPLAHMITAGADFMMIPSR

SEQ ID NO: 46917 - protein, 501 aa, Medicago truncatula
ALFYYSLLSLSFIITIKILLKITSRRLKNLPPGPPTIPIIGNLHHLKHPLHRTFTTLSQTYGDIFSLWFGSRLVVVVSSPSLAHECFTKNDIILANRPRFLTGKYIFYNYTTLGSASYGDHWRNLRRITTIDVLSNNRLNSFLGVRRDETNRLIQKLLKDVVSEGFGFTKVELRPRLTEMTFNAMMRMISGKRYYGDDGDVSDVEEAKQFREIISEMMSLLGANNKGDFLPLLRVVDLDNLEKRCKRIAKRSNAFLEGLIEEHRRGNIHSDGGTMIDHLLKLSESQPEYYSDHLIKGLIQGMLLAGTDTSAVTIEWVMSELLNHPEVLKKAKEELDTQIGKNKLVDEQDLSKLPYLQNIISETLRLHPPAPLLLPHYSSEDCTIGEFNVPKDTIILTNVWGIHRDPKHWNDALSFKPERFEKEEEVNKVMAFGLGRRACPGLSLAQRTVGFTVGLLIQCFEWERESEEKLDMMEGKGITMPMKIPLRAMCKALPIANDVTK

SEQ ID NO: 46918 - protein, 427 aa, Saccharomyces cerevisiae
MHHNSQSLSSGHIRSPEDENVAPIGNLKHRTGSLSHISSAHPRVALSRVTNIVATNSSNNSISKPKVAPIKERLDSAAIIEEERLDANSVAQRKEADHNDLLTDREQEEPVEDDGESEEDEEEDQEPLLLQHYASDTLVWEHAFRTYYRTTLDPNDDDVYDVVMVAELSNEIFEYMRKLEDLYKPNPYYMDKQPELRWSFRSTLIDWIVQVHEKFQLLPETLYLCINIIDRYLCKEVVPVNKFQLVGAASLFIAAKYEEINCPTIKDFVYMSENCYSRNDLLDAERTILNGLEFELGWPGPMSFLRRISKADDYEHDTRTLAKYLLESTIMDHRLVSAQPSWLAAGAYFLSKIILGQNQWSLAHVYYSNYTQEQILPLATIILENCRYASKRHNAIWRKYSSRRYLHSSQIVAKWIALAEHRVERSN

SEQ ID NO: 46919 - protein, 277 aa, Oryza sativa
MGVHAMSCHGGGGGGGGGGEGALSRQGSVYSLTLNEVESHLGEPLRSMNLDDLLRTVLPAAAAAAETAGRKTVDEVWRDIQGASTGRHHATPMGEMTLEDFLSRAGVAVDGAASAAGAHWLRGHYPPPPPPTTTTLQYVGGSGAVVDGVYNRVDGHGVAGFLSQVGVAGRKRGGGVDGVVEKTVERRQKRMIKNRESAARSRARKQAYTNELENKISRLEEENQRLREHKAVADFSTFPSCVDFLKAFLTQKLEPVMQIVPQPEPKQQLRRTTSASF

SEQ ID NO: 46920 - protein, 140 aa, Ipomoea alba
TQEWNPATDKYLAVKYDITTVMQAKPLLKEALQAAVGLPVDRNVPLIGFIGRLEEQKGSDILYAAISKFISMDVQIVILGTGKKKFEQQIEQLEVMYPDKARGVAKFNVPLAHMITAGADFMLIPSRFEPCGLIQLHAMR

SEQ ID NO: 46921 - protein, 460 aa, Saccharomyces cerevisiae
MMLEGYTVQPPQSTLIGDIEIQDENANQEVKNVLYQGVQKGIKRLEKRQRRVALGDVTSQKANKIHNAIHNKFHQTKNNFEIENIRSSALVKEQQRDVRHEDSDYFLIDSSEGSSTDDEQVNEDAIDDLLSRRVNDQQIQADEVYEDFDGEMQDVIEEDVDSQIEPLSPINNDEIQTELDRAFEKYFRSVPNPLDDDTHDVVMVVEYASDIFYYLRELEVKYRPNPYYMQNQVELTWPFRRTMIDWLVQLHFRFQLLPETLYLTINIVDRFLSKKTVTLNRFQLVGVSALFIAAKFEEINCPTLDDLVYMLENTYTRDDIIRAEQYMIDTLEFEIGWPGPMPFLRRISKADDYDFEPRTLAKYLLETTIVEPKLVAAAPSWLAAGAYFLSRTILGSNDWSLKHVFYSGYTSSQIIPLASLILENCKNASRRHHSIWKKYFDQKHYRCSQIVEEWIVSTEA

SEQ ID NO: 46922 - protein, 498 aa, Spinacia oleracea
MRKAAVGAAVVCTAAVCAAAAVLVRQRMKSSSKWGRVMAILKELDDNCGTPLGKLRQVADAMTVEMHAGLASEGASKLKMLISYVDNLPTGDEHGLFYALDLGGTNFRVLRVKLGGKEKRVVEQEFDEVSIPPELMVGTSEQLFDYIAEALAKFVATESEGLHPEPNKQRELGFTFSFPVKQTSIASGTLIRWTKGFNIEDTVGEDVVAELTKAMLRKGVDMRVTALVNDTVGTLAGGRYYKEDVIAAVILGTGTNAAYVERASAIHKWHGPLPKSGEMVINMEWGNFRSSYLPLTEYDIALDEESLNPGEQIFEKMISGMYLGEIVRRVLYRMADEASLFGDTVPSKLKTPFILRTPDMSAMHHDTSPDLKVVASKLKDVLGIPNSSLKVRKIIVDVCDVIASRGACISAAGILGIIKKLGRDTLKQGENQKSVIALDGGLFEHYAKFRECMEDSLKELLGDEVAETIVIEHSNDGSGIGAALLAASHSQYLEEDES

SEQ ID NO: 46923 - protein, 581 aa, ASPERGILLUS NIDULANS FGSC A4
MSSRSSSPLKGPLYIGFDLSTQQLKGLVVNSDLKVVYSSIFDFDADSQGFPIKKGVLTNEAEHEVFAPVALWLQALDSVLDGLKKQGLDFSHVRGISGAGQQHGSVYWGQDAEKLLNGLDAGKRLQEQLEGAFSHPYSPNWQDSSTQKECDEFDEYLGGADKLAEATGSKAHHRFTGPQILRFQKKYPDVYKKTSRISLVSSFLASLFLGHIAPLDISDVCGMNLWNIHKGAYDEDLLKLCAGPHGVEDLKRKLGDVPEDGGIDLGKVHRYYVDRYGFSPECTVIPSTGDNPATILALPLRPSDAMVSLGTSTTFLMSTPSYKADPATHFFNHPTTPGLYMFMLCYKNGGLAREKIRDAINDAKNEKNPSNPWANFDSVALQTPPLGQTSPSDPMKMGLFFPRPEIVPNLRAGQWLFNYDPSTGNLTETLNGEGWNRPADEARAIIESQMLSLRLRSRGLTSSPGGDIPAQPRRVYLVGGGSKNKTIAKIAGEILGGSEGVYKLEIGDNACALGAAYKAVWALERKKDQTFEDLIGARWHEEEFIEKIADGYQKEAFERYGKAVEGFEKMEQRVLEQEGRK

SEQ ID NO: 46924 - protein, 497 aa, Nicotiana tabacum
MKKATVGAAVIGAATVCAVAALIVNHRMRKSSKWARAMAILREFEEKCGTPDAKLKQVADAMTVEMHAGLASEGGSKLKMLITYVDNLPTGDEAGVFYALDLGGTNFRVLRVQLGGKDGGIVHQEFAEASIPPNLMVGTSEALFDYIAAELAKFVNEEGEKFQQPPGKQRELGFTFSFPVMQTSINSGTIMRWTKGFSIDDAVGQDVVGELAKAMKRKGVDMRVSALVNDTVGTLAGGKYTHNDVAVAVILGTGTNAAYVERVQAIPKWHGPVPKSGEMVINMEWGNFRSSHLPLTQYDHALDTNSLNPGDQIFEKMTSGMYLGEILRRVLLRVAEEAGIFGDEVPPKLKSPFVLRTPDMSAMHHDASSDLRVVGDKLKDILEISNTSLKTRRLVIELCNIVATRGARLAAAGVLGILKKMGRDTPRQGGLEKTVVAMDGGLYEHYTEYRMCLENTLKELLGDELATSIVFEHSNDGSGIGAALLAASNSMYLEDKS

SEQ ID NO: 46925 - protein, 598 aa, Magnaporthe grisea 70-15
MRLYPRWPLRVETTASYAGVLIPLEEAHLYSHSARSGRTEYEEPPSTADNNNDDEAGGKRGGEEAGMLEMRAAEYSIEGLRREVRLGSGGTRPIAYEMKSKLINKAVQDIGMGRYNWQLFFLCGFGWFADNLWMQGVSLLLPSLSAEFGISEKTVRYTTSTLFLGLCVGSFTWGIGSDMMGRRIAFNATLFITGVFGILASYAPSWGWLCLMLAALGSGVGGNLPVDGALFLEFLPDASSSLLTLLSVWWPVGQLCSSLFAWYFMANWPVDQGWRWFVFAIGVVTLLMFALRFFVFNLFESPKFLLSKGRQAEAVAVVHGLAYRNGVKTWLTEKIMDDVAGEDDDDDDDAFASSASRRLALDTTSVLRAKLASFSGDRIRPLFSNKTLGLATAIMWFIWATIGLGYPLFNAFLPQYLSRGVSDSTTGAAPVVAARADTQPQAISAETYRNYAITSIVGVPGSLLAAYTVDHPSPLLGRKGTLAISTLVSAIFLFGFATLGTTPSAQLAFSCIEAFSQNIMYGVLYAFTPEIFPAPVRGAGTGVASFLNRVAGLLAPVLAANIPGDGSTAPIYLSAVLILAAFVGMCLIPIETRGRQRL

SEQ ID NO: 46926 - protein, 209 aa, Sorghum arundinaceum
LAEKAALAYAAEHGMELVTIITTLVVGPFLSTGMPPSMITALALVTGNEAHYSILKQVQFVHLDDLCDAHIFLFEHPAAAGRYVCSSCDTTIHDLAAMLRDRYPEYDIPERFPAGTGIEDDLQMVHMSAKKLQDLGFTFRYTRMEDMYDDAIRTCREKGLIPLAAAGRDDGSASVRAPGERDVTATAGGDVVSAPVRAPGGETDVTIGA

SEQ ID NO: 46927 - protein, 266 aa, Nostoc sp. PCC 7120
MSQIDIEKLHLWVQDRDTVLKYSNHVEWRYGEKPDYTHSDAKLAQESTRNHPSNSLETLVQNLVRTFDIEANFKTNPAQWLSVVPDQFRMSTNGGSRHTITDLINSGTYKLMIGNTKNYKATEENFETSTGLFHTAFPDGFLWEVLEVYSGAPEIVFKWRHWGEFKGEFKGYAATGEAIEVIGTSVVRVTEDLKILSLEHYYDNTKFLAKLTSGGKLLKTPQNQQKKSNSLWRRFWNFIRKLWGKKETSAPANLQTSRCPFAAVVK

SEQ ID NO: 46928 - protein, 206 aa, Sorghum arundinaceum
LAEKAALAYAAEHGMELVNIITTLVVGPFLSTGMPPSMITALALVTGNEAHYSILKQVQFVHLDDLCDAHIFLFEHPAAAGRYVCSSCDTTIHDLAAMLRDRYPEYDIPERFPAGIEDDLQMVHMSAKKLQDLGFTFRYTRMEDMYDDAIRTCREKGLIPLAAAGRDDGSASVRAPGERDVTATAGGDVSAPVRAPGGETDVTIGA

SEQ ID NO: 46929 - protein, 217 aa, Silicibacter sp. TM1040
MKFFVDTAEIDAIAELNDLGMVDGVTTNPSLIKKSGRDIIEVTKEICDLVDGPVSAEVTATDAETMIAEGRKLLEIADNITVKVPLTWDGLKACKTLTDDGHKVNVTLCFSANQALLAAKAGATFISPFIGRLDDVNLDGMDLIEDIRTVYDNYGFETEILAASIRTVNHILDSARIGADVITAPPAVIKSMVNHPLTDKGLDAFLADIKAAGIKIL

SEQ ID NO: 46930 - protein, 709 aa, Glycine max
MAGLIDLNNATEDDEMPSSGSSSTVCLELWHACAGPLISLPKKGSVVVYFPQGHLEQHLHDFPLPASANIPSHVFCRVLDVKLHAEEGSDEVHCQVVLVPETEQVHQKLREGEFDADGEEEDAEAVMKSTTPHMFCKTLTASDTSTHGGFSVPRRAAEDCFPPLDYSQQRPSQELVAKDLHGQEWRFRHIYRGQPRRHLLTTGWSAFVNKKKLVSGDAVLFLRGEDGELRLGIRRAAQLKSGSTFSALSGQQGSPTSLMDVVNALSARCAFSIHYNPRVSSSEFIIPIHRFVKSLDYSYSAGMRFRMRFETEDAAERRFTGLIVGIADVDPVRWPGSRWRCLMVRWDDLEATRHNRVSPWEIEPSGSASTANNLMSAGLKRTKIGLPSAKLDFPVSNAIGTSDFGESLRFQKVLQGQEMLGVNPTYDSFNAQSHQLSDLRRCYPGSNYPRIAATGNSIGIPQVSSNVSSNGIGFSESFRFQKVLQGQEILPSQPYGRALSVDEACGNGRCGLFDGFQAMRSRNGWSSHVSNNSSHLHPPVPSGQVSSPSSVFMFQQAVNPVSNSDYNNQISQVMGGKFHQRVSYASDVKGGKFVSTPYEPLLCGLSQEGTNSFGLSNFHNQLDSSRSHDSVSVLRASQELVPSCKSRCRVFGFSLTEGAPVASKEATDSSAVACAGPSFTRHVEDDFHPGHSLRSKAVASYCTKGVLQY

SEQ ID NO: 46931 - protein, 147 aa, Zea mays
  misc_feature (5)..(5): Xaa can be any naturally occurring amino acid
  unsure (1)..(147): unsure at all Xaa locations
EIFPXHESQGENGSAWETLTDHTIHKVVCLDDDYAIGKQIELFLTNQNPNCEVVVLQDPLQAMTTLLTLQPDLILCDITMPHLDGYEICRMVRHAQHLRAIPIIMLTGKEAYLDRLLARMAGATDYLTKPFTQKELISLVESYCKKS

SEQ ID NO: 46932 - protein, 115 aa, Sorghum x drummondii
LAEKAALAYAAEHGMELVTIITTLVVGPFLSTGMPPSMITALALVTGNEAHYSILKQVQFVHLDDLCDAHIFLFEHPAAAGRYVCSSCDTTIHDLAAMLRDRYPEYDIPERFPAG

SEQ ID NO: 46933 - protein, 469 aa, Zea mays
AGGVRRAAQLKIVTPPRVRHNQCSSNSNLGNVAQAVATKTVFHIYYNPRLTQSEFIVPYWKFTRSFNQPISVGMRCRMRYESDDASERRCTGIIIGSREADPIWYGSKWKCLVVRWDDGIECRWPNRVSPWEIELTGSVSGSQMCAPSSKRLKPCLPQVNPEIVLPNGSVSSDFAGSARFHKVLQGQELLGFKTHDGPAISASQATEARNLQYSDERSNNNLGIPRLGVRSPTGIPGFPYHCSGFGESQRFQKVLQGQEVFHPFRGGCLSDGHIRTAGMYQPDGRHVSGAAYKWSAPQGYDFPQPAKPFFLLQESSPSSVMMFPQTRSKITHLEYEYSRHEDGRLDRTVPTQDMGRSNQTLSLWPHLVSGEAIEECTGTVNMHSPVSGAEHESNNESTVENGCKIFGISLAEKIRSCDEADSCSAKCNSRLQPLKSQMPKSLGSCWATVHEQRPVVGRVVDVSATDMMI

SEQ ID NO: 46934 - protein, 666 aa, Salmonella enterica subsp. enterica serovar Typhi Ty2
MSRKDLANAIRALSMDAVQKANSGHPGAPMGMADIAEVLWNDFLKHNPTDPTWYDRDRFILSNSHASMLLYSLLHLTGYDLPLEELKNFRQLHSKTPGHPEIGYTPGVETTTGPLGQGLANAVGLAIAERTLGAQFNRPDHEIVDHYTYVFMGDGCLMEGISHEVCSLAGTLGLGKLIGFYDHNGISIDGETEGWFTDDTAKRFEAYHWHVVHDIDGHAPEAVKKAILEAQSVKDKPSLIICRTVIGFGSPNKAGKEESHGAALGEEEVALTRQKLGWHHPAFEIPKEIYRAWDGREKGEKAQQQWQEKFAAYEKAYPELAAEFTRRMSGGLPEAWESATQKFINDLQANPAKIATRKASQNTLNAYGPLLPELLGGSADLAPSNLTIWKGLTSLKEDPAGNYIHYGVREFGMTAIANGIAHHGGFVPYTATFLMFVEYARNAARMAALMKARQIMVYTHDSIGLGEDGPTHQAMEQLASLRLTPNFSTWRPCDQVEAAVGWKLAIERQHGPTALILSRQNLAQVERTPEQVKAIARGGYILKDSGGKPDIILIATGSEMEITLQAAEKLTGEGHNVRVVSLPSTDIFDAQDEAYRESVLPAHVTARVAVEAGIADYWYKYVGLKGAIIGMTGYGESAPADKLFPYFGFTVENIVEKARRVLNIKG

SEQ ID NO: 46935 - protein, 547 aa, Methanosarcina barkeri str. fusaro
MEKGGQPIIIIDPKKEETKGKEALSMNIAAAKAVASIVKSTLGPRGMDKMLVNPIGDITITNDGATILHDMSIEHPAAKMVAEVAESLESSAGDGTTSAVVFTGNLLEKAEDLIESGVHPTVVVKGYRLAAEKAVEILESLAISTAENEKEKLLEVAKTSITGKASEKYGRLIAELCVDAALSIRERGVVDLKDVILSKDVGGKIEDTEFVEGIVIDKVALDKEFPLRIENPAIALIDAPMEIAKTANKAKLQINAYGDLEDFVKQEEEALFEMADYIIRAGANAVFCSKGMDDKIAAYLQNRGIYATRRVKNEDMQHLVDATGGRPIRNIKELTQKELGHAGLLEQDRDGDQGKTYLRECKGAKSVSIVIKGGTEHIVDNLERAIDDALRVVKCAIEDGRIVAGGGASEVEVALELRAYAPGIGGREQMAIRAFADALEEIPRTIARNAGLDAINTIVNLRAKHTENKNAGLNVNTGAAEDMLKKGIVDPLRVKVNSVKAGSEAAVMVLRVDDMLRAQRADMQDVKPEHMASTYDGMSAPALNMRR

SEQ ID NO: 46936 - protein, 316 aa, Salmonella enterica subsp. enterica serovar Typhi Ty2
MNQLDGIKQFTTVVADSGDIESIRHYQPQDATTNPSLLLKAAGLEQYGHLIEDAIAWGKKHGGTQEQQVAAASDKLAVNFGAEILKSIPGRVSTEVDVRLSFDKEKSIEKARHLVDLYQQQDVDKSRILIKLAATWEGIRAAEQLEKEGINCNLTLLFSFAQARACAEAGVYLISPFVGRIYDWYQARSPLEPYVVEEDPGVKSVRNIYDYFKQHRYETIVMGASFRRTEQILALTGCDRLTISPNLLKELKEKEEPVIRKLVPSSQMFHRPTPMTEAEFRWEHNQDAMAVEKLSEGIRLFAVDQRKLEDLLAAKL

SEQ ID NO: 46937 - protein, 713 aa, Bdellovibrio bacteriovorus HD100
MNQKQLPWWTWVLPFIILLGGTFVSLTFKVSQGIYWIYFPINLGVIMALWWGPRVFAAVFLNALVAISLFELPRPMLYPLYALPETLEVIFSWVLVRERFKDVSAWKPSPKNISLYFVYGLLIPSLICSVAIQGLFVLTGIQDKSLFGWSTLITTVGDLTGAIFLTIPALILISPWLRKRNLSLFAVKPLPPTHWEVVTRKEKALFAVVLGGMLVLALSFHIPQTWYVYGILMLLSAAWYGMYAALVVNTWVVFLNIILPKIANLPWSNSFLEVQTPATLLTLCFCSLITGSAVTSLTGKIRELNETQGQLKSAKDQAEEASRAKSEFLARMSHEIRTPLNSVLGMLELLRETQLSKDQERYLTLFSHAGENLKALINDLLDFSKIEAKALTVENVSYNIHSTVRSVFDILQIKAEEQGLHFELHISKDVPPLQWGDPTRLRQVLFNLIGNALKFTNEGSVKVKLELTKDAPEQLLIEVQDTGIGIPRERQSKLFSSFAQGDPTIARKYGGTGLGLVISKNLVEIMGGTMEMKSLAGRGTTFKILLPHQPDFSSNIEKKAKPAMVWSQLPADKRFRLLLVDDSEDNRVLMIHYLKSLPFDCDEAVNGQEAFEKFKERKYDLVFMDMQMPIMTGYKSTELIRYYEKMNKLPHTPIIALTATAVVEDLQRAVSSGCDSYAVKPVKKAEILEILAQNLTTKSPTKEAFKEPPSPSI

SEQ ID NO: 46938 - protein, 1519 aa, Neurospora crassa
MAAPHLKHTFANIHALRGGKPELGDLALSDYHLVFRFPPESLTAADPSLKKSVKQVWFAFHIISQCTLRPTPPSSGVPSSIRIRFRDFTYVSFNFAGDKEAREAFEFIKSRTCKLGSVDKLLAFSYRPPPNSPESKINGWDLYDVRAEFRRQGISEKSRELGWRISTINKDYSFSPTYPALLIVPSKISDATLKYAASYRSRQRIPTLTYRHPVNNCTISRCSQPLPGISFKRNIQDESLVSACFSASTEFAGGTSLDMPVESPPPSTADLMIESENTDGSMSDIQKAEDELTVGGTILYDGKTGKRLIYGAQQQNLIVDARPVINSYAMQAIGYGTENMEHYKFAKKEYLNIDNIHVMRESLEKVISAIKDADVSPFPPNKELLAKSKWLKHISGILSGSALIAQRVGIQHSNVLIHCSDGWDRTSQLSALSQLMLDPYYRTLEGFIVLVEKDWLSFGHMFHLRSGHLSHEDWFTVDGDALAGTAVKPGENDGRADHFENAIAGAKRFWSKKTASGKEAVTDADGTPIETGVEPAVAENMATRPKDISPVFHQFLDATYQLLRQHPTRFEFNERFLRRLYYHVYSCQYGTFLFNNERQRHEARLQERTRSVWAYFLSRRSEFTNEQYDATVDDHVRGRERILFPRCDDVRWWHQLFNRTDDEMNGDLNALAATAERVAAYQQASSSSELSRPVDAGTIDVNSNPPSSGAPSRTSVSPTRSPLPPGLAATAAGGSVHAGVESAHEVLTPGTRSPAPPNRNVAAGDPTGTFAALQERISGLSLGKAMFGGGTGGSTGRSSIGGSGSDSGRNSQNELAEQEMKMFSNNLTSRRNQVGTYSLVPPPHSVARPATSPVHTPPSIASRPQANIRTKSTSLSKSASLADCILPRDLPRPLHKSPTMADATNANDELFPIAVLIDELKHDEVVLRLNAIHRLSTIALALGPERTREELIPFLDESVEDEDEVLVALSEELGNFVEYVGGPAWGHVLLSPLENLAAIEEPVVRDKQVEEYFIPLTIRLSKADWFTSKVSACGLYTTPYSKVSPPIQEQLRQQFGQLVHDETPMVRRQAATNMAKFVKEMPAPIVIEEMIPMFQHLAQDDQDSVRLLTVEILISIAEVVPKEQQASHTVLLTSLRSLIEDKSWRVRYMIADRFEKIAKAVDDEVVSRDLVPAFVKLLKDNEAEVRTAIAGQIPGFCALVDRNVLLNDIMGSVEDLVSDSSQHVRAALGTQISGLAPILGKQETIDHLLPMFLQMLKDEFPEVRLHIISKLELVNQVIGIDLLSQSLLPAIVQLAEDKQWRVRLAIIDYIPLLASQLGVKFFDEKLSQLCMGWLGDTVFSIREAATQNLRKLTEVFGVEWASEAIIPKVMAMGAHPNYLYRMTTCFAITTLATVVSLDVIAKSILPMLEKLTADSIPNIRFNVAKTYGIIIGVLRRLPDEGTIYTLEKEGKPATPSPKGQELIQQRIMPCLEKLQKDDDVDVRYFATTAAAQATGPLMGAATEAGNPVPSGGEPMNTSP

SEQ ID NO: 46939 - protein, 469 aa, Methanosarcina barkeri str. fusaro
MVKKMERLKKLSIVTFILLIALVSPALAATSDQNAASIEEIKTTLTFMWLLLASGLVFFMHAGFSLVETGLTRSKNTANILMKNFMTVVLGILVYWAVGWGIMYGADAAGLIGTNQFFLAGADNATWNSWFFQMVFAATGATIVSGAMAERTNFKAYLVYCIMMVAVIYPIYGHWVWSGADMALLSGADSPIVKAIGVASHDFAGSGVVHSIGGYSALAGVILVGARIGRFKNGKPIPIPGHNLTITFLGTLILALGWLGFNGGSTLNANDPYMNLVVVNTFLAAAAGALMVMIITWVKTGKPDPSLTANGLLGGLVAVTAPCGSISNWAALVIGLVAGIIIYVGVMFNENKLKLDDPVGAIAVHGYCGSWGLISVGLFSIGMGNGILADATYAAAVPGLFYGGGISLLLIQLVSVLVTMVWGFGISYIIFKILDAVIGLRVSEEEEIMGLDISEHGIRAYPEYLMREE

SEQ ID NO: 46940 - protein, 583 aa, Methylobacillus flagellatus KT
MSKTALGKANASVQSARALYLRLLKYAARYWVAFLISIIALVTFSATNTGFLATIKLVTDAGFVNQDSTKLHLLPFMLFGLLAIRALAGFISNFAMRWVARRVVENLRQDTFRRLMSLPVSFFDAVSAGVVTSKLTYDTEQMAGAATKVAMSAVRDTLTILGMVGYMLYLDWQLTLIFAVVAPAMAWYLKSMTPKLRSSGKAVQQTMGEMTKVIEEAVSGQRMVKIFGGGDYEYQRFTKVAGKNRHMQIRLARFSGLNSMVVELLAGVALALVVFYAVGKFSAGEFAAFIGALLMLIGPVKTLTSLNEELQVGLAAAHSVFELIDSIPEVDEGHEEIGRAEGSIVFENVTLQYPSAQRPALLDLNFTVKPGEKIALVGRSGGGKTTLVNLLPRFYEVQQGRVLIDGVDVRNMSLKSLRQQFSLVSQDVILFNDTVFNNIAYGVLRNASEEDVIAAAKAAHAWDFIQQLPNGLQSEIGDRGVRLSGGQRQRLAIARAILKNAPILLLDEATSALDTESERHVQAALDELMQNRTSIVIAHRLSTIENADRIMVMEQGRIIEGGSHEELLALDGHYAKLYRKQFH

SEQ ID NO: 46941 - protein, 499 aa, Medicago truncatula
MTTFYLSLIISLFFLIITLKVFFNTSRKFKNLPPGPQCLPIIGNLHQLKQPLHHTFHTLSQKYGQIFSLWFGSRLVVVVSSLTIAQECFTKNDIVLANRPHFLTGKYIGYNNTTVAQSPYGDHWRNLRRILSIEILSSHRLNSFLEIRRDEIMRLIQKLAQKSYNGFTEVELRPMFSEMTFNTIMRMVSGKRYYGNDCDVSDVEEARLFRGIIKEVVSLGGANNVGDFLGFLRWFDFDGLEKRLKKISKRTDAFLQGLIDEHRFGKRNSNTMIDHLLTQQQSQPEYYTDQIIKGLMVVMLLAGTDTSSVTIEWAMSNLLNHPEIMKKAKNELDTHIGHDRQVDEHDISKLPYLQSIVYETLRLHAAAPLLVPHLSSEDFSLGGYNIPQNTILMVNAWVIHRDPNLWSDPTCFKPERFEKEGEVNKLLSFGLGRRACPGENLSQRTEGLTLGLLIQCFEWKRIGEEKIDMVEAKGITAGKKTSLNAMCKVRHPLKINDVF

SEQ ID NO: 46942 - protein, 316 aa, Anabaena variabilis ATCC 29413
MSSLSSDLIRIYLQEIGQFPLLTSDQEITYGRQVQQMIAIQEQQQQLSQQLHREPTTAELANFLNTTQAQVNQILELGQRAKQKMITANLRLVVSIAKKYQRRNLEFLDLVQEGAIGLQRGIEKFDPNRGYKLSTYAYWWVTQAITRAIAEKSRTVRLPIHVNEKLNQIKKVQREFFQTLGRRPSVAEIAQKLELEPSQIREYLKVASGTISLDLKVGDNQETELSELLASEGVSPNENTTHEMLRQDLSDLLASLKPMQREVLILRFGLLDNQEQSLAQISEKLNLSRERVRQIQQKAMTALRRQQPSIGQYLTS

SEQ ID NO: 46943 - protein, 396 aa, Shigella flexneri 2a str. 301
MFENITAAPADPILGLADLFRADERPGKINLGIGVYKDETGKTPVLTSVKKAEQYLLENETTKNYLGIDGILEFGRCTQELLFGKGSALINDKRARTAQTPGGTGALRVAADFLAKNTSVKRVWVSNPSWPNHKSVFNSAGLEVREYAYYDAENHTLDFDALINSLNEAQAGDVVLFHGCCHNPTGIDPTLEQWQTLAQLSVEKGWLPLFDFAYQGFARGLEEDAEGLRAFAAMHKELIVASSYSKNFGLYNERVGACTLVAADSEIVDRAFSQMKAAIRANYSNPPAHGASVVATILSNDALRAIWEQELTDMRQRIQRMRQLFVNTLQEKGANRDFSFIIKQNGMFSFSGLTKEQVLRLREEFGVYAVASGRVNVAGMTPDNMAPLCESIVAVL

SEQ ID NO: 46944 - protein, 404 aa, Bdellovibrio bacteriovorus HD100
MALGASAFAGSVFIVFLIFGLGMLAPVTALFARMQGQENYPYGGVLLRHSIIVALAISAFIIGLLYALLPNLKVFGQTNEVLEMGAAFFEITIWSVLPSLLYQSYKQFTDGIGKTKVAMYVMIFGVVLNITGNWVLIHGLYGLPKLGLNGAAWATLIARCLMALIMVTYVHIHPHFKKYLVERWVHRFDHHLLKNIIRLGLPNGFTYLFEVGAFSAAAVMMGWFGATPLAAHQITISLASTSFLITLGIGIAASIRVGYELGRGDYSLARFAGFTAIKLGAAYMSLCALGFFFLREWFPTFYVTDQDVIAWAAKFFIVVAIFEIFDGIQAVAIGALRGMSDTQWPSIIAFFAYWVMGLPGGYLLAFHLGVGPVGIWIGLLLGLIFASILLTWRFHILSKRFLKN

SEQ ID NO: 46945 - protein, 548 aa, Oleispira antarctica
MAAKDVLFGDSARAKMLVGVNILADAVRVTLGPKGRNVVIEKSFGAPIITKDGVSVAREIELKDKFENMGAQMVKEVASQANDQAGDGTTTATVLAQAIISEGLKSVAAGMNPMDLKRGIDKATAAVVAAIKEQAQPCLDTKAIAQVGTISANADETVGRLIAEAMEKVGKEGVITVEEGKGLEDELDVVEGMQFDRGYLSPYFINNQEKMTVEMENPLILLVDKKIDNLQELLPILENVAKSGRPLLIVAEDVEGQALATLVVNNLRGTFKVAAVKAPGFGDRRKAMLQDLAILTGGQVISEELGMSLETADPSSLGTASKVVIDKENTVIVDGAGTEASVNTRVDQIRAEIESSTSDYDIEKLQERVAKLAGGVAVIKVGAGSEMEMKEKKDRVDDALHATRAAVEEGVVAGGGVALIRALSSVTVVGDNEDQNVGIALALRAMEAPIRQIAGNAGAEGSVVVDKVKSGTGSFGFNASTGEYGDMIAMGILDPAKVTRSSLQAAASIAGLMITTEAMVADAPVEEGAGGMPDMGGMGGMGGMPGMM

SEQ ID NO: 46946 - protein, 294 aa, Daucus carota
MDQYEKVEKIGEGTYGVVYKARDRVTNETIALKKIRLEQEDEGVPSTAIREISLLKEMQHENIVRLQDVVHSEKRLYLVFEYLDLDLKKHMDSCPEFAKDPRLIKMFLYQILRGIAYCHSHRVLHRDLKPQNLLIDRRTNALKLADFGLARAFGIPVRTFTHEVVTLWYRAPEILLGSRHYSTPVDVWSVGCIFAEMVNQQPLFPGDSEIDELFKIFRIVGTPNEDTWPGVTALPDFKSAFPKWPSKELGNVVPNLDVAGLNLLKKMLCLDPSRRITARSALEHEYFKDIGIVP

SEQ ID NO: 46947 - protein, 66 aa, Glycine max
  misc_feature (33)..(33): Xaa can be any naturally occurring amino acid
  unsure (1)..(66): unsure at all Xaa locations
GPLRSLSSQFPSPSNFSFNYLTFCIHKRKLMSXDHTPPFPPSFFSAYTRDGALTSNDDLESIFARG

SEQ ID NO: 46948 - protein, 276 aa, Bordetella bronchiseptica RB50
MTGDPRTDTTPSCRVAAIQMVSGPDVDENLAQAAELIGKAAQDGARLVALPEYFCFMGHTDTDKLAIKEESGYGKIQSFLSNISSQYGIWVAGGTLPLTSPDPQRVFNTTFVYGPGGQQAARYDKIHLFNFQRGAESYDEAIAIRPGKEVQVFDGPCGRVGLSVCYDLRFPELYRAMGTVDLILVPAAFTYTTGQAHWELLLRARAIENQCYVLAPAQGGRHPTGRRTWGHSMLVDPWGQVLDVLPEGPGVIGGTIEAARLAEVRASLPALRHRVL

SEQ ID NO: 46949 - protein, 167 aa, ASPERGILLUS NIDULANS FGSC A4
MPDASSELIDEIGIVKIFRCFSPDIETARICIKVPSTREGLIACRTLEMAGVRTLATTLFTFVQAALAAEVGCTYIAPYVNQLKVHFESGFVDPQKLLPLCVSAQNYYEAIGVRTQVLPASLTSTDEIFALAGAHHITIALSLLQQLSLPLYPRLCSTLNRRVQVPK

SEQ ID NO: 46950 - protein, 205 aa, Shigella flexneri
STIPVITGGIGVCHIYVDESAEIAEALKVIVNAKTQRPSTCNTVETLLVNKNIADSFLPALSKQMAESGVTLHADAAALTQLQAGPAKVVAVKAEEYDDEFLSLDLNVKIVSDLDDAIAHIREHGTQHSDAILTRDMRNAQRFVNEVDSSAVYVNASTRFTDGGQFGLGAEVAVSTQKLHARGPMGLEALTTYKWIGIGDYTIRA

SEQ ID NO: 46951 - protein, 763 aa, GIBBERELLA ZEAE PH-1
MSAPNPRKRAAPGASPIVPIPQQMQPQYNAGNGAGNQGPRWTGMDPSNYMNGVDGLMDDNKNSFGLVPAQQQYSQPVPTPSNTIARRQMNHALVPTNQRSFDGVVEPWGNFVGDENTLLQGNFENLNEQDNVEVLEERAQKAKRDAQAKRKQIPPFVQKLSSFLEERKNEDLIRWSEKGDSFIVLDEDEFAKTLIPELFKHNNYASFVRQLNMYGFHKRVGLSDNSMRASERKNKSPSEYSNPYFRRGHPNLLWLINKPKSGSKAKKGSKGAEGDNDSEDDVANEEVLTSGLGPTAAQPPRSLPAGESQPAPKKEMGLIREELSKVRDQQKLILGAINRLQRNNTELYNQALMFQTQHDRHQNSINAILNFLANVFRKTLEDQGNSQNVSDIISMITNQNQQSAQHGSVFELGDYIQQMNPNTYGTPKKTRGLLPAPQQNNRAQAVRSSSTPNRSTPGSTAYQPVSHHNHNPEMGHVTELVDNSPSDTTTPNLRQELEANPEERMMSLINEHNKHNNGHGMDIPDAADLVASAPNALSNAQRNNLANFIAGQTSAAPSGRSTPASTPVSATPIPTPTQIPTSNSHMAMPTMSTSASVSPPPASSVPPPSLSPIMGPPMVPPSINEINSNSMELNHLQRLQSQQDAKISEIGSMLGPLSPSGHVPGLSDDAAAYFDPQSTDFDQFFDIGDLSGGHDFTDGSDFDFAIDTDPNHQNQAPLHPGHVMSHTSLTNTPSPAGTEEISRDDLRLENNPSDRGTKRQRIA

SEQ ID NO: 46952 - protein, 396 aa, Campylobacter upsaliensis RM3195
MQQILPKIKSLTQKYYSEIVALRHAIHMHPELEFEEENTANLLCAILDKYGIKYQRNIAKTGILAQIQGEKEGKCVLLRADMDALPVQEETNLPYASKIAGKMHACGHDGHSAGLMGALLILNELKSEFSGTIKFMFQPAEEGSGGAKPMIEAGILENPKVDAVFGCHLWGALLENTAQIVSGEIMAGVDVFELEFIGRGGHGAHPHTTIDPIVMAAKFISDIQCAISRRLKPIDAGVITIGSIHAGTAFNIIPENAILTGTVRFLSEENQALLQNAIENTAKAVALEFGGEFKLQYKREYPPLINDEKMALIARKAFAKVLEEDNIITQAKPDMGSEDFAFLTQARQGAYVFVGISKDLKNPTLHHSSTFCWDDENLKILMQGDALMALEFLNQA

SEQ ID NO: 46953 - protein, 572 aa, GIBBERELLA ZEAE PH-1
MGILQKMAWSKSTRIKVMIAIDTVFFLVEIVSGFLAHSLALMADAFHMLNDIISLVIGLWAVSAAQKTSTDEFTFGWVRAEILGAFFNAVFLIALCVSIVLEALTRFIEPPEIDNPKLMLIVGTTGLLSNFVGFFVLGGHGHSHGPGDHDHDHDHDHGHSHSHAHDAEEGNAGYHSALADESGRAAEVLPEAVMQRANSSRKSNGKSNENNRHSRGRDYHRSSRSGHSRFASLDDLSIHPASFRQSIIEATRGGDANEVTSESETDAENSLILEENEANEESPLLKGVAKNGSSLGHSNSHSHSHSRRPRRDSSVHQGHHHTLPKDAKKKDSHGHNHADMGMNAMILHVIGDMLGNIGVMVTALIIWLTDWPGKVYADPAVSLFITAIILKTCIPLTRGTARVLLQATPEHISVPEIRQDIEALPGVITCHHIHVWQLSDTKLVASMHLQVSFPIDSHSGEKYMELARRARKCLHGFGIHSATIQPEFCFDSKHAHDSDAAALTLDGGADSNKGDSCLLECIDDCQAQGCCPADSSSKASSTRRASESSHSPSSPRAHEHSHDHGHDHSHNH

SEQ ID NO: 46954 - protein, 204 aa, Dunnia sinensis
MARGNASVPAMEMTKWFDTNYHFIVPELGPDVKFTYASHKAVNEYKEANALGADTVPVLVGPFTFLSLSKPAKGVEKTFPKLSLLDKILPVYKEVIADLKAAGASAIQFDEPVLVMDLESHQLEAFANAYSELESSLAGLHVIIETYFADVPQEAYKTLTSLNAVSGFGFDLVRGAKTLDLIKGGFPAGKFLYAGVVDGRNIWA

SEQ ID NO: 46955 - protein, 344 aa, Polaromonas sp. JS666
MENPLVMENPDKPLQVATAGEALIDLILQPDGRYEPCIGGAVFNLTRALARQDIGTLYLNPLSGDRFGRQLAAALVSDGVQLAHSQPVMQSTSLALVGVDDKGHPDYAFYRDGVADRAITAERLIRSCRQAPALQMVCTGALALAPEDAPHYLPWLRAQREAGTLVVVDANLRPSVMPDLEAYRRNVQAVMQQADVLKVSDEDLEHLATPGGDALARAQHLLDATSARLLVLTLGAQGACLLTREGRQWRAREAMPLKVVDTVGAGDCFLAGFLAALLTHDGAGHGLTGAAAAAVRAPLDDAAGRRLLAHALASASLCVMRRGCVPPTRVQVQARVEQAPCAFG

SEQ ID NO: 46956 - protein, 368 aa, GIBBERELLA ZEAE PH-1
MSFAGMLNRLHGQPESYDKKAKYKFGRTLGAGTYGVVREADGPTGKVAVKIILKRNVKGNEQMVYDELEMLQKLKHPHIVKFVDWFESRDKFYIVTQLATGGELFDRICEQGKFTEKDAAETIKQVLLAVDFLHKNNIVHRDLKPENLLYLNRDPESDLVLADFGIAKMLDGKGESLKTMAGSFGYAAPEVMRKEGHGKPVDMWSMGVITYTLLCGYSPFRSENLQDLIRECTDNSVVFHERYWKDVSNDAKDFILKLIDPDADKRWTSEEALGHIWLTGENATDYNLLPEIKSFRARSRFRRIIEKIKLQARIEKLKAMEEDPDNSDLSAIFSEVARAKLADEKEEREVLRITQEVEKEVKRRSFQA

SEQ ID NO: 46957 - protein, 101 aa, Brassica napus
  misc_feature (98)..(98): Xaa can be any naturally occurring amino acid
  unsure (1)..(101): unsure at all Xaa locations
MDLDSMDCTSTIDVTDDDEEIHQDRHSYASVSKLHSNNSTNANAASGLLPTTTSVHELLECPVCTNSMYPPIHQCQNGHTLCSTCKNRVHNRCPTCRXELG

SEQ ID NO: 46958 - protein, 204 aa, Dunnia sinensis
MARGNASVPAMEMTKWFDTNYHFIVPELGPDVKFTYASHKPVNEYKEAKALGVDTVPVLVGPFTFLSLSKPAKGVEKTFPKLSLLDKILPVYKEVIADLKAAGASAIQFDEPVLVMDLESHQLEAFANAYSELESSLAGLHVIIETYFADVPQEAYKTLTSLNAVSGFGFDLVRGAKTLDLIKGGFPAGKFLYAGVVDGRNIWA

SEQ ID NO: 46959 - protein, 225 aa, Mycobacterium tuberculosis
MRQRILVVDDDASLAEMLTIVLRGEGFDTAVIGDGTQALTAVRELRPDLVLLDLMLPGMNGIDVCRVLRADSGVPIVMLTAKTDTVDVVLGLESGADDYIMKPFKPKELVARVRARLRRNDDEPAEMLSIADVEIDVPAHKVTRNGEQISLTPLEFDLLVALARKPRQVFTRDVLLEQVWGYRHPADTRLVNVHVQRLRAKVEKDPENPTVVLTVRGVGYKAGPP

SEQ ID NO: 46960 - protein, 753 aa, Escherichia coli
MTILNHTLGFPRVGLRRELKKAQESYWAGNSTREELLAVGRELRARHWDQQKQAGIDLLPVGDFAWYDHVLTTSLLLGNVPARHQNKDGSVDIDTLFRIGRGRAPTGEPAAAAEMTKWFNTNYHYMVPEFVKGQQFKLTWTQLLDEVDEALALGHKVKPVLLGPVTWLWLGKVKGEQFDRLSLLNDILPVYQQVLAELAKRGIEWVQIDEPALVLELPQAWLDAYKPAYDALQGQVKLLLTTYFEGVTPNLDTITALPVQGLHVDLVHGKDDVAELHKRLPSDWLLSAGLINGRNVWRADLTEKYAQIKDIVGKRDLWVASSCSLLHSPIDLSVETRLDAEVKSWFAFALQKCHELALLRDAVNSGDTAALAEWSAPIQARRHSTRVHNPAVEKRLAAITAQDSQRANVYEVRAEAQRARFKLPAWPTTTIGSFPQTTEIRTLRLDFKKGNLDANNYRTGIAEHIKQAIVEQERLGLDVLVHGEAERNDMVEYFGEHLDGFVFTQNGWVQSYGSRCVKPPIVIGDISRPAPITVEWAKYAQSLTDKPVKGMLTGPVTILCWSFPREDVSRETIAKQIALALRDEVADLEAAGIGIIQIDEPALREGLPLRRSDWDAYLQWGVEAFRINAAVAKDDTQIHTHMCYCEFNDIMDSIAALDADVITIETSRSDMELLESFEEFDYPNEIGPGVYDIHSPNVPSVEWIEALLKKAAKRIPAERLWVNPDCGLKTRGWPETRAALANMVQAAQNLRRG

SEQ ID NO: 46961 - protein, 164 aa, Bacteroides fragilis NCTC 9343
MAAQNKSFYDFTVKTIDGKEYPLSGLKGKKVLVVNVASKCGLTPQYAELQELYDQYKDQNFVIIGFPANNFMGQEPGTNEEIAKFCSVNYDVTFPIMAKISVKGKDMAPLYHWLTEKKLNGKQDAPVQWNFQKFMIDENGNWVGFVAPKESPFSETIISWIEKK

SEQ ID NO: 46962 - protein, 308 aa, Helianthus annuus
MAILSRYSSSNTLFCIEEQVHEDEDELTHQDSSAIHPLDLQDLCWEHEELVSLFTKEEEQQKQTPWPSSCTLSFRKEAVDWILKVKGCHGFTPLTAILAINYLDRFLSSLHFQKANTPWMIHLVAVTCLSLAAKIQETHVPLLLDLQLEESKFLFEAKNIQKTELLVMSTLKWRMNLVTPISFLDHIVRRLGLSNHLHWDFFKKCEAMILYLVADSRFVCYKPSVLATATMLCVVEEIDPTNSIGYKSQLLDLLKTTKDHINECYKLVMDLSYDNHNKGKRDENERTIYPVSPAGFIGFMCHESSNDS

SEQ ID NO: 46963 - protein, 403 aa, Streptomyces coelicolor A3(2)
MQVIQSTKLANVCYEIRGPVLEEAMRLEAAGHRILKLNTGNPAAFGFECPPEILEDILRNVSTAHGYGDAKGLLAARRAVVMHNQTLGIETDVEHVFIGNGVSELIVMAMQGLLDDGDEVLVPAPDYPLWTAAVSLSGGTAVHYRCDEQSDWMPDLADVERKITDRTKALVIINPNNPTGAVYDDAMLRGLTDIARRHNLLVCSDEIYDKILYDDATHTPTAAIAPDLLTLTFNGMSKAYRVAGYRVGWMSISGPRAHAESYIEGLTILANMRLCANMPGQHGVVAALSGRQTINELVLPGGRLREQRDAAHEALTSIPGVTCVKPKGALYLFPRLDPKVFKIKDDRRMVLDLLRQEKIMVVQGTGFNWPEPDHFRVVTLPTAADLREAVDRIGNFLDGYSQP

SEQ ID NO: 46964 - protein, 542 aa, Streptococcus pyogenes MGAS8232
MTIDKKKVVYQIYPKSYKDTTGNGVGDLRGIIDKLPYLQELGIDMIWLNPFYLSPQRDNGYDVSDYTAVNPDFGTMADFENLVKAAKEHQIELMLDMVLNHCSTDHEWFQKALAGDPYYQDFFILRDQPTDWVSKFGGNAWAPFGDTGKYYLHLFDVTQADLNWRNPHVREELAKVVNFWRDKGVKGFRFDVINLIGKDEELADCPVNDGKPAYTDRPITHTYLHDLNQASFGQDDSFMTVGEMSATTIDNCLLYTAPEREELSMAFNFHHLKVDYENGQKWTIMAFDFAALRDLFHAWGEGMSQGNGWNALFYNNHDQPRALNRFVDVTHFRNEGATMLAASIHLSRGTPYIYMGEEIGMLDPDFDSMDDYVDVESLNAYSSLLVSGKSAKEAFAIIKAKSRDNARTPMQWDASEHAGFTTGKPWLEVGKSYRDINVETEKEGRIFPFYQRLIALRKELPIIAEGDYRAAFKDSQAVYAFERHLGDQCLLVLNHFYADEVELELPLRYQHGQVLISNYEKVSICEKVMLKPYQTLAILADN

SEQ ID NO: 46965 - protein, 247 aa, Geobacter metallireducens GS-15
MKKLVLLRHGESVWNRENRFTGWTDVGLSEKGIEEAISAGRTLKEEGFVFDVAYTSVLKRAIKTLWLVLEEMDLMWIPEYRHWRLNERHYGALQGLNKAETAERHGMEQVMIWRRSYDIPPPPLTPDDQRFPGSDPRYASLLPEELPLTESLKDTVARFLPYWHETIAPAVKEGKRVLVTAHGNSLRALVKYLDLVSDSEIVNLNIPTGIPLVYELTDNMTPIRSYYLGDPDDVARASRMVADQIKK

SEQ ID NO: 46966 - protein, 258 aa, Zea mays
  misc_feature (119)..(119): Xaa can be any naturally occurring amino acid
  misc_feature (126)..(126): Xaa can be any naturally occurring amino acid
  unsure (1)..(258): unsure at all Xaa locations
MQIFVKTLTGKTITLEVESSDTIDNVKAKIQDKEGIPPDQQRLIFAGKQLEDGRTLADYNIQKESTLHLVLRLRGGMQIFVKTLTGKTITLEVESSDTIDNVKAKIQDKEGIPPDQQRXLIFAGKXQLEDGRTLADYNIQKESTLHLVLRLRGGMQIFVKTLTGKTITLEVESSDTIDNVKAKIQDKEGIPPDQQRLIFAGKQLEDGRTLADYNIQKESTLHLVLRLRGGMQIFVKTLTGKTSPFEVESSDTIDNVKA

SEQ ID NO: 46967 - protein, 406 aa, Streptococcus pneumoniae
MQTQEKHSQAAVLGLQHLLAMYSGSILVPIMIATALGYSAEQLTYLISTDIFMCGVATFLQLQLNKYFGIGLPVVLGVAFQSVAPLIMIGQSHGSGAMFGALIASGIYVVLVSGIFSKVANLFPSIVTGSVITTIGLTLIPVAIGNMGNNVPEPTGQSLLLAAITVLIILLINIFTKGFIKSISILIGLVVGTAIAAAMGLVDFSPVAVAPLVHVPTPLYFGMPTFEISSIVMMCIIATVSMVESTGVYLALSDITKDPIDSTRLRNGYRAEGLAVLLGGIFNTFPYTGFSQNVGLVKLSGIKKRLPIYYAAGFLVLLGLLPKFGALAQIIPSSVLGGAMLVMFGFVSIQGMQILARVDFANNEHNFLIAAVSIAAGVGLNNSNLFVSMPTAFQMFFSNGIVVASL

SEQ ID NO: 46968 - protein, 214 aa, Triticum aestivum
  misc_feature (199)..(199): Xaa can be any naturally occurring amino acid
  unsure (1)..(214): unsure at all Xaa locations
MAAASFTAAKFLAPVAARSGGDRARPSPAPSAFAVRPLRRGPARRLGSVMAVSSDVLKAAPAAAAYPAVTREEALELYEDMILGRNFEDMCAQMYYRGKMFGFVHLYNGQEAVSTGFIKQLNQPDCVVSTYRDHVHALSKGVPARAVMAELFGKVTGCCRGQGGSMHMFSEPHNLLGGFAFIGEGIPVATGARFAAKYXHEVLKQSSPDGLDVT

SEQ ID NO: 46969 - protein, 246 aa, Rhodococcus erythropolis
MSYALEGKVAVVTGGGSGIGAACVRQLCALGASVVVADIVFDNATLVAKEFGDRAVAVEVDVARVEDAERMVETAVAHFGGLDIAVNNAGVGVPVKASVGDTGFEEWRRVLDVNLDGAFFCMRAELRRMRKGGSVVNLASVMGAVAAEGSSSYVASKHALVGLTKTAALDYATAGIRVNAVGAGFVDTPLMAGRDPEWLAAVAASHPLGRLAQPDEIASVVAFLASSAASFVTGAFIPVDGGYLAR

SEQ ID NO: 46970 - protein, 262 aa, Capsicum annuum
MNTAIIAKSSGVRKGAWTEEEDFLLRKCIQNYGEGKWHLVPIRAGLNRCRKSCRLRWLNYLRPHIKRGDFGWDEIDLILRLHKLLGNRWSLIAGRLPGRTANDVKNYWNSHLQKKLITAPHRQEKKYNTALKITTKNVLRPRPRTFSSSAKNNISWCTNKSTVITNTLDKDERDKEIGLNICQKLTSETSSTIDDGVQWWTSLLENCKEIEEDVAAVGIFEEKNKLVPSLLHDEINSLTMQQGQSDGWDDFSADIDLWNLLN

SEQ ID NO: 46971 - protein, 541 aa, Campylobacter upsaliensis RM3195
MKQTKYIFVTGGVLSSLGKGIAAASIATLLKNSKLKVSILKADPYINVDPGTMSPFEHGEVFVTEDGAETDLDLGHYERFLDENLSQDNNFTTGKVYQSVIEKERRGEYLGKTIQVIPHIVGEIKERIIKAGENKDILIVEIGGTVGDIEGLPFLEAIRALKLEVGKNNAMNIHLTLVPFIKAAGELKTKPTQHSVGELRRIGISPNMIICRSEKPLDRDLKDKIAISCGVERNCVIESVDAASIYQIPLNFLKQDILTPICEALSLKNLKPNMENWDSLVKRVIAPSNEVKIAFVGKYVDLKESYKSLTEALIHAGAALDTRVEIRWIDSEKLENLDLNESFKEVSGILVAGGFGMRGVEGKIKAITYAREHKIPFLGICLGMQLVLVEFARNILKIKDANSSEFEPNCKNAVVYLIDEFIDSSGKKQIRTAKTPLGGTMRLGAYPCQIKENTLLSKIYNAKSIKERHRHRYEANPKFRKDYENKGLVVSGESDGLIEAVELKTHDFFLAVQFHPEFTSRLERVNPVILSFIKAANAYHN

SEQ ID NO: 46972 - protein, 279 aa, Arabidopsis thaliana
MEETEKNKGSISMVEANLPPGFRFHPRDDELVCDYLMRRTVRSLYQPVVLIDVDLNKCEPWDIPQTARVGGKEWYFYSQKDRKYATGYRTNRATATGYWKATGKDRAIQRNGGLVGMRKTLVFYRGRSPKGRKTDWVMHEFRLQGKLLHHSPNSLEEEWVLCRVFHKNSNGADIDDITRSCSDATASAFMDSYINFDHHHIINQHVPCFSNNLSHNQTNQSGLISKNSSPLFNASPDQMILRTLLSQLTKKVEESQSRGDGSSESQLTDIGIPSHAWNY

SEQ ID NO: 46973 - protein, 204 aa, Dunnia sinensis
MARGNASVPAMEMTKWFDTNYHFIVPELGPDVKFTYASHKAVNEYKEAKALGVDTVPVLVGPFTFLSLSKPAKGVEKTFPKLSLLDKILPVYKEVIADLKAAGASAIQFDEPVLVMDLESHQLEAFANAYSELESSLAGLHVIIETYFADVPQEAYKTLTSLNAVSGFGFDLVRGAKTLDLIKGGFPAGKFLYAGVVDGRNIWA

SEQ ID NO: 46974 - protein, 276 aa, Listeria innocua Clip11262
MKKITPKAMCAWIPKREDETHKGDYGRVLIVAGNKQFGGAAIMAAEACVKSGAGLTTVASDSVNRPALQTRIPECMFIDYENITSLSEQINHFDTILIGPGLGLDAYAEEIFRLVLQNSTEHQQLIIDGDGITIYAKGENPHPAAKLTFTPHAGEWERLKALAPEAETPTDVALHIDATIVLKGHRTKVYSGESAWQNMYGTPAMATGGMGDTLAGTICGLMAQTEKPLTGTLAAVFLHSYIGEILAKKRYVVLPTEIAEELPTYLKIFSETDEHA

SEQ ID NO: 46975 - protein, 196 aa, Oryza sativa (japonica cultivar-group)
NILFKHIKELLSGDTALIAETGDSWFNCQKLRLPEGCGYEFQMQYGSIGWSVGATLGYAQAAKDKRVMSCIGDGSFQMTAQEVYTMLRCGQKSIIFLINNGGYTIEVEIHDGPYNVIKNWDYTGLIDAIHNSDGNCWTKKVRTEEELIEAIATATGAKKDCLCFIEIIVHKDDTSKELLEWGSRVSAANSRPPNPQ

SEQ ID NO: 46976 - protein, 307 aa, Triticum aestivum
AYLGDISRTSLYKKAGWYRSGIPGISSTHASAHASEMLNDLLVKKNEETGWDTPIHVDAASGGFIAPFLYPELEWDFRLPLVKSINVSGHKYGLVYAGIGWCIWRSKEDLPDELIFHINYLGADQPTFTLNFSKGSSQVIAQYYQLIRLGFEGYRNIMDNCQENAMVLKEGLERTGRFNIVSKDQGVPLVAFSLKDSSRHDEFEISEFLRRFGWIVPAYTMPPDAQHVTVLRVVIREDFSRTFAERLVIDIEKVLHELDALPSRSSGPALQHPNGDTVSEKDLARQREVVSVWKRAVAARKKTQGVC

SEQ ID NO: 46977 - protein, 545 aa, Pyrococcus furiosus DSM 3638
MPLFNLTIMTKYIFVTGGVVSGLGKGITSASIGLLMKARGYKTTNIKIDPYINYDAGTMNPYQHGEVFVLDDGGEVDLDLGNYERFLDTELTFDHNITTGKVYSTVIEKERRGEYLGATVQVIPHITDEIKRRIREIAKDYEVVVVEIGGTVGDIESMPFLEAARQMQLEEGRDNVAFVHVTYVPKLKVVGEQKTKPTQHSVKELRSLGIQPDAIVARSEDPLEEAARKKISLFTNVPEEAVISAYDVEDTYEVPLLLEREGLGKYLTKRLKLEDREPDLKDWEKMVAKYKALTETVEIAIVGKYVKLQDSYLSIKEALKHASVSNEVKVKIRWIEAEDVETHGTKLLEGVDGIIIPGGFGARGAEGKIQAIRYARENDIPFLGICFGFQLTVVEFARNVLGMKGAHSTEIDPQTPYPVVDLMPEQRNLDRLGGTMRLGAYPVKIKKGTLAYSLYNKELVYERHRHRWEVNPNYIEALEKAGLVFSGVAGDDERRMEILELPDKRYFIATQFHPEFKSRPMRPAPVFHGLVRAAKEYKQEKNVTH

SEQ ID NO: 46978 - protein, 257 aa, Listeria innocua Clip11262
MTKTLTKKLANKDHASVVTYIMGGDGGLDNLEEQLLFLEKSGVSAIEIGIPFSDPVADGPVIQLAGLRALKERVSLEAILTKLATSKVQIPLIIMSYINPIFHLGIPKFIEMVQKTPVKGLIIPDLPYEHRTLITPELKGTDIALIPLVSLTSPKERLEEIANQAEGFIYAVTVNGTTGVRNEFNTHIDTHLAYLKSISPVPVLAGFGVSSIEHVEKFARVCDGVIIGSKVVQMLHDGETRELGTFLQNAAEVQIEN

SEQ ID NO: 46979 - protein, 351 aa, Streptomyces coelicolor A3(2)
MTVDGPRSTAPDVVDVVALGESMVTFLPSRPGRLADVPSFDRAIGGAESNVACVLAAAGHSARWAGRVGADGFGDHLVEAIGAYGVDVSAVRRDPARPTGVYFRTAGDRATDAHEVAYYRAGSAASAMSVDTMDLDAIRSGRVLHLSGITPALSAGCLGLMRELTARRPGRPLVSFDVNHRPGLWRDARHGHGPEVLLELARGADLVFVGDDEARDAWGLGGPEAVRAALPEPELLVVKQGASGATAFHGTDATSVPALHVDVVAAVGAGDAFAAGFLSATLRGKPVRERLRHGHLWAAAALTVPADLAAPPARGHADRLVALDDTAWGRLRLGPGWTHAEEGAEEEVRTP

SEQ ID NO: 46980 - protein, 563 aa, Polaromonas sp. JS666
MTKFVFVTGGVVSSLGKGIASASLAAILESRGLKVTLIKLDPYLNVDPGTMSPFQHGEVFVTDDGAETDLDLGHYERFIETRMRKANNFTTGQIYKSVLEKERRGDYLGKTVQVIPHVTNEIQEFIKRGAGYETADAVDVAIVEVGGTVGDIESLPFLEAVRQMSLRMGPNNTAFVHLSYVPWIAAAGELKTKPTQHTAKQLREIGIQADVLLCRADRRIPAEEREKISLFSNVPEWGVISMWDVDTIYKVPRMLHEQGLDGLICDKLRLNTPPANLKRWDDLVYETEHPKTEVNIAMVGKYVDLSDSYKSLNEALRHAGMKNHAKVVIEYFDSETITPDNVSRLARFDGILVPGGFGVRGVEGKICAARFARENKIPYLGICLGMQVATIEFARHVAGLKDANSTEFDPATPNPVIALITEWKDADGTIKTRDAKSDLGGTMRLGAQSSDVAKGSLAHKIYGDVVTERHRHRYEANVNYLDALRKSGLVISALTQREHLTEIVELPQDVHPWFVGVQFHPEFKSTPWAGHPLFNAYIAAVLEHRVKAGQDGKATAKALKAVA

SEQ ID NO: 46981 - protein, 481 aa, Arabidopsis thaliana
MSLKALDYESLNENVKNCQYAVRGELYLRASELQKEGKKIIFTNVGNPHALGQKPLTFPRQVVSLCQAPFLLDDPNVGMIFPADAIARAKHYLSLTSGGLGAYSDSRGLPGVRKEVAEFIERRDGYPSDPELIFLTDGASKGVMQILNCVIRGQKDGILVPVPQYPLYSATISLLGGTLVPYYLEESENWGLDVNNLRQSVAQARSQGITVRAMVIINPGNPTGQCLSEANIREILRFCCDERLVLLGDEVYQQNIYQDERPFISSKKVLMDMGAPISKEVQLISFHTVSKGYWGECGQRGGYFEMTNIPPRTVEEIYKVASIALSPNVSAQIFMGLMVSPPKPGDISYDQFVRESKGILESLRRRARMMTDGFNSCKNVVCNFTEGAMYSFPQIKLPSKAIQAAKQAGKVPDVFYCLKLLEATGISTVPGSGFGQKEGVFHLRTTILPAEEEMPEIMDSFKKFNDEFMSQYADNFGYSRM

SEQ ID NO: 46982 - protein, 216 aa, Thermoanaerobacter tengcongensis MB4
MKFFLDTANIEEIKEAYSLGVISGVTTNPSLVAKEGRDFKEVIREIAEIVDGPISAEVISDDHEGMVKEARELAKIHKNIVIKIPMTAEGLKAVNILSKEGIKTNVTLIFSANQALLAARAGATYVSPFVGRLDDINTDGMQIIEDIVTIFTNYDIQAEIITASVRHPIHVLEAAKLGAHIATVPYKVLMQMIKHPLTDIGIERFKEDWKKAGLKI

SEQ ID NO: 46983 - protein, 89 aa, Brassica napus
SSLMASRWVRPEVYPLFAAMGVAVGICGFQLFRNITGNPEVRVNKAGRAAGVLENHEEGRRYAMHGLRSFVHDKTPEIMPINKFFTDPK

SEQ ID NO: 46984 - protein, 476 aa, Silicibacter pomeroyi DSS-3
MAPKNEPSFRQSVDMMFNRAVALMDLPPGLEEKIRVCNATYTVRFGVRLRGQIQTFVGYRSVHSEHMEPVKGGIRYAMSVNQDEVEALAALMTYKCALVEAPFGGSKGGLCIDPRQYEEHELEQITRRFAYELAKRDLINPSQNVPAPDMGTGEREMAWIADQYARMNTTDINARACVTGKPLNAGGIHGRVEATGRGVQYALQEFFRDRVGVGKSGLDGKLDGKRVIVQGLGNVGYHAAKFLSEEDGCVITGIIERDGALVSDEGLDVEAVHNWIVKHGGVTGFPDGTFVAEGAKVLEEPCDILIPAAMEGVINLANADRIKAPLIIEAANGPVTAGADEILRKKGCVIIPDMYANAGGVTVSYFEWVKNLSHIRFGRMQRRQEEARHQLVIDELERLDRYLGDAWSMTPQFKEKYLRGADELELVRSGLDDTMRIAYQAMRDVWHERGDVEDLRTAAYLVSIDRVAKSYRAKGL

SEQ ID NO: 46985 - protein, 406 aa, Streptococcus pneumoniae
  misc_feature (115)..(115): Xaa can be any naturally occurring amino acid
  unsure (1)..(406): unsure at all Xaa locations
MQTQEKHSQAAVLGLQHLLAMYSGSILVPIMIATALGYSAEQLTYLISTDIFMCGVATFLQLQLNKYFGIGLPVVLGVAFQSVAPLIMIGQSHGSGAMFGALIASGIYVVLVSGXFSKVANLFPSIVTGSVITTIGLTLIPVAIGNMGNNVPEPTGQSLLLAAITVLIILLINIFTKGFIKSISILIGLVVGTAIAATMGLVDFSPVAVAPLVHVPIPLYFGMPTFEISSIVMMCIIATVSMVESTGVYLALSDITKDPIDSTRLRNGYRAEGLAVLLGGIFNTFPYTGFSQNVGLVKLSGIKKRLPIYYAAGFLVLLGLLPKFGALAQIIPSSVLGGAMLVMFGFVSIQGMQILARVDFANNEHNFLIAAVSIAAGVGLNNSNLFVSMPTAFQMFFSNGIVVASL

SEQ ID NO: 46986 - protein, 406 aa, Streptococcus pneumoniae
MQTQEKHSQAAVLGLQHLLAMYSGSILVPIMIATALGYSAEQLTYLISTDIFMCGVATFLQLQLNKYFGIGLPVVLGVAFQSVAPLIMIGQSHGSGAMFGALIASGIYVVLVSGIFSKVANLFPSIVTGSVITTIGLTLIPVAIGNMGNNVPEPTGQSLLLSAITVLIILLINIFTKGFIKSISILIGLVVGTAIAATMGLVDFSPVAVAPLVHVPTPLYFGMPTFEISSIVMMCIIATVSMVESTGVYLALSDITKDPIDSTRLRNGYRAEGLAVLLGGIFNTFPYTGFSQNVGLVKLSGIKKRLPIYYAAGFLVLLGLLPKFGALAQIIPSSVLGGAMLVMFGFVSIQGMQILARVDFANNEHNFLIAAVSIAAGVGLNNSNLFVSMPTAFQMFFSNGIFVASL

SEQ ID NO: 46987 - protein, 449 aa, Burkholderia cepacia
MQKYDFDLFVIGAGSGGVRAARIAAGHGAKVAIAEEYRFGGTCVIRGCVPKKLLMYASQYGQGFEDAAGFGWHSAATSHSWTSLIAAKDAEIARLEGVYQRLIENANVEIFKGRAQIAGPNRVTVTGASVSARTILIATGARPVMPPVAGANLMITSDDVFDLPVGPPRIAIIGGGYIACEFAGIFNGLGRHVVQLHRGSQVLRGFDDELREHLGDELKKSGIDLRLGVDVVAVERQRGALSVQLTTGDAMEVDAVMAATGRLPNTWGLGLETVDVGLDQNGAIKVDEYSRTSSPGIYAVGDVTNRLNLTPVAIHEGHAFADTVFGGKALPTEHENVPFAVFSQPQAASVGLSEAQARDRYSNVEIYGSAFRPMRAALSGRDEKALVKLVVNGSNDRVVGAHIVGADAAEIIQGIAVAIKARATKADFDATLGVHPTLAEEFVTLRNRR

SEQ ID NO: 46988 - protein, 415 aa, Neurospora crassa
MSFANMLNRLHGQPESYDKKSKYSFGRTLGAGTYGIVREASGPTGRVAVKIILKKNVKGNEQMVLDELEMLQRLKHPHIVKFVDWFESRDKYYIVTQLATGGELFDRICEQGKFTEKDASQTIKQVLGAVNYLHENNVVHRDLKPENLLYLTRDADSDLVLADFGIAKMLDNKDEVLTTMAGSFGYAAPEVMLKQGHGKPVDMWSMGVITYTLLCGYSPFRSENLQDLIDECSSGSVVFHERYWKDVSNDAKDFILRLLQPKPENRWTSQVRLTLAHPWLRGDSATNHNLLPEIKAYLTKARLRRGIEMVKLANRIEALKMQEDDPENTDMPGDATLAADQAQSRHRALSLASTKGGSSDAENATAPAEKRTLSKTIKTAIFREVVLAKVREMKEAEEANKLKEEAETKAKSFQA

SEQ ID NO: 46989 - protein, 474 aa, Thermus thermophilus HB27
MPPFKRTKIVATLGPATDDKEVIRALAEAGADVFRLNFSHGAPEDHRRRVGWVREVAEELGRTLAVLQDLQGPKIRVGRFREGQVLLRPGQRFVLTAEPVEGDEHRVSVSYKGLPEDVSPGQILLLDDGRIRLKVLEVRSPEILTEVEVGGVLSNNKGINIPGADLSIPALSEKDIQDLALGAELGVDWVAVSFVRTRDDLLLARHYLSRYGSKARLMAKIEKPSAVARFEEILEEADGIMVARGDLGVEMPLEEVPIVQKRLILRCIAAGKPVITATQMLESMVQNPSPTRAEASDVANAIFDGTDAVMLSAETAAGAYPVEAVAMMSRIAKAVESSPEFLQKLNVLRPAPTPTTQDAIAQAADDVVEAVGARAIVVFTATGGSARRIARTRPQVPILALTPNPEVRNQLALVWGVYPHLAPDPQDTDDMVRIALREVKALGLAQVGDRVVIAAGVPFGVRGTTNLIRVERVG

SEQ ID NO: 46990 - protein, 429 aa, Nostoc sp. PCC 7120
MKKVLAIILGGGAGTRLYPLTKLRAKPAVPVAGKYRLIDIPVSNCINSEIFKIYVLTQFNSASLNRHIARTYNFSGFSEGFVEVLAAQQTPENPNWFQGTADAVRQYLWMLQEWDVDEFLILSGDHLYRMDYRLFIQRHRETNADITLSVIPIDDRRASDFGLMKIDNSGRVIDFSEKPKGEALTKMRVDTTVLGLTPEQAASQPYIASMGIYVFKKDVLIKLLKEALERTDFGKEIIPDAAKDHNVQAYLFDDYWEDIGTIEAFYNANLALTQQPMPPFSFYDEEAPIYTRARYLPPTKLLDCHVTESIIGEGCILKNCRIQHSVLGVRSRIETGCMIEESLLMGADFYQASVERQCSIDKGDIPVGIGPDTIIRRAIIDKNARIGHDVKIINKDNVQEADRESQGFYIRSGIVVVLKNAVITDGTII

SEQ ID NO: 46991 - protein, 488 aa, Nostoc sp. PCC 7120
MQIQTPNWVKNAVFYQIFPDRFARSKQPHKRLLRDARWEDWDAMPTLQGYKGGDLWGIMEQLDYIQDLGIDAIYFTPIFQSASNHRYHTHDYYQVDPMLGGNAAFKELLDASHERNIKVVLDGVFNHSSRGFFFFHDVLENGPHSPWVNWFKIEGWPLAPYTGELPANYVGWADNRALPVFNHDNPEVREYIMEIAEYWIKFGIDGWRLDVPFEIKTPGFWQEFRDRVKAINPEAYIVGEVWGDSSEWLDGTQFDGVMNYLFAGPTIAFAAGDRVVLEQVQSRDYQPYPPLFAAEYATKIQEVLQLYPWDIQLTQLNLLASHDTARLLTIAGGDQASIQLATLLLLTFPGAPSIYYGDEVGLPGGIDPDSRRGFPLEANWDREIYQTHRQLIALRRTYPALRTGDYQVIWAQGALYIFARTLGKEELIIAVNVGTATAQANVDVASLQTQPNKILYGQAEFHWHNTEETKQLFLSLPPRSGCILGLGD

SEQ ID NO: 46992 - protein, 408 aa, Caulobacter crescentus CB15
MDYKAAFRSAVEQIREEGRYRVFADLKRQRGQFPRATWTRQDGSEHEVVVWCSNDYLGQGQNPVVLEAMKAAVDEHGSGSGGTRNISGTNHDHVLLEQELADLHGKEAGLLFTSGYVSNEATLSVVQKILPGLIIFSDELNHASMIAGIRNGGGPRKIFKHNDLAHLEQLLAEAPADAPKLIAFESVYSMDGDIADLAGTVALAKKYGAMTYLDEVHAVGMYGPRGGGVAERDGLMGEIDIIEGTLGKAFGVMGGYITGDAEVIDAIRLMASGFIFTTSLPPALTAGALASVRWLKQHPEVREIHQERAATLKAMFKAAGLPVMDSVSHIVPVLVGDPVHCKMISDMLLADFGVYVQPINYPTVPRGTERLRFTPTPFHTDDMMRKLVAAMEKLWAHCNVARMGGYAA

SEQ ID NO: 46993 - protein, 506 aa, Aspergillus niger
MSYQQPYGQGPPQGYNQYPPAGQYPPPQGQYGQHQQYPQYPPQGPGPYQQGPGSHQPPQQHGSYPPPMAGHHPQQTQAPYPPQQQHPPQGASPYPPPMSGQHPQQPGPYSSYPPSQQGMGYPHQGPPSQQGYPQGHPAQQGYPNPPQQQYQSFPPGPPGQQPPPMMAPPGAGGPYPSYNPQQGPMPSRPSPGYDPTFLAPGTASNEAEVLRKAMKGFGTDEKALIRVLTSTTDPNRMALIRHTYERMHNRSLTKDLKSETSGCFETILVSLATGPLESDITYLHDAMSGLGTNETGLNDVLLGRSNADLAAIQRAYRDKYHKSLLDDIKGELSGKTERFFEMLLNARRPERGTPFDPRGIETDVRELHRVTAGKVGTDEVAVFGIFMNSSDERLNVLAGEFERMYHVSLEKVIRGEFSGHLEDALVTMLRVARDPVSFHGATLKECFFGSDGVNEKRLIYWTVRLHWNPEYFARVKGTMGGNLRALVKNYVSGGDFEDAMMAVCSH

SEQ ID NO: 46994 - protein, 182 aa, Novosphingobium aromaticivorans DSM 12444
MPDTLAAIPLTRIDGTADSLANHAGKVLLVVNVASKCGLTPQYEGLEALYKARKDEGLEVLGFPANDFGAQEPGSHEEIAEFCKLNYGVSFPLFAKADVTGPGKQPLYAALTEAAPTKQGPAQEFRDRLKGYGMTPTEDPEVLWNFEKFVIGRDGEVAARFAPGVTPDDPALLAAIDAELAK

SEQ ID NO: 46995 - protein, 635 aa, Prosthecochloris aestuarii DSM 271
MSSTDIAQFLEQDQNKDLLRFLTAGSVDDGKSTLIGRLLFDSKKLYEDQLAALERDNVREGHAENDIDYALLLDGLKAEREQGITIDVAYRYFSTNKRKFIIADTPGHEQYTRNMVTGASTANLSIILVDARKGVITQTKRHTFLASLLGIKHVVLAVNKMDLMEYSQEVFENICGDYKNFVTRLNIPDVHCIPLSALKGDNVVDSSEKMPWYDGKTLLHHLETVHVGSDQNFIDLRYPVQYVLRPSQGYRGFAGKVASGIVRKGDELMVLPSRKKSVVTSITTYDGELDEAFPPQSVALTFADEIDISRGDMLVRPDNMPKVGRHFESMLVWMSEEPMDPTRQYLIKHANSTTRARIDKIRYRIDVNTLNKSESDAFELNDIGRTVLTTNKALCFDAYQKNKATGSFILIDPLSFNTVAVGMIIDRVSEEEMPSRITGGEQAAAVAGRSMITKAEREERLHQAGATIWITGLHGSGKNELAYKLERELFDRGAVTVLIDGSVVRAGLSRELDYSPADRAEHLRRVAHMCRMLNEQGLITICSFISPDESIRTQVAEIIGKERFYLVHVDAELEFCKAQEPELYAKAERGELQYLPGVDMAYDCPVKAAVTVDQRHVGVDPEKVVSYMLAQEVIR

SEQ ID NO: 46996 - protein, 475 aa, Burkholderia pseudomallei K96243
MTYRTEDIADVAPLYASAAPAHRTSAEYRALDAAHHLHPFSDMGSLNRAGSRVIVKAEGVHLWDSDGNRIIDGMAGLWCVNVGYGRDELIEAGSRQLRELPFYNTFFKTTHPPVIELSALLAQIAPPAFNRFFYCNSGSEGNDTVLRIAHQYWRAQNRPQKKFVISRRNGYHGSTIAGATLGGMSYMHEQMPSKVEHIVHIDQPYYFGEAREGQTPEAFGLERARQLEAKILELGAQNVAAFIGEPFQGAGGVIFPPSTYWPEIERICRQYDVLLVADEVIGGFGRTGEWFAHQHFGFAPDLMTLAKGLTSGYVPMGAVALSDRIADALIAHGEFNHGMTYSGHPVAAAVAVANLKVLRDERIVERVKTDTGPYFQQRLRETFANHSIVGDIAGAGLVAGIQLAREPRTRKRFENGGEVGTICRDYCFNGNLIMRATGDRMLLSPPLVISKPQIDEIVEKAKRAIDATAKQLGFA

SEQ ID NO: 46997 - protein, 493 aa, Kluyveromyces lactis NRRL Y-1140
MDYRNSKRSSISFGSYQRQLNLLDNVGNNGVNFYQRPNQGHSQQLQHGQQQQQQQQLGLGSGNSNYTLDKLKTVTTCQYQSSAPLFALSWNQNDQCALGTYKEDSYNRIEIINGSNDYSTWECTNVANVVYPISRIQWMPQNNTRLATCSDSLRIWSLDGSLQEQINLSLYKYGKHPSSASQKDTVTLGQLPPVTSFHWSPISPNLLLSCSIDTTCTVWDLSNSTNYVKTQLIAHDSEVFDVKFLAQSTQLFASCGGDGSVRVFDLRSLAHSTIVYDHGNETSRGSSGGGAAAADGPNKNATTKVTANTGSTAGSASGTANTSASGTSGTSGTSTLIPHGNSQDTVDQMDPEPHSNALVRLEPNPFDPNVIVTVAQDSNAIIVLDMRYPGTPLLTLEGHIGPVNQVQWHPKKSGVLVSCGDDCQVLYWDTSALLGQTSSNTARWNNQNVVHTVDTPQMAYTTETEANNLVLNPSGTHVGTVNGKTFTAINLNT

SEQ ID NO: 46998 - protein, 54 aa, Leymus chinensis
MGTANCIDIILAIILPPLGVFLKFGCGHEFWICLLLTFLGYIPGIIYAIYAITK

SEQ ID NO: 46999 - protein, 54 aa, Leymus chinensis
MGTATCIDIIIAIILPPLGVFLKFGCGHEFWICLLLTFLGFIPGIIYAIYAITK

SEQ ID NO: 47000 - protein, 176 aa, Triticum aestivum
  misc_feature (156)..(156): Xaa can be any naturally occurring amino acid
  unsure (1)..(176): unsure at all Xaa locations
MAPTVMASAGASVAPFQGLKSTAGLPVSRRSNGASLGSVSNGGRIRCMQVWPIEGIKKFETLSYLPPLSTEALLKQVDYLIRSKWVPCLEFSKVGFIFREHNASPGYYDGRYWTMWKLPMFGCTDATQVINEVEEVKKEYPDAYVRIIGFDNMRQXVQCVSFIAFKPPGCKESGKG

SEQ ID NO: 47001 - protein, 202 aa, Triticum aestivum
RFDFGTATAPKWRATASSCWRRRRACTPRRGTTASSFSSRQLSGGGAGERKRRFTEEQVRSLESTFHTRRAKLEPREKAELARELGLQPRQVAIWFQNKRARWRSKQLEQDFAELRGHYDALRARVESLKQDKLTLAAQLEELKKKLNERQDQSACCGASCAAEVDDKSNNVSSCIVAKDESAAPAADVSDGSTPGWYEDDN

SEQ ID NO: 47002 - protein, 548 aa, Glycine max
MGEEHHNHPPPPVQAPPAGPPPPNLALSRGPVWHPAEQLSQLHYCIHSNPSWPVAILLGFQHYIVMLGTTVLIATTLVPAMGGDHGDKARVIQSLLFMSGLNTLLQTWFGSRLPTVMGGSFAFLLPVLSIINDYTDRTFPSEHERFIYTIRTIQGSLIVSSFVNIFLGFSKTWGNLTRLFSPIIIVPLVCVAGLGLFARGFPLVANCVQIGLPMLILLVITQQYLKRLHHAALQVLERFALLLCIAVIWAFAAILTVAGAYNTAKSQTQVSCRTDRSYLMSSAPWIKVPYPFQWGTPIFRASHVFGMMGAALVSSAESTGAFFAAARLSGATPPPAHVLSRSIGMQGIGMLLEGIFGSIVGTTVSVENVGLLGLTHIGSRRVVQISCGFMIFFSIFGKFGAFFASIPLPIFAAIYCVLFGIVAATGISFIQFANTNSIRNIYVLGLTLFLAISIPQYFVMNTAPDGHGPVRTGGGWFNDILNTIFSSAPTVAIIVGTLVDNTLEGKQTAVDRGLPWWGPFQNRKGDVRNDEFYRLPLRINEYMPTRFL

SEQ ID NO: 47003 - protein, 338 aa, Escherichia coli K12
MRVLVTGGSGYIGSHTCVQLLQNGHDVIILDNLCNSKRSVLPVIERLGGKHPTFVEGDIRNEALMTEILHDHAIDTVIHFAGLKAVGESVQKPLEYYDNNVNGTLRLISAMRAANVKNFIFSSSATVYGDQPKIPYVESFPTGTPQSPYGKSKLMVEQILTDLQKAQPDWSIALLRYFNPVGAHPSGDMGEDPQGIPNNLMPYIAQVAVGRRDSLAIFGNDYPTEDGTGVRDYIHVMDLADGHVVAMEKLANKPGVHIYNLGAGVGNSVLDVVNAFSKACGKPVNYHFAPRREGDLPAYWADASKADRELNWRVTRTLDEMAQDTWHWQSRHPQGYPD

SEQ ID NO: 47004 - protein, 94 aa, Geobacillus stearothermophilus
VLKPLGDRVVIEVIETEEKTASGIVLPDTAKEKPQEGRVVAVGKGRVLDSGERVAPEVEVGDRIIFSKYAGTEVKYDGKEYLILRESDILAVIG

SEQ ID NO: 47005 - protein, 455 aa, Desulfitobacterium hafniense DCB-2
MENTDLKNFEESMLDGLSELTIKKGPINPELYHKYEVKRGLRDLDGRGVLVGLTEIGEVHSYIIDEGEMVPVPGRLIYRGYDITDLARGFMEDNRFGFEETAYLLLFGRLPNRQELIDFHNLLDIYQKLPDNFARDMILNVPSKDIMNGMARSVLGFYCYDTNPDDTSIRNVLKQCIRLIAAFPALAVYCYQAYTHYHGNKSLVIHSPQPELSLAENILYMLRPNHKYTELEARLLDLALVLHAEHGGGNNSSFVTHVVTSTGTDTYSAVAAALGSLRGPKHGGANHKVIQMFQDIKEKISDWQDEDELSAYLDKILLKDAFDRSGLIYGIGHAVYSISDPRAVVLKHYASKLAAEKGLDNEFNLYAKVEELAPKVIAKHTKIYKGVSANVDFYSGFVYQMLNLPLEMFTPIFALSRIAGWSAHRIEEIVNGGKIIRPAYKSVVPRQKYVPLNKR

SEQ ID NO: 47006 - protein, 329 aa, Thermoanaerobacter tengcongensis MB4
MAILVCGGAGYIGSHAVYALLKRNEEVVVVDNLATGHSESVLGGKLYIGDLRDEDFLDKVFSENDIEAVMHFAASSLVGESVENPFKYYENNVCGTLSLLKAMKKHGVKKIVFSSTAAVYGEPERIPIEEEDRTEPTNPYGETKLAIEKMLKWADAAYGIKYVALRYFNVAGALETGEIGEDHSPETHLIPIILQVALGKRDKVMIYGDDYPTKDGTPIRDYIHVMDLVDAHILALEKLRKENKSEVYNLGNGEGFTVKEVIEVARKVTGHPIPAEVTGRRPGDPAVLVASSEKAMKDLGWRPKYASLEEIIKSAWMWHKNHPNGFKRD

SEQ ID NO: 47007 - protein, 660 aa, Silicibacter pomeroyi DSS-3
MAAKDTAEDQKPEDQEDEVSLDMSQAQVKKMIAEAREKGYITYDQLNQVLPPDQVSSEQIEDVMSMLSEMGINIIEDEEAEEEEQKGSTDLITTESNREVALAGAQAEKLDRTDDPVRMYLREMGSVELLSREGEIAIAKRIEAGRNTMIAGLCESPLTFQAITIWHDELLSEDILLRDVIDLEATFGNQLDDEDDEPVVATSAVQAVKPQREETPEYDADGNPIVTEDDEDEDDQANMSLAAMEAALKDKVLITLERISSDYAQLSEMQDSRISATLNEDGSFSAHDEATYQSLRSEIVLLVNELHLHNNRIEALIDQLYGINKRVMSIDSSMVKLADQARINRREFIDAYRGRELDPNWLAEMAEKPGRGWQMFIERSSDKVEELRADMAQVGQYVGLDISEFRRIVQQVQKGEKEARQAKKEMVEANLRLVISIAKKYTNRGLQFLDLIQEGNIGLMKAVDKFEYRRGYKFSTYATWWIRQAITRSIADQARTIRIPVHMIETINKLVRTGRQMLHEIGREPTPEELAEKLQMPLEKVRKVMKIAKEPISLETPIGDEEDSQLGDFIEDKNAVLPLDSAIQENLKETTTRVLASLTPREERVLRMRFGIGMNTDHTLEEVGQQFSVTRERIRQIEAKALRKLKHPSRSRKLRSFLDQ

SEQ ID NO: 47008 - protein, 318 aa, Saccharomyces cerevisiae
MLFLNIIKLLLGLFIMNEVKAQNFYDSDPHISELTPKSFDKAIHNTNYTSLVEFYAPWCGHCKKLSSTFRKAAKRLDGVVQVAAVNCDLNKNKALCAKYDVNGFPTLMVFRPPKIDLSKPIDNAKKSFSAHANEVYSGARTLAPIVDFSLSRIRSYVKKFVRIDTLGSLLRKSPKLSVVLFSKQDKISPVYKSIALDWLGKFDFYSISNKKLKQLTDMNPTYEKTPEIFKYLQKVIPEQRQSDKSKLVVFDADKDKFWEYEGNSINKNDISKFLRDTFSITPNEGPFSRRSEYIAYLKTGKKPIKKNHSSSGNKHDEL

SEQ ID NO: 47009 - protein, 623 aa, Glycine max
IRLEVRSYVVASQTQRAKEAPNFGQHKGYPVIDHEFDAVVVGAGGAGLRAAFGLAEGGLKTACITKLFPTRSHTVAAQGGVNAALGNMTEDDWRWHMYDTVKGSDWLGDQDAIHYMCREAPNTVVELEHYGVPFSRTKEGKIYQRAFGGQSLNFGKGGQAYRCAAAADRTGHAILHTLYGQSLRHNTNFFIEYFALDLLMQDGECVGVIALNLEDGTLHRFRSHKTVLATGGYGRAYFSCTSAHTCSGDGNAMVVRAGLPLQDLEFVQFHPTGIYGAGCLITEGSRGEGGYLLNSEGERFMERYAPTAKDLASRDVVSRSMTLEIREGRGVGPEKDHIYLQLSHLPPDILHERLPGISETAAIFAGVDVTKEPIPVLPTVHYNMGGIPTKYTGEVLTVDSNGNDKVVPGLYAAGEAACVSVHGANRLGANSLLDIVVFGRACANHIRETLKPNTPHKPMKDDLGKESIAELDRVRTSTGPKSTAQVRLAMQKTMQNDAAVFRTQESLDNGVKGMSEIYGQYDDIGIKDRSMIWNSDLVETLELRNIMQNAMQTVVSAAARQESRGAHAREDFPERDDDKWMKHTLSFQRDPNSPEVELQYRGVIANTLDEAECKPVPPFKRTY

SEQ ID NO: 47010 - protein, 487 aa, Streptomyces coelicolor A3(2)
MSQRVLTTESGAPVADNQNSASAGIGGPLLIQDQHLIEKLARFNRERIPERVVHARGSGAYGHFEVTDDVSGFTHADFLNTVGKRTEVFLRFSTVADSLGGADAVRDPRGFALKFYTEEGNYDLVGNNTPVFFIKDPIKFPDFIHSQKRDPFTGRQEPDNVFDFWAHSPEATHQITWLMGDRGIPASYRHMDGFGSHTYQWTNARGESFFVKYHFKTDQGIRCLTADEAAKLAGEDPTSHQTDLVQAIERGVYPSWTLHVQLMPVAEAANYRFNPFDVTKVWPHADYPLKRVGRLVLDRNPDNVFAEVEQAAFSPNNFVPGIGPSPDKMLQGRLFAYADAHRYRLGVNHTQLAVNAPKAVPGGAANYGRDGLMAANPQGRYAKNYEPNSYDGPAETGTPLAAPLAVSGHTGTHEAPLHTKDDHFVQAGALYRLMSEDEKQRLVANLAGGLSQVSRNDVVEKNLAHFHAADPEYGKRVEEAVRALRED

SEQ ID NO: 47011 - protein, 584 aa, Cryptococcus neoformans var. neoformans JEC21
MPSATLIRLSKSLSMSSSNSTVRVALRGGAILNNPRFNKGSAFTHQERSEFALRGRLPYAVDSLEIQVKRAYEQYKSRETNILKNSFLQSMKAQNWTLFYALLQAHLVEMFPIVYTPTEADAIADYSHLFRRSEGLYLTPPGEKNMEEDFLDACEGRELELIVVSDGEAILGIGDQGSGGIGISGAKAVIYSLIAGVDPAKCLAITLDVGTNNQDLLNDPLYIGYREKRLRDDRYDQFVDKFVGLVKKHQPECLLHFEDLVSPMLNDSSEDIGARFNDDIQGTGAVTLAAVQAAISVTKSSLKDQRIVIYGSGSAGLGIARQLRDAIALDSSGSPSEAAKQFWLIDKHGLIKKSLGKDKIRSEIEDEFIRDEGDWGEGETGLKEVVKKIKPTILVGTSTQAGAFTEEVVKEMSKHVDRPIIFPLSNPTRLCEAQPKDVSEWSKGKALMSTGSPFDPVDISDSGEKYIVAECNNALIYPGLGLGSILAKSSKMTDKMIIAGAQRLGQLAPALVKKNANKSLLPDFGDAQKVNFEVALAVLEQAMEDGVARAKDIPEDKDERRKWAENNRWSPGYPNFKYDPEGLK

SEQ ID NO: 47012 - protein, 222 aa, Anabaena variabilis ATCC 29413
MALFGFGKKLALPTPEKALPGRAQIMPVPANHYVNKNPLKPPFPEGFEKALFGLGCFWGAERKFWQQSGVYTTAVGYAAGFTPNPTYDEVCTGLTGHNEVVLVVFDPKVISYTQLLKVFWESHNPTQGMRQGNDVGTQYRSGIYVYSEAQKQLAEASRDAYQQALSSAGYEKITTEILDAPEFYYAEAYHQQYLAKNPNGYCGLGGTNVACPVGVFESSANG

SEQ ID NO: 47013 - protein, 587 aa, Cryptococcus neoformans var. neoformans JEC21
MTTENEKDMAHHPTFREEVDIGFAGESAEYAQAPRLTQTANLKDMNPLDITASTEKGEVDGRQQQQPEQGQSGVLTGARLYLVFVALMLCVFMFALDQSIVSTAIPVIVSDFNAFDQVAWIITGYFLTQCGLILLVGQVLTILKAKWMLLGAIFFFELGSLICGVAKDMDTLIGGRAIQGIGASGMFVSILAVIAVVTRVDQRAAFMASFGFVFVVSSVVGPLLGGAFTDHVSWRWCFYINLPFGGFAAAAVVFLLPARDPEHADTAPPDRTVLGKLRRLDWIGTGLIFCAITCLLLALAWGGNQYAWNNWRIPFLFTLGGLLVIAFGVWQWRYDKYALIPLSLLKNRTVLACSGAIFFFMLAMLGGTYQLPLFYQAGRGHSPEKSGVDIIAFMLATCVAILISGGLTTKFGRYYPFLLIGPPFAAVGFGLLYTIDVNTPNAKIIGYQILAGFGIGLSFQNVLVAVQAEYHDRPSLLPQATGVVSFFQLTGAALGVGIINTVQSVYLNTEIKRLAPEVDFNLVRQSVSAIYTLPADQQSAVIEAYVISITNSLIPIIVAVGLAMVFGAFIRNHNLLKKGGAGSAHMA

SEQ ID NO: 47014 - protein, 366 aa, Xanthomonas oryzae pv. oryzae KACC10331
MLFETLDTTGHEQVIFCHNRDAGLKAIIALHSTRLGPALGGVRMRPYPNSEAALSDALRLSRTMTYKNALAGLNVGGGKAVIIGDPRTDKTEVLFRAFGRFVDTLGGRYITSEDVGTDVNDMEQIYLESEYVTGVHQVHRGSGDPAPFTAYGALQALMASLNRKLGHEEVGKASIAIQGLGHIGMELVKLLKERGAKLYVADLNQALVDHAVAEYGAEAVRPDEIHQVSADVFAPCALEGAINEDTLPQLKAKIVCGTANNQLASAAIGEELHRRGILHAPDYVVNAGGAMNVSLEIDGYNRERAMRLIRSIYHNLEKVFDLSRQLDVSPQRAADQIAEARIEAISKLKLPLGRTAPRFLHKLRGE

SEQ ID NO: 47015 - protein, 1047 aa, Bacillus sp. GL1
MFWIVEKLQKRIEELAAYRYRHALPLDEWEMQEDEAGANGVSRPPELTGELRMRKGERWVGYDRYVWLRRKVRVPEDWKGREVVGLFDFGLTGAGNNAAFESLLYLNGRPFQGVDTNHQEVFVPAELAGSEIELVFRLWSGLEGGGGPRDQEHQFKRAELAVLDAAADDLYFTGRAALETAKILEESNPFKHDLLTAADRAFKLLDWSRPGSDEFYVSVGLAADALRTALSELDNKHPVTVRALGHTHIDVAWLWQLKHTREKSARSFSTVLRLMEKYPEYLFLQTQPQLYAYLKKDYPEIYEQIRERVKEGRWEAGGAMWLEADCNLTSGESLVRQILHGTRFFRDEFGVECDYLWLPDVFGYSWALPQILRKSGIKTFMTTKISWNQYNRMPHDTFKWRGIDGSEILTHFITTPEVADPNVWWYTYNGQIEPFTVKGIWDTYRDKDINRELLLSYGYGDGGGGVNRHMLEMRRRLDEMPGLPKVVPGRAGDFFDKLHETVAGTDRYVHTWDGELYLEYHRGTYTSQAYNKRMNRKLELMYREAEWLHSLGAVAGGGDWSGYPKEALYEGWTTILRNQFHDIIPGSSIGAVYQDARAEYAEAERLGKEAIQAAAERLAGQAEGAVVSVYNGAAFDRTELVEIPVQAGIGSQGGWLGEAGRPLRAEFDGSRWLVLAEDVPATGAATLRFDPSAGQQTSVKAFEWADGVLRTPHYELAFDEAGRLVRLYDRGLSREVLPRGARANELQVFEDKPKMFEAWDIDLFYQEKRREVTDLRKLELVECGALRAVLRLEWAYGASVIEQRLVVYADDRRIDFVTRVDWREHQQLLKVAFPVEIRATEATYDIQFGNVKRPTHWNTSWDHARFETVGHQWVDLSERGYGVSLLNDCKYGHDIKDNVIRLSLIKSAIDPDPNADQGEHLFTYSLYPHAGDWASGGTATAAWALNNPLLAVPGASAFAGKSLLRADGAHIAFDAIKKAEDEDALVVRLHEYAGGRGLTTLTPGCEIASWQECDLLERPIGDRHDGDKPLRFELAPYEIKTFLIRLR

SEQ ID NO: 47016 - protein, 639 aa, Prosthecochloris aestuarii DSM 271
MHDVMSSTDIAQFLEQDQNKDLLRFLTAGSVDDGKSTLIGRLLFDSKKLYEDQLAALERDNVREGHAENDIDYALLLDGLKAEREQGITIDVAYRYFSTNKRKFIIADTPGHEQYTRNMVTGASTANLSIILVDARKGVITQTKRHTFLASLLGIKHVVLAVNKMDLMEYSQDVFERICADYKDFVTRLNIPDVHCIPLSALKGDNVVEHSENMPWFDGKPLLHFLETVHVGSDQNFIDLRYPVQYVLRPSQGFRGFSGRVASGIVREGDELMVLPSRKKSKVTSITTYDGNLQEAFPPMSVTLTFADEIDISRGDILVRPDNMPKIERHFESMLVWMSEEPMESNKHYLIKHTTNMTRARIDKIRYRIDVNTLNKSDSDAFELNDIGRAVLTANKPLCFDPYQKNASTGSFILIDPVSFNTVAVGMIIDRVSEENMPSRITGGEQAVSAAGRSMISRSEREAQLRQSGATIWITGLHGSGKNELAYKLERELFDRGAVTVLIDGSVVRAGLSRELDYSPADRAEHLRRVAHMCRMLNEQGLITICSFISPDESIRTQVAEIIGKEWFHLVHVDAELEFCKAQEPELYAKAERGELQYLPGVDMAYDCPVKAAVTVDQRHVGVDPEEVVSYMLAQGVIR

SEQ ID NO: 47017 - protein, 582 aa, Cryptococcus neoformans var. neoformans JEC21
MTLGERERLLQPAPAPPGTTLYSEPNHSEDIETTDEHKLSYNRVGLNARRFWILCASMWIASFLNAFDGTVVATLLGPISSSFKATNLASWLGTSYMLSVCCFTPIYGRLCNIIGRQGSMLLALAIFTTGNLLCAFAPSMEALIAARALAGMGGGGLSIIGSTIMSDIVPITHRGIFQGLANLAFGSGMGLGAPIGALINDCLNWRWAFWVQIPVLLFASYLVHSNVRYDVPSRPSSGAATPNPAAVKQTAMQLFKRIDFLGCFLLAGWVGAALIAISLNINSTATNAYNWSDPIMIGLFATSAVLFVLFLFVELKWAAEPVMPFELLVSRTPVAVAINNFVLSVANFAILYSVPLYFTTVRQMSASNAGAHLIPNSFVGVIGSLGAGLIVRRTHKYYWLNTFCACFGVIGCFLISTWRLGTSEWMLWTNMSFTSFAMGAVTTLTIVALIADVGPEHVAIATSLSYVFRTIGQVLGVALSGALTQAVLTWELEKRIRGPNAEEIIASIRESSASIRYLPEPLKSIAIASYQKGLHAVFICTVVLSVITLLSGLGIRELDMKQIMSGGKQAKQVQNESEEEEA

SEQ ID NO: 47018 - protein, 434 aa, Enterococcus faecalis V583
MNTPQQTETPNGKAAVLGLQHLLAMYAGAVAVPLLIGTGLNFDSQQMTYLISIDIFMCGVATLLQLTVNKFFGIGLPVVLGCAIQAVAPLIMIGTNKGVGAIYGSIIASGIFVVLIAGFFSKIKRLFPPLVTGTVITVIGLTLIPVAVEKMGGGLATDKSFGDPKNLLLAFVTIALIIVVQVWGRGFIKSIAVLIGLVGGTILAAFLGLVDLSPVGQATWFHFPQPFYFGKPTFDLSSIVLMIIISIVSMVESTGVYFALGDITGKKIGEDDLRRGYHAEGLAVILGGIFNTFPYTGFSQNVGLVQLSGIKTRRPIYFSAFFLIILGLLPKIGAMAQIIPEPVLGGGMLVMFGMVAVQGMRMLSKVDYSNDKNLLIIAISIGFGLGFNIMPTLFNKVPETVSMFTGNGIVMSSITAIILNLLFNGLKETSESNE

SEQ ID NO: 47019 - protein, 196 aa, Prosthecochloris aestuarii DSM 271
MKHIHPVFDQILGREDKERMLKQRGCVLWFTGLSGSGKTTIARHVEQELAGKGVLTQVLDGDNIRTGINNNLGFGEEDRVENIRRIAEVTKLFVHCGIVTLNCFISPTREMRQMAKDIVGADDFVEVFVDTSLYECEARDVKGLYKKARAGEIPNFTGIHEPFESPLDPDVHIVTEQQCVSECVSSVISFVIPRIF

SEQ ID NO: 47020 - protein, 396 aa, Escherichia coli
MFENITAAPADPILGLADLFRADERPGKINLGIGVYKDETGKTPVLTSVKKAEQYLLENETTKNYLGIDGIPEFGRCTQELLFGKGSALINDKRARTAQTPGGTGALRVAADFLAKNTSVKRVWVSNPSHPNHKSVFNSAGLEVREYAYYDAENHTLDFDALINSLNEAQAGDVVLFHGCCHNPTGIDPTLEQWQTLAQLSVEKGWLPLFDFAYQGFARGLEEDAEGLRAFAAMHKELIVASSYSKNFGLYNERVGACTLVAADSETVDRAFSQMKAAIRANYSNPPAHGASVVATILSNDALRAIWEQELTDMRQRIQRMRQLFVNTLQEKGANRDFSFIIKQNGMFSFSGLTKEQVLRLREEFGVYAVASGRVNVAGMTPDNMAPLCEAIVAVL

SEQ ID NO: 47021 - protein, 380 aa, Emericella nidulans
LEPGTMDCVRAGPFGELFRPDNFVFGQSGAGNNWAKGHYTEGAELVDNVVDVVRREAEGCDCLQGFQITHSLGGGTGAGMGTLLISKIREEFPDRMMATFSVVPSPKVSDTVVEPYNATLSVHQLVEHSDETFCIDNEALYDICMRTLKLSNPSYGDLNHLVSAVMSGVTTCLRFPGQLNSDLRKWAVNMVPFPRLHFFMVGFAPLTSRGAYSFRAVSVPELTQQMFDPKNMMAASDFRNGRYLTCSAIFRGKVSMKEVEDQMRNIQSKNQSYFVEWIPNNIQSALCSIPPRGLKMSSTFIGNSTSIQELFKRVGDQFTAMFRRKAFLHWYTGEGMDEMEFTEAESNMNDLVSEYQQYQDASISEGEEEYAEEEIMEGEE

SEQ ID NO: 47022 - protein, 396 aa, Escherichia coli
MFENITAAPADPILGLADLFRADERPGKINLGIGVYKDETGKTPVLTSVKKAEQYLLENETTKNYLGIDGIPEFGRCTQELLFGKGSALINDKRARTAQTPGGTGALRVAADFLAKNTSVKRVWVSNPSWPNHKSVFNSAGLEVREYAYYDAENHTLDFDALINSLNEAQAGDVVLFHGCCHNPTGIDPTLEQWQTLAQLSVEKGWLPLFDFARQGFARGLEEDAEGLRAFAAMHKELIVASSYSKNFGLYNERVGACTLVAADSETVDRAFSQMKAAIRANYSNPPAHGASVVATILSNDALRAIWEQELTDMRQRIQRMRQLFVNTLQEKGANRDFSFIIKQNGMFSFSGLTKEQVLRLREEFGVYAVASGAVNVAGMTPDNMAPLCEAIVAVL

SEQ ID NO: 47023 - protein, 147 aa, Glycine max
MLVPLAPYPPPPPPAPYTPPPNGAQSQLVCSGCRNLLLYPVGATSVCCAVCNAVTTVPPPGTEMAQLVCGGCHTFLMYIRGATSVQCSCCHTVNLALEANLVAHVNCGNCKMLLRYQYGARSVKCAVCSFVTSVGASTSTTEQKFST

SEQ ID NO: 47024 - protein, 185 aa, Nostoc sp. PCC 7120
MLKLYGGAFSRASIVKWYLEELEVPYEFVLLDMQAGEHLQPEYLKINPIGKVPAIVDGDFQLWESGAILLYLNDKYGKTSLSAEERGILSQWVVFANATLGTGIFVEANREKEMPRLLTPLNEIFEHQPFLLGNEFSVADVAVGSILAYIPIMLKLDLGDYPAVVNYIKQMTERPAFQKSIAGRS

SEQ ID NO: 47025 - protein, 146 aa, Cucumis sativus
MKGGKSKGAPKKTDTKLKSKSAGASKKSAKAAKDPNKPKRPASAFFVFMEEFRKQYKKEHPNNKSVAAVGKAGGDKWKSMSDAEKAPYINKAEKRKTEYNKSMQAYNKRIAEGGNGAEEEESDKSKSEVNDDDEDDDESGEDEDDE

SEQ ID NO: 47026 - protein, 232 aa, Brassica oleracea var. botrytis
MASSSYAPFSAVFSGFAATKPNPPPTCSAFLVPKRRSNSRNLKNGVSLKSWNKHGFQFKSRNLSVYARATEEKTVHDFTVKDISGKDVSLDKFKGKPLLIVNVASKCGLTSSNYTELSQLYDKYRNQGFEILAFPCNQFGGQEPESNPDIKRFVCTRFKAEFPIFDKVDVNGPSTAPIYQFLKSKSGRFLGDLIKWNFEKFLVDKKGNVVQRYPPTTPPLQIEKDIQKLLVA

SEQ ID NO: 47027 - protein, 765 aa, Hordeum vulgare subsp. vulgare
MASHIVGYPRMGPKRELKFALESFWDGKSSAEDLEKVATDLRASIWKQMAGAGIKYIPSNTFAYYDQVLDTTAMLGAVPDRYSWTGGEINLSTYFSMARGNATVPAMEMTKWFDTNYHFIVPELGPDTKFSYSSHKAINEYKEAKALGVDTVPVLVGPVSYLLLSKAAKGVEKSFSPLSLLSSILPVYKEVIAELKAAGASWIQFDEPTLVKDLESHQLAAFSAAYTELESTLSGLNVLVETYFADVPAESYKTLTSLSSVTAYGFDLERGTKTLELVKSGFPAGKYLFAGVVDGRNIWADDLAASLATLQSLEAIVGKDKLVVSTSCSLMHTAVDLVNETKLDDEIKSWLAFAAQKVVEVNALAKALAGQKDEAYFAANAAALASRRSSPRVTNEEVQKAATALKGSDHPRATTVSARLDAQQKKLNLPVLPTTTIGSFPQTVELRRVRREYKAKKISEEEYTNAIKEEISKVVKIQEELDIDVLVHGEPERNDMVEYFGEQLSGFTFTANGWVQSYGSRCVKPPIIYGDVSRPNPMTVFWSKMAQSMTARPMKGMLTGPVTILNWSFVRNDQPRFETCYQIALAIKKEVEDLEAGGIQVIQIDEAALREGLPLRKSEHAFYLDWAVHSFRITNCGVQDTTQIHTHMCYSNFNDIIQSIINMDADVITIENSRSDEKLLSVFREGVVYGAGIGPGVYDIHSPRIPSKEEIADRVNKMLAVLDTNILWVNPDCGLKTRKYAEVKPALTNMVEAAKQIRAELAKAQ

SEQ ID NO: 47028 - protein, 675 aa, Arabidopsis thaliana
  misc_feature (136)..(136): Xaa can be any naturally occurring amino acid
  unsure (1)..(675): unsure at all Xaa locations
MSWTGGDWLCGACQHANFKKRESCQKCGYPKFGGVDVSTYLYNRTEVMAGDWYCGALNCGSHNYASRTSCYRCGMIKVEYTEQYYGAQMVAYGNDGAACPPGWKTGDWVCPRVGCGVHNYASRAECFKCKTTRDYXWRLNGRERANEESLVLIIPFNKCFYFLTCMTLSYVDLKSIESLDSCNSTIFYKDNESDYESSTVGPDSSRRTSWLSSSFTASPSCSSISHLSNHGLNSYNQSKPHKANQVAWEAMARLRRCCGRAVGLEHFRLLKRLGSGDIGSVYLCQIRGSPETAFYAMKVVDKEAVAVKKKLGRAEMEKKILGMLDHPFCPTLYAAFEASHYSFLVMEYCPGGDLYAVRLRQPSKRFTISSTRFYAAETLVALEYLHMMGIVYRDLKPENVLIREDGHVMLSDFDLSFKCDVVPQFLSDNDRDRGHQEDDDDISIRRKCSTPSCTTTPLNPVISCFSPTSSRRRKKNVVTTTIHENAADISGGCPSIFAEPINARSKSFVGTHEYLAPEVISGQGHGSAVDWWTYGIFLYEMIFGRTPFKGDNNEKTLVNILKAPLTFPKVIVNSPKEYEDMVNAQDLIIKLLVKNPKKRLGSLKGSIEIKRHEFFEGVNWALIRSIKPPWVPKEETSHKTKGDNRSVNYYLPPRFMMSRKERNEPYHVSNYFDYF

SEQ ID NO: 47029 - protein, 306 aa, Arabidopsis thaliana
  misc_feature (127)..(127): Xaa can be any naturally occurring amino acid
  misc_feature (150)..(150): Xaa can be any naturally occurring amino acid
  unsure (1)..(306): unsure at all Xaa locations
METLHPFSHLPISDHRFVVQEMVSLHSSSSGSWTKEENKMFERALAIYAEDSPDRWFKVASMIPGKTVFDVMKQYSKLEEDVFDIEAGRVPIPGYPAASSPLGFDTDMCRKRPSGARGSDQDRKKGXVPWTEEEHRLRHSFISTEFFPIXVTLPRFLATQVIPFFLRVFNALFLVPCRRFLLGLLKYGKGDWRNISRNFVVSKTPTQVASHAQKYYQRQLSGAKDKRRPSIHDITTGNLLNANLNRSFSDHRDILPDLGFIDKDDTEEGVIFMGQNLSSENLFSPSPTSFEAAINFAGENVFSAGA

SEQ ID NO: 47030 - protein, 822 aa, Neurospora crassa
MTTSTVGLIDNWYPPTRENYDLILSLWKWFPVAASLQWGISWYGMGKTSVTSRLNLPGRIGWLTMEAPGFMTLVYMMRTLPAQHGFTLSDLPWQNKVLAGLFVFHYSYRALAFPFLQPSMAPIHIAIWLSALSFQIINGTLIGAWLAAYGPTSHAAWDRQLFSSFPTLQFTCGIALFYVGLMANFYHDDELREIRRRENRRQERLAKQNGQKGQPGKKVGKHYEIPKAGLFKVMLYPHYFCEWVEWLGFYMAAGWGCLPARCFLLNEVAAMLPRAVKGKQWYMEKFGEEKISKKWAVIPGGCFLGRAVPEDLQRAELHPVLNCRWWGPLLTVAWRGHKPPTNTGNPPTPRNFGSKQTELLALGTGPHQREIIEAALDGHDVFVQAATSFGKSLCFQLPAVIDRGITIVISPLLSLMMNQVEALKASDVDARTLNSNTTLAERDYIYADLATGHPLMRLLYVTPELCSGDHFRRKLKLVYEQHELARIVVDEAHCISEWGHDFRKDFKRLSWFRETFPDVPVMCLTATANEQVRHDVLTTLGLDKTPGKLKIFSMTAHRPNLHLEVRFTSDEANDRYDDFVTWLKGVYDRRAAVDRKAELDAIGERVENVPGIIYTISRDEVESLAAALRHDGIGARPFHAKLPNQVKEETLAKWIANDPGYDVIVATTAFGMGIDKENVRFVVHWRLPKSFEGYYQEAGRAGRDGNASYCFLYYSREDRDRVCNLVMREPVSKNASADGIINKQARQMSLSRLVAYCEDTGCCRHAAICRYFGETQVPACDYACDWHKDPQGLKRRMARGLASEEWVSTQREEGMYDEYWSE

SEQ ID NO: 47031 - protein, 540 aa, Shewanella oneidensis MR-1
MSELTWWRGAVIYQIYPRSLLDTNGDGVGDLRGIITKLDYIASLNVDAIWISPFFKSPMADFGYDISDYREIDPLFGSMQDFDELIEKAHQRGIKVIIDQVLSHTSDQHAWFIESRESRTNPKADWYVWADPREDGTPPNNWLAIFGGCAWEWEPRRQQYYLHNFLRSQPDINFHNPDVRQAVLDNVEFWLKKGVDGFRLDAITFCFHDELLRDNPAKPKEKRQGRGFSEDNPYAYQYHYYNNDRPQTIQFIEALRQLINRYPGTVTLGEVSAEDSLAVMAAYTKGDDRLHMAYSFELLTDDYSAAYIRQTVEALENSIGDGWPCWAIGNHDVQRVASRWGRGKQTSDMAKMLNAMLCSLRGSVCSYQGEELGLTEVPIEFHELQDPFGKTFWPMFKGRDGCRTPMPWEQYADFSGFSQVSPWLPIAAAHRALAVDLQEADCHSVLHGYRQFLAWRKCYPALITSEIEFLDAPEPLLVFVRKLGEQKLLVCFNLLDAETQLSLTGLKLQQELAGHGLKTAHRQGDSLIFSAYASFYALLA

SEQ ID NO: 47032 - protein, 309 aa, Cryptococcus neoformans var. neoformans B-3501A
MSAPTSFKLNNGVEIPAVGLGTWQAPPGQVQAAVAHALKNGYRHLDCALIYQNEAEVGDGIKESGVPRSEIFITSKVWNTHQPNVADGLRQTLEALQTDYLDLYLIHWPVRLVPNESSGLLPVNPDGSRAVDRDWDQSETWRQMEEVYASGKVKAIGVANWSIPYLEELKKTWKIVPAVNQVELHPFLPQHKLVKYCRDLGILLEAYSPLGSTNAPLLSDPEINAIAEKYKTSPATICISYQVNRGIVVLPKSVSPKRIEDNLKTIPIEKEDMVKLDGMAAAGKAQRINTPKWGWDLGFDDWYGPVKQQ

SEQ ID NO: 47033 - protein, 406 aa, Streptococcus pneumoniae
MQTQEKHSQAAVLGLQHLLAMYSGSILVPIMIATALGYSAEQLTYLISTDIFMCGVATFLQLQLNKYFGIGLPVVLGVAFQSVAPLIMIGQSHGSGAMFGALIASGIYVVLVSGIFSKIANLFPSIVTGSVITTIGLTLIPVAIGNMGNNVPEPTGQSLLLAAITVLIILLINIFTKGFIKSISILIGLVVGTAIAATMGLVDFSPVAVAPLVHVPIPLYFGMPTFEISSIVMMCIIATVSMVESTGVYLALSDITKDPIDSTRLRNGYRAEGLAVLLGGIFNTFPYTGFSQNVGLVKLSGIKTRLPIYYAAGFLVLLGLLPKFGALAQIIPSPVLGGAMLVMFGFVSIQGMQILARVDFANNEHNFLIAAVSIAAGVGLNNSNLFVSMPTAFQMFFSNGIVVASL

SEQ ID NO: 47034 - protein, 686 aa, Neurospora crassa
MSSFTETDQLAINTIRVLAADATAHANSGHPGAPMGMAPVAHVLFNRFMNFNPKNPKWLNRDRFVLSNGHACMLQYALLHLYGYALTIDDLKAFRRIDSITPGHPEAHDTPGVEVTTGPLGQGISNAVGLAIAQAHTAAVFNKPGYDLVNNYTYCFLGDGCLMEGVSSEACSLAGHLQLGNLIAIWDDNRITIDGDTNQAFTEDVLKRYESYGWHIVTVLDGDNNLDLIADAIKKAKEVTDKPTLIQLKTTIGFGSKKQGTHDVHGSPLKADDIKQLKEKFGFNPEESFAVPQEVYDLCHKASAKGAAKEEEWNQLFAKYAEEFKAEHDDLIRRQKGELPEGWEKHLPVYTPADPAVASRKLSENVLNKIFEAVPELVGGSADLTGSNLTRWKGAIDFQPPATGLGTYAGRYFRFGVREHGMGAIMNGMAAYGTLIPYGGTFLNFVSYAAGAVRLSALSQVRAIWVATHDSIGLGEDGPTHQPIETLAHFRALPNCMVWRPADGNETSAAYYVALTSKHTPSILALSRQNLPQLEGSTIEKAIKGGYVLHEVEGADVTLISTGSEVCIAIDAVKELKEKHNIKARVVSMPCMEVFDAQPKDYRLSVLPDGIPSLSIEVMSTMGWEKYSHEQFGLNRFGASGAYLDVYKKFEFTPEGIAKRAIATIDFWKDVPNIRSPINRAFQQLI

SEQ ID NO: 47035 - protein, 131 aa, Brassica napus
MAATQLTASPVTVSARSLASLRASSAKFGTLKPGTLKQSQFRSLVVRAASVVAPKYTSIKPLGDRVLVKIKEAEEKTMGGILLPSTAQSKPQGGEVVAVGEGRTIGKNKIDIAVPTGAQIIYSKYAGTEVE

SEQ ID NO: 47036 - protein, 475 aa, Aspergillus niger
MASTLRLGTSALRSSSIAAKPVVQSAAFNGLRCYSTGKAKSLKETFAEKLPAELEKVKKLRKEHGSKVIGEVTLDQAYGGARGVKCLVWEGSVLDSEEGIRFRGRTIPECQELLPKAPGGQEPLPEGLFWLLLTGEIPTEQQVRDLSAEWAARSDLPKFIEELIDRCPSTLHPMSQFSLAVTALEHESAFAKAYAKGINKKDYWNYTFEDSMDLIAKLPTIAAKIYRNVFKDGKVAPIQKDKDYSYNLANQLGYGDNNDFVELMRLYLTIHSDHEGGNVSAHTTHLVGSALSSPMLSLAAGLNGLAGPLHGLANQEVLNWLTKMKAAIGNDLSDEAIKNYLWSTLNAGQVVPGYGHAVLRKTDPRYVSQREFALRKLPDDPMFKLVSQVYKIAPGVLTEHGKTKNPYPNVDAHSGVLLQYYGLTEANYYTVLFGVSRALGVLPQLIIDRALGAPIERPKSYSTELSPSLLVLSCK

SEQ ID NO: 47037 - protein, 567 aa, Cryptococcus neoformans var. neoformans JEC21
MDPPRASSTRSSSSSMPTSSSASASANKLKKFKLDPMSMLLPHERPGYRGSPAAGRSMPPLHPQFQLQSQPGSPAYFAMLQSQQVQQDSGTQRIGIQTRTTASVGEQGGKRGEGSGSQIPTQVPVGSQHPAQGVPLSPPASMASTPPSGSWEDSASQWSSMEGVVEGTPAPGQRSQPSRHYAPRMTQNTMRLEDWEIVETLGTGTFGRVLLVRQRPSYRPTPYHPIFPHLYRSRHPFSPSPSTTQKSDDHLPHFAMKVLRKSEIVRLKQVEHINSERIILERVRHPFIVELHATYQDQINVYMLLSYIPGGELFSHLRRAGRFSADVTRFYLASIVLAIEYLHSQNIIYRDLKPENLLLDRHGYLRIADFGFAKVVQDRTFTLCGTPEYLAPEIVLSQGHGKAVDWWALGILGFEMLAGYPPFFDDHPLGIYEKILRGDIAFPSHVDPYAKDLIRGFLTADRSKRLGNLRGGAKDVMGHPWFAGVDWRSLERKEIGAPIVPRVASMGDSQNFQRYPPPRPQDLPGVFGQTYNTSNDPCGELFSDFSFPGGGSERGSASESTEVLSRD

SEQ ID NO: 47038 - protein, 406 aa, Streptococcus pneumoniae
MQTQEKHSQAAVLGLQHLLAMYSGSILVPIMIATALGYSAEQLTYLISTDIFMCGVATFLQLQLNKYFGIGLPVVLGVAFQSVAPLIMIGQSHGSGAMFGALIASGIYVVLVSGIFSKVANLFPSIVTGSVITTIGLTLIPVAIGNMGNNVPEPTGQSLLLAAITVLIILLINIFTKGFIKSISILIGLVVGTAIAATMGLVDFSPVAVAPLVHVPTPLYFGMPTFEISSIVMMCIIATVSMVESTGVYLALSDITKDPLDSTRLRNGYRAEGLAVLLGGIFNTFPYTGFSQNVGLVKLSGIKKRLPIYYAAGFLVLLGLLPKFGALAQIIPSSVLGGAMLVMFGFVSIQGMQILARVDFANNEHNFLIAAVSIAAGVGLNNSNLFVSMPTAFQMFFSNGIVVASL

SEQ ID NO: 47039 - protein, 248 aa, Bradyrhizobium japonicum USDA 110
MVLLEGKVAVITGAGSGIGAAIARLFAVEGAKVLLGDLAEGGAALAAGLAADGHAAGFQHVDVTDEASVAELMQAAVTLFGRLDILVANAGIPERKSPIHELDLVDWRRVIDVDLTGVAICNKFAAGIMRATGGGAIVNMASILAHVGQENSNAYSAAKAAVVNLTRSVALTYALQGIRANCVSPGYVDTPLLAKLPEATRQAMLVRQPIGRLARPGEIAEVVAFLASDKASIITGACVNADGGYTAI

SEQ ID NO: 47040 - protein, 486 aa, Burkholderia pseudomallei K96243
MSSSISIAPAVVWFRDDLRVSDHPALMRAAESGRPVIGVYVFDERAGGRPLGGAARWWLHGSLRALGAALAALGGTLALLRGDEHDTIVSFAAALGAGAVYWSRRYALAARAVDNAVQTALDAQGIAVETFNASLLFEPGDLVNADGRPYQVFSAYWRAAMRRGVPAPPLGAPRRLNGGALPAALARQCVALDALGLEPTGPDWAGGLRDAWRFGEDAAHRRLRAFVDSRLGGYAAERDRPGIASTSRLSPYVRFGNLSARQLWHAAADAYAHGAATQADLDKFLSELGWREFGWTQLHHFPDLPRRNLRHTLDGMPWRDDPAALAAWRRGATGYPFVDAGMRELWATGWMHNRVRMVCASFLVKHLLIDWRAGEAWFWDTLVDADAASNAANWQWVAGCGADAAPYFRIFNPVAQGRKFDPDGAYVRRWVPELAGLPPATIHEPWAAPGAQLAAAGVRLGETYPLPIVAHDAARRRALDAFGAIR

SEQ ID NO: 47041 - protein, 451 aa, GIBBERELLA ZEAE PH-1
MSYQGYGAPYGQPPPPQGYGHPPPQQPYGGYQQPPPGQYPPQQGGYQQPQGYYPPQGGPPPQQPYGGYQQQPPPQHYGAPPGPPQGHYGGPPPQQQPYGHHSPAPPGPPPGQYGAPPPQQYGAPLVQPTPPSLGYGPPQIIQWNGEPDADGLRKSMKGFGTDEKALIAILSNKDPLQIDAIRQAYERKHRRNLIADIQSETSSWFEKALVSLARGPLLSDVHALHDAMSGPGTKEVVLNDVLLGRSNADLKAIKSAYYHTFHDKLEDVVKGDLSMKTERHFMIVLGATRAEDSAPVDPRQVDDDVMQIYKATEGKMGTDEILVCSIMSTRNDNQIRAIAHTYKQKFNKDLERVIKSEFSGHMEDALLFQLRNATDKYMHAAKLLEDSMAGMGTKDHLLVSRTIRYHWDRNTLNNVKGAYQQRYGKSLGKRIYGETSGDYRKTLLAAIGEPY

SEQ ID NO: 47042 - protein, 1054 aa, Saccharomyces cerevisiae
MTIIVASLFLPYTPQFEADVTNSDTAKLVESSMIKVDCNNQELSNNKQERSSSVTSASSHYIGLPQEAQINGEPLQRANVGSPATGVNYHNEMEMLSSEQFLEELTANATHAANSGIPPANNPVSSGSTAQRPSVEEFFSAPSARVCSPSQEASASSISASRSSAHHNDLSSSLMKNPNLSFDSHPPRVRSSSKSAVITPVSKSVPDVDPAVVDVAKVREEFQQQASLPSMKRVSGSTAGDSSIASSSSNLRYSQQFQDNFIEDTDSEDDIDSDLETDATKKYNVPKFGGYSNNAKLRASLMRNSYELFKHLPWTIVDSDKGNGSLKNAVNIAVAEKTVKEPVSWVGTMGIPTDELPHEVCHKISKKLEQDFSSFPVVTDDITFKGAYKNYAKQILWPTLHYQIPDNPNSKAFEDHSWDYYQKVNQKFSDRIVSVYKPGDTIWIHDYHLMLVPQMVREKLPKAKIGFFLHVSFPSSEVFRCLANRERILEGIIGANFVGFQTKEYKRHFLQTCNRLLAADVSNDEVKYHCNIVSVMYAPIGIDYYHLTSQLRNGSVLEWRQLIKERWRNKKLIVCRDQFDRIRGLQKKMLAYERFLIENPEYIEKVVLIQICIGKSSDPEYERQIMVVVDRINSLSSNISISQPVVFLHQDLDFAQYLALNCEADVFLVDALREGMNLTCHEFIVSSFEKNAPLLLSEFTGSSSVLKEGAILINPWDINHVAQSIKRSLEMSPEEKRRRWKKLFKSVIEHDSDNWITKCFEYINNAWESNQETSTVFNLAPEKFCADYKASKKHLFIFKISEPPTSRMLSLLSELSSNNIVYVLSSFTKNTFESLYNGVLNIGLIAENGAYVRVNGSWYNIVEELDWMKEVAKIFDEKVERLPGSYYKIADSMIRFHTENADDQDRVPTVIGEAITHINTLFDDRDIHAYVHKDIVFVQQTGLALAAAEFLMKFYNSGVSPTDNSRISLSRTSSSMSVGNNKKHFQNQVDFVCVSGSTSPIIEPLFKLVKQEVEKNNLKFGYTILYGSSRSTYAKEHINGVNELFTILHDLTAA

SEQ ID NO: 47043 - protein, 403 aa, Oryza sativa
MASVDPSRSFVRDVKRVIIKVGTAVVSRQDGRLALGRVGALCEQVPNQRKVAMQVKELNSLGYEVILVTSGAVGVGRQRLRYRKLVNSSFADLQKPQMELDGKACAAVGQSGLMALYDMLFNQLDVSSSQLLVTDSDFENPKFREQLTETVESLLDLKVIPIFNENDAISTRKAPYEDSSGIFWDNDSLAGLLALELKADLLILLSDVDGLYSGPPSRGGMTAKVKAAVLASNSGTPVVITSGFENRSILKVLHGEKIGTLFHKNANLWESSKDVSTREMAVAARDCSRHLQNLSSEERKKILLDVADALEANEDLIRSENEADVAAAQVAGYEKPLVARLTIKPGKIASLAKSIRTLANMEDPINQILKKTEVADDLVLEKTSCPLGVLLIVFESRPDALVQ

SEQ ID NO: 47044 - protein, 121 aa, Glycine max
VIHPIHDQTFYLTVEHKRKLKEEYGIEPWTFIQKVGDAVFVPAGCPHQVRNLKSCIKVALDFVSPENVGECFRLTEEFRTLPISHASSEDKLEVKKMTIYAMQDVIGKLEEARSGKTKVPE

SEQ ID NO: 47045 - protein, 181 aa, Zea mays
  misc_feature (169)..(169): Xaa can be any naturally occurring amino acid
  unsure (1)..(181): unsure at all Xaa locations
MVRGKTQMKRIENPASRQVTFSKRRNGLLKKAFELSVLCDAEVALVVFSPRGKLYEFASGSAQKTIERYRTYTKDNVSNKTAHQDIEQVKADAEGLAKKLEALEAYKRKLLGERLEECSFEELHSLEVKLEKSLHCIRGRKCKKQPPPPPPMLMAPPPPPAPAAIDHTXPEDVGMDVETEL

SEQ ID NO: 47046 - protein, 359 aa, ASPERGILLUS NIDULANS FGSC A4
MSRTTVLLIGAAGETGGSIAAGLLEHPTFEIHALIRPRSAQKPAVLALQDKGVHIRKCDLKSSEEELEKALSDIDVVISCVGSAEQQDQIPIANAAKKAGVKRFIPCGFITVAPPGGIMWLRDEKEAVYNHIKQLHLPYTIIDVGWWYQLAYPRLESGKLDYAMTTSNNEIVGDGNTPLALTDLRDIGRYVARIITDDRTLNKMVFAYNTVLTQNEIFGLLEEISGEQITRNYISEELVQNRVLAARQSSETYPFDPVKFIPRYLAEYQLSWGIRGDNNPEYAKYLGYLLAKDLYPEFQPIDFKDYLIEVFQGTAKGIYTDRTISKAQQRMFPRSESTDSLQGRFFPRTESSDSLYMSR

SEQ ID NO: 47047 - protein, 155 aa, Wolbachia endosymbiont of Drosophila ananassae
SLVLVFVELIKGFVITLKYMFKPKVTLRYPMEKGPLSPRFRGEHALRRYPNGEERCIACKLCEVICPAQAIVIEAEEREDGSRRTTRYDIDMTKCIYCGLCQEACPVDAIVEGPNFEFATETREELMYNKEKLLRNGEVWEDAIALRLKKNRPYY

SEQ ID NO: 47048 - protein, 545 aa, Bradyrhizobium sp. BTAi1
MPALAHVLLAALRDHGAREIFGIPGDFVLPLFKVIEESRILPAVTLSHEPAVGFAADAAARYHGGLGVAVVTYGAGAFNLVNSVAGAYAERSPVVVIAGAPGARERVSGFLLHHQARTVDTQLAVFKEITCDQAVLSDPATAPAQIARVLRSAKEMSLPVYLEFPRDMVDVEAEPVVPLPPRRADQDALGECVEEILGRIARAERPVIVVDVEIRRYGVEARIAALARKLGLPLVTTFMGRGLLDQADDVVAGTYLGAAGNPAITALVEDADLVLMLGVILSDTNFALSNRAPDPRRMILAASCEVQIGHHVYRDMPLGDLIDALDDRATPRAAPADRVRQRSAYPRGLVADSNPIAPSDIATAINDMFDRHGRMPMTADIGDCLFTAMEIDNTALAAPGYYAGMGFGVPAGIGVAATGLRPLILVGDGAFQMTGWELGNCRRYGLDPIVVLFNNCSWEMLRVFQPESRFNDLDDWHYADIAKSIGGVGERVTTRAELVAALERAVERRGQFSLVEVMLPRGKTSDTLARFVAGFKSARERMAGG

SEQ ID NO: 47049 - protein, 548 aa, Lentinula edodes
MFLINVVFGFWLLCVPTSLRLVSGVEIVKSHPRDKIWHEKIDHHDQLFIVNKDIAPDGFQRSTVLAGRTPQDASFPGPLITGRKGDRFTINVTDLLTDPTMDRSTSIHWHGLFQKTTNYADGVAFVSQCPIATNHSFLYDFGVPDQAGTFWYHSHLSVQYGDGLRGPIVIYDPEDPHQDLYDVDDESTIITIADWFHLTSLQLLAALVVPNADATLINGNGRYVGGPDTPLTVINVEHGKRYRFRLIDMSFDAFHGFSIDNHNLTIIEVDGINTLPHTVNFIEIYPAQRYSFVLNANRPISNYRIRALSNTGVGAHNFTNGVNSAILRYVGAPEEEPQTSQPLSSNVMIFREGDLHPLENPGAPGNPYPGGADLVLNFTLGFDAEMVLFSMNGVVFESPTVPVLLQILSGAHHAQDLLPKGGVHTLPPNKVIEINFFGGDAPAGPHPFHLHGHAFDVVRTSDSSEYNFKNPVRRDTTLVAMKNQTTIRFVTDNAGPWFLHCHIDLHLSLGLAVVLAEDTRDTKKDDMIPADWKGLCPIYNSLTPSQLP

SEQ ID NO: 47050 - protein, 851 aa, Bradyrhizobium sp. BTAi1
MMDKKKRVLGAPAAIALILICIIAGSNLFFLTNLRENALLHAEEDLSRHSLTLAENADRSVKSVDLVLSSVRDYLVRGGAIDAATYGKVAADYQTHLLLKEKIAGLPQIDAVTLIDAQGRLLNFSRYWPIPDVNISDRDYFKALKGDSALRSYVSTPVQNRGDGTWNIYFARRLDDGKGEFMGLLLGAMSVPYLENFFGSTALGLDASVSLIREDGILLAHFPPTSEIGKSTSGFGQRALAAGGVLRELSGRTGEMRLRAAKMLPSYPAMIVVSVPEQHVLKAWRAMATLLVIMSLVSATAVLAAAVLISRLWERHEHLIDAAEAANAAKSTFVAMMSHEIRTPMNAVLGLATTLLETNLDPEQRRSVVAIHNAGDNLLEILNDILDFSKLESGQLSLEDIAFSAEALVHNTLSIIGPRASAKDLKLRSVNDPAVPPALVGDAGRIRQILLNLVSNAVKFTAAGEVVITTRCLAKDDAKATVEWTVTDTGIGIAADKIGSLFANFVQADNSISRRFGGSGLGLAICKRLTEQMGGEIDVTSTLGRGSTFSFRLTLPIAEAVAVPEQNDDSIYAALQSRIAAYGRPLRVLVVDDNPTNRLVATKMLKDFDIQTDTACDGAEAVTAASRFNYDLILMDVRMPEMDGFQATRTIRARGERRSNVPIIAFTANAFMEDIRACREAGMNDFVVKPARKKALVEAILRVLPARTLAIETIASDAPPLAPVEQDDMPAEFSAEAEIPAEPALDREAFAELVGEIGDDAAQEIRNVFFSETDARLKLFRKLSLDSERIKIGREAHSLKSAAGTFGYRRLATYALALEKSAPRLSPREYSELLDNIDAAYEAARAQELQY

SEQ ID NO: 47051 - protein, 271 aa, Burkholderia multivorans
MSRIQQTFAALAQQGRKGLIPFITAGDPDPAKTVEFMHALAAGGADVIELGVPFSDPMADGPVIQRSSERALARGVTLKHVLADVKRFRETNQTTPVVLMGYANPIERHGVDAFAADARAAGVDGVLVVDYPPEEAAVFAEKMRAAGIDPIFLLAPTSTDARIAEVGKIASGYVYYVSLKGVTGAGNLDVSSIAGKIPAIKSRVPVPVGVGFGIRDAETARAVAEVSDAVVIGSRLVQLLESAAPEGAVAALQAFIAELRAALDGAANTAR

SEQ ID NO: 47052 - protein, 531 aa, Novosphingobium aromaticivorans DSM 12444
MSRSTRGGRPDRLTLPATHIRRLLGWGRTLARHGALRGIENDPNTPSPVRTLCRIARLGTIQPRDPDYAGAFRAIGPAAIKLGQTLATRPDLVGEDAAHNLLALQDNLPPVDYRLIRAEIERTFEKPLEALFAQFDPEPIGAASIAQVHRAVTTEGHKVAVKVLRPGVRDKLARDIDTYEWAAAHLEAFGGEAERLRPRLVIANFKRWTVRELDLRREAASASELADVMKAHAGYRVPAIDWDRTNGRVMTLDWIDGIKISDTAALEAAGHDRKALASRLVLAFLTQAISGGFFHADMHQGNLFVQPDGTIAAIDFGIMGRIDRRARQWLAEILYGLTTGNYRRVAEIHFEAQYVPSYHSVDEFATALRAVGEPMRGKPVSELSVGQMLDGLFAITRDFDMQTQPHLLLLQKTMVMVEGIATQLDPTINMWDVSAPFVRNWIRDELGPEAAIAERIREDTQTLLRIPDLIRRIEDRFPAKGGAPEAPPLPRIELMWQRKRRKRGSGLSGQFLAFLAGGALVIGTHALGWWG

SEQ ID NO: 47053 - protein, 361 aa, Triticum aestivum
  misc_feature (170)..(170): Xaa can be any naturally occurring amino acid
  unsure (1)..(361): unsure at all Xaa locations
VLSNSANFDACLSNACCNRQGTVNNETLGFFIGRVYLFLTQLGIDKDRLRFRQHLPNEMAHYAADCWDAEIECSYGWIECVGIADRSAYDLRAHSDKSGVPLEAHEKFAEPREVEKLVITPSKKELGLAFKGSQKMVLAAREAMGETEALGMKAALESKGDVEFKVCTLXGKDVTIKRNMVSINMEKKKEHQRKFTPSVIEPSFGIGRIIYCLFEHCFYQRTGKTDDEQLNVFRFPPLVAPIKCTVFPLVKVEKFDVVAKKISKALTTAGISHIIDITGTSIGKRYARTDEIGVPLAITVDSTTSVTVRDRDSKDQIRVEVDEVALVVKEVTDGQSTWADIMWRYPAHTALATDEEEASET

SEQ ID NO: 47054 - protein, 259 aa, Enterococcus faecalis V583
MYGELHGKVAVVTGAATGLGLFITLRYILEGMNVVADYVGELPKEFEDVQAKHADRVKFVKADVSNEEDIKALAETALKEFGHVDIWVNNAGVEASFPTIDMPLKEWQRVIDVNLNGVFLGSREALRIFRDQKIKGSIINMSSVHQRIPWPTFAHYAASKGATEMFTKTIALEYAEYGIRANCIAPGAINTPINAEKFSDPEQLKQTTSMVPMGIIGKPNQVAAAAAWLASDESSYVTGTTLFVDGGMSLYPSFQHGAG

SEQ ID NO: 47055 - protein, 168 aa, Avena agadiriana
VMASSATSVAPFQGLKSTAGLPVSRRSNAGLGSVSNGGRIRCMQVWPIEGIKKFETLSYLPPLSEEALLKQIDFLIRSKWVPCLEFSKVGFIFREYGSTPGYYDGRYWTMWKLPMFGCTDASQVIKEVEEVKKEYPDAYVRIIGFDNIRQVQCVSFIAFKPPGCEESG

SEQ ID NO: 47056 - protein, 324 aa, Thermoanaerobacter tengcongensis MB4
MFKVFVTRAIPEEGLELLRKYCEVEVSPYDRMLTKEELLEKIKDKDAVITQLTDKVDKEFFEAAKNVKIVANYAVGFDNIDLEEATKRGVYITNTPDVLTNATAELAWALLFAAARRVVEADKFMRAGKFQGWAPMLFLGKGVTGKTLGVIGAGRIGQAFAKMAKGFEMKILYNARTPKPEFEKETGAKYVDLDTLLKESDFVSIHLPLTPETRHLIGERELKLMKNSAILINTGRGPVVDEKALVKALKEKWIYAAGLDVYEREPEFEKELAELDNVVMLPHIGSATEEARRDMSVLVAQNIIDVIEGRVPRTLVNKDILNKR

SEQ ID NO: 47057 - protein, 444 aa, Burkholderia sp. 383
MTTVFHRAPRATLPVAVAGDGIEIIDSTGKRYIDACGGAAVSCLGHSNQRVIDAIKRQAQQLAYAHTSFFTTDVAEELADRLVAAAPAGLEHVYFVSGGSEAVEAALKLARQYFVEKGEPQRRHFIARRQSYHGNTLGALAIGGNAWRREPFLPLLIEAHHVSPCFAYRDQQAGETDEAYAQRLADELEQKIVELGADNVAAFVAETVVGATAGAVPPVRTYLKKIRAVCDKYGVLLILDEIMSGMGRTGYLYACDEDGVAPDLLTIAKGLGAGYQPIGATLVSDRIYRTIVDGSGFFQHGHTYLGHATACAAALEVQRVIAEEKLLDNVKARGEQLRASLRDHYGAHPHIGDVRGRGLFVGVELVRDRDSKATFDPALKLHAAVKREAMQRGLMVYPMGGTIDGVHGDHILVAPPFICTAQQIDTIVERLSGAIGAALASAGA

SEQ ID NO: 47058 - protein, 363 aa, Arabidopsis thaliana
MGSTAETQLTPVQVTDDEAALFAMQLASASVLPMALKSALELDLLEIMAKNGSPMSPTEIASKLPTKNPEAPVMLDRILRLLTSYSVLTCSNRKLSGDGVERIYGLGPVCKYLTKNEDGVSIAALCLMNQDKVLMESWYHLKDAILDGGIPFNKAYGMSAFEYHGTDPRFNKVFNNGMSNHSTITMKKILETYKGFEGLTSLVDVGGGIGATLKMIVSKYPNLKGINFNLPHVIEDAPSHPGIEHVGGDMFVSVPKGDAIFMKWICHDWSDEHCVKFLKNCYESLPEDGKVILAECILPETPDSSLSTKQVVHVDCIMLAHNPGGKERTEKEFEALAKASGFKGIKVVCDAFGVNLIELLKKL

SEQ ID NO: 47059 - protein, 464 aa, Escherichia coli K12
MVRSQLSRADAPCLLTSLRRQLMAMFGFPHWQLKSTSTESGVVAPDERLPFAQTAVMGVQHAVAMFGATVLMPILMGLDPNLSILMSGIGTLLFFFITGGRVPSYLGSSAAFVGVVIAATGFNGQGINPNISIALGGIIACGLVYTVIGLVVMKIGTRWIERLMPPVVTGAVVMAIGLNLAPIAVKSVSASAFDSWMAVMTVLCIGLVAVFTRGMIQRLLILVGLIVACLLYGVMTNVLGLGKAVDFTLVSHAAWFGLPHFSTPAFNGQAMMLIAPVAVILVAENLGHLKAVAGMTGRNMDPYMGRAFVGDGLATMLSGSVGGSGVTTYAENIGVMAVTKVYSTLVFVAAAVIAMLLGFSPKFGALIHTIPAAVIGGASIVVFGLIAVAGARIWVQNRVDLSQNGNLIMVAVTLVLGAGDFALTLGGFTLGGIGTATFGAILLNALLSRKLVDVPPPEVVHQEP

SEQ ID NO: 47060 - protein, 716 aa, Arabidopsis thaliana
MNFRQEKFVRFQDWKSDKTSSDVEYSGKNEIQTGIFQRTISSISDKFYRSFESSSARIKLFKRSYKSYSFKEAVSKGIGSTHKILDPQGPFLQRWNKIFVLACIIAVSLDPLFFYVPIIDDAKKCLGIDKKMEITASVLRSFTDVFYVLHIIFQFRTGFIAPSSRVFGRGVLVEDKREIAKRYLSSHFIIDILAVLPLPQMVILIIIPHMRGSSSLNTKNMLKFIVFFQYIPRFIRIYPLYKEVTRTSGILTETAWAGAAFNLFLYMLASHVFGAFWYLFSIERETVCWKQACERNNPPCISKLLYCDPETAGGNAFLNESCPIQTPNTTLFDFGIFLDALQSGVVESQDFPQKFFYCFWWGLQNLSSLGQNLKTSTYIWEICFAVFISIAGLVLFSFLIGNMQTYLQSTTTRLEEMRVKRRDAEQWMSHRLLPENLRKRIRRYEQYKWQETRGVDEENLLSNLPKDLRRDIKRHLCLALLMRVPMFEKMDEQLLDALCDRLQPVLYTEESYIVREGDPVDEMLFIMRGKLLTITTNGGRTGFLNSEYLGAGDFCGEELLTWALDPHSSSNLPISTRTVRALMEVEAFALKADDLKFVASQFRRLHSKQLRHTFRYYSQQWKTWAACFIQAAWRRYIKKKLEESLKEEENRLQDALAKEACGSSPSLGATIYASRFAANILRTIRRSGSVRKPRMPERMPPMLLQKPAEPDFNSDD

SEQ ID NO: 47061 - protein, 563 aa, Xylella fastidiosa Ann-1
MCSIFGIFNLQPSDNLQILRHQALECSQRQRHRGPDWSGVYVDVGAILVHERLAIVDPAGGAQPLFSEDGTLALAVNGEIYNHAVLKGTLQQPYAFQTHSDCEVINALYREETPTSFLNRLNGIFAFALWDKTTGRGLIARDPMGVVPLYWGHDQDGRLRVASEMKALVEHCPDVAQFPPGHWYDTTTGTLVKYYERPWKNYSAVEGVQVSLQELREAFERAVHRQLMTDVPYGVLLSGGLDSSLVAAVAARYARHRIETNDQSEAWWPRLHSFAIGLKDSPDLSAANVAAEALNTVHHRFEYTFQEGLDVLPEVIRHIETYDVTTIRASTPMFLLARRIKAMGVKMVLSGEGSDEIFGGYLYFHKAPNAREFHEELVRKLNALYYYDCLRANKAMMAWGVEPRVPFLDREFLDVAMRMDAQHKMVDKTSNGPQRMEKGILRAAFDGYLPPSILWRQKEQFSDGVGYGWIDGLKAHAETQVSDHALATAETRFQVNPPQTKEAYYYRSIFERFFPSPAAAETVPGGKSIACSSPAAIAWDASFATMADPSGRAVSGVHQQALL

SEQ ID NO: 47062 - protein, 453 aa, Pseudomonas fluorescens Pf-5
MEITTMNQPQSAVGNCLDVQSFINAQPLSRYQWRVVILCFLIVFLDGLDTAAMGFIAPALSQDWGIDRASLGPVMSAALIGMVFGALGSGPLADRFGRKVVLVGAVLLFGAFSLASAYSTNVDQLLVLRFLTGLGLGAGMPNATTLLSEYTPERHKSLLVTSMFCGFNLGMAGGGFISAKLIPAFGWHSLLLIGGVLPLILALVLVLWLPESARYLVVRNRGTDKVRKTLAPIAPAIVGEAGSFSVPEQKTVKARNVFAVIFSGTYSVGTLLLWLTYFMGLVIVYLLTSWLPTLMRDSGASMEQAAFIGALFQFGGVLSAVAVGWAMDRFNPHKVIGCFYLLAGVFAYAVGQSLGNITLLATLVLIAGMCVNGAQSAMPSLAARFYPTQGRATGVSWMLGIGRFGAILGAWMGATLLGLGWNFEQVLTALVIPAALATTAVVIKGMVSHADAT

SEQ ID NO: 47063 - protein, 385 aa, Cryptococcus neoformans var. neoformans B-3501A
MEDEQVPQLLVSTPEAGTSSLPPARFERPQVPITLLTGYLGAGKSTLLQYILTANHGYRIAVCMNDFGDTTDIESKSLTMSDPDSSTTTSEFLSLPNGCLCCSVKDMGIAAIEDMVMKAPGGVDWVVVELTGLADPTPIVKSFWSNEEMGDLFLDGVVCVVDSRNVLKQLDGHKDYDEITECQKQVASADVILLNKIDLVSEEHLSKVERAVRELNATLRIHYTRNSQAPISELFHIRAFTNSVTPAIKEAPAALDDGHQHSSDCGHPHENGELLPHRNSRINTTLIPIPPLNLLQYNRINTFLESVLWSATFPASSKVAPEILRTKGYITLQDDRAFVLQGVADLFELKEVDRALDPEMKGKIVFIGKGVGEDLKRELQVWVGL

SEQ ID NO: 47064 - protein, 208 aa, Arabidopsis thaliana
PVFSGSTHASASEFGMDPPRMGHALPPGRETFDQKMEVRQAIEAAGIPYTYVVGACFAAYFAGNLSQMVTLLPPKEKVNIYGDGNVKVVFADEDDIAKYTAKTLNDPRTLNKTVNIRPPDNVLTQLELVQIWEKLTGKELEKTNIAAQDFLANIEQMEIPHQAGIGHFYHIFYEGCLTDHEVGEDEEASSLYPDVKYKRMDDYLRMFL

SEQ ID NO: 47065 - protein, 254 aa, Oryza sativa (indica cultivar-group)
MEAGYPGAAANGAAADGNGGAQQAAAAPAIREQDRLMPIANVIRIMRRVLPAHAKISDDAKETIQECVSEYISFITGEANERCQREQRKTITAEDVLWAMSRLGFDDYVEPLGVYLHRYREFEGESRGVGVGVGAARGDHHHGHVGGMLKSRAQGSMVTHHDMQMHAAMYGGGAVPPPPHPPPHHHAFHQLMPPHHGQYAPPYDMYGGEHGMAAYYGGMYAPGSGGDGSGSSGSGGAGTPQTVNFEHQHPFGYK

SEQ ID NO: 47066 - protein, 517 aa, Saccharomyces cerevisiae
MQVTTRFISAIVSFCLFASFTLAENSARATPGSDLLVLTEKKFKSFIESHPLVLVEFFAPWCLHSQILRPHLEEAASILKEHNVPVVQIDCEANSMVCLQQTINTYPTLKIFKNGRIFDGQVYRGVKITDEITQYMIQLYEASVIYLNSEDEIQPYLENATLPVVINRGLTGLNETYQEVALDLAEDYVFLSLLDSEDKSLSIHLPNTTEPILFDGNVDSLVGNSVALTQWLKVVILPYFTDIEPDLFPKYISSNLPLAYFFYTSEEELEDYTDLFTQLGKENRGQINFIALNSTMFPHHVRFLNMREQFPLFAIHNMINNLKYGLPQLPEEEYAKLEKPQPLDRDMIVQLVKDYREGTAKPIGKSEEIPKEQKSNVYKIVGKTHDDIVHDDDKDVLVKYYATWCIHSKRFAPIYEEIANVLASDESVRDKILIAEVDSGANDILSFPVTGYPTIALYPAGNNSKPIIFNKIRNLEDVFEFIKESGTHHIDGQAIYDKLHQAKDSEVSTEDTVHDEL

SEQ ID NO: 47067 - protein, 266 aa, Zea mays subsp. mexicana
PSADPSTDSAREPKRMRTGGGSTSSSSSSSSSMDGGRTRSSVVEAAPPATQASAAANGPAVPVVVVDTQEAGIRLVHALLACAEAVQQENFSAAEALVKQIPMLASSQGGAMRKVAAYFGEALARRVYRFRPPPDSSLLDAAFADLLHAHFYESCPYLKFAHFTANQAILEAFAGCRRVHVVDFGIKQGMQWPALLQALALRPGGPPSFRLTGVGPPQPDETDALQQVGWKLAQFAHTIRVDFQYRGLVAATLADLEPFMLQPEGD

SEQ ID NO: 47068 - protein, 153 aa, Streptococcus pyogenes
PMAYVLWNHFMNINTKTSRNWSNRDRFILSAGHGSAMLYSLLHLAGYDLSVEDLKNFRQWGSKTPGHPEVNHTDGVEATTGPLGQGIANAVGMAMAEAHLAAKFNKPGFDIVDHYTFALNGDGDLMEGVSQEAASMAGHLKLGKLVLLYDSND

SEQ ID NO: 47069 - protein, 378 aa, Anabaena variabilis ATCC 29413
MNIAELGTMEIIESVVEHEEHSLDALELIIEEEPPITDNLDSEERDSGDEMAAARPSGYNKTEHDDAVGAFFKEMARYPLLKPDEEVELARRVRFLEEVRDLQADLQLQLGLHPTKAQVAAQLEITEKQLENRLYQGRVAKRKMIRSNLRLVVSIAKRYLNRGVPFLDLIQEGAMGLNRATEKFDPDKGYKFSTYAYWWIRQAITRAIANDARTIRLPIHIVEKLNKLKKAQRELKQKFSRNPSEAEMAEALEISVPQLRQLQQLRRQALSLNHRVGKEEDTELMDLLEDEDNLSPEAKMNENMMRQEIWEVLGDVLTPREKDVISLRYGLTTSEPCTLEEVGNMFNLSRERVRQIQSKAMRKLRRPHIAKRLKGWLI

SEQ ID NO: 47070 - protein, 406 aa, Streptococcus pneumoniae
MQTQEKHSQAAVLGLQHLLAMYSGSILVPIMIATALGYSAEQLTYLISTDIFMCGVATFLQLQLNKYFGIGLPVVLGVAFQSVAPLIMIGQSHGSGAMFGALIASGIYVVLVSGIFSKVANLFPSIVTGSVITTIGLTLIPVAIGNMGNNVPEPTGQSLLLAAITVLIILLINIFTKGFIKSISILIGLVVGTAIAATMGLVDFSPVAVAPLVHVPIPLYFGMPTFEISSIVMMCIIATVSMVESTGVYLALSDITKDPIDSTRLRNGYRAEGLAVLLGGIFNTFPYTGFSQNVGLVKLSGIKKRLPIYYAAGFLLLLGLLPKFGALAQIIPSSVLGGAMLVMFGFVSIQGMQILARVDFANNEHNFLIAAVSIAAGVGLNNSNLFVSMPTAFQMFFSNGIVVASL

SEQ ID NO: 47071 - protein, 374 aa, Anabaena variabilis ATCC 29413
MVSGLQANQGKIGIAIAGTGFGQKVHIPAFQAHHRTDIVAIYHRDIHKAKAIAEANNIPHAFDTIVDIVNLPEVQAVSIATPPFLHYEMGKTVLQAGKHLLLEKPVTLNVAEAQELYQLAQKQGVIATVDFEFRFVPAWQLFAELLSSGYVGTPRLIRIDWLGSSRADTSRPWNWYSSKEKGGGALGSLGSHAFDYIYWLFGSVRRLNAHLTTAIPQRVDPASGELKAVETDDTCLLSLELANGTPCQVTISAAVHASRTHWIEVYGDRGTLVIGSENQKDYIHGFRVWGSQPGQPLQEIEIPPKLLFPQHYTDGRICAFLRVVDQWVQGIDQQKPVVPSLKEGIYSQLLMDLSHQSHTTGSWVDVPNVEDYLI

SEQ ID NO: 47072 - protein, 406 aa, Streptococcus pneumoniae
MQTQEKHSQAAVLGLQHLLAMYSGSILVPIMIATALGYSAEQLTYLISTDIFMCGVATFLQLQLNKYFGIGLPVVLGVAFQSVAPLIMIGQSHGSGAMFGALIASGIYVVLVSGIFSKVANLFPSIVTGSVITTIGLTLIPVAIGNMGNNVPEPTGQSLLLAAITVLIILLINIFTKGFIKSISILIGLVFGTAIAATMGLVDFSPVAVAPLVHVPIPLYFGMPTFEISSIVMMCIIATVSMVESTGVYLALSDITKDPIDSTRLRNGYRAEGLAVLLGGIFNTFPYTGFSQNVGLVKLSGIKKRLPIYYAAGFLVLLGLLPKFGALAQIIPSSVLGGAMLVMFGFVSIQGMQILARVDFANNEHNFLIAAVSIAAGVGLNNSNLFVSMPTAFQMFFSNGIVVASL

SEQ ID NO: 47073 - protein, 478 aa, Pseudomonas syringae pv. phaseolicola 1448A
MSQKFDVVVIGAGPGGYVAAIKAAQLGLKTACIEKYQDKEGKLALGGTCLNVGCIPSKALLDSSWKFYEAKNGFSVHGISTSEVNIDVPAMIGRKSTIVKGLTGGVASLFKANGVTTLQGHGKLLAGKKVELTAADGTVEIIEADHVILASGSRPIDIPPAPVDQKVIVDSTGALEFQQVPQRLGVIGAGVIGLELGSVWARLGAQVTVLEALDKFIPAADEAVSKEALKTFTKQGLDIKLGARVTGSKVEGEEVVVSYTDAAGEQSITFDRLIVAVGRRPVTTDLLASDSGVDLDERGFIYVDDYCTTSVPGVYAIGDVVRGLMLAHKASEEGIMVVERIKGHKAQMNYNLIPSVIYTHPEIAWVGKTEQTLKAEGVEVNVGTFPFAASGRAMAANDTGGFVKIIADAKTDRVLGVHVIGPSAAELVQQGAIAMEFGSSAEDIGMMVFSHPTLSEALHEAALAVNGGAIHIQNRKKR

SEQ ID NO: 47074 - protein, 660 aa, Ustilago maydis 521
MAGIGVATGAALSSGINGSNDANATPSPWAASSSSSSSNITVGVLAIQGAFREHASHINRLNTLHPLHTIRSTLVRTPEQLADCDALIIPGGESTAISLGCERIGLLEPLRKWVRDGRPVWGTCAGMIMLAREASGGKKGGQQLIGGVDVRVGRNGFGSQIDSFETGLEIHGLDRPQELFNGVFIRAPVVDALLLPSDLEKVAVDQPTLVKRVDPNTLADSVRTPVTNTNAVPISATADLPANASEPALAKTTIADPALRIVVAPPLYDTSDPISSAQKRPPIEILATLPEPVTTPASPSNRPVSAHVAQRDPRMDVARRPDHDSQIVALRQGNILMTSFHPELTPDTRLHSLFVTKLVIPYKKQLQQHYIWLTGASHTFYLASSVQAPLGVCTAYAHCASKLSLDFGRKVNAKGSSNASATVQRSSQVLGLGSAVTRFDEGASTLLDAPISGTCTPVSYASPSPNPASHTHTHSHLHHSTTASNHDTSTPSSTTSIDLSNLASHPTYTALFPDPDLPIANISRIMKRSLPENAKIAKDAKECVQACVSELISFITSEASDKCAAEKRKTINGDDILYAMRVLGFDNYEEVLRVYLSRYRMDQESNPRQKKRAKTGTKIIDDDDDDDDEEDDDDAAEPDLTTRPHSLFHSPAFHHDSSNP

SEQ ID NO: 47075 - protein, 429 aa, Anabaena variabilis ATCC 29413
MVSMPTLPLEGASPAHICPFDQACSYLEAAAKELRLDQGTLEILSHPRKVVTVSIPVRLDNGDIRVLAGHRVQHSDILGPYKGGTRYHPAVTLREVSALAMLMTWKCALLGIPYGGAKGGIAINPQHYSVGELEKITRRYTSELIKDIGPAVDIPAPDVGTSAREMAWMMDTYSVNVGHAVPGVVTGKPISIGGSRGREMATGRGVMIIVREALADMGRTLEGVKVVIQGFGNVGGAAAELLYQAGAKILAVSTGAGGLFAADGLDIPALKAYAAENHRSIVGFPQAVAISNAELLTLPCDVLIPAALENQITEENVDQIQAQIVAEAANGPVTLEANRVLEGRGVTVLPDILANAGGVVVSYLEWVQGLSYLFWDEERVNREMEHLMVQAYHQVIKQSQMRQVPLRLAAYTLGVGRVAQALSDRGLYP

SEQ ID NO: 47076 - protein, 386 aa, Acidithiobacillus ferrooxidans
MAEPNFAPGLEGVAATQSSISNIDGAAGLLSYRGFAIADLAAHSSFEEVALLLLDGVLPGAADLERFDHGLRAHRQVKYNVREIMKFMPVTGHPMDMLHCAVASLGMFYPQQELSDAERGNTLHLDAMAMRIIARMPTIVAMWEQMRFGNDPISPRPDLSHAANFLYMLSGREPDPAHTKILDSCLILHAEHTINASTFSVLVTGSTLTNPYHVIGGAIGTLAGPLHGGANQKVVEMLEEISSVQQVGAYLDRKMANKEKIWGFGHRIYKTRDPRAVILKGMMEDMASHGNLRHSSLFEIAIEVERQATERLGAQGIHANVDFYSGVLYHEMGIKADLFTPIFAMARSAGWLAHWREQLADNRIFRPTQVYTGEQDRRYVPVAQRT

SEQ ID NO: 47077 - protein, 1084 aa, Ashbya gossypii ATCC 10895
MSSDIVNWDPQFKPVKGIYEDRLRQFIDNGGDYRDLNLPKFYDRQRKRIDSTRVKVQYYQVPYDRHKPPVAPEKRPPWEEVVRRDRAGEIEWKDVYLGQPFGPSWSTTWFKVELDIPESWSSSGEQLVFEWDCENEGIVIDGDTLLPKTAFSGNGERTEYLLPLGRSSVSFYIECGNNGMFGVGRNNNSINPPDDDRYFHLQKADLVWPNWQARALYIDFWMLGDAARELPDNSWQKHRARELGNLVMNMFDPEDVSTVDKCRKFLQKEFFDKYTDDPKVYQQGDPQVRANVYAMGNCHIDTAWLWPFAETKRKIVRSWTSQCTLMDEFPEYQFVASQGQQFKWLLEQHPRFFKEVLVPRVQQAQFFPIGGSWVENDTNIPNGESLCRQFFYGQRFFMKHFGLKSDIFWLPDTFGYSSQVPQICRISGITKFLTQKLSWNNINSFPHSTFNWSGIDGSMVLTHMPPGNTYTASSHFGDVLRSANQNKSNEHYGTGLMLYGYGDGGGGPTREMLNKMRRIRSMSNRNGNVVPKLEVGKSVNEFYDDIMQKTDNGNALATWTGELYFEFHRGTYTTQADVKRLMRLSEVKIHDLEWIATKVSLLAPNKYTYPVNDINALWEDILLCQFHDVLPGTCIEMVYKYEAIPMLNKVVQLADRFIERALEALNTGGESLVPIGTLQWDNMAAENADAQESVFYPASVSKDSETIILNNKKLQVTFEKNTGVIKSIKDLFHDLEFIDTKHGRNKIGANQFVLFDDQPLFWQAWDTELYSVNKYQYLQNVESVTVVQDCKDVCSVETRVSIAPGSTIISTVSLSSLTSETLDDAKVDIVTKVINWNQRNKFLKVEFPVSIFNDFASYETQYGITRRPTHYNTSWDVAKFEVCQHKFTDYSDYTKGVSVLNDSKYGFSTHGNLMRLSLLRSSKAPDENADMGTHKMRYAIYPHKGGLTTDTVRLGLEFNYSYSMAVTRAFARDFRDIIFITCDKNVILANLKRGEDDEALKSDYSMAPKPESSIVVRVYESLGGESVASLLTSLKVKKVLKVNSLELDTVESLAFKTPDESTHRKFEIPIKLRQFEIATYKIMF

SEQ ID NO: 47078 - protein, 438 aa, Streptomyces coelicolor A3(2)
MSELAYPYEAPASQALFDRAAAVTPGGVNSPVRAFRAVGGTPRFMVSGTGPYLTDADGREYVDLVCSWGPMILGHAHPEVIAAVQEAVARGTSFGTPAEGEVALAEAMVERVAPLEEVRLVSSGTEATMSAIRLARGFTRRTKVIKFAGCYHGHVDSLLAAAGSGVATFALPDTPGVTGAQASDTIVLPYNDLDAVHAAFAAHPGEIACVITEASPGNMGVVPPLPGFNQGLKDACAANGALFVSDEVMTGFRTSLAGWFGVEGVVPDLMTFGKVMGGGFPAAAFGGRADVMAHLAPAGPVYQAGTLSGNPVATAAGLAQLRLLDDAAYDTVDAVSAQIQALVTEALTKEGVAHTLQNASNMFSVFFTDRPVVNYEDAKAQESFRFTAFFHSLLANGVYLPPSSFESWFVSTAHDERAVQRIADALPAAARAAAEATA

SEQ ID NO: 47079 - protein, 239 aa, Thermotoga maritima
MKGFIAYIPAGFPDLETTRKILIALNELGITGVEIGVPFSDPVADGPVIQLAHSVALRNGVTIKKILEMLSEISVDYDLYLMSYLNPIVNYPEGKEKLLDELKKLGVKGLIIPDLPLREVKNVDIAYPIVPFVAPNTKDEEIDLINSVQAPFVYYISRYGVTGEREDLPFADHIKRVKERIKLPLFVGLGISRHEQVKKVWEIADGVIVGSALVRIMEENPKDEIPRKVVEKVKELLGK

SEQ ID NO: 47080 - protein, 168 aa, Avena strigosa
VMASSATSVAPFQGLKSTAGLPVSRRSNAGLGSVSNGGRIRCMQVWPIEGIKKFETLSYLPPLSEEALLKQIDFLIRSKWVPCLEFSKVGFIFREHGSTPGYYDGRYWTMWKLPMFGCTDASQVIKEVEEVKKKYPDAYVRIIGFVNIRQVQCVSFIAFKPPGCEESG

SEQ ID NO: 47081 - protein, 351 aa, Kineococcus radiotolerans SRS30216
MTTTAQGPIPTSMRASVLLEQGVIEMQERPVPTPGDGEVLVRVGSVGVCGSDVHYYKHGRIGDMVVTAPIVLGHEVSGTVVGVGRGVSEDRVGDRVALDPQVPCRQCRQCKTGRSNLCPFMEFYATPPFDGTFCDYVTAPADQAFTVPDSLSDESAALLEPLSVGLWAAHKADVGPGDQVLIAGAGPIGAMCAQAVRARGVTDVVVTDFVDSRRERITSFGASRSLHPVADAAEIAEIRADAFIDCSGATPAVVSGIRSTRGGGTVVLVGLGAEEMPLPVQLIATREINVTGVFRYVDTWPRGIALTTSGAVHLDDMVTARYPLEQVEDALNADSDPLSMKAVVVVNPSQD

SEQ ID NO: 47082 - protein, 274 aa, Clostridium acetobutylicum ATCC 824
MLDINSFTVLNNGVKMPWLGFGTYKIEYEESSVDYIKTALKVGYRHLDTAAVYGNEPIVGKAVKESGIPRNEIFITSKVWNNKHGYDKTLKAFEDTLKRLDTDYLDLYLIHWPKTLNKETWKALEKLYKDGRVRAIGVSNFKVHHLEEILEDCEIVPMVNQVEYHPQFPQTEVHEFCKKNKIQLESWGPLMQGKIFDIPLMKELSLKYGKTISQIALRWDLQMGVVTIPKSINENRIKENCDLYDFEISKEDMKKIESLNTGVRIGHDPDTITF

SEQ ID NO: 47083 - protein, 168 aa, Avena clauda
VMASSATTVAPFQGLKSTAGLPVSRRSASSLGNVSNGGRIRCMQVWPIEGIKKFETLSYLPPLSEEALLKQIDFLIRSKWVPCLEFSKVGFIFREHGSTPGYYDGRYWTMWKLPMFGCTDASQVIKEVEEVKKEYPDAYVRIIGFDNIRQVQCVSFIAFKPPGCEESG

SEQ ID NO: 47084 - protein, 167 aa, Pyrococcus furiosus DSM 3638
MVRRIRRWDIWDPFDLIREIQEEIDAMFDEFFSRPRLWTYRRWSEPAMYEERVGEVWREPFVDIFDNGDEFVITAELPGVRKEDIKVRVTEDTVYIEATVKREKELEREGAVRIERYFTGYRRAIRLPEEVIPEKAKAKYNNGVLEIRVPKKHPTKKESEGFEVKVE

SEQ ID NO: 47085 - protein, 168 aa, Avena sterilis subsp. ludoviciana
VMASSATSVAPFQGLKSTAGLPVSRRSNAGLGSVSNGGRIRCMQVWPIEGIKKFETLSYLPPLTEEALLKQIDFLIRSKWVPCLEFSKVGFIFREHGSTPGYYDGRYWTMWKLPMFGCTDASQVIKEVEEVKKEYPDAYVRIIGFDNIRQVQCVSFIAFKPPGCEESG

SEQ ID NO: 47086 - protein, 77 aa, Zea mays
  misc_feature (11)..(11): Xaa can be any naturally occurring amino acid
  unsure (1)..(77): unsure at all Xaa locations
MAHAYCCTFLXILLAIILPPFGVFLRFGCYRIEFCICVMLTILDYDPGIIYPMYVIVALDFDQHDSEYDTHDYSIWL

SEQ ID NO: 47087 - protein, 294 aa, Pyrococcus furiosus DSM 3638
MKLDVICMGNLNYDITFMLERFPEFHEKVNAKKVYTGLGGSAGNTATWLSFLGLRVGFIGAVGNDDFGRLHLEFFEKIGVDTRGIKVVDEPTGVAVMMVIGEDKRIVKYPGANRFKEVKENYLKLARHLHLSSNPLPLVEKAVNLAKNLGLTVSFDPGEMEVPKHIEEKIDILMMNEDEFKRKYGSLEKITELKSRIAIATLNGGGALVRDENGNVYEIRGLSAKAIDTTGGGDSFDAGFIYGYLNGWDVKDSAKLGMLLAYLTVQKVGARSAVIPLDEVKKIAKELGLDLPFQ

SEQ ID NO: 47088 - protein, 1201 aa, Burkholderia sp. 383
MGRAGSLDPVKKKHHQTLPEGFMYFDRRLWAMMAGLRWRVAAAVALGLLAMGVGILRFVFLGRVLALVFSGAPARSIGEAVVATAACVLLRAWLDHRRTVLAQHTAGRVQATLRARLFDRIAALGPAWFSGERTGGVMLAVVDGVEQLQTFFGTYLPQLVIAACAPVMIFAVLAWWDVPTAAILLVAALVTLALPQLVHRADKRAALARSKAFKAFGEEFLDAVQGLPTLKAFGQSTAFGAKLAAKARALSDSTFWVLALGLLTRLFTDLGTGLGAAAAIAVGAWRVRHGDMSLEALLIVLMAGSEIFRPLRDLRSVLHQGMIGQSAANAIHALLDADSHAPAADAPRVASLRPEIAFDAVSFAYPGRRADAHAALSFSVREGETVAIVGPSGAGKSTIVRLLLRQHDAQGGAIRIGGHDVRTLDAGQVREMIAVVAQDATLFDGSVADNLRLGRPDASDADMIAAARAANAHDFISALPDGYATRIGERGLMLSGGQRQRLAIARALLRDAPILLLDEALSSVDAENEALIQQALDRLTRGRTTLVLAHRLSSVIGADRILVLDQGQVVDEGTHAALIARDGPYRRLMGPQLEAVAESVGAATTAGATARASSGPQVRPLNDDAAEIGWPETLQTLLRFVRPWTGKVVLTVLFGIGRVLAFIGVGVIGALVVGAVPGGQVSPALVTALLVIAPVAAVLHWLESWLAHDMAYRLLAEMRIALFATLERLAPAGLLRRRSGDLVSLATQDVETVEYFYAHTLAPAFVAVLVPAAVLVLLASVAWPLALVLLPFLLWAGLAPVLARRDVDRLGTGAREALGQLGAHLTETIQGLAELTAFQAVARRREAFVAEVDAYRKQRARLLDDLSAQSAALEVASGLGGLVVAALGALLCARGWFPRESLPLLVLVAVAAFMPVAEIGQVARQLADTIASTRRLRALEKEPVPVTDGSHAMPADPAVRFEATSFTYPGRSVPAIDRVSFEVPRGSTVALVGASGAGKSTVASLLLRFWDPQQGRVTLGGVDLRDLRLDDLRQHIALVAQDTYLFNDTLEANIRLAANDASDADVQRAIDHAALGDFVARLPDGLATRVGERGVQLSGGQRQRVAIARAFLKDAPVLILDEATSHLDTISEQQIRAALEDLMTQRTSIIIAHRLSTVRNADLILVMEHGGVIEAGRHADLMARQGAYARLVSHQASGVAA

SEQ ID NO: 47089 - protein, 316 aa, Solibacter usitatus Ellin6076
MSAMDVVILGRIGYDLYSEEPHVPLPQVRRFSRYLGGSSANMAVGLSRLGARAGMVSCLGDDSLSRFLVDFLQAEKVETSHVKTAPGFLPSLCLTEVSPPDRFPQVFYRRDPVDTMLDATDDDLDYAASGTMFVTNGTTLCGSPSRESAYRALERAKNAGCRVVLDVDYRSMSWRKPEEAGLAARLALPFVDVLIGNQLELKLVANVDDLDEATGKLQAAGVPMLVSKLGELGTRVLAGGESVYLPPYSVDVCTTIGAGDGFASGFLYAMLKGLPVAECLHYGNAAAAIVVSRLSCSEAMPVLAEVEEMIRQQRKA

SEQ ID NO: 47090 - protein, 550 aa, Salmonella enterica subsp. enterica serovar Typhi Ty2
MQNPYTVADYLLDRLAGCGIGHLFGVPGDYNLQFLDHVIDHPTLRWVGCANELNAAYTADGYARMSGAGALLTTFGVGELSAINGIAGSYAEYVPVLHIVGAPCSAAQQRGELMHHTLGDGDFRHFYRMSQAISAASAILDEQNACFEIDRVLGEMLAARRPGYIMLPADVAKKTAIPPTEALALPVHEAQSGVETAFRYHARQCLMNSRRIALLADFLAGRFGLRPLLQRWMAETPIAHATLLMGKGLFDEQHPNFVGTYSAGASSKEVRQAIEDADRVICVGTRFVDTLTAGFTQQLPAERTLEIQPYASRIGETWFNLPMAQAVSTLRELCLECAFAPPPTRSAGQPVRIDKGELTQESFWQTLQQCLKPGDIILVDQGTAAFGAAALSLPDGAEVVVQPLWGSIGYSLPAAFGAQTACPDRRVILIIGDGAAQLTIQEMGSMLRDGQAPVILLLNNDGYTVERAIHGAAQRYNDIASWNWTQIPPALNAAQQAECWRVTQAIQLAEVLERLARPQRLSFIEVMLPKADLPELLRTVTRALEARNGG

SEQ ID NO: 47091 - protein, 314 aa, Anabaena variabilis ATCC 29413
MSPQPDSVGIYLREISKYPMLTPEQEITLARQVKQMTVVQQHKQVLEEQLHQQLNIQQLAADMGKSETEVFQILRLGQKAKEKMIAANLRLVVAIAKKYRWSQLEFLDLVQEGSIGLQKAVERFDPNRGYKFSTCAYWWIRQEITKAIANKSTTIRTPSHMNDRLIKLKKVQRELVKILGREPNIAEIAEFAELEPNQVRECLIAFRHPLSLDRPMGQEDEVDFLEILPADGTSPNEYLDEGFLRQDLANCLITLKPLQKQVLMLRFGLGSVDKLSTKQIAERLNIKQAKVGTTQKQAIKVLHRQQPQMREYLA

SEQ ID NO: 47092 - protein, 606 aa, Xylella fastidiosa Ann-1
MNTVTFPSQGGIDRRRFLKGLALGGVVAGTGLWRLPVHAANPELPLLQRHTTPLELRIGQSSVNFTGRMRPAITVNNSLPGPVLRWRQGDTVQIHVTNTLPDVMTSIHWHGIVLPSNMDGVPGMSFDGIAPGEHYLYRFQLHQSGTYWYHSHAMFQEQAGLYGALIIDPLEPPPYRADREHILLFSDWTDLDPAALFRRLKKMSSYDNTYQRTVRDFFHDIRRDGLRTTLADRRMWGRMRMTPTDLSDVNAHTYTYLLNGTTPAGDWTGLFRPGEKVLLRLINGSAMTYFDVRIPGLKLTVVAVDGQYVHQVTVDELRIALAETYDVLIQPHGQDAFAIFAQDMGRTGYACGTLAVRPGLHAPLPALDPRPRLTMQDMGHRMTHGQHESRASEMADMPGMTHPGRLGDHASHANQPPAQTPHGSHSLPADRTAPRHPASEQNNPLVDMHVDAPQPRLNDPGIGLRDNGRHVLTYADLHSLFDDPDGREPGREIELHLTGHMEKFAWSFDGIPFASAQPLRLNYGERVRIVLVNDTMMAHPIHLHGLWSDLEDANAAFQVRKHTIDMPPGTRRSYRVRADALGRWAYHCHMLYHMESGMMREVQVRP

SEQ ID NO: 47093 - protein, 620 aa, Cryptococcus neoformans var. neoformans B-3501A
MLSAALRVLARAAAIQRAEAAATATAHSSPAGSLTALDRLIDAAPHHPPPPAPGTHPADKGHGIPLPLSLKRGYRGPVKYVQPRARPKPETVESVESVESVRPIETVKSSPLTAIPLTKPVGPAEPAEPVEPTRPAETVNAATVDVDADKPPAQPVPPIVKQLEAAAEAEAAEDDETPVILRASRVPASRLGRLFHYGSLAASLSWGAASESIRRSTGGNSSGSVFMSDANIRRLVSTLGRMRGAALKLGQFMSIQDNHMLPPEIEQVLHQVQAHANYMPDWQMDKVLRDELGADWQANLFTQFDRTPIASASIGQVHRAVLKDGRQVAVKIQFPGVASSIESDLSNLSLLLRTSALLPKGLYLQNTIAVMRRELEDECDYIREAAAGKKFAHLLAGDPFFIVPHVVDEATTGKVLTTEWMDGKPLSRVKNLSQETRDLIGTHILRLCLCELFQFRFMQTDPNWANFLFTPASSSAPPHIQLIDFGASREYTKQFMDGWYRLLKSALEGDREKMRVESLSLGYLTGQENDEMVQAHLDSMALVASPFAHHGPYPFANQTITDSIRALIPIMLKHRLTPPPQETYSLNRKLSGAFLMCAKMRANVDCRKLWEEQVGGYKQG

SEQ ID NO: 47094 - protein, 117 aa, Arabidopsis thaliana
  misc_feature (22)..(23): Xaa can be any naturally occurring amino acid
  misc_feature (26)..(26): Xaa can be any naturally occurring amino acid
  misc_feature (34)..(34): Xaa can be any naturally occurring amino acid
  misc_feature (37)..(39): Xaa can be any naturally occurring amino acid
  misc_feature (42)..(42): Xaa can be any naturally occurring amino acid
  misc_feature (45)..(46): Xaa can be any naturally occurring amino acid
  misc_feature (50)..(50): Xaa can be any naturally occurring amino acid
  misc_feature (53)..(53): Xaa can be any naturally occurring amino acid
  unsure (1)..(117): unsure at all Xaa locations
PNLVSVGGLSGLQIPGLAPSCXXRSXFGDPLLMXADXXXTAXEKXXLSAXGSXPIGIGKNSHIKGAIIDKNARIGDNVKIINSDNVQEAARETDGYFIKSGIVTVIKDALIPTGTVI

SEQ ID NO: 47095 - protein, 462 aa, Arabidopsis thaliana
MASLMLSLGSTSLLPREINKDKLKLGTSASNPFLKAKSFSRVTMTVAVKPSRFEGITMAPPDPILGVSEAFKADTNGMKLNLGVGAYRTEELQPYVLNVVKKAENLMLERGDNKEYLPIEGLAAFNKATAELLFGAGHPVIKEQRVATIQGLSGTGSLRLAAALIERYFPGAKVVISSPTWGNHKNIFNDAKVPWSEYRYYDPKTIGLDFEGMIADIKEAPEGSFILLHGCAHNPTGIDPTPEQWVKIADVIQEKNHIPFFDVAYQGFASGSLDEDAASVRLFAERGMEFFVAQSYSKNLGLYAERIGAINVVCSSADAATRVKSQLKRIARPMYSNPPVHGARIVANVVGDVTMFSEWKAEMEMMAGRIKTVRQELYDSLVSKDKSGKDWSFILKQIGMFSFTGLNKAQSDNMTDKWHVYMTKDGRISLAGLSLAKCEYLADAIIDSYHNALLYWETPIEL

SEQ ID NO: 47096 - protein, 317 aa, Bordetella bronchiseptica RB50
MTTKHRIIQVGSLAGSPTANRRLADEYDVLELWQQADRAAALARHGKGVTALVTSANFGADAALIDALPDLKAICSWGVGYETIDVDAARKRGVLVSNTPDVLTDCVADLAWGLLISGARRMAQGDRFVRAGQWGQVHGSIPLGTRVSGKNLGIIGLGRIGEAIARRGDGFDMQVRYHNRRRRDDVSYGYESSLADLARWADFLVVATVGGPSTRHLVNQEVLEALGPKGLIINIARGPVIDEAALVAALQAGKLGGAALDVFEHEPSVPDALKASDETVLLPHIGSATFETRMAMENLMLDNLASFFKTGGVITPV

SEQ ID NO: 47097 - protein, 515 aa, Frankia sp. EAN1pec
MPHSLRGPRRSRSRSSESPASAPRDAAPRDAPPRPGGGPSHAEHGVHLAFGADPATSMVVSWITREPVVRPLARVVTGTAEAVREVEAGTRSYTDAATGWEIYAHHALLDELAPDTEYTYEITYQTTAAGVVREVGRASFRTAPRGRAAFTFACFGDHGTDASDNPFGTPASGALVAGVERVDPLFTLVDGDLAYSNVSDVPPRAWADWFAMISTSAARRPWMPSVGNHETERGNGALGLAAYQTYFQPPDNGEEPYLAGLWYAFTVGGVRFVVLSGDDVCYQDAGRVYLHGYSSGRQTAWLERQLAEARADQAVDWIIVALHQAAVSTAEFHNGADLGLREAWLPLFDQYGVDLVISGHEHHYERTHPLRGVVDGSTTLTPRPVPGSVSVAGGGGGGTATLDTSAGTVHMLIGTGGSSTPSAGQLFDPPACRVVVGVREREPGQRQRSSIRAVEPAPWLAARFPEHPYAFAALTVDPGEPGGTTRIQVTVYDSADAVPVPFDTFTLARPRADAT

SEQ ID NO: 47098 - protein, 648 aa, Polaromonas sp. JS666
MQTTFPRLLLKHAAERPGAAAMREKEYGIWQAHSWAGMAELVEHIACGLHEAGLGRGEHMALIGANRPRLYATMLAAQSLGAIPIPLYQDAVGAECVFPITNADVRFAMVEDQEQVDKLLEIRDRCPDLAHIIFDDPRGLRNYEEPGLTSLDRLIESGQALAVSQPGWFRMEVDKASPDDVAAMFFTSGTTGNPKGVVHTHATLLDRAQAGAEFDKLTSAEEVLAYLPPAWIGQNIFSYAQWLACGYVVNCPESASTVMIDLKEVGPTYYFAPPRVFEGMLTTVMIRMEDAGRLKRGMFNYFMGVARQVGPALMDGKPVNFIQTLLYGLGNLMVYGPLRNNLGFSRVRVAYTAGEAIGPDLFTFYRSIGINLKQLYGSTETAVFVCLQPDNEARADTVGVPIQGVQIRVADNGEVLVKSAGLLKEYYKNPAATAEVLTADGWYHTSDAGFLNASGHLKIIDRVKDVGRIKGGANDGALFAPKYVENKLKFFPHIKEVVAYGDGREKVCVMINIDFDAVGNWAERRNLPYAGYTDLAQKPEVYQLIKECVEKVNADLSVDALLAGSQISRFLILHKELDADDGELTRTNKVRRGFIAEKYQPLVDALYGGKTEQFIETVVKFEDGRSGSVSATLKISDTQTFAPVKAAA

SEQ ID NO: 47099 - protein, 130 aa, Zea mays
MGRLFVVHLTGKIYSCKHCKTHLALYEDIISKSFHCKHGKAYLFNKVSNVTIGETEDRMMMTGKHTVADIFCVSCGSIVGWRYETAHEKSQKYKEGKSVLERFKISGPDGSNYWVSSHGRHIGGSDADDS

SEQ ID NO: 47100 - protein, 457 aa, Escherichia coli K12
MMEGQQHGEQLKRGLKNRHIQLIALGGAIGTGLFLGSASVIQSAGPGIILGYAIAGFIAFLIMRQLGEMVVEEPVAGSFSHFAYKYWGSFAGFASGWNYWVLYVLVAMAELTAVGKYIQFWYPEIPTWVSAAVFFVVINAINLTNVKVFGEMEFWFAIIKVIAVVAMIIFGGWLLFSGNGGPQATVSNLWDQGGFLPHGFTGLVMMMAIIMFSFGGLELVGITAAEADNPEQSIPKATNQVIYRILIFYIGSLAVLLSLMPWTRVTADTSPFVLIFHELGDTFVANALNIVVLTAALSVYNSCVYCNSRMLFGLAQQGNAPKALASVDKRGVPVNTILVSALVTALCVLINYLAPESAFGLLMALVVSALVINWAMISLAHMKFRRAKQEQGVVTRFPALLYPLGNWICLLFMAAVLVIMLMTPGMAISVYLIPVWLIVLGIGYLFKEKTAKAVKAH

SEQ ID NO: 47101 - protein, 168 aa, Avena maroccana
VMASSATSVAPFQELKSTAGLPVSRRSNAGLGSVSNGGRIRCMQVWPIEGIKKFETLSYLPPLSEEALLKQIDFLIRSKWVPCLEFSKVGFIFREHGSTPGYYDGRYWTMWKLPMFGCTDASQVIKEVEEVKKEYPDAYVRIIGFDNIRQVQCVSFIAFKPPGCEESG

SEQ ID NO: 47102 - protein, 168 aa, Avena maroccana
VMASSATSVAPFQGLKSTAGLPVSRRSNAGLGSVSNGGRIRCMQVWPIEGIKKFETLSYLPPLSEEALLKQIDFLIRSKWVPCLEFSKVGFIFREHGSTPGYYDGRYWTMWKLPMFGCTDASQVIREVEEVKKEYPDAYVRIIGFDNIRQVQCVSFIAFKPPGCEESG

SEQ ID NO: 47103 - protein, 507 aa, Arabidopsis thaliana
  misc_feature (344)..(344): Xaa can be any naturally occurring amino acid
  unsure (1)..(507): unsure at all Xaa locations
MASKYGSGVLPENKKEKGDKETPETSYSSQSVSVNTLADQVSSTLSFAPSSDSKTGGEVKFNEKSDQSGKSNTCRPSTSSDISDESTCSSFSGNNKPHKANDVRWEAIQAVRTKHGVLGLNHFRLLKRLGCGDIGTVHLAELHGTRCFFAMKVMDKGALASRKKLLRAQTEREILQCLDHPFLPTLYSHFETEKFSCLVMEFCPGGDLHTLRQRQPGKRFSEQAAKFYVAEVLLAMEYLHMLGIIYRDLKPENVLVRDDGHVMLSDFDLSLRCTVSPTVVRSTVLASEGQKNSGYCAQPACIQQPSCISAPTTCFSPRYFSSKSKKDKKMKNETGNQVSPLPEXLVAEPTSARSMSFVGTHEYLAPEIIKGEGHGSAVDWWTFGIFLYELLFGKTPFKGSGNRATLFNVVGQPLRFPESPVVSFAARDLIRSLLVKEPQHRLAYKRGATEMKQHPFFEGVNWALVRCASPPEIPKPVDYESAPATPAAATSTSVKSDQSNYLEFDFF

SEQ ID NO: 47104 - protein, 654 aa, Zea mays
MAGPEKTVVWFRRDLRIQDNPALAAAAKGGSVLPIFIWCPSDYGQYYPGRCSRWWLKQSLAHLGKSLELLGCPLVLIRAEDSTLAALLECVRSISATRVVYNRLYDPISLVLDNKIKNELPAHGISVQSFNGDLLYEPWDVYDENGQAFTTFNKYWEKCMNLPIEISQYLAPTRLVAAPGLANVRCCSIDDLGLESSKDVESSNALLSRAWSPGWRNAENMLEEFVSYGLPEYSEHGMKVGGSTTSLLSPYLHFGELSVRMIYQLVKMRQVKWQNEGKSEAEESVRLFLRSIGFREYSRYLCFNYPFTHERSFLGNLKHYPWLLDEGRFKSWRQGMTGYPLVDAGMRELWATGWTHNRIRVIVSSFAVKFLQIPWIWGMKYFWDVLLDADLESDILGWQYISGSLPDGHELSRLDNPEVQGQKYDPDGEYVRTWIPELARMPTEWIHSPWAAPNSILQVAGVELGFNYPKPIVELHMARECLDDAISTMWQLDTAAKLAELDGEVVDDNLNNIRNFDIPKVVLNKKLSPSTSSMEHRVLSTNGKDEKSQPTEVKALYKQIIRDDMMNDSNMDDTCSTANLKVTRKRSSSDSAFNVPSCSSSLVMESRIHHNEPSSVLYSGYFQKTADRDGTSKVEDNDSEDSGTSISRPSKKAA

SEQ ID NO: 47105 - protein, 295 aa, Oryza sativa (japonica cultivar-group)
MASDLRPPEHQVAGHRASADKLGPLVDGEGLFYKPLQAGERGEHEAAFYAAFTAHPAVPPRVRGAFFPRFHGTRFLPAPASPGGAPYPHIVLDDLLAGLPSPCVADVKIGACTWPPRSPDPYVAKCLAKDRETTSALLGFRVSGVRVVDARGGAVWRPDRSELKGIDAAGVRRVLRRYVSTGGGDGLDCALAAAVYGGEGGVLAQLRELKAWFEEQTLYHFYSASILFGYDANAAAAAAPGGGSGGVRVKLVDFAHVDDGDGVIDHNFLGGLCSLIKFIGDIVAEVTEKASSDHS

SEQ ID NO: 47106 - protein, 397 aa, Candida parapsilosis
MTIIAVFTGNFLAFIAFVVFAQGAAIPDPAKRDDNPGFVALDFEVTRKPVDVNSTLERAKRDSVSSPLYFEGPAYGIRISVGSNRQEQQVVLDTGSSDFWVIDANSSCTKEGTECKKYGTFDPDTSTSFNYLGFLFAIVFGDKTSSIGLWAEDTVQIGDITLTNQSFADVSLTSAIQGVMGLSRPQPDSPNARFDSVPVTLKKQGKIKTNAYSLYLNSPGAATGTIIFGGVDNAKYSGKLIEESVVSDQHFSINLQSLNYDGNKESAGVGVLLDSGSTISYLPDRIVADLAEKAGARAVPAGLTGDFYFIDCDAKPEGNATFTFDNGAEISVPLTEFVTQSTNEFCPWGLQSSDTSGGTPILGDNFLRHAYVVYNLEKDTISLAQVKYTSESSVSAI

SEQ ID NO: 47107 - protein, 256 aa, Kineococcus radiotolerans SRS30216
MSVLDKFSLQGKVALVTGGYKGLGRGFAQALAEAGADVVVAARDEAASVAAAAEIAASTGRRTLGLRLDVTSRPEVEAAVARVTAELGRFDVLVNNAGTCVHRPALEVTDEEYDDVITTNLKGVWLPSVVTAAWMAEHGGGSIVNVGSISAQIVNRPQMQPVYNASKAAVHQLTKSLAAEWAPLGIRVNAIAPGYVKTEMAPVDRPEFRRMWIEDAPMQRYSSPEEIAATVVYLASDASSFSTGAVVVTDGGYTLF

SEQ ID NO: 47108 - protein, 155 aa, Nostoc punctiforme
MIDEQEIEKLWQAFKVLDVDGNGAISTDELGEVMRSLGQNPTETGLRDLIKEIDVDLSGTIDFDEFKTLMIAKVGDRESRLKLAFSAFDEDNSGQITAVELRTVMSQFGLTDAELKEMLQEVDHDGDGSIDFEEFCQLVLEESESKTGYKDSPIS

SEQ ID NO: 47109 - protein, 628 aa, Xylella fastidiosa Ann-1
MTWSQDLAHKTYSIRHWADGYFEVNDAGHMVVMPLGGDGVRISLPEVVDAARAAGAKLPLLLRFPDILGHRLGKLQAAFAQAQSEWEYAGGYTAVYPIKVNQHRGVAGVLASHQGDGFGLEAGSKPELMAVLALSRPGGLIVCNGYKDREYIRLALIGRKLGLKTFIVIEKPSELRMVLEEAKTLDVLPGLGVRVRLASLGAGKWQNSGGDKAKFGLSPRQVLDVWKVLRGTEYADCLNVMHFHMGSQISNVRDIAKGMREATRYFVELSRLGAKITHVDVGGGLGIDYEGTRSRSDCSINYGLQAYASHIVQPLASACEDYDLVPPRIVTECGRAMTAHHAVLIANVTEVEAVPEGRVPGVCDDEPAVVRHMREIYGELDARPAIELFYEAQHFHAEGLAAYTLGQIDLVHRARIDDLFYAISHGVRERLSHEEKSHRPVLDELNERLVDKYFVNFSVFESIPDVWAINQIFPIVPIERLNEAPTRRGVVCDLTCDSDGTVKQYVENESLDSALPLHVLRHGEAYRIGFFLVGAYQEILGDIHNLFGDTDAVEVAVDGRGYRIAQQRCGDTTDVMLDYVGYALDEVRRVYAQRIAAAGMSAAESKALSDMLEAGLTGYPYLSDVPLE

SEQ ID NO: 47110 - protein, 434 aa, Schizosaccharomyces pombe
MVYIKCRYVCFCCAFISNTTSKSIFNELRCPVTLTFLQFGFVAFFSAVCLLFRKQFLGGTGIQKPSKYVLYTTLPLSIFQIGGHVFGSLATTKIPVSTVHTVKALSPLFTVLAYRFMFRHVYSAMTYFSLVPLTFGVTLACSFELSADIVGLLYALISTCIFVSQNIFGSKIFMEAKSHSTHTKKHYNKLNLLLYSSGVAFIVMIPVWLYQEGFAYLPEVGSPVFLNLIYNGLSHFFQNILAFTLLSIISPVAYSIASLIKRIFVIVVSIIWFQQATNFTQGSGIFLTAIGLWLYDRSKKGNLYESCKVKEFEKDALELEEQTMEDEKSYPSSGTQSPFYGKNFLPQITPRLDSVVPLISDSPMTPNSVYSNEGVTSSVSGNATPASVRQSTQNDFSNSNIHDRRSSYTFQLNNFKAPQPSRLWATETVPTLKI

SEQ ID NO: 47111 - protein, 134 aa, Triticum aestivum
  misc_feature (44)..(44): Xaa can be any naturally occurring amino acid
  misc_feature (99)..(99): Xaa can be any naturally occurring amino acid
  misc_feature (119)..(119): Xaa can be any naturally occurring amino acid
  misc_feature (132)..(133): Xaa can be any naturally occurring amino acid
  unsure (1)..(134): unsure at all Xaa locations
MRIQCDACEGAAATVVCCADEAALCARCDVQIHAANKLASKHQXRLPLEDAADAAGLPRCDVCQDKPAFVFCVDDRALFCRDCDDSIHVQGTLSANHQXRYIATGIRVSFSSVCSAHAXDSHPPPPPSNPRXXQ

SEQ ID NO: 47112 - protein, 143 aa, Triticum aestivum
  misc_feature (78)..(78): Xaa can be any naturally occurring amino acid
  unsure (1)..(143): unsure at all Xaa locations
MAPLGDGVAPVAAAAAPGLVVSFGEMLIDFVPNVAGVSLAESGGFVKAPGGAPVNVACAVSKLGGSSAFVGKFGDDEXFGHMLGGHPQSKTGLKKGGLPLRTKAQRPWAFRQPQQGKREVNVLTANPSGRQCPQGRELNLQLN

SEQ ID NO: 47113 - protein, 406 aa, Streptococcus pneumoniae
MQTQEKHSQAAVLGLQHLLAMYSGSILVPIMIATALGYSAEQLTYLISTDIFMCGVATFLQLQLNKYFGIGLPVVLGVAFQSVAPLIMIGQSHGSGAMFGALIASGIYVVLVSGIFSKVANLFPSIVTGSVITTIGLTLIPVAIGNMGNNVPEPTGQSLLLAAITVLIILLINIFTKGFIKSISILIGLVVGTAIAATMGLVDFSPVAVAPLVHVPIPLYFGMPTFEISSIVMMCIIATVSMVESTGVYLALSDITKDPIDSTRLRNGYRAEGLAVLLGGIFNTFPYTGFSQNVGLVKLSGIKKRLPIYYAAGFLVLLGLLPKFGALAQIIPSSVLGGAMLVMFGFVSIQGMQILARVDFANNEHNFLIAAVSIAAGVGLNNSNLFVSMPTAFQMFFSNGIVVASL

SEQ ID NO: 47114 - protein, 327 aa, Anabaena variabilis ATCC 29413
MRVFVTGATGFVGANLVRLLLQQGYTVKTLVRPQSNLGNLQGLDVEIVEGDFDNQYLWRQMSGCRYLFHVAAQYSLWQKDRDLLYQNNVLGTFQVLEAAQKAGIERTVYTSSVAAIGVNPSGAIADETYQSPVDKLIGHYKKSKFLAEQEAVQAAAKGQDVVIVNPSTPIGPWDIKPTPTGDIILRFLRRQMPAYVNTGLNLIDVRDVAWGHLLALEKGKSGDRYILGHQNLSLKQLLEKLAEITGLSAPQWTVPGWLPLSVAWMEEKILAPLGKPPSVPIDGVRMAQQTMYYDASKAVKELGLPQSPVDIALKDAVNWFVSQGYVK

SEQ ID NO: 47115 - protein, 406 aa, Streptococcus pneumoniae
MQTQEKHSQAAVLGLQHLLAMYSGSILVPIMIATALGYSAEQLTYLISTDIFMCGVATFLQLQLNKYFGIGLPVVLGVAFQSVAPLIMIGQSHGSGAMFGALIASGIYVVLVSGIFSKIANLFPSIVTGSVITTIGLTLIPVAIGNMGNNVPEPTGQSLLLAAITVLIILLINIFTKGFIKSISILIGLVVGTAIAATMGLVDFSPVAVAPLVHVPIPLYFGMPTFEISSIVMMCIIATVSMVESTGVYLALSDITKDPIDSTRLRNGYRAEGLAVLLGGIFNTFPYTGFSQNVGLVKLSGIKKRLPIYYAAGFLVLLGLLPKFGALAQIIPSSVLGGAMLVMFGFVSIQGMQILARVDFANNEHNFLIAAVSIAAGVGLNNSNLFVSMPTAFQMFFSNGIVVASL

SEQ ID NO: 47116 - protein, 123 aa, Glycine max
  misc_feature (16)..(16): Xaa can be any naturally occurring amino acid
  unsure (1)..(123): unsure at all Xaa locations
MAKFGEGDKRWIVADXPDGTNVHNWHWAETNCLEWSRTFFKNSFTNVAVGGGDGDATITIKKVEKLDGEAYVNVRKGKVIPGYEISVRLAWEGEARDANGKVLQRVDGAVEIPYISDENGRED

SEQ ID NO: 47117 - protein, 406 aa, Streptococcus pneumoniae
MQTQEKHSQAAVLGLQHLLAMYSGSILVPIMIATALGYSAEQLTYLISTDIFMCGVATFLQLQLNKYFGIGLPVVLGVAFQSVAPLIMIGQSHGSGAMFGALIASGIYVVLVSGIFSKVANLFPSIVTGSVITTIGLTLIPVAIGNMGNNVPEPTGQSLLLAAITVLIILLINIFTKGFIKSISILIGLVVGTAIAATMGLVDFSPVAVAPLVHVPTPLYFGMPTFEISSIVMMCIIATVSMVESTGVYLALSDITKDPIDSTRLRNGYRAEGLAVLLGGIFNTFPYTGFSQNVGLVKLSGIKKRLPIYYAAGFLVLLGLLPKFGALAQIIPSSVLGGAMLVMFGFVSIQGMQILARVDFANNEHNFLIAAVSIAAGVGLNNSNLFVSMPTAFQMFFSNGIVVASL

SEQ ID NO: 47118 - protein, 349 aa, Ashbya gossypii ATCC 10895
MSSALNIGVVGTGIFAKDTHLPVLASFQDQFRVLAAHNRTKAKAEAFAQEAGISEDKIYDTLDELLADKDVAVIDALVPVQSNVEIVRKAVAAGKPIIIEKPVAATLEQAREVVKIAEATDLPVAIAENWLFLEAGTAVKQKLADIGEVVGFTYNSTGAFLKNNKYLATKWRQRPEHIGGFLSDGGVHQLALLTDVLGQVESVSALAKQVREASGAEDIVFSTLKMKSGAIGTFTYGSAFGSTDKWVFMKIYGTKGSILLDISQKQDVTMKVVRGEYADEISGSETVELQQEQTFGVRGEFMNFHEAVAKKDKSLIRGTPRAAFHHLACVAAFLDSSAQGGNHVKVQEP

SEQ ID NO: 47119 - protein, 76 aa, Chlamydia trachomatis
IPGTWEGICAAEVLESQGIACNVTLIFNSVQAIAAAKAKVTLVSPFVGRIYDWWIAAYGAEGYLSKPILELLPSKY

SEQ ID NO: 47120 - protein, 474 aa, Xanthomonas oryzae pv. oryzae KACC10331
MERPRSDAPMPEPSSTTAPQFRRSMQVRHLVMLSLGGVIGTGLFFNTGYIIASTGALGTVLAYLIGALVVYLVMQCLGELAVAMPQTGAFHVYAARYLGPATGYVVAWLYWLTWTVALGSSLTAAAFCMQYWFPHSPAWPWCLLFCALIFGLNTVSARWFAEGEFWFSLIKVITILVFIVLGGAAVIGLLPLADGSPAPGLRHLRADGWFAHGTLPILMTMVAVNFAFSGTELIGVAAGETEQPARAIPLAIRTTLMRLVVFFVGTVLVLAALLPAEQAAVETSPFVRAFELLGIPYAADLLNVVILTAILSAANSGLYAAARMLWSLANEGTLPSGLTRLTGRGIPLRAVSLSMLGGLLALLTGVYAADTVFVAISAVSGFAVVVVWLSICASHYVFRRQLLRDGVAPETLAYRARWYPWTPILGFSLCLLACIGLAFDPQQRIALWCGVPFVALCYGAYALTQRLAARRLHA

SEQ ID NO: 47121 - protein, 395 aa, Bradyrhizobium sp. BTAi1
MTVRAGREFLAIPGPTTMPDEVLQAMHRPALDIYSKQMVELTDGLMADLGRLFATKGKTYIYIANGHGAWEAVLSNVLSRGDKLLVLESGRFAIGWGQAARAMGAEIEVLRGDWRRAVRPAEVEARLRADREHTIKAIVVAQIDTASGVVNDVEAIGRAIKASGHPALYMVDTVASLGCMPFEMDAWGIDVAMSGSQKGLMTPPGLGFVAANARALEVHKRANMRTPYWDWSEREGAEHYRKYGGTAPVHLLFALRQAIDMLFAEGLPHAFRRHQLLGEAVRRAVAKWGEGQVIGFNIADAAERSNTVTTVLVGGGYDPAVLQSYCKEQCGVVLGTGIGDLSGKAFRIAHMGHVNAPMVLGTLGVIEMALVALKIPHGRGGLDAAIQWLGESVSA

SEQ ID NO: 47122 - protein, 363 aa, Zea mays
MDKYEPVREIGAGNFGVAKLMRNKDTRELVAMKFIERGNRIDENVFREIVNHRSLRHPNIIRFKEVVLTPTHLAIVMEYAAGGELFERICDAGRFHEDEARYFFQQLVCGVSFCHAMNICHRDLKLENTLLDGSPAPRLKICDFGYSKSSVLHSRPKSTVGTPAYIAPEVLSRREYDGKHADVWSCGVTLYVMLVGAYPFEDPKDPKNFRKTIQRIMSVQYKIPEYVHVSHNCRHLLSRIFVQNPYKRITMSEIKTHPWYLKNLPRELKEEAQAAYYYSRQGDSSSSSSNNATAAPAYSSQSVEEILRIVQEAQTVPKPPSRPDEAEQQEEEDDHDDDDDYDRTVRQVHASGEFDMIMSRLQI

SEQ ID NO: 47123 - protein, 317 aa, Oryza sativa
MSKYGTIPTSSSSSSSGAAPPPLPLGGGGGASPLDFFSRAKARGATALATRRPWRELADPHALGLPPSLADAYLRVRANLAHYAMNYAIVVLAVVFLSLLWHPASLIVFLVCMVAWLVLYFLRDEPIVLFGRVVGDGAVLAALAAVTLVLLLLTGATANIVSSLLIGVLLVVLHAALHKAEENVDDEVGRCLLTQSIEALNLCVKCELDNENTDTYNELNSNVVFRRFDAICSGSECVIHAELCCHTALFIRAVSRSLGSDPAMIQGCELQRIPLVYPTFVNVMQPFPLVFMYQIGREKVKTRLDSGVENQCPVTCV

SEQ ID NO: 47124 - protein, 138 aa, Lotus corniculatus var. japonicus
MAKPIPKIGSRKNARSGSRKHLRKIPKGIIHVQASFNNTIVTVTDVRGRVISWSSAGTCGFKGTRRGTPFAAQTAAGNAIRTVADQGMQRAEVMIKGPGLGRDAALRAIRRSGILLNFIRDVTPMPHNGCRSPKKRRV

SEQ ID NO: 47125 - protein, 502 aa, Propionibacterium acnes KPA171202
MTHTTQRSHEDNPQGPKVSVTRDDPRAATIEEIQPIVDRGDQGYAETLTNRQVQMMAIGGAIGVGLFLGAGSRLRSAGPAVLISYAFCAVIAFLVMRALGELVIHRPSSGSFVSYARELLGDRWAYAVGWMYMLNWMTSGIAELTAIGTYLQFWWPSLPMWVPSLVALMILVSVNLISVKAFGEFEFWAALLKVVALTAFIIVAIGLVASHVNVGGHRAAVSNLWRFDGGFAPQGVLPLILVIQGVIFAYATIELVGTASGETQNPRKVIPKAVHAVVFRLVVFYLGSLALLAMLLPYKEYSADESPFVTAFSAMGVGWIGDAMNIVVITAAFSSVNSGLYATGRVLKSLAAAGEAPKFAGTLNRFKTPAGGILMTASVFLLGVGLEYVVPERAFEISINTAAVGVIWTWATIFWCQLVLRRRVNEGRITDSGFHMPGYPITGIFGIVSLAGVTALMVLDPQNRIVLAAALVYIAVMLVAWPAVKRNKARHPELNAQEDITF

SEQ ID NO: 47126 - protein, 502 aa, Aspergillus fumigatus
MPTLGGLLKKRRTKDSHTLSKELESSSSPAAAQTQTSPNSADHDHHYQHYDQTHHHQHSASSNPSNNSATPSAAQPHRSSNDNPNRSSGTDQKSEGQTASMQFAVTQPHPSTHHNPRLHHLQQQQQQQQQQQQQQQQQQPQQQSHTSRLHNILHPSHHASSQASTEGHAHSQQANQTEARTTKGKYSLDDFTIQRTLGTGSFGRVHLVQSKHNHRFYAIKVLKKAQVVKMKQVEHTNDERRMLNRVRHPFLITLWGTWQDARNLYMVMDFVEGGELFSLLRKSQRFPNPVAKFYAAEVTLALEYLHSQQIIYRDLKPENLLLDRHGHLKITDFGFAKEVPDITWTLCGTPDYLAPEVVSSKGYNKSVDWWSLGILIFEMLCGFTPFWDSGSPVKIYENILRGRVKYPPYLHPDAVDLLSQLITADLTKRLGNLHGGSEDVKNHPWFAEVTWDRLARKDIDAPYVPPIRGGQGDASQYDRYPEETEQYGQQGEDVHGHLFPDF

SEQ ID NO: 47127 - protein, 145 aa, Oryza sativa
  misc_feature (103)..(103): Xaa can be any naturally occurring amino acid
  unsure (1)..(145): unsure at all Xaa locations
MVRSWPVAENEKRRKVSAQRYHVLLVKKHDYTASLFTAPVNAPAPAKEHGCCERGHAARRASAVGTTRAWVGWLTPWLDERPKGYLFKRSSPLAGEFRKWVDXELPCYLTVVILGIRLNTKPNLTLQTWPHFTITWQTIEHIKVR

SEQ ID NO: 47128 - protein, 503 aa, Burkholderia sp. 383
MTHNSERPADPAGGADSRHADPDAMFASHEAGYAKQLKPRHVQMIAMGGAIGTGLFLGAGGRLQHAGPALALVYLVCGVFAFLIMRALGELVMHRPTSGSFVSYAREFMGERASFVAGWMYYLNWATTGIVDITAVAIYMKYWAVFTDVPQWVFALGALGIVSVMNMIGVKVFGEMEFWFSIVKVGTLAVFLAVGAVFLASGHPVAGQMPGLHLVADHGGIFPHGILPAVLIVQGVVFAYASIELVGVAAGETADARKVLPKAINSVMWRIALFYVGSVVLLTMLLPWTAYSAHESPFVTFFSKLGVPYVGTVMNVVVLTAALSSLNSGLYSTGRVLRSLAMGGSAPRFVSRMNARGAPYGGILITVAINAIGVPLNYIVPAQAFEIVLNMASLGIITTWGFIVMCQILFRRAVDRGELKAVSFRMPGAPFTSWLTLAFLVGVLVLMAFDYPGGTWTIATIPVVVLALVVGWKLAKRGAAREQVADARASAATHAVADPARGA

SEQ ID NO: 47129 - protein, 216 aa, Agrobacterium tumefaciens str. C58
MFLFDTLSKKTTMPTEETALPGREEALAVPETHFVNGRPLKGPYPDGLEIIYLGMGCFWGAERLFWKTPGVWVTAVGYAGGFTRNPTYHETTTGQTGHAEVVKVVYDPAVISLSGLLKIFFEEHDPTQGMRQGNDVGTTYRSAIYATTEGQLQQAQKARDAFQQALDEAGHGHAITTEIGPLETFYYAEDYHQQYLAKNPGGYCGLRGTGVSCNIG

SEQ ID NO: 47130 - protein, 568 aa, Escherichia coli K12
MGPLPRKGNMKQKITDYLDEIYGGTFTATHLQKLVTRLESAKRLITQRRKKHWDESDVVLITYADQFHSNDLKPLPTFNQFYHQWLQSIFSHVHLLPFYPWSSDDGFSVIDYHQVASEAGEWQDIQQLGECSHLMFDFVCNHMSAKSEWFKNYLQQHPGFEDFFIAVDPQTDLSAVTRPRALPLLTPFQMRDHSTRHLWTTFSDDQIDLNYRSPEVLLAMVDVLLCYLAKGAEYVRLDAVGFMWKEPGTSCIHLEKTHLIIKLLRSIIDNVAPGTVIITETNVPHKDNIAYFGAGDDEAHMVYQFSLPPLVLHAVQKQNVEALCAWAQNLTLPSSNTTWFNFLASHDGIGLNPLRGLLPESEILELVEALQQEGALVNWKNNPDGTRSPYEINVTYMDALSRRESSDEERCARFILAHAILLSFPGVPAIYIQSILGSRNDYAGVEKLGYNRAINRKKYHSKEITRELNDEATLRHAVYHELSRLITLRRSHNEFHPDNNFTIDTINSSVMRIPRSNADGNCLTGLFNVSKNIQHVNITNLHGRDLISEVDILGNEITLRPWQVMWIK

SEQ ID NO: 47131 - protein, 508 aa, Burkholderia sp. 383
MPSRTPTALWAQQFRRSSASSLQDQIRRMLVAAILDGQLAPDAALPSSRELADQLGVARNTVVLAYQMLVEEGYLISRERSGHFVNPKMLEGLPGFAAAKPAAQPGGGDETPGRPAWDKRIAHPPSRQRNIVKPANWQHYEFPFIYGQFDQSLFPTNDWRECCLKALSVMEIRNWAPDLIERDDESLIQQIRTRVLPRRGVFAMPDEIVVTNGCQQALYLIADLLCGKHTTVGFENPGYPDARNIFENRNARLLPLPVDGHGIAPATLGDTLSRCDYVYVTPSHQCPTTATMPVERRRVLLDCAQQHDFVIIEDDYESENTFSGTPHPALKSLDTADRVIYVGSLSKTFAPGLRLGYVVGPRELIRELRALRRLMVRHPVAYIQRAFATFLALGHHDALLRRLAHAYSERSQALMAALDAHLPEARYVQVTGGASCWVEGPPWLDATRLAADAQEAGILIEPGSVFFMNDEGDARRCFRMGFSAIPLERIEPGVRALAQCVRTQRPGA

SEQ ID NO: 47132 - protein, 228 aa, Capsicum annuum
MATAEMEKTTTFDEAEKVKLNANEADDEVEEGEIVEETDDTTSYLSKEIATKHPLEHSWTFWFDNPVAKSKQAAWGSSLRNVYTFSTVEDFWGAYNNIHHPSKLVVGADLHCFKHKIEPKWEDPVCANGGTWKMSFSKGKSDTSWLYTLLAMIGHQFDHEDEICGAVVSVRGKGEKISLWTKNAANETAQVSIGKQWKQFLDYSDSVGFIFHDDAKRLDRNAKNRYTV

SEQ ID NO: 47133 - protein, 560 aa, Eremothecium gossypii
MSPSVRDARNDLASLQQQAAAEAEDIRRWWSQPRWAGTKRVYTAEDIVKRRGTFPVVEYPSSVMADKLVETLARHSRNGTVSQTFGVLDPVQMTQMVKYLDTIYVSGWQCSATASTSNEPGPDLADYPMDTVPNKVEHLFMAQLFHDRKQREARLSCTTQRELDQLGPEIDYLRPIVADADTGHGGLTAVFKLTKMFIERGAAGIHMEDQSSSNKKCGHMAGRCVIPVQEHISRLVTVRMCADVMHSNLVLVARTDSEAATLLSSNIDARDHYYIVGASNPEVTVPLIEVLDAAQQAGASGDRLAQLEEDWCKKAKLRLFHEAFADQVNASPSIKDKAGVIAKFNSQIGPQTGASIREMRKLGRELLGQDVYFDWDLPRAREGLYRYKGGTQCAIMRARAFAPYADLVWFESNFPDFQQAKEFAQGVREKFPNKWMAYNLSPSFNWPKAMPPKEQENYIQRLGEIGYVWQFITLAGLHTNALAIDNFSREFSRFGMRAYAQGIQQREMDEGVDVLKHQKWAGAEYVDSILKLAQGGVSSTASMGKGVTEEQFGSSNGAKL

SEQ ID NO: 47134 - protein, 334 aa, Xylella fastidiosa Ann-1
MAIKVGINGFGRIGRNILRSAVQNFGSNIDIVAINDLLEPDYLAYMLQYDSVHGRFKGEIAIEGTALILNGKKIRLTAERDPGNLQWADAGAEIVIESTGLFLTQESAGKHLVAGAKKVIISAPSKDETPMFVYGVNHNSYNGEPIVSNASCTTNCLAPLAKVINDKWGITRGLMTTVHAATATQKTVDGPSNKDWRGGRGILENIIPSSTGAAKAVGKVIPSLNGKLTGMSFRVPTSDVSVVDLTVQLNTPATYKEICTEVKQQSEGPLRGILDYIEDKVVATDFRGETCTCVFDADAGIALDPTFIKLIAWYDNEWGYSNKCLEIAKVIAAK

SEQ ID NO: 47135 - protein, 758 aa, Yersinia pseudotuberculosis IP 32953
MTILNHTLGFPRVGLKRELKKAQESYWAGNSTQEELLNVGRELRARHWQQQQQAGVDLVPVGDFAWYDHVLTTSLLLGNVPERHQNADGSIDIDTLFRIGRGRAPTGKPAAAAEMTKWFNTNYHYMVPEFQQGQQFKLGWTQLLDEVDEALALGHKIKPVLLGPITYLWLGKVKGEQFDRLSLLNDILPVYQQVLAELAKRGIEWVQIDEPALVLELPQEWLDAYQPAYQALQGQVKLLLTTYFDSIGHNIDTIRALPVQGLHVDVVAGHDDLAVLNKNLPKEWLLSLGVINGRNVWRADLSSWFERLQPLVNSRPLWLGSSCSLLHSPIDLNEETRLDAEVKSWFAFALQKCAELALLTQALNAPNDAKLAELAAYSAPIRARRSSSRVHNAQVEQRLAAITSQDIERQLPYEARAETQRKRFNLPAWPTTTIGSFPQTTEIRGLRLDFKQGRLDGKNYRTGISEHIKQAIAEQERLGLDVLVHGEAERNDMVEYFGEHLDGFVFTQNGWVQSYGSRCVKPPVIIGDISRPEAITVEWAKYAQSLTEKPVKGMLTGPVTILCWSFPREDVSRETIAKQIALALRDEVEDLEKAGIGIIQIDEPALREGLPLRRADWQAYLQWAVDAFKLNAAVAQNDTQIHTHMCYCEFNDIMDSIAALDADVITIETSRSDMELLESFEDFAYPNEIGPGVYDIHSPNVPSVEWIEALLRKAAQRIPAERLWVNPDCGLKTRGWPETRQALANMVLAAQRLREEQI

SEQ ID NO: 47136 - protein, 339 aa, Brassica napus
MADKKIKIGINGFGRIGRLVARVILQRNDVELVAVNDPFITTEYMTYMFKYDSVHGQWKHNELKVKDEKTLLFGEKPVTVFGIRNPEDIPWGEAGADFVVESTGVFTDKDKAAAHLKGGAKKVVISAPSKDAPMFVVGVNEHEYKSDLNIVSNASCTTNCLAPLAKVINDRFGIVEGLMTTVHSITATQKTVDGPSMKDWRGGRAASFNIIPSSTGAAKAVGKVLPQLNGKLTGMSFRVPTVDVSVVDLTVRLEKAATYDEIKKAIKEESEGKLKGILGYTEDDVVSTDFVGDNRSSIFDAKAGIALSDNFVKLVSWYDNEWGYSTRVVDLIIHMSKAA

SEQ ID NO: 47137 - protein, 406 aa, Streptococcus pneumoniae
MQTQEKHSQAAVLGLQHLLAMYSGSILVPIMIATALGYSAEQLTYLISTDIFMCGVATFLQLQLNKYFGIGLPVVLGVAFQSVAPLIMIGQSHGSGAMFGALIASGIYVVLVSGIFSKVANLFPSIVTGSVITTIGLTLIPVAIGNMGNNVPEPTGQSLLLAAITVLIILLINIFTKGFIKSISILIGLVVGTAIAATMGLVDFSPVAVAPLVHVPTPLYFGMPTFEISSIAMMCIIATVSMVESTGVYLALSDITKDPIDSTRLRNGYRAEGLAVLLGGIFNTFPYTGFSQNVGLVKLSGIKKRLPIYYAAGFLVLLGLLPKFGALAQIIPSSVLGGAMLVMFGFVSIQGMQILARVDFANNEHNFLIAAVSIAAGVGLNNSNLFVSMPTAFQMFFSNGIVVASL

SEQ ID NO: 47138 - protein, 354 aa, Pseudomonas syringae pv. phaseolicola 1448A
MHPKNAWYVACTADEVADKPLGRQICNERMVFYRDQNQQVVALEDFCPHRGAPLSLGYVENGQLVCGYHGLVMGGDGKTAAMPGQRVRGFPCNKTFAAVERYGFIWVWPGDREKADPALIHHLEWAVSDEWAYGGGLFHIQCDYRLMIDNLMDLTHETYVHASSIGQKEIDEAAPVTTVEGEEVITARHMENIMPPPFWQMALRGNNLADDVPVDRWQICRFTPPSHVLIEVGVAHAGKGGYHALHEFKASSIVVDFITPETDTSIWYFWGMARNFNPADEQLTATIREGQRKIFSEDLEMLERQQQNLLQHPQRNLLKLNIDAGGVQSRKILERLIAAERASTAEQIPVMATK

SEQ ID NO: 47139 - protein, 406 aa, Streptococcus pneumoniae
MQTQEKHSQAAVLGLQHLLAMYSGSILVPIMIATALGYSAEQLTYLISTDIFMCGVATFLQLQLNKYFGIGLPVVLGVAFQSVAPLIMIGQSHGSGAMFGALIASGIYVVLVSGIFSKVANLFPSIVTGSVITTIGLTLIPVAIGNMGNNVPEPTGQSLLLSAITVLIILLINIFTKGFIKSISILIGLVVGTAIAATMGLVDFSPVAVAPLVHVPTPLYFGMPTFEISSIVMMCIIATVSMVESTGVYLALSDITKDPIDSTRLRNGYRAEGLAVLLGGIFNTFPYTGFSQNVGLVKLSGIKKRLPIYYAAGFLVLLGLLPKFGALAQIIPSSVLGGAMLVMFGFVSIQGMQILARVDFANNEHNFLIAAVSIAAGVGLNNSNLFVSMPTAFQMFFSNGIVVASL

SEQ ID NO: 47140 - protein, 144 aa, Bacillus clausii KSM-K16
MTKPQKDELKKKLTPIQYFVTQENGTEPPFQNEYYETEEEGIYVDVVSGKPLFSSKDKYDAGCGWPSFTKPIDEAEIIEKEDRSHFMVRTEVRSKNADSHLGHVFPDGPGPNGLRYCINSAALRFIPKAKLKEAGYGAYEKLFD

SEQ ID NO: 47141 - protein, 162 aa, Bacillus clausii KSM-K16
MVKPFDSYDGIETVTSGYTGGHTINPTYKEVCSETTGHFEAVQIVYDAAVFPYSKLLEIFWKQIDPTDPGGQFHDRGDSYRTAIFYHNETQKKEAEHSKEQLEQSGKFSKPIATLILPAKPFYPAEGYHQDYYKKNPFHYQMYRRGSGREAFIQKHWGGETT

SEQ ID NO: 47142 - protein, 114 aa, Glycine max
VSPRQPMHQHNSQTAMHNTNFGASIPSNAFGATVAGQGIRAGQPDQQPKNSVFSNALSSPIRRSLQPYHLAQGSFPSCNIMSSGNGTRNSDMTYPNGQNRGTNLHGYAFNDFSC

SEQ ID NO: 47143 - protein, 730 aa, Cryptococcus neoformans var. neoformans JEC21
MAAPRRSAGVTSSSGYADVAELEKYKLISNIGKGSFGVISKVQRVSDGKEFALKQLDYSKMTEKDRKQILAEVAILDSLKHRNIVQLIQKIKDPKNERIYIVMEYCTSGDLGTLIRRAQRNNSSLPEDKIWNIFLQIVLALHHCHWPAERPANTGGRQSVVAPSTDGGVARYQVLHRDLKPENVFLSDEFVKLGDFGLSKDMGTASFTSTYVGTPLYMPPEILAENRYDTKSDIWSLGCLVYEMCALHSPFSAAQTQAELITMVKSGKIPPLPARYSPALRSVIKAMLTLHPAKRPSTKDLLEMPEMKLHRKLFTVQNQTSLLFAKRDELKQFEDQIRARAVALDEREKELAGREASLQAREDLCDSREEEAKETQRKLNQAAESLRGQWERFREEKEQWERYRELEEEAKETAFGVTDVPDEKCQPHTGAVGIARPPLEERNTAPASPSVSRFTRCLDTPSKIPLATAAVSPAPLAPLEARFSTSHFQPRPATPLRRAATKSMGNLAGVVRAQTAQEWAGATQSTPAKQFSFPIRQQRISIGSPSELQSVCCEDVSMISAIPSPWVPRPRKSSVAPSIVVAQQECPASGESFSTGNNRLASVAPTQIPAPTFIYREAATPAKWSFDDPDLPSPFIRRPNSMPTQPQAASFPPSSNMVGMRQPLGSINPQATITAPSALGSPVAKKIPSRSGNLHQHVLKVNAARVSGEGVAPSVAPVGVVRGRTGNRIG

SEQ ID NO: 47144 - protein, 448 aa, Lactobacillus plantarum WCFS1
MKETSKTTAGLPKLSSNKIWMMSLGFLGVQMAFTLQSSQMSRIFQTLGADPNNLGWFFILPPLAGLIVQPIIGSLSDRTWAPRLGGRRLPYLILGTVVAAIVMLLLPNSGSFGFGYASMAALVFGAITVAFLDLSSNVAMQPFKMMVGDMVNDDQKSYAYGIQSFLLNTGAVIAAIFPFLLTLFGVANTASKGVIPNSVIWSFYIGAAILVVSTIITIARVREYDPVTYAKYHGIDESANKSGGNWLALLKKAPKVFWLVALVQFFCWMAFQYLWTYSTGAMAANVWHTTNASSAGYQAAGNWYGILSAVQSVAAVVWSYVLAKVPNNRHKLGYALSLLLGAIGFFSIFFIHSQSALVVSFILVGMAWAAMNTYPLTMVTNALSGEHMGTYLGLFNGSICLPQIVASLLSFALYPLFGNSQANMFIFAGIVLAVGAGTVGLIKETYKN

SEQ ID NO: 47145 - protein, 1309 aa, ASPERGILLUS NIDULANS FGSC A4
MATLTTKTGQVVDRSVLDSMLRRRLFYTPSFEIYGGVSGLYDYGPPGCAVLNNIVETWRKHFVLEEDMLEVDCTMLTPEEVLKTSGHVDKFADWMCKDPKTGEIFRADHLVEEVLEARLKGDKEARGQKVEVDAEKEAKKKKKAKSVAVKLDDAVVKEYEEILAQIDNFDGPQLEQIIAKYDIRNPVTGGNLLPPVAFNLMFQTSIGPSSNMPGYLRPETAQGQFLNFQKLLEFNQQAMPFASASIGKSFRNEISPRAGLLRVREFLMAEIEHFVDPEGGKKHARFEEVKNIELTLLNRDVQLSGSTKTERMTVGKAVETGLVDNETLGYFLARIQLFLLKLGVDPTKLRFRQHMANEMAHYACDCWDAELYTSYGWIECVGCADRSAYDLNVHKNKTGAPLVVRETRAEPLKVEEWQIELDKKKFGPRFKKDGKTVEAAIDALSQELREKLALDLEKTGKIEVGYIITIEKRTRVENVREYTPNVIEPSFGIGRILYSLMEHVYYYREGDEARGVLSFPPVIAPTKVLLVPLSSNPAFRPMVQELTTKLRRLGVSSRVDDSSASIGKRYARNDELGTPFGVTVDFQSVKDNTITLRDRDSTKQVRASQEEILQALKSLVEGEETWEDVRKRLPEFTGQELYQFVLLNAFKRHELSEVVDVELSRDEDSVTSLAAAQSNDTSIVTFVGINSSLALQKENKNRHLRSFKIDYPPRRTNSASAEFKSPNGSTPGQTVKLSEESVFRTVAGSKGSTETYQRITRLSPWKGEGATRVAAIATGLASSGEIVFFNANTTKPSEGDVIGRIRLKSDEEAEDIDIAGQDEEKGLFPVAYTNGVDVFTCRISPETRSNAAPDVRCVYSPPANTNGKGPRPKFRALRFLSPTTLLLLQNAPNRKGCELIILDLRPTTSSSQATIIRRYKLRKSINIGLSLDVCNLGTSSSIKQQSIIAVSGSDQSLEILTIDVDSSRQYRAAAGYSQIRRYATIRDVHPFSMTRICFSHFVPPPAPVTPETPPQYIKLASVSLGNTVVVHTFPLSPTPPSSRNPRYVLVRPGESELLTGFSSTLAAVLSIVLVIFLLQAFTEIRGVMPPYLGITDYLPTDIRTKIAVPYNAPLPHFPSSPTPILQTQAFPSTSAAPDEAQSRTLRDIIQDSEASILISCDPLNSKIIVEPHNPHPSSTTPEPDLDAEVTPESDLTTRPAQQWTDLSVEDRQTWKTYLINAGFLDQQQDEDESILSRVFFRDSCPRRQPSSNDDHDYTSVDSADKSSELLHIFLVCLSISLPLFYDMYVYDFQMVSTGKFQHTSMPMKG

SEQ ID NO: 47146 - protein, 415 aa, Bacillus cereus ATCC 10987
MNEVLAKGKRAKEVARELVLKSTHQKNEALAAVANQLIHETAYILEENKRDIEEGKAKGFSDSLLDRLMLTENRIIDMTEGIKQLIELRDPVGECVREWERPNGLSIQEMRVPLGVVGMIYEARPNVTVDAATICLKTGNTVILRGSSSAIHSNKAIVAVIHRALKQTSLPEESVQLIEDTTRDSAKQLFTMNDYLDVLIPRGGKQLIDTVVREASVPVLETGAGNCHIFIDETADKQMAIDIIINAKTQRPSVCNAIETIVLHEKWAQQHGSELFSSLKERGVELRGDQRALALDSSIVLASEEDWGTEFLSLTLAVKVVSSIEEAIHHINTYGSMHSEAIISENEENVSKFFVSVDAAALYHNASTRFTDGSEFGFGAEIGISTQKLHVRGPMGLPALTSTKYVIRGNGQIRK

SEQ ID NO: 47147 - protein, 859 aa, Arabidopsis thaliana
MASSEVSMKGNRGGDNFSSSGFSDPKETRNVSVAGEGQKSNSTRSAAAERALDPEAALYRELWHACAGPLVTVPRQDDRVFYFPQGHIEQVEASTNQAAEQQMPLYDLPSKLLCRVINVDLKAEADTDEVYAQITLLPEANQDENAIEKEAPLPPPPRFQVHSFCKTLTASDTSTHGGFSVLRRHADECLPPLDMSRQPPTQELVAKDLHANEWRFRHIFRGQPRRHLLQSGWSVFVSSKRLVAGDAFIFLRGENGELRVGVRRAMRQQGNVPSSVISSHSMHLGVLATAWHAISTGTMFTVYYKPRTSPSEFIVPFDQYMESVKNNYSIGMRFKMRFEGEEAPEQRFTGTIVGIEESDPTRWPKSKWRSLKVRWDETSSIPRPDRVSPWKVEPALAPPALSPVPMPRPKRPRSNIAPSSPDSSMLTREGTTKANMDPLPASGLSRVLQGQEYSTLRTKHTESVECDAPENSVVWQSSADDDKVDVVSGSRRYGSENWMSSARHEPTYTDLLSGFGTNIDPSHGQRIPFYDHSSSPSMPAKRILSDSEGKFDYLANQWQMIHSGLSLKLHESPKVPAATDASLQGRCNVKYSEYPVLNGLSTENAGGNWPIRPRALNYYEEVVNAQAQAQAREQVTKQPFTIQEETAKSREGNCRLFGIPLTNNMNGTDSTMSQRNNLNDAAGLTQIASPKVQDLSDQSKGSKSTNDHREQGRPFQTNNPHPKDAQTKTNSSRSCTKVHKQGIALGRSVDLSKFQNYEELVAELDRLFEFNGELMAPKKDWLIVYTDEENDMMLVGDDPWQEFCCMVRKIFIYTKEEVRKMNPGTLSCRSEEEAVVGEGSDAKDAKSASNPSLSSAGNS

SEQ ID NO: 47148 - protein, 486 aa, Shewanella sp. ANA-3
MSQQYLTSQSGSPIADDQNSLSAGERGPLLLQDWHLIEKLAHFNRERIPERVVHAKGTGVYGTFTLTKDLSEYTIADHFNGVGKQTETFVRFSTVGGEMGSADAERDPRGFGLRFYTARGNHDIVGNNTPTFFLRDGIKFPDFIHTQKRNPLTNLKDPQAMWDFWSLNPEAMHQVTILMSDRGIPANYRQMHGYGSHTFSFWNAKGERFWVKFHFKSQQGVVNLTNEQADKLKGIDPDSSQRDMVVAVTDGNFPRWTVNVQIMPESDANTYHINPFDLTKVWPHGDYPLIEIGVLELNRLPQNYFAEVEQVALAPSNLVPGVGASPDKMLQARLFAYADAQRYRIGANYNQLPVNCPHATKANHHQRAGAMAGTQCPYHGSQTGGDATANYGPNSTAGALVELANFAEPPLRLDGEAARYSRYNQDDYTQAGNLYRIFSEAEKARLVETISGSLRQASLDVQQRMLAHFHKADADYGQRIQTALGL

SEQ ID NO: 47149 - protein, 367 aa, Bacillus cereus ATCC 10987
MKKQRIVVKIGSSSLADSHGGISKEQLSDHVAALARLKEEGHEVLLITSGAVAAGFSALGYPSRPVTIKGKQAAAAVGQSLLMQAYTEEFRKYGIVTAQLLLTRSDFSRKEQYSNAYATLGELLNRSALPIINENDSISLEELTFGDNDMLSALVSGLVSADMLMIFTDVNGLYDKNPQKNEDAKKYYFLPEVTEEIASLAGDAGSKLGTGGMKSKIDAAKTALSLGVSVFIGTGRGQEKFVDVLKGKGDGTYVGNAPQKEIKMNKQWIALHSVVSGQIEIDAGAATAIIQHGKSLLPAGVTNVSGFFKVGDVVEVMTQQGRVIGKGQCTYSAEELREIKGMQSQHIQARGERHNYEVIHRDHWVSL

SEQ ID NO: 47150 - protein, 264 aa, Xanthomonas oryzae pv. oryzae KACC10331
MADQFAAHVLWMDDAALLPGRPYWLKIGTRTVVASVSEIKYRVDVNTQERLAAKRLELNEVGYCNLALDQPVAFVPYARNRTLGGFILIDRHSHATVAAGTLDFALRRAGNLHWHHLDVDKAARARIKGQTPRVLWFTDLSGAGKSTIANLVEKHLHAQGRHTFLLDGDNVRHGLNRDLGFTDEGRVENIRRVAEVARLMTDAGLIVLVSFISPFRAEREMARACFAPGEFVEVFVDVPLQVAEARDVKGLYQAAEILVDTLEK

SEQ ID NO: 47151 - protein, 470 aa, Pseudomonas putida KT2440
MDATSTTTTAKSGHESKLSASLKSRHLTMMSIAGVIGGALFVGSGSVIHSAGPAAVLAYLAGGILVVLIMRMLGEMATSSPDTGSFSTYADRAIGRWAGFTIGWLYWWYWVILMAWEAYVAGKILHGFFPDVSVNVFVLATTLLLITVNFFNVKHYGEFEFWFALIKVIAIVCFLIVCTAAVMNIWQFGEVRGISHLTAEGFMPNGITTVIGALLGVMFAFLGAEIVTIAASEAKDPAAQIVKATNSVVWRVCLFYVGSIFLIVCLVPWNDPHLGVSGYGAYRRTLELLGVPYAELLMNFVVLTSVSSCLISGHYTASRMLFSLAQRGDAPSFFKITRAGTGVPVYAIMGSCAVAVVCALINFSETLRPKDVLDTLMNTTGMIALLVYLVIAFSQLRMRRKLIAEGKEVRLKMWLFPWLTYLVIAFIVAALVTMAFMPDYQILVISTGIAAAVVVAMGVVHQIRSGSKQH

SEQ ID NO: 47152 - protein, 162 aa, Xanthomonas campestris pv. vesicatoria str. 85-10
MNKITHYFKSLLLLELLGGLWLTLKYTFKPKYTVLYPMEKFPQSPRFRGLHALRRYPNGEERCIACKLCEAVCPALAITIDSAKREDGTRRTTRYDIDLFKCIFCGFCEESCPVDSIVETHILEYHFEKRGENIVNKPQLLAIGDRLETEIAERRAADAAFR

SEQ ID NO: 47153 - protein, 411 aa, Thermus thermophilus HB27
MTPRHLILGLQHTVAMFGATVLVPLLTGLNPSVALFTAGVGTLVFHLVTGRMVPVFLGSSFAFIAPILAAKEAGFSLSAIGGGIAAAGLVYVLFALLVLLIGSERVRQVFPPVVTGPVIVVIGLTLAPVAVEMAGKDWLLAVFTFLGAVASAVFFRGLFQMVPVLVGVGAGYLLALLLGRVDLSPVREAPWFALPAFTPATLEWGAVLLIAPVALVTVMEHIGDILTNGRVVGKDFFVKPGLHRTLLGDGLATSLAGLLGGPANTTYSENTGVLAVTRVYDPLVLRIAAGFAILLAFIPKLSALLQTLPQGVLGGISMLLFGMIASIGIRTLAEAEIDFTQSRNLIVVSAILVLGLGGAVANLGTVQVAGTAVPLKVSGMALAALVGVVFNLLLPPRLEPRTLLEEEERLP

SEQ ID NO: 47154 - protein, 474 aa, Escherichia coli O157:H7 EDL933
MSRLVVVSNRIAPPDEHAASAGGLAVGILGALKAAGGLWFGWSGETGNEDQPLKKVKKGNITWASFNLSEQDLDEYYNQFSNAVLWPAFHYRLDLVQFQRPAWDGYLRVNALLADKLLPLLQDDDIIWIHDYHLLPFAHELRKRGVNNRIGFFLHIPFPTPEIFNALPTYDTLLEQLCDYDLLGFQTENDRLAFLDCLSNLTRVTTRSAKSHTAWGKAFRTEVYPIGIEPKEIAKQAAGPLPPKLAQLKAELKNVQNIFSVERLDYSKGLPERFLAYEALLEKYPQHHGKIRYTQIAPTSRGDVQAYQDIRHQLENEAGRINGKYGQLGWTPLYYLNQHFDRKLLMKIFRYSDVGLVTPLRDGMNLVAKEYVAAQDPANPGVLVLSQFAGAANELTSALIVNPYDRDEVAVALDRALTMSLAERISRHAEMLDVIVKNDINHWQECFISDLKQIVPRSAESQQRDKVATFPKLV

SEQ ID NO: 47155 - protein, 411 aa, Oryza sativa (japonica cultivar-group)
MGGGGAGGDGEAWADQEQGNGGGRGGGGGEAKRSEIYTYEAGWHIYGMNWSVRRDKKYRLAIASLLEQHNNHVQVVQLDESSGDIAPVLTFDHPYPPTKTMFVPDPHSVRPDLLATSADHLRIWRIPSPDEAAAAAAASSNSGSVRCNGTASPDVELRCELNGNRNSDYCGPLTSFDWNDADPRRIGTSSIDTTCTIWDVEREAVDTQLIAHDKEVYDIAWGGAGVFASVSADGSVRVFDLRDKEHSTIIYESGSGGSSNSAGADGGAASPTPLVRLGWNKQDPRYMATIIMDSPKVVVLDIRYPTLPVVELHRHHSPVNAIAWAPHSSCHICTAGDDSQALIWDLSSMGTGSNNGGNGNGNAAAAAAAEGGLDPILAYTAGAEIEQLQWSATQPDWVAIAFSTKLQILRV

SEQ ID NO: 47156 - protein, 428 aa, Polaromonas sp. JS666
MGMLDWKEKSVDVLKQGGVIAPDERLPWPQTAVMGVQHVIAMFGATVLAPILMGFDPNIAILMSGIGTLIFFAVTGGKVPSYLGSSFSFIGVVIAATAYAGKGPNANLGVALGGIIACGVAYTLIGVIVQLVGTGWIERVMPPVVTGAVVAVIGLNLASIPVKNMAASNFDAWMQLVTFVSVALVAVMTRGMVQRLLILVGLLVASIVYAVLTNGLGLGKPLDLSGIASAGWVGLPGIAAPVFSLNAMLLIAPVAIILVAENLGHIKAVTAMTGKNLDVYIGRAFIGDGVATIVSGSAGGTGVTTYAENIGVMAATKIYSTAVFVVAALIAILLGFSPKFGALIQAIPLPVMGGVSIVVFGLIAVAGAKIWVDNKVDFSDNRNLIVAAITLVLGTGDFTLKFGQFAMGGIGTATFGAILLYALLNRQR

SEQ ID NO: 47157 - protein, 348 aa, Pyrococcus furiosus DSM 3638
MVERLKVGVVGCGNIFNLAHKPALKALRHLAKVVAVMDINEEAAKKAGKELNAKVYTDLDEFLNEDMDVVEVLTPTYTHAEIAIKALKAGKHVIVEKPIALTVEEAKEMIKEAEQQGLKLFVGHVRRFDKRWIQIKEVIKSRNILPVQIRKTEVQHLPFPADYWYWDESKSGGVALDLGVHVTDFLRWFFESEPIEVFAVGKAIRGEARVNKTFDHVIMFIKFEGEKTGIVEVSWSYPLPAKYGVFYHHLDIIGKNGRIRYTPLDAPVVGVVKSSFEMPRFSPMLSTFPEAFEAELKHFFECIRSECDPIVTAKDALIALYIAEKARESIRKGEPVRLNVEELTSSSP

SEQ ID NO: 47158 - protein, 392 aa, Cryptococcus neoformans var. neoformans B-3501A
MSLLAESLAGAKYMVATNDDRESSTNGAAEFLRRKRWPEILLKELVGSAVFCLKPTLILGSRQYQNGEAWSWKIIYSSPSVYEMLGQRPADLEGRDFFDLVLVDDRPQLQSFFNSLLAPPLLNVEPTLLSSEGPDTLGGSRTTYIRMLSAAPGPSRSDSSSRSSSGQRSLPQSSYGTPVGRILGPVVWEIRAHATGIGEDLGEAAGNGETLRMAADGTVVSAIREGDGKHKAIWLMARQVGEGMNEDQKSLEAFLEVKLENERLLAELQELEEEVGMTVEDSINNNQSASTPSSHSSTDTPPGGDKNKNKAGRPPKTNTQASASGHKRQKSGTGGPAGASEGETMHVCVTCGRTDSPEWRKGPLGPKTLCNACGLRWAKRNSTHIPKKDKQS

SEQ ID NO: 47159 - protein, 765 aa, Hordeum vulgare subsp. vulgare
MASHIVGYPRMGPKRELKFALESFWDGKSSAEDLEKVATDLRASIWKQMAGAGIKYIPSNTFAYYDQVLDTTAMLGAVPDRYSWTGGEINLSTYFSMARGNATVPAMEMTKWFDTNYHFIVPELGPDTKFSYSSHKAINEYKEAKALGVDTVPVLVGPVSYLLLSKAAKGVEKSFSPLSLLSSILPVYKEVIAELKAAGASWIQFDEPTLVKDLESHQLAAFSAAYTELESTLSGLNVLVETYFADVPAESYKTLTSLSSVTAYGFDLERGTKTLELVKSGFPAGKYLFAGVVDGRNIWADDLAASLATLQSLEAIVGKDKLVVSTSCSLMHTAVDLVNETKLDDEIKSWLAFAAQKVVEVNALAKALAGQKDEAYFAANAAALASRRSSPRVTNEEVQKAATALKGSDHRRATTVSARLDAQQKKLNLPVLPTTTIGSFPQTVELRRVRREYKAKKISEEEYTNAIKEEISKVVKIQEELDIDVLVHGEPERNDMVEYFGEQLSGFTFTANGWVQSYGSRCVKPPIIYGDVSRPNPMTVFWSKMAQSMTARPMKGMLTGPVTILNWSFVRNDQPRFETCYQIALAIKKEVEDLEAGGIQVIQIDEAALREGLPLRKSEHAFYLDWAVHSFRITNCGVQDTTQIHTHMCYSNFNDIIQSIINMDADVITIENSRSDEKLLSVFREGVVYGAGIGPGVYDIHSPRIPSKEEIADRVNKMLAVLDTNILWVNPDCGLKTRKYAEVKPALTNMVEAAKQIRAELAKAQ

SEQ ID NO: 47160 - protein, 634 aa, Streptococcus pneumoniae
MSNLSVNAIRFLGIDAINKANSGHPGVVMGAAPMAYSLFTKQLHINPAQPNWINRDRFILSAGHGSMLLYALLHLSGFEDVSMNEIKSFRQWGSKTPGHPEFGHTAGIDATTGPLGQGISTATGFAQAERFLAAKYNREGYNIFDHYTYVICGDGDLMEGVSSEAASYAGLQKLDKLVVLYDSNDINLDGETKDSFTESVRDRYNAYGWHTALVENGTDLEAIHAAIETAKASGKPSLIEVKTVIGYGSPNKQGTNAVHGAPLGADETASTRQALGWDYEPFEIPEQVYADFKEHVADRGASAYQAWTKLVADYKEAHPELAAEVEAIIDGRDPVEVTPADFPALENGFSQATRNSSQDALNVVAAKLPTFLGGSADLAHSNMTYIKTDGLQDDTNRLNRNIQFGVREFAMGTILNGMALHGGLRVYGGTFFVFSDYVKAAVRLSALQGLPVTYVFTHDSIAVGEDGPTHEPVEHLAGLRAMPNLNVFRPADARETQAAWYLAVTSEKTPTALVLTRQNLTVEDGTDFDKVAKGAYVVYENAADFDTILIATGSEVNLAVSAAKELASQGEKIRVVSMPSTDVFDKQDAAYKEEILPNAVRRRVAVEMGASQNWYKYVGLDGAVLGIDTFGASA

SEQ ID NO: 47161 - protein, 464 aa, Shigella flexneri 2a str. 301
MVRSQLSRADAPCLLTSLRRQLMAMFGFPHWQLKSTSTESGVVAPDERLPFAQTAVMGVQHAVAMFGATVLMPILMGLDPNLSILMSGIGTLLFFFITGGRVPSYLGSSAAFVGVVIAATGFNGQGINPNISIALGGIIACGLVYTVIGLVVMKIGTRWIERLMPPVVTGAVVMAIGLNLAPIAVKSVSASAFDSWMAVMTVLCIGLVAVFTRGMIQRLLILVGLIVACLLYGVMTNVLGLGKAVDFTLVSYAAWFGLPHFSTPGFNGQAMMLIAPVAVILVAENLGHLKAVAGMTGRNMDPYMGRAFVGDGLATMLSGSVGGSGVTTYAENIGVMAVTKVYSTLVFVAAAVIAMLLGFSPKFGALIHTIPAAVIGGASIVVFGLIAVAGARIWVQNRVDLSQNANLIMVAVTFVLGAGDFALTLGGFTLGGIGTATFGAILLNALLSRRLVDVPPPEVVHQEP

SEQ ID NO: 47162 - protein, 634 aa, Streptococcus pneumoniae
MSNLSVNAIRFLGIDAINKANSGHPGVVMGAAPMAYSLFTKQLHINPAQPNWINRDRFILSAGHGSMLLYALLHLSGFEDVSMDEIKSFRQWGSKTPGHPEFGHTAGIDATTGPLGQGISTATGFAQAERFLAAKYNREGYNIFDHYTYVICGDGDLMEGVSSEAASYAGLQKLDKLVVLYDSNDINLDGETKDSFTESVRDRYNAYGWHTALVENGTDLEAIHAAIETAKASGKPSLIEVKTVIGYGSPNKQGTNAVHGAPLGADETASTRQALGWDYEPFEIPEQVYADFKEHVADRGASAYQAWTKLVADYKEAHPELAAEVEAIIDGRDPVEVTPADFPALENGFSQATRNSSQDALNVVAAKLPTFLGGSADLAHSNMTYIKTDGLQDDANRLNRNIQFGVREFAMGTILNGMALHGGLRVYGGTFFVFSDYVKAAVRLSALQGLPVTYVFTHDSIAVGEDGPTHEPVEHLAGLRAMPNLNVFRPADARETQAAWYLAVTSEKTPTALVLTRQNLTVEDGTDFDKVAKGAYVVYENAADFDTILIATGSEVNLAVSAAKELDSQGEKIRVVSMPSTDVFDKQDAAYKEEILPNAVRRRVAVEMGASQNWYKYVGLDGAVLGIDTFGASA

SEQ ID NO: 47163 - protein, 410 aa, Anabaena variabilis ATCC 29413
MVCGLLWQSGSMVLSKPFSCSHMIEVVITGIGLVSALGTSLEESWQSLIAGKSGITWHQPFPELPPLPLGLIGQKPTSLPSLTQVVVDAAIKDAGLVPPLTDCAVVIGSSRGYQASWEKLAQQIYAGDNSFDNAERLEDWLDTLPHMNAMATARQIGATGAVTAPMAACATGIWAIAQAAILIQTGQYQRVIAGATEAAITPLTLSGFQQMGALAKTGAYPFDLQREGLVLGEGAAVFVLESRQLAEKRKAKIYGQILGFGLTNDAYHSNQPEPKGKSAIAAIEQCLVRSQLTSADIDYIHAHGTATQLNDRIESQVIKHLFPSKVAVSSTKGSTGHTLGASGALGVAFSLLALEQKILPPCVGLQEPEFDLNIVKTAQHSQIQQVLCLSFGFGGQNAAIALGRGNDHRG

SEQ ID NO: 47164 - protein, 634 aa, Streptococcus pneumoniae
MSNLSVNAIRFLGIDAINKANSGHPGVVMGAAPMAYSLFTKQLHINPAQPNWINRDRFILSAGHGSMLLYALLHLSGFEDVSMDEIKSFRQWGSKTPGHPEFGHTAGIDATTGPLGQGISTATGFAQAERFLAAKYNREGYNIFDHYTYVICGDGDLMEGVSSEAASYAGLQKLDKLVVLYDSNDINLDGETKDSFTESVRDRYNAYGWHTALVENGTDLEAIHTAIETAKASGKPSLIEVKTVIGYGSPNKQGTNAVHGAPLGADETASTRQALGWDYEPFEIPEQVYADFKEHVADRGASAYQAWTKLVADYKEAHPELAAEVEAIIDGRDPVEVTPADFPALENGFSQATRNSSQDALNVVAAKLPTFLGGSADLAHSNMTYIKTDGLQDDANRLNRNIQFGVREFAMGTILNGMALHGGLRVYGGTFFVFSDYVKAAVRLSALQGLPVTYVFTHDSIAVGEDGPTHEPVEHLAGLRAMPNLNVFRPADARETQAAWYLAVTSEKTPTALVLTRQNLTVEDGTDFDKVAKGAYVVYENAADFDTILIATGSEVNLAVSAAKELASQGEKIRVVSMPSTDVFDKQDAAYKEEILPNAVRRRVAVEMGASQNWYKYVGLDGAVLGIDTFGASA

SEQ ID NO: 47165 - protein, 480 aa, Arabidopsis thaliana
MAAFPNLNSGSGLKKLDEHLLTRSYITGYQASKDDITVFTALSKPPTSEFVNVSRWFNHIDALLRISGVSAEGSGVIVEGSSPITEEAVATPPAADSKDAAADEEDDDDVDLFGEETEEEKKAAEERAASVKASTKKKESGKSSVLIDIKPWDDETDMKKLEEAVKSIQMEGLFWGASKLVPVGYGIKKLQILCTIVDDLVSIDTMIEEQLTVEPINEYVQSCDIVAFNKICSGAVLLLSSSSVHGLRYRPVRRYFNSSDQSSVLGSNKTFESGGHNKARRVQEGDVEEGGCEICRGRERDCGGCTGGEGSCEGCNGAGGSSGDGGAGGGGSGRVGRRGNGKGDGKGQGDDGGKEDCNDHEKNKGDDRNNGDGVGIGIGIGIGGEPSPGSGGGGGGGGGGGGGGSGPGGGGGGGGGGGGGGGGVGDGYGYGRGWGGGYGGGGGGGWGWGGDSNGGVWGPGNGGGCWFPGCEYKKSTKGQH

SEQ ID NO: 47166 - protein, 292 aa, Cryptococcus neoformans var. neoformans JEC21
MSADKLPKALQATEDDIQLLLAAQCHLGTKNCDKSMENYVWKRRADGIHVINVGKTWEKLVLAARVLATIENPNDVCVISARPYGHRAVLKYGSFTGAQAIAGRFTPGSFTNYITRSFKEPRVIIVTDPRVDHQAIREAAYVNIPVIAFCDTDASTKFVDIAIPANNKSRHSIGLMWYLLCREVLRLRGTVPRGPTGPSGWDVLPDLFFYRDPEEIEREAAEKAAAAAAQEGADAEAAATSAAAGVTAEYDAGNAADAVLAAQPTETALDWSDEPVAGDWAAEPAADAQGGW

SEQ ID NO: 47167 - protein, 513 aa, Bacillus cereus ATCC 10987
MTFLFNYLKIITRFHITEYIPQYGKTSNFILSTTKVRKTMAQVNNTNNELKRTMKSRHLFMIALGGVIGTGLFNGSGFIISQAGPGGSVLAFMAGGLLMYFVMLCLGELAVAMPVSGSFQEYATKFINPATGFTIGWLYWLSWANTTGLEFTTAGITMQRWFPDIPVWVWCLIFGVTIFTINALSARSYAETEFWFSSIKVSAIIAFIILGGAAMFGFIDLKGDEPAPLLSNFVNHGGLFPNGLAAILLTMVTVNYSFQGTELVGIAAGESEDPAKTLPRSIRNIIWRTMFFFVLAIFVLVALIPWEEAGLTKSPFVAVFDNIGIPYAADIMNFVILTAVLSVANSGLYAATRMLWSLSKNEMAPAFLKKLSSRGIPLNALIMTIAISAFSLLTSVVAAETVYLWLISISGVITIIVWMSICVSQFFFRKHYLADGGKLEDLKFKTPLYPLVPILGFGLYGIILISLIFIPEQRLGIYCTVPFIIFCYTYYHLKVKKRISTNTNSETKISETM

SEQ ID NO: 47168 - protein, 229 aa, Triticum aestivum
MQIFVKTLTGQTITLEVESSDTIDNVKAKIQDKEGIPPDQQRLIFAGKQLEDGRTLADYNIQKESTLHLVLRLRGGMQIFVKTLTGKTITLEVESSDTIDNVKAKIQDKEGIPPDQQRLIFAGKQLEDGRTLADYNIQKESTLHLVLRLRGGMQIFVKTLTGKTITLEVESSDTIDNVKAKIQDKEGIPPDQQRLIFAGKQLEDGRTLADYNIQKESTLHLVLRLRGGQ

SEQ ID NO: 47169 - protein, 302 aa, Glycine max
MGTQRQNSMYSLTLDEVQNQLGDLGKPLTSMNLDELLKNVWTAEASQTIGMDNEGTSQASQAALQHQASLSLTGALSKMTVDEVWRDIQENKIIAEKKFEDRHPTLGEMTLEDFLVKAGVVADASSNRTNTGTIAGVDSNVAVPQFPSQGQWIQYPQVQYQHSPQSLMGGIYMPSQGMVQPLHMGAEASIDVSFADSQVALPSPLMGTMPDMLTPGRKWSNSEDMREKTVERRQKRMIKNRESAARSRARKQAYTNELENKVSRLEEENERLRKQKELELMLPCEPPPEPKYQLRRIASAPF

SEQ ID NO: 47170 - protein, 471 aa, Exiguobacterium sp. 255-15
MIEQNVINGVWYDTEETIPVFNPATKELLGHVPSSTADDAQRAVDAASTAFVDWSERTADDRADKIDAWYRLIQEHRDELADIMTREQGKPFIEARGEIDYGNQYVRWYAEEARRIYGETIPASVPGKRLFVEKEPVGVVAAITPWNFPAAMITRKLAPALAAGCTVVLKPSEETPYTALRLVELAIEAGIPAGAINVLTGDAATISGVWQADSRVRKITFTGSTAVGKLIMRQAADTMKKLSLELGGHAPFIVTENADLDKAVQGAIRSKFRNGGQACVATNRFYVQASVLDTFTEKFVAEVKRLKVGNGLDADSTIGPLINAKAVAKVKAHIDDAVAKGATILTGGTIDDSVGYFVEPTVLGNVTEDMICMQEETFGPLAPISVFETLDEVIERANNTPYGLAAYAFSEKIDEALRLGKKLEYGIVGLNDGAPSAAQAPFGGYKESGLGREGGVYGIEDYLEVKYLSLG

SEQ ID NO: 47171 - protein, 161 aa, Lotus corniculatus var. japonicus
MFLMVTGFMNYSQQTVRAARYIGQSFMITLSHANRLPVTIQYPYEKLITSERFRGRIHFEFDKCIACEVCVRVCPIDLPVVDWKLETNIRKKRLLNYSIDFGICIFCGNCIEYCPTNCLSMTEEYELSAYDRHELNYNQIALGRLPMSVIDDYTIRTIQIK

SEQ ID NO: 47172 - protein, 599 aa, Brassica napus
  misc_feature (194)..(194): Xaa can be any naturally occurring amino acid
  unsure (1)..(599): unsure at all Xaa locations
MDMAFVEVCLRMLLVFVLSWTIFHVTNRKKKKATKLADVATEERREGGPDVIIVGAGVGGSALAYALAKDGRRVHVIERDMREPERMMGEFMQPGGRLLLSKLDLQDCLEEIDAQKSTGLTLYKEGKGGASPFPVGDSKCGYEPSARMSYNGRFVHRLDRKTSELASVRVEEVQAGCWIELTGVVQGVRFKKRXGQKSTAIAPLTEGCESCYSIPVDTNFPYEPSGRFFHNGRFVQRLRQKASSLPNVRLEEGTVRSLIEEKGVVKGVTYKNSSGEETTSFAPLTVVCDGCHSNLRRSLNDNNAEVTAYEIGYISRNCRLEQPDKLHLIMAKPSFAMLYQVSSTDVRCNFELLSKNLPSVSNGEMTSFVRNSIAPQVPLKLRKTFLKGLDEGSHIKITQAKRIPATLSRKKGVIVLGDAFNMRHPVIASGMMVLLSDILILSRLLKPLGNLGDENKVSEVMKSFYALRKPMSATVNTLGNSFWQVLIASTDEAKEAMRQGCFDYLSSGGFRTSGLMALIGGMNPRPLSLFYHLFVISLSSIGQLLSPFPTPLRVWHSLRLLDLSLKMLVPHLKAEGIGQMLSPTNAAAYRKSYMAATVV

SEQ ID NO: 47173 - protein, 425 aa, Kineococcus radiotolerans SRS30216
MARTGWQLHGDGRAASPGAVVAPEERLAWPRTVGIGLQHVVAMFGSTVLVPAITGFPVATTLFFSAIGTALFLLITRNRLPSYLGSSFAFIAPVLGSAAGSATGGILVTGLLLAVVGLAVHVAGSRWIDVVMPPVVTGTIVALIGLNLAPAAWGTTEDSGFRADPVTAVVTLLAIALTSVLFRGLLGRLAILVGVVVGYLVAAVRGLVSWEAVGAADWVGLPTFTAPRVDVSSLALFLPVVFVLVAENVGHVKSVAAMTGRDLDPLAGRALLADGLATTLAGLGGGSGTTTYAENIGVMAATKVYSTAAYWVAAAAALVLSFSPKFGALVGSIPPGVLGGAATLLYGMIGVLGARIWVQNKVDFSDPVNLTTAAVALVVGIANYTLTTSGGLSFEGIALGTVAAIGLYHLMRAVARARGTATPAA

SEQ ID NO: 47174 - protein, 499 aa, Malus x domestica
MPAPDTDRHRVGARPAVRTRVPLRQLLRVASVACGIQFGWALQLSLLTPYVQELGIPHAWASVIWLCGPLSGLVVQPLVGHMSDRCTSRYGRRRPFIVVGAACIAVSVLIIGFSADIGWLLGDRGGGVRPRAIAVFVFGFWILDVANNVTQGPCRALLADLTEKDYRRTRVANAYFSLFMAVGNVLGYATGSISYLFKVFPFSITPACNVNCANLKSAFFVDTAFIAITTWISISAAQVTPLGSSNRTTPFADEGPGQSSHIEEAFLWELFGTFRYFPGSVWLILLVIALNWIGWFPFLLFDTDWMGREIYGGKPNEGINYSTGVRMGALGLMLNSVILGITSVLMEKLCRKWGAGFVWGISSILMTLCFFAMLVITFVNKSIGVRGHDLPPDGIVIAALVVFAVLGIPLAITYSVPYALVSSRIESLGLGQGLSMGVLNLAIVIPQVIVSLGSGPWDQLFGGGNVPAFAVAAVASLASGLVAILAIPRSAAPKPRAVT

SEQ ID NO: 47175 - protein, 473 aa, Burkholderia sp. 383
MQPSNQSDLKCGLKQRHMTMIALGGVIGAGLFVGSGVVIQQTGPAAILSFLITGGLVVLVMRMLGEMACAMPAVGSFYEYARLAFGNWRGPGKMAGFLTGWMYWYFWVIVVALEAVAGAKLIQFWLPDTPAWIISLALLVVLTLTNLISVGSYGEFEFWFSSIKVGAIIVFLFLGGLYVLGLWPASMHTTSVLPTLLGHGGFMPLGIGPVMSGAVAATGFYFGAEIVTIAAAEAKEPAKAVAKATNSVITRVLVFYVGSVALVVALVPWNSHQMATPYVSALEVMGLPAAANVMNAIVLTAVLSALNSGLYAASRMLFALTRHGDAPAALAKVNKRGVPVRAILLGTVFGYVSVVMSYVSPDTVFAFLVNSYGTVALFVYVLIAFSQLRLRKRLDPVAASKLRVKMWAYPYLTWVAIIGMVGILVAMAFIPDQRKPLWLGVASLGVLVVAYGLTRRSRREHLDDSELLAYPPR

SEQ ID NO: 47176 - protein, 255 aa, Exiguobacterium sp. 255-15
MYLPSFQLDQKTVLVTGAGRGIGRALAIGMAEAGADVLLVARTESDLQETAKQIEQLGRRAFVLTCDVTDRTQVQATVDRAYTYVDRIDVLVNNAGMNIRSKALDVTEDEWETIQQTNLKSAFLFSQEIGRRMQDTGGSILNIASVAGHVALRTGVVYATTKAALIQMTKVLALEWGPKNIRVNAIGPWYFKTPLTEPLLADPAYLQDIVDVTPLGRVGELTELVGPAVFLASDAGTYVTGQTLFVDGGMTIKGF

SEQ ID NO: 47177 - protein, 568 aa, Arabidopsis thaliana
MDTARAWLKKLKSKGKEKSSNKKETSRGNVKEGSKTAGGEEAVSNVTKQKAAAAKQYIENHYKKQVQSQQQRKERRDMLENKLAAAEVSEEEQKNLLKDLEKKETEYMRRQRHKMGTDDFEPLTMIGKGAFGEVRICREKTTGNVYAMKKLKKSEMLRRGQVEHVKAERNLLAEVDSNCIVKLYCSFQDEEYLYLIMEYLPGGDMMTLLMRKDTLTEDEARFYVGETVLAIESIHKHNYIHRDIKPDNLLLDRSGHMKLSDFGLCKPLDCSILQEKDFVVAHNLSGALQSDGRPVAPRRTRSQMEQLQNWQRNRRMLAYSTVGTPDYIAPEVLLKKGYGMECDWWSLGAIMYEMLVGFPPFYSDEPMTTCRKIVNWKNYLKFPDEVRLSPEAKDLICRLLCNVEQRIGTKGANEIKEHPWFSGVEWEKLYQMKAAFIPQVNDELDTQNFEKFEETDKQVPKTPKSGPWRKMLSSKDINFVGYTYKNVEIVNHDQLPGIAELKKKSTKPKRPSIKSLFEDESASSTTSHQGSFMKLLPTQIEVPEKEDKSSSSSETLSSSTTRFDNATS

SEQ ID NO: 47178 - protein, 568 aa, Cryptococcus neoformans var. neoformans B-3501A
MHDGGAGRCGTRTEHCLLRPGRSITTTNEIDPVLVITRYPQLGIFSFHPEIFPVTSKYLSPAQLPQRTLLYILPLFSWTTLLALPSHLTSTSTTQTAMYGQQNNYGTPPPQQWGQAPPQGYQPGYQNGPPAATYGAHPSQQQQWGAPPGPPQHQPYGAPPANQYGAPPQHQQGYGGHSPQPPFGAPSPAPAGYGVPPIAPPQGQYGTSSPYPQQPPQQGFGGPQQGYGSQPQGQGPMMYLGVPIPAPPPAVPVSTLAGYDARFDAERIRKATKGFGTDERTIIDTLSPLDAFQMDVLSRTYEQTVGRSLKTTLEKELSSWLEYTLVLLSLGPLGGDVYLLHRACKGMGTHEDLLNEVLLGRTNQEIFLLKEAYRRTYNKDLVQIVQGELSMKTERMFNMALSGQRDESPYLNHQLVQQDVETLYRAGPGKIGTDEIAICGILISRSKEHLKAIAQAFPARHRVSLSQMIKSEFSGHMCDALFFIARGVEADGDGVVRDCELLHAAMAGMGTKDERMIYRLVRNHWNRPRFNAIKNQYQVLYRNSLRRAVEGETTGKYEKALVGIIEQN

SEQ ID NO: 47179 - protein, 598 aa, Candida albicans SC5314
MTTPLSSYSTTVTNHHPTFSFESLNSISSNNSTRNNQSNSVNSLLYFNSSGSSMVSSSSDAAPTSISTTTTSTTSMTGASANADNQQVYTITEEDSINDINRKEQNSFSIQPNQTPTMLPTSSYTLQRPPGLHEYTSSISSISSTSSNSTSAPVSPALINYSPKHSRKPNSLNLNRNMKNLSLNLHDSTNGYTSPLPKSTNSNQPRSNFIMDSPSKKSTPVNRIGNNNGNDYINATLLQTPSITQTPTMPPPLSLAQGPPSSVGSESVYKFPPISNACLNYSAGDSDSEVESMSMKQAAKNTIIPPMAPPFALQSKSSPLSTPPRLHSPLGVDRGLPISMSPIQSSLNQKFNNITLQTPLNSSFSINNDEATNFNNKNNKNNNNNNCTATTTITNTILSTPQNVRYNSKKFHPPEELQESTSINAYPNGPKNVLNNLIYLYSDPAQGKIDINKFDLVINVAKECDNMSLQYMNQVPNQREYVYIPWSHNSNISKDLFQITNKIDQFFTNGRKILIHCQCGVSRSACVVVAFYMKKFQLGVNEAYELLKNGDQKYIDACDRICPNMNLIFELMEFGDKLNNNEISTQQLLMNSPPTINL

SEQ ID NO: 47180 - protein, 82 aa, Arabidopsis thaliana
SRGGEKERLLLERNGEIYGANLGGCTGMGPVTVEARTCESQSHRFKGTCVSASNCANVCHNEGFVGGNCRGFRRRCFCTRHC

SEQ ID NO: 47181 - protein, 458 aa, Listeria monocytogenes str. 1/2a F6854
MEEQKEELQRGLKNRHIQLIAIGGAIGTGLFLGAGKSIHLAGPSIMLVYLIIGAILFFVMRALGELLIHNPTTGSFTEFAEQFIGPWAGFITGWTYWFCWIVTGIAEITAVGMYVKFWVPDLPQWIPALACVLILLLFNLATVKAFGEIEFWFAIIKVVVIIALIVIGFVLVFIGYKHGTSTASFSNLVDYGGFFPNGIAGFLLAFQMATFSFVGIELVGVTAGEADDPERTLPKAINNIPIRILIFYIGALLVLMSIYPWSNIDPNTSPFVSVFTMIGIPAAAGIINFVVLTAAMSSCNSGIFSTSRMLYTLSAEGKAPKKMHHLSSNGVPATALITSTACLLIGVFLNYFLPEQVFILVTSIATICFIWVWGVILVAHLRFRHKHPEIAEKSKFKMPLSPLMNWVSLIFFGGLLVILGFAADTRIALFVTPVWFLILGIAYQILKASNRKTKIRHN

SEQ ID NO: 47182 - protein, 415 aa, Bacillus clausii KSM-K16
MATAKLISQKAKAHAPSLSQATTAEKNSVLQAMAQQLKADADVLLQANQLDIANAKKNGLSDHLIDRLLLTKARIDAMATAIDHLIELPEPIGAVKEEIKRPNGLVIKEMVVPFGVVGMIYEARPNVTVDACTLAVKTGNAVVLRGSASALHSNKAIVHTLKKAFQNSPIHPDVIQLLEDTSKEEAANMMQLKSTIDVLIPRGGANLIQTVLQEATIPVIETGVGNCHVYVASSADPDMAFDIVVNAKTQRPSVCNACETLLVEQSFAKAHLPALVERLSAKGVSLVGNEGACTLDPRIAQANEDDWSTEYLDLRLAIRVVADTNEAIAHINQYGTKHSEAIITESLAERDTFFATVDAACVYHNASTRFTDGFEFGFGAEIGISTQKLHARGPMGLKALTTSKYGIYGEGQVKE

SEQ ID NO: 47183 - protein, 362 aa, Cryptococcus neoformans var. neoformans JEC21
MAPQTVPCQYKTGKTLGSGTYAVVKECVHITTGEYYACKVLNKKFLMGREHMVRNEIAVLKRVSAGHKNIVQLHDFFETTHNLYLVFDLCTGGELFDRICAKGSYFEKDAANIVRTVTSAVKYLHDQGIVHRDLKPENILFKSKAEDADLMLADFGLSKVLDDDKFAILTTTCGTPGYMAPEIFKKAGHGKPVDIWAIGVITYFLLCGYTPFDRDSQYEEMQAICKGDYRFEPVEYWGGVSETARQFVRDCLTVDPTNRPTVDELLNHPWLRDVEASKDEPAEAKGVDLLPNVKAAFDAKKTFRKAVLGMMAVHRLQDHSATIHGQTEAEQEKLKKEVEAFKEEAAQEDVKDVIQPGAPASI

SEQ ID NO: 47184 - protein, 372 aa, Bacillus clausii KSM-K16
MATGTIVIKIGSSSLTDGNGALSTERLRGHVEAICELRHQGINVIVVTSGAVAAGFTLIGYHQRPKSISQKQAAAAVGQSLLMQAYMDAFRLHGYTAAQLLLTRADFADPARFSNISQTLRELLKRGAIPVINENDSTSVDELTFGDNDRLSALVSGIIHADMLCLYTDVNGVYDQNPNDSPNAKKYHYLASVPEALLDRVSADTSAVGTGGMKSKLLAAKTAIELGTNVFIGNGKGRETFTDVLLGKGDGTYLGPFTNKTMSTTKQWIVFHSEPAGSIEIDSGASTALLKRGKSLLPAGVLSAKGDFSAGDIIEVFFNNRPIGKGKTNFSKHELELIKGLNSEEALSLTKRSKKAVIHRDFWVATKKECSY

SEQ ID NO: 47185 - protein, 616 aa, Bacillus clausii KSM-K16
MCGITGWVDWQRNLRTETKQMKNMANTLNRRGPDALETWTSDHAAFGHARLVVVDPEGGKQPMTRTAKGNTCTIVYNGELYNTEELRKELLAHGHTFAGHSDTEVLLKAYMEWGAACLEKLNGIFAFAVWDEQEQTLFMARDRLGVKPLFYTEKDGMLLFGSELKALLAHSQIEAVVDRSGLADVMGLSPSRTPGHGIFKGIVELRPAHYLQFSKNGSAVKRYWQLQSNIHTETAHETAAHIRELLEDIVERQLFADVPVGMFLSGGVDSSALTAIAARIYEKQGNAPIFSYSIDYEENEKYFKASTFQPNADADWVEKVAAHCGTNHKNCIIGNDVLANLLKESVLVRDTPGMADVDSSLLWFCKQIKNDVTVGLSGECADEIFGGYPWFHKAEVMAIDGFPWMRSLDERIQLLQPDWQKRLNLQEYVYDRYKETIQETPRFDGDSPEEARRREISYLNMIWFMTNLLDRKDRMSMGASLEVRVPFSDHRLVEYVWNIPWEMKTYGGREKGILRKALQGLLPDDVLFRKKSPYPKTHHPLYTAAVTKAIQEVVRQKDAPLFTFINRDRLKEIADKGGFDTGKPYFGQLMAGPQLLAHFVQIDYWMKAYNIQIDES

SEQ ID NO: 47186 - protein, 510 aa, Bordetella parapertussis 12822
MTTIRTLVVAAEAFPLAKTGGLGDAVSGMVQALGHRPGGVDVQCELLMPAYRGTLDMVYRPRTVARLGGLPGGPASLVRGHCPGSGLSVLLLRNDALYDRPGIYVDDSGQGYPDNARRYAALAHAAARLAQGLPGLRPPHVVHAHDWHAALAPLLIHAAGLHYVKTLLTIHNLAFQGTFPAELASALGIPLACRHDDGALSDDSVNFLKAGIRYATRVTTVSRAYAREILTPAFGCGLHGLLRARGADLSPVPNGIDTALWNPAADPHLGGLRFDALDMRNKACCKAALQAELGLQPRADATVLAMGSRLTGQKMADVAIAALPALLEAHEHLQFALIGRGEPALETALRALAARYPGRCAVHIGYDEPLAHRLHAGADLLLHGSRFEPFGLTPLYAMRYGTLPVASRVGGMVDTIRDPGPAVEESCAGQGTGFLFDGSEPADMQLAVARALRALAKPAVCDAMRRNAMQADFSWRASAQAYAGLYASLASAPQRGRVPAPTLPLLANAA

SEQ ID NO: 47187 - protein, 633 aa, Bacillus anthracis str. A2012
MCGFVGCLCENPREFSETEKHQFENMNTMIFHRGPDDEGYFRDEHVQFGFRRLSIIDLEAGHQPLTYENDRYVIIFNGEIYNYVELREMLLEKGATFATQSDTEVIIALYAHMKEKCVDYLRGMFAFMIWDREEKKLFGARDHFGIKPLYIAQQGDTTFFASEKKSIMHVMEDKGVNPTSLQHYFTYQYGPEPETLTIDVNKIEPGHYFVKEIGKEMEIHRYWKPYFNASSATKEEHIQAIRDVLYDSVKVHMRSDVPVGSFLSGGIDSSIIASIAREMNPNLLTFSVGFEQRGFSEVDVAKETAEKLGVKNHNVFISAKEFMDEFPKIIWHMDDPLADPAAVPLYFVAKEARKHVTVVLSGEGADELFGGYNIYREPNSLKMFSYIPSPGKSVLKALSGALKEGFKGKSFLERGCTPIEERYYGNAKIFREEEKAELMKYYNESVNYMDITKPLYNEIKDYDDVSKMQYIDMFTWLRGDILLKADKMTMANSLELRVPFLDKEVFDVASKIPTEFKIANGTTKAILREAARGIVPDHVLDRKKLGFPVPIRHWLKDEMHDWAINIINESKTEHLIDKQYVLNLLEAHCADKGDYSRKIWTVLAFMVWHQIYVEHKYDTNKFHEETKRAYSLV

SEQ ID NO: 47188 - protein, 525 aa, Rubrivivax gelatinosus PM1
MRDLARLVYIVFIVLRYGLDELALSSFRQRWVRGLARLVGVGRRLDAPRGARLRMALERLGPIFVKFGQVLSTRRDLLPVDVADELAKLQDDVPPFPAEQAVALVEAAFGRPLDQLFASFEHEPVASASIAQVHFAVLKNGREVAVKVLRPGVLQIIDSDLALLRVLAGWADRYSADGKRLKPREVVAEFDKYLHDELDLVREAANATQLRRNMEGLDLVLVPEMIWDLCTPGVMVMERMTGVPISQVARLREAGIDFQKLARDGVTIFFTQVFRDGFFHADMHPGNIQVSVAPQTFGRYVALDFGIIGTLTESDKDYLAQNFIAFFRRDYKRVAELHLESGWVPAGTRIDELEGAIRACCEPYFDRPLKEISLGQVLLRLFQTSRRFNVEIQPQLVLLQKTLLNVEGLGRQLDPELDLWSTAKPFLERWMHEQIGWRGLIERLKDEAPRYAKMLPELPRLLHDALEAQARARPAAHGDGPSDALLAALLAEQRRTNRLLQAVLCTGVGFLMGLLVVQIWQRWPG

SEQ ID NO: 47189 - protein, 300 aa, Glycine max
MAPPLEHNGVSTSGDSQRSIPTPFLTKTYQLVDDHTIDDVISWNDSGSSFIVWNTTAFAKDLLPKYFKHNNFSSFVRQLNTYGFRKVVPDRWEFSNEYFRRGEKRLLCEIQRRKILSASPPPAGATATVAVPSPLPLSAIPTAKPIVSPSNSAEEQVLSSNSSPARAPVELLDENERLRKENILLTKELVKMRSLCNNIFNLMSNYANAQADGSSAAAAKRCSGEDAVEEMNPKLFGVAIGKKRAREEEGHGAKYDTALSLHQPFHADVKSEALDLPGRGENKKTPWLNQCHRANQRVCN

SEQ ID NO: 47190 - protein, 183 aa, Oryza sativa
MCDLVARTGRHQQRYEDGRRLVAGCIPFRYRTSNDETSDDEPKKIVEVLMINSQSGPGLLFPKGGWENDETVEQAAAREAVEEAGVRGDIVQFLGFYDFKSKTHQDACCPEGMCRAAVFALHVKEELDSWPEQSTRRRTWLTVPEATSQCRYQWMQEALLTGFSDWHDNWSKGGGGDTNYDSL

SEQ ID NO: 47191 - protein, 487 aa, Bradyrhizobium sp. BTAi1
MNLVVVSNRVARGKANEPMTGGLAAALLPVVENSGAVWVGSSGRVRDGAQMEPIAQIEQLGQGALALLDLPAAHYAGYYEGFANSALWPALHSRSDLISVSHDDYRSYREVNAFVARALLRFHKPETLFWIQDYHFLSLGVELRTLGVKSPIGFFLHTPWPARSVIDSVPNHRDLVTAMLAYDLIGFQTEDDRDNFCACIRADLGLQVRDGVVKSRHGRTRLAVFPIGIDADKFAASAAKAASHPDVSRLRRSLHGEKLAIGVDRLDYSKGLVNRITAFDRMWTMHPTLLRAASLLQIATPSRESIEAYGNLQSDVARLVSEVNGRHGEADWTPIRYLNKGYGQGVLSGLYRSAQVGVVTPLHDGMNLVAKEYVAAQSPVDPGVLVLSKFAGAANELDAALLVNPHDIDGMARTIAMALSMPLNERRMRYEIMMTKLRRHSIQQWFTDFLEALQDSDAPETAEIAPLPTAPAGLLSSRLASSSARYH

SEQ ID NO: 47192 - protein, 398 aa, Propionibacterium acnes KPA171202
MAEQQTNGNWQERYHNALLGVFGNPQLCLDHGQGCVVVDNDGKEYLDLLAGIAVNALGYAHPAWVEAVSHQSETLAHVSNFFTTGPQLDLAEKLLALAKAPKGSAVFLSNSGTEANEAAIKICLARKNGRIIALDHAFHGRSLGALSLTHKIAYRQPFGPSAVDVTFIAPEDPDALASELDRGDVSGVFMEPIQGEAGVVPLSDEYLQQVRELTACHDVLMVVDEVQCGMGRTGRWFAHQSAHITPDVMTMAKALGGGFPIGVTMTFGSDVSGILAAGQHGTTFGGNPLACAAALAVISTIESDDLLTHVRQIGTLMSTALRQSHPRITEVRGTGALLGVQFDSDIAADLVAAARDAGFIVNAVNPSTLRLAPPYILTKAEAESFIAALPRLIDAVQA

SEQ ID NO: 47193 - protein, 426 aa, Escherichia coli K12
MSKSENLYSAARELIPGGVNSPVRAFTGVGGTPLFIEKADGAYLYDVDGKAYIDYVGSWGPMVLGHNHPAIRNAVIEAAERGLSFGAPTEMEVKMAQLVTELVPTMDMVRMVNSGTEATMSAIRLARGFTGRDKIIKFEGCYHGHADCLLVKAGSGALTLGQPNSPGVPADFAKYTLTCTYNDLASVRAAFEQYPQEIACIIVEPVAGNMNCVPPLPEFLPGLRALCDEFGALLIIDEVMTGFRVALAGAQDYYGVVPDLTCLGKIIGGGMPVGAFGGRRDVMDALAPTGPVYQAGTLSGNPIAMAAGFACLNEVAQPGVHETLDELTTRLAEGLLEAAEEAGIPLVVNHVGGMFGIFFTDAESVTCYQDVMACDVERFKRFFHMMLDEGVYLAPSAFEAGFMSVAHSMEDINNTIDAARRVFAKL

SEQ ID NO: 47194 - protein, 268 aa, Xanthomonas campestris pv. vesicatoria str. 85-10
MRRIDSCFAELRANGRKALIPFITAGDPSLEATVPVMHALVRAGADVIELGVPFSDPMADGPTIQRSSERALGRGAGLAYVLEAVHEFRREDATTPVVLMGYLNPIEIHGTRRFAEAAVAAGVDGVLLVDLPPEEAGETRAIFTEVGLALIALASPTTSEQRLDMLCSTAQGYLYYVSFAGVTGASNLLDTHAASDRLRQLRQRAGAPVVAGFGIKDAASAAAMAVDADGVVVGSALVAALADAGEVRSARERAEAFLAPLRQALDQK

SEQ ID NO: 47195 - protein, 249 aa, Thermus thermophilus HB27
MKLLLLDLDDTLLQDLPVSRAVLEDLGRKAGVEGFFARVKARAEALFREAPFYPWAEAIGHSALEALWARYSTPGLEALAAWAGPFRERVFREALEEAGGAPERARELAEAFFRERRRYPLYPEAEAFLAEARRRGLALALLTNGVPDLQREKLVGAGLAHHFSLVLISGEVGIGKPDPRLFRMALCAFGVAPEEAAMVGDNPQKDVRGARLAGVRAVWVDRGLRPEDPEASPDLRVGDLREVFLAEAL

SEQ ID NO: 47196 - protein, 96 aa, Legionella pneumophila subsp. pneumophila str. Philadelphia 1
MKIRPLHDRVVVRRMEEERTTAGGIVIPDSATEKPMRGEIIAVGAGKVLENGDVRALAVKVGDVVLFGKYSGTEVKVDGKELVVMREDDIMGVIEK

SEQ ID NO: 47197 - protein, 414 aa, Staphylococcus aureus subsp. aureus Mu50
MSQNKRVVITGMGALSPIGNDVKTTWENALKGVNGIDKITRIDTEPYSVHLAGELKNFNIEDHIDKKEARRMDRFTQYAIVAAREAVKDAQLDINDNTADRIGVWIGSGIGGMETFEIAHKQLMDKGPRRVSPFFVPMLIPDMATGQVSIDLGAKGPNGATVTACATGTNSIGEAFKIVQRGDADAMITGGTEAPITHMAIAGFSASRALSTNDDIETACRPFQEGRDGFVMGEGAGILVIESLESAQARGANIYAEIVGYGTTGDAYHITAPAPEGEGGSRAMQAAMDDAGIEPKDVQYLNAHGTSTPVGDLNEVKAIKNTFGEAAKHLKVSSTKSMTGHLLGATGGIEAIFSALSIKDSKVAPTIHAVTPDPECDLDIVPNEAQDLDITYAMSNSLGFGGHNAVLVFKKFEA

SEQ ID NO: 47198 - protein, 550 aa, Legionella pneumophila subsp. pneumophila str. Philadelphia 1
MIMAKELRFGDDARLQMLAGVNALADAVQVTMGPRGRNVVLEKSYGAPTVTKDGVSVAKEIEFEHRFMNMGAQMVKEVASKTSDTAGDGTTTATVLARSILVEGHKAVAAGMNPMDLKRGIDKAVLAVTKKLQAMSKPCKDSKAIAQVGTISANSDEAIGAIIAEAMEKVGKEGVITVEDGNGLENELSVVEGMQFDRGYISPYFINNQQNMSCELEHPFILLVDKKVSSIREMLSVLEGVAKSGRPLLIIAEDVEGEALATLVVNNMRGIVKVCAVKAPGFGDRRKAMLQDIAILTKGQVISEEIGKSLEGATLEDLGSAKRIVVTKENTTIIDGEGKATEINARITQIRAQMEETTSDYDREKLQERVAKLAGGVAVIKVGAATEVEMKEKKARVEDALHATRAAVEEGIVAGGGVALIRAQKALDSLKGDNDDQNMGINILRRAIESPMRQIVTNAGYEASVVVNKVAEHKDNYGFNAATGEYGDMVEMGILDPTKVTRMALQNAASVASLMLTTECMVADLPKKEEGVGAGDMGGMGGMGGMGGMM

SEQ ID NO: 47199 - protein, 1206 aa, Pichia angusta
MKMLTKFESKSSRAKGVAFHPKRPWILVSLHSSTIQLWDYRMGTLIDRFEEHDGPVRAVDFHPTQPIFVSGGDDYTVKVWSLQTRKCMFTLNGHLDYVRTVFFHHDLPWIISCSDDQTIRIWNWQNRQEIACLTGHNHYVMSAQFHPSQDLIVSASLDQTVRVWDISGLRKKHSAPQGGMRSFEEQYARNQVPQQDIFGNTDAVVKYVLEGHDKGVNWASFHPTLPLIVSGGGHRVVKLWRMSETRAWEVDSCRGHTNNVPCVLFHPTEDLIISVGEDRTIRTWDLNKRTPVKQFKRENDRFWLVAAHPTMNLFATCHDSGVMVFKLDRERPASTLFQNTLFFVNNESQVQQYQFDKQQVSLPMLSLNKISKSWTKIRNISYNPAERSLLVQAGENENGVYSYMDLPKEIVGALEPSPRGEGAVPAACFIARNRFVTFSKVTHKLEVRDLRNTVTKVIDLDSAVKDILYAGPGTILLMKPNEVIHYDVQQKKELAKIQISNAKYAVWSADTQYVALLSKHTIIIANKKLETLMSMHETIRVKSAAWDDSGVLIYSTLNHIKYALLNGDNGTIKTLENTLYVIKVSGRQCFCLNRKGEVEVVTIDPTEYRFKKALVNKNFNEVLRIIKTSNLVGQNIIGYLQAKGYPEIALQFVEDSETRFELAIECDNLDIALEEAKKLDNPVIWEKLGKEALLQGNVPIVELVYQQLKKLEKLSFLYLITGETEKLSKMEQIAEARGDYSSLFQNSLYLNSVEKRINTFIETGLLPLAYATAKTNGLDDVAESILSEAGLMEADIQMPSFGEPNSVPEVTSVITEPWPLEKASLSYFEQALLGNFEGLSIEDQPQTEATATDRFAASVDDENLFEDAEPIADDEGWDLGEEELEVEVDEDAVDDDVEDVGALSGELGNWVRNSRCAAGYIAAGAFEPAAQMLNKQLGIANFEPLRKRFLEIYQANKVFIPAIDGLPSLKSYVRADPEEENGSKALPYVPGFDKLEAGLHEGFKLFKANKLEEAIVVFRELIYIVATSVVYNADDEEKCEEVLAVCKEYILGLSIELARRALPQDDVKRNLELAAYFTRAQLQPSHRVNALQVAMTQSFKYKNYALASYFAGEFLSIITSGPRAEQANKIKAKSDSISTDAVEIDFDPYADFDVCAGTFTPIYKGSPYVTEALTGAKYHASEKGKICSITKVTLVGAPASGLRILA

SEQ ID NO: 47200 - protein, 878 aa, Pseudomonas aeruginosa PAO1
MPEIDARLREDVHQLGELLGDTIREQYGPRFLDKIELIRKGAKAARRGSAEGAQQLTATLDGLEEDELLPVARAFNQFLNLANIAEQYHRIRRRRPNEPEPFENLVLEELLGRLKDAGHAPGQLARQLAGLEIELVLTAHPTEVARRTLIQKYDAITAQLAAKDHADLLPEERSRIQQRLQRLVAEAWHTDEIRKVRPTPVDEAKWGFAVIEHSLWQALPNVLRHVDEVLLRSTGERLPLTAAPLRFASWMGGDRDGNPNVTASVTREVLLLARWMAADLYLRDIDRLAAELSMQQASPQLLARVGDSAEPYRALLKQLRERLRVTRNWTHQALAGEVPAAEGVLEHNRDLVEPLQLCHESLHACGMGVIADGALLDCLRRAATFGLFLVRLDVRQDSARHAAALSEITEYLELGSYDEWDEKTRLEFLLEELNSRRPLLPAHYQPSADTAEVLATCRAIAAAPPASLGSYVISMAGQPSDVLAVQLLLKESGVDWPMRVVPLFETLDDLDNAGPCMERLLTLPGYRSRLSGVQEVMIGYSDSAKDAGTLTAAWAQYRAQEKLVEICRQHEVELLLFHGRGGTVGRGGGPAHAAILSQPPGSVAGRFRVTEQGEMIRFKFGLPDIAEQNLNLYLAAVLEATLMPPPAPEPAWRAQMDRLAKDALLAYRRVVRDDPQFVEYFRLATPEQELGRLPLGSRPAKRREGGVESLRAIPWIFAWTQTRLMLPAWLGWETALLNAIERGEGALLGQMREQWPFFTTRIDMLEMVLAKADADIARLYDERLVPLELRPLGRRLRDLLSQAVRVVLGLTGQSLLLAHASETRESISVRNSYLDPLHLLQAELLARSRRCRGDACGGLEQALLVTVAGVAAGLRNTG

SEQ ID NO: 47201 - protein, 112 aa, Arabidopsis thaliana
  misc_feature (89)..(89): Xaa can be any naturally occurring amino acid
  unsure (1)..(112): unsure at all Xaa locations
MEKNSFKLSNPLEMRMAESTRIRAKYPGRVPVIVEKAGQSDVPDIDKKKYLVPADLTIGQFVYVVRKRIKLGAEKAIFVFVKNTLPRTXKGEVGFLYMTYSGENTFGGSFYC

SEQ ID NO: 47202 - protein, 195 aa, Thellungiella halophila
MTKMGFKPDSNPSPNPNESNAKEIRYRGVRKRPWGRYAAEIRDPGKKTRVWLGTFDTAQQAARAYDAAAREFRGAKAKTNFPTFLELNAAKDGGFARSPSQSSTVDSVSPTSARLVTPPQLELSLGGGGGGACYQIPVARRPVYFYNMTTFPAAAAATCGVQSESDSSSVVDFECGAEKKYRPLDLDLNLAPPAE

SEQ ID NO: 47203 - protein, 395 aa, Campylobacter jejuni subsp. jejuni NCTC 11168
MKMDYKEQSHIIPTYKRFDIVLEKGQGVYLFDDKAKKYLDFSSGIGVCALGYNHAKFNAKIKAQVDKLLHTSNLYYNENIAAAAKNLAKASALERVFFTNSGTESIEGAMKTARKYAFNKGVKGGQFIAFKHSFHGRTLGALSLTANEKYQKPFKPLISGVKFAKYNDISSVEKLVNEKTCAIILESVQGEGGINPANKDFYKALRKLCDEKDILLIADEIQCGMGRSGKFFAYEHAQILPDIMTSAKALGCGLSVGAFVINQKVASNSLEAGDHGSTYGGNPLVCAGVNAVFEIFKEEKILENVNKLTPYLEQSLDELINEFDFCKKRKGLGFMQGLSLDKSVKVAKVIQKCQENALLLISCGENDLRFLPPLILQKEHIDEMSEKLRKALKSF

SEQ ID NO: 47204 - protein, 361 aa, Zea mays
MDKYEAVRDIGSGNFGVARLMRNRETRELVAVKCIERGHRIDENVYREIINHRSLRHPNIIRFKEVILTPTHLMIVMEFAAGGELFDRICDRGRFSEDEARYFFQQLICGVSYCHYMQICHRDLKLENVLLDGSPAPRLKICDFGYSKSSVLHSRPKSAVGTPAYIAPEVLSRREYDGKLADVWSCGVTLYVMLVGAYPFEDPDDPKNIRKTIQQIMQVQYKIPDHVHISTECQQLIARIFVANPMRRITMKEIKSHPWFLKNLPRELTETAQGMYYRRDNRVPSYSDQTSEEIMKIVQDARTMPKSSRSGYGWSSEYSDEEEEKEEEHRPEEHEEEEDEYDRRVKEVHASGELRMDALHI

SEQ ID NO: 47205 - protein, 469 aa, Ehrlichia canis str. Jake
MTKHEFLIIGSGPGGYIAAIRAAQLGYDVAIVEKENSLGGVCLNWGCIPTKSLLQSASVYHNIKKADIFGITVKDVKFDFNKIIERSRNVVEKLANGISGLMKKNNIKVYHGTAKLLGNATVEITDHSNKRISITSTHIVLATGSQAKNIPGIDFDNNIVWNAKNAMTPNKFPESILIIGSGAIGIEFASFYNTFGTQVTMVELKDNILPLEDHEVSKCMHNILSNKGIKIHTSSSITKLEKCNNYAKVQISDTIDLQVDNVILAVGIIPNSSNIGLENTKIKTDNAGFIITDKHCCTDEPGIYAIGDVAGFPCLAHKASHEAILCIENIAATENKIPQHKIHTINKNNIPSCIFSIPQIASIGLTEHQAKHQGYNFKVGKFNANCSGKAVAIDEVEGFVKVIIDKSTGELLGAHMIGAEVTEMINGYIIGKQVEITDQDITSAIFPHPTLSEMLHEAVLSSNNESLNS

SEQ ID NO: 47206 - protein, 738 aa, Arabidopsis thaliana
MEVCNCIEPQWPADELLMKYQYISDFFIAIAYFSIPLELIYFVKKSAVFPYRWVLVQFGAFIVLCGATHLINLWTFTTHSRTVALVMTTAKVLTAVVSCATALMLVHIIPDLLSVKTRELFLKNKAAELDREMGLIRTQEETGRHVRMLTHEIRSTLDRHTILKTTLVELGRTLALEECALWMPTRTGLELQLSYTLRHQHPVEYTVPIQLPVINQVFGTSRAVKISPNSPVARLRPVSGKYMLGEVVAVRVPLLHLSNFQINDWPELSTKRYALMVLMLPSDSARQWHVHELELVEVVADQVAVALSHAAILEESMRARDLLMEQNVALDLARREAETAIRARNDFLAVMNHEMRTPMHAIIALSSLLQETELTPEQRLMVETILKSSNLLATLMNDVLDLSRLEDGSLQLELGTFNLHTLFREVLNLIKPIAVVKKLPITLNLAPDLPEFVVGDEKRLMQIILNIVGNAVKFSKQGSISVTALVTKSDTRAADFFVVPTGSHFYLRVKVKDSGAGINPQDIPKIFTKFAQTQSLATRSSGGSGLGLAISKRFVNLMEGNIWIESDGLGKGCTAIFDVKLGISERSNESKQSGIPKVPAIPRHSNFTGLKVLVMDENGVSRMVTKGLLVHLGCEVTTVSSNEECLRVVSHEHKVVFMDVCMPGVENYQIALRIHEKFTKQRHQRPLLVALSGNTDKSTKEKCMSFGLDGVLLKPVSLDNIRDVLSDLLEPRVLYEGM

SEQ ID NO: 47207 - protein, 99 aa, Cryptococcus gattii
WHGMRQKNTPYMDGVPGITQCPIPPGGSYTYNFTISDQSGTYWWHSHYSNAMADGLWGPLIVHSVDEPIQRGRDYDEDRIVFVTDWMHDDSEIIIAALA

SEQ ID NO: 47208 - protein, 483 aa, Caulobacter crescentus CB15
MQVRNDSGDSKANLDAVIVWFRKDLRIADNPALRHAAQSGRPVIPLYILDETPGIRPMGGASLWWLDKSLKSLAASLETLGTKLVLRKGVAAEVLDQLIAQSGARSVVWNRLYDKPSTDRDAAIKAALRDRGVDCQSFNAGLLNEPWTVKNGSDQPYKVFTPYWRAAREHLTDVAVTAAPGHLVAPARFPASESLASWNLHPTKPDWSKGFDLWTPGEAGAHARLDAFLKGPIKGYGDQRDIPGVEATSKLSPHLHFGEIGPRQVWLATRSAADQGDIPLAEADKFLSEIGWREFNHSILYNWPHMPSANFKPEFDGFPWVKDEGALEAWKRGQTGYPIVDAGMRELWTTGFMHNRVRMIVASFLIKHLMIDWREGEAWFWDTLLDADLANNVGNWQWTAGSGADAAPYFRIFNPIAQGEKFDPKGDYVRRWVPELRNVSDDVIHKPWTKPLHLPAGAKRLYSRPIVDHAMARARALEAYHGL

SEQ ID NO: 47209 - protein, 94 aa, Bacillus anthracis str. A2012
  misc_feature (11)..(11): Xaa can be any naturally occurring amino acid
  unsure (1)..(94): unsure at all Xaa locations
MKADLPGFQKXNIQVEFEQDVLTIQATNHNEVEEKNENGTYIRKERSIGSVTRRFSFKQVEEENVRANYKDGVLTIELPKLKEEKNSKTTINIE

SEQ ID NO: 47210 - protein, 99 aa, Cryptococcus gattii
WHGMRQKNTPYMDGVPGITQCPIPPRGSYTYNFTISDQSGTYWWHSHYSNAMADGLWGPLIVHSVDEPIQRGRDYDEDRIVFVSDWMHDDSEIIIAALA

SEQ ID NO: 47211 - protein, 474 aa, Escherichia coli K12
MKKTTLALSALALSLGLALSPLSATAAETSSATTAQQMPSLAPMLEKVMPSVVSINVEGSTTVNTPRMPRNFQQFFGDDSPFCQEGSPFQSSPFCQGGQGGNGGGQQQKFMALGSGVIIDADKGYVVTNNHVVDNATVIKVQLSDGRKFDAKMVGKDPRSDIALIQIQNPKNLTAIKMADSDALRVGDYTVAIGNPFGLGETVTSGIVSALGRSGLNAENYENFIQTDAAINRGNSGGALVNLNGELIGINTAILAPDGGNIGIGFAIPSNMVKNLTSQMVEYGQVKRGELGIMGTELNSELAKAMKVDAQRGAFVSQVLPNSSAAKAGIKAGDVITSLNGKPISSFAALRAQVGTMPVGSKLTLGLLRDGKQVNVNLELQQSSQNQVDSSSIFNGIEGAEMSNKGKDQGVVVNNVKTGTPAAQIGLKKGDVIIGANQQAVKNIAELRKVLDSKPSVLALNIQRGDSTIYLLMQ

SEQ ID NO: 47212 - protein, 406 aa, Clostridium acetobutylicum ATCC 824
MESYNKTVITGMGMITSVGLNLKDTWNNLVKGVSGVTTITSFDTKSIDTHIAAPVSDEFEELAKVQIPKKDRKRMTRSTRMLMVAVNEAVSAANINFENYDKTRIAVIMGIVSTGYDEVEKKAGNMHMVVKSMPNSPSAWVSLKYGLEGPNFSVSTACASSAYAIGLGQQMIKSGLADVVIVGGVDSHINAEYIDGFNKIMAMSTRNDSPSTASRPFSLSRDGFVMGEGAGVMVLEAEKIARARNAKIYGELAGYAITSEAVDITAPKKDGEGMLKTMQMALNNANINPYEVDYINAHGTSTYLNDKYETFAIKKCFGERAKEVPVSSSKSMIGHTIAASGVIEGIITVMSICSGVITPTINYQDADPELDLDYVPNHSRAQDIHIALSNSFGFGGHNATVVYRRY

SEQ ID NO: 47213 - protein, 612 aa, Arabidopsis thaliana; identical to SEQ ID NO: 767

SEQ ID NO: 47214 - protein, 282 aa, Brassica napus
CQPGDLYNCSNKETVVVPVNSGETSLLRVINAALNQPLFFTVANHKLTVVGADASYLKPFTTKVLMLGPGQTTDVLLTADQPPKRYYIAARAYQSAQNAPFDNTTTTAILHYRNTTKSSPPVTLSLPAFNDTNTVTSFSRKFKSLRNVVGPKTIDENLFFTIGLGLDNCPKNFPKNRCQGLNGTRFTASMNNVSFVLPSNFSLLQAHSNGIPGVFATDFPAKPPVKFDYTGNNISRGLFQPVKGTKLYKLKYGTRVQIVLQDTNIVTSENHPIHLHGYEFYI

SEQ ID NO: 47215 - protein, 636 aa, Vibrio cholerae
MCGVAGFISKRLSPVDCLTSMVGSIMHRGPNDSGLWVDDDFGVCLAHARLSIQDLSSAGHQPMHSKSERYVMIFNGEIYNHLTLREELIEIVPSYWNGHSDTETLLAGFEVWGIEQTIQKCVGMFAIVLWDKVLKQLILIRDRFGEKPLYYGWQRDTFLFASELKALKAHPSFEGSINRQALSHFFRLNYIPTPLSIYEGIFKLEPGVIAVFSHEGQLLSKQTFWDASHAVSLQNFSDHDAVDKLDDLIKQSIQDQALSDVPLGAFLSGGVDSSTVVGILQSLSTRPVKTFTIGFDHADFNEASEASDVAKHLGTDHVELIVSAEDALAIINQLPVMYDEPFADASQVPTFLVSKLAKKEVTVCLSGDGGDELFCGYNRYHYTAKVWSYLEKIPFPIRKMLSVFLLTLSPSSWDVLSKTLGLNTRLPNLGNKIQKGAQALKARDIEDLYTRVVSNWDLDEPLVKNTAVEKLPFLSDLTELSHLNDLEKMMLWDKQSYLMDDVLVKTDRATMACSLEGRVPLLDHRIAEFAASLPIHLKYRGGKGKWLLREVLYRYVPKKLIERPKKGFSLPIAEWLRGPLKDWANVLLDSDRIDKEGFLSSELVQKKWREHLAGKRDWSSQLWSVLMFQLWLEKNK

SEQ ID NO: 47216 - protein, 458 aa, Bacillus cereus ATCC 10987
MDENYDKQRQSLLGKDFNDNEERNEQAILHSQTVGSRGPVLEQDSVLHEALQQFIHEKILERPVHVKGFGAFGYFQTIYPMSEHTKLSFLQHSNEKVPVMVRFSLAVSTKGTPDTSRNVRGFSTKFYTKEGIFDLLCNHIPVFSVRDPMRFPETIQALSPSPKNNLIDPNRFWSFVARAPESIHFVVRLYSDNGTAKSLRHIPGHSVNTYVWRNAEGNRKYVKYHWYPFEGVQFITSEEANKLAAENPDYSGKDLYDAIANGKPVEYGLYVQLMDPKDEAHLSYDPLDDTKIWDEKAYPLIPVGKMVLNKNPENFMEQIEKVAFSPSNLLDGAELSDDKMLQGRANIYSDSQRKRIGPEFRKLTINQQQNWTPANQITSGDGRYVDGKLERTSISKQDDFTQAGEFYATLKPIEKEHLAENLAGDLKVISDDIRKVVLEYFHNVSVDLVKRIETEIKK

SEQ ID NO: 47217 - protein, 370 aa, Xanthomonas campestris pv. vesicatoria str. 85-10
MWARCRRAFPVRSMSDGRRPRVWVSQPLFDDVVAQLGEHFELTTTQRVSAYSPAELAAQLAPLDGALITLNERIGAAEIAAAPQLRAIANVGVGYNNLDIDALSAAGILASNTPDVLTETTADLGFALLMATARRITESERWLRDGQWGQWSFKTMLGADIHGSTLGILGMGRIGQGIARRGAHGFGMRVLYHNRSPLPAATEQALGARYVDFETLLAQSDHLVLVLPYTRDSHHIIDAAALGKMRATATLVNIARGGIVDELALADALANGRLAGAGLDVYEGEPHVRPELLALNNVVLTPHIGSASLATRRAMVQLAVDNLIAALGKGPHAGNPPSALNADAVAAAKRGGTGVDAKETGVTGSISTKR

SEQ ID NO: 47218 - protein, 437 aa, Lycopersicon esculentum
MTSICKLSNPCFSSTSYGSRSSSTPKFVVHLRTSTFNHTLSGSKLSLVINPSIRASLCVKCSQADGNGSSVKKTTLHHFYETQGQSPWYDNLCRPVTDLIPLIDSGVRGVTSNPAIFQKAISTSNAYNDQFRELVQAGKDIDSVYWELVVKDIQDACKLFETIYDKTDGGDGSVSVEVSPRLADDTEGTVEAAKWLHKKVERSNVYIKIPATAPCIPSIKEVISLGISVNVTLIFSLSRYEAVIDAYLDGLEASGLSDLSRVTSVASFFVSRVDTLIDKLLEKIGTPEALDLRGKAANAQAALAYDLYQKKFSGPRWEALVKKGCQKQRLLWASTSVKNPAYPDTLYVDPLIGPDTVSTMPDQALQAFIDHGSVARTIDANLSEAEGIYSALEKLGIDWGFVGSQLELEGVDSFKKSFDSLLDSLQEKANTLKLVSL

SEQ ID NO: 47219 - protein, 117 aa, Arabidopsis thaliana
  misc_feature (76)..(76): Xaa can be any naturally occurring amino acid
  misc_feature (94)..(94): Xaa can be any naturally occurring amino acid
  unsure (1)..(117): unsure at all Xaa locations
MQIAQELREEARQDSCGVCHRTVSEILIKLQDPDTQLDIVELLIKGCKSLKNYEKKCKTLVFEYGPLILVNAEEFXLVKNDVCTLLRACPPEKXSVLRQPGVGLILECSKPFAITGF

SEQ ID NO: 47220 - protein, 256 aa, Photorhabdus luminescens subsp. laumondii TTO1
MDRMLEGKVVIVTGGASGIGAGIALAAARHGAATVIIGDITDQPREGGTPVFQRLRALGTQAIFHRCDVTSRSEMDALVDIATPFGGVDLMACNAGIALATDGPQINADDFHKLLTVNLDGVLFGAQAAAEQMIKLGKRGSIVATSSMGSIRTGQLTTAYSTSKAGVNMMVAALADAFGPSGIRVNAVCPGLINTALPLSSPEVAKMFDGLRERMPLRRLGEPEEVGNAVVWLGSDLASFITGVSLLVDGGQTVVL

SEQ ID NO: 47221 - protein, 779 aa, Zea mays
ADVPVAEQDEVSQALLDRFRCAPVFLPDRLNDRFYHGFCKRQLWPLFHYMLPFSSSASAAGTTSSSDATCNGRFDRSAWEAYVLANKFFFEKVVEVINPEDDYVWVHDYHLMALPTFLRRCFNRLRIGFFLHSPFPSSEIYRTLPVREEILKALLNCDLIGFHTFDYARHFLSCCSRMLGIEYQSKRGYIELDYFGRTVGIKIMPVGVHMGQLESGLRLPDREWRLSELQRQFQGKTVLLGVDDMDIFKGINLKLLAFENMLRTHPKWQGRAVLVQIANPARGRGKDLEAIQAEIEESCQRINGDFGQSGYSPVVFIGRDVSSVEKIAYYTIAECVVVTAVRDGMNLTPYEYVVCRQGAPGSQSVSEVSGPKKSMLVVSEFIGCSPSLSGAIRVNPWNIEATAEAMNEAISMPEQEKQLRHEKHYRYVRSHDVAYWSKSFIIDLERVCKDHFKRTCWGIGLGFGFRVVALDPHFTKLNMDSIINAYELSESRAILLDYDGTLVPQTSLNKEPSPQVLSIINTLCSDSRNIVFLVSGRDKDTLGKWFSSCPRLGIAAEHGYFLRWSREEEWQTCTQALDFGWMQMAKPVMNLYTEATDGSYIEAKESALVWHHQDADLGFGSSQAKEMLDHLESVLANEPVSVKSGQFIVEVKPQGISKGIVAERILASVKERGKQADFLLCIGDDRSDEDMFENIADIIGRNLVAPRTALFACTVGQKPSKAKFYLDDTFEVVTMLSALADATGPELETDSADESVAYISSLDIGDEQSESSDKPVEGS

SEQ ID NO: 47222 - protein, 304 aa, Glycine max
MASHDLRFFELNTGAKIPSVGLGTWLAEPGVVARALATAINVGYRHIDCAQIYGNEKEIGAALKKLFADGVVKREDMFITSKLWCNDHLPENVPEAFDKTLQDLQLDYLDLYLIHWPVSAKNGKLTKPDIPSTWRAMEALYNSGKAQAIGVSNFSVKKLQDLLDVASVPPAVNQVELHPSLQQPELHAFCKSKGVHLSGYSPLGKGYSESNILKNPFLHTTAEKLGKTAAQIALRWGLQMGHSVLPKSTNDARLKENFDLFDWSIPADLLANFSDIKQERIVTGDGFFSKTSPGYKTIEELWDE

SEQ ID NO: 47223 - protein, 415 aa, Legionella pneumophila subsp. pneumophila str. Philadelphia 1
MVRMFKIWYYLQIYPEIQEIIVLERFINYLQNELETLKADGLYKSERVISSQQQADVKVNEREVINLCANNYLGLANDPELIAEGQAALAKYGYGMASVRFICGTQTPHKQLEQKISHFLSKEDTILYSSCFDANTGLFETLLTEEDAIISDALNHASIIDGVRLCKAARYRYANNDMKALEEQLIAAKNARFRLIATDGVFSMDGILANLPAICELADKYDAMVMVDDSHAVGFMGKTGRGTPEHFGVSDRIDIVTGTLGKALGGASGGYTASNQVVIDWLRQRSRPYLFSNTLAPVIAHTSCVVLDKLSTNNSLAEKLKRNSHYFREGMTQLGFELIPGEHPIIPVMLGDASLAGRIANRLLELGVYVVGFSYPVVPKGLARIRTQMSAALELHHLDKALKAFETVGKEFSVI

SEQ ID NO: 47224 - protein, 457 aa, Acinetobacter sp. ADP1
MPKEANMASQDYATQRSSLDAQALINDAPLSRYQWLIAIVCFLIVFVDGIDTAAMGFIAPALAQDWGVDRSQLGPVMSAALGGMIIGALVSGPTADRFGRKIVLSMSMLVFGGFTLACAYSTNLDSLVIFRFLTGIGLGAAMPNATTLFSEYCPARIRSLLVTCMFCGYNLGMAIGGFISSWLIPAFGWHSLFLLGGWAPLILMLLVIFFLPESYRFLIVKGKNTKKVRQILSRIAPQKVQGVTEFHVPEEKVEAGTKKGVFGMLFSAKYVKGTVLLWVTYFMGLVMIYLLTSWLPTLMRETGASLERAAFLGGLFQFGGVLSALFIGWAMDRFNPNRIIAGFYLAAGIFAVIVGQSLSNPTLLALFILCAGIAVNGAQSSMPVLSARFYPTQCRATGVAWMSGIGRFGAVFGAWIGAVLLGNNWSFTMILSMLIIPARAAAIAIFVKSLVAHTDAT

SEQ ID NO: 47225 - protein, 342 aa, Legionella pneumophila subsp. pneumophila str. Philadelphia 1
MTMKSLVKAKKEPGIWMQDIPVPEYGVNDVLIKIKRTAICGTDIHIYSWDEWAQATIPVPMTVGHEFYGEIVEVGKEVQGLKVGQRVSGEGHITCGFCRNCRAGKRHLCRNTLGVGVNRPGCFAEYLALPATNVIALPDNITEEQAAILDPFGNAAHCALAFDVVGEDVLITGAGPIGIMAAAIVRHIGARHVVITDVNDHRLELARQMGVSRAVNVKYQKLSDVANELGMLEGFDVGLEMSGNPMALNDMMKAMNHGGHVALLGIPPQETPIDWNQVIFKGLVIKGIYGREMFETWYKMIAMLQSGLNISPVITHNFPVDEYQHAFQIMASGQSGKVILNW

SEQ ID NO: 47226 - protein, 479 aa, Cryptococcus neoformans var. neoformans B-3501A
MPPINKAQAEQVGEYDYFVIGGGSGGLASARRAGSYGAKVGLVEVSPRLGGTCVNVGCVPKKIMWYTADVAENLRKSAQYGFGKEGEGYKLAADFNWTELKHKRDAYIHRLNGIYESNLEKDHVDHHQGWASFVDANTVAIEPPNGDKYTVKAKNIVIAVGGRPTVPSEKDIPGASYGITSDEFFELETQPKRVAVIGAGYIAVELAGVFNTLGSETHLVIRHNQLLRTFDPMMSEVLVPCMEKAGMKIHKKTHVKKVEKTSSGSLLVHLDSSSESIEVDCLLWAIGRHADTAKLGLDKAGVKYDKKGDVIVDDYQNTNVPGIYAVGDVGGRMLLTPVAIAAGRRLSNRLFGPEKYKNDKLSYDNIPSVVFSHPTIGSIGLSEPEAREKFGDDNIKIYKTSFRAMSFAMLDEDHKQPTAYKLICTGPDEKVVGLHIIGEGSDEMLQGFGVAIKMGATKEDFDACVAIHPTSSEELVTLR

SEQ ID NO: 47227 - protein, 248 aa, Arabidopsis thaliana
MDICLCCQVRTILKSFRWAPFLPVSTESSMLSVMLLLSKYRLRNVPVIKTGEPDIKNYVTQSAVVHGLEGCKGRDWFDHISALPISDLGLPFMSPNEVISIESEELILEAFKRMRDNNIGGLPVVEGLNKKIVGNISMRDIRYLLLQPEVFSNFRQLTVKSFATKIATAGEEYGLAIPAITCRPDSTLGSVINSLASRSVHRVYVAAGDENELYGVITLRDVISCFVSEPPNYFENCLGFSVKEMLNR

SEQ ID NO: 47228 - protein, 211 aa, Leuconostoc mesenteroides subsp. mesenteroides ATCC 8293
MTPLKAEILPEIHEHYSIPKKINDHGYFTYDFALPMTTLYTLYSGKTNQLAKWLKMSPMKQFTTLDTHDGIGVVDARDVLTDEEIDYASEELYKVGANVKKTYSSASYNNLDIYQINSTYYSALGNDDAAYLLSRIFQVFAPGIPQIYYVGLLAGENDIELLESSKEGRNINRHYYSVDEVKEEVKRPVVAKLLKLLSWRNNFAAFDLDGS

SEQ ID NO: 47229 - protein, 211 aa, Campylobacter jejuni subsp. jejuni NCTC 11168
MENLISGAIKFMQEDFKEHEELFESLKNKQNPHTLFIGCSDSRVIPNLITNTGPGELFVIRNIANIVPPYRVGEDYLATTSAIEYALNSLHIKNIVVCGHSNCGGCNALYYSDEELNKIPNVKKWLTMLDPIKKDVMIFARDDLAMRSWLTEKLNLVNSLQNILTYPGVQEALDEGKIEVHAWYYIIETGEIYEYDFKAKIFTLIQDRKVQ

SEQ ID NO: 47230 - protein, 538 aa, Xanthomonas campestris
MSQTPWWRGAVIYQIYPRSFLDSNGDGVGDLPGIIAKLDYISGLGVDAIWISPFFKSPMADFGYDISDYRAVDPLFGSLADFDRLLEKAHGLGLKVMIDQVLSHTSIAHAWFQESRQDRSNPKADWYVWADPREDGTPPNNWLSLFGGVAWQWEPRREQYYLHNFLVDQPDLNFHNAEVQQATLDNVRFWLDRGVDGFRLDAINFCFHDAQLRDNPAKPADKRVGRGFSADNPYAYQYHYFNNTQPENLPFLERLRGLLDSYPGAVSLGEISSEDSLATTAEYTAQGRLHMGYSFELLVQDYSAAYIRDTVSRLEATMLEGWPCWAISNHDVVRAVTRWGGAQATPAFARMVVALLCSLRGSICLYQGEELGLSEAEVAFEDLQDPYGITFWPTFKGRDGCRTPMPWTDAPSAGFTSGKPWLPLAASHRAAAVSVQQDDAHSVLRAVRAFLAWRKEMPALREGSIAFYDTAEPVLMFRREHAGQVVLLAFNLSADPAELALPAGEWEQIDVPGVELGAMDGGHLRLAGHAVVAAVGRG

SEQ ID NO: 47231 - protein, 464 aa, Listeria monocytogenes str. 1/2a F6854
MLYSKENKESYLEPVFGSSAEDRDIPKYTLGKEPLEPRIAYRLVKDELLDEGSARQNLATFCQTYMEDEATKLMSETLEKNAIDKSEYPRTAELENRCVNIIADLWHAPKDQKFMGTSTIGSSEACMLGGMAMKFAWRKRAEKLGLDIYAKKPNLVISSGYQVCWEKFCVYWDIDMRVVPMDKEHMQLNTDQVLDYVDEYTIGVVGILGITYTGRYDDIYALNEKLEEYNSKTDYKVYIHVDAASGGFFTPFVEPDIIWDFRLKNVISINTSGHKYGLVYPGIGWVLWKDESYLPEELIFKVSYLGGEMPTMQINFSRSASHIIGQYYNFLRYGFEGYRTIHQKTSDVAQYLAHAVEQTGYFDIFNDGSHLPIVCYKLKNDANVKWTLYDLADRLQMRGWQVPAYPLPKSLENIIIQRYVCRADLGFNMAEEFIQDFQASIQELNNAHILFHNTQQSGVHGFTH

SEQ ID NO: 47232 - protein, 251 aa, Thellungiella halophila
MLAVFEKTVANSPEALQSPHSSVPAYALKEGYLANQFVSKNPNSVTLNLGSSGLLAYSLDNHDPLVPRLFAVVDDIFCIFQGHIDNLPFLRQQYGLSKITNEAIMVIEAYRTLRDRGPYPVDKVVRDFHGKFSFILFDGTKSTVFAASDADGSVPFFWGTDAEGHLVLADDTEMVKKGCSKSYSPFPKGCFFTSSGGLRSYEHPKNELKPVPRVDSSGDVCGATFKVDAETKREPTKMPRVDSSQNWAGHI

SEQ ID NO: 47233 - protein, 185 aa, Candida albicans SC5314
MVSTISPTILKTSTSKLINLSAGCFWGVENVFRKQFTNKGLVDIKVGYANGKPSISNVTYEKVCTGTTDYAETVQISYEPSQLKLAEILDIFFKMHDPTTVNSQGPDVGTQYRSAIFTFDDEDKSLALKIRDQFQKEWYPNHKIATTIETIYNWYDAEDYHQNYLTKNSGGYECPTHFIRTKPKI

SEQ ID NO: 47234 - protein, 403 aa, Yarrowia lipolytica CLIB122
MRFSITAAATFVAYALAAPIAAPEAESSPADGVLAISLAHDAPLEASKIPNFAAGDNVISIEMINEVMSYYVNIELGGQKNKVHIDTGSQFLWVWNSQSQTCQSDQYKDQCATDGSYDPRKSSTSKDLGSTFHLQYGKGHADGEYYSDTAAVGAAKVNKLKFGVSPDYVNDGGFGTVFGIGPNPDNDSSFTKQLVNDGVTKRQVYGMSFGEPGDQSTSEITFGSINTGRFEGNLEKLPIKNDGHFTVKGSGKIGDTQFISNGDIILDSGTSITFLESQSYNSFIDVVRKSGIQLYPQGRGLNAFLCSDASKAPDTTFTFGNKEIKISLREFSIQASVISSQNSASVCLLGVALGDGSMNLFGDTFLRSVYSVYDLERSEVHIAQAKRGQSNNYKVVTGDVPSN

SEQ ID NO: 47235 - protein, 467 aa, Vibrio vulnificus CMCP6
MTTPNPTRKTDLIYQLNDRPPLPQTLFAALQHLLAMFVAVITPSLIICQALGVSAEQTNTIISMSLFASGISSFIQIRTFGPIGSGLLSVQGTSFNFLGPIIGAGLALKAGGASVESMMAAIFGTILVASFAEILLSRVLEYARRIITPLVSGIVVTLIGLTLIQVGLVSMGGGYAALGDGTFGSLDKLALAGTVLGLIVLLNRAKNPYVRVASIVIAMLVGYVMAYFMGMVDTRQASSSALIALPIPMQFGLSFDWSLFIPLVLIFLITALEAIGDITATSEVSGEPVKGPVYMKRIKGGVLADGLNSALAAVFNSFPNSTFSQNNGVILLTGVASRYVGYFIAGMLVLLGLFPGVAGFVQLIPEPVLGGATIVMFGTIAAAGVRIISRVDLDRRAILIMALSFSMGLGIAQKPEILQFMPEFIKSIFSSGVAAGGITAIVLNLLLPEKLQGEEEEKAHEPATVKR

SEQ ID NO: 47236 - protein, 94 aa, Streptococcus pneumoniae R6
MLKPLGDRVLLKIEEKEQTVGGFVLAGSAQEKTKTAQVVATGQGVRTLNGDLVAPSVKTGDRVLVEAHAGLDVKDGDEKYIIVGEANILAIIEE

SEQ ID NO: 47237 - protein, 95 aa, Rickettsia sibirica 246
MSFKPLHDRIAIKPIEQEEKTKGGIIIPDTVKEKPMQGEIVAVGNGIRNEKGEIHPLELKVGDKVLYGKWAGTEIEIKGTKLIVMKESDVFGIIN

SEQ ID NO: 47238 - protein, 544 aa, Lactobacillus zeae
MAKEIKFSEDARAAMLRGVDQLANTVKTTLGPKGRNVVLDKSYGSPEITNDGVTIAKSIDLEDHYENMGAKLVAEVASKTNDIAGDGTTTATVLAQSIIREGMKNVTAGANPVGIRTGIEKATKAAVDELHKISHKVNGKKEIAQVASVSSSNTEVGSLIADAMEKVGHDGVITIEESKGIDTELSVVEGMQFDRGYLSQYMVTDNDKMEADLDDPYILITDKKISNIQDILPLLQEIVQQGKALLIIADDVAGEALPTLVLNKIRGTFNVVAVKAPGFGDRRKAQLEDIATLTGGTVISSDLGLDLKDTKLEQLGRAGKVTVTKDNTTIVDGAGSKDAIAERVNIIKKQIDDTTSDFDREKLQERLAKLAGGVAVVKVGAATETELKERKYRIEDALNATRAAVEEGYVAGGGTALVDVLPAVAALKEEGDVQTGINIVLRALEEPVRQIAENAGKEGSVIVEQLKKEKQGVGYNAATDEWEDMAKSGIIDPTKVTRSALQNAASVAALMLTTEAVVADKPDPNANNNAAAGANPAAGMGGMM

SEQ ID NO: 47239 - protein, 134 aa, Oryza sativa (japonica cultivar-group)
VILAKDMAEESPLPWYQPLDPSQLSLTHFQFTRIGRFLGQTLVSKQFITQTEATEFLACSWERLYSTIDFFLPAKNPQLKSLEFLHLAPEGSLRICRFLATSVDSLVKGGKEGIFTPLFFVLARKPLQKQEEQI

SEQ ID NO: 47240 - protein, 229 aa, Listeria monocytogenes str. 1/2a F6854
MKLVLIRHGQSEWNKLNLFTGWHDVDLSQEGVVEAMTAGKRIKEAGLEFDVAFTSVLTRAIKTLNYVLEESDQMWVPVHKSWRLNERHYGALQGLNKQETAEKYGADQVQKWRRSYDTLPPLLEENDERQAKNDRRYQLLDTHAIPSGENLKVTLERVIPYWMDTIAPEIKEGRRVVIAAHGNSLRALVKFLEGISDDEIMDLEIPTGVPLVYELNDDLKPVNKYYLDK

SEQ ID NO: 47241 - protein, 547 aa, Rickettsia sibirica 246
MATKLIKHGSKAREQMLEGIDILADAVKVTLGPKGRNVLIEQSFGSPKITKDGVTVAKSIELKDKIRNAGAQLLKSAATKAAEVAGDGTTTATVLARALAREGNKLVAAGYNPMDLKRGMDLAVNAVVEEIKKSSKKINSQEEIAQVGTISSNGDKEIGEKIAKAMEEVGKEGVITVEEAKNFSFDVEVVKGMMFDRGYLSPYFVTNSEKMVAELENPFILIFEKKLSNLQPMLPILEAVVQSQRPLLIIAEDVEGEALATLVVNRLRGGLKVAAVKAPGFGDRRKAMMEDIAILTKGELITEDLGMKLENVSIKSLGTAKRVTISKENTVIVDGNGDKKNIEDRVLQIKSQIAETTSDYDKEKLQERLAKLSGGVAVLKVGGATEVEVKERKDRVEDALAATRAAVEEGVVAGGGVTLLHASQPLTKLKVENKDQQAGIEIVIEALKDPLKQIVENAGENGGVVVGKLLEHKDKNYGFNAQDMQYVDMIKAGIIDPAKVVRTALQDAASVASLIITTETLIVDEPSDKAEPMPMRGGMGGMGGMDF

SEQ ID NO: 47242 - protein, 606 aa, Zea mays
MDQYEVLEQIGKGAFGSALLVRHKLERKKYVLKKIRLARQTDRTRRSAHQEMQLIANVRNPFIVEHKDSWVDKGCYVCIVIGYCEGGDMAEAIKRANDTHFSEEKLCQWLVQLLMALDYLHAHHILHRDVKCSNIFLTRDQNIRLGDFGLAKILTADDLAFSIVGTPSYMCPELLADIPYGTKSDIWSLGCCMYEMAALKPAFRAFVSSENAFIDCLSAVCARYLIKWLSTKVTSRYAKPYQQDYQVDSITFANKIFWCIPYVLQLHLKSHLSRSIVPVHQSPSEKRMTFAAEPVCRSKGRRNSLGSERMIAAFSKPSPDRSSVSSIRSVKDDYTATQSVRELSVDESMVEVASKPVASRTSDVMRTPKATPWKMMTTLRNRLEAPQASYDRTSHTHTEFSRTPVDKRNSRVARRASLPLPVFETPKQRSSMSVLERLESPDVSVNSPRIDRIAEFPLASCEDPLFSTVKPPTPASASASATPPFVDRSITKDKCTAQTLRSAAHDGGNGRSEDGGGLSSGRTTTTAASSGGTSGSLQPKGRFDTTSYQQRAEALEGLLEFSAQLLQQERYEELGVLLKPFGPDEMVSPRETAIWLTKSFKETAPS

SEQ ID NO: 47243 - protein, 166 aa, Bordetella parapertussis 12822
MNTMYDFSAPTITGAERALADFRGQVALVVNVASRCGFTPQYSGLEELYRSYRNEGFVVLGFPCNQFGRQEPGDEAAIAQFCETQYAISFPLFAKIDVNGAHAHPLYRWLKAHKPGLLGTRAIKWNFTKFLVGRDGLPLRRYAPAHTPESLRHDIARACAAPGPTP

SEQ ID NO: 47244 - protein, 460 aa, Candida glabrata CBS138
MSSTVGSGVLTLLHTACGAGILAMPYAFKPFGLIFGILMIMFCGLCSMMTLLIQARVAGYAPDSKNASFFSLTQVINKNLSVIFDLAIAIKCLGVGISYLIVVGDLLPQIAGSITTKPLLLNRDFHITLVMIFVVTPLCLKKRLNSLRHTSSLAIMSVAYLCVLVIIHLVSSDGDIEQMKGHVSIGLPHHGPSPLTTLPIFVFAYTCHHNMFSVINEQKDNRFKTTKYIPLISTSLACILYILIGGCGYMTFGDKIVGNIITLYPHSVSSIIGRIAIALLVTLAFPLQCHPARSSIHNILAFFYPSLNPDLKNTQEPTANADTMSSSQLLATERTPLVRSISSIEDNELAEEQGSIKDVPIEMERKLFLAITAAILIPSYLVAMSVHSLDKVLAIVGATGSTSISFILPGIFGYRLIGSDGATLTRGDRLLKKLGLAATIWGFFVMTASLFATFKYNAHH

SEQ ID NO: 47245 - protein, 249 aa, Xanthomonas axonopodis pv. citri str. 306
MTRKLVLLRHGQSQWNLDNRFTGWVDVELTDQGRQEAVAAGRLMKDEGLQFDVAHTSVLKRAIHTLQGALKELDQDWLPVSKSWRLNERHYGGLQGLDKAETAAKHGEEQVKIWRRSYDIPPPAMDVNDPGHPCHDRRYATLDRNALPGTESLATTLVRVLPYWHDAIAPQLKAGQTVLVTAHGNSLRALYKYLNDVSNEQILELNIPTGIPLLFELDDSLQVRSFRYLGDPEAAKRAAEAVANQGKAK

SEQ ID NO: 47246 - protein, 429 aa, Staphylococcus aureus subsp. aureus MRSA252
MNFSESERLQQLSNEYILGGVNSPSRSYKAVGGGAPVVMKEGHGAYLYDVDGNKFIDYLQAYGPIITGHAHPHITKAIQEQAAKGVLFGTPTELEIEFSKKLRDAIPSLEKIRFVNSGTEAVMTTIRVARAYTKRNKIIKFAGSYHGHSDLVLVAAGSGPSQLGSPDSAGVPESVAREVITVPFNDINAYKEAIEFWGDEIAAVLVEPIVGNFGMVMPQPGFLEEVNEISHSNGTLVIYDEVITAFRFHYGAAQDLLGVIPDLTAFGKIVGGGLPIGGYGGRQDIMEQVAPLGPAYQAGTMAGNPLSMKAGIALLEVLEQDGVYEKLDSLGQQLEEGLLKLIEKHNITATINRIYGSLTLYFTDEKVTHYDQVEHSDGEAFGKFFKLMLNQGINLAPSKFEAWFLTTEHTEEDIKQTLKAADYAFSQMK

SEQ ID NO: 47247 - protein, 110 aa, Triticum aestivum
  misc_feature (95)..(95): Xaa can be any naturally occurring amino acid
  unsure (1)..(110): unsure at all Xaa locations
MAPSSSTSTTAAAAADERDRKRKRGAGGEAGTEAEAERAPKWRSRREHEIYSTRLLDALRLVRAGGGVAPSPARQVRDAADRALAVAARGRSRWXRAILASRRAHRVHRV

SEQ ID NO: 47248 - protein, 397 aa, Shewanella sp. ANA-3
MIFSQVVLAPADPILGLTDTFKADPRQDKVNLGVGIYKDEAGQTPVLQSVKKAEALLLEQEKTKNYLGIEGVQTYNRVVQELLFGEGSTLVTSGRAATAQAPGGTGALRIAAEFLLRNTPSRTVWVSNPTWANHQNIFETAGLTVKEYGYYNASAHDIDFDGMMTDLANAQAGDIVLLHGCCHNPTGIDLTLAQWELVANLCADKQLVPLFDFAYQGFGAGIEEDAAGLRLVAAKVPELLVANSFSKNFGLYNERIGAVTVVAQNADEAVRAFSQVKRTIRANYSNPPAHGALIVSTILSDAALKALWVQELTEMRERIAQMRTLFVQSLKDEGVTQDFSFISRQNGMFSFSGLNKEQVARLKDEFGIYIVGSGRISVAGMTKTNMPVICKAIAQVL

SEQ ID NO: 47249 - protein, 578 aa, Staphylococcus aureus subsp. aureus MRSA252
MIKRYLQFVKPYKYRIFATIIVGIIKFGIPMLIPLLIKYAIDGVINNHALTTDEKVHHLTIAIGIALFIFVIVRPPIEFIRQYLAQWTSNKILYDIRKKLYNHLQALSARFYANNQVGQVISRVINDVEQTKDFILTGLMNIWLDCITIIIALSIMFFLDVKLTLAALFIFPFYILTVYVFFGRLRKLTRERSQALAEVQGFLHERVQGISVVKSFAIEDNEAKNFDKKNTNFLTRALKHTRWNAYSFAAINTVTDIGPIIVIGVGAYLAISGSITVGTLAAFVGYLELLFGPLRRLVASFTTLTQSFASMDRVFQLIDEDYDIKNGVGAQPIEIKQGRIDIDHVSFQYNDNEAPILKDINLSIEKGETVAFVGMSGGGKSTLINLIPRFYDVTSGQILIDGHNIKDFLTGSLRNQIGLVQQDNILFSDTVKENILLGRPTATDEEVVEAAKMANAHDFIMNLPQGYDTEVGERGVKLSGGQKQRLSIARIFLNNPPILILDEATSALDLESESIIQEALDVLSKDRTTLIVAHRLSTITHADKIVVIENGHIVETGTHRELIAKQGAYEHLYSIQNL

SEQ ID NO: 47250 - protein, 342 aa, Propionibacterium acnes KPA171202
MAKIYYDDDADLSIIQNRQVAVIGYGSQGHAHALNLRDSGVDVRVGLRDGSSSIAKAEAQGLRVLSIEDACEEADLIMVLVPDQNQRQLYAEHIAPHLKDGDALFFAHGFNVHFGYIKAPQGVDVCMVAPKGPGHIVRREYSDGRGVPVLVCVEQDASGIAWDLTRSYAKALGGLRAGGIETSFREETETDLFGEQAVLCGGLSHLIQAGFETLVTAGYQPEMAYFEVCHEMKMIVDLIIEGGISKLRWSISDTAEYGDYVSGPRVIDDHVKKNMKAVLDDIQNGAFAKRFIADQDAGAPQSKKFREGEAKHPIEATGKELRKMYSWLAAADDDYTEGSVAR

SEQ ID NO: 47251 - protein, 615 aa, Halobacterium sp. NRC-1
MYEHDVIVVGGGGAGLRAAIAAQEEGADVAIVTKLHPVRSHTGAAEGGINAALRDGDSWEDHAYDTMKGSDYLGDAPAIDTFAKTAPDEVIQLEHWGMPFSREDDGRVSQRPFGGLSFPRTTYAGAETGHHMLHTLYEQVVKRGIEVYDEWYVSELAVTDEDNPNDRECHGVVAWDVQSGEIAGFKASDSVILATGGIGQAFDHTTNAVANTGDGVAMAYRAGVPVEDMEMIQFHPTTLPSTGVLISEGVRGEGGILYNGEGERFMFEHGYATNDGELASRDVVSRAELTEINEGRGVDDEHIYLDMRHLGEERITDRLENILHLAEDFEGVNGLEEPMPVKPGQHYAMGGIETNEFGETCVSGLYAAGECACVSLHGANRLGGNALPELIVFGALAGRHAAGKEMADPLIETGPSDALEHDELSVPTGAPDGDAGVAEPATDGGAQGAVDTRAPTDVVADTATTEEERIEALLGREDGVNHADVRADLQQSMTENVNVFRTEDGLKQALADIQDARKRYQDVYVADKSRTFNTDLQHTIETRNLLDVAEMITIGALARDEFRGAHWRKEHQERKDDEWLKHTMVSWNDGDPDLWYRPVLLEGHDDTYEPKTRSY

SEQ ID NO: 47252 - protein, 382 aa, Arabidopsis thaliana
MPINDQFPSGLRILVVDDDTSCLFILEKMLLRLMYQVTICSQADVALTILRERKDSFDLVLSDVHMPGMNGYNLLQQVGLLEMDLPVIMMSVDGRTTTVMTGINHGACDYLIKPIRPEELKNIWQHVVRRKCVMKKELRSSQALEDNKNSGSLETVVVSVSECSEESLMKCRNKKKKKKRSVDRDDNEDDLLLDPGNSKKSRVVWSIELHQQFVNAVNKLGIDKAVPKRILELMNVPGLSRENVASHLQKFRLYLKRLSGEASQSNDSESTKRYENIQALVSSGQLHPQTLAALFGQPIDNHHSASFGVWIPNDNLGRSQNEHFSVDVSSASNRPVSVAVHGLSSSANFRQRGDVNNNRIRQGYGSNVNEESWILERSSRQR

SEQ ID NO: 47253 - protein, 119 aa, Brassica napus
MSASRFIKCVTVGDGAVGKTCMLISYTSNTFPTDYVPTVFDNFSANVVVDGNTVNLGLWDTAGQEDYNRLRPLSYRGADVFILAFSLISKASYENIAKKWIPELRHYAPGVPIIPLGTK

SEQ ID NO: 47254 - protein, 259 aa, Arabidopsis thaliana
MAEEYKNNVPEHETPTVATEESPATTTEVTDRGLFDFLGKKEEEVKPQETTTLESEFDHKAQISEPELAAEHEEDEENKPSVIEKLHRSNSSSSSSPRVRPRVRPRVRSDEEGEEKKEKKKKIVEGEEDKKGLVEKIKEKLPGHHDKTAEDDVPVSTTIPVPVSESVVEHDHPEEEKKGLVEKIKEKLPGHHDEKAEDSPAVTSTPLVVTEHPVEPTTELPVEHPEEKKGILEKIKEKLPGYHAKTTEEEVKKEKESDD

SEQ ID NO: 47255 - protein, 347 aa, Streptomyces tenebrarius
MGGVHAEVFAEHPRARLAAVCDLDRGAARELAGRFAVETVTDDLDSVLSDDRIGLVVVTTPNALHAEQAARALRAGRHVLVEKPLALTSDEIRGLLRLADERGLVLAHGSNFVHSPKFRRVRELVADADAFGRPHLARVVVRNGGPDSGWCLDPALAGGGVLLDLGCHAVEICRWLLGGAEVRAVTARSQRVRPRAGRVEDQATLLLEFADGALGQCDVSWACPGGEEITTEVLGTSGRAGADLWAGMGVHAFSERGFASVWEPNQGWVRPEWEWVRASGYTHQDHAVVEAVLDGTPLPHSAVEAWTSARVLEAAAESAATGRTVELAPSPNGHPVPDAVRGGDRVH

SEQ ID NO: 47256 - protein, 370 aa, Haloarcula marismortui ATCC 43049
MTQDVLNRAPDDRIQALDADGEIVDPDLIPDLSDEALVSMYRDMRFARRFDERMISLQRQGRLGTYSSLAGQEGSQVGSTYALADEDTIFYQYREHGALVARGLPWEYVLYWMGHEAGNAALGDVNVFPLNISIGAHLPHAVGWSWAAKKRGDERAGVVHFGDGATSEGDFHEAMNFAGVFETPTVFFCNNNQWAISVPRERQTASQTLAQKADAYGFDGVQVDGMDPLATYSVTEAARERAVGANGGEQEPIFIEAVQYRFGAHTTADDPDVYRDDAEVEEWRERDPLDRMEAFLRNCNLLDDGKIDVMDDTIDERLGEIIDNAESHAPDPTDLFTDVYDESTSNIDEQREYFEGLRERHGDDALLESE

SEQ ID NO: 47257 - protein, 370 aa, Photorhabdus luminescens subsp. laumondii TTO1
MKRKTGFFFDEHCFWHSTGMHVMTLPVGGWVQPSSGTAHAESPETKRRLKNLMDVSGLSHSLHLSSASPIDEQTLRKIHPEEYLKQFKRVSDNGGGMLGIEASLGPGSYEIAKLSASLACAAVEAVLSGELDNAYSLSRPPGHHCLPDKPMGFCFLANIPLAIEQAKARFDLKRVAVIDWDVHHGNGTQHIYWDRSDVLTISIHQDGCFPPGYSGEDDIGEGEGTGYNLNIPLLAGAGHNSYIYAMTQIVLPALERFKPELIIVACGYDANAMDPLARMQLHSESFREMTQLVQQAADSLCDGKLVVVHEGGYAESYVPFCGLAVLEQMSGIRTEVKDPMLDSIRLQQPRAEFELFQQQQLDKLKEKFGL

SEQ ID NO: 47258 - protein, 453 aa, Synechococcus elongatus PCC 7942
MRRLSASLAGDARLVCEEIALVTSSPFKTIKSDEIFAAAQKLMPGGVSSPVRAFKSVGGQPIVFDRVKDAYAWDVDGNRYIDYVGTWGPAICGHAHPEVIEALKVAMEKGTSFGAPCALENVLAEMVIDAVPSIEMVRFVNSGTEACMAVLRLMRAYTGRDKIIKFEGCYHGHADMFLVKAGSGVATLGLPDSPGVPKSTTANTLTAPYNDLEAVKALFAENPGEIAGVILEPIVGNSGFIVPDAGFLEGLREITLEHDALLVFDEVMTGFRIAYGGVQEKFGVTPDLTTLGKIIGGGLPVGAYGGKREIMQLVAPAGPMYQAGTLSGNPLAMTAGIKTLELLRQPGTYEYLDQITKRLSDGLLAIAQETGHAACGGQVSGMFGFFFTEGPVHNYEDAKKSDLQKFSRFHRGMLEQGIYLAPSQFEAGFTSLAHTEEDIDATLAAARTVMSAL

SEQ ID NO: 47259 - protein, 220 aa, Leuconostoc mesenteroides subsp. mesenteroides ATCC 8293
MRGEYVSASSDINQLLEQILPLYGQVFKELQAAGVTWIQLDEPTLVKVADEADVEPYRRATEYLNEVAPQLNIELQTYFDSIDPYQAVTKLPVQAIGLDFVHGHGENFDNIRKFGFPEDKILAAGIIDGHNVWTANLQEKANFAEELRTLAPKLWLQPSNTLLHVPITKKYETKASPELFGGLAFADEKVQELVALTKKLNGDDVTAIFEHDCRCSGGIE

SEQ ID NO: 47260 - protein, 260 aa, Zea mays
MAMASALPLLLAPRAVFASAGPSSPHLRSRRLALRLPPPPRPAALSAPPAAVQPREARRVQPPRAASCCQDPAPAAGGGARDWRMFLAWYLMALDKNPIVTKAVTSAALTLAGDLICQLVIDRVPELDLRRTFVFTFLGLALVGPTLHVWYLYLSKLVTISGASGAIARLMLDQFIFSPIFIGVFMSLLVTLEGKPSLVVPKLKQEWLSSVLANWQLWIPFQFLNFYFVPQKFQVLGANFVALAWNVILSFKAHKEVIAK

SEQ ID NO: 47261 - protein, 339 aa, Streptomyces tenebrarius
MKALSFEAPGEAVFGTREVPVPAPGEALIHLGYNSICGSDLSLYRGVWHGFSYPVVPGHEWSGTVVEVNGPGAELVGRDVVGDLTCACGSCAACGRGTPVLCENLQELGFTRDGACAEYMTIPTGNLHVLPEGLSLRAACQVEPVAVALHAVSTVGVEPGERVAVLGAGGIGLMLMQVARQRGGVITTVGEPVAERRAVAAQLGARTVTTGRPGELAELVAKHPDLTPDVVLEASGYPVAVQEAIEVVRPGGRIGLVGYRVEEVGPMATHHVAVKALTIRGSLGPGGRFPEAIDLLARGEIEVEPLLSHEFALDDHARALDLALRRAEGNVRSFFNLRA

SEQ ID NO: 47262 - protein, 457 aa, Zea mays
MQIFVKTLTGKTITLEAESSDTIDNVKAKIQDKEGIPPDQQRLIFAGKQLEDGRTLADYNIQKESTLHLVLRLRGGMQIFVKTLTGKTITLEVESSDTIDNVKAKIQDKEGIPPDQQRLIFAGKQLEDGRTLADYNIQKESTLHLVLRLRGGMQIFVKTLTGKTITLEVESSDTIDNVKAKIQDKEGIPPDQQRLIFAGKQLEDGRTLADYNIQKESTLHLVLRLRGGMQIFVKTLTGKTITLEVESSDTIDNVKAKIQDKEGIPPDQQRLIFAGKQLEDGRTLADYNIQKESTLHLVLRLRGGMQIFVKTLTGKTITLEVESSDTIDNVKAKIQDKEGIPPDQQRLIFAGKQLEDGRTLADYNIQKESTLHLVLRLRGGMQIFVKTLTGKTITLEVESSDTIDNVKAKIQDKEGIPPDQQRLIFAGKQLEDGRTLADYNIQKESTLHLVLRLRGGQ

SEQ ID NO: 47263 - protein, 467 aa, SYNECHOCOCCUS SP. WH 8102
MAKGFALQFAEAVDAQQAKHHPKEPVQSIACAALAVDRGTPRRAVGTAGYSHLAQFEPCVNRADPEGIQRFCRTDDGCGEPCRQSNCSTPLPRQPRRTGETRDRRSRSTTDLLRLYLQDIGRVDLLTNEEEVTLARLVQRREALLQQQRDLATSDAAIGELYRLEELQRREANQHSHWPTKQEWARAAHLSLAELQQRIEAGYGAWAREANLEARELKTALRNGRRAKDHMIQANLRLVVAVAKKYQQRGMELLDLVQEGTLGLERAVEKFDPTRGFRFSTYAYWWIRQGMTRAIATQSRTIRLPVHVTEKLNRIKRAQQEIATNEGRIASIADLARALKLSEDTVRQTLARVPRSVSLDTRVGRDQDTQLGDLIEDGKATPEQTLTHDELHNDLEHLLDELTSREAAVLRRRFGLEDDTPQTLAQIGEALKLSRERVRQIETRALLKLRQPQRRSKVRDYIQGLDS

SEQ ID NO: 47264 - protein, 214 aa, Thellungiella halophila
MGVKRSPNMCASVGIQGIAWAFGGMIFALVYCTAGISGGHINPAVTFGLFLARKLSLTRAVYYIVMQCLGAICGAGVVKGFQPKQYQALGGGANTIAHGYTKGSGLGAEIIGTFVLVYTVFSATDAKRNARDSHVPILAPLPIGFAVFLVHLATIPITGTGINPARSLGAAIIFNKDNAWDDHWVFWVGPFIGAALAALYHVIVIRAIPFKSRS

SEQ ID NO: 47265 - protein, 524 aa, Fusobacterium nucleatum subsp. vincentii ATCC 49256
MNKIYWYSGFLLIALIFKSHFGGWGMVKMQKTGSTASKDLRIAMGDHVKKLNLGYFNSHNLGYLINILTMDITDFEQAITHNIPDLLKVLVLSVYLLLITFFINFKLAIIQIIVVLLTIPILKVGGEKLEKIGVEKKTVSAKLISTIIEYISGIEVFKSFGVIGDKFERLEKGFRDLKKYSIKLELAAVPYVLLFQIIIDLLFPILLLLAVRFFMNGELEAKMLVGFIVLSLTLTNVIRNFSASYSITRYLFLSVAKISDTLNYPVISYKDEDFNFSSYDISFEDVDFSYTEDRKVLKDINFTAKNNEITALVGKSGSGKSTVMSLIARFWDTTKGSIKIGGKDIKEVNPDSLLKNISMVFQDVYLINDTIYENIRIGNLNASREEIMNAAKIANCHDFISKLPKGYDTYIGEEGSTLSGGEKQRISIARALLKNSPIILLDEATASLDADSEHEIKMAINELIKDKTVIIIAHRLNTIKDANKIIVMDDGKIIESGNHEKLMNDKGTYYSMFTAMEKAKEFSI

SEQ ID NO: 47266 - protein, 544 aa, SYNECHOCOCCUS SP. WH 8102
MAKFVFITGGVVSSIGKGIVAASLGRLLKSRGYNVSILKLDPYLNVDPGTMSPIQHGEVFVTEDGAETDLDLGHYERFTDTAMSRLNSVTTGSIYQAVINKERRGDYNGGTVQVIPHITGEIRERIHRVAANSNADVVITEIGGTVGDIESLPFLEAIREFSGDVGRNDLAYIHVTLLPFIGTSGELKTKPTQHSVKELRSIGIQPDVLVCRSDRTISEEMKRKIGGFCGVPTRAVIPSLDAESIYAVPLTLEQEGLCREVLDVLDLTDHDSDMAAWQELVHKLRNPGPAVKVALVGKYIQLNDAYLSVVEALRHACIAQDASLDLHWVCAEQIESDGAQALLKGMDAVVVPGGFGNRGVDGKIAAIRWAREQRVPFLGLCLGMQTAVIEWARNQAGLTEATSAELDAGTPHPVIHLLPEQQDVVDLGGTMRLGVYPCRIAPDTLAHRLYGDQVVYERHRHRYEFNNAYRNLFLESGYVVSGSSPDGRLVELIELKGHPFFTACQYHPEFLSRPGRPHPLFQGLIEAAQQRLPSSPVEAIQTQR

SEQ ID NO: 47267 - protein, 295 aa, Zea mays
MMRETYMDVLPPVDHIAARSNWFPAAARLWTAAENKQFERALAGLDLCRPDWEEVARAIPGRTVREVVSHFKHLEVDVQQIESGQVPLPAYGGGASSFTLQWDGYGPGPGDFRHGYRFAGGCGRRHHGRTPEQERKKGVPWTEEEHRLFLLGLKKYGKGDWRNISRNFVQTRTPTQVASHAQKYFIRLNSGGKDKRRSSIHDITTVNLTDDQPPSPSQSSLITSQSNAPAPAPAAGICQVPLAADAKRHGAGTLPFSSPNRTSAAPAYRMEFHDQQGLQCGPLHDQLLASQSVLF

SEQ ID NO: 47268 - protein, 341 aa, Arabidopsis thaliana
MDNSAPDSLSRSETAVTYDSPYPLYAMAFSSLRSSSGHRIAVGSFLEDYNNRIDILSFDSDSMTVKPLPNLSFEHPYPPTKLMFSPPSLRRPSSGDLLASSGDFLRLWEINEDSSTVEPISVLNNSKTSEFCAPLTSFDWNDVEPKRLGTCSIDTTCTIWDIEKSVVETQLIAHDKEVHDIAWGEARVFASVSADGSVRIFDLRDKEHSTIIYESPQPDTPLLRLAWNKQDLRYMATILMDSNKVVILDIRSPTMPVAELERHQASVNAIAWAPQSCKHICSGGDDTQALIWELPTVAGPNGIDPMSVYSAGSEINQLQWSSSQPDWIGIAFANKMQLLRV

SEQ ID NO: 47269 - protein, 271 aa, Mycobacterium avium subsp. paratuberculosis K-10
MTVKQSQASRLSPIFEPCRDDDRAALIGYLPTGYPDVPTSVQAMVALVESGCDIVEVGVPYSDPGMDGPTIARATEAALHGGVRVRDTLAAVEAISAAGGRAVVMTYWNPVLRYGVDAFARDLAAAGGYGLITPDLIPDEAGQWLAASERHGLDRIFLVAPSSTPQRLALTVEASRGFVYAASTMGVTGARDAVSHAAPELVSRVREISDIPVGVGLGVRSREQAAQIGGYADGVIVGSALVSALGDGGLTALRALTEELAAGVRQRAAAS

SEQ ID NO: 47270 - protein, 254 aa, Bacillus clausii KSM-K16
MSAEVKNGGKKKPLSDKQVKELIAKSQEGDTEARDSIVNHNTRLVWSVVQRFLNRGYEADDLFQIGCIGLIKSVDKFDLSYDVKFSTYAVPMIIGEIQRFLRDDGTVKVSRSIKELSNKIRKAKDELTKTLRRAPTINEIAEHLGVTPEEIVFAGDANRSLSSIHETVYENDGDPITLLDQIADHSQVKWFDKIALKEAICDLGERERLIVYLRYYKDQTQSEVAERLGISQVQVSRLEKKILEQMKETMSDAT

SEQ ID NO: 47271 - protein, 515 aa, Yarrowia lipolytica
MIYTANSSPSTNLQWLSTLNTDDIPTKNYRKSSIIGTIGPNTNSAEMISKLRQAGLNIVRMNFSHGSYEYHQSVIENARESEQQFQGRPLAIALDTKGPEIRTGVTKDDKDWDVKAGHVMLFSTNPKYKDQCDDKIMYIDYTNIVKQIDIGKIIFVDDGVLSFKVLEKIDGETLKVETLNNGKISSRKGVNLPGTDVDLPALSEKDKADLKFGVEHGVDMIFASFVRTANDVQAIRDVLGEKGKGIQVISKIENQQGVNNFDEILKETDGVMVARGDLGIEIPAPQVFIAQKQLIAKCNLAGKPVICATQMLDSMTYNPRPTRAEVSDVGNAVLDGADCVMLSGETAKGTYPIESVKMMHETCLVAEKAIAYAPLFNEMRTLTVRPTETVETIAISAVSASFEQQARAIIVLSTSGTSARLCSKYRPNCPILMVTRNAQAARFSHLYRGVYPFIYHKARASNPAEWQHDVEERLKWGMDEAVALGILNKGDVVVAIQGWTGGLGHTNTLRVLECV

SEQ ID NO: 47272 - protein, 472 aa, Mycobacterium avium subsp. paratuberculosis K-10
MSRRGKIVCTLGPATNSDELILALVEAGMDVARLNFSHGDYADHKAAYERVRVASDATGRAVGVLADLQGPKIRLGRFATGPTYWADGETVRITVADCEGSHDRVSTTYKQLAQDAAVGDRVLVDDGKVGLVVDGIEGDDVICTVVEGGPVSNNKGISLPGMNVSAPALSDKDIEDLTFALELGVDLVALSFVRSPSDVELVHEVMDRVGRRVPVIAKLEKPEAVDNLEAIVLAFDAIMVARGDLGVELPLEEVPLVQKRAIQMARENAKPVIVATQMLDSMIENSRPTRAEASDVANAVLDGADAVMLSGETSVGKYPLAAVRTMARIICAVEDNSTAAPPLTHVPRTKRGVISYAARDIGERLDAKALVAFTQSGDTVKRLARLHTPLPLLAFTAWPEVRSQLAMTWGTETFIVPMMTSTDGMIRQVDKSLLELGRYRRGDLVVIVAGAPPGTVGSTNLIHVHRIGEDDV

SEQ ID NO: 47273 - protein, 651 aa, Synechococcus elongatus PCC 6301
MEKLMAAEQTAIAPLAVAVESQQWRIEDSEALYRIQGWGEPYFGINAAGHITVSPQGDRGGSLDLYELVEALRRRGLNLPLLIRFPDILEDRIERLNACFAKAIARYNYAGEYRGVFPVKCNQQRHLIESLVNYGRPFQFGLEAGSKPELLIALAHLDTPGALLICNGYKDRDYIETAILGRRLGKTPILVIEQLEEVDVAIAASQRLGIEPILGVRAKLNARGMGRWGSSAGDRAKFGLTMPEIVAAVEELQAANLLHCLQLLHFHIGSQISDISVLKDAIQEAAQIYVQLAALGADMRYLDVGGGLGVDYDGSKTNFHASKNYNMQTYANDVVATIKDACQAHRLAVPTLTSESGRAIASHQSVLVFDVLGSSEVPRAAVEPPQEEDSAIVRTLYEVLEAIALENLQECYHDAFKLKEDAVSAFRLGYLSLTERAKAERLFWSCCHRIQEFLKQLDRIPEDLEDLERVMASIYYVNLSVFQSAPNTWAIDQLFPIMPIHRLNEEPNQRVTLADLTCDSDGKIDRFIDLLDVKSTLELHSLQPDQPYVLGMFLGGAYQEIMGNLHNLFGDTNAVHIKLTPKGYSIEHVVKGDTMGEVLGYVQYDTEQLLERLRQQTEAALQQDQISLDEAQRLLRHYEEGLQRYTYLSLD

SEQ ID NO: 47274 - protein, 220 aa, Brassica rapa subsp. pekinensis
MAEEYKNASEEFKNVPEHETPKITTTEEPSAATGEVKDRGLFDFLGKKEEVKPQETTTPLASEVEHKAQITEEPASVAKHEEEEHKPTLLEQLHQKHEEEEENKPSLLQKLHRSNSSSSSSSEEEGEDGQKRKKEKKKKIVEGEEKKGVMEKIKEKLPGHSEKPDDSQVVNTEAAVPVSDETAEHPEEKKGILEKIKEKLPGYHAKSSEEEEKKEKESDD

SEQ ID NO: 47275 - protein, 468 aa, Pseudomonas aeruginosa PAO1
MNARLHATSPLGDADLVRADQAHYMHGYHVFDDHRVNGSLNIAAGDGAYIYDTAGNRYLDAVGGMWCTNIGLGREEMARTVAEQTRLLAYSNPFCDMANPRAIELCRKLAELAPGDLDHVFLTTGGSTAVDTAIRLMHYYQNCRGKRAKKHVITRINAYHGSTFLGMSLGGKSADRPAEFDFLDERIHHLACPYYYRAPEGLGEAEFLDGLVDEFERKILELGADRVGAFISEPVFGSGGVIVPPAGYHRRMWELCQRYDVLYISDEVVTSFGRLGHFFASQAVFGVQPDIILTAKGLTSGYQPLGACIFSRRIWEVIAEPDKGRCFSHGFTYSGHPVACAAALKNIEIIEREGLLAHADEVGRYFEERLQSLRDLPIVGDVRGMRFMACVEFVADKASKALFPESLNIGEWVHLRAQKRGLLVRPIVHLNVMSPPLILTREQVDTVVRVLRESIEETVEDLVRAGHR

SEQ ID NO: 47276 - protein, 264 aa, Hordeum brevisubulatum
MTRKKKVRRRSTGPDSVAETIKKWKEQNQKLQQENGSRKAPAKGSKKGCMAGKGGPENSNCAYRGVRQRTWGKWVAEIREPNRGNRLWLGSFPTAVEAARAYDDAARAMYGATARVNFPEHSPDANSGCTMAPSLLLSNGATAVSHPSDGKDESESPPSLVSNAPTAALHRSDAKDEFESSGTVAHKVKAEVSNDLRSTHEEHKALEVTQPKGKALHKEANVSYDYFNVEEVLDMIIVELSADVKMEAHEEYQEGDDGFSLFSY

SEQ ID NO: 47277 - protein, 532 aa, Magnaporthe grisea 70-15
MAWSKATRIGVMLAIDLAFFFLELGVGIYVGSLALMADAFHMLNDVISLVIGLWAVRVAQNKSTDKFSYGWLRAEILGAFFNAVFLIALCVSILLEALGRFVDPPTIQNPQLILVVGSLGLASNLAGFFVLGGHSHGHGHDDDHDHDHDHGHNDAHSHSHDHAHDATREAEEGRHISFDDSREDVAGVPARFKSHRRRPSSNRHSRLTNIDDMSFHPASFRQEIIAASRPVEVSDDESVTDNENDANDNTPLINDRTGAGHEGQYGSTGHSNSHGRSRRDSVLHDHHNHNKPREAQKGGGHSHNHADMGMQAMILHVIGDALGNVGVIVTALIIWKTEWSGRFYADPAVSLFITCIILRSCIPLTLATAKILLQATPDHISIRDIKADIQDLPGVVSCHHVHIWQLSDTKLVASMHIQVSFPISEEGGEKYMKLAMRARSCLHAYGIHSATIQPEFYLDDVHLSRSDIAASDAATACGTGGPGSVCLLECVDDCVGQGCCSDAGAKSPPSSSHSGSGGGHNHGHSHGHDHQH

SEQ ID NO: 47278 - protein, 171 aa, Zea mays
MASSSGSGSSGSLSAATAALAAAAGTEEELRALMEQRRAKRMLSNRESARRSRMRKQRHLDELTAQAAHLRRENAHVATALGLTAQGLLAVDAENAVLRTQAAELAARLGSLNDILACMNTNAVGAVAVSLTAAAAAAAASSDPCLAFDGATALDDLLRSCPENMFQYQLC

SEQ ID NO: 47279 - protein, 235 aa, Hordeum vulgare
MAALAASIATSTAFAAKPRLSRPPARLSVSCSASSGDNNNSTATPSLSASIKTFSAALALSSVLLSSAATSPPPAAADIAGLTPCKESKAFAKREKQSVKKLNSSLKKYAPDSAPALAIQATIDKTKRRFENYGKFGLLCGSDGLPHLIVSGDQRHWGEFITPGVLFLYIAGWIGWVGRSYLIAVSGEKKPAMREIIIDVELAARIIPRGFIWPVAAYRELINGDLVVDDADIGY

SEQ ID NO: 47280 - protein, 334 aa, Saccharomyces cerevisiae
MRALRFLIENRNTVFFTLLVALVLSLYLLVYLFSHTPRPPYPEELKYIAIDEKGHEVSRALPNLNEHQDDEEIFLSVVIPSYNETGRILLMLTDAISFLKEKYGSRWEIVIVDDGSTDNTTQYCLKICKEQFKLNYEQFRIIKFSQNRGKGGAVRQGFLHIRGKYGLFADADGASKFSDVEKLIDAISKIETSSTDLKTTKPAVAIGSRAHMVNTEAVIKRSMIRNCLMYGFHTLVFIFGIRSIKDTQCGFKLFNRAAILKIFPYLHTEGWIFDVEILILAIRKRIQIEEIPISWHEVDGSKMALAIDSIKMAKDLVIIRMAYLLGIYRDNKKC

SEQ ID NO: 47281 - protein, 335 aa, Pleurotus sajor-caju
MVNVGINGFGRIGRIVFRNALEVGGVDVVAINDPFIDLDYMVYMFKYDSVHGRFKGSIEAKDGKLIVEGKPIHIFAEKDPANIPWGSVGADYVVESTGVFTTIDKASAHLKGGEKVVISAPSADAPMFVCGVNLETYDPKYKVISNASSTTNCLTPLAKVIHDKFGIVEGLISTIHATTATQKTVDGPSHKDWRGGRSVNNNIIPSSTGAANWVGKVIPSLNGKLTGLSFRVPTLDVSVVDLVVRLEKPADYKEIVAAIKEASETTHKGILGFTSDSVVSTDFVGSTDSSIFDSTAGIQLNPNFVKLIAWYDNEYGYSRRVVDLLKYVAEKDGAQ

SEQ ID NO: 47282 - protein, 298 aa, Micromonospora echinospora
MLTGHQEGVIGAVFHPDDHLVATSGEDGTVRLWDATTGEQVGRTLTGHTDTVWLVVFDPEGRLLASASEDRTARIWDVSTGEQVGEPLTGHTAGVYGVAFHPDGGLLATGSADHTVRLWKVPGGEPVGEPLTESTDEIDGVAFHPDGHLVASTGDAVRLYDTATGRPVGTPLVGHTKGAVSVAFSPDGRLLASGSDDLTVRIWDHAAGGAAVEPLVGHTDAVDGVVFHPNGRLLVSAAEDCTVRVWDVATGRQVGEVETGHTAPVWNIAFDRSGERIVTASQDGTARILPFPAYPAAG

SEQ ID NO: 47283 - protein, 517 aa, Nicotiana tabacum
MGQREDGKTLSDEYEVTDILGRGGFSVVRRGTRRRTLHSGQHHEVVAIKTLRRFGPPPAPEKKSLNKSRVPQAALISETLLTNELLVMIKIVEDVSPHPNVIHLYDVCEDPSGVHLILELCSGGELFDRIAGQARYNEAGAAAVVRQIAKGLEALHGASIVHRDLKPENCLFLNKDENSPLKIMDFGLSSIEDFANPVVGLFGSIDYVSPEALSRENITTKSDIWSLGVILYILLSGYPPFIAPSNRKKQQMILNGQFSFDEKTWKNISSSAKQLISSLLKVDPNMRPTAQEILEHPWVTGDLAKQEQMDAEIVSRLQSFNSRRKFRAAAMASVLSSSFSLRTKKLKKLVGSYDLKPEELQNLSHNFKKICKNGENSTLLEFEEVLKAMEMSSLVPLAPRIFDLFDNNRDGTVDMREIIGGFSSLKYSQGDDALRLCFQMYDTDRSGCISKEEVASMLRALPEDCLPINITEPGKLDEIFDLMDANSDGKVTFDEFKAAMQRDSSLQDVVLSSLRPS

SEQ ID NO: 47284 - protein, 456 aa, Xanthomonas campestris pv. vesicatoria str. 85-10
MSARYDYDVVILGGGSGGLAAGFRAAKHGARVAIMEPDELGGTCVNLGCVPKKAMWLAADLAGKIELASVLGFDVPRPTLAWQELVTHRQGYISNIHASYRRRLNEDGVVLIPQRGVLQDRHTVMGSDGVPVTAEHIVIATGAHPLRPDVEGAEHGEVSDDFFNLCHAPEQVAIVGGGYIAVEIAGLLQALGSRVHLFVQDERLLERFDAELTLQLADNLRHLGVRLHFGFTTTALERDLHGALRVHGHCVHPREQGNDVFDKVFFAVGRRANTAGLGLDTVGVALGDKGEVVVDDGQTTNVPNIHAIGDVGGKVGLTPVAIAAGRKLMDRLFGHQPDARMDYENVPSVVFSHPPLGNVGLTEEQARARYNGAVRVYRSNFRPMLHALADAPQRSLFKLVCVGEEERVVGVHLLGESADEMLQGFAVAVKMGATKRDFEETVAIHPTSSEEIVLMH

SEQ ID NO: 47285 - protein, 220 aa, Zea mays
MAPRTSERAMTSAAAGLARGAGPHYRGVRKRPWGRYAAEIRDPAKKSRVWLGTFDTPEDAARAYDAAAREYRGAKAKTNFSFPACLPLAAADVAGACRSGNSSSTTTTTTVDSFGGDVQAPPMQAMPLPPSFCASGAVRFPFSSYPVTHPYYFFGQAAAGCHMLKLPPTTVTVAQSDSDSSSVEDLSPSPSPSPPAAVSATRSATFDLDLNCPPPAEAEA

SEQ ID NO: 47286 - protein, 575 aa, SYNECHOCOCCUS SP. WH 8102
MQTLNAETLQGLLENLFPEDSSADSEQLSSQLLQILRGASANDDPPGATDLWSGADAVLITYADTVVEQGVPALRSLRQLLNNRLRPFAEVVHVLPFLTSTSDGGFAVASHDRIEPRFGDWRDLADLAHGRRMMADLVLNHISASHPWVRQFLRDEEPGRSCVLEAAPDPCWDQVVRPRSSSLFTQLSGSDGPRQVWTTFGPDQVDVDWRSPEVLLGFTRLLDRMLRHGVRWVRLDAVGFIWKTPGTGCIHLPEAHRIVEVLRQLMERSCSGGVVVTETNVPEQENLSYLVSGREAHLAYNFPLPPLLLEAAISGRADLLNGWLNRWPALPVATGLFNFTACHDGVGLRALEGLMTDQRRLQLLIACEQRGGLISHRRLTNGEEAPYEINISWWSAMADGGIDPAHLQRARFLMTQLLVLALPGVPAFYLPALLATPNDLGRFRRTGQRRDLNRPQFKADTVERRLQDPDSDATAVTSVLAHALRVRRDQPALHPDAAMEVMSAGRSDLVMLRRRGGGQTLVAVHNVTPSRLTLVLGRLGGRTGLAWTDCLSGSSETHGSQLQLEPYAVHWLIQA

SEQ ID NO: 47287 - protein, 405 aa, Triticum aestivum
  misc_feature (297)..(297): Xaa can be any naturally occurring amino acid
  misc_feature (311)..(311): Xaa can be any naturally occurring amino acid
  misc_feature (356)..(356): Xaa can be any naturally occurring amino acid
  unsure (1)..(405): unsure at all Xaa locations
YSVDIFNAAGRPRPYPVPCQFITIGDGSKNPNYDDIISRIATNALDAAVGDFAIVRNRTKIAEFTQPYIEAGLVIVAPVRKANSNAWAFFKPFTLEMWCVTGTLFIFVGVVVWILEHRSNEEFRGSPRRQILTIFWFSFSTMFFAHRENTVSALGRFVLIIWLFVVLIINSSYTASLTSILTVPRPPPRLTGLDNLVASALPIGYPAGKFVRNYLIDELNIPESRLVPLSTVEEYANALNRGPKDGGVAAVVDEMPCVEIFLSTHCNFRIVGQEFTKEGWGFAFQRDSPLAADLSTXHPSHFQRGGQLQKXITTKWLTDPTCGDDDSGLGAVRLGLGSFWGLFLLCALICVFALMXYFARICWQYSKYSSSEPPSEPSDSAAAVTLHNAQIRQRSKADAPWNFKD

SEQ ID NO: 47288 - protein, 339 aa, Shewanella sp. MR-4
MSRNLPPIQKQLEQKIGSVMLDTLLPFKRHFLSRNGNKLHYINEGQGEPVVMVHGNPSWSFYYRNLVSALKDTHQCIVPDHIGCGLSDKPDDSGYDYTLKNRIDDLEALLDSLKVNENITLVVHDWGGMIGMGYAARYPERIKRLVILNTGAFHLPDTKPLPLALWICRNTLLGTVLVRGFNAFSSIASYVGVKRQPMSKYIREAYVAPFNSWANRISTLRFVQDIPLKPGDRNYQLVSDIAASLPKFAKVPTLICWGLQDFVFDKHFLAKWREHMPHAQVHEFADCGHYILEDASDEVITHIKHFMAEAQTPEPEVQQVETESVTEPEVETQAPQAAH

SEQ ID NO: 47289 - protein, 314 aa, Triticum aestivum
  misc_feature (3)..(4): Xaa can be any naturally occurring amino acid
  misc_feature (8)..(8): Xaa can be any naturally occurring amino acid
  misc_feature (10)..(10): Xaa can be any naturally occurring amino acid
  misc_feature (12)..(12): Xaa can be any naturally occurring amino acid
  misc_feature (14)..(14): Xaa can be any naturally occurring amino acid
  misc_feature (16)..(16): Xaa can be any naturally occurring amino acid
  misc_feature (18)..(18): Xaa can be any naturally occurring amino acid
  misc_feature (21)..(21): Xaa can be any naturally occurring amino acid
  misc_feature (23)..(27): Xaa can be any naturally occurring amino acid
  misc_feature (31)..(32): Xaa can be any naturally occurring amino acid
  misc_feature (34)..(34): Xaa can be any naturally occurring amino acid
  misc_feature (36)..(40): Xaa can be any naturally occurring amino acid
  misc_feature (42)..(42): Xaa can be any naturally occurring amino acid
  misc_feature (44)..(44): Xaa can be any naturally occurring amino acid
  misc_feature (46)..(47): Xaa can be any naturally occurring amino acid
  misc_feature (52)..(52): Xaa can be any naturally occurring amino acid
  misc_feature (54)..(54): Xaa can be any naturally occurring amino acid
  misc_feature (62)..(65): Xaa can be any naturally occurring amino acid
  misc_feature (68)..(69): Xaa can be any naturally occurring amino acid
  misc_feature (74)..(75): Xaa can be any naturally occurring amino acid
  misc_feature (195)..(195): Xaa can be any naturally occurring amino acid
  misc_feature (241)..(241): Xaa can be any naturally occurring amino acid
  misc_feature (257)..(258): Xaa can be any naturally occurring amino acid
  misc_feature (273)..(273): Xaa can be any naturally occurring amino acid
  unsure (1)..(314): unsure at all Xaa locations
KKXXFKSXRXKXGXVXNXESXGXXXXXYTAXXVXLXXXXXRXKXAXXQNGQXSXWRTLKAHXXXXRAXXTFGAXXPVQVKIMAKHLNTIYVSGWQCSSTHTSTNEPGPDLADYPYDTVPSKVEHLFFAQQYHDRKQQEARMSLPRAERAHAPFVDFLKPIIADGDTGFGGATATVKLCKLFVERGAAGVHLEDQXSSVTKKCGHMAGKVLVAVSEHVNRLVAARLQFDIMGVETVLVARNXTPVAATLIKNNIHARXXKFILGATNPRLKKPXASTGNSGPSARRNGGFKAIQGWTQRGKKNLPRVGKIAKGKL

SEQ ID NO: 47290 - protein, 459 aa, Rickettsia conorii str. Malish 7
MQEFDLVVIGSGPAGYTGSIRAAQLGMKVACIEKSDTLGGTCLNIGCIPSKVLLNSSEKYEVALKHFENIGIIADVKLDLQKMLANKDKVVLDLTQGIESLFAKNKVTRIKGEAKISSSNIVEVNKEQIKAKNILITTGSSVIEIPNIKIDEEFIVSSTGALKLSKVPENLIVVGGGYIGLELGSVWRRLGAKVTVIEYAPSIVPMLDKEIATQFMKLQQKQGIEFKLNTKVLSAEVKSGKVNLTIEEDSKSSVVTSNVVLMAVGRKAYTQNLGLESVGIITDKQGSIEINDRFQTAISNIYAVGDVVKGAMLAHKAEEEAVAAVEIMAGQAGHVNYNLIPSVIYTYPEVASVGETEEQLKEKGINYKVGKFPFLANSRARAIGSTEGMVKILADSKTDRVLGAHIIGADAGTLIAALTAYMEFGAASEDIARTCHAHPTLSEAIKEAALSVDKRTINM

SEQ ID NO: 47291 - protein, 174 aa, Petunia x hybrida
MSAMKRSREDRQVEAAAMANCLMLLSKLNDKSTSTTTTNQDHHNDFECKTCNKRFSSFQALGGHRASHKRPKLLIGAGEFLVQPSSKKMHECSICGMEFSLGQALGGHMRRHRAAIDEKSKAATKAMMIPVLKKSNSSKRIFCLDLNLTPRNEDVDLKLWPTAPISSPVLRIFI

SEQ ID NO: 47292 - protein, 255 aa, Escherichia coli CFT073
MRSKYMAVTKLVLVRHGESQWNKENRFTGWYDVDLSEKGVSEAKAAGKLLKEEGYSFDFAYTSVLKRAIHTLWNVLDELDQAWLPVEKSWKLNERHYGALQGLNKAETAEKYGDEQVKQWRRGFAVTPPELTKDDERYPGHDPRYAKLSEKELPLTESLALTIDRVIPYWNETILPRMKSGERVIIAAHGNSLRALVKYLDNMSEEEILELNIPTGVPLVYEFDENFKPLKRYYLGNADEIAAKAAAVANQGKAK

SEQ ID NO: 47293 - protein, 250 aa, Solanum tuberosum
MGKSYPTVSEEYLKAVDKCKRKLRALIAEKNCAPIMLRLAWHSAGTYDVCSKTGGPFGTMRFKAEQAHGANNGLDIALRLLEPIREQFPTLSHADFHQLAGVVAVEVTGGPDVPFHPGREDKPEPPVEGRLPDATKGCDHLRDVFVKQMGLSDKDIVALSGAHTLGRCHKERSGFEGPWTANPLIFDNSYFTELLSGEKEGLLQLPSDKALLCDPAFRLLVEKYAADEDAFFADYAKAHLTLSELGFAEA

SEQ ID NO: 47294 - protein, 629 aa, Cryptococcus neoformans var. neoformans JEC21
MYPGSSTSALTRAAIARIALRRSTVACRRSVTSRTISADDKNLIPIRTNLRGSALLNTPRLNKGAGFTREERQIFGLEGFLPYDVHSLEKQCLRAYNQLCKQPSVILKHAFLASLRDQNQVLFYRLMQDRLKELLGVLYTPGAAEAVAGYSSLFRRPVGCYISFPNQDGMRAQLEGHLTDVNRTADVAYDSNKPDDAIDLVVVTDAEAILGIGDQGVGGITISTSKAALYTLGAGINPNRILPVVLDCGTDNHALFSDPLYMGWKRTRIRGKNYDQFIDRFITNCRELFPNAIIHFEDFGMANAYRLMEKYKNIPMFNDDIQGTGAVALAALLSAIKVAGSRLSDQRIVIYGAGSAGMGIADQIKDGLMILEGLNKDEAARRFWCVDRNGLLVESMGNGLRHSQMPYARPDAEVEHWNKEDEDRNGIWLMDVIKNVKPTVLIGTSTHSRAFSEELVREMGKHVERPIIFPMSNPTALCEVDPADALAWTENRALVATGSPFPPVQLGNGQEYIVAQTNNALIYPALGLGAILARSKTISNSMLMAGVNSLASLSPALSNSEASLLPDLADVRKVSVDVAAAVVRQAVEDGNAYDENTIKYVKGKGDVSLEEYIRSRMWDAVYRPLELVD

SEQ ID NO: 47295 - protein, 175 aa, Petunia x hybrida
MSSIKRSRSEEYGQVEAEAMANCLMLLSKLNDHNTSKNQDHHNEFECKTCNKRFPSFQALGGHRASHKRTKVLTGAGEFLAQQAKKNKMHECSICGMEFSLGQALGGHMRRHRDENNKTLKVARKTTTMIPVLKKSNSSKRIFCLDLNLTPRNEDVDLKLWPTAPISSPVLRIFI

SEQ ID NO: 47296 - protein, 173 aa, Zea mays
MAAKRELVVSFGEMLIDFVPTVAGVSLAEAPAFVKAPGGAPANVAIAVARLGGGAAFVGKLGDDEFGRMLAKILRDNGVDAGGVVFDSGARTALAFVTLRADGEREFMFYRNPSADMLLTADELKVDVIKRAAVFHYGSISLIAEPCRTAHLHAMKVAKEAGALLSYDPNLRE

SEQ ID NO: 47297 - protein, 373 aa, Bacillus clausii KSM-K16
MQVEQTYHPGLDGVIAAETDLSFLDTEQGQIIIHGYDLIQLSKTNGYLDIVHLLLKGELPSEQERLALAERLSGSYDLPEAVLDVLKRLPASTHPMDALRTGVSVLGGFDTRLDDRSEEANRERAYELLAKLPAVVANSYRILEKKQVLTPKDSLSYSANFLYMITGNVPSELEERVFDQSLLLYSEHEMPNSTFAARVIASTLSDMYGALTGAVASLKGHLHGGANEAVMYMLLDANSPEEFETLLSNKLKKKEKIMGFGHRVYMKKIDPRALIMKEALAELSQAAGDDRLLQMCEAGEALMAKEKGLYPNLDYYAAPVYWMLGIPISLYTPIFFSSRTAGLSAHVIEQHRNNKLFRPRVKYTGPRYTSVQK

SEQ ID NO: 47298 - protein, 314 aa, Solanum tuberosum
MASLTVPAEVPSVAEDCEQLRSAFKGWGTNEKLIISILAHRNAAQRKLIRQTYAETFGEDLLKELDRELTHDFEKLVLIWTLDPSERDAYLAKEATKRWTKSNFVLVEIACTRSPKELVLAREAYHARNKKSLEEDVAYHTTGDHRKLLVPLVSSYRYGGDEVDLRLAKAESKVLHEKISDKAYSDDEVIRILATRSKAQLNATLNHYKDEYGEDILKQLEDEDEFVALLRATIKGLVYPEHYFVEVLRDAINRRGTEEDHLSRVIATRAEVDLKTIANEYQKRDSIPLGRAIAKDTGGDYENMLVALLGQEEE

SEQ ID NO: 47299 - protein, 166 aa, Petunia x hybrida
MVVLPLKREREAEFKSITTMANYLMLFSHQENHFNTMMDNSPSRVFECKTCNRQFSSFQALGGHRASHKKPRLMGELNFQLPTSPPKPKTHECSICGLEFPIGQALGGHMRRHRAVMNENNLQVTPVVKKSNSRRVLCLDLNLTPLENDNLEFKLGKAARIVDCLL

SEQ ID NO: 47300 - protein, 338 aa, Escherichia coli CFT073
MRVLVTGGSGYIGSHTCVQLLQNGHDVIILDNLCNSKRSVLPVIERLGGKHPTFVEGDIRNEALMTEILHDHAIDTVIHFAGLKAVGESVQKPLEYYDNNVNGTLRLISAMRAANVKNFIFSSSATVYGDQPKIPYVESFPTGTPQSPYGKSKLMVEQILTDLQKAQPDWSIALLRYFNPVGAHPSGDMGEDPQGIPNNLMPYIAQVAVGRRDSLAIFGNDYPTEDGTGVRDYIHVMDLADGHVVAMEKLANKPGVHIYNLGAGVGSSVLDVVNAFSKACGKPVNYHFAPRREGDLPAYWADASKADRELNWRVTRTLDEMAQDTWHWQSRHPQGYPD

SEQ ID NO: 47301 - protein, 304 aa, Gigaspora rosea
LVLRAAIEKDTVDVVAINDPFLDLSYMAYLFKHDSTHGRFHGTVDVSSGKLVVSYHGKSTHTITVFTEMKAENIKWGEAGAEYIVESTGVFTTLDKAKAHHMGGAKKVIISAPSADAPMFVMGVNHTSYDPSKHNIVSNASCTTNCLAPVAKVINDNFGIGEGLMTTAHSVTATTQKTGDGPSGKLWRDGRGAFQNIIPASTGAAKADGKVIPALNGKLTGMAFRVPTPDVSVVDLTCRIEKPATYDAIKECVKKASESPEYKGILGYTEEQVVSSDYIGCTISSIFDAGAGISLNPNFVKLIS

SEQ ID NO: 47302 - protein, 684 aa, Arabidopsis thaliana
MSYFKRNEGTIVFAFASIGFIAFYIINYYIRRCRNRAAAAGDIEEARMSPRRPPRGLDAEAIKSFPSFVYTEARGIEPGIGELECVVCLNEFKDDETLRLVPPCVHVFHADCVDIWLSHSSTCPICRAKQESESVDRNRKTNFPTETVIAIIVLAIFISLSMVACFLHKTFYRAEVEAASQEVFHSRARRGLEKELVESFPIFLYSEVKGLKIGKGGVECAICLSEFVDKETLRWMPPCSHTFHANCIDVWLSSQSTCPACRANLSLKPGESYPYPITDLETGNEQRDEHSLLQLGTNLDRFTLQLPEEMQRQLVSLNLIRTSNMTLPRAMSSRQGYRSGFSHGRQTLRRAISMSLSFSLQAASVRSTVGRDDLVLETSQAKDKDLCEQSFQHLMPEKQESVPTNSIRQTNLSADSIIAIVVLAIFISLGMVSCCLHCIFYREEIGAAGQDVLHSRARRGLEKEVIESFPTFLYSEVKGLKIGKGGVECAICLSEFEDQETLRWMPPCSHTFHANCIDVWLSSWSTCPVCRANLSLKPGESYPYLNMDVETGGVQKLPNERSLTGNSVTTRSRSTGLLSSWRMAEIFVPRSHSTGHSLVQQLGENLDRFTLQLPEEGYRSGSVGSERGGFSQGRQTHRRALSMSFSFSFQTASVRSIHDMNDQAQAKDKYFGERSFERLMPEEK

SEQ ID NO: 47303 - protein, 180 aa, Oryza sativa (japonica cultivar-group)
MFPMVTGFMSYGQQTIRAARYIGQSFIITLSHTNRLPITIHYPYEKSITSERFRGRIHFEFDKCIACEVCVRVCPIDLPLVDWRFEKDIKRKQLLNYSIDFGVCIFCGNCVEYCPTNCLSMTEEYELSTYDRHELNYNQISLSRLPISIMGDYTIQTIRNSTQSKIDEEKSWNSRTITDY

SEQ ID NO: 47304 - protein, 225 aa, Mesorhizobium loti MAFF303099
MKTYLAEVLGTFLLVFIGTASVVTGGFGGALPLGQEGIGLAFGIGLIAAAYAIGPISGAHLNPAVTLGVFLAGRLPAKDVIPYWIAQIIGAILASLALWIIVSGQAGGHTGGFGANGWDETKWGMSSAFLWELIGTFTFVTVILGVTAEKHSTAFAGLVIGLTLAGIHFAMIPVTGTSVNPARSIGPALFTGGAALSQLWLFIVAPLIGGAIAGVVAKARIFEKD

SEQ ID NO: 47305 - protein, 436 aa, Bacillus anthracis str. A2012
MRDYLIKPLVGQPYPMISHGKGVYLYDQNGNKYFDGSSGAITAGIGHGVKEIADVIKKQAEEIAFVYRSQFTSEPAEKLAKKLSDLSVGDLNWSFFVNSGTEANETAMKIAIQHFQERGIQGKHKILSRWMSYHGITMGALSMSGHPLRRQRFVSILEDYPTIPAPYCFRCPVQKVYPTCQLACATELERSIERIGAEHIAAFIAEPIIGAAGGAVVPPKEYYKVIKDICSHYDILFIADEVMTGLGRTGAWFAMEHWGVEPDIMTLGKGLGAGYTPMAATVVSDRVMEPILRGSRSVMSGHTLSANPLSAATALAVIEYMEKHNLPEKTAEKGEYLIKGLQKVQQQSTIIADVRGKGLLIGVELQPFSKASELISVAAKNGLLLYQAVSGQAGKEDSALLVAPPMTTTYSELDELLSIFAKSVEEMMQKGGHSIA

SEQ ID NO: 47306 - protein, 636 aa, Vibrio cholerae O139
MCGVAGFISKRLSPVDCLTSMVESIMHRGPNDSGLWVDDDFGVCLAHARLSIQDLSSAGHQPMHSKSERYVMIFNGEIYNHLTLREELIEIVPSYWNGHSDTETLLAGFEVWGIEQTIQKCVGMFAIVLWDKVLKQLILIRDRFGEKPLYYGWQRDTFLFASELKALKAHPSFEGSINRQALSHFFRLNYIPTPLSIYEGIFKLEPGVIAVFSHEGQLLSKQTFWDASHAVSLQNFSDHDAVDKLDDLIKQSIQDQALSDVPLGAFLSGGVDSSTVVGILQSLSTRPVKTFTIGFDHADFNEASEASDVAKHLGTDHVELIVSAEDALAIINQLPVMYDEPFADASQVPTFLVSKLAKKEVTVCLSGDGGDELFCGYNRYHYTAKVWSYLEKIPFPIRKMLSVFLLTLSPSSWDVLSKTLGLNTRLPNLGNKTQKGAQALKARDIEDLYTRVVSNWDLDEPLVKNTAVEKLPFLSDLTELSHLNDLEKMMLWDKQSYLMDDVLVKTDRATMACSLEGRVPLLDHRIAEFAASLPIHLKYRGGKGKWLLREVLYRYVPKKLIERPKKGFSLPIAEWLRGPLKDWANVLLDSDRFDKEGFLSSELVQKKWGEHLAGKRDWSSQLWSVLMFQLWLEKNK

SEQ ID NO: 47307 - protein, 459 aa, Arabidopsis thaliana
METLKKNPSVRRKSKLARTFQKVCNLRTTSTKVSSNNGIGICMLKSQNPNFDDEDDDGDSVFDLKSTSSSRSGEIKVRERNRAVLQAVVAKIFASTTSIKAAYAELQMAQRPYDNDAIQAADTAVVEELRALSELKRSFLRKELNLSPQVAIMLAEIQEQQSLMRTYEITIKKLEFEVTEKQLKIDELKMSFEESLVVNKSLEKKLSASGSVSVFDNIEIRNLNLSSFVQVLGFTLRSVRSFVKLIVKEMESASWDLDAAASAAVSVNVKNASTVFARPSHRCFAFESFVCGKMFENFGAPDFSRREKFEKLRSVDPIQYLTRNPGSSFARFVVHKYLSVVHAKMECSFFGNLNQRKLVNSGGFPDSGFFATFCEMAKRIWLLHCLAFSLSGNVTVFQLKRGCRFSQVYMESVKSGDESLFSGDNSDIRVGFTVVPGFKIGENVIQSQVYLTPVNGFTS

SEQ ID NO: 47308 - protein, 209 aa, Triticum aestivum
MSTPRVPEWDTRTLTWTEGVEKTPFFPAAQTKPHRAAATVAAAARGGDHPAAAKMQIFVKTLTGKTITLEVESSDTIDNVKAKIQDKEGIPPDQQRLIFAGKQLEDGRTLADYNIQKESTLHLVLRLRGGAKKRKKKTYTKPKKQKHKHKKVKLAVLQFYKVDDATGKVTRLRKECPNAECGAGTFMANHFDRHYCGKCGLTYVYNQKA

SEQ ID NO: 47309 - protein, 562 aa, Propionibacterium acnes KPA171202
MGTDNHCSKHVFVTGGVVSSLGKGLTASSLGSLLKARGLKVTMQKLDPYLNVDPGTMNPFQHGEVFVTEDGAETDLDIGHYERFLNENLSGQANVTTGKVYSAVIAKERRGDYLGDTVQVIPHITNEIKERMLAMEEGHPDVVIHEIGGTVGDIESLPFLEAARQVRHEIGRENVFFLHVSLVPYIKPSGEMKTKPTQHSVAALREVGIQPDAIVCRSERPIGKGIKSKIALMCDVEGPAVVSCPDAPSIYLIPKVLHREGLDAYVVQKLSLFFRDVDWTTWDDLLDRVRKPRSEVTVALVGKYIDLPDAYLSVTEALRAGGFANKAKVNVVWVASDSCATAEGAAQQLRDADAICVPGGFGIRGVEGKVGAIRYAREHKVPFLGLCLGMQCAVIEVARDLAGIKDAASSEFDSQTPDPVIATMAEQVEAVAGKADLGGTMRLGAYPAKLAKDSLVAELYGTTTVTERHRHRYEVNNAYRDRLEQAGLRISGTSPDGGLVEFVELDRQTHPYFVATQAHPELKSRPTHAHPLFRGLVAAAVGHAKAASKGAAKESSTKVADK

SEQ ID NO: 47310 - protein, 489 aa, Halobacterium sp. NRC-1
MPAAQPPGMQLFWHRRDLRTTDNRGLAAAAPGVTAVDGGHDQGPVAAVFCFDDEVLAHAAPPRVAFMLDALAALRERYRDLGSDLIVRHGDPAAVLPAVANDLDATRVVWNHDYSGLATDRDAGVRDALDAAGVAHAQFHDAVHHRPGEIRTNAGDPYSVYTYFWRKWQDREKNPPAPEPEPADLAADTALADTSPLPSVQELGFAEPEAAVPDAGTAAARSLLDAFRESGDIYRYEDRRDYPHEEPTSRLSPHLKFGTIGIRTVYEAARAAKSDADTDDERENVAAFIGQLAWREFYAQVLYFNQNVVSENFKAYEHPIEWRDDPAALQAWKDGETGYPIVDAGMRQLRAEAYMHNRVRMIVAAFLTKDLLVDWRAGYDWFREKLADHDTANDNGGWQWAASTGTDAQPYFRVFNPMTQGERYDPDADYITEFVPELRDVPADAIHSWHELSLSERRRHAPEYPDPIVDHSQRREDAIAMFERARGDE

SEQ ID NO: 47311 - protein, 446 aa, Lactobacillus plantarum WCFS1
MENQQLARKLKRRHVQMIALGGAIGTGLFLGSGLAIKQAGPSILLAYAIGGFFCYLMMRALGELLLSDTRLHSFLEFINRYLGKRFEFAIGWTYWLCWISLAMADLTASGIYIRYWFPWIPQWVTPLIIILILLVFNMLSVSAFGELEYWFSMIKVVAIIALIVTGAILIGSSAHVGGQTVSVTNLVSHGGFFPTGVQGFLMSFSLVIFAFTGIEMVGITAGEAENPEKELPRAINSLPIRISFFYVGALFVIMAIYPWNQITTSQSPFVQVFSDVGIKAAASIINFVVLTAALSACNSAIFSTSRTLFTLAHGDNAPKWMGKVNRYNVPARSLLFSSLILLVIVALNYVIPSTVFTLISNVATTNFIIVWCALLVCHYVYKRTTDSTHNPFKLPLFPVTNIATLAFFIAVTVVLCFDQVNRWAVIGSVVWFVILLVIERSMHRTV

SEQ ID NO: 47312 - protein, 1558 aa, Arabidopsis thaliana
MDKYELVKDIGAGNFGVARLMKVKNSKELVAMKYIERGPKIDENVAREIINHRSLRHPNIIRFKEVVLTPTHLAIAMEYAAGGELFERICSAGRFSEDEARYFFQQLISGVSYCHAMQICHRDLKLENTLLDGSPAPRLKICDFGYSKSSLLHSRPKSTVGTPAYIAPEVLSRREYDGKMADVWSCGVTLYVMLVGAYPFEDQEDPKNFRKTIQKIMAVQYKIPDYVHISQDCKNLLSRIFVANSLKRITIAEIKKHSWFLKNLPRELTETAQAAYFKKENPTFSLQTVEEIMKIVADAKTPPPVSRSIGGFGWGGNGDADGKEEDAEDVEEEEEEVEEEEDDEDEYDKTVKEVHASGERENIPPLGNRIIFYGLELNRSHLPEVQKPRGPQTNWSEHAKALESSSSVTKFLSSNVLYALESQKPRDMAARSIAFPSVNVHTLAHPQISKAWRALSSLSVNNTYLRPGVTPPIDVGTNDSYSARERSTAKVISSTGGSVYSSTRPNLSAMNVSGTGRSFHSFPSSVPGDDKIVAEKFPRGNNEIRESEPSCTHLNGVEKSFGNSAFPAEQFESRKACLDDMDDDDILENIDVDQIVMEHYHSTSTPQPSVSNFSLRTPPVDRSASRLEEECNLPPELCSNCSHGIKLGLCPEASTHVEQMKDVLLAISNELLDDATDLSPDRVGQLRQERLRLKKQIQQLENHIRDKESQKSQFLSSTATRIFQYETPKSTNYKMDQPQTDFRAHVSDQGRYACDSWNTPRDSSFSVDRYGLSSAPVEREQYVPKIIDVTYTEGSNDKKWSSREFPWTRKLEVNNKKVFGNHSFRPNQREIINATMSGSDVFVLMPTGGGKSLTYQLPALICGGITLVISPLVSLIQDQIMNLLQANIPAASLSAGMEWAEQLKIFQELNSEHSKYKLLYVTPEKVAKSDSLLRHLENLNSRGLLARFVIDEAHCVSQWGHDFRPDYQSLGILKQKFPNIPVLALTATATASVKEDVVQALGLVNCVVFRQSFNRPNLWYSVVPKTKKCLEDIDKFIKENHFDECGIIYCLSRMDCEKVSERLQEFGHKAAFYHGSMEPEQRAFIQTQWSKDEINIICATVAFGMGINKPDVRFVIHHSLPKSIEGYHQECGRAGRDGQRSSCVLYYGYGDYIRVKHMISQGGVDQSPMATGYNRVASSGRLLETNTENLLRMVRYCENEVECRRFLQLVHLGEKFDSTNCKKTCDNCCSSQSLIDKDVTLITRQLVELVKQTGERFSSAHILEVYRGSLNQMVKKHRHETLQFHGAGKHLSKIEVSRILHYLVTEDILVEDVRKSDMYGSVSSLLQVNNAKATILFSGSQTIVMKFPSSVKVLKPSKQGATAAKGPLTSEKQSTLPLTTEDAPPKDVNLSANMYTALRKLRTALVKEAPDGVMAYHIFINSTLQQISRRIPRTKEELLEINGLGKAKVSKYGDQLLETIETTVNEYYGTNKKDSIISNDSPDSGKRRRDENISPNVAEDDDFEVSPSQSCKKTVRNKSNEVLHGECIDGDRRGMELDFDFKDEDGSEIRPEGRVLPW

SEQ ID NO: 47313 - protein, 88 aa, Oryza sativa
  misc_feature (11)..(11): Xaa can be any naturally occurring amino acid
  unsure (1)..(88): unsure at all Xaa locations
MSWWWAGAIGXVKKRQEENAAATEPSFQSVALVVGSTGIVGTSLLDILPLQDTPGGGAGAPGEAGAGGDGVASRAERRVGEPAARVHA

SEQ ID NO: 47314 - protein, 345 aa, Photorhabdus luminescens subsp. laumondii TTO1
MRELLKVGLVGYGYASKTFHAPLIAGTAGVKLAAISSSDAEKVKSDWPNIPVVSRPEDLFNDPDIDLIVIPTPNDTHYPLAQKALAAGKHVVVDKPFTITVEQAESLKQQAEKADLLLSVFHNRRWDSGFLTIKSLIKENRLGKLKYFASHFDRYRPIIRQRWREAAGQGSGIWYDLGPHLLDQAIQLFGKPQSITADLGMIRPQAEAVDYFHVLLNYPDIKVVLHATTLAAAESAVYTLHGMAGSYVKYGLDPQEERLKAGERPPHADWGYDIRDGIVTLSHGEELVTKHVPTLPGNYSAYYAAIRDAIMLGKPNPVTANEAIQIMKLIEAGIQSAEQQRTVAI

SEQ ID NO: 47315 - protein, 1075 aa, Magnetococcus sp. MC-1
MSRLVKWLLVLVLLPVVADAQQGERPWPVTVAVLQDFPPLYSLDTHGKPQGLAIDLLQQVAQQAQLKITYKVVQNWGQAMQLVRQGEADFVPGIGITEVRRAEFLFSHPMESVPVSCFVRKQNRSIQGLQDLPGYSVGVIAQSAAHTRLSQIPNMRLKLYQSIDEAFFQLLAGELDAFVTSRPVMEKKARKIAPQEMIKVVGEPLMDLKRGYLLSTQNRALLQRIDPIIQHLTRSARYGEIYARWYGTAAPFWSVEQVFWIMSALLVAVLVVGGLYRVFAIARYNRELQRSIAAQQQAEQRLQRSEERFALAMRGSNDGLWDWDIPTDRVTFSPRWLEMLGYQGAPQDADMRHWQAHIHPDDQPRVEQALGRFLSGDQQHYHSEYRMRHKDGHTIAVLSRAFVLRDATGRAIRMVGTHADITALKEQARRLRESETRFRAYFEQSVVGMVMASLDRHFIDANHAFCHMLGYSRGELLKMNFPQITYPDDLERDLVQFEQLRSGQVSAFEMEKRYLHRDGHPVWGLLSATTVKDELGQASYLIAQVQNIDTQKKALEQLRQSESMMRGYFELGLIGMATTTAQHGWVQINQRLCEILGYPEMALRQKSWAEITHPQDRQADEVAIERLRKGLSEGYALEKRFIRQDGAFIYASISAGCLRKEGGEIGHFLTLVQDITARKRMELALQEQKEQAEAANRAKSTFLAVMSHEIRTPMNAILGMAELLRESDLTSRQHWCVETLNRSGESLLSLINDILDLSKIEAERLTLEHVVFDLVQLVGDVCSLFGYEAQSKGLALKHHIAPTLPRYVVGDPIRLRQIMMNLVGNAVKFTKQGHVSVELNPLADGRLSFVIRDTGIGVSVEQQRNIFKPFTQADSSITREHGGTGLGLTICMRLVALMGGEMQLESTLGEGSCFHFELELPAAPPGAESVVGTPRTLADVASALRLESAAHHNDPILVVDDAEDNRMLVNVFLKKTRYTLVMAENGLEAVNAFKQQPFALVLMDIQMPLMDGYEATRQIRQWEQQKGSGRTPIIALTAHALSEESQQILEAGCDIHLTKPIRKSKLLEVLAEVLA

SEQ ID NO: 47316 - protein, 769 aa, Staphylococcus aureus subsp. aureus Mu50
MDIGKKHVIPKSQYRRKRREFFHNEDREENLNQHQDKQNIDNTTSKKADKQIHKDSIDKHERFKNSLSSHLEQRNRDVNENKAEESKSNQDSKSAYNRDHYLTDDVSKKQNSLDSVDQDTEKSKYYEQNSEATLSTKSTDKVESTEMRKLSSDKNKVGHEEQHVLSKPSEHDKETRIDSESSRTDSDSSMQTEKIKKDSSDGNKSSNLKSEVISDKSNTVPKLSESDDEVNNQKPLTLPEEQKLKRQQSQNEQTKTYTYGDSEQNDKSNHENDLSHHTPSISDDKDNVMRENHIVDDNPDNDINTLSLSKIDDDRKLDEKIHVEDKHKQNADSSETVGYQSQSTASHRSTEKRNISINDHDKLNGQKTNTKTSANNNQKKATSKLNKGRATNNNYSDILKKFWMMYWPKLVILMGIIILIVILNAIFNNVNKNDRMNDNNDADAQKYTTTMKNANNTVKSVVTVENETSKDSSLPKDKASQDEVGSGVVYKKSGDTLYIVTNAHVVGDKENQKITFSNNKSVVGKVLGKDKWSDLAVVKATSSDSSVKEIAIGDSNNLVLGEPILVVGNPLGVDFKGTVTEGIISGLNRNVPIDFDKDNKYDMLMKAFQIDASVNPGNSGGAVVNREGKLIGVVAAKISMPNVENMSFAIPVNEVQKIVKDLETKGKIDYPDVGVKMKNIASLNSFERQAVKLPGKVKNGVVVDQVDNNGLADQSGLKKGDVITELDGKLLEDDLRFRQIIFSHKDDLKSITAKIYRDGKEKEINIKLK

SEQ ID NO: 47317 - protein, 146 aa, Petunia x hybrida
MTIKKRSREELAKVETQAIANCVNILEQNTWLARKIFECKTCKKQFDSFQALGGHRASHKKPKFITAADFSIETSSYECSFCGEDFPTGQALGGHMRKHPDKLKKKKQKNCDDKLGSGKSLFLDLNLTPYENDLMLGIIPLKVFDS

SEQ ID NO: 47318 - protein, 478 aa, Pseudomonas syringae pv. tomato str. DC3000
MSQKFDVVVIGAGPGGYVAAIKAAQLGLKTACIEKYQDKEGKLALGGTCLNVGCIPSKALLDSSWKFYEAKNGFAVHGISTSEVAIDVPAMIGRKSTIVKGLTGGVASLFKANGVTTLQGHGKLLAGKKVELTAADGTVEIIEADHVILASGSRPIDIPPAPVDQKVIVDSTGALEFQQVPQRLGVIGAGVIGLELGSVWARLGAQVTVLEALDKFIPAADEAVSKEALKTFTKQGLDIKLGARVTGSKVNGEEVVVSYTDAAGEQSITFDRLIVAVGRRPVTTDLLASDSGVDLDERGFIYVDDYCTTSVPGVYAIGDVVRGLMLAHKASEEGIMVVERIKGHKAQMNYNLIPSVIYTHPEIAWVGKTEQTLKAEGVEVNVGTFPFAASGRAMAANDTGGFVKIIADAKTDRVLGVHVIGPSAAELVQQGAIAMEFGSSAEDIGMMVFSHPTLSEALHEAALAVNGGAIHIQNRKKR

SEQ ID NO: 47319 - protein, 163 aa, Petunia x hybrida
MTIKKRSREELAKVETLAMANCVNILEKNTSLARKIFECKTCKKQFDSFQALGGHRASHKKPRFITAADFSIGSPNYKPNNKVHECSFCGEDFPTGQALGGHMRKHRDKLGHELKKQKQKNCDEIVEIEKKNNSGTGKLFFDLNLTPYENDLMLGIIPLKVFI

SEQ ID NO: 47320 - protein, 287 aa, Oryza sativa (japonica cultivar-group); identical to SEQ ID NO: 762

SEQ ID NO: 47321 - protein, 334 aa, Bacillus cereus E33L
MGRILTLGEIMLRLSTNEGTRITEANYFKAHYGGSEANVAINLANFNHQVSFASKVPSNLLGKAVQQHLQNYGVDTSNLLKGGLRLGTYYLERGTGKRASLVLYDRTYSSFAQMKNVEWNIDDLFKNVSLFHVSGISLALSDSMTNLILGLIKEAKKRQIKVSFDINYRSNLWNYERASKTLNKILPYVDYCSAGKKDALYLIGIPENKTQQSDLEYYYEQMHNKYPNIEVFYSTLRDVHSASSNDLQGTLWKNHFLYTSKVYHINPIVDRVGGGDAFVAGILHGLLKEKDPDYTVSFATAASSLKHTIHGDCNQFSILEVEEFMRNESGNIIR

SEQ ID NO: 47322 - protein, 172 aa, Petunia x hybrida
MALEIRSRSEEAKSEVSVERLAMENCANILQQRNQLLGESSSKIFECKTCKKQFDSFQALGGHRTSHKILRNKLLTSLPGNDQLPVKTKKHECSICGEQFLLGQALGGHMRKHRDELNQLQQQKKKIKMDDEKSDVSEEVVQEKKGNAGLFFDLNLTPDENEVRARMTSVHS

SEQ ID NO: 47323 - protein, 529 aa, Pleurotus sajor-caju
MPTQEVFDKKDGAVYTTSNGAPVAEPYAAQRAGLHGPLLLQDFHHIDLLAHFDRERIPERVVHANAAGAHGYFEVTHSCADITSNKLLCSVGKKVRLTARFSTVGGESGSADTARDPRGFALKLRTEEGNWDWVFNNTPIFFIRDPAKFSHFIHTQKRDPQTHLKDADMFWDYLGQNPESIHQMMILFSDRGTPDGVHQMHGYSGHTFKWLKDDGSFTYVQVHCRADSGFKTLDGETAHRLTADNPDYSTEMLFRTIEAGKFPSWTVYIQTMTPEQAENFRYNILDLTKVWPHKEFPLRPIGRFVLDENPKNYFAEIEQAAFAPSHLVPYIEPSADPVLQSRLFSYLDTHRHRLGANYHQIPVNAPIVPVANFQRDGPMTVNNNQGNRPNYQSSIQPLTYISNKETLEAGCRNQERMARHENFIGGAYRDLGEITELDFEQPRALWQKVWNDQQREAYVKNVAGHFGGVKSPVVRDRQLSVWAAVDQDLSDRIAKAVGAKPVAPLKVKPAAEALRFRCNIGGPPGPSRL

SEQ ID NO: 47324 - protein, 405 aa, Ralstonia solanacearum
MKPLLLTHFTATSCLGRGLDATLDALRGQRGGLAPCRFERADLDTWTGAVEDVDAQPVRADLSDFECRNNRLAQIGLTQDGFAEQVEAARARHGAGRIGVFVGTSTAGILETELAYRHRDPQTGALPADFRYAHTHSPYSSAAFVRAYFGLHGPAMSVSSACSSGAKVFGSARRMLEAGLIDAAVVGGVDSLCLTTLYGFNSLELLSRQPCKPFDVARDGISIGEAAAFVLLERADGRSGHDEAILLLGVGESSDAHHMSTPHPEGLGARLAMEQALASAGIAAEAIDYINLHGTATASNDAAESHAVNALFSGTPCSSTKGATGHTLGAAGALEAVIAALALRHQLLPAGINTTRPDPVLALDYVLTSRPARLRAALSNAFGFGGTNCSLVLGRTDSLATSIAP

SEQ ID NO: 47325 - protein, 377 aa, Triticum aestivum
MDPFHGIVKEEEFDFAGAAADGYSPSSWGSSPSSWGSSQSSWAGGGALAELPRPMDGLGEAGPTPFLNKTYEVVDDHSTDTIVSWGVAGNSFVVWDAHAFSMVLLPRYFKHCNFSSFVRQLNTYGFRKVDPDRWEFAAEGFLRGQKELLKTIRRRRPQSSPSGTPALLQQQQQGQQGACLEVGHFGPEGEVQRLQRDKGTLIAEVVKLRQEQQATRAQMQEMEARLAATEQKQQQMTVFLARAMKSPSFLQMLVQRQDQSRRKELAEALLSKKRGRPIEYLLPRNGETSSAASYSAAARGYGPGLADGSDGRRADGEDTESFWKELLSLGLEERHREAGGGGGEASGAEVDDDVDDEVDELVQSLYHLSPNRPHSHQ

SEQ ID NO: 47326 - protein, 566 aa, Listeria monocytogenes str. 1/2a F6854
MTNLRKRLSRLYAEDVVDSLAARIEARVQQTQQRKLTRKDQWDEKDIVLITYGDQFKEESQKTLTTFKKMYDSYLKSAFEIVHFLPFYPYSSDDGFSVIDYKAVNPELGDWEDIKEMEQSARLMFDFVCNHMSAKSDWFKRYLAGDEEFRNFFVEMDPKTDLSSVTRPRATPVLTPFQFDSGKVGHIWTTFSEDQIDLNFASPEVLYKMIDVLMFYLEEGAEYVRLDAVGFMWKVPGTSSIHLEETHEIVKLFRDLVDIAAPGTIIITETNVPHVDNISYFGNGEKEAHMVYQFPLPPLVLHAIHHGNAEFLRNWAKNLELPEGKRTFFNFLASHDGIGLNPVRGIIPEAEILALVNDLEEEGALVSYKQNPDGSKSPYEINVTYMDALSKQADTDDLRMSRFLVAHAVLMSIPGVPAVYVQSILGSRNDYSGVETTGHNRSINRKKYDLAEITAELEQRGSLRKATYDALTKLISTRKAESLFHPEIPMEVLESTAELFVVKRSSDAESIILIHNLSEKEVSYSLDSGVYTNLYKGSTVTGSDSIKLSGYEFCWLKTKNYREEQK

SEQ ID NO: 47327 - protein, 380 aa, Saccharomyces cerevisiae
MNCIPSPISERKIQINNEDCIGKENAFHTIPRESSINLTPHSTNEKKVLSEVNSNKIDSLQLPRGKLQRDSTHLEKSRKRQLSNDSTDPIESKTVKKIKCHQWKNLDSMEMDDPFMVAEYTDSIFSHLYEKEIQMLPTHNYLMDTQSPYHLKSSMRALLIDWLVEVHEKFHCLPETLFLAINLLDRFLSQNVVKLNKLQLLCITCLFIACKFEEVKLPKITNFAYVTDGAATVEGIRKAELFVLSSLGYNISLPNPLNFIRRISKADNYCIETRNMAKFIMEYSICCNKFIHLKPSYLAAMSMYIARKIKNENSKWDETFIHYSGGIDIESDPAFKDFISELVEDIAVPDTNLDSLRLKYKKPKHGMVYFKVFDWCKQKR

SEQ ID NO: 47328 - protein, 148 aa, Arabidopsis thaliana
MEESVASEGLEFKWGKKKGVGGKKKDVQFYESFTYDGDEYRLYDCVLVGNASEPDSTEPFIGMIIKIWEHANKHIPKKVKLLWFFKPSEIAPYLEGVPNVLANEVFLASGEGLGLANTTQLVTNYSSAYYVEFSFSIVLIEHVMAFSY

SEQ ID NO: 47329 - protein, 539 aa, Geobacillus thermoglucosidasius
MAKEIKFSEEARRAMLRGVDKLADAVKVTLGPKGRNVVLEKKFGSPLITNDGVTIAKEIELEDPFENMGAKLVAEVASKTNDVAGDGTTTATVLAQAMIREGLKNVTAGANPMGIRKGIEKAVAVAVEELKAISKPIQGKESIAQVAAISAADEEVGQLIAEAMERVGNDGVITLEESKGFTTELDVVEGMQFDRGYASPYMITDTEKMEAVLENPYILITDKKISNIQDILPILEQVVQQGKPLLIIAEDVEGEALATLVVNKLRGTFTAVAVKAPGFGDRRKAMLEDIAILTGGEVISEELGRELKSTTIASLGRASKVVVTKENTTIVEGAGDSERIKARINQIRAQLEETTSEFDRGKLQERLAKLAGGVAVIKVGAATETELKERKLRIEDALNSTRAAVEEGIVAGGGTALMNVYNKVAAIEAEGDEATGVKIVLRAIEEPVRQIAQNAGLEGSVIVERLKSEKPGIGFNAATGEWVNMIEAGIVDPTKVTRSALQNAASVAAMFLTTEAVVADKPEENKGGNSGMPDMGGMM

SEQ ID NO: 47330 - protein, 727 aa, Magnaporthe grisea 70-15
MASQWDQRALSRSDSRALQYDSNGRESHMSHYVDARATMDDHAHDHEDLEYDHDDSESSVISEELDDDMGMASETEEGSESGGQTPMTERAALELDLDEEDPQLYTASSGRDTSLSDQPVDDDDEEEEDDEDEIYSTSDDDPSEGSSSSSTGKETPVDMNAVSIMEKRLSSEGSQTPDPDHSRDLESAVEGPPEWKPSKEFVLAFSALSVISLGAAFDATSLSVAIPTISAHLGGTALQAFWSGTSFLLASTVLQPTVAGLSNIFGRKNLIYITLTFFLAGSIVSAVANNFMVLITGRTIQGVGGGGLLAMTEVIITDLVPLHARGAWFSVLSAVWSVGTVIGPLLGAGFAQNVNWRWIFWINLPIIACSGIFVILFLNQAPIPGNMKKKLAQFDWGGSLIFTASATSFLFGITTGGVQYPWGSWHVLVSIIVGLAGIVLFGFWEVKVAKNPMISKGIFNNWDMIVNYIMTVFHGAILWSIVFFLLLYYQAVKFYTPVISAVAALPETLTVAPAGIVVGLVVMWTGRYRWSIWIGWALTTLGSGLLVLLMPKTSIAGWVWLNIPVGVGTGMLFPAMALSIQAACKPALNGQAAAFFSFLRTFGQALGVAISGSIFQNAFKARLLKTRNYHNLADEFSRDATIIVEIIRLMDDGPLRRELVDAYNGALHMIWVACIAFGGFCFLLSLTIKGYSLQQEHVTEQGLMVNGKPVVSTGRSEKGKNAVPREA

SEQ ID NO: 47331 - protein, 267 aa, Yarrowia lipolytica CLIB122
MIVGADMGHIVCAKDASTSIKAYSPDVMVHPYLQESTSAAPGVTAKDLLPRATSILDRVHVIVVGPGMGRDKLMIETVTGVIEAAKQKNLHIVIDADGLFLVQNNPDIIKGYRRAVLTPNVVEFKRLQDSVGLKPQGEGDVTKLSQAFGGVTILQKGQVDRISNGSETLVSDIQGGLKRVGGQGDTLSGSLATFLAWKKAYQDNLWEHSEELAEDKLMTIAAYGASSITRKTSRLAYEAKGRAMLTSDLSKHLGDAYVELYDNDSKL

SEQ ID NO: 47332 - protein, 154 aa, Xanthomonas oryzae pv. oryzae KACC10331
MSQFDLTPPSPAQRDALIAGLSDEEQRVLLQHGTEAPFCGVFLDNKLDGVYTCRLCGLPLFRSSAKFESGTGWPSFFAPYDPAHVREIRDTSYGMIRTEIVCARCDSHLGHVFPDGPPPTGERHCLNSVSLGFTENGQALPNPLHREGAEAQSA

SEQ ID NO: 47333 - protein, 160 aa, Glycine max
MSLIPNIFGGRRSNVFDPFSLDMWDPFKDFPFPNSVSTSFPEFSRENSAFVSTRVDWKETPEAHVFKADIPGLKKEEVKVQIEDDKVLQISGERNVENEDKNDTWHRVERSSGKFMRRFRLPENAKVNEVKASMENGVLTVTVPKKEVKNHDVKAIEISG

SEQ ID NO: 47334 - protein, 473 aa, Magnaporthe grisea 70-15
MGNKEKSHLNVVVIGHVDSGKSTTTGHLIYKLKGIDQRTIEKYEKEAAELGKGSFKYAWVLDKLKAERERGITIDIALWKFETAKYQVTVIDAPGHRDFIKNMITGTSQADCAILVIGAGTGEFEAGISKDGQTREHALLAFTLGVRQLIVAVNKMDTAKWAQSRYDEIVKETSNFLKKIGFNPDSVPFVPISGFNGDHMISESADIKGNISPNAPWYKGWTKTVNKDGKKEKVIGGASLQDAIDDVTPPTRPTDKPLRLPLQDVYKIGGIGTVPVGRIETGILKPGMVVTFAPANVTTEVKSVEMHHQQLPEGVPGDNVGFNVKNVSVKDIRRGNVAGDSKNDPPMGCASFNAQVIILNHPGQVGAGYAPVLDCHTAHIACKFSEILEKLDRRTGKSIESNPKFIKSGDAAIVKMIPSKPMCVETFSEYPPLGRFAVRDMRQTVAVGVIKSVDKSQGTQGKVTKSAAKAAKK

SEQ ID NO: 47335 - protein, 384 aa, Synechococcus elongatus PCC 7942
MTQATELLDPALKPAETKAKRSSRKKATTAVVEPATTIAPTADVDAIDDEDSVGEDEDAAAKAKAKVRKTYTEDSIRLYLQEIGRIHPAASQQQRPTRRRWANDRAVRATHRECVLEQASQRFDGRAQFLHRPAATEFRRRLFRGRRAKDKMVQSNLRLVVSIAKKYMNRGLSFQDLIQEGSLGLIRAAEKFDHEKGYKFSTYATWWIRQAITRAIADQSRTIRLPVHLYETISRIKKTTKLVSQEMGRKPTEEEIATRMEMTIEKLRFIAKSAQLPISLETPIGKEEDSRLGDFIEADGETPEDEVAKNLLREDLEGVLSTLSPRERDVLRLRYGLDDGRMKTLEEIGQLFNVTRERIRQIEAKALRKLRHPNRNSILKEYIR

SEQ ID NO: 47336 - protein, 554 aa, Bacillus clausii KSM-K16
MLKTRIRYLSRYQDIITALYHYGFGQIVRDLGLLDRTKKRTKKKRAQDSSLSVAKRIRLLLEELGPTFIKLGQLASTRGDLFPAYVLTELENLQDNVPSFAYQEVKDIIEVELEAPLEKLFRSFEPVPLAAASIGQVHRAELPTGEKVVVKVRRPGIERTIETDLAILQDLLELAEERIGWVKRFRLVDLFHEFAEALKEEINYKNEAQNAERIRRQNSETQHLFTPVVYSSHSTMKVLTMTYVDGTKITDATYDKGFNQEIVAERFATGMFEQIFVHGFFHGDPHPGNVFVTKENEIILIDFGMVGRLTTDMRQNLALLVLGLKGRNTDRVMEALFRMDIVHDHVDRDRLWDDLDHLRLKYYDIPMADISLAEAVQDLFNVANKHDCIVPVDLTMLGKALLSVEAIVSSLAPTLRIIDIVEPFGRVLIKERYDPLNFAKKVQAEFQEGMETLRYFPRDMRKTLKDIRGGKLKVNISIREIHHLIQKVDRISNKLAFSIVLLSFSIIMAGVIIGGSLTAEPTILLQIPAIEIGLVITSLMFFWIIWAIFRSGRF

SEQ ID NO: 47337 - protein, 462 aa, Triticum aestivum
MFFLASMYFAFPRRAGAPGQVFAAGLPLWVPNSGRNVFPANYCYRGYLASTAGFRTILLVPFETGVLELGSMQQVAESSDTLQTIKSVFAGTGGNKDIIPSREGNGHIERSPGLAKIFGKDLNLGRSSAGPVIGVSKVDERPWEQRTAGGGSSLLPNVQKGLQSFTWSQARGLNSHQQKFGNGILIVSNEATHGNNRTADSSTTTQFQLQKAPQLQKLPLLQKPPQLVKPLQMVNQQQLQPQAPRQIDFSAGTSSKSGVLVTRAAVLDGDSSEVNGLCKEEGTTPVIEDRRPRKRGRKPANGREEPLNHVEAERQRREKLNQRFYALRAVVPNISKMDKASLLGDAIAYITDLQKKLKDMETERERFLESGMVDPRERAPRPEVDIQVVQDEVLVRVMSPLENHPVKKVFEAFEEADVRVGESKLTGNNGTVVHSFIIKCPGSEQQTREKVIAAMSRAMSSV

SEQ ID NO: 47338 - protein, 303 aa, Bacillus cereus ATCC 10987
MKRWQMEWLLVSVALVWGANYTIGKYGVAFMSSIQFNSLRFLVASPVLLLITFLMERSLRIERKDWLRLVAVGIVGTTMYQTMFMLSVKYTSATNASLLIAMSPIFTGILAVLHKQERFSMKVQIGSIVAFIGAAFVLLTGHTGGATYEYAWLGNIIGLVAAIAWGWYPILAQPLITKYSAMRVTSWSTLIGIVPLVIYCLFNVNTLTWPVDTPSWGSLAYSIVFATIFGLAMWYVGISQIGSTKVMVYMYLVPLFAVIFAAVIIGEQINMMQLVGGLIIFIGLYVVKKGGMKKPALNLKKVS

SEQ ID NO: 47339 - protein, 711 aa, Yarrowia lipolytica CLIB122
MSDCLENFSLSTADALTVYPHNTPSDTTTTIYSHCGPLCSKSSRQLFSTYRNTQNTSPPHNACRKPHNTTNTEMLRAIKNPRAVLKSRHFSTSPVVAKVFANGPVKAQEAPSHVASKYAVVDHEYDCVVVGAGGAGLRAAFGLAEAGFNTACISKLFPTRSHTVAAQGGINAALGNMHPDNWKWHMYDTVKGSDWLGDQDAIHYMTKEAPKSIIELEHYGVPFSRNDEGRIYQRAFGGQSKDYGKGGQAYRTCAVADRTGHAMLHSLYGQSLRHNTHFFIEYFAMDLLMEDGACVGVVAYNQEDGTLHRFRAHKTVLATGGYGRAYFSCTSAHTCTGDGMAMVTRAGLPLQDLEFVQFHPTGIYGSGCLITEGSRGEGGYLLNKNGERFMERYAPTAKDLASRDVVSRSMTLEIREGRGVGQHGDHIFLQLSHLPASVLHERLPGISETAAIFAGVDVTKEPIPVLPTVHYNMGGIPTRYTGEVLTQDENGQDKVVEGLFACGEAACVSVHGANRLGANSLLDLVVFGRAVAHRITETLTPGAPLPPVSADIGYESIANLDKMRNADGPLSTATIRDKMQRTMQMDVSVFRTQESLEDGVRGITAVDRLIDQVGVTDRSMIWNTDLTETLELQNLLTCAMQTAYSAVARKESRGAHAREDYPDRDDVNWMKHTLSWQDKPGDEIKLGYRAVQMHTLDESECPTVPPAKRVY

SEQ ID NO: 47340 - protein, 397 aa, Triticum aestivum
  misc_feature (77)..(77): Xaa can be any naturally occurring amino acid
  unsure (1)..(397): unsure at all Xaa locations
MSWWWAGAVGAVKKRQDERAAAAEPTFQSVALILGSTGIVGTSLLDILPRDDTPGGPWKVYAVSRRAPPGWSTPPPXPAVTHLQLDLADPAAVRDALTPLTDVTHVFYAAWSSHETEDRNREVNAGMLRNVLSVVVPGCPALAHVCLQTGRKHYVGPFDVIGKIPAPDPPYTEDMPRLDHPNFYYDLEDVLFDHVSGRDGAVTWSVHRPTVIFGFSPRSAMNVVGSLCVYAAICRKEGATLRWPGCKVAWEGFTDASDADLVAEHEIWAAVDPFAKNEAFNCSNGDVFKWKQLWPLLADRFGVEWAGYEGEDSRFALADAMAGKEAVWTEIIQENELVTTELEEITSWWFVDAMLSIDIEHLDNMNKSKEHGFLGFRNTINSFNAWIDKMKASKVVP

SEQ ID NO: 47341 - protein, 267 aa, Escherichia coli K12
MAIPAFGLGTFRLKDDVVISSVITALELGYRAIDTAQIYDNEAAVGQAIAESGVPRHELYITTKIWIENLSKDKLIPSLKESLQKLRTDYVDLTLIHWPSPNDEVSVEEFMQALLEAKKQGLTREIGISNFTIPLMEKAIAAVGAENIATNQIELSPYLQNRKVVAWAKQHGIHITSYMTLAYGKALKDEVIARIAAKHNATPAQVILAWAMGEGYSVIPSSTKRKNLESNLKAQNLQLDAEDKKAIAALDCNDRLVSPEGLAPEWD

SEQ ID NO: 47342 - protein, 627 aa, Bradyrhizobium elkanii
MLVKAITESVQAKPKDQLRFITCGSVDDGKSTLIGRLLHDSKMIYHDQMTALERDSAKHGTTGREIDFALLVDGLEAEREQGITIDVAYRFFATERRSFMVADTPGHEQYTRNMATGASNAQLAIILIDARKGVLVQTKRHSFICSLLGIRHLVLAVNKIDLVHYSKESFDRIVADYVAFASDLGFESIVPIPISARYGDNVVDRSGNTHWYDGPCLLGQLESIDIRCDSSGQAFRFPVQWVNRPDLDFRGYAGSVASGSISVGDDIVVAASGRTTRVRRIVTQGGGLSCAEAGDAITITIEDEIDIGRGDLLARPTERPELADQFAAHLIWMDEDQLVVGRNYILRIGSQTIAGSITAINHRIDVNTREHLSAGTLGLNEIGFCNISTTRPAAFDPYEANRKTGSFIVIDRYTNRTVAAGMIACPLRRATNVAWQPVAVGRKERADLKNQKPCIIWFTGLSGAGKSTIANIVDQKLFAMSRHAMLLDGDNLRHGLNADLGFSEVDRMENIRRAGEAAKLMADSGLIVICSFISPHRSERDMVRSLVSKEEFVEVFVDTPIEECARRDPKGLYSKAKSGKIKNFTGIDASYEAPIRPEIHLRTMEQTPEQMAQAVIDVLMARAILGR

SEQ ID NO: 47343 - protein, 467 aa, Pseudomonas aeruginosa PAO1
MMESYDVIVIGAGPGGYNAAIRAGQLGLKVACVEGRETLGGTCLNVGCMPSKALLHASELYAAASGGEFARLGIRVSPELDLAQMMKQKDESVAALTRGVEFLFRKHKVQWIKGWARLQGEGRVGVALADGGHAQLEARDIVIATGSEPAPLPGVPVDNQRILDSTGALELVEVPRHLVVIGAGVIGLELGSVWRRLGAQVTVLEYLERICPGLDGETARTLQRALTRQGMRFRLGTRVVAARSGEQGVELDLQPAAGGATESLQADYVLVAIGRRPYTEGLGLETVGLASDRRGMLENQGQRSAAPGVWVIGDVTSGPMLAHKAEEEAIVCIERIAGHAAEMNAEVIPSVIYTQPEVASVGLGEEQLQAARREYKVGRFPFSANSRAKINHESEGFIKILSDARSDQVLGVHMIGPGVSEMIGEACVAMEFSASAEDLALTCHPHPTRSEALRQAAMDVHGRAMQN

SEQ ID NO: 47344 - protein, 309 aa, Picea abies
MTKEERRESEQQGFPPKDYTDPPPAALIETSEFKLWSFYRALIAEFVATLLFLYITIATVIGHSRTSTNCGSVGVLGIAWSFGGMIFVLVYCTAGISGGHINPAVTFGLFLARKVSLPRAILYMIAQCLGAICGTGLAICGTGLVKSFQKSFYDRYGGGANYVHHGYTKGVGLAAEIIGTFVLVYTVFSATDPKRSARDSHVPVLAPLPIGFAVFMVHLATIPITGTGINPARSFGAAVIYGHKQSWDDHWIFWVGPFAGAALAAAYHQYILRAAAIKALGSFRSNGNVELEELVARRSCLCLKYVGLQ

SEQ ID NO: 47345 - protein, 487 aa, Arabidopsis thaliana
MSFRDDNEEARNDLRRPFIHTGSWYRMGSRQSSMMGSSQVIRDSSISVLACVLIVALGPIQFGFTCGYSSPTQAAITKDLGLTVSEYSVFGSLSNVGAMVGAIASGQIAEYIGRKGSLMIAAIPNIIGWLCISFAKDTSFLYMGRLLEGFGVGIISYTVPVYIAEIAPQNMRGGLGSVNQLSVTIGIMLAYLLGLFVPWRILAVLGILPCTLLIPGLFFIPESPRWLAKMGMTDEFETSLQVLRGFETDITVEVNEIKRSVASSTKRNTVRFVDLKRRRYYFPLMVGIGLLVLQQLGGINGVLFYSSTIFESAGVTSSNAATFGVGAIQVVATAISTWLVDKAGRRLLLTISSVGMTISLVIVAAAFYLKEFVSPDSDMYSWLSILSVVGVVAMVVFFSLGMGPIPWLIMSEILPVNIKGLAGSIATLANWFFSWLITMTANLLLAWSSGGTFTLYGLVCAFTVVFVTLWVPETKGKTLEELQSLFR

SEQ ID NO: 47346 - protein, 374 aa, Magnetospirillum magnetotacticum MS-1
MLATPRREVNVAVPLRRDDGRTVLFHGYRVQHNVSRGPGKGGLRYAPSVDIDEVRALAMWMTWKCALVDLPYGGAKGGVAIDPRSYSDAELERVTRRYTSEIMPVIGPERDIMAPDMGTSERTMAWVMDTYSVNQGYTIPAVVTGKPITVGGSLGRTTATSAGVVHVTAAALEEAGVPLSDVRVAVQGFGKVGSHAAAIFAARGARVVAVSDQYGGVHAPDGLDVRALVEHVAATGSVVGFDRADPVDNDALLALDVDVLVPAAVEGVLDGDTARTVRARWVVEGANGPTTAEGDRVLAKNGVTVVPDVLANAGGVVVSYFEWVQANQAYWWTADEIGDKLEHRMLHAYEEVAVSRAARTSACATRRSSSASRT

SEQ ID NO: 47347 - protein, 291 aa, Triticum aestivum
MQDFQSIPGLAGRLFGGAAAADIRRVQGPASRCGVFSQAASAQPEAAVKCPRCESTNTKFCYYNNYNLSQPRHFCKSCRRYWTKGGVLRNVPVGGGCRKAKRSSSSASAPSTPAATDAKSQRRASASSSSRSNSGSGSASPTAAAEETTTTETEPPPPPTPSSNSNSNAVSFANRMTNYPFAADVPPLAPIFADQAAALASLFAPPPPPPLPVFSFSAEPKMEEAIGSLLLPGQEASQEPEEPTCTSTVADMAPFMSLDAGIFELGDASPADYWNGGSCWTDVQDPSVYLP

SEQ ID NO: 47348 - protein, 273 aa, Triticum aestivum
  misc_feature (157)..(157): Xaa can be any naturally occurring amino acid
  misc_feature (174)..(174): Xaa can be any naturally occurring amino acid
  misc_feature (213)..(213): Xaa can be any naturally occurring amino acid
  misc_feature (235)..(235): Xaa can be any naturally occurring amino acid
  misc_feature (252)..(252): Xaa can be any naturally occurring amino acid
  misc_feature (266)..(266): Xaa can be any naturally occurring amino acid
  unsure (1)..(273): unsure at all Xaa locations
LGDSIEQVCTKKQAGTGPEFPGYRRPTRPGILLGAVHGIVEALFRRYTEQGMDEELAYKSTVEGITGIISKTISKKGMLEVYNSLSEEGKKEFNKAYSASFYPCMDILYECYEDVASGSEIRSVVLAGRRFYDKEGLPAFPMGKIDQTRMWKVGEKXRSTRPDGDLGPLHPFTXGVYVALMMAQIEVLRKKGHSYSEIINESVIESVDSLNPXMHARGVGFMVDNCSTTARLGSXRKWAPRFNYFLTQQGFXTGNRNNPVNQELIXNFLAEPV

SEQ ID NO: 47349 - protein, 450 aa, Zea mays
MRKFNLMQSQKSRVLGAMSSSLPILPNPLKGSFPRPHNPQHIPMLRQLPDDSMPLCIDTHQSVSLHPRAGVIGVPYSGYTASPLDSVSNLDSQTMAAPFISQSSNFEALQSLSDNTPETHTKAAWFTSSMDVSPLNTDNIAASDVNQIHSIRPAMTSDESATQNDWWADIMNDDWKDILDATATDSHSKAMIQISNSATSLPAVNQSASSHSREICPVASPPNSSNASVAKQRMRWTPELHECFVDAVNQLGGSEKATPKGVLKLMKVDGLTIYHVKSHLQKYRTARYKPDLSEGTSEKRTATEELVLDLKTSMDLTEALRLQMEVQKRLHEQLEIQRKLQLRIEEQGKYLQMMFEKQSQSSTEKVQDPSSRDTTAKPSSNQSQSTNKDSGATMDPNGTGDIARTAELGERSSELGVKQKLVEIEESGTEVATGDRSKIYQEKRRKLQDS

SEQ ID NO: 47350 - protein, 353 aa, ASPERGILLUS NIDULANS FGSC A4
MRAVRFHGRRDIRVDQIDEPSCAEGQVKIRPAFVGICGSDLHEYLSGPIAIPTTPHPLTGAQLPVTLGHEFSGTIEEVGQGVTGFKVGDRVAVRPNLSDGTCASCVYGRPNCCRSLGFIGFSSNSGGLSDYVTVPAKHAILLPESVPLDLGALVEPLTVAWHAVARSPHETARTALVVGGGPIGLAVVQVLKARGVQTVVVAEVSTQRREYALTLGATHVFNPLTDDVVARVRSLTDNAGADISFECSGVQAGFDTAMNGIRVRGTTTIVSLWEKKPMIDAFDVVSYEKHVIGAAICDDGDFEAVIGAIKDGKLNPRPMITSKIRMEDVEEKGFKALVDEKDKHVKILIDIAA

SEQ ID NO: 47351 - protein, 674 aa, SYNECHOCOCCUS SP. WH 8102
MCGIGGVFLADRHQTLDRQLLVNMAAIQSHRGPDGFGVECLDAAGVGFCHARLSIIDLNESRARQPFLSNDRQVLMAHNGEFYDFQRIRADLTAQGVRFSSKSDSEILLRLYQRQGLESTLPLLRGEFAFALFDAADDCLYLVRDRFGIKPQYWTMTPEGLVFGSELKVLFAHQAVERRFTSEGLFHQLMQTMVPGTTAFAGVHQVQPGHVLKVQRRSDRLEVSESTYWDVDFPRLDQRDSTLTEADHIANVRAALLEAVEMRMVADVPVGCYLSGGIDSCSILGLASAVSQGPVKAFTIGFDDARYDETPIAAEMAEATGAEQDVMRLSGRELYGHMEQTLWHTERTIYNTLAVAKYLMSRHVNSVDYKVVMTGEGSDELFGGYPAFRRDMFLHGLEDLPQSDRQDWESLLQTNNSLVQGAMLAADQVDDPDLDAVVGFTPSCLQPWLACAPLVPDLLADEHRQALVEYSPGKAIAEQLNPQQLDGRHALDKAQYVWIKTMLEGQILTWGGDRVDMANSMEARPAFLDHHLAAAAVQVPPELRIKGKTEKYVLREAMAGLLPEVLYKREKFAFMAPPAHTEPEKWAQMKQLADDYLSDEAIDAAGLLSKEGVRALFARHDDPATTDAERVQMDAVINHLLGVQMLHRMFVAADVPAQAREQADRLGWRVLMPV

SEQ ID NO: 47352 - protein, 334 aa, Magnetococcus sp. MC-1
MGPNTTLPVTLLTGFLGSGKTTLLNHVLRQPELRDTLVVINEFGAIGLDHELVAEATEQAALLMPSGCLCCSMRGDLLKTLREAIWRYARGGQPWFKRVVIETTGLADPVPILQTLLGEATLQRHYHLAGVVTVVDAQYGEASLAEHAENQRQVAVADGLFISKSDLCSGAALERLTARLSVLNATAAQHRLEHGMMAAHTWLQYAGAVERHPSGAVWDAVMWQGEEATPAPPPHGDIEAHALVLDEALPRAVLEAWLSALAQGPELLRVKGLVCLLGQRGPWLIQGVRHTLYPPQPWSQWPTSDQRSRLVFITRGLPRSSLWQALQQARAAVL

SEQ ID NO: 47353 - protein, 407 aa, Pseudomonas syringae pv. tomato str. DC3000
MRRVVITGLGIVSCLGNDKETVTANLRANRPGIRFNPEYAEMGLRSQVSGSIDLNLEELIDRKIYRFVGHAAAYAYLAMKDAITDSGLSDDQVSNVRTGLIAGSGGASTLNQMEALDTLREKGVKRVGPYRVTRTMGSTVSACLATPFKIKGVNYSISSACATSAHCIGNAVEQIQLGKQDIVFAGGGEEEHWSQSFLFDAMGALSTQYNETPEKASRAYDAKRDGFVIAGGGGMVVVEELEHALARGAKIYAEIVGYGATSDGYDMVAPSGEGAIRCMQMALADVDKNDVDYINTHGTSTPVGDAKEMEGVREVFGTNAPAISSTKSLSGHSLGAAGVHEAIYCLLMMENNFIAGSANIDELDPAIADMPILLKTREDAKLDLVMSNSFGFGGTNATLVLKRWAGK

SEQ ID NO: 47354 - protein, 641 aa, Pseudomonas syringae pv. tomato str. DC3000
MKFRQWDINTRTQIISLGPALLLTVMLISFFTFVRIQDLRQELNHTGQLIANQLAPAVEPGVTAGDIDGLKSLMRATLSMPSVRYVEIQDASNTVMVYIDQTRENEHQPRQMEIFQAPIRHQRAAAHTAPAARRETQDAASPDYLGRVLVGMSSEAFNRRQQEILLKAGILALCALLFTFLLARRLSLSLSRPISEMGEALKAIQQGDYHTPMPVSDDAELGALARHINSLAENLHRTSLEQQRSVAQLIQTREEAERANRAKSDFLAMMSHELRTPMNGVLGMLQLMETTRMTDEQSEYATLATESTEHLLKVINDILDFSRIERDALQMEGIAFNLAELVSVSTHAFNHSALQRKLLLELHVQPGLEAMTVIGDPTRIRQILVNLIGNALKFTEEGKVCVEADWLMLDDEQLRFTCKVHDSGIGIDAERLESMFDAFKQADSSISRRYGGTGLGLPIARKLAERMGGTLYAESVEGAGSAFTLQIALPVSRYVSVDVVPPPSALYAYGKERSILLVEDNPVNRTVVQAMLHNLGCKVDVAVDGVDAVMKAGAGNYALILMDCRLPVMDGYEATRKIRQLSGLERIPIIALTANALHGDRDACLQAGMDDYLPKPFKHADLQQVLQRWLSFQAPATGDKC

SEQ ID NO: 47355 - protein, 302 aa, Oryza sativa
MAAAEAAAAVGKQQQKGGGGRGGGGGGPAPFLTKTNQMVEESATDEVISWGKEGRSFVVWKPVEFARDLLPLHFKHCNFSSFVRQLNTYGFRKVVPDRWEFANGNFRRGEQGLLSGIRRRKATTPQSSKSCGSGVNVAFPPPLPPLPPEPSATTSSGNDRSSSSASSPPRADITSENEQLRKDNQTLTMELARARRHCEELLGFLSRFLDVRQLDLRLLMQEDMRAAAGGVGGEQRVQEHAREEKCVKLFGVLLDDTHGAATRKRARCEEAAASERPIKMIRIGEPWVSVPSSGPARCGGDN

SEQ ID NO: 47356 - protein, 100 aa, Cryptococcus neoformans var. neoformans JEC21
MRSTKTKLMPKKALQDELVSKAFNGRSGRAYLMNSTINTSLGKIEERKLLTGTHTVADLLCASCKESLGWMYIKAPNGDQRYKEGRYILEAARIIKENKW

SEQ ID NO: 47357 - protein, 248 aa, Oryza sativa
MAMDAERRQAELIEQFSAQAAALSSSAPQLAALVLEATSHPALFAFSELLSLPALSKLTGTQYASSLDVLRLFAYGTLKDYKSNSGNLPALLPDQVRKLKQLSVLTLAESTKVLPYDQLMQELDVSNVRELEDFLINECMYSGIVRGKLDQLRRCFEVQFATGRDLTPDQLNNMIDTLSDWLGTSDNLLHQIQEKIKWADTMSEVNKKHQKEFEDKVEEAKKSIKLNNLSRQTSTYGGMTTFSLNLEE

SEQ ID NO: 47358 - protein, 184 aa, Arabidopsis thaliana
YPYIAGMGVYVFRKEGLLKLLRSSYPTSNDFGSEIIRARRKLHNVQAFLFNDYWEDIGTIGSFFDANLALTEQPPKFQFYDQKTPFFTSPRFLPPTKVDKCRILDSIVSHGCFLRECSVQHSIVGIRSRLESGVELQDTMMMGADFYQTEAEIASLLAEGKVPVGVGQNTRIKNCIIDINARIG

SEQ ID NO: 47359 - protein, 535 aa, Tetragenococcus halophilus
MAKDIKFSEDARRSMLNGVSKLADTVKVTLGPRGRNVVLEKSYGSPLITNDGVTIAKEIELENRFENMGAQLVSEVASKTNDIAGDGTTTATVLAQSIVKNVTSGANPLGIRRGIEQATQKAVEELQNISTPVESKEAIVQVGEVSSGSKQVGQYIADAMDKVGNDGVITIEDSQGIDTELDVVEGMQFDRGYLSQYMVTDNEKMEADLDSPYILITDKKISNIQDILPLLEQVVQESKPLLIIADDIDGEALPTLVLNKIRGTFNVVATKAPGFGGRRKAMLEDIAVLTGATVITEDLGLELKDATMDSLGKANKVTVDKDNTTIVEGAGDSTAIEDRVQLIKNQVAETTSDFDREKLQERLAKLAGGVAVIKVGAATETEVPKLKLRIEDALNAARAGVEEGMVSGGGTALVNVINKVAELDADDDAITGVNIVLRALEEPVRQISENAGFEGSVIIEKLKSEKLGIGFNAATGQWVNMVDAGIVDPTKVVRSALQNAASISALLLSTEAVIADRPDESGNDAGVALKEWIHQ

SEQ ID NO: 47360 - protein, 349 aa, Bacillus cereus E33L
MKAAVWYGQKDIRIEDKELKPLKDNEVTVRVAWAGICGSDLHEYQEGPVFVPVDAPDELTGEVAPIIMGHEFAGVVEKVGSAVKKYKVGDRVVVNPTITHGNKPEDIDCYDGFSFIGLHGDGGFTTFANAPEHNIYKLPDTLTLQDGALVEPTAVAVQAVKEGGMQFGDTVAIFGAGPIGLLTTIAAKAAGASKILVFDLSETRLEKAKELGATEVFNSGKINPVEAVKQHAPNGVDVTFEVAGVAPTFKSAIDVTRPRGTVVIVSIFAHSIEWNPMQLTNTGVKVTSTIAYTPTSFQQTVDLMGTGQLKPQGIVTSQIELENIVEKGFEALTSDKSQAKILVKLSGEM

SEQ ID NO: 47361 - protein, 183 aa, Arabidopsis thaliana
YPYIAGMGVYCFKTEALLKLLTWRYPSSNDFGSEIIPAAIKDHNVQGYIYRDYWEDIGTIKSFYEASIALVEEHPKFEFYDQNTPFYTSPRFLPPTKTEKCRIVNSVISHGCFLGECSIQRSIIGERSRLDYGVELQDTLMLGADSYQTESESRLLAEGNVPIGIGRDTKIRKCIIDKNARIG

SEQ ID NO: 47362 - protein, 281 aa, Arabidopsis thaliana
MVLTHNVLAVTFGVLGNIISFIVFLAPVPTFVRICKKKSIEGFESLPYVSALFSAMLWIYYALQKDGAGFLLITINAVGCFIETIYIILFITYANKKARISTLKVLGLLNFLGFAAIILVCELLTKGSNREKVLGGICVGFSVCVFAAPLSIMRVVIRTKSVEFMPFSLSLFLTISAITWLFYGLAIKDFYVALPNILGAFLGAVQMILYVIFKYYKTPLVVDETEKPKTVSDHSINMVKLSSTPASGDLTVQPQTNPDVSHPIKTHGGDLEDQMDKKMPN

SEQ ID NO: 47363 - protein, 384 aa, Escherichia coli CFT073
MIWQEKIDAALDARRVADALRRRYPVAQGAGRWLVADDCQYLNFSSNDYLGLSHHPQIIRAWQQGADQFGVGSGGSGHVSGYSVAHQVLEEELAEWLGYSRALLFISGFAANQAVIAAMMAKEDRIVADRLSHASLLEAASLSPSPLRRFAHNDVTHLARLLASPCPGQQLVVTEGVFSMDGDSAPLEEIQQVTQQHDGWLMVDDAHGTGVIGEQGRGSCWLQKVKPELLVVTFGKGFGVSGAAVLCSNTVADYLLQFARHLIYSTSMPPAQAQALRASLAVIRSDEGDARREKLAALITRFRAGVQDLPFTLADSWSAIQPLIVGDNSRALQLAEKLRQQGCWVTAIRPPTVPAGTARLRLTLTAAHEMQDIDRLLEVLHGNG

SEQ ID NO: 47364 - protein, 466 aa, Mesorhizobium loti MAFF303099
MVEPALSLNETGAPTNERFHLIQAAPLAGSIGAEARELITSSEDIFVTDQSGRKLIDGPAGMWCINVGHRNQALADTLRDQAMSMTYSTPWYTSNAPAEKLAQMLAERAPGDLNHVFLTTGGSSAVETAIRLVQFYNNVRGLPQKKLLISRQGSYHGSTYLTASLNGRPRDHDWMDGAGDLVRKLTCPNPFHRPANLSLEAFEDFLVNEFRALIEHEGAQQIAAFIAEPIQASGGVLMSPPNYLKRMRALCTENDILFITDEVVTAFGRLGHIFASQDVFGIQPDMITFAKGVTSGYFPLGGVMVSDRLLSELRRLNHPKANFVHGLTYSSHPIGCAVAIRNIELLEDGLLHHAREIGPYFQEQLRTLEELPLVGEVRGAGLMAGIECVADAKTEDRLDLDLTVGKRIDFHCQENGLLVRPLINMCVMSPPLTISRSQIDMMTDALRKGIEATADDLIREGLWKPA

SEQ ID NO: 47365 - protein, 225 aa, Schizosaccharomyces pombe
MIPSKNIQKIKLVTFDAFGTILHLSKPVPIVYSEVAQKYGVHATIDEIEHNTFKDFSEKHKNHGKKSGLNPHDWWIKVIEHSFPTPVPAEMAEELWSYFSKKTGYTIHPLLIDFLKRNKEERKYIIGIISNTDERIRTVLEDYGIDHLIDIYAFSYDVGFEKPSREIFDYAMEKAVKLLGQEIQPEECMHLGDDLIKDVSAARNIQWNAEYCDIKTNFLKYFEQK

SEQ ID NO: 47366 - protein, 707 aa, Methanosarcina mazei Go1
MDISKKLLIVTFSIFALFTVLLITASHSILLESFSDLEEQDTAKNTGKIEQAIAWEIMSIDRTARDWAFWDDTYDFVNTLNPQYIESNLDGNTLYSLDLNLMLFVNKSGSLVYPMSVDLINETVVPVPEGIKEGIDSGVLIAHNDTDYIHGVVLLDNGPMLVVCRPILTGPGKSPHAGTLIFGKYLDDSYRMFLENRTKTSLELYTLNQQMPPDFQKAFNIIASGEKSPVIILGNERVAGYFALRNTIGEPVAIVRADYPRELYEQGEKTLYYIYIFLLISGIATGAATKFSIDRLLVSRLITIDNFLRKVKRDKDTSKKLEMEGEDEIHRLSKGINDMLFSIRLAEQELRASEYEKKFILDSLEEIVVLRDPEFNVRWANQAALKNRDLLMIENKEKALDIPVNDRKTPQELQLPGAPIWTDHEFTSPEGKTWLLRLKPICGETGNIIAYLETGVEITERKKYEIELFRAKQDAEVANYAKSEFLANMSHELRTPLNSIIGFSDLLHDKVYGELNARQLKAVGNISGSGKHLLNLINEILDLSKVEAGGFELHYSTFWLADVFAEVRDMLFPFAASKGIKLELEIEKDLPGIYGDRERITQVLSNLMTNAVKFSNENSCVRVKASQNNNFIEVSVSDEGIGIAAEDHDKLFKPFSQIDSSSSRKYQGTGLGLALVKEIVQLHGGAVWFKSEVGKGSTFGFSIPLHV

SEQ ID NO: 47367 - protein, 130 aa, Glycine max
LFQKQLPKMPREYITRLVLDKNHISMAIVKKGWRVVGGICYRPFESRGFAEIVFCAVDSSEQIKGYGSHLMNSLKDHVRKAHPTINHFLTYADNYAVGYFKKQGFTKQISLPRERWVGYIKDYEGGTIMQ

SEQ ID NO: 47368 - protein, 715 aa, Methanosarcina mazei Go1
MAIDISKKVLIITLLIFTVLTASFTFTHNMQLSNFLELERADTFENVERVQNAVATEQSYLDYIVQDWACWDDTYQFIEDKNPEYIRVDLQNQTLSGINVNVMIFVNNSGKVVYVKSVNTSTAEEAPVPRKLLAMIEDGGLLTEGENDSISGFVLLDEDPMFIACHPILTTKYEGPSRGTLIFGRYFDDALLESFKKVTRSSLLMYRADEEMPQDFQNKIKNFSQNSDNIVVDPLNKNQIAGYFGLKDIKGDIALILRADFPRELYLHGERTLNYMYFFLLLTGLMTGVGVKFVLDKLFISRLVEVDDFVTRVRSEKDLSQRLSLEDNDELYRLSREINGMLNEIYLAEQELKAQAREKKVLLDSLNELAVFVDTELKIIWANKAALEYMNMGLEKAIGVCLKVAPGISGPLVEHLNLEEIFTTGEKKSGEYTAQDGRVWFAQAIPVPDEQGKIIGILQTCRDVTERKEAERLLHEKQIAEIANRTKSEFLANMSHELRTPLNSIIGFSDLLYEKVYGELNEKQARAVGNISRSGKHLLNLINDILDLSKVEAGKMELDYKEFELAGKLNAIKSLLSPIADRKNIEIDIEVDKGLTHIRADEARFVQIMYNLMDNAIKFSHENGLVKVRAERKGDLVEITVKDKGIGIKEEDQCKLFKPFSQVDSFSSKTFQGTGLGLSLVKQIVNLHGGEVWFNSKIGEGSTFAFTVPIDGNNN

SEQ ID NO: 47369 - protein, 343 aa, Zea mays
  misc_feature (76)..(76): Xaa can be any naturally occurring amino acid
  unsure (1)..(343): unsure at all Xaa locations
DRSCGCGGSEQKHGSFRHAGRAADGNNARRRVAVPGAAPRAPTAAQPWRERPAHVAAGCGGGGGQEPAAGGGARGXGGGGGAGVRYRECLKNHAAAIGGSATDGCGEFMPAGEEGSLDALRCSACGCHRNFHRKEPPGGDGRQLYGHHHHHPLSPLAAVHPHHHRGLLVAALPPAPTRMVMPLSAAMHHHQQPPQQHHSSASADSDDAHVPGVRGGEVQQQQQAPARKRFRTKFTAEQKARMLGFAEDAGWRLQKLDEAAVQRFCQEVGVKRRVLKVWMHNNKHTLARRGHAGLPGDPELLGPHDGQLGMPLPEPAAEPAVAAAAAAGLGVTDQAMSFGTGRH

SEQ ID NO: 47370 - protein, 346 aa, Mesorhizobium loti MAFF303099
MKTIFSPIQLKHQGQFEFYNGAVVEGYENTSRATFITSRIEEVRLGPVLNPRPQSLDTAKRIHSPTYLDFIASAWRLWRDAGRTGTALPYAWPARGRYKDVAPDSIDAQLGQYSIDASTGFVEGTWEAVKASHDSALTAADLIIEGEQACFALCRPPGHHAGTDFNGGYCFVNNAAVAAQRLLDGGASRVTILDIDYHHGNGTQEIFYARGDVQVVSLHADPRNDYPFFAGYADERGSGSGEGFNINIPLPHGTDWAQWEGALDFALGSVRQFGPDVVVISHGVDTFEGDPISRFRLSHDHFPLIGARLAGLQTKTLFVLEGGYAVEDVGINVVGVLSGYEDAIRR

SEQ ID NO: 47371 - protein, 488 aa, Bacillus cereus ATCC 10987
MNSATNQATSKTETTKGKGELRRGLKSRHLTMISLGGTIGTGLFLASGGVIHSAGPGGALIAYAAIGIMVYFLMTSLAELAAYMPVTGSFSTYATKFVDPSLGFALGWNYWYNWAITIAAELAAVTLIMKFWFPNTPSLIWSGLCLAIIFLLNYLSVKGFGESEYWFALIKVVTIIIFLIVGFMMIFGIMGGETVGFKNFTVADAPFNGGIMAIIGVFMAAGFSFQGTELLGVAAGETSDPERNIPKAIRSIFWRILLFYILAILVIGLLIPYTTESLAASDVTVSPFTLIFEKAGVAFAASVMNAVILTAVLSAGNSGMYASTRMLWDLARQGKAPKFLGKLDSRGVPVNALIVTSIVGSIAFIASLFGDGVVYIWLLNASGMSGFIAWVGIAISHYRFRKAYIAQGKDLKDLPYKAKWFPFGPLFAFTLCIIVILGQNYGAFMGESIDWNGVLVSYIGLPLFLVLWLGYKFTKKTKVIPLDKCELK

SEQ ID NO: 47372 - protein, 502 aa, Oryza sativa
DAMASSPTTDGLTESVAKRKGSPCQQDDDCQDDKRIRSGADLLEDIFWYIHSLMPLRDAARAACVSHSFLRSWRCYPYLMFSEELLRLQESAFSDDERTRNLISKVNHILQNHSGIGVKKLELVFLDSTDVDLSYIDSWLHKAVTRGIEELTLILPINSNAEYSFPCSLLSDGNGNSIQYLHLSRCAIRPTADLGCLRTLTTLHLYSVRITGFELEYLLSNSPALEWLIMMDCKEIVQLKIPSLLKRLHTLFVSRCQTLKVVESYAPNIATFHFRGHVHAVRMLGLLQVKDLEMSCSDHSSILCYALTNLLSIVPNVEKLRISSQTQIVSTQTVPGKYLRLKHLHISLNRSPNFDYLSLVSFLDASPSLETFILHIWDIYIPLGHMGHPWTLGDSEQLRQMPGHRHDSLKKFEVVGSCYAKGLVELTCHILETTSSLDRIKLDTCGYVGLCASGSGRCYPHYTEQIMEACNSVLAIRTYIMGKVPPTVKFELVEPCSRCPVQ

SEQ ID NO: 47373 - protein, 532 aa, Glycine max
MNAIATASALSLPIFLRAGKLDTKRDLKGRFRVFAVFGEEEKKNAWGALFDVEDPRSKFPQNKGKVLDISQALEVARHDIQYLDWRARQDVLTIMHLHEKVVEVLNPLAREYKSIGTLKKELAELQDELAQAHTQVHISEARVTTALDKLAYMEELVNDRLLQDRSTTDVAQTSSSPSTSANSLVTEKRRQPRKSLNVSGPVQSYHPHLKNFWYPVAFSNDLKDDTMIPIECFEEPWVIFRGKDGKPGCVQNTCAHRACPLHLGSVNEGRIQCPYHGWEYTTDGKCEKMPSTRQLNVKIKSVPCFETEGMIWIWPGNDPPTATLPSLLPPSGFEIHAEIVMELPIEHGLLLDNLLDLAHAPFTHTSTFAKGWSVPSLVNFLTPASGLQGYWDPYPIDMEFRPPCMVLSTIGISKPGKLEGQSTRECSTHLHQLHVCLPSSKQKTRLLYRMSLDFAPLLKHIPLMKYLWRHFAEQVLNEDLRLVVGQQERMNNGANVWNFPVAYDKLGVRYRMWRDALERGAKQLPFSPQHID

SEQ ID NO: 47374 - protein, 777 aa, Neurospora crassa
MAQAYDDEELSISLSPSQIRSRNKRSGDGASGFGPSTGNLHEYGQHGQQLHPNINAVMADAPLRDKMRTEQRIGAYNIVKTLGEGSFGKVKLAVHRMTGQQVALKIIARKKLISRDMQGRVEREIEYLQLLRHPHIIKLYTVIKTPTEIIMVLEYAGGELFDYIVQHGKMKEDEARRFFQQMLCAVEYCHRHKIVHRDLKPENLLLDDNLNVKIADFGLSNIMTDGNFLKTSCGSPNYAAPEVIGGKLYAGPEVDVWSCGVILYVLLVGRLPFDDEHIPSLFAKIARGSYMVPTWMSPGAASLIKKMLVVNPVQRATIDEIRQDPWFLKDLPAYLHPPVEEFLNTGVDPNKAIKVSDIAPNAPPQEQEKLHNEVTEKISKTMGYGKRDVEEALEADEPSAIKDAYMIVRENKLMQSNLDFATSHPPSASILHLPSGEHRLTQKKSKSLSLRPSSFWSNTNEEYQDTLLKTDEEIPGLTTEESVPSPLHDPNMSSARSIASVSTATSPRPYVSKIGILPSSLPTYHRVFMEREKAKAEGLEPPDAIPTIVEPANQPRSQAEQEETIRRLKPHSRSQLRLDEANKRPQGLTPVHPPKKNKPARWQFGIRSRNAPWEALVCIYKALNKLGAGWIVDEDYERAHRDDDDTDDYDGPSIGSRKKSSSSMDPTKTYRLPADPWHIKIRWTTDKLKKHSVASGLSEAGENTHVSRDGSDSKYQVVAMRMEIQIYEMEHGVYLVDFKVDGYETPDGKLLEDKEVTSPFPFLDMAAKLIMQLADAD

SEQ ID NO: 47375 - protein, 191 aa, Triticum aestivum
  misc_feature (158)..(159): Xaa can be any naturally occurring amino acid
  misc_feature (181)..(183): Xaa can be any naturally occurring amino acid
  misc_feature (188)..(190): Xaa can be any naturally occurring amino acid
  unsure (1)..(191): unsure at all Xaa locations
METGIGSVDGPKGAPSGAVACPATFPASSPTFVGSPEATLGRHLAQRLVQVGVGDVFAVPGDFNLTLLDYLVAEPGLRLVGCCNELNAGYAADGYARAKGVGACAVTFTVGGLSVLNAIAGAYSENLPLICIVGGPNSNDYGTNRVLHHTIGLPDFSXXLRCFTPVTCYQAVVNNLDDAHXXXDKAIXXXL

SEQ ID NO: 47376 - protein, 465 aa, Synechococcus elongatus PCC 7942
MRILFVAAECAPFAKVGGMGDVVGSLPKVLKASAHDVGIFMRYYGFLTSKLDIPAEPIWWGYAMFNHFAVYETQLPGSDVPLYLMGHPAFDPHRIYSGEDEDWRFTFFANGAAEFSWNYWKPQVIHCHDWHTGMIPVWMHQSPDISTVFTIHNLAYQGPWRWKLEKITWCPWYMQGDSTMAAALLYADRVNTVSPTYAQQIQTPTYGEKLEGLLSFISGKLSGILNGIDVDSYNPATDTRIVANYDRDTLIARLNNRLALQKEMGLEVNPDRFLIGFVARLVEQKGIDLLLQILDRFLSYSDAQFVVLGTGERYYETQLWELATRYPGRMSTYLMYDEGLSRRIYAGSDAFLVPSRFEPCGITQMLALRYGSVPIVRRTGGLVDTVFHHDPRHAEGNGYCFDRYEPLDLYTCLVRAWESYQYQPQWQKLQQRGMAVDLSWKQSAIAYEQLYAEAIGLPIDVLQEA

SEQ ID NO: 47377 - protein, 1421 aa, Polyangium cellulosum
MADRPIERAAEDPIAIVGAGCRLPGGVIDLSGFWTLLEGSRDTVGQVPAERWDAAAWFDPDLDAPGKTPVTRASFLSDVACFDASFFGISPREALRMDPAHRLLLEVCWEALENAAIAPSALVGTETGVFIGIGPSEYEAALPRATASAEIDAHGGLGTMPSVGAGRISYVLGLRGPCVAVDTAYSSSLVAVHLACQSLRSGECSTALAGGVSLMLSPSTLVWLSKTRALATDGRCKAFSAEADGFGRGEGCAVVVLKRLSGARADGDRILAVIRGSAINHDGASSGLTVPNGSSQEIVLKRALADAGCAASSVGYVEAHGTGTTLGDPIEIQALNAVYGLGRDVATPLLIGSVKTNLGHPEYASGITGLLKVVLSLQHGQIPAHLHAQALNPRISWGDLRLTVTRARTPWPDWNTPRRAGVSSFGMSGTNAHVVLEEAPAATCTPPAPERPAELLVLSARTAAALDAHAARLRDHLETYPSQCLGDVAFSLATTRSAMEHRLAVAATSSEGLRAALDAAAQGQTPPGVVRGIADSSRGKLAFLFTGQGAQTLGMGRGLYDVWPAFREAFDLCVRLFNQELDRPLREVMWAEPASVDAALLDQTAFTQPALFTFEYALAALWRSWGVEPELVAGHSIGELVAACVAGVFSLEDAVFLVAARGRLMQALPAGGAMVSIAAPEADVAAAVAPHAASVSIAAVNGPDQVVIAGAGQPVHAIAAAMAARGARTKALHVSHAFHSPLMAPMLEAFGRVAESVSYRRPSIVLVSNLSGKAGTDEVSSPGYWVRHAREVVRFADGVKALHAAGAGTFVEVGPKSTLLGLVPACLPDARPALLASSRAGRDEPATVLEALGGLWAVGGLVSWAGLFPSGGRRVPLPTYPWQRERYWIDTKADDAARGDRRAPGAGHDEVEKGGAVRGGDRRSARLDHPPPESGRREKVEAAGDRPFRLEIDEPGVLDRLVLRVTERRAPGLGEVEIAVDAAGLSFNDVQLALGMVPDDLPGKPNPPLLLGGECAGRIVAVGEGVNGLVVGQPVIALSAGAFATHVTTSAALVLPRPQALSATEAAAMPVAYLTAWYALDGIARLQPGERVLIHAATGGVGLAAVQWAQHVGAEVHATAGTPEKRAYLESLGVRYVSDSRSDRFVADVRAWTGGEGVDVVLNSLSGELIDKSFNLLRSHGRFVELGKRDCYADNQLGLRPFLRNLSFSLVDLRGMMLERPARVRALFEELLGLIAAGVFTPPPIATLPIARVADAFRSMAQAQHLGKLVLTLGDPEVQIRIPTHAGAGPSTGDRDLLDRLASAAPAARAAALEAFLRTQVSQVLRTPEIKVGAEALFTRLGMDSLMAVELRNRIEASLKLKLSTTFLSTSPNIALLTQNLLDALATALSLERVAAENLRAGVQSDFVSSGADQDWEIIAL

SEQ ID NO: 47378 - protein, 171 aa, Lactobacillus plantarum WCFS1
MTETAIFAGGCFWCMVKPFDQQPGIKSVISGYTGGTVANPTYEQVASHTTGHTEAVKITFDPDVISYADLVEIYWRQTDPTDASGQFQDRGDSYRPVIFVNSEAQRRTATASRDALAASGKFAEPIVTTIEDAKPFYPAEAEHQDFYRRNPFRYQIEEMGGREAFIKQHWQ

SEQ ID NO: 47379 - protein, 151 aa, Zea mays
SLEETKKQISKAKDKERTGHDILDDTLDSRSNRARNPSNGSTASHAPAKNTNASTFSWGGANTDSTPKTGRKITGKKVNDLTGNDIFKGDAPPASGEKHLSTAKLKEITGSNIFADGKEPIRERVGGNRKPPGGESSIDLIYHNPELSVDP

SEQ ID NO: 47380 - protein, 144 aa, Lactobacillus plantarum WCFS1
MDKQQGELRQRLTPEQYAVTQEAATERPFSGEYDNFYQEGIYVDVVSGQALFSSRDKYDAGCGWPSFTKPIDQTNLNEHRDESFGMHRTEVTSTQANSHLGHVFPDGPRDRGGLRYCINSAALKFIPVADLEKAGYGQYQSLFK

SEQ ID NO: 47381 - protein, 473 aa, Cryptococcus neoformans var. neoformans B-3501A
MSTSLETPSGTSAGPSIVASGLPPLADLVRAGSKRTRVVYGAETSAVEDDGLARANKIKLATKLAIEYKDVQTLPPILQAQQTGPAGPKRPTQPSIAASATAGPNVKLIGGPEAEKASSSTPQAVAEPRSLVKFRHQEGFAAEGGQATSRLSQALMRKKEAREVKPEYHPEWKLTRVISGHMGWVRAVAMDPGSQWFATGAGDRVIKIWDLASGELKLSLTGHISTIRGLAVSDRHPYLFSCAEDKMVKCWDLETNKVIRHYHGHFSGVYSLSVHPTLDVLVTGGRDASVRVWDMRTRANIFTLTGHTSTVGDVKTQDSDPQIISGSMDSTVRLWDLAAGKCMNTLTHHKKSVRALAIHPTEYSFASASSGGNNIKKWKCPEGIFVNNFVGHEAIINTLSINSENVLFSGADNGTLTLWDYKTGLPFQHLKDIPQPGSLDAEAGVFCSTFDKTGTRLITGGADKTIKVYSEQA

SEQ ID NO: 47382 - protein, 217 aa, Synechococcus elongatus PCC 7942
MALPQVIFFDAVGTLFGVKASVGLAYRQLALEFGVDANARRLNDAFYAAFQEAPPLAFPEAPPEQVPALEYQWWQAIARRTFERSGDLVQFCDQSFADFFDNLYRHFQGPEPWFVYDDVWPLLDYWRDRGVALGIISNFDSRIYPVLDSLGLTNYFSSITISPEVGAAKPDRLIFAMALAQQQCQPHEAWHIGDSFREDVRGSQAAGLQPIWLKREA

SEQ ID NO: 47383 - protein, 311 aa, Zea mays
MSHSPLPPPVFQNISLRFSESFSLQGTETTGAFTPPAFPSPPGTTGLLAIIRPSMAKLVNKLVDSFDHHEAPAPDVGCVRAVLAELVLTFLFVFTGVSASMAAGAGGKPGEAMPMATLAAVAIAHALAAGVLVTAGFHVSGGHLNPAVTVGILVRGHITKLRALLYVAAQLLASSLACILLRYLSGGMVTPVHALGAGISPMQGLVMEVILTFSLLFVTYAMILDPRSQVRTIGPLLTGLIVGANSLAGGNFTGASMNPARSFGPAMATGVWTNHWVYWIGPLLGGSLAGFVYESLFMVYKTHEPLLNGDI

SEQ ID NO: 47384 - protein, 1635 aa, Nostoc punctiforme PCC 73102
MQTSDNQDPIDGVAIIGMVGRFPGAGNVDEFWRNLCEGLESTTFFQDEELDPSIDPNLCKDPSYVKARGIIPGGETFDAAFFGINPMEAVVMDPQARVFLELVYEALENAGYESESFDGLIGLYAGCGQNTYFANHISGRMEIVDRIGEFQTMLANEKDFLTTRAAYKLNLKGPAVSVNTACSTSLVAIIQACQALSSYQCDMALAGGVSMTTPQNSGYIAQEGSMLSGDGHCRPFDASAQGTMFNNGAGIVVLKRLEDALNEGDRIYAVIRGSGINNDGADKVSFTAPSVDGQAEAIAMAQAYANFHPETISYIEAHGTATPLGDPIEIEALTQAFRVHTDAKQFCAIGSLKSNVGHLVAAAGVAGLIKTVLALHYKKIPPSLNFEAPNPKIDFANSPFYVNTKLAEWSQGETPRRAGVSSFGVGGTNAHIVLEEAPQIQNSGSSRPQQLLLLSAKTSTALEAATANLQQYLQYNAEINLADVAYTLQRGRKALNYRRSVVCHDITDAIAALQSLDPNQINTRHTVIRNLAVAFMFPGQGSQYVDMGLNLYNREPVFQEVVDECAEILKPLLGGDLRRIIYPAPSDRETAAIALKQTCFTQPALFVIEYALAQLWQSWGVKPQAMIGHSIGEFVAACIAGVFTLEDALMLVANRGRFMWELPQGAMLSVRLPAQEVEPRLIPELAIAAINAPSLCVVSGPTEAIAALQKQLESEEVVCRPLHTSHAFHSPMMDDIIAPFAEVVRKVKLSPPQIPFVSTVTGDWITAQQATDPMYWATHLRQTVRFAEGIQTLWQQPERVLLEVGPRITTTTLARQQAKDIKQQIAIASLSDNAENEAEWTALLKAVGQLWLAGVSIDWSNFYQRETRQRISLPTYPFERQRFWIDPLPHPNRAATPKPLNPQLEKTQDMTKSPQQKLIPLLKEIIEETSGLEIASVDDSTTFLEMGLDSLSLTQVGLALKKKFQVKVTLRQLLEIYPNLGTLADFINPALSPETLSALGLTETVAEPIPEVPLPAPATTSPTLVVHEVHTNGSAPQISPQPAASSFFENVINQQLQIMSQQLSLLGNNSQAVTIPVVPAATPQNNGVKPQNAVSIPATQTSKESPASVDTESNGAKKAFGAAARIEKTQTKTLTTQQRTHLDKIIQRYTQRTKKSKEYTQSHRPYLADPRTVSGFNPTMKEMVYPIVASRSSGSKLWDLDGNEYVDLSNGFGLNLFGWSPPFITEAIEAQLKLGMEIGPQTPLVGEVAKLMCELTNFDRAAFCNTGSEAVLGAMRMARTITGRNLIAIFSGAYHGILDEVIVRGTKKLRSIPAAPGIPPEMVENILVVDYDSPESLEILRSRADELAAVMVESVQSRRPEYQPKEFLQQLRDFTEEAGIALIFDEIVTGFRIHPGGAQAHFGIKADIATYGKIVGGGLPIGVIAGKSQYMDALDGGFWQFGDDSVPEVGVTYFAGTFVRHPLALAAAKAVLQHLKQSGPSLQQNLNARTDKFVAELMGYFQKVQAPFTAYNFGSLFIVKSAPEFPYGDLLFYLLRDKGVHTWDHRPCFLTTAHSEADLAFVMAAFKESIAEMQSAGFLSAPPIEVTNSEVTNNSLRNRPPQPNAKLGRDPQGNPAWYIPDTERPGKYLQVASVS

SEQ ID NO: 47385 - protein, 195 aa, Arabidopsis thaliana
MQIFVKTLTGKTITLEVESSDTIDNVKAKIQDKEGIPPDQQRLIFAGKQLEDGRTLADYNIQKESTLHLVLRLRGGAKKRKKKTYTKPKKIKHKHKKVKLAVLQFYKVDGSGKVQRLRKECPNATCGAGTFMASHFDRHYCGKCGLTYVYQFKRSSGMIFISISIIVDRITAFFFFISNLFKNCCCSYGNLVRIF

SEQ ID NO: 47386 - protein, 186 aa, Arabidopsis thaliana
YPYIAGMGIYVVSRDVMLDLLRNQFPGANDFGSEVIPGAPFLGLRVQAYLYDGYWEDIGTIEAFYNANLGITKKPVPDFSFYDRSAPIYTQPRYLPPSKMLDADVTDSVIGEGCVIKNCKIHHSVVGLRSCISEGAIIEDSLLMGADYYETATEKSLLSAKGSVPIGIGKNSHIKRAIIDINARIG

SEQ ID NO: 47387 - protein, 413 aa, Cryptococcus neoformans var. neoformans JEC21
MSFALRARGLRAATRSLGAKPLRSTLPQVRYVQIDADKSSPMHDLPASGSEPFKVQLHADSFHSYRCDAPPPETTVTKDELINMYRTMVQMRRMEQAADALYKQKLIRGFCHLAIGQEAVSVGMETAITGQDRVITSYRCHTFAVLRGGTIKGVIAELMGRKDGMSFGKGGSMHIFTPSFFGGNGIVGAQVPVGAGVALAQKYNKEKAATFALYGDGAANQGQVFEAFNMAKLWNLPCVFVCENNKYGMGTSAERSSMNTQFFTRGDQIPGLQVNGMDILAVREATKWAREWATSGKGPLLVEFVTYRYGGHSMSDPGTTYRTREEVQQMRSSQDAIAGLKKYILEWGATDEASLKAIDKAAKEEVDAAVEEAKQSPFPDQVEFWSDIYYKGSEPTHMRGREKEEVHYYNKSA

SEQ ID NO: 47388 - protein, 587 aa, Bacillus licheniformis ATCC 14580
MMEYAAIHHQPFSSDAYSYNGRTLHIKIRTKKDDAEHVRLVWGDPYEYTGGTWKANELAMAKIAATSTHDYWFAEVAPPFRRLQYGFILTGADDRDTFYGSNGACPFAGKAADIGKHCFKFPFVHEADTFDAPDWVKSTVWYQIFPERFASGREDLSPENALPWGSKDPEAHDFFGGDLQGIMDKLDYLEDLGVGGIYLTPIFAAPSNHKYDTLDYCSIDPHFGDEELFRTLVSRIHERGMKIMLDAVFNHIGSASQEWQDVVKNGETSRYKDWFHIHSFPVKEGSYDTFAFTPEMPKLNTANPEVQAYLLDIALYWIREFDIDGWRLDVANEVDHAFWKKFRQAVTAEKPDIFILGEIWHQADPWLRGDEFHSVMNYPFTEPMIDYFADGSISASQMASRINSHLMSGMKQVNEVMFNLLDSHDTKRILTRCGGDDKKVRSLLAFMFAQTGSPCIYYGTEVGLDGGDDPLCRKCMVWEEEKQNQEMLAFMKRLIALRKQENDVLTYGALEWKLVDDQNDFVSFSRTHEGKELIYFFHQGSEVRRVRLRDLKIASDKRIYDAWTEEALQHDDVVDIQPGGFFILGAV

SEQ ID NO: 47389 - protein, 394 aa, Pseudomonas fluorescens PfO-1
MREVVIVDSVRTGLAKSFRGKFNQTRPDDMAAHCVNALLSRNDIDPASVEDCIVGAGSNEGAQGYNIGRNVAVLSQLGTGTAGMTLNRFCSSGLQAIAIAANQIASGCSDIIVAGGVESISLTLKSVNTDHLINPLLKQQTPGIYYTMGQTAEVVARRYGVSREAQDRYSLQSQIRTAQAQAAGLFNDEIVPMAVKYRVEDKNSGDVQILDGIVDRDDCNRPDTTYESLAGLKPVFAEDGSVTAGNSSQLSDGASMTLVMSLEKALQLGLKPKAFFRGFTVAGCEPDEMGIGPVFSVPKLLKAKGLQVADIDLWELNEAFASQCLYARDRLEIDNEKYNVNGGSISIGHPFGMTGSRQVGHLVRELQRRNLRYGIVTMCVGGGMGATGLFEAVR

SEQ ID NO: 47390 - protein, 456 aa, Mycobacterium avium subsp. paratuberculosis K-10
MSVAEPKRDIAGLPLAPKNPLSYRERLRAIKEFHTGTNKLRDAGGPVTRVTLGPRWLISPIVLATSPQGIRDIVSVRDGSIDKTSTVATELRRLLGPNLFVLPHTEWLPRRRTLQPVFTRQRVREFGGHMAEAAESVCAGWPEDTEIDLDAQCRTLTLRALGRSVLGLDLDERSDAIAEPLRVATSYAVRRALRPLRAPEWLPTPSRRRARAAAGAIRALADEILQACRADPGREAPLVHALIAATDPETGQALSDKEIRDEMIIFLFAGHDTTATTLTYALWALGRHPEYQARVAAEVAELPDRHLTPDDVARLGFTVRVLQEALRLCPPGPTGTRMATRDVEVAGYRVEAGTMLAFGRMAVQTDPSLWDAPLRFDPDRFDPRRAGDRDRWQYLPFGGGPRSCIGDHFAMLEATLALATIVRRVEIESLSDDFPLAVPFTMVAAAPIRAMVRRRR

SEQ ID NO: 47391 - protein, 184 aa, Physcomitrella patens subsp. patens
MASAVASTVVAPVSVTVASSSVAASRESSSVKAFSGLKSATLFTSKSQQLSSVQNGSRVQCMQVWNPIGQPKFETFSYLPPLSDDQIARQVDYMIQQNLIPCIEFDTVGAVSRTNFSGSGSSGYYDGRYWTMWKLPMFGCTDSSQVLREIQECKTSYPSCWVRVLGFDSKKQVQICGFLVARPN

SEQ ID NO: 47392 - protein, 624 aa, Ralstonia eutropha JMP134
MAMARQDEERQRQMRALIALGRERGYLTHADINDHLPDNFTQTAAMETIVSTFSDMGVTVYEQAPDADTLLLSDTAPAGASDDQADEEAEAALSTVDSEFGRTTDPVRLYMREMGASELLTRAGEIEIAKRIEGGLQGMIQAIAACPSVVSTMLADVDRIVAGELRIDELVYGISDDVNDSEIALASDDVHVEADASDDDPVGDDVEPDAGDSEKANAARLEQLTLDSLAIFARVRALFEQLPDAPVTGKARSAAVEQLRSKIQSELAPIRFTAKTIDRLCASVHEQLTEVRAIERSILEIAVDRCGMPRKVFVESFPGNETDLKWTSKMAATSRQFGAALKRHLPAIQAGQQKLIDIEAKVTLPLQQFKQINRQMSAAELKMRQAKRELIEANLRLVISIAKKYVNRGMHFLDLIQEGNIGLMKAVDKFEYRRGWKFSTYATWWVRQAVTRALADQARTIRVPVHMVEMINKLNRISRDFRQQTGREAHPAVLAERMEMSEEKVRSILRSARQPVSLETPVGDDADATLGDMIEDVSASSPAEAAIHADMRAAIDEALDGLSPREAKVLRMRFGLDTTSDRTLEEVSKQFDVTRERIRQIESQAMRKLLHPSRADKLRPFLER

SEQ ID NO: 47393 - protein, 166 aa, Glycine max
MACSSGTSSGSLSLLQNSGSEEDLQAMMEDQRKRKRMISNRESARRSRMRKQKHLDDLVSQVAQLRKENQQILTSVNITTQQYLSVEAENSVLRAQVGELSHRLESLNEIVDVLNATTTVAGFGAAASSTFVEPMNNNNNSFFNFNPLNMGYLNQPIMASADILQY

SEQ ID NO: 47394 - protein, 544 aa, Vibrio vulnificus CMCP6
MTPTELKRLYRIIKVQLEYGLDDLLPDHQLAKAPRWMRKSLFWLKNQHPEKPLGDRLRLALQELGPVWIKFGQMLSTRRDLFPPHIADPLALLQDQVSPFDGALAKAQMEQALGGPLETWFSDFDLVPLASASIAQVHTAKLKTTNQEVVLKVIRPDIRPIIDADLKLMRRMARIVAKAMPEARRLKPIEVVREYEKTLLDELDLRREAANAIQLRRNFTDSEELYVPEVYPDFSNETVMVSERIYGIQVSDIAGLKANGTNMKLLAERGVSVFFTQVFRDSFFHADMHPGNVFVNPEHPENPQWIGLDCGIVGTLNSEDKRYLAENFLAFFNRDYRRVAELHVDSGWVPADTNIDEFEFAIRIVCEPIFAKPLCEISFGHVLLNLFNTARRFNMEVQPQLVLLQKTLLYVEGLGRQLYPQLDLWETAKPFLEEWMMNQVGPKALINAIKDRAPYWAEKLPELPELLYDSLKQGKAMNQRMDQLYQGYRASKRQQATGKFLFGVGATLVVCSAILVDHTYEQLSLATAIAGVTFWLFSWRAYRR

SEQ ID NO: 47395 - protein, 7257 aa, Polyangium cellulosum
MTTRGPTAQQNPLKQAAIIIQRLEERLAGLAQAELERTEPIAIVGIGCRFPGGADAPEAFWELLDAERDAVQPLDRRWALVGVAPVEAVPHWAGLLTEPIDCFDAAFFGISPREARSLDPQHRLLLEVAWEGLEDAGIPPRSIDGSRTGVFVGAFTADYARTVARLPREERDAYSATGNMLSIAAGRLSYTLGLQGPCLTVDTACSSSLVAIHLACRSLRAGESDLALAGGVSTLLSPDMMEAAARTQALSPDGRCRTFDASANGFVRGEGCGLVVLKRLSDAQRDGDRIWALIRGSAINHDGRSTGLTAPNVLAQETVLREALRSAHVEAGAVDYVETHGTGTSLGDPIEVEALRATVGPARSDGTRCVLGAVKTNIGHLEAAAGVAGLIKAALSLTHERIPRNLNFRTLNPRIRLEGSALALATEPVPWPRTDRPRFAGVSSFGMSGTNAHVVLEEAPAVELWPAAPERSAELLVLSGKSEGALDAQAARLREHLDMHPELGLGDVAFSLATTRSAMTHRLAVAVTSREGLLAALSAVAQGQTPAGAARCIASSSRGKLALLFTGQGAQTPGMGRGLCAAWPAFREAFDRCVTLFDRELDRPLREVMWAEAGSAESLLLDQTAFTQPALFAVEYALTALWRSWGVEPELLVGHSIGELVAACVAGVFSLEDGVRLVAARGRLMQGLSAGGAMVSLGAPEAEVAAAVAPHAAWVSIAAVNGPEQVVIAGVEQAVQAIAAGFAARGVRTKRLHVSHAFHSPLMEPMLEEFGRVAASVTYRRPSVSLVSNLSGKVVTDELSAPGYWVRHVREAVRFADGVKALHEAGAGTFLEVGPKPTLLGLLPACLPEAEPTLLASLRAGREEAAGVLEALGRLWAAGGSVSWPGVFPTAGRRVPLPTYPWQRQRYWIEAPAEGLGATAADALAQWFYRVDWPEMPRSSVDSRRARSGGWLVLADRGGVGEAAAAALSSQGCSCAVLHAPAEASAVAEQVTQALGGRNDWQGVLYLWGLDAVVEAGASAEEVGKVTHLATAPVLALIQAVGTGPRSPRLWIVTRGACTVGGEPDAAPCQAALWGMGRVAALEHPGSWGGLVDLDPEESPTEVEALVAELLSPDAEDQLAFRQGRRRAARLVAAPPEGNAAPVSLSAEGSYLVTGGLGALGLLVARWLVERGAGHLVLISRHGLPDREEWGRDQPPEVRARIAAIEALEAQGARVTVAAVDVADAEGMAALLAAVEPPLRGVVHAAGLLDDGLLAHQDAGRLARVLRPKVEGAWVLHTLTREQPLDLFVLFSSASGVFGSIGQGSYAAGNAFLDALADLRRTQGLAALSIAWGLWAEGGMGSQAQRREHEASGIWAMPTSRALAAMEWLLGTRATQRVVIQMDWAHAGAAPRDASRGRFWDRLVTVTKAASSSAVPAVERWRNASVVETRSALYELVRGVVAGVMGFTDQGTLDVRRGFAEQGLDSLMAVEIRKRLQGELGMPLSATLAFDHPTVERLVEYLLSQALELQDRTDVRSVRLPATEDPIAIVGAACRFPGGVEDLESYWQLLTEGVVVSTEVPADRWNGADGRGPGSGEAPRQTYVPRGGFLREVETFDAAFFHISPREAMSLDPQQRLLLEVSWEAIERAGQDPSALRESPTGVFVGAGPNEYAERVQDLADEAAGLYSGTGNMLSVAAGRLSFFLGLHGPTLAVDTACSSSLVALHLGCQSLRRGECDQALVGGVNMLLSPKTFALLSRMHALSPGGRCKTFSADADGYARAEGCAVVVLKRLSDAQRDRDPILAVIRGTAINHDGPSSGLTVPSGPAQEALLRQALAHAGVVPADVDFVECHGTGTALGDPIEVRALSDVYGQARPADRPLILGAAKANLGHMEPAAGLAGLLKAVLALGQEQIPAQPELGELNPLLPWEALPVAVARAAVPWPRTDRPRFAGVSSFGMSGTNAHVVLEEAPAVELWPAAPERSAELLVLSGKSEGALDAQAARLREHLDMHPELGLGDVAFSLATTRSAMNHRLAVAVTSREGLLAALSAVAQGQTPPGAARCIASSSRGKLAFLFTGQGAQTPGMGRGLCAAWPAFREAFDRCVALFDRELDRPLCEVMWAEPGSAESLLLDQTAFTQPALFTVEYALTALWRSWGVEPELVAGHSAGELVAACVAGVFSLEDGVRLVAARGRLMQGLSAGGAMVSLGAPEAEVAAAVAPHAAWVSIAAVNGPEQVVIAGVEQAVQAIAAGFAARGVRTKRLHVSHASHSPLMEPMLEEFGRVAASVTYRRPSVSLVSNLSGKVVTDELSAPGYWVRHVREAVRFADGVKALHEAGAGTFLEVGPKPTLLGLLPACLPEAEPTLLASLRAGREEAAGVLEALGRLWAAGGSVSWPGVFPTAGRRVPLPTYPWQRQRYWPDIEPDSRRHAAADPTQGWFYRVDWPEIPRSLQKSEEASRGSWLVLADKGGVGEAVAAALSTRGLPCVVLHAPAETSATAELVTEAAGGRSDWQVVLYLWGLDAVVGAEASIDEIGDATRRATAPVLGLARFLSTVSCSPRLWVVTRGACIVGDEPAIAPCQAALWGMGRVAALEHPGAWGGLVDLDPRASPPQASPIDGEMLVTELLSQETEDQLAFRHGRRHAARLVAAPPRGEAAPASLSAEASYLVTGGLGGLGLIVAQWLVELGARHLVLTSRRGLPDRQAWREQQPPEIRARIAAVEALEARGARVTVAAVDVADVEPMTALVSSVEPPLRGVVHAAGVSVMRPLAETDETLLESVLRPKVAGSWLLHRLLHGRPLDLFVLFSSGAAVWGSHSQGAYAAANAFLDGLAHLRRSQSLPALSVAWGLWAEGGMADAEAHARLSDIGVLPMSTSAALSALQRLVETGAAQRTVTRMDWARFAPVYTARGRRNLLSALVAGRDIIAPSPPAAATRNWRGLSVAEARMALHEVVHGAVARVLGFLDPSALDPGMGFNEQGLDSLMAVEIRNLLQAELDVRLSTTLAFDHPTVQRLVEHLLVDVLKLEDRSDTQHVRSLASDEPIAIVGAACRFPGGVEDLESYWQLLAEGVVVSAEVPADRWDAADWYDPDPEIPGRTYVTKGAFLRDLQRLDATFFRISPREAMSLDPQQRLLLEVSWEALESAGIAPDTLRDSPTGVFVGAGPNEYYTQRLRGFTDGAAGLYGGTGNMLSVAAGRLSFFLGLHGPTLAMDTACSSSLVALHLACQSLRLGECDQALVGGVNVLLAPETFVLLSRMRALSPDGRCKTFSADADGYARGEGCAVVVLKRLRDAQRAGDSILALIRGSAVNHDGPSSGLTVPNGPAQQALLRQALSQAGVSPVDVDFVECHGTGTALGDPIEVQALSEVYGPGRSEDRPLVLGAVKANVAHLEAASGLASLLKAVLALRHEQIPAQPELGELNPHLPWNTLPVAVPRKAVPWGRGARPRRAGVSAFGLSGTNVHVVLEEAPEVELVPAAPARPVELVVLSAKSAAALDAAAERLSAHLSAHPELSLGDVAFSLATTRSPMEHRLAIATTSREALRGALDAAAQRQTPQGAVRGKAVSSRGKLAFLFTGQGAQMPGMGRGLYEAWPAFREAFDRCVALFDRELDQPLREVMWAAPGLAQAARLDQTAYAQPALFALEYALAALWRSWGVEPHVLLGHSIGELVAACVAGVFSLEDAVRLVAARGRLMQALPAGGAMVAIAASEAEVAASVAPHAATVSIAAVNGPDAVVIAGAEVQVLALGATFAARGIRTKRLAVSHAFHSPLMDPMLEDFQRVAATIAYRAPDRPVVSNVTGHVAGPEIATPEYWVRHVRSAVRFGDGAKALHAAGAATFVEIGPKPVLLGLLPACLGEADAVLVPSLRADRSECEVVLAALGTWYAWGGALDWKGVFPDGARRVALPMYPWQRERHWMDLTPRSAAPAGIAGRWPLAGVGLCMPGAVLHHVLSIGPRHQPFLGDHLVFGKVVVPGAFHVAVILSIAAERWPERAIELTGVEFLKAIAMEPDQEVELHAVLTPEAAGDGYLFELATLAAPETERRWTTHARGRVQPTDGAPGALPRLEVLEDRAIQPLDFAGFLDRLSAVRIGWGPLWRWLQDGRVGDEASLATLVPTYPNAHDVAPLHPILLDNGFAVSLLATRSEPEDDGTPPLPFAVERVRWWRAPVGRVRCGGVPRSQAFGVSSFVLVDETGEVVAEVEGFVCRRAPREVFLRQESGASTAALYRLDWPEAPLPDAPAERMEESWVVVAAPGSEMAAALATRLNRCVLAEPKGLEAALAGVSPAGVICLWEPGAHEEAPAAAQRVATEGLSVVQALRDRAVRLWWVTTGAVAVEAGERVQVATAPVWGLGRTVMQERPELSCTLVDLEPEVDAARSADVLLRELGRADDETQVVFRSGERRVARLVKATTPEGLLVPDAESYRLEAGQKGTLDQLRLAPAQRRAPGPGEVEIKVTASGLNFRTVLAVLGMYPGDAGPMGGDCAGIVTAVGQGVHHLSVGDAVMTLGTLHRFVTVDARLVVRQPAGLTPAQAATVPVAFLTAWLALHDLGNLRRGERVLIHAAAGGVGMAAVQIARWIGAEVFATASPSKWAAVQAMGVPRTHIASSRTLEFAETFRQVTGGRGVDVVLNALAGEFVDASLSLLTTGGRFLEMGKTDIRDRAAVAAAHPGVRYRVFDILELAPDRTREILERVVEGFAAGHLRALPVHAFAITKAEAAFRFMAQARHQGKVVLLPAPSAAPLAPTGTVLLTGGLGALGLHVARWLAQQGAPHMVLTGRRGLDTPGAAKAVAEIEALGARVTIAASDVADRNALEAVLQAIPAEWPLQGVIHAAGALDDGVLDEQTTDRFSRVLAPKVTGAWNLHELTAGNDLAFFVLFSSMSGLLGSAGQSNYAAANTFLDALAAHRRAEGLAAQSLAWGPWSDGGMAAGLSAALQARLARHGMGALSPAQGTALLGQALARPETQLGAMSLDVRAASQASGAAVPPVWRALVRAEARHAAAGAQGALAARLGALPEARRADEVRKVVQAEIARVLSWGAASAVPVDRPLSDLGLDSLTAVELRNVLGQRVGATLPATLAFDHPTVDALTRWLLDKVLAVAEPSVSPAKSSPQVALDEPIAVIGIGCRFPGGVTDPESFWRLLEEGSDAVVEVPHERWDIDAFYDPDPDVRGKMTTRFGGFLSDIDRFEPAFFGISPREATTMDPQQRLLLETSWEAFERAGILPERLMGSDTGVFVGLFYQEYAALAGGIEAFDGYLGTGTTASVASGRISYVLGLKGPSLTVDTACSSSLVAVHLACQALRRGECSVALAGGVALMLTPATFVEFSRLRGLAPDGRCKSFSAAADGVGWSEGCAMLLLKPLRDAQRDGDPILAVIRGTAVNQDGRSNGLTAPNGSSQQEVIRRALEQAGLAPADVSYVECHGTGTTLGDPIEVQALGAVLAQGRPSDRPLVIGSVKSNIGHTQAAAGVAGVIKVALALERGLIPRSLHFDAPNPHIPWSELAVQVAAKPVEWTRNGAPRRAGVSSFGVSGTNAHVVLEEAPAAAFAPAAARSAELFVLSAKSAAALDAQAARLSAHVVAHPELGLGDLAFSLATTRSPMTYRLAVAATSREALSAALDTAAQGQAPPAAARGHASTGSAPKVVFVFPGQGSQWLGMGQKLLSEEPVFRDALSACDRAIQAEAGWSLLAELAADETTSQLGRIDVVQPALFAIEVALSALWRSWGVEPDAVVGHSMGEVAAAHVAGALSLEDAVAIICRRSLLLRRISGQGEMAVVELSLAEAEAALLGYEDRLSVAVSNSPRSTVLAGEPAALAEVLAILAAKGVFCRRVKVDVASHSPQIDPLRDELLAALGELEPRQATVSMRSTVTSTIVAGPELVASYWADNVRQPVRFAEAVQSLMEGGHGLFVEMSPHPILTTSVEEIRRATKREGVAVGSLRRGQDERLSMLEALGALWVHGQAVGWERLFSAGGAGLRRVPLPTYPWQRERYWVEAPTGGAASGSRFAHAGSHPLLGEMQTLSTQRSTRVWETTLDLKRLPWLGDHRVQGAVVFPGAAYLEMALSSGAEALGDGPLQVSDVVLAEALAFADDTPVAVQVMATEERPGRLQFHVASRVPGHGRAAFRSHARGVLRQTERAEVPARLDLAALRARLQASAPAAATYAALAEMGLEYGPAFQGLVELWRGEGEALGRVRLPEAAGSPAACRLHPALLDACFHVSSAFADRGEATPWVPVEIGSLRWFQRPSGELWCHARSVSHGKPTPDRRSTDFWVVDSTGAIVAEISGLVAQRLAGGVRRREEDDWFMEPAWEPTAVPGSEVTAGRWLLIGSGGGLGAALYSALTEAGHSVVHATGHGTSAAGLQALLTASFDGQAPTSVVHLGSLDERGVLDADAPFDADALEESLVRGCDSVLWTVQAVAGAGFRDPPRLWLVTRGAQAIGAGDVSVAQAPLLGLGRVIALEHAELRCARIDLDPARRDGEVDELLAELLADDAEEEVAFRGGERRVARLVRRLPETDCREKIEPAEGRPFRLEIDGSGVLDDLVLRATERRPPGPGEVEIAVEAAGLNFLDVMRAMGIYPGPGDGPVALGAECSGRIVAMGEGVESLRIGQDVVAVAPFSFGTHVTIDARMVAPRPAALTAAQAAALPVAFMTAWYGLVHLGRLRAGERVLIHSATGGTGLAAVQIARHLGAEIFATAGTPEKRAWLREQGIAHVMDSRSLDFAEQVLAATKGEGVDVVLNSLSGAAIDASLATLVPDGRFIELGKTDIYADRSLGLAHFRKSLSYSAVDLAGLAVRRPERVAALLAEVVDLLARGALQPLPVEIFPLSRAADAFRKMAQAQHLGKLVLALEDPDVRIRVPGESGVAIRADGTYLVTGGLGGLGLSVAGWLAEQGAGHLVLVGRSGAVSAEQQTAVAALEAHGARVTVARADVADRAQIERILREVTASGMPLRGVVHAAGILDDGLLMQQTPARFRAVMAPKVRGALHLHALTREAPLSFFVLYASGAGLLGSPGQGNYAAANTFLDALAHHRRAQGLPALSIDWGLFADVGLAAGQQNRGARLVTRGTRSLTPDEGLWALERLLDGDRTQAGVMPFDVRQWVEFYPAAASSRRLSRLVTARRVASGRLAGDRDLLERLATAEAGARAGMLQEVVRAQVSQVLRLPEGKLDVDAPLTSLGMDSLMGLELRNRIEAVLGITMPATLLWTYPTVAALSAHLASHVVSTGDGESARPPDTGNVAPMTHEVASLDEDGLFALIDESLARAGKR

SEQ ID NO: 47396 - protein, 216 aa, Pinus resinosa
  misc_feature (151)..(151): Xaa can be any naturally occurring amino acid
  misc_feature (176)..(176): Xaa can be any naturally occurring amino acid
  unsure (1)..(216): unsure at all Xaa locations
MEGKEEDVKLGANKYSERQPLGTAAQTREKDYTEPGPAPLFEPGELASWSFWRAGIAEFMATFLFLYITILTVMGVKRADNVCTDSVGIQGIAWAFGGMIFCLVYCTAGISGGHINPAVTFGLFLARKLSLPRAVFYMICQCLGAICGAGXVKGFMEGEYQADGGGANSVAHGYTXGDGLGAEIVGTFVLVYTVFSATDAKRSARDSHVPLLAPLP

SEQ ID NO: 47397 - protein, 503 aa, Chrysanthemum lavandulifolium
MTTIPSRQLFIDGEWREPVKKNRIPVINPSTEQIVGDIPAATAEDVDVAVKAARKALKRNGGKDWASATGAHRAKYLRAIAAKITGKKELFSKLEAIDCGKPYDEAAWDIDDVAGCFEYNADLAEALDKKQNAPIELPMDTFKCHVIKEPIGVVGLITPWNYPLLMATWKVAPALAAGCAAILKPSELASLTCLELGEVCKEVGLPAGVLNILTGLGPDAGAPLAAHPDVDKIAFTGSSATGSKIMTAAAPNVKPVTLELGGKSPIVVFDDVDIDKAVEWTLFGCFWTNGQICSATSRLILHESIAKEFLDKLVKWAKNIKISDPLEEGCRLGPVVSSGQYERVLKFVETARSEGATILSGGQRPQHLKKGFFIEPAIITDITTSMQIWRDEVFGPVLCVKTFSSEEEAIELANDTHYGLGSAVISNDLDRCDRVTRAFDAGIVWVNCSQPCFCQAPWGGKKRSGFGRELGEWGLDNYLSVKQVTRYISNDAWGWYTPPSPKL

SEQ ID NO: 47398 - protein, 432 aa, Listeria monocytogenes str. 1/2a F6854
MDHSMSKKLHDEALLHIVGGVNSPSRSNKGVGGGIPVTMERASGAYFYDVDGNKYIDYLAAFGPIITGHAHPHITEAITKAAQNGVLYGTPTKHEITFAKMLKEAIPSLEKVRFTNSGTEAVMTTIRVARAYTGRDKIIKFAGCYHGHFDLVLVEAGSGPSTLGIPDSAGVTKSTAEEVITVPFNDLASFKEALAVWGDQVAAVLVEPIVGNFGMVAPEDGFLEAVNELAHVNGSLVIYDEVITAFRFMYGGAQNYLGVIPDLTAMGKIIGGGLPIGAYGGRIDIMEKVAPLGPAYQAGTHAGNPASILSGIACLEVLQEEGLYERFEKYGSMLKDGIEKAAAKHNIAVTVNQIVGALTVYFTEDTVTNYAEAGATNGELFGRFFKGMLEEGINLAPSKYEAWFITSAHSEADILETIQAVDTVFGKMVQDN

SEQ ID NO: 47399 - protein, 1032 aa, Glycine max
MTDITGDIAEEISFQSFDDDCRLLGNLLNDILQREVGTNLLDKIERTRVLAQSGCNMRQAGIVNMAEMLEKQLASELSKMTLEEAFTLARAFSHYLTLMGIAETHHRVRKGGNMAQIAKSCDDIFNQLVQGGVPPEELYDTVCKREVEIVLTAHPTQINRRTLQFKHIRIAHLLDYNDRPDLSTEDREMVIEDLVREITSIWQTDELRRQKPTPVDEARAGFNIVEQSLWKAVPHYLRRVSNALKKHTGKPLPLTCTPIKFGSWMGGDRDGNPNVTAKVTKDVSLLSRWMAIDLYIREVDSLRFELSMNQCSDRLSRLAHEILEAKHENRRENWNQSANRSLTLPTQLPARAHLPSIAENGESRHPRLDIPAPDYMQSNHKDGGVSVSSTTSKLANPNTRLPGTSSANSSASSAALGQKKLYAESQTGKSTFQKLLEPMLPQLPGIAPYRIVLGNVKDKLEKSRRRLEILLEDVACDYDPLDYYETSDQLLEPLLLCYESLQSCGSGVLADGRLADLIRRVATFGMVLMKLDLRQESGRHAEALDAITQYLDMGTYSEWDEEKKLDFLTRELKGKRPLVPVSIEVHPDVKEVLDTFRIAAELGSDSLGAYVISMASNASDVLAVELLQKDARLAAIGELGKACPGGTLRVVPLFETVKDLRGAGSVIRKLLSIDWYHEHIVKNHNGHQEVMVGYSDSGKDAGRFTAAWELYKAQEDVVAACNDYGIKVTLFHGRGGSIGRGGGPTYLAIQSQPPGSVMGTLRSTEQGEMVEAKFGLPQIAVRQLEIYTTAVLLATLRPPIPPREEKWRNVMEEISNISCQCYRNVVYENPEFLAYFHEATPEAELGFLNIGSRPTRRKSSVGIGHLRAIPWLFAWTQTRFVLPAWLGVGAGLKGACEKGYTEELKAMYKEWPFFQSTIDLIEMVLGKADIPIAKHYDEVLVSKERQELGHELRSELMTAEKFVMVISGHEKLQQNNRSLRRLIENRLPFLNPLNMLQVEILKRLRRDDDNRKIRDALLITINGIAAGMKNTG

SEQ ID NO: 47400 - protein, 2439 aa, Polyangium cellulosum
MATTNAGKLEHALLLMDKLAKKNASLEQERTEPIAIIGIGCRFPGGADTPEAFWELLDSGRDAVQPLDRRWALVGVHPSEEVPRWAGLLTEAVDGFDAAFFGTSPREARSLDPQQRLLLEVTWEGLEDAGIAPQSLDGSRTGVFLGACSSDYSHTVAQQRREEQDAYDITGNTLSVAAGRLSYTLGLQGPCLTVDTACSSSLVAIHLACRSLRARESDLALAGGVNMLLSSKTMIMLGRIQALSPDGHCRTFDASANGFVRGEGCGMVVLKRLSDAQRHGDRIWALIRGSAMNQDGRSTGLMAPNVLAQEALLRQALQSARVDAGAIDYVETHGTGTSLGDPIEVDALRAVMGPARADGSRCVLGAVKTNLGHLEGAAGVAGLIKAALALHHESIPRNLHFHTLNPRIRIEGTALALATEPVPWPRAGRPRFAGVSAFGLSGTNVHVVLEEAPATVLAPATPGRSAELLVLSAKSTAALDAQAARLSAHIAAYPEQGLGDVAFSLVATRSPMEHRLAVAATSREALRSALEAAAQGQTPAGAARGRAASSPGKLAFLFAGQGAQVPGMGRGLWEAWPAFRETFDRCVTLFDRELHQPLCEVMWAEPGSSRSSLLDQTAFTQPALFALEYALAALFRSWGVEPELIAGHSLGELVAACVAGVFSLEDAVRLVVARGRLMQALPAGGAMVSIAAPEADVAAAVAPHAASVSIAAVNGPEQVVIAGAEKFVQQIAAAFAARGARTKPLHVSHAFHSPLMDPMLEAFRRVTESVTYRRPSMALVSNLSGKPCTDEVCAPGYWVRHAREAVRFADGVKALHAAGAGIFVEVGPKPALLGLLPACLPDARPVLLPASRAGRDEAASALEALGGFWVVGGSVTWSGVFPSGGRRVPLPTYPWQRERYWIEAPVDGEADGIGRAQAGDHPLLGEAFSVSTHAGLRLWETTLDRKRLPWLGEHRAQGEVVFPGAGYLEMALSSGAEILGDGPIQVTDVVLIETLTFAGDTAVPVQVVTTEERPGRLRFQVASREPGARRASFRIHARGVLRRVGRAETPARLNLAALRARLHAAVPAAAIYGALAEMGLQYGPALRGLAELWRGEGEALGRVRLPESAGSATAYQLHPVLLDACVQMIVGAFADRDEATPWAPVEVGSVRLFQRSPGELWCHARVVSDGQQAPSRWSADFELMDGTGAVVAEISRLVVERLASGVRRRDADDWFLELDWEPAALEGPKITAGRWLLLGEGGGLGRSLCSALKAAGHVVVHAAGDDTSAAGMRALLANAFDGQAPTAVVHLSSLDGGGQLDPGLGAQGALDAPRSPDVDADALESALMRGCDSVLSLVQALVGMDLRNAPRLWLLTRGAQAAAAGDVSVVQAPLLGLGRTIALEHAELRCISVDLDPAQPEGEADALLAELLADDAEEEVALRGGERFVARLVHRLPEAQRREKIAPAGDRPFRLEIDEPGVLDQLVLRATGRRAPGPGEVEIAVEAAGLDSIDIQLAVGVAPNDLPGGEIEPSVLGSECAGRIVAVGEGVNGLVVGQPVIALAAGVFATHVTTSATLVLPRPLGLSATEAAAMPLAYLTAWYALDKVAHLQAGERVLIRAEAGGIGLCAVRWAQRVGAEVYATADTPEKRAYLESLGVRYVSDSRSGRFAADVHAWTDGEGVDVVLDSLSGEHIDKSLMVLRACGRLVKLGRRDDCADTQPGLPPLLRNFSFSQVDLRGMMLDQPARIRALLDELFGLVAAGAISPLGSGLRVGGSLTPPPVETFPISRAAEAFRRMAQGQHLGKLVLTLDDPEVRIRAPAESSVAVRADGTYLVTGGLGGLGLRVAGWLAERGAGQLVLVGRSGAASAEQRAAVAALEAHGARVTVAKADVADRSQIERVLREVTASGMPLRGVVHAAGLVDDGLLMQQTPARLRTVMGPKVQGALHLHTLTREAPLSFFVLYASAAGLFGSPGQGNYAAANAFLDALSHHRRAHGLPALSIDWGMFTEVGMAVAQENRGARLISRGMRGITPDEGLSALARLLEGDRVQTGVIPITPRQWVEFYPATAASRRLSRLVTTQRAVADRTAGDRDLLEQLASAEPSARAGLLQDVVRVQVSHVLRLPEDKIEVDAPLSSMGMDSLMSLELRNRIEAALGVAAPAALGWTYPTVAAITRWLLDDALAVRLGGGSDTDESTASAGSFVHVLRFRPVVKPRARLFCFHGSGGSPEGFRSWSEKSEWSDLEIVAMWHDRSLASEDAPGKKYVQEAASLIQHYADAPFALVGFSLGVRFVMGTAVELASRSGAPAPLAVFALGGSLISSSEITPEMETDIIAKLFFRNAAGFVRSTQQVQADARADKVITDTMVAPAPGDSKEPPSKIAVPIVAIAGSDDVIVPPSDVQDLQSRTTERFYMHLLPGDHEFLVDRGREIMHIVDSHLNPLLAARTTSSGPAFEAK

SEQ ID NO: 47401 - protein, 384 aa, Rickettsia bellii
DISKVYSEADCFTYDPGFMSTASCRSTITYIDGDQGILRHRGYDIKDLAEKSDFLEVAYLLIYGELPNNKQYNDFTKKVAHHALVNERLHYLFQTFCSSSHPMAIMLAAVGSLSAFYPDLLNFFKEADYELTAIRMIAKIPTIAAMSYKYSIGQPFVYPDNSLDFTENFLHMMFATPCEKYKVNPVIKNALNKIFILHADHEQNASTSTVRIAGSSGANPFACVSTGIASLWGPAHGGANEAVINMLKEIGSVENIPKYIAKAKDKNDNFRLMGFGHRVYKNYDPRAAVLKETCKEVLKELGQLDNNPLLQIAIELEAIALKDEYFIERKLYPDVDFYSGIIYKAMGIPPQMFTVLFATARTVGWMAQWKEMHEDPEQKISRPR

SEQ ID NO: 47402 - protein, 506 aa, Chrysanthemum lavandulifolium
MTTTIPIPSRQLFIDGEWREPVKKNRISVINPSTEQIVGDIPAATAEDVDVAVKAARKALKRNGGKDWASATGAHRAKYLRAIAAKITEKKELFSKLEAIDCGKPYDEAAWDIDDVAGCFEYNADLAEALDKKQNAPIELPMDTFKCHVIKEPIGVVGLITPWNYPLLMATWKVAPALAAGCAAILKPSELASLTCLELGEVCKEVGLPAGVLNILTGLGPDAGAPLAAHPDVDKIALTGSSATGSKIMTAAAQNVKPVTLELGGKSPIVVFDDVDIDKAVEWTLFGCFWTNGQICSATSRLILHESIAKEFLDKLVKWAKNIKISDPLEEGCRLGPVVSSGQYEKVLKFVETARSEGATILSGGQRPQHLKKGFFIEPAIITDITTSMQVWREEVFGPVLCVKTFSSEEEAIELANDTHYGLGSAVISNDLDRCDRVTRAFDAGIVWVNCSQPCFCQAPWGGKKRSGFGRELGEWGLDNYLSVKQVTRYISNDAWGWYTPPSPKL

SEQ ID NO: 47403 - protein, 257 aa, Triticum aestivum
  misc_feature (160)..(160): Xaa can be any naturally occurring amino acid
  misc_feature (172)..(172): Xaa can be any naturally occurring amino acid
  misc_feature (188)..(188): Xaa can be any naturally occurring amino acid
  misc_feature (198)..(198): Xaa can be any naturally occurring amino acid
  misc_feature (236)..(237): Xaa can be any naturally occurring amino acid
  unsure (1)..(257): unsure at all Xaa locations
MPTANVRAAQPSADRRLSTLVRHLLPSSPRTSAATATSADSSLQPFPTMASPSVFAGIAQGPEDPILGVTVAYNKDPSPVKVNLGVGAYRTEEGKPMVLNVVRRAEQMLIQNESRVKEYLPITGLADFNKLSAKLIFGADSPAIQENRVATVQCLSGTGXSLRVGGEFLARXHYHERTIYIPQPTWGXNHPKVFTLAXGLTARSYRYYDPATCGTGISKGPLGRLNSAPSSAIVLXXACAHNLRVSTNLGTWEQIRN

SEQ ID NO: 47404 - protein, 906 aa, Arabidopsis thaliana
MMVSDKKKPMIGSAVEKAEILRAACFLRFLEILVLEFVAHSAAVNCLKIGRKSSRVLVTGGEDHKVNLWAIGKPNAILSLYGHSSGIDSVTFDASEVLVAAGAASGTIKLWDLEEAKIVRTLTGHRSNCISVDFHPFGEFFASGSLDTNLKIWDIRKKGCIHTYKGHTRGVNVLRFTPDGRWVVSGGEDNIVKVGSCFHVTSHFSVLACLYQVWDLTAGKLLTEFKSHEGQIQSLDFHPHEFLLATGSADRTVKFWDLETFELIGSGGPETAGVRCLSFNPDGKTVLCGLQESLKIFSWEPIRCHDGVDVGWSRLSDMNVHEGKLLGCSYNQSCVGVWVVDLSRTEPCMAGDTAQSNGHPEKRSCSGRDPVVLNDNNSKTVLGKLSVSQNVDPLLKETKSLGRLSVSQNSDPSTKETKSIGRSSTSQNSESSMKESKPLGRLSVSQNSDVSKESRTFSSTGSLPGTPHRVSSTNVSKATSGVSTAVSNAATSRRNFTKANPKANPVNKAADFAPVIVPRADPRIEQATESRAELDIIARTMPYSLQAADSRRSPSSRNNPDLPDASVLEMSESQPVEPNNIPDGGTLPGGKVGMRGATERSINDFRYKRYGRSNSRSRMGSPPRNHDENYDLVSHRSNRDPSPTESQKGGDSSAQLSSFLLQMKRISFMCLIISGRFQSLVINRERRGRFSNFEGPVSNFSSGNMPAPNIRPSNMFKQRGNHMPVEQGIDSPSEENIVEDIMGKHNQFVSSMQSRLAKLQVVRRYWERNDVKNSIGSIEKMADNAVTADVLGIITERNEILTLDNCTSLLPLLTALLGSGMDQHLSVSLDLLLKLVRLYGSPIYSSLSAPASVGVDIEAEQRIERYSRCFVELEKVKACLPSLARRGGLVAKSVLELNLAFQEVSS

SEQ ID NO: 47405 - protein, 342 aa, Yarrowia lipolytica CLIB122
MPPTSLVTGSTGFLASHVVDQLLSAGHRVIGTVRSPHKAARLAEAFKQQIASGQLELETLSDVRNAGEFKAIFEKHPEIKYILHTASPFNYNTTDPEKEMLQPAVEGTTTVLKAAKDHAPNVEKVVITSSLAAILNIATFNDPSTTLTEKDWNPITWEQAAEKGNPYANYIGSKAMAEKASVEFEKMEKPKFKLTWVNPVLILGPGIILDPLAINTSNEAIVTNAFETKPGQKPPVKAGYFVDVRDCAKAHVSALNPEFDGRRLFLSTSKYCTQDFLNIANQLPEFKGKIAEFDPIEREKELHSLAQIDNSATLKLLNYDLISLEHSVTDFAKEWLSYERND

SEQ ID NO: 47406 - protein, 292 aa, Bruguiera gymnorhiza
GLLMLALVASDAALAPEAYWNSVLPNTPMPKAIKVLLHPDMLEDKGTSVAVGKGAVNVDAGSFINYYNAASEDQIRDNSNITIFFLEKDLKPGKSMNLYFFESSNTATFLPRHVADSMPFSSNKLQEAFREFSVKPGSLEAETMEDTIKECENPRIEGEEKYCVTSLESIVDFSSSKLGKDIQAISTEVEKQTGRQKYTIAVVKKMAGDKSVVCHKQNYPYAVFYCHTTQSRAYLVQLKGADRSELKAVATCHTNTSAWNPKHMAFQVLAVKPGTVPVCHFLTQSHVVWAPK

SEQ ID NO: 47407 - protein, 346 aa, Bruguiera gymnorhiza
GLLMLALVASDAALAPEAYWNSVLPNTPMPKAIKDLLHPDMLEDKGTSVAVGKGGVNVDAGKGKPGGGTHVGVGGKGVGVDAGTPGGGGTNVGVGKGGVSVNTGHKGTPVNVNVSPFVYRYAASEDQIHDNPNVALFFLEKDMKPGKSMNLDFSESSNTATFLPRHVADSIPFSSNKLQDAFREFSVKPGSMEAEIMENTVKECENPGIEGEEKYCATSLESMVDFSTSKLGKDIQAISTEVEKQTGRQQYTIAGVKKTAGDKSVVCHKQNYPYAVFYCHSTQSTRAYLVQLKGADRTRLQAVAICHTNTSAWNPKHLAFQVLAVKPGTVPICHFLPQSHVVWVPK

SEQ ID NO: 47408 - protein, 381 aa, Medicago sativa
MSCSVAVSNSPVFSPSSSLFCNKSETLTLSLSHLKPSSTTTTTTTSSSSSSSSPSPCSSPSSPFCLRLPKLPLVFTSNKDSGSQNDAVLKRKRPTRLNIPVSEHAFCVPATPSAVARDVVEAEGDGYSVYCKRGRREYMEDRYTAGVNLRGENNLAFFGVFDGHGGAKAAEFARNNLEKNILDEVIMTDEDDVEEAVKRGYLNTDSEFMKKDLHGGSCCVTAFIRNGNLVVSNAGDCRAVISRGGVAEALTSDHRPSREDEKDRIETLGGYVDLCRGVWRIQGSLAVSRGIGDRHLKQWVTAEPETKVIRIEPEHDLLILASDGLWDKVSNQEAVDIARQFCVGNNNQQPLMACKKLAQLSVSRGSLDDTSVMIIKFKHYV

SEQ ID NO: 47409 - protein, 533 aa, Streptococcus oralis
VESALEKIGAKNIESSYRRGEAVFELSDDIEVESAIKAIADANYHPGEAEEIQVQSEKRTDVSLNDEGNYDYDYIIIGSGGAAFSSAIEAVTLNAKVAMIERGTVGGTCVNVGCVPSKTLLRAGEINHLAKNNPFVGLHTSASNVDLAPLVKQKNDLVTEMRNEKYVNLIDDYGFELIKGEAKFVNENTVEVNGNQITAKRFLIATGASSTAPNIPGLDEVDYLTSTSLLELKKVPNRLTVIGSGYIGMELGQLFHNLGSEVTLIQRSERLLKEYDPEISEAITKALTEQGINLVTGATYERVEQDGDIKKVHVEINGKKRIIEAEQLLIATGRKPNTESLNLHAAGVEVGSRGEIVIDDYLKTTNSRIYSAGDVTLGPQFVYVAAYEGGLAARNAIGGLNQKVNLEVVPGVTFTSPSIATVGLTEQQAKEKGYEVKTSVLPLDAVPRALVNRETTGVFKLVADAKTLKVLGAHVVAENAGDVIYAATLAVKFGLTVGDLRETMAPYLTMAEGLKLAVLTFDKDVSKLSCCAG

SEQ ID NO: 47410 - protein, 593 aa, Zea mays
MDTAIGSVPAASDAARHPAPSASAPRDATLGRHLARRLAEVGARDVFTVPGDFNLTLLDELEAEPGGVRLVGCCNELNAAYAADGYARARAGGVGACAVTFTVGGLSAINGVAGAFSENLPVVCIVGGPNSNDYGSNRILHHTIGLPDFTQELRCFQNVTCYQAVVNNLEDAHEQIDTAISTAIKESKPVYISISCNLPSIPHPTFSRHPVPFFLSPRLSNQMNLEAAVEAAAAFLNKAVKPVLVGGPKMRVSKAWEALAELADACGYPVAVMPSAKGLVPVHHSRFIGTYWGAVSTPFCAEIVESADAYLFAGPVFNDYSSVGYSLLLKKEKAIIVQPERVVVGHGPAFGCVLMKDFLHALATRLKKNTVAYENYRRIYVPPGEPLSSEPGEPLRVNVLFKHIQAMLSGDMAVIAETGDSWFNCQKLKLPEGCGYEFQMQYGSIGWSVGATLGYAQAAKDKRVIACIGDGSFQVTAQEVSTMLRWGQNSIIFLINNGGYTIEVEIHDGPYNVIKNWNYTGLVEAFHNGEGACYTAKVRTEEELTEALEAALGPKKDCLCFIEVIVHKDDTSKALLEWGSRVSAANSRPPNPQ

SEQ ID NO: 47411 - protein, 336 aa, Bruguiera gymnorhiza
MESRIPYILGLLMLALVASGAALAPEAYWNSVLPNTPMPKAIKDLLHPDMLEDKGTSVAVGKGGVNVDAGKGKPGGGTHVGVGGKGVGVDAGKPGGGGTNFGFDRAVSNIYAASEDQIHDNPNLALFFLQKDLKPGKSMNLDFPESSNTATFLPRHVADSIPFSSNKLQDAFREFSVKPGSLEAEIMENTVKECENPGIEGEEKYCATSLESMVDFSTSKLGKDIQAISTEVEKQTGRQKYTIAGVKKIAGDKCVVCHKQNYPYAVFYCHSIQSTRAYLVQLKGVDRTRLQAVAICHTNTSAWNPKHPAFQVLAVKPGTVPICHFLPQSHVVWVPK

SEQ ID NO: 47412 - protein, 156 aa, Zea mays
MSPARSSSSNVFDPLSLDFWPSFADPFGVVRPLAEQCPVLTNVRVDWKETPEAHVFRADLPGVRKEAAKVEVEDGNVLVISGERAREEEEEEAGKDEAWRWRLVERSSGRFQRRFRLPRGARLDQVHASMENGVLTVTVPKEEAKKPQVRAVEISG

SEQ ID NO: 47413 - protein, 533 aa, Streptococcus mitis
VESALEKIGAKNIESSYRRGEAVFELSDDIEVESAIKAIADANYHPGEAEEIQVQSEKRTDVSLNDEGNYDYDYIIIGSGGAAFSSAIEAVTLNAKVAMIERGTVGGTCVNVGCVPSKTLLRAGEINHLAKNNPFVGLHTSASNVDLAPLVKQKNDLVTEMRNEKYVNLIDDYGFELIKGEAKFVNENTVEVNGNQITAKRFLIATGASSTAPNIPGLDEVDYLTSTSLLELKKVPNRLTVIGSGYIGMELGQLFHNLGSEVTLIQRSERLLKEYDPEISEAITKALTEQGINLVTGATYERVEQDGDIKKVHVEINGKKRIIEAEQLLIATGRKPNTESLNLHAAGVEVGSRGEIVIDDYLKTTNSRIYSAGDVTLGPQFVYVAAYEGGLAARNAIGGLNQKVNLEVVPGVTFTSPSIATVGLTEQQAKEKGYEVKTSVLPLDAVPRALVNRETTGVFKLVADAKTLKVLGAHVVAENAGDVIYAATLAVKFGLTVGDLRETMVPYLTMAEGLKLAVLTFDKDVSKLSCCAG

SEQ ID NO: 47414 - protein, 307 aa, Bruguiera gymnorhiza
GLLMLALVASGAALAPEAYWNSVLPNTPMPKAIKDLLHPDMLEDKGTSVAVGKGGENVDAGKGKPGGGGTNFGIDRAVSNIYAASEDQIHDNPNVALFFLQKDLKPGKSMNLDFPASSNTATFLPRHVADSIPFSSNKLQDAFREFSVKPGSLEAEIMENTVKECENPGIEGEEKYCATSLESMVDFSTSKLGKDVQAISTEVEKQTGRQKYTIAGVKKIAGDKCVVCHKQNYPYAVFYCHSIQSTRAYLVQLKGVDRTRLQAVAICHTNTSAWNPKHPAFQVLAVKPGTVPTCHFLPQSHVVWVPK

SEQ ID NO: 47415 - protein, 385 aa, Rickettsia rickettsii
MTNENNNDSEFAELKIRGKIFKLPILKASIGEDVIDISRVSAEADCFTYDPGFMSTASCQSTITYIDGDKGILRHRGYDIKDLAEKSDFLEVAYLLIYGELPSGEQYNNFTKQVAHHSLVNERLHYLFQTFCSSSHPMAIMLAAVGSLAAFYPDLLNFKEADYELTAIRMIAKIPTIAAMSYKYSIGQPFIYPDNSLDFTENFLHMMFATPCTKYTVNPIIKNALNKIFILHADHEQNASTSTVRIAGSSGANPFACISTGIASLWGPAHGGANEAVINMLKEIGSSEYIPKYIAKAKDKNDPFRLMGFGHRVYKNYDPRAVVLKETCKEVLKELGQLDNNPLLQIAIELEAIALKDEYFIERKLYPNVDFYSGIIYKAMGIPSQ

SEQ ID NO: 47416 - protein, 605 aa, Zea mays
MDTHIGSVNGAASNQTVGCPASAPGCPMASTPAQPAATLSAGEASLGRHLARRLVQVGVNDVFAVPGDFNLTLLDHLIAEPGLRLVGCCNELNAGYAADGYARARGVGACAVTFTVGGLSVLNAIAGAYSENLPVICIAGGPNSNDYGTNRILHHTIGLPDFSQELRCFQTVTCHQAVVNNLDDAHEQIDTAIATALRESKPVYLSISCNLPGLPHPTFSRDPVPFFLTPRSNKMGLEAAVEATVEFLNKAVKPVLVAGPKLRVAKAGKAFVDMVDASGYAYAVMPSAKGLVPETHPHFIGTYWGAVSTAFCAEIVESADAYLFAGPIFNDYSSVGYSFLLKKEKAIIVQPERVIVGNGPAFGCVMMKEFLSELAKRVNKNTTAYENYKRIFVPEGQPLESEPNEPLRVNVLFKHVQKMLTGDSAVIAETGDSWFNCQKLKLPEGCGYEFQMQYGSIGWSVGALLGYAQGANHKRVIAFIGDGSFQVTAQDVSTMLRCEQNSIIFLINNGGYTIEVEIHDGPYNVIKNWNYTGFVDAIHNGLGKCWTSKVKSEEELTAAIETALGEKKDCLCFIEVIAHKDDTSKELLEWGSRVSAANSRPPNPQ

SEQ ID NO: 47417 - protein, 698 aa, Coxiella burnetii RSA 493
MPSRKKKSSVTKTKKKTTGKKARVTAKAKPSVKSKLKTVKRAPAKPKSVTVAKTKSKKEKAKVVSQPLPKTAEKKPSAPPSETQQPKIGENAAESQRLGFGALLEEAKNKGYLVHEDLINLLPNDYADPSQMEGIIGRLTEMGIKVFEIPPDADSLLLEEDTQSDDDEINEDVAEVLATETRTTDPVRMYMREMGSVELLTREGEIVIAKRIEEGIRQVMGAVVQYPELIEKFIKEYDTIVATEGRLSDLLIGFFDEEESTASPVAPEARDKEAETSDEDDGGEGGSDEFGESGPDPLITQQHMEELKKLYGRYQNAIKRYGKKAPATLKHQKALAELFSTFKLSIKQFNRLTGQLRRMLRAARAQERLIMSYCVVKAKTPRKKFIASFPHNETNMKWLEQYKNENKEQAKRLEKYSKEIYRAQRNLAQLEEQNNLNIQEIKEINRRVAIGEAKSRRAKKEMIEANLRLVISIAKKYTNRGLQFLDLIQEGNIGLMKAVDKFEYRRGYKFSTYATWWIRQAITRSIADQARTIRIPVHMIETINKLNRISRQILQETGIEATPEELGRRMDMPEEKVRKVLKIAKEPISMETPIGEDEDSNLGDFIEDINMESPVDFATSAGLMEATREILSTLTPREAKVLRMRFGIDMNTDHTLEEVGKQFDVTRERIRQIEAKALRKLRHPSRAEKLHSFIEVEE

SEQ ID NO: 47418 - protein, 590 aa, Pseudomonas fluorescens PfO-1
MCGLAGELRFDQQPADLAAIERITHHLAPRGPDAWGFHAQGPIALGHRRLKIMDLSDGSAQPMIDSQLGLSLAFNGAIYNFPELRAELEALGYAFYSGGDTEVLLKGYHAWGEALLPKLNGMFAFAIWERDAQRLFIARDRLGVKPLYLSRTGQRLRFASALPALLKGGDINPILDPVALNHYLNFHAVVPAPRTLLAGIEKLPPASWMRIEADGTTEQKTWWTLPYGPHADEKNLTLEDWRDRVLDSTREAVAIRQRAAVDVGVLLSGGVDSSMLVGLLREVGVENLSTFSIGFQDAGGERGDEFQYSDLIAKHYGTQHHQLRIDEKEIIEQLPAAFRAMSEPMVSHDCIAFYLLSREVAKHCKVVQSGQGADELFAGYHWYPQVDGAADPYAAYREAFFDRSYDDYAATVQPKWLTANDAAGDFVKEHFAQPGADAAVDKALRLDSTVMLVDDPVKRVDNMTMAWGLEARTPFLDYRLVELSARIPGQFKLPDGGKQVLKEAARRVIPSEVIDRKKGYFPVPGLKHLQGETLSWVRELLLDPSQDRGLFNPAMLDQLLTDPQGQLTPLRGSKLWQLAALNLWLSEQGI

SEQ ID NO: 47419 - protein, 179 aa, Triticum aestivum
  misc_feature (25)..(25): Xaa can be any naturally occurring amino acid
  misc_feature (171)..(171): Xaa can be any naturally occurring amino acid
  unsure (1)..(179): unsure at all Xaa locations
MGRPWPPPVMALWAPSVGPFQGVKXSTGGFPFSRRSNGASLGSVSNGGRIRCMQVWPIEGIKKFETLSYLPPLSTEALLKQVDYLIRSKWVPCLEFSKVGFIFREHNASPGYYDGRYWTMWKLPMFGCTDATQVINEVEEVKKEYPDAYVRIIGFDNMRQVQCVSFIAFKXGCEESGKA

SEQ ID NO: 47420 - protein, 314 aa, Bacillus coagulans
MNILLMVRTPFIEAVPDFVKNLNRLGNVTILDTDNGIEKEKLKQAVREVEVIITAVVQIDKEIIDAAPNLKYIMKFGAGYDNIDFKYAREKGIPVTNTPGQNADAVADLAIGLMLATARNIPAKNEELRNGNWELSMGIEIFQKKLGIIGFGAIGQAIAQRATGFQMEVLAYGTFQDQTIADRLNVEFVDLNKLLNESDIVVVSTTLRKDNYQLINAKTLNEMKKDALFINVSRGALVDEDALYKALTNGKIKGAGLDVFVEEPSHHPLLTLPNTTVTPHIGAATNEAIKRTGSVALENVQRLKNDLPLLYVVN

SEQ ID NO: 47421 - protein, 131 aa, Rickettsia conorii str. Malish 7
MAYSKKVIDHYENPRNVGSLDKENKNVGTGLVGAPACGDVMKLQIAVDDDGIITDAKFKTFGCGSAIASSSLVTEWVKGRSVEDAETIKNTEIAKELSLPPVKLHCSLLAEDAIKAAIADYKQKKESKKDS

SEQ ID NO: 47422 - protein, 142 aa, Streptococcus thermophilus
MLNKIQHRNLNTYSVTPFDFFEEFSRNLFNDFKPNFIKTDIHETDNEYLVEAELPGIPKENIQVTYENGVLTISGQQQIDSVNEDKKGKLIRSERSLTSVQRQYLLENVKEDEIKASYSDGVLKVTLPKDSNKEIKKSISIE

SEQ ID NO: 47423 - protein, 111 aa, Zea mays
MAAVETVVLKVAMSCEGCAGAVRRVLSKMEGVETFDIDLKEQKVTVKGNVKPEDVFQTVSKSGKRTSYWEGEATAPDAAAAPEAEAAPSTAAEAPPAAPAAPEITPAKADA

SEQ ID NO: 47424 - protein, 383 aa, Rickettsia sp. COOPERI
DISRVSAEADCFTYDPGFMSTASCQSTITYIDGDKGILRHRGYDIKDLAEKSDFLEVAYLLIYGELPSGEQYNNFTKQVAHHSLVNERLHYLFQTFCSSSHPMAIMLAAVGSLSAFYPDLLNFKEADYELTAIRMIAKIPTIAAMSYKYSIGQPFIYPDNSLDFTENFLHMMFATPCTKYTVNPIIKNALNKIFILHADHEQNASTSTVRIAGSSGANPFACISTGIASLWGPAHGGANEAVINMLKKIGSSEYIPKYIAKAKDKNDPFRLMGFGHRVYKNYDPRAAVLKEACKEVLKELGQLDNNPLLQIAIELEAIALKDEYFIERKLYPNVDFYSGIIYKAMGIPSQMFTVLFAIARTVGWMAQWKEMHEDPEQKISRPR

SEQ ID NO: 47425 - protein, 450 aa, Botryotinia fuckeliana
MSNLPSEPEFEQAYNELASTLENSTLFEKNPEYRTALKVVSIPERVIQFRVVWEDDKNQVQVNRGYRVQFNSALGPYKGGLRFHPTVNLSVLKFLGFEQIFKNALTGLNIGGGKGGADFDPKGKSDNEIRRFCVSFMRELSKHIGADTDVPAGDINVGGREIGFLFGAYKAIQNKWEGVLTGKGGSWGGSLIRPEATGYGLVYYVAHMIQYAGQGSFQGKRVAISGSGNVAQYAALKCIELGATVVSLSDSQGSLIAEGDAYFTPEDVGKIAELKLKRQSLTAFEHGGKYKYIEGSRPWTHVKVDVALPCATQNEVSKEEAESLVASGARYIAEGSNMGCTQEAIDVFEAERKEKKDKAIWYAPGKAANAGGVAVSGLEMAQNSARISWTQEEVDEKLKDIMKNAFETGLETPKKYVEAKDGEYPSLVAGSNIAGFVKVASAMHNHGDWW

SEQ ID NO: 47426 - protein, 610 aa, Glycine max
SYVAAPPPRGSEDMLDCFPEADNSVFMDDLKGLPLMSCKTRFGPKSDQGMTTSSAGSMTPRSPLMTPRTSQIDLLLAGKGAYSEHDDLPQMNELADIARCVANAPLDDDRTTSYLLSCLDDLRVVVDRRKFDALTVETFGTRIEKLIREKYLQLTEMVDVEKIDTESTVDDDILEDDVVRSLRTSPIHSSRDRTSIDDFEIIKPISRGAFGRVFLAKNRTTGDLFAIKVLKKADMIRKNAVESILAERDILITVRNPFVVRFFYSFTCRENLYLVMEYLNGGDLYSLLRNLGCLDEEVARVYIAEVVLALEYLHSLRVVHRDLKPDNLLIAHDGHIKLTDFGLSKVGLINSTDDLSGPAVNGTSLLEEDETDVFTSADQRERREKRSAVGTPDYLAPEILLGTGHGFTADWWSVGVILFELLVGIPPFNAEHPQIIFDNILNRKIPWPAVPEEMSPEALDLIDRLLTEDPNQRLGSKGASEVKQHVFFKDINWDTLARQKAAFVPASESALDTSYFTSRYSWNTSDGFVYPASDVEDSSDADSLSGSSSCLSNRQDEVGDECGGLTEFDSGTSVNYSFSNFSFKNLSQLASINYDLTKGWKDDPATNSSA

SEQ ID NO: 47427 - protein, 625 aa, Xanthomonas oryzae pv. oryzae KACC10331
MNSSRRLPARPVELQEKQMAVIEIKVPDIGDYSDVPVIEVLVAVGDSVAKDQGLVTLESDKATLEVPSSAAGVVKELKVKVGDILSEGALVLLLETEGEAAAPAKAETKAAPAAVAPAAAPGSKPPVTPSHRAPAEPAPSKPALASDKPADIACKMVVLGAGPGGYTAAFRAADLGLDTVLIERYASLGGVCLNVGCIPSKALLHAAAVIDEVAHAGDFGVDFGQPKITLGTLREYKEKVVGKLTGGLASMAKQRKVRTVTGVATFVSPNELEIVGDDGKTQLLRFEHCIIAAGSQAVKLPNFPWDDKRVMDSTDALELHDIPKTLLVVGGGIIGLEMATVYSALGSKVTVVEFMDQLMPGADKDLVKPLADRLKKQGVDVHLKTKATDVTAGKKGITVSFEAAVEGDKPGLQATAYDRVLVAVGRSPNGKKIGADKAGVTVTERGFIPVDRQMRTNVPHIFAIGDIVGNPMLAHKATHEGKLAAEVAAGEKKEWVARVIPSVAYTNPEIAWVGVTETEAKAKGLKVGVAKFPWAASGRAIGIGRTEGFTKLIFDEETHRVIGGAIVGVHAGDLLAEIGLAIEMGAEAEDIGHTIHAHPTLSESVGMAAEVYDGTITDLYIPKKK

SEQ ID NO: 47428 - protein, 412 aa, Oryza sativa (japonica cultivar-group)
MIFFVMLYCRGQRIKTRKRNIAAPLDPASFSDAIVQIYLDNAGDLELVAKSIESSDLNFSRYGDTFFEVVFIGGRTQPGTIKPEEEGERHPYSVLDCAAQREAILPSVLYIQKTLRRRPFLIKNLENVMRKFLQSLEFFEENERKKLAIFTALAFSQKLSGLPPETVFQPLLKDNLVSKGIVLSFITEFFKEYLKENTLDDLIALLKKGKMEDNLLEFFPSAKRTSEALSEHFTKEGLTSLVEYNEKKMFEVKLKEIKLTLTTMINEEAEISEVTEAVKQQVKDAKFPDIEVVRMLWDVLMEAVQWSGKNQQQNSNSALRQVKAWAGLLNAFCTSGRLELELIYKVQTQCYEDAKLMKLFPEIIRTLYDQDVLAEDTILLWFRKGSNPKGRQSFVKALEPFVKWLEEAEEEE

SEQ ID NO: 47429 - protein, 373 aa, Candida albicans SC5314
MTTSLTEQTAILAKYLELSQNGKILAEYVWIDAEGSTRSKCRTLSKKPTSVDDLPEWNYDGSSTGQAPGHDSDVYLRPVAFYPDPFRKGDNIIVLNECWNNDGTPNKFNHRHECAKLMKAHASEEVWFGLEQEYTLFDQYDYPYGWPKGGFPAPQGPFYCGVGTGKVVARDVIEAHYRACLYAGINISGINAEVMPSQWEFQVGPCEGIEMGDQLWIARYLLQRVAEEFAVKISFHPKPLKGDWNGAGCHTNVSTKSMRVPGGMKVIESALSKLAKRHKEHMLLYGADNDQRLTGRHETGHMDTFSSGVANRGASIRIPRQVAKEGYGYFEDRRPASNIDPYLVTGIMVETICGSIPDADMAKEFLRESSDDN

SEQ ID NO: 47430 - protein, 111 aa, Triticum aestivum
  misc_feature (59)..(59): Xaa can be any naturally occurring amino acid
  misc_feature (105)..(105): Xaa can be any naturally occurring amino acid
  unsure (1)..(111): unsure at all Xaa locations
MECAMELSLLKPAMHYLGIAGKTASHVSVLRARRGAVLFRVRDAAGATSAPGGKSGWRXKRRTTAVNESMITPSCYTTDLNKMEQMMNAEIYKQMNQDEFDTLMXEFTTDY

SEQ ID NO: 47431 - protein, 567 aa, ASPERGILLUS NIDULANS FGSC A4
MRQKRKLSNGADERYHPNAQQTADFGIVLRDFYPPEMSNARCEAYNSGILERPIESWQKAYTETSAQQNAMTANAAVVHWFKSDLRLHDNRALQMAYRVAREHKIPLIGLYILSPEDLTAHLSSPARVDLTLRTLEQLKRDLGELDVPLYMETQACRKDIPRRIINLCQEWGANHLFANLEYEVDELRREAKLIRLCAENGIRFETAHDMCVVPPGVLSSQQGRQYAVYSPWFRSWLAFLNENPEYLEVSEDPTSNPGDARRYFKELFECPVPATPENKRFDDVEKADRVRRAFPAGEHEGLRRLEEFLEKATAYDDERNFLSGETTSKLSPYFASGSLSARTAVAKAREANAGKISRGEAGYISWISEVAWRDFYKHVLVHWPFICMNKCFKFEFTNIDWSYNNTHFEAWAAGKTGYPLVDAAMRQLHATAWMHNRCRMVVSSFLCKDLLIDWRRGERYFMEHLIDGDFASNHGGWGFGSSTGVDPQPYFRIFNPIRQSERFDPDGEFIRRWVPELRGVEGNAIHAPYERGAGDIARANGYPEPIVDHARQRGVALRKYKDAARGA

SEQ ID NO: 47432 - protein, 385 aa, Rickettsia rickettsii
MTNENNNDSEFAELKIRGKIFKLPILKASIGEDVIDISRVSAEADCFTYDPGFMSTASCQSTITYIDGDKGILRHRGYDIKDLAEKSDFLEVAYLLIYGELPSGEQYNNFTKQVAHHSLVNERLHYLFQTFCSSSHPTAIMLAAVGSLAAFYPDLLNFKEADYELTAIRMIAKIPTIAAMSYKYSIGQPFIYPDNSLDFTENFLHMMFATPCTKYTVNPIIKNALNKIFILHADHEQNASTSTVRIAGSSGANPFACISTGIASLWGPAHGGANEAVINMLKEIGSSEYIPKYIAKAKDKNDPFRLMGFGHRVYKNYDPRAVVLKETCKEVLKELGQLDNNPLLQIAIELEAIALKDEYFIERKLYPNVDFYSGIIYKAMGIPSQ

SEQ ID NO: 47433 - protein, 330 aa, Escherichia coli
MSQNTLKVHDLNEDAEFDENGVEVFDEKALVEYEPSDNDLAEEELLSQGATQRVLDATQLYLGEIGYSPLLTAEEEVYFARRALRGDVASRRRMIESNLRLVVKIARRYGNRGLALLDLIEEGNLGLIRAVEKFDPERGFRFSTYATWWIRQTIERAIMNQTRTIRLPIHIVKELNVYLRTARELSHKLDHEPSAEEIAEQLDKPVDDVSRMLRLNERITSVDTPLGGDSEKALLDILADEKENGPEDTTQDDDMKQSIVKWLFELNAKQREVLARRFGLLGYEAATLEDVGREIGLTRERVRQIQVEGLRRLREILQTQGLNIEALFRE

SEQ ID NO: 47434 - protein, 482 aa, Bacillus subtilis subsp. subtilis str. 168
MSFPEEKKMKKLPKYRQIVHFIKEKIGNGEWPIGSKIPSQRTLAKDFQVNRSTVITALEELMADGLIEGTMGKGTVVINNTWTLMAKNSAPDWDQYVTSGIQMPSRKIVQEINQSESNTDLIQLSKGELSAEIFPLAVMKEMMGKVSQHMEAFGYEEPKGYLPLREALSNYLKTIGINVSSSSILIVSGALQALQLISMGLLQRGSTVYLDQPSYLYSLHVFQSAGMKLTGLPMDNEGLLPENVHLTRGERGRAILYTNPCFHNPTGILMSKKRREEILAVSENTQLPIIEDDIYRELWIDEIPPYPIKTIDKNGHVLYIGSLSKTLSPGLRIGWIVGPEPVIERLSDIKMQTDYGSSSLSQRVAAEWFTSGHYQQHVEKVRQQLKVRRELALSALETHLKEVATWNIPKGGFFVWIKILPSISMKLLYTKALSKGILINLGSIYAQEKGNYIRLSYAYASLEDLQKGIYELGLMIKELASR

SEQ ID NO: 47435 - protein, 269 aa, Escherichia coli
MSQNTLKVHDLNEDAEFDENGVEVFDEKALVEYEPSDNDLAEEELLSQGATQRVLDATQLYLGEIGYSPLLTAEEEVYFARRALRGDVASRRRMIESNLRLVVKIARRYGNRGLALLDLIEEGNLGLIRAVEKFDPERGFRFSTYATWWIRQTIERAIMNQTRTIRLPIHIVKELNVYLRTARELSHKLDHEPSAEEIAEQLDKPVDDVSRMLRLNERITSVDTPLGGDSEKALLDILADEKENGPEDTTQDDDMKQSIVKWLFELNAK

SEQ ID NO: 47436 - protein, 385 aa, Rickettsia rickettsii
  misc_feature (345)..(345): Xaa can be any naturally occurring amino acid
  unsure (1)..(385): unsure at all Xaa locations
MTNENNNDSEFAELKIRGKIFKLPILKASIGEDVIDISRVSAEADCFTYDPGFMSTASCQSTITYIDGDKGILRHRGYDIKDLAEKSDFLEVAYLLIYGELPSGEQYNNFTKQVAHHPLVNERLHYLFQTFCSSSHPMAIMLAAVGSLAAFYPDLLNFKEADYELTAIRMIAKIPTIAAMSYKYSIGQPFIYPDNSLDFTENFLHMMFATPCTKYTVNPIIKNALNKIFILHADHEQNASTSTVRIAGSSGANPFACISTGIASLWGPAHGGANEAVINMLKEIGSSEYIPKYIAKAKDKNDPFRLMGFGHRVYKNYDPRAVVLKETCKEVLKELGQLDNNPLLXIAIELEAIALKDEYFIERKLYPNVDFYSGIIYKAMGIPSQ

SEQ ID NO: 47437 - protein, 565 aa, Haloarcula marismortui ATCC 43049
MTAARAWWKEAVVYQIYPRSFNDSDGDGVGDLQGIIERLDYVADLGVDVIWLNPVYDSPQKDNGYDISDYQTIYDEFGTMADWEALVEEVHNRDMRLVMDLVVNHTSDQHEWFRKSRQRDPEYEDYYIWREGGTDEDGDPVPPNNWESFFGGSAWEYDEERSEYFLHLYDTSQPDLNWRNDSVRTDIFDTIEWWLEKGIDGFRMDVINLLSKVEGLPDGDPDSEWVGAEHFIDGPEMLSYLTALDEEVLSNYDVMTVGEMPQLTVESALEYADTDGPLDMAFHFQHTKLDYADGERWSVGDWSLPELKRIIGRWQDGLAADGWNTLYWENHDQPRSVSRYGDPENYRRESAKLLGTFILTLRGTPYVYQGQELGMTNADWETMDDLRDVDAINHARELLDRDGVEEYDDVKDIVGYRTRDNARTPMQWDDSKNAGFTDGDPWIQVNPNYREINAADQQADVDSVYSYYQRLIQLRADRDVLVYGDYTDLLPDHETVFAFTRSLSADSGTERILVVLHFDDATETLDLPVEYADATLLEGNYDCDDTDPGTVTLAPYEARVYELFD

SEQ ID NO: 47438 - protein, 341 aa, Nostoc sp. PCC 7120
MKVAVFSTKAYDRQFLEAANAPKHHELAFFEPRLNQDTAILAAGFPAVCVFVHDQVDAATLEILASRGTRLIVLRCAGFNNVDLKAANKLGVTVVRVPAYSPYGVAEHAVGLILSLNRKIHRAYNRVREGNFALDGLLGFNINGRTVGIIGTGKIGLILGQIMKGFGCRLLAYDVYRNPEMESLGGEYVELPELFANSDIISLHCPLMPQTHHLINAEAIEQVKPGVMLINTSRGALIHTQAVIEGLKTGKIGSLGVDVYEQESELFFEDLSGEIIQDDIFQRLTTFPNVLITGHQAFFTEDALRNIAETTLNNIADIEQGRSCPNEIRYQPEVEAKVLVS

SEQ ID NO: 47439 - protein, 1491 aa, ASPERGILLUS NIDULANS FGSC A4
MARQGFHLHAFTITSSNLPVRDAAKLGKRRASAESETRPEKKAMTDTKMQVDTPTQDTVEKIKQGDIDESLYSRQLYVLGHEAMKRMGSSNVLVVGLKGLGVEIAKNIALAGVKSLTLYDPAPVAISDLSSQFFLQPQDVGKPRAEVTAPRVAELNSYVPVTIHEGSSLVENLEQLKRYQAIVLTLTPLKEQLVIADFCHKNGIYLTIADTFGLFGYLFNDFGKNFTVGDSTGEDPVGGIVADISEDGLVSALDETRHGLEDGDFVTFTEVKGMEGLNNSAPRKVTVKGPYSFTIGDVSGLGTYQGGGLFTQVKMPKFIDFEPLSEQIKKPEFLISDFAKFDRPQQLHIGVQALHKFAETKGHFPRPHHESDAQELLQIANGLASSQEEKVELDEKLLKELSYQALGDLNPLAAFFGGIVAQEVLKAVSGKFGPVHQWLYFDSLESLPTSVTRSEETCKPLGTRYDGQIAVFGKEFQDKIANLTQFLVGAGAIGCETLKNWAMMGLGTGPKGKIYVTDMDQIEKSNLNRQFLFRSKDVGKLKSECASAAAVAMNPELEGKIVTLKDRVGPDTEHIFNEEFWEGLDGVTNALDNVEARTYVDRRCVFFRKPLLESGTLGTKGNTQVVLPRITESYSSSQDPPEKSFPMCTLKSFPNRIEHTIAWARDLFQTYFVGPPEAVNMYLSQPNYIEQTLKQAGNEKQTLEHLRDFLVTEKPANFDDCIVWARNQFEAQYNNAIQQLLYNFPRDSTTSTGQPFWSGPKRAPTPLKFDSTNPTHLGFIIAGANLHAYNYGIKNPGVDKGYYRKIVDNMIIPEFTPKSGVKIQASDNDPDPNAEASGSSFDDNDEIKRLVEILPSPKSLEGFRLNPVEFEKDDDTNHHIDFITAASNLRAENYEITPADRHKTKFIAGKIIPAIATTTALVTGLVALELLKIIDGKDDIEQYKNGFVNLALPFFGFSEPIASPKTKYQGKQGEVTIDQIWDRFEVDDIPLQDFLKHFSDLGLEISMVSSGVSLLYASFYGPSKVKDRLPMKMSELVEHISKKPIPDHQKNVIFEVTAEDQTEQDVEIPAKSGLVRLSDPSVINVISCEGLQAPPQSSASFTHINLVLFLALIFMFLVLRRANQLVQHLSPFSALFGPSNSNISRNLSPALLAKREMATDISKKITDWVNPGDKSGEFKRQASVFRNLISKEAGAEFPPEKDRYHLYVSYACPWAHRTLIVRKLKGLEDIISYTSVHWHLGEKGWRFATPDEDIPGANTTPDPVHSSYSHLRDIYFANEPNYTGRFTVPVLYDKKTKRIVSNESSEIIRMFYYEFDDLLPAQYQKVDLFPPHLREQIDATNDWVYNDVNNGVYKSGFATTQEAYERNVTTLFASLDRIEKHLADSKSAYFFGDDITEADIRLFTTIVRFDPVYVQHFKCNIRDIRSGYPAIHAWLRRLYWDVPAFRETTQFEHIKKHYTKSHSQINPFGITPVGPTPDILPKDKEVNAVKH

SEQ ID NO: 47440 - protein, 414 aa, Oryza sativa
MAEQGAGEADAGGGEPPPAAVMTAAAEALAGQRSLPTPFLTKTYQLVEDPAVDDVISWNEDGSTFVVWRPAEFARDLLPKYFKHNNFSSFVRQLNTYGFRKIVPDRWEFANDCFRRGEKRLLCDIHRRKVVAAAAAAPPPPSPGMATAAAAVASGAVTVAAAPIPMALPVTRAGSPAHSSEEQVLSSNSGSGEEHRQASGSGSAPGGGGGGSASGGDMGEENERLRRENARLTRELGHMKKLCNNILLLMSKYAATQHVEGSAGISSIANCSGESSEAVPPPPPLPPAILDLMPSCPALATAAAAAGLAIDGEPDPSARLFGVSIGLKRTRDDAAAAADEDGGGEDQAEHGGADVKPEAADPHPAGGGGGSSTEASPESHPWPIYRPTPMYHAVRPTCNGPDRAGSDQDGSSSR

SEQ ID NO: 47441 - protein, 417 aa, Ralstonia eutropha JMP134
MMTLWPFVERHPRYADQALLERLVEPERVIQFRVAWTDDQNRVQVNRAFRVQHSSAIGPYKGGMRFHPTVNLSVLKFLGFEQTFKNALTTLPMGGGKGGSDFDPKGKSDAEVMRFCQALVTELYRHLGPDTDIPAGDIGVGAREVGFMAGMMKKLSNQSACVFTGKGLAFGGSLMRPEATGYGTVYFAQEMLHRRGMDFDGLRVLLSGSGNVAQYAAEKAIELGAKVLTLTDSGGVLHYPEGMTTEQLAEVMAFKNEERGRLSDFAARHGMKFEAGRTPWHVPADVALPCATQNELDGNDAETLLGNGVICVAEGANMPSTLEAVDRFVDAKILYAPGKASNAGGVATSGLEMSQNAMRLSWHHAEVDEKLHAIMKDIHQNCIHHGQKDGGYVNYVEGANIAGFVKVADAMLAQGVI

SEQ ID NO: 47442 - protein, 572 aa, Oryza sativa (japonica cultivar-group)
MSSPFSVPSLIMEEEGRFEAEVAEVEAWWGTDRFRLTKRPYTARDVALLRGTLRQSYASGDMAKKLWRTLRAHQANGTASRTFGALDPVQVAMMAKHLDTVYVSGWQCSSTHTSTNEPGPDLADYPYDTVPNKVEHLFFAQLYHDRKQREARMSMSRAERAHEPYVDYLKPIIADGDTGFGGATATVKLCKLFVERGAAGVHLEDQSSVTKKCGHMAGKVLVAVSEHVNRLVAARLQFDIMGVETVLVARTDAVAATLIQTNVDARDHQFILGATNPRLRNRSLAAVLSDAMSAGKNGRELQAIEDEWLATAQLKTFSDCVRDAIASLNATDADKQRKLQEWSAATSHDKCVPLEQARDIAAGLGVTSLFWDWDLPRTREGFYRFRGSVAAAVVRGRAFAPHADVLWMETSSPNIAECTAFAEGVRAASPGAMLAYNLSPSFNWDASGMTDADMSEFIPRVARLGYVWQFITLAGFHADALVTDTFARDFARRGMLAYVERIQREERSNGVETLQHQKWSGANFYDRVLKTVQGGISSTAAMGKGVTEEQFKGSWTGPGSESSSHVLAKSRM

SEQ ID NO: 47443 - protein, 450 aa, Oenococcus oeni PSU-1
MNNLEKASRLIDEENNYYARSARINYYDLVINHAHGATLIDVDGNEYIDLLASASAINVGHTNERVVKAISRQAQKLIHYTPAYFHHVPGIELSKRLAELAPGNSPKMVSFGNSGSDANDAIIKFSRAYTSRQYIVSYMGSYHGSNYGSQSLSGTSLNMTRKIGPMLPGVVHVPYPDLYRRYAGETEHDVAIRYFNAFKAPFESFLPADETACVLVEPIQGDGGIVKAPEEYMQLVYKFCHDNGILFAVDEVNQGLGRTGKMWGIQQYKDIEPDLMSVGKSLASGMPLSAVVGKKDIMQSLDAPAHIFTTSGNPVCAAASLATLNVIRDDHLVEKSAKDGEYAKQRFLEMQRHHPIIGDVRMWGLNGGIELVKDPKTKEAENDAATKVIYYAFAHGVVIITLAGNILRFQPPLVISHKQLDKALQVLDDAFTAVEQNKVEVPKDTGKIGW

SEQ ID NO: 47444 - protein, 525 aa, Ralstonia solanacearum
MTRLFRLCKIIFVILYHGLDQLALSGFKSRRIRALVWVLTLGRRQTRPRGERLRLALEQLGPIFVKFGQVLSTRRDLLPPDVADELAKLQDRVPPFDPKIAAAIVERSLGKPLSALFHRFDHHPVASASIAQVHFATLRGGPDDGREVAVKVLRPGMLPVIDSDLALMRDVATWMEKLWADGKRLKPREVVAEFDKYLHDELDLMREAANASQLRRNFAKSELLLVPEVFWDWCTSEVFVMERMHGVRVSHADELRAAGVDTHKLARDGVEIFFTQVFRDGFFHADMHPGNILVSVAPESLGRYIALDFGIVGALSEFDKNYLAQNFLAFFQRDYHRVALLHVESGWAPEETRVEELEGAIRACCEPYFDRPLGEISLGLVLMRLFQTSRRFNVEVQPQLVLLQKTLLNVEGLGRQLDPDLDLWKTAKPFLERWMHEQIGWRGLVDRLKIEAPQWANMLPDFPRLAHQILERHARDNGSAQTATLSALLAEQRRTNRLLSAALLFIGGFAVGIIATHVLAWLARH

SEQ ID NO: 47445 - protein, 380 aa, Campylobacter jejuni subsp. jejuni NCTC 11168
MKLEKILQDLEQNHNLRTLTPLKHENKFVYKQDHKLLNLVGNDYLYLASSKELKAEFLNTLKEQDLFFSSSSSRSLSGNFEIYEKLESFLKTKFKDKEILHFNSGYHLNISCIAALSSVSKTLFLTDKFIHASMIDGLRLGRADFFRFHHKDMNHLESLIQKHYENYENIIVLSEALFSMDGDFSDFKTLCELKRRYDKIKLYIDEAHSVGCFDEEGLGLVKKLALENEVDFLVFTFGKALASMGACIICDEKYKKFFINKARAFIYSTALPPINVAWTQFIFKKMPYFKKEREKLELLSTFFKSKLQEKNHIVLGDAYIICLLLGENKKALEISQKLQKAGFFAPAIKEPTVPKNTARIRFSLHAGLNTEELERIIELL

SEQ ID NO: 47446 - protein, 229 aa, Oryza sativa
MRIQCDACEAAAATVVCCADEAALCARCDVEIHAANKLASKHQRLPLDAALPAALPRCDVCQEKAAFIFCVEDRALFCRDCDEPIHVPGTLSGNHQRYLTTGIRVGFSSVCSANADHLPPPAPKGNSKPPASGIAAAAAPKPAVSAAAQEKGSPIGFKDLEWLDDIDLFHVQSPAKGGSTAAEVPELFASPQPASNMGLYKASGARQSKKPRVEIPDDDEDFFIVPDLG

SEQ ID NO: 47447 - protein, 409 aa, Mycobacterium avium subsp. paratuberculosis K-10
MVTNTDALRRRWEAVMMHNYGTPPVALASGEGAVVTDVDGNTYLDLLGGIAVNVLGHRHPAIIEAVTKQLSTLGHTSNLYATEPSLALAEELVALLGAGHEPAGHESGGTESAGTARVFFCNSGTEANEVAFKLSRLTGRTKLVAAQEAFHGRTMGSLALTGQPSKQAPFAPLPGDVTHVPYGDAEALAAAVDDGTAAVFLEPIMGESGVVVPPEGYLAAARDITARHGALLVLDEVQTGMGCTGTFFAHQHDGITPDVVTLAKGLGGGLPIGACLAVGPAADLLTPGLHGSTFGGNPVCAAAALAVLRVLASENLVRHAEVLGKSLHQGIEGLGHPLVDHVRGRGLLCGVVLTAPHAKDAEAAAREAGFLVNAAAPGVIRLAPPLIVTEAQIDGFIAALPGILDRAAA

SEQ ID NO: 47448 - protein, 583 aa, Glycine max
MEAKIAKALDRVALNLKRKRATRYAAHLSGASQPMLGHWSSFTSPTSRAVKRMRLGGYRNRLTNAGPHIGRSLARRFLNYKKSGRLERLMFYENGSWLDFPKDVVDLVKKDLEIKRAAVEIESHGYHLFFDFLRLHKMDLKTGLQQPIALIDEAGCCFFPEIYAASDEEPYNLSKQEGGKSPDSYASNEIKLHLEVEINGVDQSRLSECSGESNALVKGIQIDTKENCCQYDVEVEDSINKKDCGNVGEDIQQHQDIGLDAYTESVYGKLDLNSVQKMFLKGMCSFGSTDSDIVEIYHCSGASMQARWELFQKQAEITKKNHGEANIRYAWLASSKGELSTMMNYGLSHYGLSGSKCTYGIGVHLAAVTCPDASVRYCDVDENGVRHLALCRVIMGNMEILRPGTDQFHPSSCEYDNGVDAIECPQYYVVWNMNMNTHIYPEFVVSFKVSSDAEGHFCGSEGKNVSGVNSACQGPHGLLHSESSTVDNGKAPSMVASTPKVPKSPWMPFPLLLDAIRNQVPPKGMDVIKIYYEQFRSKHISRDDFVKMLRLIVGDGLLRTTITNLQFKIPSGGELKGSIKKEV

SEQ ID NO: 47449 - protein, 954 aa, Neurospora crassa
MDGQLSLLSPTSSSSTSHSRKRLTKKQRPPSANHRTSSSFNVESLRIDAQSLDSKRSASSLRQGPNCNQSPSLARTVSVPVSVPSNAPAHTKASDLSLPRSHTTRSQSANRPYNPTQTIPTNRFILSPASSSQPQTQSPPYPSAVASTTVTSSRNKDTSKQYDPLDSCIGSFDQNKLSTDELIGAPFDGNAILSRIEATKLSAAPAPTSTTTIAHSNNISPRRVAPPPPPPPPALSRSNTDSKAARSSKPSKSPKSTISNKTMGASSFRHSASFSSAEQLPPSEKPSKSESSSSSNKRHSGDGKESRVPGMLRKKSGFSGFMNSLVGSPKKPLISAPENPVHVTHVGYDSNTGQFTGLPKEWQRLISESGITEKDRREHPQILVDVLTFYKETTEKPQEDQQLEKFHDARATDFRSPPVTGTAPLVLQTGVGYAHGPMSPMISPPASPRFPQVGHEGSFENPRAPPPVPKGPGPLPAKDINLIPSRPAPKPPAISTRPLVPPASLPAKDSGIGMPPPGDEAPMPYLPPKDNVQHMYQEEHRNRSRSNSRTNGAAPFSPVQASPLHPIATANQTAAYQQQLLQHQQEQAMAQAQAAMSGQLSRAASKRQQPTPPTSQHQHPRQPDINGAPRMPQTQGAAPQASARPRHRPRQSNAIDVVASLKRICSDGDPREIYRGFTKIGQGASGGVYTGHERGSNRLVAIKQMNLEQQPKKDLIINEILVMKESSHPNIVNFIDSYLCAGELWVVMEYMEGGSLTDVVTFNIMTEGQIASVCRETLRGLQHLHSKGVIHRDIKSDNILLSMEGNIKLTDFGFCATINEAQSKRTTMVGTPYWMAPEVVTRKEYGRKVDIWSLGIMAIEMIEGEPPYLTESPLRALWLIATNGTPHIKDEQSLSPVFRDFLYFALKVDPEKRASAHDLLRHDFMNKCVDLSTLAPLVRAAREARAQEKARKGQ

SEQ ID NO: 47450 - protein, 446 aa, Shewanella oneidensis MR-1
MADSPNNLAHEHPSLEHYWMPFTANRQFKASPRLLAQAEGMYYTDINGNKVLDSTAGLWCCNAGHGRREISEAVSKQIRQMDYAPSFQMGHPIAFELAERLTELSPEGLNKVFFTNSGSESVDTALKMALCYHRANGQASRTRFIGREMGYHGVGFGGISVGGLSNNRKAFSGQLLQGVDHLPHTLDIQHAAFSRGLPSLGAEKAEVLEQLVTLHGAENIAAVIVEPMSGSAGVILPPQGYLKRLREITKKHGILLIFDEVITAFGRVGAAFASQRWGVIPDIITTAKAINNGAIPMGAVFVQDYIHDTCMQGPTELIEFFHGYTYSGHPVAAAAALATLSIYQNEQLFERSFELERYFEEAVHSLKGLPNVIDIRNTGLVAGFQLAPNSQGVGKRGYSVFEHCFHQGTLVRATGDIIAMSPPLIVEKHQIDQMVNSLSDAIHAVG

SEQ ID NO: 47451 - protein, 586 aa, Neurospora crassa
MMWSLLVSLALLCFGTVARAAVVTINWNVTWVWASPDGFGRPVIGINNQWPCPKLEANVGDTLIVNLHNGLGNQTTGIHWHGINQLQTPEMDGPSGVVQCPTPPGSSVQYKFVLDEPGTFWYHSHEKGQYPDGLRGPLIVQDPNDPYKGRYDEEIVLTVSDWYHSQSIPLVQNMLSPANTRFAPPFPDTILLNDKKDVKFNFVKGKTYRVRLINMSAFASAFLWIDSHPLTMIMSDSTYLQTETAYQLHASSAQRYDFLISAIDRDSGNYPILVALDINRDFRNQTLAPAFPHNQTAWLMMDENAPLTRPTNTIDVWRPADDTHFKPLDNLAMVPAYDHLVKLDFRFCLDANGYPRACLNGKPFISQKVPSLYTAATVGGNNTNPLVYGQINPVVVRKGDIVQLVINNQEAAGHPFHLHGHSFQILDRARPYAGDWPGRDVNYNPVPNRRDTVTVWSWSHAVLRFRADNPGVWLFHCHIEWHVEMGLTASFIEGPEQLRGKQFPADHLENCRVGGVPTRGNAAGNELDPLDTTGMLTISPTGYTGATWIPPPANTVSMTPGNSTSPLARRRAASRVQRRDTVFENS

SEQ ID NO: 47452 - protein, 338 aa, Haemophilus somnus 2336
MAILVTGGAGYIGSHTVVELLNHHFEIVVLDNLSNSSEVSLQRVQQITGKNITFYQGDILDREILQRIFSTHKIEAVIHFAGLKAVGESVKKPLHYYQNNVNGSITLLEEMLKAGIYNLVFSSSATVYGDPEIIPITETCKVGGTTNPYGTSKFMVERILQDAVSANPHLSVVILRYFNPVGAHESGLIGEDPNGIPNNLLPYISQVAVGKLPQLSVFGSDYDTHDGTGVRDYIHVVDLAIGHLKALEKHQNDPGCHIYNLGTGIGYSVLDMVKAFEKANDIQIPYKLVERRPGDIATCYSNPQKALEKLGWKTERDLTQMMKDTWNWQKNNPNGYKS

SEQ ID NO: 47453 - protein, 314 aa, Methanosarcina mazei Go1
MKKEWKGEKGAIKPIRALTFGEALFDTIKGTAHLGGAPLNLAAHLAKLGARTAVLTAVGKDELGKILLSRAEEMGVDTSYILIDEKRPTGTVTVELKYEGIPVFSINEGVAWDVITPDEKQFEALAGDEWDVFCFGTLAQRSEENRKTLKRLFQEIKTKHFFYDVNLRAEYYTEEWILSSLEHCTILKMNEEEAEAISGMLFDTIYKFRTLCRLLTDRYPEMSVICITKGPDGAAVYHDGVYEEVSASPIEVADTVGAGDAFSAGFLYAYLSGNGASKALSIATTLGTYVASKPGAVPEYSEELIEELKRYNKT

SEQ ID NO: 47454 - protein, 152 aa, Arabidopsis thaliana
MASKQLSREELDEKAKQGETVVPGGTGGHSLEAQEHLAEGRSKGGQTRKEQLGHEGYQEIGHKGGEARKEQLGHEGYQEMGHKGGEARKEQLGHEGYQEMGHKGGEARKEQLGHEGYKEMGRKGGLSTMEKSGGERAEEEGIEIDESKFTNK

SEQ ID NO: 47455 - protein, 888 aa, Vibrio parahaemolyticus RIMD 2210633
MDVVFLRGRTTMNEKYAALKSNVRMLGHLLGNTIRDAHGEEIFEKVETIRKLSKSAQAGNQADRESLIEEIKHLPDEQLTPVTRAFNQFLNLTNIAEQYHTISRHCEEHICEPDAINSLFSKLVQNDVSKLDTAQAVRDLNIELVLTAHPTEITRRTMINKLVKINECLSKLELSDLSSKERKKTERRLEQLIAQSWHSDVIRQQRPTPLDEAKWGFAVVENSLWEAVPDFLREMNDRLKSYLGEGLPIDARPVHFSSWMGGDRDGNPFVTHSVTREVLLLSRWKAADLYLNDINELISELSMTVSNDQVRELAGEDQHEPYRAILKQLRALLNETKDILDAKIHGQKLAVKAPLQKVEQLWDPLYACYQSLHECGMGVIADGSLLDTLRRVKAFGVHLVRLDIRQESTRHADVLSELTRYLGIGDYEQWSEQDKIAFLTNELASKRPLLPRDWEPSEPVKEVLDTCKIIALQPREAFGAYVISMARTASDVLAVHLLLQEAGCPYRMDVCPLFETLDDLNNAESVIKQLMSIDLYRGFIQNHQMVMIGYSDSAKDAGVMSAGWAQYHAMESLVKVAEDEGVELTLFHGRGGTVGRGGAPAHAALLSQPPKSLKGGLRVTEQGEMIRFKLGLPDVAVNSFNLYASAILEANLLPPPEPKQEWRDLMEVLSEVSCEAYRGVVRGEPDFVPYFRQATPELELGKLPLGSRPAKRNPNGGVESLRAIPWIFSWSQNRLVLPAWLGAGEAIQYSVDKGHQALLEEMCREWPFFSTRLGMLEMVYTKCNMEISRYYDQRLVEPQLQPLGDRLREQLQRDIKSVLNVENNENLMQSDPWGQESIRLRNIYVEPLNMLQAELLYRTRQTEEASANLEEALMVTIAGIAAGMRNTG

SEQ ID NO: 47456 - protein, 253 aa, Streptomyces avermitilis MA-4680
MADAPYKLILLRHGESEWNAKNLFTGWVDVNLNEKGEKEAVRGGELLKDAGLLPDVVHTSLQKRAIRTAQLALESADRHWIPVHRSWRLNERHYGALQGKDKAQTLAEFGEEQFMLWRRSYDTPPPPLADGSEFSQSDDPRYASIPPELRPKTECLKDVVNRMLPYWYDGIVPDLLTGRTVLVAAHGNSLRALVKHLDGISDEDIAGLNIPTGIPLSYELDTDFKPLNPGGTYLDPDAAAAAIEAVKNQGKKK

SEQ ID NO: 47457 - protein, 427 aa, Yarrowia lipolytica CLIB122
MSSVINLVNTIVGAGILAMPFALRQNSLFLGVFLIIMSGSLSGFGLFLQGRCAFYAPARQASFFALASQTYPSLSVIFDIAIAVKCFGVGVSYLIIVGDLMPQVVQSLFNPGDNTQFIVSREFWILASVAIVVPLSYLRKIDSLKYTSLVALISVGYLIVLVVAYYLFSDISSTRAPISLFKPAKISNVLSCFPIIVFAFTCHQNMFSIVNELQHRTAANINRVVATSISFSAFCYCLVGVTGYLSFGNIVSGNIVSMYPSSVATEIARFCIAFMVVLSYPLQCHPCRASLDHTYSWFQSSGFVKSLAHKVSWSRLPSSEEEMVHPTSGGQPGSMTTARFGIVTTIIVVASYITALTVESLELMLAFVGSTGSTSISFILPGLFAYKLIGADASNSEDWLKWSGLALCLYGVLVMIVSLGINIYLLL

SEQ ID NO: 47458 - protein, 250 aa, Lycopersicon esculentum
MGKCYPTVSEEYLKAVDKCKRKLRGLIAEKNCAPIMLRLAWHSAGTYDVCSKTGGPFGTMRFKAELQHGANNGLDIALRLLEPIREQFPTLSHADFHQLAGVVAVEVTGGPDVPFHPGREDKPEPPVEGRLPDATKGCDHLRDVFKKQMGLSDQDIVALSGAHTLGRAHKERSGFEGPWTANPLIFDNSYFTELLSGEKQGLLQLPSDKALLCDPAFRPLVEKYAADEDAFFADYAEAHLKLSELGFAEA

SEQ ID NO: 47459 - protein, 428 aa, Staphylococcus aureus subsp. aureus MRSA252
MNPLAQSLNEQLQQSNATAFAMLSDLGQNMFYPKGILSQSAEAKSTTYNATIGMATNKDGKMFASSLDAMFNDLTPDEIFPYAPPQGIEELRDLWQQKMLRDNPELSIDNMSRPIVTNALTHGLSLVGDLFVNQDDTILLPEHNWGNYKLVFNTRNGANLQTYPIFDKDGHYTTDSLVEALQSYNKDKVIMILNYPNNPTGYTPTHKEVTTIVEAIKALANKGTKVIAVVDDAYYGLFYEDVYTQSLFTALTNLHSNAILPIRLDGATKEFFAWGFRVGFMTFGTSDQTTKEVLEAKVKGLIRSNISSGPLPTQSAVKHVLKNNKQFDKEIEQNIQTLKERYEVTKEVVYADQYHSHWQAYDFNSGYFMAIKVHDVDPEALRKHLIDKYSIGVIALNATDIRIAFSCVEKDDIPHVFDSIAKAIDDLR

SEQ ID NO: 47460 - protein, 561 aa, GIBBERELLA ZEAE PH-1
MAAMDSSSPVPENPTPGQPPSPLPPGAASSKKGARFWLIFVAIALTTFLAALDTSIISTALPTIAADLGSDSLYVWIIDSYLLASTATIPIFAQAANIYGRRSLTLIAVCIFTLGSGLCGGAHNTAMMVGGRAVQGIGGGGVLTMSEIVVCDMVSIRERGMYAGIIGGVWAIAAVVAPVMGGAFAQNISWRWIFYINLPIAGVALVALGLFLKLTRPPSGTFKEQMARIDWGGSVLLIGSVTSIVLALSWGGSEHAWSDWETVVPLVIGLVALLAFFAYQGVPWLKEPTMPLRLFSNRTSSTLLAISFIHSLLLYWICYFLPVYFQAVKEASPTRSAVMLFPIACTSAPGGVAAGITITKTGKYRIWHFAGFVLMSIACGLFTLLDENSSTGRWVGFQILFGFGTGVVFTSTLPPILASLPDSDVATATGAWTFIRNFGSIWGVAIPAAVFNNHVNHAASDISDQGVRSLLVNGGAYEHATQYFLKTLESSPQLKDEVVQVYLNGLKVVWQVSIAFCLLGFLLCFFVRSLTLRDELNTEFGLQEEKGSGQIKSSEEGVVRD

SEQ ID NO: 47461 - protein, 697 aa, Desulfovibrio vulgaris subsp. vulgaris str. Hildenborough
MCGIAGIVSPGAPVASATLAAMTESLAHRGPDACGLFIRPSGAGSPHVGLGHRRLSILDLSDAGAQPMQSEDGAFTLVFNGEIYNYPDLRRDLEAAGHIFRSTSDTEAILRGYMAWGEGVVARLKGMFAFALWDERKRSLLLARDRFGKKPLHYAVTRQGTLLFASEPKALLAHPEFRPEPDAASLLHFLRYDYVPAPRSIYAGAAKLPPSHLMVWRDGRLEVRRYASLAFSGATGDRGVPLREAEAAVDALLDAAVQRRLASDVPLGVFLSGGLDSSTVLAYMTRHIPAHDIRTFAIGFDEASYDESAHAEAMARHAGSHHTMMRLPAARMLDLLDMVWTTQDEPMADASIIPTLLLCRFAREHITVALGGDGGDELFAGYDPVLADLPARCLDWLPPAALRLLQGIALRLPTGDANMSLGFKVQRFLSGLGAREVAARHQTWLGAFDDEGARAMLHPDLRAATRDVSPLDALDMLREECRDASRFDAMLHFYQRFYMCGSILTKVDSASMAVSLEVRSPFLDQDLADYVNRLPREHKLRGLTRKVLLRRLMRSRMPDALLKRPKKGFGLPLARWFRHELRPLVTAMLDPGRVAQGGLLDPVTVERMVRDHLSGRRDHRKEIWSALCVEAWRERYLHHSRATASDTIEFGTTPHGDGHLITAQAVPARSSAAINDSTNDSPSWAASPSRHRCNDSI

SEQ ID NO: 47462 - protein, 352 aa, Staphylococcus xylosus
YSTNDITQYTSASIFSEVGKQTEMFARFSTVAGERGAADAERDIRGFALKFYTDEGNWDLVGNNTPVFFFRDPKLFASLNHAVKRDPRTNMRSAQNNWDFWTSLPEALHQVTILMSDRGIPKGFRNMHGFGSHTYSMYNDKGERVWVKFHHRTQQGIENLQPDEAAKIIADDRESSQRDLFEAIENKDYPKWKTYIQVMTEEQARNHKDNPFDLTKVWYKGDYPLIEVGEWELNRNPDNYFQDVEQAAFAPTNIVPGLDFSPDKMLQGRLFSYGDAQRYRLGVNHWQIPVNQPKGVGVENICPFSRDGQMRILDNNQGGGTHYYPNSDGSFEDQPEFKKPGLKVEGEAYEYD

SEQ ID NO: 47463 - protein, 401 aa, Pseudomonas aeruginosa UCBPP-PA14
MTDNHIDVLINGCGIGGAMLAYLLGRQGHRVVVVEQARRERAINGADLLKPAGIRVVEAAGLLAEVTRRGGRVRHELEVYHDGELLRYFNYSSVDARGYFILMPCESLRRLVLEKIDGEATVEMLFETRIEAVQRDERHAIDQVRLNDGRVLRPRVVVGADGIASYVRRRLLDIEVERHPYPSPMLVGTFALAPCVAERNRLYVDAQGGLAYFYPIGFDRARLVVSFPREESRELMADTRGESLRRRLQRFVGDESAEAIAAVTGTSRFKGIPIGYLNLDRYWADNVAMLGDAIHNVHPITGQGMNLAIEDASALADALDLALRDACALEDALAGYQAERFPVNQAIVSYGHALATSLEDRQRFAGVFDTALQGSSRTPEALGGERSYQPVRSPSLEAPRG

SEQ ID NO: 47464 - protein, 149 aa, Staphylococcus epidermidis RP62A
MERTFLMIKPDAVQRNLIGEIISRIEKKGLKLVGGKFMQVPMELAEKHYSEHEGKPFYDKLISFITSAPVFAMVVEGENAVAVSRKIIGSTNPSEAAPGTIRGDYGLNLGRNIIHGSDSTESAQREVKLWFTSSEIADYKEPREDWLYE

SEQ ID NO: 47465 - protein, 296 aa, Solanum tuberosum
MATLTNFLLKPSPNLASITKISPSLYSNFPFEKSKQSIFKNLKTNKPLLITKATAAPDVEKKVAKSERVQKVNSMEELDEALKKAKNRLVVVEFAGKDSERSKNIYPFMVNLSKTCNDVDFLLVIGDETEKTKALCRREKIDKVPHFNFYKSMEKIHEEEGIGPDLLAGDVLYYGDSHSEVVQLHSREDVEKVIQDHKIDKKLIVLDVGLKHCGPCVKVYPTVIKLSKQMADTVVFARMNGDENDSCMQFLKDMDVIEVPTFLFIRDGEICGRYVGSGKGELIGEILRYQGVRVTY

SEQ ID NO: 47466 - protein, 354 aa, Staphylococcus xylosus
VTNDITQYTSASIFSEVGKQTEMFARFSTVAGERGAADAERDIRGFALKFYTDEGNWDLVGNNTPVFFFRDPKLFASLNHAVKRDPRTNMRSAQNNWDFWTSLPEALHQVTILMSDRGIPKGFRNMHGFGSHTYSMYNDKGERVWVKFHHRTQQGIENLQPDEAAKIIADDRESSQRDLFEAIENKDYPKWKTYIQVMTEEQARNHKDNPFDLTKVWYKGDYPLIEVGEWELNRNPDNYFQDVEQAAFAPTNIVPGLDFSPDKMLQGRLFSYGDAQRYRLGVNHWQIPVNQPKGVGVENICPFSRDGQMRILDNNQGGGTHYYPNSDGSFEDQPEFKKPGLKVEGEAYEYDSDL

SEQ ID NO: 47467 - protein, 535 aa, Arabidopsis thaliana
MGNCCGNPSSATNQSKQGKPKNKNNPFYSNEYATTDRSGAGFKLSVLKDPTGHDISLQYDLGREVGRGEFGITYLCTDKETGEKYACKSISKKKLRTAVDIEDVRREVEIMKHMPKHPNVVSLKDSFEDDDAVHIVMELCEGGELFDRIVARGHYTERAAAAVMKTIVEVVQICHKQGVMHRDLKPENFLFANKKETSALKAIDFGLSVFFKPGEQFNEIVGSPYYMAPEVLRRNYGPEIDVWSAGVILYILLCGVPPFWAETEQGVAQAIIRSVIDFKRDPWPRVSDSAKDLVRKMLEPDPKKRLTAAQVLEHTWILNAKKAPNVSLGETVKARLKQFSVMNKLKKRALRVIAEHLSVEEAAGIKEAFEMMDVNKRGKINLEELKYGLQKAGQQIADTDLQILMEATDVDGDGTLNYSEFVAVSVHLKKMANDEHLHKAFNFFDQNQSGYIEIDELREALNDELDNTSSEEVIAAIMQDVDTDKDGRISYEEFVAMMKAGTDWRKASRQYSRERFNSLSLKLMRDGSLQLEGET

SEQ ID NO: 47468 - protein, 384 aa, Arabidopsis thaliana
MKLVSFFLILSTFCLTTVNSEPQCHNFKSIISFGDSIADTGNLLALSDPTNLPKVAFLPYGETFFHHPTGRFSNGRLIIDFIAEFLGFPLVPPFYGSQNANFEKGVNFAVGGATALERSFLEERGIHFPYTNVSLAVQLSSFKESLPNLCVSPSDCRDMIENSLILMGEIGGNDYNYAFFVGKNIEEIKELVPLVIETISSAITELIGMGGKTFLVPGEFPLGCSVAYLSLYQTSNIEEYDPLTGCLKWLNKFSEYHDEQLQAELNRLQKLYPHVNIIYADYYNTLLRLAQEPAKFGFISRPLPACCALGGPFNFTLGRKRGTQVPECCDDPSKYVSWDGVHMTEAAYRLMAEGILKGPYAIPPFDWSCLSSEIKNTQNSLMNN

SEQ ID NO: 47469 - protein, 511 aa, Haloarcula marismortui ATCC 43049
MTCYAMSLRQRSTTASRRGSPYQRQMGPGVSGNAQNDAVPDSLVVVSNREPYSHEQDDDGEIQVQSAAGGLTSALDPVMQSRGGTWVAWGSGDADMAVADEGIVEVPPSDPAYDLKRVPLSDAAVQGYYYGYANQVLWPLCHEDTGRIWAEPAYWEQYRAVNEQFAEAVDTVADAGQPVWFQDYHLALAPRLVRERRPDATLLQFWHIPWPAPSVFRHCPHSDALLDGLLACDIIGFHTAGYAEQFLHCVDSAFPAATVDTDSGTVTRDGDRTRAVANPLGIDVGGVRDRARATDVASIRDTVLGGSRSDTSIRLALGVERLDYSKGIPERIEALAHLWDRRPDLRGDFTYVQKASRTREGIAAYRRYRADVVDAIERVNDRFGTDDWQPIVYTEANLDNETLAGLYRAAEVAVVTPHRDGMNLVAHEYPVACTDGDGALVLSELAGAATHLDGALTVNPHDIEAIADAIERALELDEAETSDRLSRLQHSVETLDSAEWVARQFSAGQSL

SEQ ID NO: 47470 - protein, 615 aa, ASPERGILLUS NIDULANS FGSC A4
MASVDPAHSRLHTVEEHVIIHDDPIDDDEEHEEDDAEMDPSVRACLEHQRKVDEFLSPLCLDEAVLYKLARRLSSVYRKLALESDQQFLPTPVSKLPSGLETGRYLAIDVGGSNLRVAFIELLGDTADPDMARTSASERPLKKAQTQRVKRTLEKAWPIQEHLKMDKAEDLFAWIGDCIAEVVAESLSSDATKNAVPEELEMGITFSFPMMQESLAEATLMPMGKGFAITSDLNLRNILLSGYERHTRRPDDEDQPSTKRRKLYALPKLKISAITNDAVATLASLAYAVKSLPNSRVAMGLIVGTGCNATIPMKLSALHEDKVKHVRRSDPETSGIIVNTEWTIYGVLPPLKELNIITKWDAELDASSARPGFQPFEYMTGGRYIGELIRLIFTDYLINVAGVSTAALPATLTQGYALTTSYISDKVARARSDEELTDELAHSLPPPSDTWQWDATSAGVLRTVARTVQRRSAGLVAAAVVGLLACAGEIELRLDSPQGSPQDSHAASPERDSITTLSAQLKSEGSASNGFRGPIVPIISPTPADWQSGPEELVVACTGGIIQHYPNFKEMCQQTIDRLIMRTGPQKSGKSVFLREASDGGVIGAGVLAGMVGNR

SEQ ID NO: 47471 - protein, 396 aa, Listeria innocua Clip11262
MRTKLMNMLQERKDEITQIRRHLHEHPELSFHEAETAKFIQDFYKGKDVEVATEVGNGHAVVVTIKGGKPGKTIALRADFDALPIEEQTDLPFKSKNPGVMHACGHDGHTAYLLVLADCLIQLKENIPGTIKIVHQHAEETPPGGAKSVVESGILDDVDQIFGIHVFPFGESGQVYYHSGYAMAGRTYFKLKIQGVGGHGSSPHMANDAIVAGAYFVTAIQTVVSRRLNPFDTGVITIGSFDGKGSFNVIKDAVELEGDVRYMNTENRDKIDAEIHRIVSGIEAMFGVSVELTYTNDYPPLYNDPAVTEQVVASLQKGLGEYLTDISMYDMLSGSEDFAYYLQKIPGVFFYIGAKPKNTPHAYFNHHPKFDIDEDALLVAAKSVADVVLDYFKLNG

SEQ ID NO: 47472 - protein, 392 aa, Cryptococcus neoformans var. neoformans JEC21
MTIAATSIPTTKYEAHYDPTKVIQHPEFQTLSEDAPELSDPKLNIACAYNPAHEIHMVKKPRFEPGPGEVTIHVRATGICGSDVHFWKHGHIGPTMIVTDECGAGHESAGEIVAVGEGVAQWQVGDRVAVEAGVPCGLASCDPCRTGRYNACPAVVFFSTPPYHGTLTRYHNHPAAWCHRLADNVSYEEGSLCEPLAVALAGLDRAGVRLGDPIAICGAGPIGLVTLLAAHAAGCTPIVITDLFPSRLEFAKKLLPTVKTVQIEKTAKPEEVAKQIKGAAGMQLSLAFDCTGVESSIRSAIFSVKFGGKVFVIGVGPSEQSYPFGYCSANEIDLQFQYRYNNQYPKAIRLVAGGLVDLKPLVTHRFALKEAVKAFHVAADPSQGAIKVQIRD

SEQ ID NO: 47473 - protein, 281 aa, Prunus mume
MAKDVEGAEHGEFAAKDYHDPPPTPFFDAEELTKWSFYRALIAEFVATLLFLYITVLTVIGYKSQSSGDQCGGVGILGIAWAFGGMIFVLVYCTAGISGGHINPAVTFGLFLARKVSLPRAVLYIIAQSLGAICGVGLVKAFQKTYYEEYGGGANELAAGYNKGTGLGAEIIGTFVLVYTVFSATDPKRNARDSHVPVLAPLPIGFAVFIVHLATIPITGTGINPARSFGAAVIYNKDKAWDDQWIFWLGPFIGAAIAALYHQYILRAGAIKALGSFRSNA

SEQ ID NO: 47474 - protein, 374 aa, Oryza sativa
MSLASHAVRSTRAFASSSIASARLTSLNRQINTSPFLGFRKMSSLPKTMKAVYIEKTGGTDVLQYKTDVPVPEPQEGEVLVKNDFIGINYIDTYFRSGVYKPPKFPYILGREGAGTIAAVGPNVPSDLTVGTRVGYMGQYAYAEYVPVAATYTIPLPDSIDSKTAAASILQALTAITLIRDAYPVQKGDWILVTAAAGGVGLWLCQLLRAIGARVIASASTEEKRNLAKENGAEFVLGYYEEDRDQFVKKVLEITGGEGVHAVFDSVGKATFDSSLATIRRKGSMISFGNASGPVEGFALARLSAKNLKLMRTTLFNFIVTREETLKAAEELWKLIEKDGLNVKIHEVYPLEDIVRATQDIEGRKTTGKLLLKP

SEQ ID NO: 47475 - protein, 587 aa, Streptococcus pyogenes M49 591
MAVEIIMPKLGVDMQEGEIIEWKKQEGDTVNEGDILLEIMSDKTNMELEAEDSGVLLKITRQAGETVPVTEVIGYIGAEGESVEVSSPAASDVNVARTTEDLEAAGLEVPKAPAQAASAAPKAALADDEYDIIVVGGGPAGYYAAIRGAQLGGKIAIVEKSEFGGTCLNVGCIPTKTYLKNAEILDGIKIAAGRGINLASTNYTIDMDKTVDFKNIVVKTLTGGVQGLLKANKVTIFNGLGQVNPDKTVTIGSQTIKGRNVILATGSKVSRINIPGIDSKLVLTSDDILDLREMPKSLAVMGGGVVGIELGLVWASYGVDVTVIEMADRIIPAMDKEVSLELQKILSKKGMKIKTSVGVSEIVEANNQLTLKLNNGEEVVAEKALLSIGRVPQMNGLENLNLEMDRNRIKVNDYQETSIPGIYAPGDVNGTKMLAHAAYRMGEVAAENAIHGNTTRKANLKYTPAAVYTHPEVAMVGLTEEQAREQYGDVLIGKNSFTGNGRAIASNEAHGFVKVIADAKYHEILGVHIIGPAAAEMINEAATIMESELTVDELLLSIHGHPTFSEVMYEAFADVLGEAIHNPPKRK

SEQ ID NO: 47476 - protein, 610 aa, Cryptococcus neoformans var. neoformans JEC21
MGFIQVLTNRRTGRATGITSASSTQINTLDGIQSTAPLESVGSTEEKKDVIPDEENVPPTAEPKQDFPDETAQRGVQNAEAITLTWSRTSLIVAYAFMFLLYFVNAFQSSITGNLSAYIVSGFSAHSLIPTIGIVSNVMSAATYMPLAKALNLWDRSYGFAFMTLLSTIGLILSATCKNIYVYCASQVFYSIGFVGMIFAIDVITADTSHLKDRGLAYAFTSSPYIITAFAGSAASEHFYESNWRWGFGTFAIVLPIVAVPLFLVLFLNKRKAQKAGLIVKVPSGRTFWQSVWYYIVEFDVLGVFLLAAGLVLFLLPFSIAASAADEWRQDYIIAMLVVGLVLLILFVLAERFAAPRPFIPYRVVLSRGVIGAGLLDFTYQVAYYCWYDYFTSYLQVVFGTSISVAGYISSIFDIVSGVWLLVVGYAIRKTGYFRWLLMFSVPLYLLGEGLMIYFRKPGGHFGWIIFCQVLVAFGGGTITICEQVSVLASASHNDAAAVLAFLGLFGYIGGAVGNSISGAIWTHTFPNALAKYLPAEALPDLDTIYEDLDTQLSFPIGSATRTGIIEAYAEAQEKMLIAGTAVMALSLIWIFVIKNINVAKIAQVKGLLF

SEQ ID NO: 47477 - protein, 325 aa, Prunus mume
MSSGAGKVVCVTGASGYIASWLVKLLLQGGYTVKASVRDPNDPTKTEHLLGLDGAQERLQLFKANLLEEGSFDSAVDGCEGVFHTASPFYHDVTDPKAELLDPAVKGTLNVLNSCAKSQSIRRVVLTSSIAAVAYNGKPRTPDVVVDETWFTDADFCKESKLWYVLSKTLAEDAAWKFVKEKGIDMVTINPAMVIGPLLQPTLNTSAAAVLNVIKGARTFPNASFGWINVKDVANAHIQAFEIPSASGRYCLVERVAHFSEVVRILQELYPGLQLPEKCADDKPFVPTYQVSKEKAKKLGVEFIPLEVSLKETVESLKEKNFVDF

SEQ ID NO: 47478 - protein, 399 aa, Ralstonia solanacearum
MTKQLQDAYIVAATRSPIGKAPKGSFKNLRPDDLLATVLKSAVAQVPDLDPKLIEDAIVGCAIPEAQQGLNVARIGALLAGLPNTVGGVTVNRFCASGLTAVAMAADRIRVGESDVMIAAGVESMSMVPMMGNSPSMSPDIFTRDENIGIAYGMGLTAERVAQQWKITRDAQDAFSLASHQKALAAQQAGEFKDEITPIEIIEKFPNLGTGAIDLKTRTLSLDEGPRADTSLEGLAKLRAVFANKGSVTAGNSSQTSDGSGALILVSEKILRQFNLTPLARFVSFAVRGVPPEIMGIGPKEAIPAALRAAGLTQDQLDWIELNEAFAAQSLAVIQDLGLDTGKINPLGGAIALGHPLGATGAIRAATVVHGLRRRNLKYGMVTMCVGTGMGAAGIFERV

SEQ ID NO: 47479 - protein, 556 aa, Cryptococcus neoformans var. neoformans JEC21
MSYRPSQQQQPGPSNFQQQQQHMLNPQNMAGPGRTSPMPTVPQVSQPNIGQPGSMRPGEGPTPAVAQANAGGQIQGNGAEGLGSLASDKGPDYVYFERKPGQFSEAVQGKAMGAKMKLELFYKEAVEGVVGRKERRTALEKQLAADALTPDSLKARQLINLGRRESNYLRLRRTRIGLDDFRTVKVIGKGAFGEVRLVQKADTGKIYAMKTLRKNEMFKKDQLAHVRAERDVLAESNSPWVVQLYYSFQDTQYLYLVMEFLPGGDLMTMLIKYDTFSEDVTKFYMAECILAIEAVHNLGFIHRDIKPDNILIDSLGHIKLSDFGLSTGFHKQHDSAYYQRLLGGGDVSGSNRHSQTAAGARNSVMVNAINLTMTSKQDIATWKANRRKLAYSTVGTPDYISPEIFLQQGYGKECDWWSLGAIMFECLVGYPPFCSENAHDVYKKIIDWRNYLFFPDDVHLSREAEDLIRRMLCEADRRYTVEQLKAHPFFYGVDWATIREIDAPFVPHLRSITDTSYFPTDELDQVPDIPVGAETGSDAKKDLAFLGYTFRRYEML

SEQ ID NO: 47480 - protein, 374 aa, Chlamydomonas reinhardtii
MALMMKSSASLKAVSLAALAAPSLCAPGKYDEELIKTAGTVASKGRGILAMDESNATCGKRLDSIGVENTEENRRAYRELLVTAPGLGQYISGAILFEETLYQSTASGKKFVDVMKEQNIVPGIKVDKGLVPCPTPTMSWCMGLDGWTSAAEYYKAGARFAKWRSVVSIPHGPSIMLPRLAYGLARYAAIAQNAGLVPIVEPEVLLDGEHDIDRCLEVQEAIWAETFKYMADNKVMLQGILLKPAMVTPGADCKNKAGPAKVAEYTLKMLAARAPPVPGIMFLSGGQSELESTLNLNAMNQSPNPWHVSFSYARALTNTVLKTWQASPRTVQAPRLAAQARKANSDAQQGKYDATTEGKEAAQGMYEKGKGYVY

SEQ ID NO: 47481 - protein, 361 aa, Candida glabrata CBS138
MVVHNPNNWHWVDKNCLGWAREYFQEKLVGLAAQEGDCQLSVTSVKTVDGDCEVSQRKGKVISLFDLKIVLAYDGELAGDKFEGTVSVPEVAFDSDPEDYQFVVTIFQETSKLNERVKPLIRERLVPQLRSAFQQFGPDLLTTHSSDIQVGADQVSSTFTRANQEASVPVAGASQAKAPASAQSTAKSSTQVQKPVEKATSGASASKPGTTSRVVNTSSMHLEPSFNVPAAELQRTFLDRMRLQQFSRSELRMLHSGSGSGAGGETLGEGDEYELFGGNVRTRVVSVGDSSIKLQWRLSDWTPEWFSELSIEFHESQEYHETKLKITWDKIPVGQEDRVRQNFEEYYVRAIKLTFGFGAVL

SEQ ID NO: 47482 - protein, 449 aa, Triticum aestivum
MYRAKRAALSPKVKRRVGKYELGRTIGEGTFAKVRFAKNTETMEPVAIKILDKEKVQKLRLVEQIRREICTMKLIKHPNVVRLHEVMGSKARIFIVLEYITGGELFDTIYTNGRLKEEEARKYFQQLINAVDYCHSRGVYHRDLKLENLLLDAAGNLKVSDFGLSALTEQVKADGLLHTTCGTPNYVAPEVIEDRGYDGAAADIWSCGVILFILLAGFLPFEDENIIALYKKISEAQFTCPSWFSTGAKKLITRILDPNPATRITIPQILEDPWFKKGFKPPVFDDKYETSFDDVYAAFGDSEDQHVKEETEHKPTSMNAFELISLNQGLNLDNLFEAKEEHKRETRFTSQCPPKEIISKIAEAARPLGFDIQKKNYKMRMENPKAGRKGNLNVATEVFQVAPSLHVVELKKAKGDTLEFQMFYRSLSTQLKDVVWKCGGEVEDNGTAA

SEQ ID NO: 47483 - protein, 407 aa, Agrobacterium tumefaciens str. C58
MGLILVHHDTGSPALYGAAAAAVAVRRNCGFMHLASRFDTKRHADAEQHVVASGGLAASGLCWFERLSGKPIEPVAPIEAVIDAAREADIVVPIHPAFLADANAIAGLFAAAQLQAVSVETIRIADGVHQFADDATGTVITWRDQFGRIRLDKPKAPTETVLTIALVGARSDHVDVYPAALASLADAADSLRLPLAINFIDPVGFDEAYAEQTLRPYAGILLPGGANMKNVAGQTAVAAFALENQLPIVGLCLGMQTMATAVAWRAFGRRNANLAEADPDVGIKTFLAMAGGTTADGGPLPEHRTGDQQTVPTAGTRLAGLIPHGTIVRCNHRYRLNPDLVRDMETHGLRVAARGVNGSVVDAIEVVGHPFYMGMQGHPELSSRPDAPHPLLVAFLEAALRRQSQAS

SEQ ID NO: 47484 - protein, 330 aa, Triticum aestivum
MATGVGEARGETVLVTGASGFIGSWTVRLLLARGYAVHAAVLNPDDKAETEHLLALAGGDEGRVRFFPCDLLDGAAMLAAARGCSGVFHLASPCTVDRVLDPQKELVVPAVEGTLNVLRAAKDAGGVRRVVVTSSVSAVVPCPGWPAGEVLDERCWTDIDYCDKNGVWYPASKTLAEKAAWKFAEENGLDVVVVNPGTVLGPMIPPRINASMAMFLRLLEGCTEEYKDFFIGPVHVEDVALAHITLFENPSASGRHLCVEPICHWSDFASKVAELYPDYKVPKFREDTQPGLVRAEAVPKKLMALGLQFTPLEKIIRDAVESLRSRGCIA

SEQ ID NO: 47485 - protein, 607 aa, Bacillus cereus G9241
MCGITGWVDWKEDLSNQHVILEKMANRIQHRGPDAEGFWFSPRAAFAHRRLIVIDPEGGTQPKTFRAGDYTYALTYNGEIYNFRELREQLRKCGHAFETHSDTEVLLHAYLEWKEDCVQHLNGIFAFALWDDQKQQLFLARDHLGVKPLFYTERNDSIIFGSEIKALLAHPSVPAEIDADGINEIFGLGLFRTPGCGVFKHIQEVRAGHSITFTRDKKVVQKYWNLESKVHTDSIEDTSSHILSILQDTVKRQLIADVPLVCMLSGGLDSSGITALAGKEFAAENKTLHTYSVDFVNSAKDFELTFARTGLDAPWVKRVSEHVGTSHHDIIVNAEELANHLFVPLHAKDLPSAGEMETSLYLLFCEMKKDATVALSGESADEVFGGYPWFHQEELLYVDKFPWLTNWKNTSPLLLNEVSNQCNLENYIDTRFQEAILEVPTLEGESKKSAKQRQMFYLFLTRFLPFLLDRKDRMSMAVGFEVRVPFCDYRLVEYLWNVPFNIKSIDNIEKGILRRALKPALPDDIRNRRKSAYPTSQDPHYLQTIRHLSLDMCSNKNNPIFSLINHSTLLAIANQSNKEINNFEARSAMEYMLQVNEWLKTYHIHIA

SEQ ID NO: 47486 - protein, 439 aa, Neurospora crassa
MGQTLSEPVVEKASATGGDERLIYGVSAMQGWRISMEDAHTTVLDLLANNPKEAKDHSQKLSFFGVFDGHGGDKVALFAGANIHDIIAKQDTFKTGNYEQALKDGFLATDRAILNDPKYEEEVSGCTACVGLITDEKIFVANAGDSRSVLGVKGRAKPLSFDHKPQNEGEKARITAAGGFVDFGRVNGNLALSRAIGDFEFKKSAELAPEQQIVTAYPDVMVHDLADDDEFLVLACDGIWDCQSSQAVVEFVRRGIAAKQDLDKICENMMDNCLASNSETGGVGCDNMTMIIVGFLRGRTKEEWYEEIAKRVANGDGPCAPPEYAEFRGPGVHHNFDDSDSGYDLEDNGNKGKPFGMGGYKGRIIFLGDGTEVLTDADDTEMFDNVDEDKDLASQVSKSPSSITTNDQDQKEQAAVAAAAADNSTQNAKKEETSSPAKA

SEQ ID NO: 47487 - protein, 172 aa, Prunus persica
HDEIDFEFLGNLSGDPYILHTNVFTQGKGNREQQFYLWFDPTKDFHTYSILWNPQSIIFSVDGTPIRQFKNLESKGIPFPKNQAMSIYSSLWNADDWATRGGLVKADWSKAPFTASYRNFNAQACTWSSGSSRCSSSSSSGSSSWLSQSLDATGQERIKWVQKNYMIYNYCT

SEQ ID NO: 47488 - protein, 413 aa, Arabidopsis thaliana
MMIAQELGIYVVESKGGAILCLLLSLLCLGTWPALMALLERRGRLPQHTYLDYSITNFLAAIFIAFVFGGIGESTHEAPSFITQLTQIQDNWPSVLFAMAGGVGLSIGNLATQYSLAFVGLSVTEVTAASITVVVGTTVNYFLDNGLNRADILFSGVGCFMVAVCLGSAVHSSNSADIKAKLGKLSGDCETVTPEECQRLFGVEEEEEEEKEMENVKEGSAAFLIALENKRAIKVLGKSMVVGLGITFFAGLSFSLFSPLFNLATNDQWHTLKQGVPKLIVYTAFFYFSLSCFVIAVALNISFLYKPVLDSPRSSFREYLSDWNGRGWALAAGLLCGFGNGLQFMGGQAAGYAASDAVQALPLVSTFWGIYLFGEYRRSSTRTYALLVGMLVMFTVAVGLLMASAGERETRFT

SEQ ID NO: 47489 - protein, 398 aa, Vibrio sp. Ex25
MAFALISEFEYPYKLWFDMNSCSPKDTQRQKELEMNVQALPMHRFIDHHGDLVGQLPNWADTETLVGFYRDMVLTRTYDNKAVALQRTGKLGTYPSHLGAEAIGIAVGRALKADDVFVPYYRDMPAMWCRGIGMEKNLQYWGGDERGSDFAPEGSPIPSRDLPFCVPIATQCTHAVGVASALKIQGNHEAALVMCGDGGTSKGDFLESINCAGAWNIPLVFVVNNNQWAISVPRSLQCAADFLSEKAQGAGIPGITVDGNDVVAVYDATKTALERARKGKGATLIEAVSYRLSDHTTADDATRYRKEDDVQTAWQYEPIARLKTYLLNQGAWSDEQEQQWLEYCKEQVELAVERYLSLPSQAPETGFDYLYESLPQELHAQRDELINKAMRMQGGKHG

SEQ ID NO: 47490 - protein, 128 aa, Glycine max
  misc_feature (11)..(11): Xaa can be any naturally occurring amino acid
  misc_feature (32)..(32): Xaa can be any naturally occurring amino acid
  misc_feature (57)..(57): Xaa can be any naturally occurring amino acid
  misc_feature (66)..(66): Xaa can be any naturally occurring amino acid
  misc_feature (81)..(81): Xaa can be any naturally occurring amino acid
  misc_feature (86)..(86): Xaa can be any naturally occurring amino acid
  unsure (1)..(128): unsure at all Xaa locations
KHVYLRELKEXLVGFLEPVLNRNERLYSSGNXPSGGVSFRVTGQKTRPHATVEVEIXEDMQLFIRXVKSTDFELYDDNYVXLEAMXFGERPLEDNMPDDLPDGGEVLGNLRHHEPAVLSNFLMCQTDL

SEQ ID NO: 47491 - protein, 551 aa, Staphylococcus epidermidis RP62A
MKRNWWKEAVAYQVYPRSFNDSNGDGIGDLPGLIEKLDYLENLGIDVIWLSPMYPSPNDDNGYDISDYKGIMSEFGTMNDFDQLLSSIHQRGMKLILDLVVNHTSDEHPWFIESKSSKTNAKRDWYIWADPKPDGSEPNNWESIFNGSTWEFDESTKQYYFHLFSKKQPDLNWENPDVRQAVFEMMNWWFEKGIDGFRVDAITHIKKNFEAGDLPVPDGKKFAPAFDVDMNQPGIQEWLQEMKDKSLSRYDIMTVGEANGVTPNDAEEWVGEENGKFNMIFQFEHLGLWSTGDTKFDVKSYKQVLNRWQKQLENVGWNALFIENHDQPRRVSTWGDDKNYWYESATSHATAYFLQQGTPFIYQGQEIGMTNYPFESIESFNDVAVKTEYQIVKKEGGDVNQLLDKYKMENRDNARTPMQWNNSINAGFTTGKPWFHVNPNYTEINVKQQLNDKFSILSYYKALIQLKKSDLIYTYGKFNMVDAENKQVFAYTRTFKNNTVLIVANLTNEVSELNLPFELDISSVDIKLHNYHLNDINLDHIKPYESFVVEI

SEQ ID NO: 47492 - protein, 400 aa, Listeria innocua Clip11262
MEVWIMKEKLFQKLDEKRDRMIEIRRYLHEHPELSFQEENTAKYIADFYKEMDCDVRTHVGGNGVVVTIDTGKPGKTLAIRADFDALPIQEETGLAFASKNPGVMHACGHDGHTAYMLILGETLIEMKEELTGKLVILHQHAEETPPGGAIQMIQDGALDGVDNVLGIHVMSTMKTGEVFYREGAIQTGRSYFKLKVQGQGGHGSSPHLANDAIVAASEFVVAVQTVISRRLNPFDVGSITIGSFDGKGSFNVIKDAVEIEGDVRSMSEEARNIIQKEITRIVSGIEAMFGVTCELDYKNDYPVLNNDEALTDFVVKSIKGAKIPEITDVVRCEPQPPSEDFAYYAKERPSSFFYVGAMPADGHFYPHHHPKFDINEDSLLIASKAMGACVVDYLKGENN

SEQ ID NO: 47493 - protein, 206 aa, Oryza sativa
  misc_feature (31)..(31): Xaa can be any naturally occurring amino acid
  misc_feature (118)..(118): Xaa can be any naturally occurring amino acid
  misc_feature (186)..(186): Xaa can be any naturally occurring amino acid
  unsure (1)..(206): unsure at all Xaa locations
WNQKNLFCGWYDADLSEKGNEEAKQAGKWLXEKGYTFDIAFTSVLKRAIKTLYNIQQELDLHWIPVQRHWRLNERMYGALQGKNKSETAAKYGEDQVKIWRRAYDIPPPELEESSEYXPRTDSKYKNLDPRVLPLTECLKDTVDRALPYWHDAIVPAIRSGQKVLIAAHGNSLRALIKYLDKVPDXEIVETHLPTGIPLVYELDAI

SEQ ID NO: 47494 - protein, 280 aa, Magnetospirillum magnetotacticum MS-1
MWTRPWRIARSPEPAAAPAPSAPLPNKGDTAWMLLSSVLVLLMTVPGLALFYGGLVRTKNMLSVLTQVFAIASIVCLLWVAYGYSLAFTNGGGLNDFVGGFSKAFLKGVDANSVAATFSNGVVIPEYVYICFQMTFAMITPGLIVGAFAERMKFSALIVFSILWVTLIYFPMAHMVWYWGGPDVFADAARKLAAAGGEANAAAKAEYDAVLGDAGLLFKWGALDFAGGTVVHINAGIAGLVGCLMLGKRIGYGRDLLAPHSLTMTTIGASLLWVGWFGLQ

SEQ ID NO: 47495 - protein, 285 aa, Glycine max
  misc_feature (69)..(70): Xaa can be any naturally occurring amino acid
  misc_feature (161)..(161): Xaa can be any naturally occurring amino acid
  unsure (1)..(285): unsure at all Xaa locations
MPPKPLDYGSINENVKKSQYAVRGELYLRASELQKEGKKIIFTNVGNPHALGQKPLSFRSPGLLLCAKXXFLLDDPNVGLLFPADAIARAKHYLSLTSGGLGAYSDSRGLPGVRKEVAEFILRRDGYPTDPELIYLTDGASKGVMQILNTIIRGQDDGVIXFFLVSTAVFYIQCPLKELPTTSYCQILVPVPQYPLYSATIALLGGTLVPYYLEETANWGLDVNELRQSVEQARFKGITVCVLSLQCYVSTLFLHQTHKTKHLHVWKMLNQCEGSESCHIESICC

SEQ ID NO: 47496 - protein, 868 aa, Cryptococcus neoformans var. neoformans B-3501A
MSPAPVAPIRQPRGPSTNSFSQAASPPSSTSAGNSGTAAATGPPAPDTDSLRRANTVSNPRHQPSASISASSAASSAFHGVPPSAASTSASSSRGVRGVSRFRSGSLSNALPDPGLVRRASGREVAKEVVLENEGEGEGIEAASWGKGLGRQSSLPSRRGLSLAQAANQGAPEPVPPPRPPRRIAINTTTVSGPTPPVSAHSASHSLSSLSMLHRPTYSSQLSQDEPIPSATSGGVSRTQSLRAQAKHSDVGGLGRSISLKAVGEHTYRQSTSQQASSGQSSGVISSPSSVAFSPPAPPPVSSTAALPPFQLPLPDSSYVSTTTGGADVKRHQSLTQGYGSSSRVRDRLERSPAITLEPREPRDTSGVRVRIDTRFEDEPPTSPIGPSVWSNTLSRTDDGWGSAPLNQSARNASQQLQDAFEAMTLGRNMMAPDGNAMLANDFDPRERLSLETDIMRHPQPSSNNTLPSGGQGLQRINSGAEEPSWVNKLVGGDSTPMVGNVMPRSSSALGWSERARQNETQRFPYGAYNMPFGNGFNMGLKPQMGQMGMPQMGPVGMNGMPMGMPMGMGPMNMGFPMGMNMGFGQMGANGFGQFAPGHPGQAQNQHPGQGYPPPSSSAAPTGHGMGAQDREVIELARKKGLNPATFNCKPQNARFFVIKSYTEEDVQKSLKHEIWSSTVLGNKRLDAAYRETANKGPIYLFFSVNGSRHFCGVAEMTTPVDETKTSKVWAQDKWKGIFEVKWIFVRDVPSAALRHIRLTNTPECKPITNSRDTQELPYEAGTEVLQIFLDHQTKSKTSLLQDFAYYEQLSVNRQNQNSPQNGNSQNQQPSSYQQFQQKPGNAIPPPMSTSHSGPTIPPVPAIPDKFR

SEQ ID NO: 47497 - protein, 392 aa, Triticum aestivum
ITRTFQKFSVACALTLGRVGSASPAASLLPPFRSPLHSPTYPSSPSESPPIPSRRRRKEHGEMSSGMGKVVCVTGGSGYIASWLVKLLLHRGYTVRATVRDTADPKKTLHLQALDGAKDRLHLFKASLLEEGSFDAAIAGSDCVFHTASPFYHNVKDPKAELLDPAVNGTLNVLRSCKKASIKRVIITSSMAAVAYNGKPRTPDVVVDETWFSSAEVCEKNEQWYVLSKTLAEEAAWKFANDNGFEIVTINPAMVIGPLLQPTLNTSAEAILKFINGSSSTYPNFSFGWINVKDVALAHILAYEVPSANGRYCMVERVAHHSEIVKIIHEMYPNFPVPEKCADDAPFVPIYQVSKDKIRSLGMELIPLETSLKETIESLREKGFVTSESSHL

SEQ ID NO: 47498 - protein, 458 aa, Bacillus subtilis subsp. subtilis str. 168
MTDDMTKDNINQQTLQRGLKNRHIQLIAIGGAIGTGLFLGSGKSIHFAGPSILFAYMITGIICFLIMRSLGELLLSNLNYHSFVDFVQDYLGDMAAFITGWTYWFCWISIAMADLTAVGLYTQYWLPGVPQWVPGLIALIILLIMNLATVKLFGELEFWFALIKVIAILALIVIGLVMIFKGFSTSSGVSSFTNLWSHGGLFPNGMHGFILSFQMVVFAFVGIELVGLTAGETENPEKVIPKAINNIPVRVLLFYIGALLVIMSIYPWDIINPSESPFVQVFVAVGIVGAASIINFVVLTSAASACNSAVFSTSRMVYSLAKDHNAPESMAKLTQRKVPRNALFFSAIVILIGVTLNYIMPEGVFTLITSISTVCFIYIWGITVICHMKYRKTRPELAKTNKFKLPLYPFTNYLILAFLAFVLVVLALAQDTRVSLFVTPVWFILLIVIYKVRKAKHQ

SEQ ID NO: 47499 - protein, 156 aa, Brassica napus
  misc_feature (148)..(155): Xaa can be any naturally occurring amino acid
  unsure (1)..(156): unsure at all Xaa locations
MALEEEEEIQNAPFCMLFCEEDSSGFDEEDEDSCDDKSDEKFPFFHLGFLDRCMSWEEDELSSLISKENEFRPSLTEEGVLDDEYLALCREKAVDWILRVKSHYGFSSLTALLAVNYFDRFITSRKFQTEFPWMSQLTALACLSLAAXXXXXXXXP

SEQ ID NO: 47500 - protein, 121 aa, Arabidopsis thaliana
KFQGGWELDESVEEAASRECLEEAGVLGFVQHQLGKWDFLSKSRGTYYEGLMFPMLVTEQLELWPEQHVRQRIWMNVTEAREACRDWWMKEALDVLVERLSSPMNQPKEEKTMSISIETMC

SEQ ID NO: 47501 - protein, 316 aa, Nicotiana tabacum
MASLKVPTSVPEPYEDAEQLKKAFAGWGTNEALIIQILAHRNAAQRKLIRETYAAAYGEDLLKDLDAELTSDFQRAVLLWTLSPAERDAYLVNEATKRLTSSNWVILEIACTRSSDDLFKARQAYHARYKKSLEEDVAYHTTGDFRKLLVPLLTAFRYEGEEANMTLARKEANILHEKISDKAYNDEELIRIISTRSKAQLNATFNHYLDQHGSEINKDLETDSDDEYLKLLSAAIECLKTPEKHFEKVLRLAIKGTGTDEWDLTRVVTTRAEVDMERIKEEYHKRNSVPLDRAIAGDTSGDYERMLLALIGHGDA

SEQ ID NO: 47502 - protein, 173 aa, Arabidopsis thaliana
MQPQTDVFSLHNYLNSSILQSPYPSNFPISTPFPTNGQNPYLLYGFQSPTNNPQSMSLSSNNSTSDEAEEQQTNNNIINERKQRRMISNRESARRSRMRKQRHLDELWSQVMWLRIENHQLLDKLNNLSESHDKVLQENAQLKEETFELKQVISDMQIQSPFSCFRDDIIPIE

SEQ ID NO: 47503 - protein, 338 aa, Haloarcula marismortui ATCC 43049
MLVRQLIGRTLSGTVTMCAGPFRSVLNMLHRPQWETAMIAPLPAVDMRVICAGHVNWDVTLHVDHLPKPDGEGRITDRSQSSGGSASNAAVALAGLDADPLVLGSVGRDDHGTMARRELAATGVETLLIESDEATAVKYLIVDENGDVAVLGNDGANEAFNASDLPAETLAEADHLHLTGQNPTTAATLARDAAAADVPVSFDPGRRLPYRDYSSVLSHAEILFCNDREADHARDSGLFETVPTVVVKHGDCGATAHIGDQTVTNAGYPIESVDTAGAGDAFAAGYLLASAQETDPERALAVANACGALAAQSSGARTTLDWESVWELVDSGQPPETA

SEQ ID NO: 47504 - protein, 433 aa, Ralstonia solanacearum
MSNVASPSTLQHAIPSYLPADNLGPWGIYLQQVDRVTPYLGSLARWVETLKRPKRALIVDVPIQMDDGRIAHFEGYRVQHNTSRGPGKGGVRFHQDVTLSEVMALSAWMSVKNAAVNVPYGGAKGGVRVDPRKLSSGELERLTRRYTSEIGIIIGPNKDIPAPDVNTNAQIMAWMMDTYSMNEGATATGVVTGKPIALGGSLGRREATGRGVFVVGSEAARNLGIDVKGARIVVQGFGNVGSVAAKLFQDAGAKVIAVQDHKGIVFNGAGLDVDALIQHVDHNGSVDGFKAETLSADDFWALECEFLIPAALEGQITGKNAPQIKAKIVVEGANGPTTPEADDILRDRGILVCPDVIANAGGVTVSYFEWVQDFSSFFWTEDEINQRLVRIMQDAFRAIWQVAQDNKVTLRTAAFIIACTRILQARQERGLYP

SEQ ID NO: 47505 - protein, 332 aa, Staphylococcus epidermidis RP62A
MIDYKSAGLTEEDLKKIYKWMDLGRKTDERLWLLNRAGKIPFVVSGQGQEATQIGMAYAMQKGDISSPYYRDLAFVTYMGISPLDTMLSAFGKRDDINSGGKQMPSHFSHKEKGILSQSSPVATQIPHSVGAALALKMDNKPNIATATVGEGSSNQGDFHEGMNFAAVHKLPFVCVIINNKYAISVPDSLQYAAEKLSDRALGYGMHGIQVDGNDPIAVYKAMKEARERALAGEGPTLIEAVTSRMTPHSSDDDDTYRTKEERDLLKQEDCNIKFKTALLDQGIINENWLSQLEKEHKELINEATKSAEAAPYPSEEEALTYVYEEGGQRND

SEQ ID NO: 47506 - protein, 264 aa, Salmonella typhimurium LT2
MNDSLKAQCGAEFLGTGLFLFFGIGCLSALKVAGASLGLWEICIIWGLGISLAVYLTAGISGGHLNPAVTIALWLFACFPKQKVLPYIIAQFAGAFGGALLAYVLYSSLFTEFETAHHMVRGSVESLQLASIFSTYPAAALNVWQAALVEVVITSILMGMIMALTDDGNGIPKGPLAPLLIGILVAVIGASTGPLTGFAMNPARDFGPKLFTWLAGWGNMAMSGGREIPYFIVPIVAPVIGACAGAAIYRYFIGKNLPCNRCEL

SEQ ID NO: 47507 - protein, 473 aa, Staphylococcus epidermidis RP62A
MSEKQYDLVVLGGGTAGYVAAIRASQLGKKVAIVEKSLLGGTCLHKGCIPTKALLKSAEVNHTIKNAHTFGIDVNHFKINFPKILERKDAIVKQLHEGVNQLMKHHHIDIYNGIGRIMGTSIFSPQSGTISVEYEDGESDILPNKNVLIATGSSPQSLPFIKFDHKQILSSDDILRLNTLPQRLAIIGGGVIGLEFASLMNDLGADVVVIEANDRVLPTESTQVASLLKEELTNRGVTFYENIQLTKDHFNQTDKGVTINISDEPVQFDKVLVAIGRKPNTNDIGLNNTQIKTSDAGHIITNGYQQTEDKHIYAAGDCIGQLQLAHVGSKEAIVAVEHMFDCSPIPINYDLIPKCVYTNPEIASIGKNLEQAKKAGIKAKSIKVPFKAIGKAIIEDVTQSKGFCEMVVNKDDDEIIGLNMIGPHVTELINEISLLQFMNGSSLELGLTTHAHPSLSEVVMELGLKANGQAIHV

SEQ ID NO: 47508 - protein, 306 aa, Pseudomonas fluorescens PfO-1
MLHTGQVIIDLVMAVDALPQIGGDVLAQSASFEAGGGFNVMAAAARNGLPVVYLGRHGNGRFGDLARQAMNAEGICIGIDQPAEHDTGICVALTDASAERSFISYIGAEGEVTTAELNSVTAEEGDYVYVSGYSLLHSGKAQALLDWTLALPKTINVVFDPGPLVESPDSPMMQALLPRIDVWTSNSVEALRFTGATDIETALDRLAVHLPQEVLMVVRDGPQGCWIHQCGERQHVPGFKVQAVDSNGAGDAHAGVFVAGLAQGLAAHEAARRANAAAALAVTRWGPATAPGTAEVDVLISKKCTD

SEQ ID NO: 47509 - protein, 361 aa, Zea mays
MAPSSYEMAASTLLCGEDSSSILDLEAGGQEEEEEVLLARSRTRGEPSVVFPVPSEDCVAGFVEAEAAHMPREDYAERLRGGGTDLRVRTDAIDWIWKVHAYYGFGPLTACLAVNYLDRFLSLYQLPEGKSWTTQLLSVACLSLAAKMEETYVPPSLDLQVGDARYVFEAKTVQRMELLVLSTLRWRMRAVTPFSYIDYFLHRLKDGGAPSRRAVLRSAELILRVARGTCCLGFRPSEVAAAVAAAVAGEEHAVDIDKACTHRVHEERVSRCLEAIQATVALLAPAQPLKAEGPSSGRSRASSSSATVPRSPTGVLDAGCLSYRSDDAAAAAAASHASSAWRDEDGDCSPAVCSKRRKTSR

SEQ ID NO: 47510 - protein, 380 aa, Synechococcus elongatus PCC 6301
MTVASSAVASALDAPKLGLPVTIITGFLGSGKTTLLNHILTNQQGVKTAVLVNEFGEIGIDNELIVSTSEDMVELSNGCICCTINSDLMDAVYRVLERPEKIDYLVVETTGLADPLPVALTFLGSELRDLTRLDSIVTVVDAENYSLDLFNSQAAYNQLLYGDIILLNKCDLVSESRLQELEAKIREIKADARLLRTTQAQVPLPLILSVALFESDRYFDSRDHSDCDHDHGHCTHEAHDHHEHNHHDHSACDHDHGHCEHDHDHHHEHAANHLEIDGFTSLSFQSDRPFAIRKLQHFLDNQLPTSVFRAKGILWFDESAKRHIFHLSGKRFSIDDSEWTGPKRNQLVLIGQGLDHAELQQQLEACLTLPSTTRGKGFGR

SEQ ID NO: 47511 - protein, 532 aa, Listeria monocytogenes str. 4b F2365
MTKYIFVTGGVVSSIGKGITAASLGRLLKNRGLSVTIQKFDPYINVDPGTMSPYQHGEVYVTDDGAETDLDLGHYERFIDINLNKYSNVTTGKVYSEVIKKERRGDYLGGTVQVIPHITNELKDRVFRAARMTNSDIIITEIGGTVGDIESLPFLEAIRQIKSDVGAENVLYIHTTLIPYIKAAGEMKTKPTQHSVKELRSLGIQPNIIVVRTEQPVSQEMKDKIALFCDIKASEVIESRDEETLYNVPLSLQKQKMDDIVLEHLQLEAPQAEMTDWKNLVHRVKNLSKKVRIGLVGKYVSLQDAYLSVAEALRHAGYDHDAEIEIDWIDSEKVTKENVAEIMKDVDGILVPGGFGDRAIEGKIAAIEYARVNKVPYFGICLGMQLATVEFARNVLGLEGAHSAEIEPETKHNIIDLLPEQKNIENMGGTLRLGLYPARIKQGTKAEAAYGTTLVEERHRHRYEFNNEYREQMEEAGMIVSATSPDGRLVEVVELADHPWFVACQYHPEFISRPNRPQSLFKDFVGAALNNK

SEQ ID NO: 47512 - protein, 324 aa, Burkholderia vietnamiensis G4
MKTMKPRIVAYKPLPDDVLVYLREHAEVIRADGADALADALGEADGAIGASLKITPQMLDRAPRLKAWSTISVGYDNFDVADLTRRGIVLAHTPDVLTESTADTVFSLILASARRVVELAEWVKAGHWQRSIGPELYGTNVQGKTLGIVGLGRIGGAVARRAALGFRMQVLYTNRSAHAEAEQQYGARRVTLDELLAQADFVCLQVPLSPQTHHLIGAAEFAKMKRGAILINASRGPVVDEAALIDALRAGTIRGAGLDVFEKEPLSADSPLLRMSNVVALPHIGSATHETRHAMARCAAQNLVGALAGTLRTNLVNPDALAHA

SEQ ID NO: 47513 - protein, 64 aa, Ceratopteris thalictroides
ARGPVGVEGLLTTKWVLHGKGQIVDGDNGVVYQHKELPCEGMTQAAKGSLCNGSAPKLSCNVAA

SEQ ID NO: 47514 - protein, 68 aa, Oryza sativa
MISCFSHVNILLFEMVPAAQARECETPSNEFKGICMMVANCANVCLTEGFSGGKCSGFRRRCMCTKDC

SEQ ID NO: 47515 - protein, 101 aa, Carica papaya
  misc_feature (5)..(5): Xaa can be any naturally occurring amino acid
  misc_feature (7)..(7): Xaa can be any naturally occurring amino acid
  misc_feature (11)..(11): Xaa can be any naturally occurring amino acid
  misc_feature (15)..(15): Xaa can be any naturally occurring amino acid
  misc_feature (41)..(41): Xaa can be any naturally occurring amino acid
  misc_feature (46)..(47): Xaa can be any naturally occurring amino acid
  misc_feature (52)..(52): Xaa can be any naturally occurring amino acid
  misc_feature (57)..(57): Xaa can be any naturally occurring amino acid
  misc_feature (64)..(64): Xaa can be any naturally occurring amino acid
  misc_feature (67)..(69): Xaa can be any naturally occurring amino acid
  misc_feature (76)..(77): Xaa can be any naturally occurring amino acid
  misc_feature (79)..(79): Xaa can be any naturally occurring amino acid
  misc_feature (82)..(82): Xaa can be any naturally occurring amino acid
  misc_feature (91)..(92): Xaa can be any naturally occurring amino acid
  misc_feature (95)..(95): Xaa can be any naturally occurring amino acid
  unsure (1)..(101): unsure at all Xaa locations
GYTQXGXVDIXRPPXLASKTGRWKACAFLVGNEAFERMALXGIASXXVNYLXTQLHXDPVSSVXNVXXXSGSVWIXXIXGAXIADSDLGRXXTFXISSVIY

SEQ ID NO: 47516 - protein, 651 aa, Agrobacterium tumefaciens str. C58
MVDDFHFREKIFHFDHERIPERVVHARGYGAHGYFETYDSLATHTKADLFQRAGERTPAFVRFSTVAGNKGSADLARDVRGFAVKLYTKEGNWDLVGNNIPVFFIQDAIKFPDLVHAAKQEPDRAFPQAQTAHDTFWDFISLTPESMNMVMWIMSDRTIPRSFRFMEGFGVHTFRFINAKEQSTFVKFHWKPKLGLQSVAWNEAVKINGADPDFHRRDLWTAIQSGNFPEWELQVQLFDQDFADSFDFDVLDPTKIIPEEILAPKPVGRLVLDRMPDNFFAETEQVAFMTQNVPPGIDFSNDPLLQGRNFSYLDTQLKRLGGPNFTHLPINAPKCPFAHFQQDGHMAMRNPTGRANYQPNSFGEGQRESPTRGFQHFAAEEQGVKARLRPESFADHYSQARQFYISQTPPEQRHIASALTFELSKVETVEIRERMVSHLLNIDETLATTVAQKLGLQTMPEPANTAIPTRQDLEPSPALSIVERGPKRFEGRKLGILITDGVDAKLLKGLTQAVTAEKAVFEFIAPKVGGVTASNGTLIEAHHMIDGGPSVLFDAVALLTSEAAIAELTEEATARDFVADAFQHCKFIGYDRSALPLLEIAGIADAMDEGVLPLPGEEGLAAFVAELGKLRVWAREPSLKLGKASVPVNKE

SEQ ID NO: 47517 - protein, 404 aa, Streptococcus pneumoniae R6
MKEYNKSSKLEHVAYDIRGPVLEEAMRMRANGEKILRLNTGNPAEFGFTAPDEVIHDLIMNARDSEGYSDSKGIFSARKAIMQYCQLKKFPNVDIDDIYLGNGVSELIVMSMQGLLDNGDEVLVPMPDYPLWTAAVSLAGGNAVHYICDEAVEWYPDIDDIKSKITSNTKAIVLINPNNPTGALYPKELLLEIIEIARQNDLIIFADEIYDRMVMDGHVHTPVASLAPDVFCVSMNGLSKSHRIAGFRVGWMVLSGPKTHVKGYIEGLNMLSNMRLCSNVLAQQVVQTSLGGHQSVDELLLPGGRIYEQRNFIYNAIQDIPGLSAVKPKAGLYIFPKIDRNMYRIDDDEQFVLDFLKQEKVLLVHGRGFNWQEPDHFRIVYLPRVDELAQIQEKMTRFLKQYRR

SEQ ID NO: 47518 - protein, 607 aa, Bacillus cereus ATCC 10987
MCGITGWVNWNKDLSNEHVILEKMAHSIQHRGPDAEGFWFSPRAAFAHRRLIVIDPEGGAQPKTFRAGDYTYALTYNGEIYNFRELREQLRKCGHTFETHSDTEVLLHAYLEWKEDCVQHLNGIFAFALWDDQKQQLFLARDHLGVKPLFYTERNDSIIFGSEIKALLAHPSVPTEIDADGINEIFGLGLFRTPGCGVFKHIEEVRAGHSITFTRDKKVVTKYWNLESKAHTDSTEDTASHILSILQDTVKRQLIADVPLVCMLSGGLDSSGITALAGKEFAAENKTLHTYSIDFVNSAKDFELTFARTGLDAPWVKRVSEHVGTSHHDIIVNAEELANHLFVPLRAKDLPSAGEMETSLYLLFCEMKKDATVALSGESADEVFGGYPWFHQEELLYVDKFPWLTNWKNTSPLLLHEVSNQCNLEEYIDTRFQEAILEVPTLKGESKKSAKQRQMFYLFLTRFLPFLLDRKDRMSMAVGFEVRVPLCDYRLVEYLWNVPFNIKSIDNIEKGILRRALKPALPDDVRNRRKSAYPTSQDPHYLQTIRHLSLDMCSNKNNPIFSLINHSTLLAIADQSNKDINNFEARSAMEYMLQVNEWLKTYHIHIA

SEQ ID NO: 47519 - protein, 487 aa, Haloarcula marismortui ATCC 43049
MSWKDTAEPLLVRMPAVQRPEGHVPFKRKLTWTGGVLLLYFFLTNVKLFGLDIDASQQVFGRFSSILASGQGSIMQLGIGPIVTASIVLQLLGGADLLGLNTQDDPRDQILYQGLQKLLVLVMICLTGLPMVFAGGFLPADTAVANSLGIGTAGVQWLIFAQMFVGGVLILFMDEVISKWGVGSGIGLFIVAGVSQRLVGGLLTAPFLGNSEGIIYTWYLFITGERGTGPVLAADGLQTVLLQGELLGLFTTVLIFAVVVYAESVRVEIPLSNARVKGARGRFPVKLIYASVLPMILVRALQANIQFLGRILNAQLGSMPAFLGTYANGQPTGGLFYFLAPIQSRGDWMWWLEGTAQPVWQILTRVGIDLFVMLVGGAVFAVFWVETTDMGPEATAKQIHNSGMQIPGFRQNVGVIEKVLERYIPQVTVIGGALVGLLAVMANMLGTIGGVSGTGLLLTVSITYKLYEEIAEEQLMEMHPMMRQMFG

SEQ ID NO: 47520 - protein, 185 aa, Polytrichum juniperinum
MSEQSDAAQSYVDAAEETVNRLPASQPAPNSDQYTKPVSQRFLTKDKTVHQLLGGGRAADSALWRDKYLSIGTLVGSTVIWFLLEKSGYTFLTLLCNILMFGVDILFVWANVAALLHRNGPPVPELSLSEEFVTNIARSVRIELNKAMGVARDVALGKDFKLFLKVIALLWVVSTVTSWFNFLTC

SEQ ID NO: 47521 - protein, 396 aa, Helianthus annuus
MALRMSPVTLQREIYPSYTFHQSKNLRSPKFAMASTIGSSTPKVESTKKPFTPPREVHLQVTHSMPPQKIEIFKSIEGWAEDNILVHLKPVEKCWQPQDFLPEPASDGFEEQVKELRARAKEIPDEYFVVLVGDMITEEALPTYQTMLNTLDGVRDETGASPTPWAIWTRAWTAEENRHGDLLHQYLYLSGRVDMRQIQKTIQYLIGSGMDPRTENSPYLGFIYTSFQERATFISHGNTARHAKDYGDLKLAQICGTIAADEKRHETAYTKIAEKLFEIDPDGTVLAFADMMRKKISMPAHLMYDGRDDDLFDHFSAVAQRLGVYTAKDYADILEFLVGRWKVADLTGLSGEGRKAQDYVCGLPSRIRRLEERAAARAKEGPSIPFSWIFDREVKL

SEQ ID NO: 47522 - protein, 400 aa, Oceanobacillus iheyensis HTE831
MGYYDQSYRKKKRKSTWIVPLLTGIILGGIVMLVVVPDIFLNHEDGRDTNQATSTDQTSPEIESSPNVQPLQVDVSTQLTDVVSEVTPAVVGITNLQRGNDFWSQEEGVEAGTGSGVIYKLEGDTAYVVTNHHVIEGADTVEVVMHDETHIEAEIIGSDIFTDLAVLRMDGSEVDTVIEMGTSSTIKVGEPAIAIGNPLGLYLSSTVTQGVISGKERTIPMDFDMDGRADWQAEVIQTDAAINPGNSGGALININGHLIGINSMKINEDAVEGIGFAIPIDSALPVIEELETTGEVTRPYLGVEIYSLEELPQYEWRNSLNLPQEVTGGVYVWTVERLSPADKAGLQELDVIVEMDGEPIHNMIDLRKILYQEKEIGDEVELTIYRDGRQMNTTITLGSQ

SEQ ID NO: 47523 - protein, 396 aa, Helianthus annuus
MAIRINTATFQSDLYRSFAFPQPKPLRSPKFAMASTIGSATTKVESTKKPFTPPREVHQQVLHSMPPQKIEIFKSMEGWAEDNILVHLKPVEKCWQAQDFLPDPASDGFMEQVEELRARAKEIPDDYFVVLVGDMITEEALPTYQTMLNTLDGVRDETGASPTSWAIWTRAWTAEENRHGDLLHQYLYLSGRVDMRQIQKTIQYLIGSGMDPRTENSPYLGFIYTSFQERATFISHGNTARHAKEHGDVKLAQMCGIIAADEKRHETAYTKIVEKLFEIDPDGTVLAFADMMRKKISMPAHLMYDGRDDNLFENFSAVAQRLGVYTAKDYADILEFLVGRWKVADLTGLSGEGRKAQDYVCGLAPRIRRLEERNSARAKESVNVPFSWIFDREVKL

SEQ ID NO: 47524 - protein, 356 aa, Vibrio sp. Ex25
PDPCLFPLESLNRNLASSGRKMGPDKLLDNLPPGAESLRRLVAQRYIHHGISLTHDDVVITSGALEALNLSLQAVTRPGDTVVVESPTFYGALQAVERLGLKAIEISVDDESGHSLEQIEAAFANEDVRACWLMTNFHNPTGASLSDEHKRYIVELANRYDVYLIEDDVYSELYFSDKRPNSLKSFDEQERVLHCGSFSKSLCPGYRLGWVVNKRFNETIQKLQLISTLSGSAPIQQGVAHYLQNDSYDNHLRKLRKTLQHRQADFVDLLAKHIPKEVTYQRPDGGYFLWLKLPDGISSKAVYQALLSEHVTVAYGKLFSISDQYENYLRLNASLPLETSLERAIKRLGDLLRELL

SEQ ID NO: 47525 - protein, 114 aa, Forsythia x intermedia
NEVIKPTIEGFRSLIRSCTKAKTVKRIVFTSSAGTVNVEEHQKSVYDETDYSDLNFIYSKKMTGWMYFVSKILAEKVAWEAAKENSIGFISIIPTLVVGPFIMPTFPPSLITAL

SEQ ID NO: 47526 - protein, 645 aa, Chlamydomonas reinhardtii
MLPASLQRKAAAVGGRGPTNQSRVAVRVSAQPKEAPPASTPIVEDPESKFRRYGKHFGGIHKLSMDWLDSVPRVRVRTKDSRQLDDMLELAVLNERLAGRLEPWQARQKLEYLRKRRKNWERIFEYVTRQDAAATLAMIEEANRKVEESLSEEAREKTAVGDLRDQLESLRAQVAQAQERLAMTQSRVEQNLQRVNELKAEATTLERMRKASDLDIKERERIAISTVAAKGPASSSSSAAAVSAPATSATLTVERPAATTVTQEVPSTSYGTPVDRAPRRSKAAIRRSRGLESSMEIEEGLRNFWYPAEFSARLPKDTLVPFELFGEPWVMFRDEKGQPSCIRDECAHRGCPLSLGKVVEGQVMCPYHGWEFNGDGACTKMPSTPFCRNVGVAALPCAEKDGFIWVWPGDGLPAETLPDFAQPPEGFLIHAEIMVDVPVEHGLLIENLLDLAHAPFTHTSTFARGWPVPDFVKFHANKALSGFWDPYPIDMAFQPPCMTLSTIGLAQPGKIMRGVTASQCKNHLHQLHVCMPSKKGHTRLLYRMSLDFLPWMRHVPFIDRIWKQVAAQVLGEDLVLVLGQQDRMLRGGSNWSNPAPYDKLAVRYRRWRNGVNAEVARVRAGEPPSNPVAMSAGEMFSVDEDDMDN

SEQ ID NO: 47527 - protein, 391 aa, Glycine max
SYVGPPPPFISIGTQYTGFNSLRAEMNTFSHVPPGFRFHPTDEELVGYYLRKKVASKRIDLDVIKDVDLYKIEPWDLQELCKIGTDEQSDWYFFSHKDKKYPTGTRTNRATKAGFWKATGRDKAIYSKHCLIGMRKTLVFYKGRAPNGQKSDWIMHEYRLETNENGTTSQEEGWVVCRVFKKRMTTMQKVGEYDQSPCWYDEQVSFMQDLESPRRSISLPYASYHHHHHPSCKPELMELQYNNIPHDAFLQLPQLESPKVTQSACSVVPYGYENNNNNNNNNNGSTLQFSSLTQEEQLQYCNNQQSHHSLYGSNDHAVDQVTDWRVLDKYVASQLSHNNQDVVSKETSYSNAPIFNVTEQVSVVANGSKKEQVSQEYASTSTSSYQIDLWK

SEQ ID NO: 47528 - protein, 371 aa, Forsythia x intermedia
METDALPLPATTVCVTGASGFIGSWLVMRLLERGYFVRATARDPENKQKVKHLLELPRADTNLTLWKADMTVEGSFDEAIQGCEGVFHVATPMDFESKDPENEVIKPTIEGFLSLIRSCTKAKTVKRIVFTSSAGTVNVEEHQKSVYDETDYSDLNFIYSKKMTGWMYFASKILAEKVAWEAAKENSIGFISIIPTLVVGPFIMPTFPPSLITALSPITGNEAHYSIIDQCQYVHLDDLCEAHIFLYEYPNAEGRYICSSHDATIYDVAKMIRDKWPKYDIPTEFEGIGKDIPVVSFSSKKLIGMGFTFKYTLEDMYRGAIETCREKGLLPYSTRNQANREKKELLLNLKKFHGHDQEELPANGKEKHTNG

SEQ ID NO: 47529 - protein, 612 aa, Oceanobacillus iheyensis HTE831
MNKVGFFRSIQLKFIIIYILLLIIAVQVIGSFFTDRLNEELTRNFKTTVGERVEMLSHNLEQAFARDRSEESGTIESLEEEIRRIINDINRGNASTTINVVDNQSRVRGTNVLDDQNQIGQKLAHPMVRDALLFNSTDDSIFYEKDTDSRVYVYVKPILGEDNMAVGAIFYKSSLEEVYGQIEDINNIFLQGSILAITISAIIGILVARTITKPIMEMREQALIMANGDFTQKVNVYGRDEIGQLAETFNDLNSRLKHSYATIEEERRKLSSILANMSDGVIATDNDGSVTLMNDAAAKLIGENPEDLIGDSVIDVLHLEGKEIDLSELHSNGSMIIDFSNEDTPFLIRANFSTVVDEEEEVTGFITVISDVTEQQKMEQERRDFVSNVSHELRTPLTTMKSYLEALSDGAWENKEIAPRFLDVTQKETNRMIRMVNDLLQLSKMDSDELPMHKQREEFTSYLYQVLDRYEMNKPESIHMEKNIPNTKAYVWMDRDKITQVLDNVITNAIKYSPDGGKIRVKLDIRRHYLLVSIQDQGMGIAYDKLDKIFERFYRVDKARNRKLGGTGLGLAITKELVEAHHGQIWAQSSEGKGTTILFTLPLMSSKRGDVR

SEQ ID NO: 47530 - protein, 267 aa, Methylococcus capsulatus str. Bath
MSRLTSTFQVLRHANRKALIPFITAGDPEPGFTVPVMHAMVEAGADVIELGVPFSDPMADGPVIQKASERALVHHMSLGKTLDLVAEFRRADRTTPIVLMGYLNPVECMGYQRFVDRAKDAGVDGVLTVDMPPEEAGEFVPMLHRAGLDPIFLLAPNSSDARVQRMAALGRGYLYYVSLKGVTGASHLDLAEVESRIAHIRSLTDLPIGVGFGVKNAETAAAIGRFADAVVVGSALVEKIAAAQDRPEQARKDIVDLLAVMRRALDA

SEQ ID NO: 47531 - protein, 327 aa, Chlamydia trachomatis D/UW-3/CX
MSSQFDQLKLWSVLVGDTGDPALIKTLGVQDATTNPSLILKVAQEPKYQSMLTEAISWGIRQNGDDVQTLTFVLDKIQVNLGLEILKHVPGRVSLEIDARLSFNTEAMVQRAIFLSQLFEKMGGDKKRLLVKIPGTWEGICAAEVLESQGIACNVTLIFNLVQAIAAAKAKVTLVSPFVGRIYDWWIAAYGAEGYSIEADPGVASVANIYSYYKKFDIPTQIMAASFRTKEQVLALAGCDFLTISPKLLEELKKDQQPVERKLSVEEAKKLDIQPVELSESVFRFLMNEDAMATEKLAEGIRIFSGDTQILESAVTEFIRQIAAQEA

SEQ ID NO: 47532 - protein, 432 aa, Arabidopsis thaliana
MTPPLRGSQNPISRLCNTMAEPETLSSFVQHEYANNHQVMDFPGGKVAFTPEIQFISESDKERVPCYRVLDDNGQLITNSQFVQVSEEVAVKIYSDMVTLQIMDNIFYEAQRQGRLSFYATAIGEEAINIASAAALTPQDVIFPQYREPGVLLWRGFTLQEFANQCFGNKSDYGKGRQMPVHYGSNKLNYFTVSATIATQLPNAVGAAYSLKMDKKDACAVTYFGDGGTSEGDFHAALNFAAVMEAPVLFICRNNGWAISTPTSDQFRSDGVVVKGRAYGIRSIRVDGNDALAMYSAVHTAREMAIREQRPILIEALTYRVGHHSTSDDSTRYRSAGEIEWWNKARNPLSRFRTWIESNGWWSDKTESDLRSRIKKEMLEALRVAEKTEKPNLQNMFSDVYDVPPSNLREQELLVRQTINSHPQDYPSDVPL

SEQ ID NO: 47533 - protein, 426 aa, Cryptococcus neoformans var. neoformans B-3501A
MSSCLPVTLTRTRTRTLTLTLHPAMPSTKGVILVGGPSKGTRMRPLTLDCPKPLLPVAGKPMIWHPLQALSKVPDLTEVIIIGFYDDSQMAAFVKEAKREFPNIAISYLREYKALGTAGGLYHFRDSILRPPVPQHIFICNIDICCSFPFAEMLELHTSHGGTGTIMGVNVKKETATQYGCIVTDPETNQMVHYVEKPEGWISNIVNGGVYLFDKSLFDVIKVAMDEKTARAAEDPLVKPDEILRLEQDVIVPLAAARKMYVYQTHDFWRQIKTAASAVTATALYLSNYKLTNPSLLAPAAPNIIAPTFIDPSATIDPSAKIGPNVAIGPNVTVGPGVRIKDAIVLEGSTLEKHSCALNSIVGTNSHIGAWSRVDGEQEFEREVKGKISVTILASEVSLAPETMVRSCIVLPNKTLTKNATNQVLL

SEQ ID NO: 47534 - protein, 220 aa, Helicobacter pylori J99
MAKQEYKQLPKRAEVHSATEQFKDTIKTSLGLDLFKGLGLTIKEFFSPSVTIHYPMEQLPLSPRYRAVHHLQRLLDSGSERCIGCGLCEKICTSNCIRIITHKGEDNRKKIDSYTINLGRCIYCGLCAEVCPELAIVMGNRFENASTQRSQYGSKSEFLTSEQDAKNCSHAEFLGFGAVSPNYNERMQATPLDYVQEPSKEESKEESPTSPESHKGDENV

SEQ ID NO: 47535 - protein, 726 aa, Methanosarcina acetivorans C2A
MQVCGFTSGSLLVMCMDVSKKLLIVTFTMFALLTVLLIIAAHTILLSSFSDLETQDTIKNTGKIEQAIAWEALSLDRTARDWGFWDDTYKFVDTLSPEYIESNLDDSTLYDLDLNVMLFVNKSGVLVYPMSVDLVNMTNVPVPEGLLKQIDSGILTTRENTDQIQGVVLLDEGPMLIVARPILTSFGEGPSAGTLILGKYIDNSYISSLEERTQTSLSLYTLNEEMPPDFQEVFDEAASNDGSAVKILGSERVAGYFILRNTNGEPVALMRADYPRDLYAQGKKTLVYIYGFLLLSGLVIGTATKFSLDSLLVSRLITIDGFLENVKKEKDISKRLEVEGEDEIHRLSKGINEMLSSIRLAEQELKAREYEKKFILDSLEEMVVLRDPNFNIRWANRAALNNKDLLKAEDKAPEADSPEAQDRYNIPKPLYPLAPDYAAHELTSSEGKTWLLRSKPVCDKIGNTIAVLETGVEITERKNYEIELFRAKQDAEVANRAKSAFLANMSHELRTPLNSIIGFSDLLYEKVYGELNLKQTKAVGNISNSGKHLLNLINEILDLSKVEAGSFELHYSTFWLAEVFAEVRDMIFPFATSKGLKIELEIDSNLSRVYADKERILQVLSNLVTNAVKFSNENGCVKVKAVQMDGFLKITVADDGIGIAAADHEKLFKPFSQIDSSFSKRYQGTGLGLALVKEIVQLHGGTVWFESEVGKGSVFGFSIPLPGRSE

SEQ ID NO: 47536 - protein, 357 aa, Haloarcula marismortui ATCC 43049
MTGPRDQFKPADHPNDHFLLTTVVGSYPKPKWHDRARELFEDEDADFGEDEWEESKDDASRLITHEHERAGLDVICDGEMRRNEMVEYFAHRIDGYEFNGRVKVWGHNYFDKPSVADEVEYGEQWLVEEFEFTDEVAERPVKVPITGPYTLANWSFNEVYDSEEQLAYELADLVNEEIEALVEAGARYIQIDEPALATTPDDHAIVGECLERIVDEIPDDVRLGLHVCYGDYSRIYPEILDYPVHEYDLELANGDYDQLDVFKEHEFTKDFAMGVLDAHTAEVESVAEIKENIKKGLEVVPPERLTVSPDCGVKLLPREVARGKMENMVQAAREIEEELDAGEIDVVASGAEAHADD

SEQ ID NO: 47537 - protein, 346 aa, Zea mays
MQACACHFSPVLAPPRSRISASHSPGMATLKVPATVPPVADDCDQLRKAFQGWGTNEALIISILGHRDAAQRRAIRRAYAEAYGEELLRSITDEISGDFERAVILWTLDPAERDAVLANEAARKWKPGNRVLVEIACTRTSAQIFATRQAYHERFKRSLEEDIAAHVTGDFRKLLVPLVSTYRYDGPEVNTRLAHSEAKLLHEKIHHKAYSDDEIIRILRRGGPPTTRSKPQLIATFNHYNDAFGHRINKDLKADPQDEYLRTLRAIIRCFSCPDRYFEKVARQAIAGLGTDENSLTRVITTRAEVDLKLIKEAYQKRNSVPLERAVAGDTSGDYESMLLALLGQE

SEQ ID NO: 47538 - protein, 740 aa, Methanosarcina acetivorans C2A
MLGVYAIDISKKVLIITLLIFAVLTASFTFTHNMQLSNFLELEQADTLENVERVQNSVATEQGYLDYIVQDWACWDDTYRFIDDKNQEYINVDLQNQTLAGINVNVMIFVNNSGEVVYIKSVNTHTAEEMPVSDDLLAMIKDGSLLTTGDEDSISGFVLLEEDPMFISCHPILTTTYEGPSKGTLIFGRYFDDELLDSFKRVTRSSLLMYRADENMPADFQTKIKNASENPDRIIVEPLNEDQIAGYFGLKDINGDLALLIRADFPRELYRHGERTLNYMYWFLILTGLMTGVGVKFALDKLFISRLVEIDDFVTKVRSEKDLSKRLDLKDNDELYRLSREINGMLNEIYLAEQELKAQAREKKVLLDSLNELVVFVSPELKIIWANKAALEYMNMDLESAMGVCLKATPGISGPLVEFMYLEHIFTSEEKKSGEFTAKDGKVWFFQATPVTDDQGKIIGVLQTCRDVTERKEAEKLLQEKQVAEVANRTKSEFLANMSHELRTPLNSIIGFSDLLYEKIYGDLNEKQLKAVGNISRSGKHLLNLINDILDLSKVEAGKLELEYKEFELSSKLNSIKNLLSPIADRKMIEVQIQVDESLNTIRADEARFAQIMYNLLDNAIKFSKENGLVEIDAKRKGDTVEITVKDYGIGIKVEDQSKLFKPFSQIASFSSKKVQGTGLGLALVKQIVNLHGGYIWFNSRIGEGSTFAFTIPINGNKRTEGDSEVEASNIAGKAEDSES

SEQ ID NO: 47539 - protein, 259 aa, Geobacillus kaustophilus HTA426
MTRNKVEICGVDTSKLPVLKNEEMRELFRRMHEGDLEAREKLVNGNLRLVLSVIQRFNNRGEFVDDLFQVGCIGLMKSIDNFDLNQNVKFSTYAVPMIIGEIRRYLRDNNPIRVSRSLRDIAYKALQVRERLMSETAKEPSTEEIAKELGVAHEEVVFALDAIQDPVSLFEPIYNDGGDPIYVMDQLSDERNRDSQWIEEIALKEGLRRLNEREKMIIRKRFFQGKTQMEVAEEIGISQAQVSRLEKAAIRQMNKNIQV

SEQ ID NO: 47540 - protein, 417 aa, Arabidopsis thaliana
MQGHHQNHHQHLSSSSATSSHGNFMNKDGYDIGEIDPSLFLYLDGQGHHDPPSTAPSPLHHHHTTQNLAMRPPTSTLNIFPSQPMHIEPPPSSTHNKEGNRKGLASSDHDIPKSSDPKTLRRLAQNREAARKSRLRKKAYVQQLESCRIKLTQLEQEIQRARSQGVFFGGSLIGGDQQQGGLPIGPGNISSEAAVFDMEYARWLEEQQRLLNELRVATQEHLSENELRMFVDTCLAHYDHLINLKAMVAKTDVFHLISGAWKTPAERCFLWMGGFRPSEIIKVIVNQIEPLTEQQIVGICGLQQSTQEAEEALSQGLEALNQSLSDSIVSDSLPPASAPLPPHLSNFMSHMFLALNKLSALEGFVLQADNLRHQTIHRLNQLLTTRQEARCLLAVAEYFHRLQALSSLWLARPRQDG

SEQ ID NO: 47541 - protein, 96 aa, Burkholderia fungorum LB400
MSLRPLHDRLIVKRLDQETKTASGIVIPESAAEKPDQGEVIAIGPGKRDSDGKRIEPDLKVGERVLFGKYAGQSVKVDGTELLVLREEDVVAVVTQ

SEQ ID NO: 47542 - protein, 190 aa, Oryza sativa
  misc_feature (37)..(37): Xaa can be any naturally occurring amino acid
  unsure (1)..(190): unsure at all Xaa locations
KNEGLVLLADEVYQENIYVDNKKFNSFKKIARSMGYXSVNLCSNITGQILASLVMNPPKAGDASYASYKAEKDGIPQSLARRAKALENAFNSLEGITCNKTEGAMYLFPQLSLPQKAIDAAKAANKAPDAFYALRLLEATGIVVVPGSGFGQVPGTWHIRCTILPQEEKIPAIISRFKAFHEGFMAAYRD

SEQ ID NO: 47543 - protein, 546 aa, Burkholderia fungorum LB400
MAAKEIIFSDVARSKLVEGVNILANAVKVTLGPKGRNVVLERSFGSPVVTKDGVSVAKEIELPDRVQNIGAQLVKEVASRTSDAAGDGTTTATVLAQAIVREGQKYVAAGLNPLDLKRGIDKAVVAAIDELKKISKPTTTSKEIAQVATISANGEESIGQRIAEAIDRVGKEGVITVEDGKSLDDELDVVEGLQFDRGYLSPYFINDQDKQVAVLDNPYVLLHDKKVSNIRDLLPVLEQVAKASRPLLIIAEDVEGEALATLVVNNIRGILKTVAVKAPGFGDRRKALLEDIAILTGGQVIAEETGLTLEKATLAELGQAKRIEVGKENTTVIDGAGEHKNIEARVKQIRAQIDEASSDYDREKLQERVAKLAGGVAVIKVGGATEIEVKEKKDRVDDALHATRAAVEEGIVPGGGVALIRVRNAISGLKGANADQDAGIKIVLRALEEPLRQIVTNAGEEASVVVAKVAEGSGNFGYNAQTGEYGDLVESGVLDPTKVTRTALQNAASVAALLLTTDATVYEAPKDPAPATSAAGPGAPGAGYDF

SEQ ID NO: 47544 - protein, 271 aa, Brassica napus
  misc_feature (254)..(254): Xaa can be any naturally occurring amino acid
  unsure (1)..(271): unsure at all Xaa locations
FRSGFPGRPTRPDDFTEIVSKIACLDHENVTKLDGYCCEHGQHLVIYEFYRNGSLHDFLHLSEEESKPLIWNPRVKIALGTARALEYLHEVCSPSIVHKNIKSANILLDSELNPHLSDAGLASFLPTANELLNQNDEGYNAPEVSMSDQYSLKSDVYSFGVVMLELLTGRKPFDSTRSRSEQSLVRWATPQLHDIDALGKMVDPALKGLYPVKSLSRFADVIALCVQPEPEFRPPMSEVVQALVVLVQRANMSXKRTVGVGSGSSGANDYM

SEQ ID NO: 47545 - protein, 638 aa, Xanthomonas oryzae pv. oryzae KACC10331
MAVIGPARALRGFSQLCDASVLTMERTGDVMSFDSPCSDASSSNGLSRRRFVQGLALGGIAVAGGLWRRDARAATPANTPVLRGSSQSLQIGRMPVDFTGRTRPAITVNQRLPAPILRWREGDTVSVRVRNALTDQPTSVHWHGLLLPANMDGVPGMSFDGIAPGQEYHYRFALRQSGTYWYHSHSMFQEQAGLYGAIVIDPLTPPPYRHDREHVVLLSDWTDLDPAALFRRLKQMPSHDNDAQRTVGDFLRDARDDGLRATLADRGMWGRMRMTPTDLSDVNANTYTYLLNGVAPAGNWTGLFKPGEKVLLRFINGSSMTYFDIRIPGLRMTVVAADGQYVHPVSVDQLRIAAAETFDVIVEPLGQDAFTLFAQDMGRTGFACGTLAVQHGLQAPIPALDPRAILTMQDIGHGDGMGHGDHAMHGDGTTQGDGTTQGDAHAAHAMAMPMPEMHGHGGGNTQTKTPHQPASEDGNPLIDMRSNATAPRLDDPGVGLRDNGRRVLCYADLHSVFDDPDGREPGREIELHLTGHMEKFAWSFDGIAFASAEPLRLQYGERLRIVLVNDTMMQHPIHLHGMWSDLEDADGNFQVRKHTIDMPPGTRRTYRVLADALGRWAYHCHLLYHMEAGMMREVRVEA

SEQ ID NO: 47546 - protein, 366 aa, Gerbera hybrid cv. 'Terra Regina'
MEEDSPATVCVTGAAGFIGSWLVMRLLERGYVVHATVRDPGDLKKVKHLLELPKAQTNLKLWKADLTQEGSFDEAIQGCHGVFHLATPMDFESKDPENEIIKPTIEGVLSIIRSCVKAKTVKKLVFTSSAGTVNGQEKQLHVYDESHWSDLDFIYSKKMTAWMYFVSKTLAEKAAWDATKGNNISFISIIPTLVVGPFITSTFPPSLVTALSLITGNEAHYSIIKQGQYVHLDDLCECHIYLYENPKAKGRYICSSHDATIHQLAKIIKDKWPEYYIPTKFPGIDEELPIVSFSSKKLIDTGFEFKYNLEDMFKGAIDTCREKGLLPYSTIKNHINGNHVNGVHHYIKNNDDDHEKGLLCCSKEGQ

SEQ ID NO: 47547 - protein, 1081 aa, Candida glabrata CBS138
MFRQQAVEERNYDPQFKPVQGIYEDRLRQFLDQGGPFSHQNLPKFYDRERIRLDGKHVKVQWYQVPFEDGSDPTSPDKRPSWKSIIEKDKKGELNFQDASIGQPFGPSWSTTWFKVHLKLPSHWIGKKIIFDWDCSNEGVVIDPETLLPATAFSGNERTEYQLPKNESGEYFFYIESGNNGMFGCGAGSTINPPDDHRFFGLNKADIVWPDWEARALRIDFWMLGDAARELPGDSWQKHKARQVGNLVMDAFDPEDRSSVRRCRELLHKEYLDDFADSPKVYQNGSDVMTSVYGIGNCHIDTAWLWPFAETRRKIVRSWSSQCTLIDEFPEYQFVASQAQQFKWLLEDHPEFFKKVLVPKVQEGQFIPVGGSWVENDTNMPSGESLARQFFYGQRFFMKHLGTKSTVFWLPDTFGYSSQVPQICRLSGIDKFLTQKLSWNNINSFPHSTFNWAGIDGSQLLTHMPPGNTYTADSHFGDVLRSSKQNKTTEFYGAGLMLYGKGDGGGGPTREMLEKMRRIRSISNRNGNVVPKLDVGKSVDEFYDNILKNTDNGSILPTWNGELYFEFHRGTYTSQARTKKHMRFSEIKIHDLEWIATKVSILFPDRYKYPANEINKLWEDILLCQFHDVLPGSCIEMVYKYEAIPRLDEVIERCNKLIEDALKCVQKDKHKDELTLRTLPWLETDFAGEKDISKKFFASVKDKDDCYLLSNGKWEVSICKKRGVIKSIKDTKDNIEYLDLKNGRNKFGANQFVIFDDKPLSWQAWDTELYSVNQFNYLEDADSVKIVGDSGNECTVESRFKISKNCEIITKVSLKSTDEQRADESIIHINTKVENWESENKFLKVEFPVNVRNDFASYETQFGITKRPTHYNTSWDVAKFEVCNHKFADYSEHTKGVSILNDCKYGFSVHGNLMRLSLLRSPKAPDAHADMGSHEINYAIYPHRGELNYKTVRNAIEFNFNHKYQISKEYADKLQSIISIEGEPNVILSNIKRGEDDEELNSNYALKKLRSRSLIARVYESLGGESRAVLKTSLPLREVQIVDNLELDAIEDVNFKKLDDGTYEIPITLKTFQIASYRLIF

SEQ ID NO: 47548 - protein, 231 aa, Spinacia oleracea
MSFTIPTNLYKPLATKPKHLSSSSFAPRSKIVCQQENDQQQPKKLELAKVGANAAAALALSSVLLSSWSVAPDAAMADIAGLTPCKESKQFAKREKQALKKLQASLKLYADDSAPALAIKATMEKTKKRFDNYGKYGLLCGSDGLPHLIVSGDQRHWGEFITPGILFLYIAGWIGWVGRSYLIAIRDEKKPTQKEIIIDVPLASSLLFRGFSWPVAAYRELLNGELVDNNF

SEQ ID NO: 47549 - protein, 352 aa, Candida glabrata CBS138
MASDNSNTTVFVSGATGFIAQHVVRQLLDQNYKVIGSVRSAEKGDHLKNVIFKGGDFNYEIVKDISDPTAFDHVFEKHGKDIKVVLHTASPFHFNTTDIEKDLLIPAVNGTKGILESIKKYAAQTVERVVVTSSFAANTSTVDMFYAKDSSKTITEESWNQDTWESCQSDPIRGYCGSKKFAEKAAWDFYNANKDSVKFKLSIINPVYVFGPQNYVEPGKKILNTSSEVINSLVHLKKDDPLPEFAGGHIDVRDVAKAHILAFQKDELIEQRLMLHAGLFTTQTLLDIINEQFPELKGKIPAGKPGTGNPDDALTPVDNSKTKKLLGFEFIDLKKDLYDTISQILEAEKNSN

SEQ ID NO: 47550 - protein, 402 aa, Xanthomonas oryzae pv. oryzae KACC10331
MRRVVITGMGINSCLGNDLDTVSSALREGRSGITALPDHAEAGLRSQVGGAVALDLDSLIDRKLKRFMGDASAYAYLAMRDAIADAGLDAEHVSGLRTGVIAGSGGGSSQWQVETADLLRNRGVRKVGPYMVPRTMCSAVSASLATAFKIRGLSYSLSAACATSAHCIGAAADLIRHGAQDVMFAGGGEELHWTMSVMFDAMGALSTGFNDRPAVASRPYDAQRDGFVIGSGGGMLVLEDYDHAIARGARIHAELLGYGVTSDGADMVAPSGEGAVRCMRMAIQGLDRPIDYLNTHGTSTPLGDVTELGAVREVFGDNVPPLSSTKGLSGHSLGAASVHEAVYSLLMLRDGFMAGSAHIEELDPRAEGFPILRQTQEATLNTVMSNSFGFGGTNGALVFGRV

SEQ ID NO: 47551 - protein, 531 aa, Neurospora crassa
MSGATPSRSADLLKPRPDETASLVRKPPSLQSSSTQVEESEVPNLPEYKLWLSELWLLTKNAIPVIFAYTLQNSLQTGSILIVGRLSPEALATAAFSYMFAMSTAWLIALGGSTALDTLASSSYTGSSNKHDLGILLQRGLAVLSALYAVMALIWTFSEPLFRVLGQEEYICVQSAMFLRRLIPGGLGYIWFECMKKFLQAQEVYRPGTYVLLITSPLNALLNYFLIHKLGLGLHGAPLATGISYWCSFFLLVAYATFVRGHECWGGLSPHRALSNIGPFIRLALLGIIHVGTEWWAFEIVALAAGQLGTIALAAQSVIMTADQIINTIPFGLGVAASSRVGNLLGARKVKEASRASHCAVVLSIVAGALILTVLMSVKDVFGRLFNDDERVIRLVADVMPFVALFQIADGLNGSCGGVLRGTGRQWVGAAVNLVSYYGGALPTGIYLAFHGWGLRGLWIGQCVALYLVGVLEWLIVGMSNWEDEVKRAISRLDDGGFGDSSAHVYAYGAIGEGQADEALGERHREGREPV

SEQ ID NO: 47552 - protein, 231 aa, Nostoc punctiforme PCC 73102
MNYKAIIFDLDNTLLNFELCERRAILGALEDCAVSLDLNGVSETTFIQVFETYSSKYWIQREKFSPTELIEMSYQSTLAELNIKTDQISNLGKSCWQIFNHLGVMEPDVKEVLTVLAHSYRLAVITNGFVSAQLPRMQAAGIEHFFEEVVVSEAIGFAKPSPEIFHHALSRLDLTPAQVLYVGDSLTHDYAGAMQVNIDFCYYNRKNQVLPQEAQPKFMISELLKLLELVK

SEQ ID NO: 47553 - protein, 459 aa, Magnaporthe grisea 70-15
MPRARRRAAAMVWLPLARAGWKRSLDDSCQSWYSEESMCLVLVGCLFWMRLVPSTEDTRSPHPLSTGTNGKRKATEDPASPVSAKRPKHESPDSPEKKKPNEIARIPFPEKPAVIEERNGEIEFRVVNNDNERESLIILTGLKCIFQKQLPKMPKDYIARLVYDRTHLSIAIVKKPLEVVGGITYRPFKGRQFAEIVFCAISSDQQVKGYGAHLMSHLKDYVKATSDVMHFLTYADNYAIGYFKKQGFTKEITLPKSVWMGYIKDYEGGTIMQCSMLPRIRYLEMGRMLLKQKECVHAKIRAFSKSHIVHQPPKQWKNGIEPIDPLSISAIRASGWSPDMDELARQPRHGPNYNQLLHLLNDMQNHQSAWPFLVPVNKDDVADYYEVIKEPMDLSTMENKLEMDQYPTPEDFIRDAKLIFDNCRKYNNESTPYAKSANKLEKFMWQQIKAIPEWSHLEP

SEQ ID NO: 47554 - protein, 272 aa, Oryza sativa
MGRRACCAKEGMKRGAWTSKEDDVLASYIKSHGEGKWREVPQRAGLRRCGKSCRLRWLNYLRPNIKRGNIDDDEEELIVRLHTLLGNRWSLIAGRLPGRTDNEIKNYWNSTLSRKIGTAATAAAGSRGGSTPDTARATDAASSSSVVPPGQQQQPASRADTDTATAAAAAAATTTTVWAPKAVRCTRGFFFHDRETAPLAAAAPAPAGELGDGDDVDCDYYCSGSSSAATTTSSSSLPAVVEPCFSAGDDWMDDVRALASFLDTDDAWNLCA

SEQ ID NO: 47555 - protein, 183 aa, Avena sativa
YRVSIGLPGNGGWCSGWGRGDDGGAANARASVQGRGETWVRRRSGRQGCGGGGGRREEEGAGPAAKAQVVGWPPIRSYRKNTMATSLSAPRSKDEVEAKQAPVAGCLYVKVSMDGAPYLRKVDLKMYKNYKDLSLELEKKFSCFTVGHGESNGKSGRDGLSDCRLMDPKSGAELVLTYEDKDG

SEQ ID NO: 47556 - protein, 542 aa, Ureaplasma parvum serovar 3 str. ATCC 700970
MEIDLMKHIQKTKFIFVTGGVYSSLGKGVSASSIGRILVELGYSVAMQKLDPYLNIDPTYLSPLQHGEVFVTKDGKEADLDLGTYERFINADLNKYASVTSGKIYYEILTKERENGFDGKTVQTIPHVTSAVIDYIKKIKDSLKTDFIIVEIGGTIGDIESLPFIEAISQFKTIYGVNNVMFIHCSPLIYIEKVGELKTKPTQHSVKTLRSLGINLDLLLLRTNQKLDEVTIKKLAWSCGLDIDMIFAAYDVESVYLLPNVLFEQGIHKTILDFFSLPLKNDNINSWIDFTDKITTFKKHNLVIGLVGKYVELPDAYKSVLASLELAAIELNIDLKIKYIQPQNLNENNINEELKKINGIVIPSIAGSIKGWPGALLAASYARKNNIPFLAVGTGVNIGIGEFINNVLKLPIEFINLGNGDFSFLKDAFVKNEIENYRIGEYCSNIQANTITSQIYLKQNQLNERHRHHFEFNNHYINNYFLNQNWKIGAISVDNNYIDVLEYTKNHFYVLTIFNPEYTSKPSKANPYFINLLKMSLKIKES

SEQ ID NO: 47557 - protein, 486 aa, Desulfovibrio desulfuricans G20
MMAKYDYDIIVIGGGAAGLTVTAGAAQLGVKVLLVESGHALGGDCLHYGCVPSKTLLRTAGVRHLMRHAARYGLPDAQLPPVDFAQVAQRISEVQAVIQQHDSVERFTALGAEVLFGAASFADDHTVEIRSDDSVVRATGAKIVIATGSGASVPPLEGLKESGYLTNREIFSLPVLPASLIVLGGGPVALEMAQAFRRLGTEVTVVQRSGQLLSNEDADMADIVRLRLESEGVRVLTRTEIQSIRRGADGVQVRLVHEGSEKLLSAAELLVALGRAPHVSGLTLENAGVVYSARGVGVDARMRTNVPHIYAAGDVTGRYLFTHAAGYEGGIIIANAVFRLPKKADYTNMPWCTFTDPELASVGLNERRAQAAGVDYTVRTELFSGNDRALAEGAPEGRIKMLLDPREKVLGVQICGAGAGEIINQWVAVQAGKVSLSRIAGAVYPYPTLGEISKRVAGNVMADKLFSGKVQSALCFLFRHQGKACS

SEQ ID NO: 47558 - protein, 365 aa, Bordetella bronchiseptica RB50
MLRRVRPPPVAWAARPFRGGNGAGGPAHGKAMDAFKQDSRIGVTVLTGFLGSGKTTLLNRLVQEPEYAEAVVIVNEFGDIGVDHHLVRNVDDRIVLLEGGCICCTASGGLVDTLRDLFMLAVRRRIKPFKRVLLETTGLAGPASVMFSLRHDPFLAERYAYHGAIAMVDAQHVREQLMVQPEAAQQIALADLVVFSKADLAGQAQLASAMRDVARANPGVPMCVVRRGEPLDERLRGDFLVRERRQAAPLGRWLGAFAAPPGGPHPNVAHFSLNLSVPLTRGMFLARMSEIQAAYDRGILRIKGLVCFEAEALPCAVHGVHRQLYPLEALPQWPGDDRQSRLVFILRGLDRDAVRADVARRLQQG

SEQ ID NO: 47559 - protein, 120 aa, Avena sativa
GSVVGWPPVRSYRRNAMTVQSVKIKKEEETEKQQPASAVAAAAAAATAGGNGSAFVKVSMDGAPYLRKVDLKMYNTYKDLSIALQKMFSTFTATGNEGKMVEAVNGSDVVTTYEDKDGDW

SEQ ID NO: 47560 - protein, 165 aa, Ureaplasma parvum serovar 3 str. ATCC 700970
MIKSIWIAGGCFWGIQKYFDSIIGVNHTVVGYSQGNVINPSYEQVCTQTTNHTETVQIDYDDRFVSLISILEHLYQIIDPFSLNKQGDDVGSQYRSGIYYVDHDDEFIIKDFLLKKQNQTPKKIMIEVERLRNFNIAEEYHQKYLDKNPNSYCHVDLSLSKKEFR

SEQ ID NO: 47561 - protein, 506 aa, Cryptococcus neoformans var. neoformans B-3501A
MPRQPPAKRARLSTRAISSTSEQPEVGPSRSVNDESPTKLDKGKGKAEATITQTQEKQGKQSEGEMDATEELEAWQDFAADHYETVEQLPLELHRNFRLLRELDDGTLAQMDTLKKLIRTYVSGRIALEQPRSLSTPLEEAALKKSNREEDSIDAERAEETLSHHDSPQEGEEGVNPASETTAEPANSGEPSLNPSLTDEKQKEPGVPLADGAGGLIIPCSPESQAKVPARAKFPSLPSSPTARHSGAIENDDPNIDSLARAAAQQNHSSSIPLRASRPAGPHSLLPEISRLAREIVRTSDEKVAVAIGAYNAVDRHIRALDSALTAQEASILLGLRPSTLPSNAIDEALDLEGSTGKAGTGQRVDGRSRGQGTADVVGEGDEREVTLGIGGGGSRKKGKKRKGKPKQRESQDGNEEGKVEENWNIPPDPNEPRYCYCNRVSFGEMIGCDNDECPLEWFHLQCLGFENPPTGKWLCDLCKPKTNGHGAGTSAGAARRSRVSGGRKR

SEQ ID NO: 47562 - protein, 262 aa, Helicobacter pylori J99
MRYQNMFETLKKHKKMAFIPFVTLGDPNYELSFEIVKTLIISGVSALELGLAFSDPVADGTTIQASHLRALKHASMAKNFQLLKKIRGYNHDIPIGLLAYANLIFSYGVDGFYAQAKECGVDSVLIADMPLIEKELVIKSAQKHQIKQIFIASPNASSKDLEQVATHSQGYIYTLARSGVTGASHTLENDASAIIKTLKTFSSTPALLGFGISKKEHITNAKGMGADGVICGSALVKIIEENLNNEDAMLEKIKGFVGGMIS

SEQ ID NO: 47563 - protein, 566 aa, Listeria innocua Clip11262
MTNLRKRLSRLYSEDVVESLATRIEARVNQTKQRKLVRKDKWDEKDIVLITYGDQFKEESKKTLPTFKKMYDRYLKSTFEVVHFLPFYPYSSDDGFSVIDYKAVNPELGDWEDIKEMEQSARLMFDFVCNHMSAKSEWFKRYLAGDKEFQNFFVEMDPDTDLSSVTRPRATPVLTPFQFASGKEGYIWTTFSEDQIDLNFACPEVLYKMIDVLMFYLEEGAEYVRLDAVGFMWKVPGTSSIHLDETHEIVKLFRDLVDMAAPGTIIITETNVPHVDNISYFGNGEKEAHMVYQFPLPPLVLHAIHHGNAEFLSNWAKNLELPEGKRTFFNFLASHDGIGLNPVRGIIPEAEILALVDDLEKEGALVSYKQNPDGTKSPYEINVTYMDALSKQADTDDLRLSRFLVAHAVLMSIPGVPAVYVQSILGSRNDYSGVETTGHNRSINRKKYDLAEITAELNQADSLRKETYDALTKLISTRKAESLFHPEIPMEVLESTAELFVVKRSSDAESIILIHNLSEKEVSYSLDSGVYTNLYKGSTVTGSDSIKLRGYEFCWLKTKNYREEQK

SEQ ID NO: 47564 - protein, 402 aa, Bartonella sp. SV12uk
TTTATVLGQAIVQEGVKAVAAGMNPMDLKRGIDAAVEEVVASLFKKAKKIQTSAEIAQVGTISANGAAEIGKMIADAMEKVGNEGVITVEEAKTAETELEVVEGMQFDRGYLSPYFVTNAEKMVADLDDPYILIHEKKLSNLQSLLPVLEAVVQSGKPLLIIAEDVEGEALATLVVNKLRGGLKIAAVKAPGFGDRRKAMLEDIAILTSGQVISEDVGIKLENVTLDMLGRAKKVNISKENTTIIDGAGQKAEISARVNQIKAQIEETTSDYDREKLQERLAKLAGGVAVIRVGGATEVEVKEKKDRVDDALNATRAAVEEGIVAGGGTALLRAANALTVKGSNPDQEAGINIVRRALQAPARQIATNAGEEAAIIVGKVLENNADTFGYNTATGEFGDLIS

SEQ ID NO: 47565 - protein, 628 aa, GIBBERELLA ZEAE PH-1
MASRDHTLMSTDDVSSSKMAKTKVKGSKSKGIRKSSVPPKALPVTLLSGFLGAGKTTLLQHILRSEHGLRIAVVVNDIGAINVDASLIKQTHRVNKTQEKVISLQNGCICCTLRGDLLEELVRLSQLQEFDYIIIESSGISEPEQVAETFDSRLAEQMDVMASIEGAPGLDADMVKVLKQLKEAGGLEKFAKLDTTVTVIDAFTMLHDFDTGDLLSSRRDDVTPEDERTVSDLMVDQIEFADVIILNKLDMVDAFTKPRLLDLVKKLNHRAKVIESSYGKVDVKQIVNTGMFNLQVAQAGYGWLQDLHDMTVREVNGRNVLTPKPETEEYSVRSCIYTRHRPFHPRRLWALLYDKFILQLENPEDDDDDEEEEDDEDDDLEMVDYADAQDPSSEVDQETEDSSSSRGKRSAPSSPQSSHSTIESAPSPEPASKKQRVAEAEMDETEDYFTPPNEVILETKRNHPIFARLFRSKGEFLLATRPHRAGDWSQAGAMLTMTGGRPWFCTLSPEDYTTGDAEVDGLVKHDIKKGGEWGDRRQELVFIGENLDHKALEKMLDECLLTDAEFKQWEDVMRDDKKNVEEKREALEDLFDDGFPDWSEDGHEDHEGHDHSHSGGLRSIKQHLQEVD

SEQ ID NO: 47566 - protein, 473 aa, Ustilago maydis
MTVVHSNPASRQQSTEPGTINGRYDAKRRKLASSDLAKESTVEANMSTDLSDESAELTGVEAVEPTANGEDALQEAKKGAANESKSAVCASADADTAEFGQTKVKAEEAVDLEEAMQPAPKSAASAVEEGVAQKKERPAVIEERTGLIQFRVVTNDDDHESMILLTGLKNIFQRQLPKMPREYISRLVFDRNHQSVAIVKRGLQVVGGITYRPFKQRKFAEIVFCAITSTEQVKGYGSHLMNHVKDHVKASSPVMHFLTYADNYAIGYFKKQGFTKEISLDRSIWVGYIKDYEGGTLMQCSMVPRVKYLEVSDMLAAQKEAILAKIRSISRSHVVHKGLQAMHDRDRLIKLKGLIENPDGTVAKPERAAKRDQNHGEEDPTATFLVNPSEVPGLKESGWTPEMDELSRRPKRGPHFAVMRHILVELNGHGSAWPFVNPVNGDEVTDYYDVIKNPMDLSTMEAKLENNQYAQRR

SEQ ID NO: 47567 - protein, 395 aa, Pisum sativum
VEAAHLKTDIMSVFDDLTQDDQDSFRFLAVEGCAALGKLLEPQDCLAHILPVIVNFSQDKSWRVRYMVANQLYELCEAVGPDSTKTELVPAYVRLLRDNVAEVRIAAAGKVSKFSRILSPELAIQHILPCVKELSTDSSQHVRSALASVIMGMAPVLGKDATIEQLLPIFLSLLKDEFPDVRLNIISKLDQVNQVIGIDLLSQSLLPAIVELAEDRHWRVRLAIIEYIPLLASQLGVGFFDDKLGALIMQWLKDKEYSIRNAAANNVKRLAAEEFGPEWAMQHIIPQVLDMINDPHYLYRMTILHAISLLAPVLGSEITSTNLLPLVVNASKDRVPNIKFNVAKVLQSLIPIVDESVVESTIRPCLVELSEDPDVDVRFFASQALQSSDQVKMSS

SEQ ID NO: 47568 - protein, 402 aa, Bartonella sp. SV06uk
TTTATVLGQAIVQEGVKAVAAGMNPMDLKRGIDAAVDEVVANLFKKAKKIQTSAEIAQVGTISANGAAEIGKMIADAMEKVGNEGVITVEEAKTAETELEVVEGMQFDRGYLSPYFVTNAEKMVADLDDPYILIHEKKLSNLQSLLPVLEAVVQSGKPLLIIAEDVEGEALATLVVNKLRGGLKIAAVKAPGFGDRRKAMLEDIAILTSGQVISEDVGIKLENVTLDMLGRAKKVNISKENTTIIDGAGQKAEINARVNQIKAQIEETTSDYDREKLQERLAKLAGGVAVIRVGGATEVEVKEKKDRVDDALNATRAAVEEGIVAGGGTALLRAANALTVKGKNPDQEAGINIVRRALQAPARQIATNAGEEAAIIVGKVLENNADTYGYNTATGEFGDLIA

SEQ ID NO: 47569 - protein, 358 aa, Cryphonectria parasitica
MAEFVRAQIFGTTFEITSRYSDLQPVGMGAFGLVCSARDQLTNQNVAIKKIMKPFSTPVLAKRTYRELKLLKHLRHENIISLSDIFISPLEDIYFVTELLGTDLHRLLTSRPLEKQFIQYFLYQIMRGLKYVHSAGVVHRDLKPSNILVNENCDLKICDFGLARIQDPQMTGYVSTRYYRAPEIMLTWQKYDVEVDIWSAGCIFAEMLEGKPLFPGKDHVNQFSIITELLGTPPDDVINTIASENTLRFVKSLPKRERQPLASKFKNADEQAVDLLERMLVFDPKKRITASDALAHEYLAPYHDPTDEPVAEEKFDWSFNDADLPVDTWKIMMYSEILDYHNVDASGASAAMGEFNGQ

SEQ ID NO: 47570 - protein, 664 aa, Magnaporthe grisea 70-15
MCPESIQVSDAGSATTDSVGLYIPMPNPFLEKLFSLDGRLAVVTGGTRGIGQAMAVALAEAGADIILIQRDESNLDTKSQIEALGRKATVYTCDLSSQESVERLAPRILADGHDVSVLVTCAGIQRRHPAHIFPMGDWDEVLQVNLKTVWTLDRDFGAYMLTRPADPATGHRGSIINVASLVSFQGGITVPAYAAAKGGIAQLTKALSNEWASKGVNVNAIAPGYVATDMNEALLKDEARAASILARIPAGRWGNADDFKGATVFLAGRGSFTSDAIVTLLQDLDSGQKNRGELQLLYGPKDLRVEERTIPAPAAGEVQVSIRATGICGSDMHYYVHGANGDFKVREPLSLGHESAGVVEAVGPDVTDLKVGDRVAVEVGIACDDCALCKSGRYNLCKGMKFRSSAKIFPHFQGTLQDRINHPARLTYKLPDSASLAEGALLEPLGVAIHGVKRAGEQKGKTALVLGAGAVGLLTAAVLRVEGIESIAIADIVPERVQFAVAHGFADKAVVVPSKRLPPTASADEKLALARETAALLTREGNGGDEYDTTFECTGVESCVQAAIYATGPGGRVMMIGMGTPVQTLPLGAAALREVDLLGVFRYANTYPRGIELLAGRESNGMPDIGLLATQNVKGLDRAEDAFAIAAKPVDADGKLVLKVIIET

SEQ ID NO: 47571 - protein, 490 aa, SYNECHOCOCCUS SP. WH 8102
MTTAFHSPTSRRRKTLQEANLLEGPLMLIKSIRGFSSNRAMTWLACAPLALMGLGIFTLSAKAEELPDLNAAFLANNLWLLVATILVIFMNAGFAMVEAGMCRQKNAVNILAKNLFVFALAVTAYWFVGYSFMYGDAAIDGWLYFGGLFFDPTVTAETISDAGLVPTVDFLFQAAFAGTAATIVSGLVAERIKFGEFVVFALILTAFIYPVAGSWEWNGGWLNSVGNAEFIDFAGSSIVHSVGAWAGLVGAALLGPRIGKYVGGNVQAIPGHNMSIATLGALILWIGWYGFNPGSQLAMDQWVPYVAVTTTLGAAGGAIGATVISTITSKKPDLTMIINGILAGLVSVTAGCGNLTLTGSWVAGLVGGIIVVFSVSALDSAGIDDPVGAFSVHGVCGVWGTLVIGLWGFDVQGDGSPLGLLVGGGIEQLGIQALGTAAYAIWTVVTCFIAWQIIGALFGGIRVTEQEETEGLDIGEHGMEAYAGFSTTNN

SEQ ID NO: 47572 - protein, 317 aa, Magnaporthe grisea 70-15
MSSGRKIKLNSGHEIPQSNPNEVAKAVEHALRNGYRHIDGALVYGNEHEVGEGIRASGVPRSDIFLTSKLWNTFHHPDDVEAGIDLTLRDLGTHYVDLYLIHWPVSFAPRENPRELFPIDPATGATHVVDIPDADTWRAMERLVESGKARSIGVSNFTRGRLEKLLQTARIRPAVNQIEAHPYLQQRELLEWHRQQGIVVQAYSPTGNNIYGRPKPLDDPVVLEVAARVGRTPAQVLVQWAAQRGTVVLPKSVTPSRIDENFVDFELPADEVEKLNALERHARYNFPARLGVDIFGEATEEELKAAVQAFIEQRRQA

SEQ ID NO: 47573 - protein, 351 aa, Bromheadia finlaysoniana
MENEKKGPVVVTGASGYVGSWLVMKLLQKGYDVRATIRDPTNLEKVKPLLDLPRSNELLSIWKADLNDIEGSFDEVIRGCVGVFHVATPMNFQSKDPENEVIKPAINGLLGILTSCKKAGSVKRVIFTSSAGTVNVEEHQAAVYDENSWSDLHFVTRVKMTGWMYFVSKTLAEKAAWEFVKENAIHFIAIIPTLVVGSFITNEMPPSLITALSLISGNEAHYSILKQAQFVHLDDLCDAHIFVYEHPEANGRYICSSHDSTIYDLANMLKNRYATYAIPQKFKEIDPNIKSVSFSSKKLMDLGFKYKYTIEEMFDDAIKTCRDKNLMPLNTEELVLAAEKYDEVKEQIAVK

SEQ ID NO: 47574 - protein, 313 aa, Escherichia coli
MSQNTLKVHDLNEDAEFDENGVEVFDEKALVEEEPSDNDLAEEELLSQGATQRVLDATQLYLGEIGYSPLLPAEEEVYFARRALRGDVASRRRMIESNLRLVVKIARRYGNRGLALLDLIEEGNLGLIRAVEKFDPERGFRFSTYATWWIRQTIERAIMNQTRTIRLPIHIVKELNVYLRTARELSHKLDHEPSAEEIAEQLDKPVDDVSRMLRLNERITSVDTPLGGDSEKALLDILADEKENGPEDTTQDDDMKQSIVKWLFELNAKQREVLARRFGLLGYEAATLEDVGREIGLTRERVRQIQVEGLRRL

SEQ ID NO: 47575 - protein, 69 aa, Phaseolus vulgaris
KNYTYSLEVGGNGRKMIWQGVPRSIRDSHRKVRDSFDGLIIQRSMALFFSGGDKKELKLRVTGRIWKEQ

SEQ ID NO: 47576 - protein, 274 aa, Exiguobacterium sp. 255-15
MEFVTLNNGLVMPQLGYGVFKVPEQEVYEAVREALRVGYRSIDTAMIYENEAGVGRALKDSGIPREDIFLTTKVWNKDQGYERTLAAFETSLQKLGVDYVDLYLIHWPMPDEDLYMDTWRALEQLYRDGKAKAIGVSNFHIPHLTRVLEEGTVVPAVNQIELHPFLSQEAIRAFCQKNGIVVEAWSPLMKGRDALTDPVITDIAARHGKTPAQVVLRWHLQHDIIAIPKSVTPSRIQENLDIFDFVLSPDDMRQIDQLNRNERTGSNPDEMHKK

SEQ ID NO: 47577 - protein, 425 aa, Pseudomonas fluorescens PfO-1
MQSRHLKKESAVSRRRVVVTGMGMLSPLGTDVPSSWQGILAGRSGIGLIEHTDLSAYSTRFGGSVKGFNVEEYLSVKEARKLDLFIQYGLAAGFQAVRNAGLEVTDANRERIGVAMGSGIGGLTNIEETSRTLHETGPRRISPFFVPGSIINMISGFLSIHLGAQGPNYAIATACTTGTHCIGMAARNIMYDEADVMIAGGAEMAACGLGMGGFGASRALSTRNDEPTRASRPWDKGRDGFVLSDGAGALVLEELEHAKARGATIYAELIGFGTSGDAFHMTSPPADGAGAARCITNALRDAKINVDQVQYINAHGTSTPAGDLAEANAIKSVFGDHAYKLAVSSTKSMTGHLLGAAGAVEAIFSVLAINSQVAPPTINLEEPDEGCDLDFVPHTARNMDIDVVLSNSFGFGGTNGTLAFRRFAG

SEQ ID NO: 47578 - protein, 581 aa, Bacillus licheniformis ATCC 14580
MIKFRTRLLAALLTLLILVFASLGFLLVHLFHSSYDAKLSSHIEKEAALVASLANGENMKSSEQGAILEKASRELDSRVSLIDTKGQVLFHFGGRAEEQSVIKEALESDLNGEGGGFRINPDDESVYRYVQPLKDDGNVNGYILISTPVDSLQDINQKIWILLGVSLGTAFLIIAGLGARITSQYTNPIESATQVAIELAKGNYKARTFNEDETMLSQSINMLAQNLQDMTRAQEMQRDRLQTVIENIDSGLILIDGKGYIHLVNRAYQKQFHVEADQLLYHFYHEVLEHEEIINLIEEIFMTEAKVRKMFKLPIKIERRYFEVDGVPIIGINDEWKGIVLVFHDMTERKQLEEMRKDFVANVSHELKTPITSIKGFTETLLDGAMNERETLLQFLSIILKESSRLQTLIQDLLDLSKIEQQNFTLNIQNCNIGEILAEIEMLLKNKAEEKGITLTLEKPDKPAVASGDPHRLKQIFLNLVNNALTYTPEDGSVTISADVLEDAVQVKVRDTGIGIKQSEIPRIFERFYRIDKDRSRNSGGTGLGLAIVKHLVEAHQGEIDVESERGKGTEFTVRLKRASE

SEQ ID NO: 47579 - protein, 375 aa, Pseudomonas syringae pv. tomato str. DC3000
MAEAKVLSGAGLRGQVAGQTALSTVGMAGAGLTYRGYDVRELAAEAQFEEVAYLLLYGELPTQSQLAAYLGKLKGLRDLPQALKEVLERIPADTHPMDVMRTGASMLGTLEPELSFDQQRDATDRLLAAFPAIMCYWYRFSHDGQRIDCTTDESSIGGHFLHLLLDKTPSELHRKVMDVSLILYAEHEFNASTFTARVCASTLSDLYSCVTAAIGTLRGPLHGGANEAAMEMIQRFASADEATQGTLGMLERKEKIMGFGHAIYKESDPRNEVIKGWSKKLADEAGDSVLFPVSEAIDKVMWEQKKLFPNADFYHASAYHFMGIPTKLFTPIFVCSRLTGWAAHVFEQRANNRIIRPSAEYIGVEQRSFVPIEQR

SEQ ID NO: 47580 - protein, 526 aa, Coprinellus congregatus
MFKFAVLSQFVALALAAIGPQADLFIGNANVAPDGFQRSAALAGTDANSMVFPGPVIQAFKGETFNINVRNRLADPSMLRTTSIHWHGFFQAGSAWADGPVGVTQCPIAPNRDFLYTFATARQAGTFWYHSHHRSQYCDGLRGAMVVYDPEDPHRSLYDVDNEDTIITLADWYHPPGPVLETLNVATANSTLINGKGRYPTGPTTPLAVVGVTAGKRYRFRLVSISCSPFFTFSIDGHRMTIIEADGESTQPLVVDSIDIHAGQRYSFVLEANQPVANYWIRSNPNRGNRGFAGGLNTAILRYVGAPDADPVKPSDVDVPVPALPLVETNLHPLENPAAPGPPALGGEGVTAIELQIGLQGREWTVNGATFHEPNEPILLQTLNGKQMNELLPNQGSLFPIPRNSVIELTMPGGGAGSPHPMQLHGHMFSVIRSASNSTPNFVNPVRRDVVSLGSNTADRVTVRFVTDNAGPWIMHCHIDWHLVHGLSVVFVEDIEGISDSQRVAEDHPWRQLCPIYEQEKPDNEP

SEQ ID NO: 47581 - protein, 127 aa, Ipomoea purpurea
VKYDITTVMQAKPLLKEALQAAVGLPVDRNVPLIGFIGRLEEQKGSDILYAAISKFISMDVQIVILGTGKKKFEQEIEQLEVMYPDKARGVAKFNVPLAHMITAGADFMMIPSRFEPCGLIQLHAMR

SEQ ID NO: 47582 - protein, 313 aa, Escherichia coli
MSQNTLKVHDLNEDAEFDENGVEVFDEKALVEEEPSDNDLAEEELLSQGATQRVLDATQLYLGEIGYSPLLTAEEEVYFARRALRGDVASRRRMIESNLRLVVKIARRYGNRGLALLDLIEEGNLGLNRAVEKFDPERGFRFSTYATWWIRQTIERAIMNQTRTIRLPIHIVKELNVYLRTARELSHKLDHEPSAEEIAEQLDKPVDDVSRMLRLNERITSVDTPLGGDSEKALLDILADEKENGPEDTTQDDDMKQSIVKWLFELNAKQREVLARRFGLLGYEAATLEDVGREIGLTRERVRQIQVEGLRRL

SEQ ID NO: 47583 - protein, 139 aa, Ipomoea nil
QEWNPATDKYLAVNYDITTVMQAKPLLKEALQAAVGLPVDRNVPLIGFIGRLEEQKGSDILYAAISKFITMDVQIVILGTGKKKFEQEIEQLEVMYPDKARGVAKFNVPLAHMITAGADFMMIPSRFEPCGLIQLHAMR

SEQ ID NO: 47584 - protein, 372 aa, Bacillus licheniformis ATCC 14580
MTATRGLEGVVATTSSVSSIIDDTLTYVGYNIDDLTEKASFEEVVYLLWHLKLPNKEELAELKKQLSENAGIPKEVIDHFKSYPNGKVHPMAALRTAVSLLGLFDEEADQMDAEANYRKAVRLQAKMPALVAAFSRIRKGLEPIEPNPELGFAANFLYMLNGKEPSPVEVEAFDKALILHADHELNASTFTARVCVATLSDVYSGITAAIGALKGPLHGGANEAVMKMLSEIGEVENVDSYIHAKLEKKEKIMGFGHRVYRQGDPRAKHLKEMSRRLTNLTGESKWYEISERTEEIVTSQKKLPPNVDFYSASVYHSLGIDHDLFTPIFAISRVSGWLAHILEQYENNRLIRPRADYTGPDMQRFIPIEERS

SEQ ID NO: 47585 - protein, 220 aa, Ehrlichia ruminantium str. Welgevonden
MKIFLDTIDISFLEEFCISGLIDGVTTNPSLFSKSELKCSDLIFKLCSLIKGPVSIEVISTSYKDMISEALEISKIAENVVIKLPLTYDGLIACRILSNEHNLKVNVTLCFSPAQAILAAKSGAYFISPFVGRLDDIGQIGMELIKDIREIYSKYHSFNTQILVASIRHPMHVVQAAKIGADIVTISPSIFKQMFVHPLTNKGLEDFLRNWNESGKKMFS

SEQ ID NO: 47586 - protein, 351 aa, Candida glabrata CBS138
MTAANNNTTVFVSGASGFIAQHIIRQLLDQNYKVIGSVRSTEKGDNLKNAIFKSANFNYEIVKDIADLNAFDPVFEKHGKDIKVVLHTASPLNFTTTEYEKDLLIPAVNGTKGILESIKKYAAQTVERVVVTSSFASHTSTVDMCNTKGKITEDSWNQDSWENCQTDAVRAYFGSKKFAEEAAWEFLNKNKDAVKFKLATVDPVYVFGPQNHIEPGKKVLNVSSEVINQLVHLKKDDPLPQVACGYIDVRDIAKAHILAFQKDELIGQRLLLHSGLFTVQTLLDAINEQFPELRGKIPAGEPGSNKPEDLLTPIDNTKTKKLLGFEFRDLKTIIQDTVSQILEAENASAKL

SEQ ID NO: 47587 - protein, 469 aa, Bacillus cereus ATCC 10987
MKPPTDNNKEGAESHKLESESKPIWKSMSMFLVPLLLSNVLQSVGQLFGMVVVGRWLGVNDLAAISAFFPLFFLLVSFVIGIGSGSSILIGQAFGAKNEDRLKAIVGTTLTFTFIIGVVLAIVGSIFAMDIMRLMGTPENIIEISVHYARILFISMPILFLYFAYTTFMRGTGDSKTPFYFLIVSTALNMILLPILIFGWLGAPKLDVYGAAYASVISTVITFIVMLVYLKKKNHPLQLDSTVRKYLRMDWGLLKLLLRLGIPASINMILVSLSEIAVIAFVNRYGSDATAAYGVVNQVASYVQMPAVSLGITVSIFAAQSIGANQFDRLQKVVKAGIIMNYVIGGVLISLIYLFSRDILALFLTSQTTIEIAHSLVMITLWSYLIFGHAQIISATMRASGTVLWPTVIGVVSIWLVEVPVAYYLSYHTSLGIEGIWIGYPAAFIVSLILQYAYYKLSWQKKRITRLVS

SEQ ID NO: 47588 - protein, 140 aa, Ipomoea turbinata
TQEWNPATDKYLAVKYDITTVMQAKPLLKEALQAAVGLPVDRNVPLIGFIGRLEEQKGSDILYAAISKFISMDVQIVILGTGKKKFEQQIEQLEVMYPDKARGVAKFNVPLAHMITAGADFMMIPSRFEPCGLIQLHAMR

SEQ ID NO: 47589 - protein, 492 aa, Helianthus annuus
MDPYKYRSSSAYNAPFWTTNSGAPVYNNNNSLTVGSRGPILLEDYHLVEKLANFDRERIPERVVHARGASAKGFFEVTHDITALTCADFLRAPGVQTPVIVRLSTVIHERGSPETLRDPRGFAVKFYTREGNFDLVGNNFPVFFIRDGMKFPDMVHSLKPNPKSHIQEDWRIMDFFSHHPESLHMFTFLLDDIGVPQDYRHMDGSGVNTYTLINKAGKAYYVKFHWKPTCGVKSLLEEEAIKIGGANHSHATQDLYDSIAAGNYPEWKLFIQTIDPDHEDRLDFDPLDVTKTWPEDIFPLQPVGRLVLNKNIDNFFAENEQLAFCPAIIVPGIYYSDDKLLQTRIFSYSDTQRHRLGPNYLQLPANAPKCAHHNNHYDGFMNFMHRDEEIDYFPSRYDPARHAEQYPIPPVRLSGKRDKCVIEKENNFKQPGERYRSFSPDRQERFINRVVGGLSDPRVTHEVRSIWVSYWSQADKSLGQKIASRLNVKPNY

SEQ ID NO: 47590 - protein, 162 aa, Ureaplasma parvum serovar 3 str. ATCC 700970
MERLNMKLSDYPVLDIDKKLFNWSKVKNKLVLIVNVASKCGYAKQYEQLEYLYKKYKNKGFIIVAFPCRQFMFQEFDDNNKIKEFCSTKYNVTFPIMDLTNVVGSNISPLYKQLITEYPWSPKAKAVKWNFEKFFVKNDEIIGRFESKCEPNDLEEFIKNNL

SEQ ID NO: 47591 - protein, 464 aa, Bartonella quintana str. Toulouse
MRHFFVVGLFFAIMAQISFHCVYAQIPQTRKEITLSFAPLVKKTIPSVVNIYAARQIRARSPFEGDPFFEQFFGRYQNNRPLRTQSSLGSGVIVDARGLIVTNYHVIKDANEIKVALSDGREFESKIMLKDEATDIAVLEIDAKGAQFPILPLGDSDTVEVGDLVLAIGNPFGVGQTVTSGIVSAQARTRVGISDFDFFIQTDAAINPGNSGGALIDMKGQLIGINTAIYSRSGGSVGIGFAIPANLVKVMLDTVRRGGKYFVPPYIGASFQNVTPDIAGGLGLERPYGALVIEIMKDSPAAKAGLKVGDVILGVQGIRVDSPDSLGYRLMTAGIGHSLVLEYLRSGKTFQTKITVSSIPESAFLKSEKIIDEGPLSGAEVLDLTPQNSRRFHLPKSAKGVVITNLDEMSNAAGIFRPGDILRVVNGHKILTVNQLKKVLMQGRSRIWQLEYERDGMYIRQFIR

SEQ ID NO: 47592 - protein, 525 aa, Spinacia oleracea
MAGRNIKNGENNKIAGSSLHLEKNPTTPPEAEATLKKLGLVASVAAGVQFGWALQLSLLTPYVQLLGIPHTWAAYIWLCGPISGMIVQPLVGYYSDRCTSRFGRRRPFIAAGAALVAVAVGLIGFAADIGAASGDPTGNVAKPRAIAVFVVGFWILDVANNTLQGPCRALLADMAAGSQTKTRYANAFFSFFMALGNIGGYAAGSYSRLYTVFPFTKTAACDVYCANLKSCFFISITLLIVLTILALSVVKERQITIDEIQEEEDLKNRNNSSGCARLPFFGQLIGALKDLPKPMLILLLVTALNWIAWFPFLLFDTDWMGKEVYGGTVGEGKLYDQGVHAGALGLMINSVVLGVMSLSIEGLARMVGGAKRLWGIVNIILAVCLAMTVLVTKSAEHFRDSHHIMGSAVPPPPPAGVKGGALAIFAVLGIPLAITFSIPFALASIFSASSGSGQGLSLGVLNLAIVVPQMFVSVTSGPWDAMFGGGNLPAFVVGAVAATASAVLSFTLLPSPPPEAKIGGSMGGH

SEQ ID NO: 47593 - protein, 141 aa, Zea mays
  misc_feature (22)..(22): Xaa can be any naturally occurring amino acid
  misc_feature (109)..(109): Xaa can be any naturally occurring amino acid
  unsure (1)..(141): unsure at all Xaa locations
IGSRSAERRCGGGITTLRAIPXIFSRTQTRYHLAEWVRGPAALQLAIEDDVRNFQALTQMYNEWPFFRVLLQLQHMLFVMGEPGIAGLKDHLVVPEELKACAEPALSSXYGQREWLSLQIDGHHDIHESDPVMKQDLVYDD

SEQ ID NO: 47594 - protein, 310 aa, Methylococcus capsulatus str. Bath
MTTLYISHPVFLRHDTGPGHPEGSVRLAAIESALAAPEFRSLRRLEAPRADISRLELVHSRRHIERVFASLPQTGHHFVDADTVVSPESGEAALHAVGAVCLAVDEVIGKRARNAFCAVRPPGHHAEPDAAMGFCLFNNIAIAAAHALANHGLQRIAIVDFDVHHGNGTQAAFRRNPQVLYVSTHQYPWYPGTGSAEETGVGNLVNIPLPAGTDSAAYREAVTATALPAIDRFRPELVLISAGFDAHRDDPLADLALTEDDYGWITAELMKLADRHSGGRIVSALEGGYALEALGRSAAAHLRTLLLPAS

SEQ ID NO: 47595 - protein, 468 aa, Bordetella bronchiseptica RB50
MIPAAAPSPGFGATMRDIARQAWPVLISQWAGISFGVLDTAMTGHASPQDLAAMSLSVSVYITVFVGLMGVVHALIPILAQHFGAGQQREVGSTWGQGVWLALGLSVVGAILMLFPDAWLSLSGDVDPAVRDRVAAYLRALVLALPATLVFRTIYALGTAVSRPKVVMSINLAAVFVKAFCNWVLIYGKFGLPALGAVGAGLATAISGWLSLAAGLWIITHDRYYRRFRLRVGRPDWRALKELLRLGLPMGGSYLVEVSAFTFMALLVAREGTYVSGGHQIMSNLAALCYMMPMALGVATAALTAQAIGAGRPDLAHRTGMAGLALGLLGAALTAAVLLVGRPLIIAAYTDDLEVAAVAASLLAIIPLFHLCDSMQCINSYLLRAHKVAVMPLVLQTVALGGVGLLGGWWLGFGPGRGGLDPVRAALMPGSPAGAGTMWLMAMAGLGLSAVLLHYWYRRIARLALARG

SEQ ID NO: 47596 - protein, 1274 aa, Arabidopsis thaliana
MENKTVVPGCSTRLSLRQPRTIITPPASLRVFSSLGSNQDPTGSVLIETTATSSSSLETSAADIVPKSTVSGGVQDVYGEDAATEDMPITPWSLSVASGYTLLRDPHHNKGLAFSHRERDAHYLRGLLPPTVISQDLQVKKIMHTLRQYQVPLQKYMAMMDLQETNERLFYKLLIDHVEELLPVIYTPTVGEACQKYGSIFLRPQGLFISLKEKGKIHEVLRNWPEKNIQGMGIPVGKLSLYTALGGVRPSACLPVTIDVGTNNEKLLNDEFYIGLRQRRATGEEYSELMHEFMTAVKQNYGEKVVIQFEDFANHNAFDLLAKYGTTHLVFNDDIQGTASVVLAGLIAALRFVGGSLSDHRFLFLGAGEAGTGIAELIALEISKKSHIPLEEARKNIWLVDSKGLIVSSRKESIQHFKKPWAHDHEPIRELVDAVKAIKPTVLIGTSGVGQTFTQDVVETMAKLNEKPIILSLSNPTSQSECTAEEAYTWSQGRAIFASGSPFAPVEYEGKTFVPGQANNAYIFPGFGLGLIMSGTIRVHDDMLLAASEALAEELMEEHYEKGMIYPPFRNIRKISARIAAKVAAKAYELGLATRLPQPKELEQCAESSMWKLTKNNIIYHSPMVREKDICWEYAEKLDGNKVKCKFCSRVLNGGISRLKHHLSRLPSKGVNPCAKVRDDVTDRVRSILSAKDDPPITNKYKPPPPLSPPFDAPASKLVFPSSPPNAQDIAERSISLFFFENKIDFAVARSPSYHHMLDAVAKCGPGFVAPSPKTEWLDRVKSDISLQLKDTEKEWVTTGCTIIAEAWTDNKSRALINFSVSSPSRIFFHKSVDASSYFKNSKCLADLFDSVIQDIGQEHIVQIIMDNSFCYTGISNHLLQNYATIFVSPCASQCLNIILEEFSKVDWVNQCISQAQVISKFVYNNSPVLDLLRKLTGGQDIIRSGVTRSVSNFLSLQSMMKQKARLKHMFNCPEYTTNTNKPQSISCVNILEDNDFWRAVEESVAISEPILKVLREVSTGKPAVGSIYELMSKAKESIRTYYIMDENKHKVFSDIVDTNWCEHLHSPLHAAAAFLNPSIQYNPEIKFLTSLKEDFFKVLEKLLPTSDLRRDITNQIFTFTRAKGMFGCNLAMEARDSVSPGLWWEQFGDSAPVLQRVAIRILSQVCSGYNLERQWSTFQQMHWERRNKIDREILNKLAYVNQNLKLGRMITLETDPIALEDIDMMSEWVEEAENPSPAQWLDRFGTALDGGDLNTRQFGGAIFSANDHNIFGL

SEQ ID NO: 47597 - protein, 423 aa, Gloeobacter violaceus PCC 7421
MKSRNQRELKRVVVTGMGSITPLQNDPESFWQQLLVGRSGVSRITYFDTSHHRCQIAAEVKGFEASDYLSLKAAKRTERCIQFAIAGARQALDDAQFSIDALNASQVGVVIGTAIGGIRIFEAQANVYAQKGPDRCSPFLTPMTICNMAAAQVAIQIGATGPCFCPATACAAGSNAIGDAFRLIQLGHVQAVIAGGTEAPITPLVIAGFEAARVVSTLNQEPEKASRPFDKSRDGFVIGEGSGILLLEELEHALRRGKKIYAELIGYGASCDAHHITSPLPTGAGAAQAMRLAIEDADLSPGQVNYINAHGTSTLANDAMEIKGISLAFGELAPLIPINSTKSMTGHLLGAAGGIEAIATIMTITKDQIPATLNLQNPDTECDLDFVTKESRHKIVDVAMSNSFGFGGHNVSLIFRKFPGMLE

SEQ ID NO: 47598 - protein, 147 aa, Geobacter metallireducens GS-15
MAIVKYTPFGDLRNLQEQMNRLLDMAWSRESGEELREGVWQPPVDIFEDENGVVIKAELPGIDQKDIEVKIEDNTLTIRGERKHDQEVKKENYHRVERYYGSFMRSFSLPTTIDRDTVKAVCDKGILTITLPRREETKPKQINVEVK

SEQ ID NO: 47599 - protein, 412 aa, Caulobacter crescentus CB15
MAAPSAAKVEAAAKAVQPKVVAWRRDIHENPELGNQEVRTAALIAKELKALGIEVREGVGKTGVVGVLKGGKPGKVVALRADMDALPVEEKTGLPFASKVKATWEGRTVPVMHACGHDTHVAMLLGAATVLAGMKQDIQGTVVFIFQPAEEGPPAGEEGGAKLMIRDGALDNPKVDAVFGVHIGPGDPHELNYRPEGFYASSDRITITVKGRQTHGARPWAGIDMASVAADIIQATNQIAARQVDVGVSPSVLTIATINMGFRQNIIPEDLKMEGTMRTFSKERREDLIARMQKSVTAIGDRYGAKAEVAFTQPYPVTYNDPALSKWVKGTLEKASPGKVDDNAALVTGAEDFSMYAEKVPGVFIQLGGRKADVPRETVPVNHSPYFDVDEAVFETGVKAHAFMALDYLAKK

SEQ ID NO: 47600 - protein, 485 aa, Chlamydia trachomatis D/UW-3/CX
MIARTKIICTIGPATNTPEMLEKLLDAGMNVARLNFSHGTHESHGRTIAILKELREKRQVPLAIMLDTKGPEIRLGQVESPIKVQPGDRLTLVSKEILGSKESGVTLYPSCVFPYVRERAPVLIDDGYIQAVVVNAQEHMVEIEFQNSGEIKSNKSLSIKDIDVALPFMTEKDIADLKFGVEQELDLIAASFVRCNEDIDSMRKVLESFGRPNMPIIAKIENHLGVQNFQEIARAADGIMIARGDLGIELSIVEVPGLQKFMARASRETGRFCITATQMLESMIRNPLPTRAEVSDVANAIYDGTSAVMLSGETALGAHPVHAVKTMRSIIQETEKTFDYHAFFQLNDKNSALKVSPYLEAIGFSGIQIAEKASAKAIIVYTQTGGSPMFLSKYRPYLPIIAVTPNRNVYYRLAVEWGVYPMLTLESNRTVWRHQACVYGVEKGILSNYDKILVFSRGAGMQDTNNLTLTTVHDVLSPSLDEIVP

SEQ ID NO: 47601 - protein, 174 aa, Cicer arietinum
NISGGHLNPAVTFGLAIGGNITIITGLFYWIAQLLGSIVASLLLNYVTSKSVPTHGVAAGLSPIAGLVFEIIVTFGLVYTVYATAADPKKGSLGTIAPIAIGFIVGANILVAGPFSGGSMNPARSFGPAVVSGNFADNWIYWVGPLIGGGLAGLIYGDIFIGSYAPAPASETYP

SEQ ID NO: 47602 - protein, 432 aa, Geobacillus kaustophilus HTA426
MNKPVLDIQDRPTVGQWITLSLQHLFAMFGATILVPYLVGLDPSIALLTSGLGTLAFLLITKWQVPAYLGSSFAYIAPIIAAKTAGGPGAAMIGSFLAGLVYGVVALIIKKAGYRWVMKLLPPVVVGPVIIVIGLGLAGTAVGMAMNGPDGKYSLLHFSVALVTLAATIVCSVLARGMLSLIPVLVGIVVGYLYALAVGLVDLSKVAAAKWFEWPDFLIPFADYPVRVTWEIVMLMVPVAIVTLSEHIGHQLVLSKVVGRDLIQKPGLHRSILGDGTATMISALLGGPPKTTYGENIGVLAITRVYSVYVLAGAAVIAIAFGFVGKITALISSIPTPVMGGVSILLFGIIASSGLRMLIDSRVDFGQTRNLVIASVILVIGIGGAVLKISDSFQITGMALSAIVGVLLNLILPGRPQAAENLFEENQSDHVA

SEQ ID NO: 47603 - protein, 164 aa, Nostoc sp. PCC 7120
MRRLFALILVICLSFSFAPPAKALGADLTPCAENPAFQALAKNARNTTADPQSGQKRFERYSQALCGPEGYPHLIVDGRLDRAGDFLIPSILFLYIAGWIGWVGRAYLQAIKKDSDTEQKEIQLDLGIALPIIATGFAWPAAAVKELLSGELTAKDSEITVSPR

SEQ ID NO: 47604 - protein, 303 aa, Escherichia coli
MSQNTLKVHDLNEDAEFDENGVEVFDEKALVEEEPSDNDLAEEELLSQGATQRVLDATQLYLGEIGYSPLLTAEEEVYFARRALRGDVASRRRMIESNLRLVVKIARRYGNRGLALLDLIEEGNLGLIRAVEKFDPERGFRFSTYATWWIRQTIERAIMNQTRTIRLPIHIVKELNVYLRTARELSHKLDHEPSAEEIAEQLDKPVDDVSRMLRLNERITSVDTPLGGDSEKALLDILADEKENGPEDTTQDDDMKQSIVKWLFELNAKQREVLARRFGLLGYEAATLEDVGREIGLTRERVR

SEQ ID NO: 47605 - protein, 1008 aa, SYNECHOCOCCUS SP. WH 8102
METDRRLCLRQHPMGHVSGTRGDTPLKATRTEWIETFRSRSRRDLRSGWRRSHALEREPFILESWGKNNRPDWAARGLLIWPRGRAWLRLEQTVVRPEAWPDASHHRARLCLSWWAESARLWVDGVLVHQGDLFDTACRWTLPEAFLAGHVHRIQLELCSPLHDDGALISSWLDLEPNRPGEDPAGVLLPEALLLHLEAGGDLPFGWEQMDPNSEAALKAVAQQLKAQPTPQGAVHWFGHAHLDLAWLWTVADTWQAAERTFRSALALMKRWPDLRFAHSTPALYAWMEHHRPELFSAICKASRAGRWEPINGPWVETDCVLVSTASLWQQFAIGQAYSREIFPEWRHHLAWLPDSFGFAAGLPAVAQATGVRWFCTHKLAWNASNSFPHRLFRWRSRGGGDVMSLMLPPIGRRGDPSDILKEQRRWQQCSGVSELLWIPGVGDHGGGPTEEMLEQMQLWDPEPSALPRQAGSLRQYLDRLEPMAGQLPVWRDELYLELHRGCATSRPDQKRHNRSLERLLRESDTVAALLAFAGRPSVGSDWRPLLFQQFHDILPGTSIPEVFDQAEPIWRRARRQARHQRDQGLRQLLGVDSGSGASSTWLWMGWQPLARWSPLLKLPHGAWHTDGAALPQQPSVQGGTWVQLPEQRGICSVALSDGPVDSGEIAPRHPVSVVQVSPEIWRVSNGLVEFECSPVGLLQLRDAQGVDQLSAPLCPCRYRDRGEFWDAWDIAAEYRRHPLELEPVGSVQLLESGPLVAQLVVTYRVGASRMRLDLRLKADCPWLELIVSVDWCQRHELLRLDIPLASAAVRLAADTSGGVIERPAHPQTPREQERWEVPAISWLASQAKAPGGGIAVLLDGPQGVDGATDRLGVSLLRGATWPDPSADQGQQRMRLALMPFQGSWAHAAVPQAAIAFREPGWHGPIAAGQHQTSMGTRCWLPAIPRWLCPIALRPDANGVVLQLLNPGASRCRWQPGAGWKVGRSVAADDWIELAPGELVELRLAQSS

SEQ ID NO: 47606 - protein, 313 aa, Escherichia coli
MSQNTLKVHDLNEDAEFDENGVEVFDEKALVEEEPSDNDLAEEELLSQGATQRVLDATQLYLGEIGYSPLLTAEEEVYFARRALRGDVASRRRMIESNLRLVVKIARRYGNRGLALLDLIEEGNLGLIRAVEKFDPERGFRFSTYATWWIRQTIERAIMNQTRTIRLPIHIVKELNVYLRTARELSHKLDHEPSAEEIAEQLDKPVDDVSRMLRLNERITSVDTPLGGDSEKALLDILADEKENGPEDTTQDDDMKQSIVKWLFELNAKQREVLARRFGLLGYEAATLEDVGREIGLTRERVRQIQVEGLRRL

SEQ ID NO: 47607 - protein, 585 aa, Bacillus licheniformis ATCC 14580
MRKTKIVCTIGPASESVEKLTQLMEAGMNVARLNFSHGDFEEHGARIKNIREAAGKLGKDIGILLDTKGPEIRTHTMENGSIELAAGSQLIVSMDEVIGTPDKISVTYDGLIHDVSVGSTILLDDGLVGLEVTDINKDKREIVTKVMNSGTLKNKKGVNVPGVSVNLPGITEKDANDIVFGIEQGVDFIAASFVRRPSDVLEIRELLEEHNAADIQIIPKIENQEGVDNIDAILEVSDGLMVARGDLGVEIPAEEVPLVQKELIKKCNALGKPVITATQMLDSMQRNPRPTRAEASDVANAIFDGTDAIMLSGETAAGNYPVEAVQTMHNIASRSEEALNHKKILSARSKQVSMSITDAIGQSVAHTAINLDVNAIVTPTESGHTARMISKYRPQAPIVAVTVNDAVSRKLSLVFGVFATSGQNHSSTDEMLEKAVQKSLDTGIVRHGDLIVITAGAVGEAGTTNLMKVYVVGDVVAKGQGIGRKSAFGEVVIAQNAQEAAKKMKDGAVLVTKSTDRDMMASLEKAGCADYGRRRLNKPRAVVGLSLGIPVIVGMENATSILKEGEDITVDSARGAVYKGRASVL

SEQ ID NO: 47608 - protein, 706 aa, Candida boidinii
MALAKAASINDDIHDLTMRAFRCYVLDLVEQYEGGHPGSAMGMVAMGIALWKYTMKYSTNDPTWFNRDRFVLSNGHVCLFQYLFQHLSGLKSMTEKQLKSYHSSDYHSKCPGHPEIENEAVEVTTGPLGQGISNSVGLAIASKNLGALYNKPGYEVVNNTTYCIVGDACLQEGPALESISFAGHLGLDNLVVIYDNNQVCCDGSVDIANTEDISAKFRACNWNVIEVEDGARDVATIVKALELAGAEKNRPTLINVRTIIGTDSAFQNHCAAHGSALGEEGIRELKIKYGFNPSQKFHFPQEVYDFFSDIPAKGDEYVSNWNKLVSSYVKEFPELGAEFQSRVKGELPKNWKSLLPNNLPNEDTATRTSARAMVRALAKDVPNVIAGSADLSVSVNLPWPGSKYFENPQLATQCGLAGDYSGRYVEFGIREHCMCAIANGLAAFNKGTFLPITSSFYMFYLYAAPALRMAALQELKAIHIATHDSIGAGEDGPTHQPIAQSALWRAMPNFYYMRPGDASEVRGLFEKAVELPLSTLFSLSRHEVPQYPGKSSIELAKRGGYVFEDAKDADIQLIGAGSELEQAVKTARILRSRGLKVRILSFPCQRLFDEQSVGYRRSVLQRGKVPTVVIEAYVAYGWERYATAGYTMNTFGKSLPVEDVYEYFGFNPSEISKKIEGYVRAVKANPDLLYEFIDLTEKPKHDQNHL

SEQ ID NO: 47609 - protein, 318 aa, Shewanella oneidensis MR-1
MANTLEQLKSYTTIVADTGDIEAIKRYQPEDATTNPSLILKAAQIPEYSALIDNAIAWAKLQSTDIEQQIDDASDKLAVNIGVEILKLVPGRISTEVDARLSFDKEKSIAKAHKLVRLYQEAGVDKSRILIKLASTWEGICAAKELEQEGINCNLTLLFSFSQARACAEAGVYLISPFVGRILDWYKKDTGKDYDAVNDPGVVSVTEIYNYYKQHGYNTVVMGASFRNIGEIIELAGCDRLTIGPSLLEELANSQLAIQPKLVPTSTTVAVAEPLTEAQFRWEFNQDAMAVDKLAEGIRNFAIDQGKLEVMLKAKLAN

SEQ ID NO: 47610 - protein, 635 aa, Solanum tuberosum
MESCDCIEALLPTGDLLVKYQYLSDFFIAVAYFSIPLELIYFVHKSACFPYRWVLMQFGAFIVLCGATHFISLWTFFMHSKTVAVVMTISKMLTAAVSCITALMLVHIIPDLLSVKTRELFLKTRAEELDKEMGLIIRQEETGRHVRMLTHEIRSTLDRHTILKTTLVELGRTLDLAECALWMPCQGGLTLQLSHNLNNLIPLGSTVPIIFLLSMRFLVALKQYRFHIPNPLARMRNTVGRYIPPEVVAVRVPLLHLSSFTNDWAELSTRSYAVMVLVLPMNGLRKWREHELELVQVVADQVAVALSHAAILEDSMRAHDQLMEQNNALDDARQEAEMAIRARNDFLAVMNHEMRTPMHAVIALCSLLLETDLTPEQRVMIETILKSSNLLATLINDVLDLSRLEDGILELENGTFNLHGILREAVNLIKPIASLKKLSITLALALDLPILAVGDAKRLIQILLNVAGNAVKFTKEGHISIEASVAKPEYARDCHPPEMFPMPSDGQFYLRVQVRDTGCGISPQDIPLVFTKFAEARPTSNRSTGGEGLGLAICRRFIQLMKGNIWIESEGSGKGTTVTFVVKLGICNHPNALPLLPMPPRGRLNKGSDDLFRYKQFRGDDGGISVNAQRYQRSL

SEQ ID NO: 47611 - protein, 242 aa, Oryza sativa
  misc_feature (169)..(169): Xaa can be any naturally occurring amino acid
  misc_feature (195)..(195): Xaa can be any naturally occurring amino acid
  unsure (1)..(242): unsure at all Xaa locations
RELGHYGRRGGMQIFVKHLTGKNITLEVESSDTIDNVKAKIQDKEGIPPDQQRLIFAGKQLEDGRTLADYNIQKESTLHLVLRLRGGMQIFVKTLTGRTITLEVESSDTIDNVKAKIQDKEGIPPDQQRLIFAGKQLEDGRTLADYNIQNESNLHLVLRLRRGMQIFVXTLTGKTITLEVESSDTIDDVKAQISXQEGIPQDKQRLIYDGTPLDHGRHLPTTSPNDHLTWARPAGAHRTPTA

SEQ ID NO: 47612 - protein, 183 aa, Triticum aestivum
  misc_feature (63)..(63): Xaa can be any naturally occurring amino acid
  unsure (1)..(183): unsure at all Xaa locations
MHPTRRELSLMVDLQAAGLVISSGRPGRSGCKVAWEGFTDASDADLVAEHEIWAAVDPFAKNXEAFNCSNGDVFKWKQLWPMLAERFGVEWAGYEGEDSRFALADAMTGKEAVWTEILQENELVTTELEEITSWGFVDAMFNIDIEHLDNMNKSKEHGFLGFRNTVNSFNAWIDKMKASKVVP

SEQ ID NO: 47613 - protein, 625 aa, Oryza sativa
MATAEPVEPQSLKKLSLKSLKRSHDLFAPTHSLLFTPDPESKQVRVGCKVNAEYSAVKNLPTDQGRGQVKSAAAPSTALALPGTQDVKDADNKGSSTAIVPAPHMLPKAPDSTIPGKNTTITIPGSSDRFSTSALMERIPSRWPRPVWHAPWKNYRVISGHLGWVRSIAFDPSNEWFCTGSADRTIKIWDLASGTLKLTLTGHIEQIRGLAVSQRHTYLFSAGDDKQVKCRDLEQNKVIRSYHGHLSGVYCLALHPTIDILLTGGRDSVCRVWDIRTKAHVSALTGHDNTVCSVFARPTDPQVVTGSHDSTIKFWDLVAGRTMCTLTHHKKSVRAMALHPKEKSFASASADNIKKFSLPKGEFLHNMLSQQKTIINSMAVNEDGVLATGGDNGSLWFWDWKSGHNFQQDQTIVQPGSLESGVISGHLGWVRSIAFEAGTEGVGRGAGDRRRQTWERAGGAGELAGRGRGEEKGGRDRRAGQAAGAKTGAATTNRGGAQAGQQDRLRRDKGGPPKHDSPLSQTTAPAHRATQLHPPARHPKLPHQPDKPNNLHRARGCAPYSLYGRGARGASSPPVRPPPPPPSPSPASAAASRSNRNRIHHHPNLLLLPPAAARSGVLTCCCLLF

SEQ ID NO: 47614 - protein, 602 aa, Neurospora crassa
MASLLWSGYRSESVDDYPGVLVPLEEAHLHSHSSRSRPPSDLDDAVLGYDDEGGHRHKDPADDEDTGMLLEMGTEPEYSIEGLRREVRRGNKGGEKWTDYEMKSKLINKAIQDIGMGRYNWQLFVLCGFGWFADNLWMQGISLTLPSLSAEFDISEKTVRYTTSFLFAGLCVGSFIWGIGSDVLGRRLAFNATLFITAIFGIASAFATSWAGVCFLYAALGFGVGGNLPVDGALFLEFLPDASSSLLTLLSVWWPIGQLCSSLLAWYFIGHLPAEQGWRHFVFSIGIITLIMFLVRFFIFHLYESPKFLLSSGRQAEAVAVVHGIAFRNGRKTWLTEEILDAVVDGLSSLSPATPRRRQHVTRQRLSTANIIKQRFASFSSNRLRPLFSSRKLGLTTVLIWFCWATIGMGYPLFNAFLPQYLSHGGNNGGQQPAPETSTSIDSPETISAETYRNYAITSIAGVPGSLLAAYAVDMKSPFFGRRGTLALSTLVSAIFLYLFIKFGTTSAALLTFSCIEAFAQNIMYGVLYAFTPEIFPAPVRGAGTGVASFLNRVTGLVAPILAATVPGDGRTTPVYLSAALILAAFVGMVLIPIETRGRQRL

SEQ ID NO: 47615 - protein, 387 aa, Triticum aestivum
  misc_feature (336)..(336): Xaa can be any naturally occurring amino acid
  unsure (1)..(387): unsure at all Xaa locations
MEAAAECAGGGGGGLREVKKEAGAGDVFLVDDLLDLPCDDDEEEDDAAAAGFADGAADCSAGEAGAGDVGNASADSSTVTAVDSCSNSLSGGLADGDFSGGLCEPYDQLAELEWLSNYMGDDNFPTEDLRKLQLISGIPSASSQTAPRAPAAAPVQPCGGGGAVGTALWRSEAHAGQVSVPGKARSKRSRVAPCNWSSRLLVLPPAPASPPSAASAVISPSESGTAFPLFPNKKPAKSSKKKEAPAAPAMTAAEAAAAEGRRCLHCETEKTPQWRTGPLGPKTLCNACGVRYKSGRLVPEYRPAASPTFVPSKHSNSHRKVVELRRQKDTPAPLAXHQPQQQQLGPGLGFHVPSPLLFDGPAAPHLGGGADEFLIRNRIGPDHRQLI

SEQ ID NO: 47616 - protein, 1080 aa, Desulfovibrio vulgaris subsp. vulgaris str. Hildenborough
MPHSSRSAIGLQVRVSLLVLMVTMVLLAGFAFWEHTLLREAEEMQLRQETRLLADRAARLLALPLWNLDGPSARAIIQAEMDDPRVYGIAVFEQGRQLFEGMQRDASWRVVPWVGSAPPDVVEERRDLVVEGTQVGSLSIMVSPRFLAARLAERFQQAVWRYTLLAGILAVGLMLLVRSVLIAPLGRLGGVARRVTSEENFALRAPKGADDEIGELVDSFNAMLERIEQRNRLLGEQRRRLEMEVSERTAEFVGARERAERESKAMADFLAAITHEVRTPMTGIIGLLDISLRGQLEPRLREHLEIVRSSSHALLDVINGVLDFSRIEAGKLRIERIPFALRESVEDVLDLFRAHLAERDVALVLDMASDLPCKVAGDPTRLRQVLVNIVGNAFKFTEQGEIVVRISHERQGDGSVLLRFAVRDTGVGIPAEARKRLFEMFSQADASVARRFGGSGLGLAIARELVRLMGGSIEVDSTPGRGTVFRFTVHCGFVEGPSDPLPLPQGVRVVLGESHASLQRVLSGLLRRWGAEVVAVSGAAALKDAAADADVCVLSSHLQGGLAALSRPGQPGPPVLLLVPYGEEPEPSLCAGAGVVAFVGRPVRAATLRAALDAVFAPGMPDGAQATAMKGDMRAGLHIPSSRDGSGGASSAARVVEGQAVTGPMTQPGAMPSVGASGDGHDADQSVHEGGSGLEGMRVLVAEDDDVSRLVLREMLTGFGVQVNETADGATMLAHFAAAPYDVVLIDVQMPVLDGFATLERLRALPDGDTVPVALFTAQKLSVAELAERGIRVAGVVEKPLEMETLVAFLRGLRAVKGQGRHDVAGADAAPRMAGQEHGESAVTDATLSPNAATLISGETLVLGGTADGAATRGVGVPGMAAVAEVIASGGHETETSSSTSDANASSFESGAATPSSIPGDGASSHMPDAEASSVPAGVADVSAVAATTTSRSRAPRRLAGPPLPTALEGVDIGEVLTRVGGKEWLLLKVLRSFVTAYADAADGLAAMVEAGDDEAVKLRGHTLAGAAGNISAHELRAICLALEMGGDKSTQQSLVAAFRGELDRVVTSIREMLARYEEP

SEQ ID NO: 47617 - protein, 698 aa, Solanum demissum
MSLNRTCNSSFWTKEEDKAFENALAVFSGDNDKFLKIAAAVPGKSLQEIIDHYNVLVEDINDIESGKVPLPKYERMQSSSSCRRRSLGAGVERRKGLPWTAEEHRSFLQGLAKHGKGDWRGISRNFVFSRTPTQVASHAQKYYSRLNDNNAKRRKSIHDVTSVGAANITEPSQGQKSDELTGPCGGQSQWPIADYVTEAFDTGMLSLPGSVTNCTTDAIEGPSAVNPEKFPLVAALGSELNSSFPGVDEFLQSVEDLIIVPAEGTSGVCHGVDTRTSPSLSVQPSVTGGTGMYTHPVSFPDVHEFLQEVEDLITVPAEGTSGACHGIDTRTSPSLSLQSSVAGGTRMYTHSVTVPAEGTSGVRCGIDTRTSPSLSLQPSVAGGTRMYPHPVNVLAEGTSGASHGVDTRTSPSLSLQPSVAGGSRIYPHPVNVPAEGISGVSHGVDTRTSPSLSLQPSVGGGTGMYTHPVTVRVEGTSGARRGVDTRTSPSLSLQPSVVGGIGMYTHPIIVPAEGTSGTRRGVDTRTSPSLSFQPSVGGGTGMYTHPVTVLAEGTSGVRCGVGTRTSPSLGLQPSVAGGTRMYTHAVNNVGYDLEELMTKQLVGASQEGPSINTASLPSPIADHIGLHGCTTSSSVAKNGFVSTMEAPGGGFSVDSMQTPSIPGHIGGGTYPCWEPSSKDDSIFDLEYLYTDHMFGFRK

SEQ ID NO: 47618 - protein, 678 aa, Chlamydia trachomatis D/UW-3/CX
MRHSVYQLDSAVENVFRLAWTLRFSERKMLLLSRQSGSGGSFQLSCAGHELAGVVAAKSLIPGKDWAFPYYRDQGFPLGLGCDLSEIFASFLARTTQNHSAGRMMPYHYSHKKLRICCQSSVVGTQFLQAAGRAWGVKNSGKSEVVYVSGGDGSTSQGEFHEMLNFASLHQLPLVIAIQNNQWAISVPFADQCGADLVALGNSYSGLATYEVDGGDVSALTQTFERAVSDARHRHIPALVIVNVVRLESHSNSDNQAKYRSEEDLSCCQAQDPLVRLEKSLLDDFGVAHEVIEQIKAELQETVNQACELAESAPFPCKGATKHEVFAPYNISLIDYENALETASLQKLEPRVMRDAITEALVEEMQRDPGVVVFGEDVAGNKGGVFGVTRTLTEQFGENRCFNTPLAEATIIGAAVGMAFDGFYKPVAEIQFADYIWPGINQLFSEAASIYYRSAGEWEMPIVIRTPCGGYIQGGPYHSQNIEAFLAHCPGLKVVYPSNAADAKALLKAAIRDPNPVVFLEHKALYQRRLFSTTPVFSSDYVLPFGQARIVHPGTDLTIVSWGMSLVMSVEVARDLLELGISVEVIDLRTIVPCDFATVCESVKKTGKLLVVHEASEFCGFGSELVALVAERAYRYLDAPIKRIGALHAPVPYSKVLENEVLPQKEKIFQEAKLLAEF

SEQ ID NO: 47619 - protein, 558 aa, Glycine max
EAEVAEVQAWWNSERFRLTKRPYTARDVVSLRGNLRQTYASNEMAKKLWRLLKNHQANGTASRTFGALDPVQVTQMAKHLDTIYVSGWQCSATHTTSNEPGPDLADYPYDTVPNKVEHLFFAQQYHDRKQKEERMRMSREERARTPYVDYLRPIIADGDTGFGGTTATVKLCKLFVERGAAGIHIEDQSSVTKKCGHMAGKVLVAISEHINRLVAARLQFDVMGVETVLVARTDAEAANLIQSNIDTRDHQFILGVTNPNLKGKSLATLMQQGMAAGKNGAELQALEDEWLSKAQLKTLSEAVVEAIERQNNIGEEEKRRKLNEWMHHSSYERCLSNEEGREIAEKLGVRNLFWDWDLPRTREGFYRFKGSVTASVVRGCAFSPHADVIWMETASPNVVECTEFSEGVRSKHPQMMLGYNLSPSFNWDASGMSDEQMKDFIPKIAKLGYVWQFITVGGLHSNALITSTFARDFANRGMLAYVERIQREERNNGVDTLAHQKWAGANYYDRYLKTVQGGVASTAAMGKGVTEEQFKESWTRSGAVNIDRGSIVVAKARM

SEQ ID NO: 47620 - protein, 113 aa, Heterosigma akashiwo
AKTPSKKAAKAPKKAGSKRNKRVETYSSYIYKVLKQVHPDTGISKRGMSIMNSFINDIFERLAGEASRLARYNKRSTLSSREIQTAVRLMLPGELAKHAVSEGTKAVTKFTSN

SEQ ID NO: 47621 - protein, 1051 aa, Methanosarcina acetivorans C2A
MTVIINKLKNTKNSLPLLEFTLTKLWESRSDGMLTHEAYTRIGGTSGAIGQWANETYNSLNTEEKELARKIFTRLIHYGNGDFPDSRRRLPLESLAGESDEQAVHRLIKKLADAHILVTDCDLSKGTETVEIIHDSLLIEWKQLNKWISEHRGFLTWRQRLEDKMEEWNRKGDEGNLLRGAPLVEAKNWMEKNKRELQSDEIKYIEASSELEEKTRAEKEKARSLIIKGLAIFSIFILILAGVAAYQWYQTEQQKQLAESLSLSSKSTSISSFLQKNPKNRDKSILFAIESFQILKTVDADQLIRQGLLFIPHSVVVLKHDDWVNKTIFSPDGKYVATVSNEKAQIWDLSTEETIDVISHNGSVRDVNFSPDGKYVATASRDKTSHIWNISTHKEIAVLNHNDELAKVFFSPNGKYIATMSYGSTAYVWNASTYEQIAVLKHADKVCDVELSPDGKYIATASQDNTSRLWDVTEAENITLKHTLKHNGSVLDVTFSPDGEKVATASQDKTACIWDVSTGKQITVLNHSNSVSKIIFSSDGKKVAMMISGNIACLWNSTGKQIDVMNHTDVMRDVAFSPDGEKVATASADRTSRLWNVSTGKEIAVLKHDYSIKKVFFSPDGKKVATASADETARLWDAYTGKEIAIMNHGKDVVDIAFSPDGKKVATASADNTSCIWDVYTEIPVLNHKDSVLNVEFSPDGVYVATASQDNTARVWDAYTGEEISVLKHDAGINKAVFNRDGKYVATASQDNTARVWNTSTGKDITLKHGGGVLDVAFSPDGKYVATASQDNTARVWNWNAPTGENITLKHEGWVNKIVFSPDGKYVATASADNTARIWSASTGKQIDVISHDGSVQDVEFSSDGKYVATASDDNTAKVWNWNTSTRKNITLKHTLNHSNKVHDVAFSPDGKKVATASWDKNARIWNLSISNDFTNLSHDDYVSRVEFSSDGKFIATTSYGETAFIWDASTGDKIAAISHDGVVNDVVFSPNGKYIATASDDNTAKVCLCNIEDLINETKNCLDRNLTQEELKEYMDNESYHDQETFPNLL

SEQ ID NO: 47622 - protein, 785 aa, Triticum aestivum
MAKAPCLCARPSLAARTRRPGPGPAPRLRRWRPNATAGKGVGEVCAAVVEVATKAEDEGEEDEPVAEDRYALGGACRVLAGMPTPLGATALAGGVNFAVYSGGATAAALCLFTPEDLKADRVTEEVPLDPLMNRTGNVWHVFIEGELQDMLYGYRFDGTFAPHCGHYLDVSNVVVDPYAKAVISRGEYGVPARGNNCWPQMAGMIPLPYSTFDWEGDLPLRYPQKDLVIYEMHLRGFTKHDSSNVEHPGTFIGAVSKLDYLKELGVNCIELMPCHEFNELEYSTSSSKMNFWGYSTINFFSPMTRYTSGGIKNCGRDAINEFKTFVREAHKRGIEVILDVVFNHTAEGNENGPILSFRGVDNTTYYMLAPKGEFYNYSGCGNTFNCNHPVVRQFIVDCLRYWVTEMHVDGFRFDLASIMTRGSSLWDPVNVYGAPIEGDMITTGTPLVTPPLIDMISNDPILGGVKLVAEAWDAGGLYQVGQFPHWNVWSEWNGKYRDIVRQFIKGTDGFAGGFAECLCGSPHLYQAGGRKPWHSINFVCAHDGFTLADLVTYNNKYNLPNGENNRDGENHNLSWNCGEEGEFARLSVKRLRKRQMRNFFVCLMVSQGVPMFYMGDEYGHTKGGNNNTYCHDSYVNYFRWDKKEQYSDLHRFCCLMTKFRKECEGLGLEDFPTAERLQWHGHQPGKPDWSENSRFVAFSMKDERQGEIYVAFNTSHLPAVVELPERTGRRWEPVVDTGKPAPYDFLTDDLPDRALTIHQFSHFLNSNLYPMLSYSSVILVLRPDV

SEQ ID NO: 47623 - protein, 684 aa, Zea mays
  misc_feature (616)..(616): Xaa can be any naturally occurring amino acid
  unsure (1)..(684): unsure at all Xaa locations
MAAAEARGADFPVGMKVLVVDDDPTCLVVLKRMLLECRYDVTTCPQATRALTMLRENRRGFDVIISDVHMPDMDGFRLLELVGLEMDLPVIMMSADSRTDIVMKGIKHGACDYLIKPVRMEELKNIWQHVVRKKFNGNKDHEHSGSLDDTDRNRPTNNDNEYASSANDGGDGSWKSQKKKREKEDDETDLESGDPSTSKKPRVVWSVELHQQFVNAVNHLGIDKAVPKKILELMNVPGLTRENVASHLQKFRLYLKRIAQHHAGIPHPFVASASSAKVAPLGGLEFQALAASGQIPPQALAALQDELLGRPTSSLALPGRDQSSLRLAAIKGNKPHGEREIAFGQPIYKCQNNTYGAFSQSSPAVGGLPSFAAWPNNKLGMTDSSNTLGNVGNSQNSNMLLHELQQQPDTLLSGTLHNIDVKPSGVVMPSQSLNVFPASEGISHNQNPLVIPSQSPSFLASVPPSMKHESLLGSPSPSTSLLGGLDMVNQASTSQPLISSHGANLPGLMNRSSNAMPSPGISNFQSGNIPYVVNQNAMGVSSRPPGVLKTECTESLTHSYGYIGGSTSVDSSLLSSQAKNPQYGLLQSQNDVSSSWLSSQDFDSFGNSLGQGHPGXTSSSFQSSALGKLPDQGRGRNHGFVGKGTCIPSRFAVDEVGSPTNLSHNIVNSGDIVNPDIFGFSGQM

SEQ ID NO: 47624 - protein, 242 aa, Arabidopsis thaliana
MAAFPNLNSDAGLKKLDEHLLTRSYITGYQASKDDITVFAALAKPPTSQYVNASRWYNHIDALLRISGVSAEGSGVIVEGSAPITEEAVATPPAADSKDAAADEEDDDDVDLFGEETEEEKKAAEERAASVKASTKKKESGKSSVLIDIKPWDDETDMKKLEEAVKSIQMEGLFWGASKLVPVGYGIKKLQILCTIVDDLVSIDTMIEEQLTVEPINEYVQSCDIVAFNKICKFHEPIRNSF

SEQ ID NO: 47625 - protein, 480 aa, Arabidopsis thaliana
MASRTTPSRSTPSRSTPSGSSSGGRTRVGKYELGRTLGEGTFAKVKFARNVENGDNVAIKVIDKEKVLKNKMIAQIKREISTMKLIKHPNVIRMFEVMASKTKIYFVLEFVTGGELFDKISSNGRLKEDEARKYFQQLINAVDYCHSRGVYHRDLKPENLLLDANGALKVSDFGLSALPQQEDGLLHTTCGTPNYVAPEVINNKGYDGAKADLWSCGVILFVLMAGYLPFEDSNLTSLYKKIFKAEFTCPPWFSASAKKLIKRILDPNPATRITFAEVIENEWFKKGYKAPKFENADVSLDDVDAIFDDSGESKNLVVERREEGLKTPVTMNAFELISTSQGLNLGSLFEKQMGLVKRKTRFTSKSSANEIVTKIEAAAAPMGFDVKTNNYKMKLTGEKSGRKGQLAVATEVFQVAPSLYMVEMRKSGGDTLEFHKFYKNLTTGLKDIVWKTIDEEKEEGTDGGGTNGAMANRTIAKQST

SEQ ID NO: 47626 - protein, 171 aa, Arabidopsis thaliana
MGASASVPERSVHQFTVKDSSGKDLNMSIYQGKVLLIVNVASKCGFTETNYTQLTELYRKYKDQDFEILAFPCNQFLYQEPGTSQEAHEFACERFKAEYPVFQKVRVNGQNAAPIYKFLKASKPTFLGSRIKWNFTKFLVGKDGLVIDRYGTMVTPLSIEVSVLYISKVPM

SEQ ID NO: 47627 - protein, 214 aa, Physcomitrella patens
LSDIHCTQCLPIRLSLVLSSALSKFRESVAMASAVVSTVVAPVALGGASSCVGAPSESSSVKAFSGLKSATLFSGKTQKLSSVQNGSRVQCMQVWNPIGQPKFETFSYLPPLTDDQIAKQVDYMIQQNLIPCIEFDTVGSVSRTNFSGAGSSGYYDGRYWTMWKLPMFGCTDSSQVLREIQECKSQFPSCWVRVLGFDSKKQVQICGFLVSRPN

SEQ ID NO: 47628 - protein, 188 aa, Brassica napus
  misc_feature (177)..(177): Xaa can be any naturally occurring amino acid
  unsure (1)..(188): unsure at all Xaa locations
MAEVENNVNAAPVSDDELYGFKRQEMYTGTLAGSVAPYGRHVFLCYKSHESWLPRVETEGLPQRFAKSFKDRRADFAVKTNLTVCGGGESDGDVLIFPEMIRYKAIKDTDVDAFVEDVLVNGKPWTSGVQEELSGSFVFGCAHGSRDNRCGVCGPALMEKFEQEIGSRGLSGKIFVXPCFSYRGHKYA

SEQ ID NO: 47629 - protein, 500 aa, Escherichia coli
MVQSAVLGFPRIGPNRELKKATEGYWNGKITVDELFKVGKDLRTQNWKLQKEAGVDIIPSNDFSFYDQVLDFVFVVQCHSDRYTKYDLSPIDTLFAMGRGLQRKATETEKAVDVTALEMVKWFDSNYHYVRPTFSKTTQFKLNGQKPVDEFLEAKELGIHTRPVLLGPVSYLFLGKADKDSLDLEPLSLLEQLLPLYTQILSKLASAGATEVQIDEPVLVLDLPANAQAAIKKAYTYTGEQSNLPKITLATYFGTVVPNLDAIKGLPVAALHVDFVRAPEQFDEVVAAIGNKQTLSVGIVDGRNIWKNDFKKSSAIVNKAIEKLGADRVVVATSSSLLHTPVDLNNETKLDAEIKGFFSFATQKLDEVVVITKNVSGQDVAAALEANAKSVESRGKSKFIHDAAVKARVASIDEKMSTRAAPFEQRLPEQQKVFNLPLFPTTTIGSFPQTKDIRINRNKFNKGTISAEEYEKFINSEIEKVIRFQEDLEVIPDVSQALAW

SEQ ID NO: 47630 - protein, 541 aa, Streptococcus pneumoniae TIGR4
MTLDKGKVVYQIYPKSYKDTTENGIGDFRGIIEKIPYLAKLGVDMVWLNPFYPSPQRDNGYDISDYMAVDPLFGDMADFEKMVCVGKEHKIDFMLDMVLNHCSTEHEWFQKALAGDKYYQDFFFIQDQPTDWQSKFGGSAWTPFGDTGKYYLHLFDETQADLNWRNSNVRKELFKVVNFWRDKGVKGFRFDVINLIGKDEVSVDCPENEGKPAYTDKPIVHNYLRMMNQATFGSDDSFMTVGEMSSTTMENCVLYSSPDRQELSMTFNFHHLKVDYKDGQKWTLAPFDFEELKSLYHSWGKEMSDKDGWSALFWNNHDQPRALNRFVDIQNFRKEGATMLAASIHLSRGTPYIYMGEEIGMIDPDYDSMADYVDVESLNAYQMLLEEGKSQQEAFQIIQAKSRDNSRIPMQWDASENAGFSTGTPWLKAGKSYKYINVENEIQGPIFTFYQDLIRLRKEMPIISEGSYKPAFEDSKQVYAFERQFEDQKLLVLNNFYAKEVEIDLPAVYQNGQILISNYEDAEVSEKILLKPYQTLAIYVN

SEQ ID NO: 47631 - protein, 126 aa, Arabidopsis thaliana
  misc_feature (90)..(90): Xaa can be any naturally occurring amino acid
  misc_feature (93)..(94): Xaa can be any naturally occurring amino acid
  misc_feature (103)..(103): Xaa can be any naturally occurring amino acid
  misc_feature (111)..(111): Xaa can be any naturally occurring amino acid
  misc_feature (117)..(117): Xaa can be any naturally occurring amino acid
  misc_feature (120)..(121): Xaa can be any naturally occurring amino acid
  misc_feature (124)..(124): Xaa can be any naturally occurring amino acid
  unsure (1)..(126): unsure at all Xaa locations
MDLEFGRFPIFSILEDMLEAPEEQTEKTRNNPSRAYMRDAKAMAATPADVIEHPDAYVFAVDMPGIKGDEIQVQIENENVLVVSGKRQRXNKXXEGVKFVKMXKKIGEFFXGVFRLXGNXXLEXGL

SEQ ID NO: 47632 - protein, 502 aa, Pseudomonas aeruginosa
MEKTTTSPVGATYWRSRAENVEFEGRCLIDGKLIEAHSGQTFDCVSPVDGRVLTKVAEGGEADINKAVAAARAAFQDRRWAGQSPIFRKRTLQAFAALIRLHRDELALLETLDMGKPISASRSVDVEAVANCFDWYAEAIDKLYEQIAPTAENDLALITREPLGVVGAIVPWNFPMLTTAWKVAPALATGNSVVLKPAEQSPLTAIRLGQLALEAGIPEGVFNVVPGFGRSAGKALACHMDVDGIFFTGSTATGRLLTEYAAKTNLKRVCLELGGKSPNIILASYGDIEKAAVTAAESMFNNQGEVCIAPSRLIVERSIHKQVVEIVAEIARQRQPGDPLDPATRIGALVNAQHADRVMGFIERAKTDGATLAAGGTRALTETGGSYVVPTVFDNVSNDMEIAREEIFGPVLSVIPVSSVDEAVSVANDSPYGLGAGVWTDSLSDAHKISRKLRAGVVYVNCYNDCDITTPFGGVKQSGNGRDKSLYALDEYTELKTTWIRL

SEQ ID NO: 47633 - protein, 358 aa, Glycine max
MKNEEQARSLFGISLSDRPRWQQFLICSSGFFFGYLVNGICEEYVYNRLHFSYGWYFTFVQGFVYLCLIYLQGFTSKQMVNPWKTYVKLSAVLMGSHGLTKGSLAFLNYPAQIMFKSTKVLPVMIMGAFIPGLRRKYPLHEYISAILLVVGLILFTLADAQTSPNFSMIGVIMISGALVMDSFLGNLQEAIFTMNPETTQMEMLFCSTVVGLPFLIPPMLFTGELFKAWTSCSQHPYVYGVLVFEAMATFIGQVSVLSLIAIFGAATTAMITTARKAVTLLLSYLIFTKPLTEQHGSGLLLIAMGITLKMLPDNKFTSTKTKRVLTSSARDNGAKSTSDEELGTLPNSGENDERRPLV

SEQ ID NO: 47634 - protein, 807 aa, Geobacter metallireducens GS-15
MGNDMRNDVKSLRAGIFSEIIIVFLPLTMLLIYQTVSDITVSDRLADTHRLLAASSSAYQRYRLFVNGVVDAIDTGRVSEDAVHNLEHTTVELKSITTGDRSSDFSSLAARTNALLAHLRKDRSFGKVLPLRDTINGIDADLSALAAQCDETNRQMILENINSTQSRKIMVFTALALGALVTLALIVMLIRHVTRFELVLRESEERMRVMFESINAGIVLIDCDNNSIVDVNPTALRLHGGTKEELIGYPSERLFHGDNVRTDPEHDEGKAIDISKGMLSLCNGERLPVLESVNYVAINGRRYMLKSFVDLSKQMTLETELLAAKEAAEAASRAKSIFLASMSHEIRTPMNAIIGYAQLLKREGNLAPQQGQYLNVINNSGEHLLKLINDILEMSKIESGTVNLTPVPFNFHNLLHDVESLFADRARQKKLRFDVRLQGEVPVVLDADEMKVRQVLINMIGNALKFTDEGTIAVTVSSSTDSPDKERDTYGETAITVDVEDSGIGISAEEADQVFALFEQTESGRRRIGGTGLGMPISRQFARLMGGDLFLVRGEPGIGSAFRFVFRAKALDLAEFKQPAVDERFFWRIIPDEKEWRVLVVDDQENNRSLLSHMLTRAGFAVREADGGIDGVAQFRAWLPDIVLMDILMPDMDGYEALRQIKATSEGGVTPVIAVTASVMMDEHQKALDLGFDGFIMKPVSMECLFEEIRRLTNVAYLYDDSRSSGDAAAEILPPWVDRLTTLPDVLLGAMRDALEAGDIASLRGLIEQIGESEPIPAEALRRLVDSYSYDELTTLLAGGDARYASA

SEQ ID NO: 47635 - protein, 359 aa, Lolium multiflorum
MAHGRILVLALAVLATAAVAAASFADSNPIRPVTERAASAVESTVLGALGRTRHALRFARFAVRHGKSYGSAAEVQRRFRIFSESLDEVRSTNRKGLSYKLGINRFSDMTWEEFQATKLGAAQTCSATLAGNHLMRDANALPETKDWRETGIVSPVKDQASCGSCWTFSTTGALEAAYTQATGKNISLSEQQLVDCAGAYNNFGCNGGLPSQAFEYIKYNGGIDTEESYPYKGVNGVCKYRPENAAVQVADSVNITLNAEDELKNAVGLVRPVSVAFEVIDGFKQYKSGVYTSDHCGTTPDDVNHAVLAVGYGVENGVPYWLIKNSWGADWGEDGYFKMEMGKNMCAVATCASYPILAA

SEQ ID NO: 47636 - protein, 544 aa, Bacillus subtilis subsp. subtilis str. 168
MAKEIKFSEEARRAMLRGVDALADAVKVTLGPKGRNVVLEKKFGSPLITNDGVTIAKEIELEDAFENMGAKLVAEVASKTNDVAGDGTTTATVLAQAMIREGLKNVTAGANPVGVRKGMEQAVAVAIENLKEISKPIEGKESIAQVAAISAADEEVGSLIAEAMERVGNDGVITIEESKGFTTELEVVEGMQFDRGYASPYMVTDSDKMEAVLDNPYILITDKKITNIQEILPVLEQVVQQGKPLLLIAEDVEGEALATLVVNKLRGTFNAVAVKAPGFGDRRKAMLEDIAVLTGGEVITEDLGLDLKSTQIAQLGRASKVVVTKENTTIVEGAGETDKISARVTQIRAQVEETTSEFDREKLQERLAKLAGGVAVIKVGAATETELKERKLRIEDALNSTRAAVEEGIVSGGGTALVNVYNKVAAVEAEGDAQTGINIVLRALEEPIRQIAHNAGLEGSVIVERLKNEEIGVGFNAATGEWVNMIEKGIVDPTKVTRSALQNAASVAAMFLTTEAVVADKPEENGGGAGMPDMGGMGGMGGMM

SEQ ID NO: 47637 - protein, 239 aa, Triticum aestivum
MAVEAVLEAATMIPSPPSKEMEASSSTSEEASALLGQAEGWSKRKRSRRQRALDPSEEEYLALCLLMLAHGHRDSAPAAAPEQQHGCSVCGKVFASYQALGGHKASHRKPTAAPAGAEDQKPLAAVAAASSSGSGEAAVSAGGGKVHECNVCRKTFPTGQALGGHKRCHYDGTIGSAAAGPTQKLAAKAAAASATAASQGFDLNLPALPDIPERCAVTEDGEEVLSPASFKKPRLMLAA

SEQ ID NO: 47638 - protein, 411 aa, Streptomyces avermitilis MA-4680
MIAGEPSFMTESFRRSGEYPEGDHQQPAYPQQQHSSSPVNPEWPPPPAYEPVTPVAVEPGTTVWPSPAQAQAHGHVAGQAADHTFAATGDGGYGGGHGGDTALFTTSPEGAGAAPKKRARGPLALLAAVAIVAAAIGGGTAYGIQELTGNDTASSSTSTNVVPTAKKGTVAGVAQAVSPSIVEISAASNAGSSTGAGVIITSSGEIITNNHVISGASEIKVQLNNGKSYTAKVVGTDSKKDLALIKLESAPSGLKAATLGNSDGVQVGDDVVAIGSPEGLTGTVTSGIVSALDRDVTVSTDESQGQQQQQGGGGNGEWPFSFGGQQFNGDTGSSTTTYKALQTDASLNPGNSGGALIDMNGNIIGINSAMYSAASDSSSSSSSAGSVGLGFAIPINTVKADLETLRSGSTG

SEQ ID NO: 47639 - protein, 319 aa, ASPERGILLUS NIDULANS FGSC A4
MSPPTVKLNSGYDMPLVGFGLWKVNNDTCADQVYEAIKAGYRLFDGACDYGNEVEAGQGVARAIKEGIVKRSDLFIVSKLWNSFHDGERVEPIARKQLSDWGIDYFDLYIVHFPVSLKYVDPEVRYPPGWENAEGKVELGKATIQETWTAMESLVDKGLARSIGISNFSAQLLLDLLRYARIRPATLQIEHHPYLTQERLVTFAQREGIAVTAYSSFGPLSFLELSVKQAEGAPPLFEHPVIKDIAEKHGKTPAQVLLRWATQRGIAVIPKSNNPARLLQNLDVVGFDLEDGELKAISDLDKGLRFNDPPNYGLPITIF

SEQ ID NO: 47640 - protein, 161 aa, Brassica napus
  misc_feature (86)..(86): Xaa can be any naturally occurring amino acid
  misc_feature (157)..(157): Xaa can be any naturally occurring amino acid
  unsure (1)..(161): unsure at all Xaa locations
FFQFLWATYGLWWLKGDQASIVAGAINYLKELEHHLQSIEPPLKSATVPVDTGSAAAAADQINTIAASSLGQFSEFFAFPQYSSRXSSSSVAEGMAEIEVTMVESHASVKILAKKRPKQLLKLAASIQNLKLTVLHLNVTTCDDSVLYSISLKVEEXSQLN

SEQ ID NO: 47641 - protein, 263 aa, Clostridium acetobutylicum ATCC 824
MANKIDLKFKELKYKNKKAMIPFVTSGYPDVETTKKIVIEMEKSGADLIELGIPYSDPVADGPIIQISSSGALNNGLKIKDIMNMVKEVRKNVKIPIVYMGYFGCVFKYGLEKFIKDSKESGVDGIVIPDLPLEERERVKEIADRYEFYIIPLVAPTSEDRIGKIVNGAKGFIYCVSTNGVTGVRNIIANDVKAYIDVVSKASNVPKCIGFGISSPEMAQKMKEYCDGVIIGSAVMKIVEEDIPKEEMIRKVGEFISQVNEVL

SEQ ID NO: 47642 - protein, 431 aa, SYNECHOCOCCUS SP. WH 8102
MADATDQRSIPLLLRWQGCLTPTASVQQRLELLSGVVLMLLLGSLPFVSRSGLGLELAAAGLLWLLWSLITPAKRLGAISRWVLLYLAIAWVCTGFSPVPIAAAKGLLKLTSYLGVYALMRTLLERQIVWWDRLLAALLGGGLFSSVLALRQLYASTDELAGWADPNSVSAGTIRIYGPLGNPNLLAGYLLPLVPLACIAVLRWKRLSCRLLAAVTALLAGSATVFTYSRGGWLGLLAALALAGMLILLRTTAHWPPLWRRLLPLAALLIAGIALALAITQLDPIRTRVLSLVAGRGDSSNNFRINVWLAAIEMVQDRPWLGIGPGNAAFNSIYPLYQQPKFDALSAYSVPLEILVETGIPGLLACLGLLLSSIQRGLRIHGQQGLIAIGSLAAIAGLLTQGITDTIFFRPEVQLIGWFALASLGATWLRD

SEQ ID NO: 47643 - protein, 129 aa, Methanosarcina barkeri str. fusaro
MYNKKVMDHFMNPRNVGEIEDANGVGEAGNPHGDYMKIFLKIRDDRVEDAKFKTFGCAAAIASSSMATELIKGKTLKEAWELTNEDVAEALEGLPPGKLECSVLSREAIHSAINEYRRKQGLGALPEQT

SEQ ID NO: 47644 - protein, 292 aa, Vigna angularis
MGSSLWTCLILLSLASASFAANPRTPIDVPFGRNYVPTWAFDHIKYLNGGSEIQLHLDKYTGTGFQSKGSYLFGHFSMYIKLVPGDSAGTVTAFYLSSTNAEHDEIDFEFLGNRTGQPYILQTNVFTGGKGDREQRIYLWFDPTTQYHRYSVLWNMYQIVFYVDDYPIRVFKNSNDLGVKFPFNQPMKIYNSLWNADDWATRGGLEKTDWSKAPFIASYKGFHIDGCEASVNAKFCDTQGKRWWDQPEFRDLDAAQWQKLAWVRNKYTIYNYCTDRKRYSQVPPECTRDRDI

SEQ ID NO: 47645 - protein, 338 aa, Methylobacillus flagellatus KT
MKVYYDKDADLSLIKKLKVTIVGYGSQGHAHAQNLKDSGVNVTIGARKEGSSFAKAVNAGHEVKEIKEAVTGADVVMVLLPDETMAEIYHAEIEPNLKKGAALAFAHGFNIHYNQIVPSKDLDVIMIAPKGPGHTVRSEYLKGGGVPSLIAVYQDASGKAKDIALSYAAANGGTKGGVIETNFREETETDLFGEQAVLCGGAVELVKAGFETLVEAGYAPEMAYFECLHELKLIVDLMYEGGIANMNYSISNNAEYGEYVTGPRVIADQARAAMKECLKNIQNGDYAKQFILEGRTGYPSMTARRRLNAAHPIEQVGSQLRAMMPWIAKNKLVDQSKN

SEQ ID NO: 47646 - protein, 293 aa, Vigna angularis
MASSLLILCLVLVSLASSALCAAPRRPVDVPFGRNYIPTWAFDHIKYFNGGSEIQLHLDKYTGTGFQTKGSYLFGHFSMNIKMVPGDSAGTVTAFCLSSQNAEHDEIDFEFLGNRTGQPYILQTNVFTGGKGDREQRIYLWFDPTKAYHRYSVLWNMYQIVFLVDNIPIRVFKNLKELGVKFPFNQPMKVYNSLWNADDWATRGGLEKTDWSKAPFVAEYKGFHVDGCEASVNSRFCATQGKRWWDQTEFRDLDSFQWRRLKWVRQKFTIYNYCTDRTRYPQLPPECRRNRDI

SEQ ID NO: 47647 - protein, 248 aa, Triticum aestivum
  misc_feature (129)..(129): Xaa can be any naturally occurring amino acid
  misc_feature (165)..(165): Xaa can be any naturally occurring amino acid
  misc_feature (169)..(169): Xaa can be any naturally occurring amino acid
  misc_feature (201)..(201): Xaa can be any naturally occurring amino acid
  misc_feature (209)..(209): Xaa can be any naturally occurring amino acid
  misc_feature (214)..(214): Xaa can be any naturally occurring amino acid
  misc_feature (216)..(216): Xaa can be any naturally occurring amino acid
  misc_feature (227)..(227): Xaa can be any naturally occurring amino acid
  misc_feature (231)..(231): Xaa can be any naturally occurring amino acid
  misc_feature (233)..(233): Xaa can be any naturally occurring amino acid
  misc_feature (238)..(239): Xaa can be any naturally occurring amino acid
  misc_feature (246)..(246): Xaa can be any naturally occurring amino acid
  unsure (1)..(248): unsure at all Xaa locations
MQIFVKTLTGKTITLEVESSDTIDNVKAKIQDKEGIPPDQQRLIFAGKQLEDGRTLADYNIQKESTLHLVLRLRGGMQIFVKTLTGKTITLEVESSDTIDNVKAKIQDKEGIPPDQQRLIFAGKQLEDXRTLADYNIQKESTLHLVLRLRGGMQIFVKTLTGKTXTLEXVESSDTIDNVKAKIHDKEGISPDQQRPDLLFXKQLEEGRXPCPTXTXRKEVHPFTWGXRLRXGXMQIFXXTPTGKNXTP

SEQ ID NO: 47648 - protein, 577 aa, Bacillus cereus ATCC 10987
MNRGRDVMSKFTVASNGSLETTLRGVEVLSTPLLNKGVAFTQEEREELGLKGLLPPAVLTLEEQARRAYEQFCSQPDDLLKNVYLTALHDRNEVLFYRILTDHLREMLPIVYTPTVGVAIQRYSHEYRKPRGVYLSINDPSGIEEAFANIGATAENIDLVVVTDGEGILGIGDWGVGGINIAIGKLAVYTAAVGIDPSRVLPVILDVGTNREELLNNPFYIGNRHPRITGEAYDEFIDTFVRAVNKQFPKALLHWEDFSSRNARKILDKYRHDICTFNDDIQGTGAVSLAAVLSAVKASGVPLSEHRVVVFGAGTAGIGIADQVRDAMVRVGVSEEESYKRFWCIDRNGLVTDNMKDLLDFQMPYARKEAEVSEWKQNGVIGLAEVVKHVKPTILIGTSTVAGAFKEEIVKEMASHVERPIILPMSNPTPLAEAKPADLIKWTEGRALVATGSPFEPVTYNGVTYVIGQSNNALIFPGLGLGTIVVRASVMTDGMFAAAAEAVASMVDTSQPGAPILPEVEELRNISEMVAIEVAKVAVAEGVARENLSDNDIKIAVKEAIWEPEYRQIKAVEKVRI

SEQ ID NO: 47649 - protein, 448 aa, Bacillus subtilis
MTHDLIEKSKKHLWLPFTQMKDYDENPLIIESGTGIKVQDINGKEYYDGFSSVWLNVHGHRKKELDNAIKKQLGKIAHSTLLGMTNVPATQLAETLIDISPKKLTRVFYSDSGAEAMEIALKMAFQYWKNIGKPEKQKFIAMKNGYHGDTIGAVSVGSIELFHHVYGPLMFESYKAPIPYVYRSESGDPDECCDQCLRELEQLLKEHHEEIAALSIESIVQGASGMIVMPEGYLAGVRELCTTYDVLMIVDEVATGFGRTGKMFACEHENVQPDLMAAGKGITGGYLPIAVTFATEDIYKAFYDDYENLKTFFHGHSYTGNQLGCAVALENLALFESENIVEQVAEKSKKLHFLLQDLHALPHVGDIRQLGFMCGAELVRSKETKEPYPADRRIGYKVSLKMRELGMLTRPLGDVIAFLPPLASTAEELTEMVAIMKQAIHEVTSLEN

SEQ ID NO: 47650 - protein, 218 aa, Saccharum officinarum
ARLDRVKNMTGPVEISGKKARLRELANPVIVAGDHGKESKDRDEAEEQGGFKKMYSLIDDYKFKGHIRLISAQMNRVRNGELYQYICDTKGAFVQPAYEAFRLDCDRVHEVRSAKDRDLPWRPCEIIADGVSGLHIDPYHSDKDADILVNFFDKCNADPSYWDEISQGGQRIYEKYTWKLYSERLMTLTGAYGFWNYVSKLERGDTRYIDMFYALEYP

SEQ ID NO: 47651 - protein, 453 aa, Agrobacterium tumefaciens str. C58
MKEYDAIFIGAGQAGPFLAARMAAMGRKVVLIERKFLGGTCVNAGCMPTKTLVASAKTAQVARRASEFGVRIDGEPVVDMKAVAARARKVTLDARSGLASWFDSLETMDVVYGHARFVGAKVVSVGGSLYTAPQIFINVGARPHIPDVPGLANVPYLTSTSVIALEELPKHLVVLGGSYIGLEFAQMYRRFDAQVTVIERGQYLASREDEDISQAIADILTRDGIKVLLSHKIVSVTTDSAEITVRTDQGDVRGSHVLVAVGRQPNTDDLGLDQAGVETDRRGYITVDERLQTNVEGIWALGDCNGRGAFTHTSYNDFEIAAANLLDGGDRKVSDRILGYGLYIDPPLGRVGMTERQAKEAGHRIKVATRPMNRVGRAVEKGETLGLMKLVTEADTDRVLGAAFLGVGGDEAVYGVLDAMNLGATTEKLRWAVPIHPTVGELVPTLISDLKET

SEQ ID NO: 47652 - protein, 435 aa, Pseudomonas aeruginosa
MTALISSSNYPLPVVHHARGVFIYDDSGKSYIDGSGGAMTVSIGHGVPEVLSAMSRQAQQVCFTYRTHFTSTAAEELAKEIVALAPGDLNKVFFVNSGSEATELSMRTAIQYWQARGQPTKTKILGRAISYHGMTMGSLSMSGHAARRADYSNLLHQFAVAPPPYAYRFEVPNDGTFGASVWEKIIQEQGADTIAAVIVEPIVGAAGGALTPPIGYLKALREICDRHSILLISDEVITGMGRTGTWFGCEHDGIVPDIIATGKGMSSGYTPMGGVIIRDGIMEALGERVKLFGHTFSANPLSAATCLAVIRYMKEHAILDNVAARSVQLESGLKDLSVRYPWMADVRGRGLLWGFEFVKDATTKEPIDAARQPNLRFAQHCFDAGLIAYPAGIAPLNNSALLAPPLVISASETEELLSRLEIGLQRFGNEMGLPA

SEQ ID NO: 47653 - protein, 693 aa, Trichodesmium erythraeum IMS101
MDLHSTINENSSQISNNTLLTNISQTDQTEINDIKSEQKKLWRIEDSEKLYKILGWGHPYFSINSVGHVTVSPKGDLGGSLDLYELVESIKQRNIGLPLIIRFSDILEDRIERLNACFSKAIARYKYKNIYRGVFPVKCNQNSHLVEEVVKFGKPHKFGLEAGSKPELLIAIATLNTTDGLIICNGYKDREYIETAILAQRLGKIPIIVIEQVEEVQLVIEASRKLNIKPVVGIRVKLSTKGMGRWAGTTGDRAKFGLNIPEIIKVVNQLKSTGILDSLQLLHFHIGSQISSISVIKDAIREASQIYVELAQLGANMKYLDVGGGLAVDYDGSKSNFYASKNYDMQNYANDIVAEVKEACEEKNILPPILISESGRAVASHQSVLVFDVLGVSQIPKEEPPVIGKGEHLILQNLYETYQSINKDNYQEAYHDAIQFKEESISIFNFGYLSISERAKVEQLYWGCLRKIQEILKSSEYIPNDLEELEKVMASIYYINLSVFQSAPDSWAINQLFPIMPIHRLDEEPTERVILADLTCDSDGKIDRFIDLRDIKSLLELHPLQVSNKSSQYSPIQKLENSTTEIISVFEPYYLAMFLGGAYQEIMGNLHNLFGDVNVVHIKLNPSGYKIEHVVKGDTMTEVLNYVQYNSDDLVENIRCQTEQALQEEKITLKESRMLLQNYESSLSSYTYLSLSN

SEQ ID NO: 47654 - protein, 388 aa, Trichodesmium erythraeum IMS101
MKAMILAAGKGTRIRPITYRIPKPMIPILQKPVMEFLVELLRKHGFDQIMVNVSHLAKEIENYFRDGQRFGVNIAYSFEGRIEDGNLIGEALGSAGGMRRIQDFYPYFDDTFIVLCGDALIDLDLTKALQRHKEKGAMATVIMKSIPREQVSSYGVVVTDETGRIQSFQEKPKVEEALSTNINTGIYIFEPEVLDCIPSGVEFDIGSQLFPKLVEIGAPFYGVAMDFEWVDIGKVPDYWQAIRDVLIGKVKNVSIPGKEVSPGIYTGLNVAVNWDKIDIKRPVYIGGMTRIEDGAKIVGPSMIGPNCWICSGATVDSSVIFEYSRLGPGVRLVDKLVFGRYCVDKTGSSIDVQAASLDWLITDTRHPFPSPPPAEHETIKDILQENGG

SEQ ID NO: 47655 - protein, 503 aa, Capsicum annuum
MAIGSLARRKASTILSSSRYVSKYSSYYFSRSFASGSDENDVVVIGGGPGGYVAAIKAAQLGLKTTCIEKRGTLGGTCLNVGCIPSKALLHSSHMFHEAQHSFAQHGVKFSSVEVDLPAMMSQKDKAVAGLTRGIEGLFKKNKVNYVKGYCKFLSPSEVSVDTIDGGNTVVKGKNIIIATGSDVKSLPGLTIDEKRIVSSTGALALTEVPKNLVVIGAGYIGLEMGSVWGRLGSQVTVVEFASDIVPTMDGEVRKQFQRSLEKQKMKFMLKTKVVSVDTAGDVLKLTLEPAAGGEQTTLEADVVLVSAGRVPFTSGLGLDKIGVETDKAGRILVNERFASNVTGVYAIGDVIPGPMLAHKAEEDGVACVEFIAGKEGHVDYDLVPGVCYTHPEVASVGKTEEQVKALGLDYRVGKFPFLANSRAKAIDDAEGIVKVLAEKETDKILGVHIMAPNAGELIHEAVLALHYGASSEDIARTCHAHPTMSEALKEAAMATYDKPIHI

SEQ ID NO: 47656 - protein, 474 aa, Streptomyces sp. CHR28
MLQAHTGYDLAIVGSGGGAFAAAIAARNKGRRVVMVERGTTGGTCVNVGCVPSKALLAAAEARHGARAASRFPGLQATEPALDFPALIGGKDALVEQLRAEKYTDLAAEYGWQIVHGTAAFADGPVLEVSLNDGGTTTIEAAHYLIATGSAPTAPPIDGLDQVDYLTSTTAMELQQLPEHLLVLGGGYVGLEQAQLFARLGSRVTLAVRSRLASREEPEISAGIEDVFREEGFAVHTRTQLRAVRRDGDGILATLTGPGGEQQVRASHLLIATGRRPVTDGLGLERVGVKTGERGEVVVDEYLRTDNPRIWAAGDVTGHPDFVYVAAAHGTLVADNALDGAERTLDYTALPKVTFTSPAIASVGMTDAQLAEAGIACQCRTLPMEYVPRALANRDTRGLVKLIAERGTGKLLGAHVLADGAGDIITAATYAITAGLTVDQLARTWHPYLTMAEALKLAAQTFTSDVAKLSCCAG

SEQ ID NO: 47657 - protein, 700 aa, Arabidopsis thaliana
MAEGQSPENSPPSPTPPSPSSSDNQQQSSPPPSDSSSPSPPAPPPPDDSSNGSPQPPSSDSQSPPSPQGNNNNDGNNGNNNNDNNNNNNGNNNNDNNNGNNKDNNNNGNNNNGNNNNGNDNNGNNNNGNNNDNNNQNNGGGSNNRSPPPPSRNSDRNSPSPPRALAPPRSSGGGSNSSGNNEPNTAAIVGIVAGAGLLFLVMILFCVCCCRKKKKKHQMPYYAGNGYATGKGDQYQQQQYNNQSDHVMNLSQQYPGSNGNNNWMNSPPPPPPGSWQPSPPPPPPPVSGGMNGNSSDFSSNYSGPHGPSVPPPHPSVALGFNKSTFTYDELAAATQGFSQSRLLGQGGFGYVHKGILPNGKEIAVKSLKAGSGQGEREFQAEVDIISRVHHRFLVSLVGYCIAGGQRMLVYEFLPNDTLEFHLHGKSGKVLDWPTRLKIALGSAKGLAYLHEDCHPRIIHRDIKASNILLDESFEAKVADFGLAKLSQDNVTHVSTRIMGTFGYLAPEYASSGKLTDRSDVFSFGVMLLELVTGRRPVDLTGEMEDSLVDWARPICLNAAQDGDYSELVDPRLENQYEPHEMAQMVACAAAAVRHSARRRPKMSQIVRALEGDATLDDLSEGGKAGQSSFLGRGSSSDYDSSTYSADMKKFRKVALDSHEYGASSEYGNTSEYGLDPSSSSSEEIRRGGANNNKTTPSRDH

SEQ ID NO: 47658 - protein, 144 aa, Methylococcus capsulatus str. Bath
MTIGRNEPWSLLNQLQRELERSFEGRQGSDSAATAEWTPAVDIKEEADRYVLLADLPGVSTDNIDVSMEQGVLTLRGERNTEARTERSGYKRIERVYGSFYRRFSLPDTADADGISARYNNGVLEIVIPKKAAIQPRRIVVSAD

SEQ ID NO: 47659 - protein, 378 aa, Lactococcus lactis subsp. lactis Il1403
MKEMLIMTPGPTEVAENVRLARAKATTNPDIDLAFYDFYKKTCSKLAQFLKTKNDVRVLAGEGILGLEAACASLTEKGDRVLVLDNGIFGHGFSDFIELYGGEAILLESSGKEAFSLEILEKFLEKDHDFKYATVVHCDTPSGVLNDLSSICPLLKKYGILTVVDSVAAMGGEELQVDKWQIDIALGGSQKVISAPPGLTIASISTEAYQAMTERKSPIASFYCNLLTFKDYYEKKWFPYTMPISDIYGLDQAIDNLLADQEILKRHAMIGHATRQAIENSPLELYLQNGYSNTVSVIKVPEGLNDQEILRKMRENYRVMITGSFDHLAGKVLRIGHMGENARPNKVAYSLYALQKVLEDFGIAFKNNLQEDFLEALN

SEQ ID NO: 47660 - protein, 320 aa, Bacillus subtilis subsp. subtilis str. 168
MRSHSVVCIGELLIDFFCTDVDVDLMEGRQFLKSAGGAPANVSAAIAKLGGDAAFSGKVGKDPFGYFLKRTLDAVHVDTSMLVMDEKAPTTLAFVSLKQNGERDFVFNRGADALFTLEDIDQEKLNEAKILHFGSATALLSDPFCSAYLRLMSIAKDNGQFISFDPNYREDLWRGRVSEFVSVAKKAIAVSDFVKVSDEELEIISGVKDHEKGVAILHEIGANIVAVTLGKSGTLLSNGKDREIIPSIPVTSIDSTGAGDAFVGAALYQLANTDQIQSVDADFVKLREIVAFANKVGALVCTKIGAIDALPSLDEIGVSL

SEQ ID NO: 47661 - protein, 535 aa, Lactococcus lactis subsp. lactis Il1403
MSTKYIFVTGGGTSSMGKGIVAASLGRLLKNRGLKVTVQKFDPYLNIDPGTMSPYQHGEVFVTDDGAETDLDLGHYERFIDINLNKYSNVTSGKVYSEILRKERKGEYLGATVQMVPHVTNMLKEKIKRAATTTDADIIITEVGGTVGDMESLPFIEALRQMKAEVGADNVMYIHTVPILHLRAAGELKTKIAQNATKTLREYGIQANMLVLRSEVPITTEMRDKIAMFCDVAPEAVIQSLDVEHLYQIPLNLQAQNMDQIVCDHLKLDAPKADMTEWSAMVDHVMNLKKKVKIALVGKYVELPDAYISVTEALKHAGYSSDAEVDINWVNANDVTDENVAELVGDAAGIIVPGGFGHRGTEGKIAAIKYARENDVPMLGICLGMQLTAVEFARNVLGLEGAHSFELDPETKYPVIDIMRDQVDVEDMGGTLRLGLYPAKLKNGSRAKAAYNDAEVVQRRHRHRYEFNNKFREDFEKAGFVFSGVSPDNRLVEIVELSDKKFFVACQYHPELQSRPNRPEELYTEFIRVAVENSK

SEQ ID NO: 47662 - protein, 150 aa, Oryza sativa (japonica cultivar-group)
MSLVRRSNVFDPFSLDLWDPFDSVFRSVVPATSDNDTAAFANARIDWKETPESHVFKADLPGVKKEEVKVEVEEGNVLVISGQRSKEKEDKNDKWHRVERSSGQFMRRFRLPENAKVDQVKAGLENGVLTVTVPKAEVKKPEVKAIEISG

SEQ ID NO: 47663 - protein, 489 aa, Clostridium acetobutylicum ATCC 824
MSAELEKDKNGELKRSLKTRHMNMIAIGGSIGTGLFFTSGNTISTAGPGGAIAAYAIMGVLVYFLMTSLGEMATMIPNAGSFETYASKFVDPALGFALGWNYWFNWAITVAAELVAGGLVVKFWLPNTGTTIWSIGFLVILFGLNLLSAKAYGEGEYWFSSIKVVTIIVFLIMGVLIIFGIMGGHGVGFSNWVLKDGKGNSAPFVGGGMAILMSFLTAGFSFAGTEVVGLAAGEAENPEKDVPKAINSVFWRILIFYIGAIIVIGFIIPFNDSNLLKNGVSDIAYSPFTIVFKRSGIALAASIMNAVILTSVLSCGNSGLYAGSRMMYAMAKEGKAPKIFGKLNKSGVPLNALIFTSVIASTAFFASLIGDGKIYSILYNLSGITTFITWLGIAICHYRFRKAYIAQGNKIEDLKYKALLYPFGPIFAMILCTVVLFGANIWVFQAKTFSWFDFTTNYGSIPLFLCFYFIYKKVHKTRIVSLMECDLNK

SEQ ID NO: 47664 - protein, 209 aa, Glycine max
FPQRCCTMSSSLIANPTADRSRDSHRTKKKKKSIKQHQQQHDAKWKTHAQQQLYSSKLHQALARVNISGDAPRRGRAVRDAADRVLAVAAKGRTRWSRAILTNRLKVKFRKPVHKRQKVVVVGPGRPKKKARFSVLRLRGKTLPAVQRKVRVLGRLVPGCRKEPLPVILEEAIDYIPALEMQVRAMQALADLLLGSSSASTSATAAPPS

SEQ ID NO: 47665 - protein, 259 aa, Bacillus cereus E33L
MKVACIQMNIVFGDVEKNIENAKNKISEAMKERPDVIVLPELWTTGYDLTRLSEIADRDGLETKEKLIEWSKQYGVHIVGGSIAKQTEQGVTNTMYVVTNKGELVNEYSKVHLFQLMDEHKYLIAGNSTGEFKLDDVECAGTICYDIRFPEWMRVHTAKGAKVLFVVAEWPLVRLAHWRLLLQARAVENQCYVVACNRAGKDPNNEFAGHSLIVNPWGEVVVEANEEESILFGELTFEKIEEVRKGIPVFADRRPELYK

SEQ ID NO: 47666 - protein, 267 aa, Vigna unguiculata
MANGSVLSPVVKRLEGKVAIITGGASGIGEATARLFSQHGAHVVVADIQDDVGLSLCNELKSAIYVHCDVTKEEDIEKCVDTAVSKFGKLDIMFNNAGTGDEFKKSILDNTKSDFERVISVNLVGPFLGTKHAARVMIPARRGCIINTASVAGCIGGGATHAYTSSKHALVGLTKNTAVELGQFGIRVNCVSPFAIVTPLLNKYFNLDEEGVRKTYMNLKGWYPVPNDVAEAALYLASDESKFVSSHNLVIDGGLINSNVGFPMFEM

SEQ ID NO: 47667 - protein, 371 aa, Bacillus subtilis
MKIDSWLNDRLDIAKEAGVHRNLRSMNGAPVPERNIDGENQTVWSSNNYLGLASDRRLIDAAQTALQQFGTGSSGSRLTTGNSVWHEKLEKKIASFKRTEAALLFSSGYLANVGVLSSLPEKEDVILSDQLNHASIIDGCRLSKADTVVYRHIDMNDLENKLNETQRYQRRFIVTDGVFSMDGTIVPLDQIISLAKRYHAFVVVDDAHATGVLGDSGRGTSEYFGVYPDIVIGTLSKAVGTEGGFAAGSAVFIDFLLNHARTFIFQTAIPPASCAAAHEAFNIRTSLKNMGYVVKGDHTPIIPVVIGDAHKTVIFAEKLQGKGIYAPAIRPPTVAPGESRIRITITSDHSMGDIDDLLKTFHSIGKELHII

SEQ ID NO: 47668 - protein, 2160 aa, Magnaporthe grisea
MTRNDALSRFSSITSSSTDSAHSTATVKPLPSTPIASDTRRHSSGSRPAIPSRLRIDDDLNRITASPLRDDTQVSPTNTFGTRVALSPSSPTSNVFPREQRLSDFGNYRRDLAVLDPGGSRVPQIQQPPPNTGPSLSSQVAPWMTSNGTGGAPAAINTSFYNDSSDNLSVASQLSPGFRIPGGRPSISQPSGVGADNNEASYFGDERRPSIASITTTASSQGSKASGNRGGFRKLQGFFGEEFPGRDSSDTSLPPAVPGKEHRSHSYSHGRPYRDRNYSNATDHTRDGSPSSSRPRTPVPAPEVVPFLYQEADDIAKYGEAPVRDILSGPDRERYVTGDSLQNPPKTSSSSRSGHSLAHLSGQHRHQKSNDDPRTLRPTMSRDDSAVPTYKDRSGSATTMMTTSRDRAHSPAPSGHSIGGYFSSKNGTYDGQTSPPGHQKKSLLGRFKRNKDKEDTGSLKKTSLSSTSLNLKPSRSEFGGDGASTMGQDWPSRLAEPSQYNSNSNSASARPPQARHGTFKSPFAKRGRTHHRHDDRDEAIGPTDKHDGMQAGGTMFHLDTDLNDMSGILSRPLPLTPMDADFVGTIKGEKSTVTSNGRNGAWDAPDSWAVKRTGDDLAYHGPENDEAGPSPRPEEKMTSYCIRVFKSDGTFATLQMSIDSSVQDLIGQLSKKSYVSGGLEYHIALRKHGLIRVLGSAEKPLFIQKRLLRQVGFEERDRIEDIGREDNSYLCRFLFMSSRELEQQARTQDLGLGRTQKFNHVDLSARNIIRIPIYLYSKVQDIISLNLSKNLSLDLPRDFISSCQNLRDIKFNNNEARKLPASLGRASRLTYLDVSNNRIDHLENAELNGLVGLLKLNLANNRLKHLPPYFGAYRSLRTLNVSSNFLDKFPSFLCELESLVDLDLSFNLIGAFPPAIENLRNLEKLVITNNRLAGTLPDSFSRLQSLRELDIKYNAISGIDVISLLPKLEILAADHNAISQFVGSFERVRSLKLKDNPITRFELTSTVPTLKLLNLSNAKLASIAESFNHMLNLERLVLDRNHFVSLPSQIGRLRRLEHFSIAHNALAELPPEVGCLQELKFLDVRGNNLKKLPLEIWWANKLETLNASSNVMTDFPKPASRPPQPPESSPGSMQGSNGKVAMVGSLSTPPSIEDLDPDDSRRPSQASSSTLLSVGPSPVPAGPDRKSSVVSVYGKGGRKTSIISRSANSSGNAPAPPNTRKDSGLSARITNTFSGSLRNLFLADNLLDDDVFDQIMLLCELRVLNLSFNQISDMPQRCIKSWPQLSELYLSGNELTTIPVDDLEEYSLLQVLHINCNKFTNLPADISRAKKLAVLDCGSNFLKYNISNVPYDWNWNLNPNLRYLNLSGNRRLEIKQPAYGSGAGNREQYTDFSRLQNLRVLGLMDVTLTQPSIPEQSEDCRVRTSGSSAGYLPYAMADTLGKNEHLSTVDLVVPRFNASETETLLGLFDGQALSSGGSKIAKYLHENFGQILATELRALKTGLKETPEDALRRAFLALNKELVTIAIQHSEDRPSVPHRSGSQAHVILNKEDLNSGGVATVVYLQGQDLYVANVGDAQAMIILSDQTHKMLTRKHDPAEPTERSRIREAGGWVSRNGKLNDQLGVSRAFGYVDLMPAVQAAPHVSHVAIREQDEMILLATSELWEHLAPELIVDIARQERGDLMRATQKLRDLAIAYGSTNKIMIMMISVADLKRRTERTRINRGQSMSIHNLSLHGEQYKFPTRGRRKKDQVMDSTLQRLEAEVPAPTGMIAIVFTDIKNSTNLWETYPAAMRSAIRLHNEMMRRQLRRIGGFEVKTEGDAFMVSFPTATSALLWCFAVQLQLLEVNWPSEMLNSLSCKPTVDKNNQVIFKGLSVRMGIHWGEPLCEPDPITRRMDYYGPMVNKASRISAVADGGQITVSSDFISEIQRCLETYQGANAAALVNESFDEDPFSMAIRKELRSLSSQGFEVKELGERKLKGLENPEVVYSLYPHQLAGRIETHQAHDKGVTAAAPELIENTPAVLKEGSELDFDPKIIWGLWKLSLRLEMLCSSLEYVGGRGLQAPETELLERMKQRGGEVTESFLVNFMEHQISRIETCVSTLSIRHLNMGGGTIKELDDLRGPISSVLANFSKQMAELQRYKALYGPLDAIEDGQQAS

SEQ ID NO: 47669 - protein, 589 aa, Phaseolus vulgaris
MSSISLKENGGEVSVKKDYSNGGGVRDLYGEDSATEDHLITPWTFSVASGCSLLRDPRYNKGLAFTEGERDAHYLRGLLPPSVFNQELQEKRLMHNLRQYEVPLHRYMALMDLQERNERLFYKLLIDNVAELLPVVYTPTVGEACQKYGSIFRRPQGLYISLKEKGKILEVLKNWPEKSIQVIVVTDGERILGLGDLGCQGMGIPVGKLSLYTALGGVRPSSCLPVTIDVGTNNEKLLNDEFYIGLRQRRATGQEYATFLDEFMRAVKQNYGEKVLVQFEDFANHNAFDLLEKYSSSHLVFNDDIQGTASVVLAGLLASLKLVGGTLADHTFLFLGAGEAGTGIAELIAVEVSKQTKAPVEETRKKIWLVDSKGLIVSSRLESLQQFKKPWAHEHEPVKGLLEAVKAIKPTVLIGSSGAGKTFTKEVVETMASLNEKPLILALSNPTSQSECTAEEAYTWSKGRAIFASGSPFDPVEYEGKLFVPGQANNAYIFPGFGLGLIMSGAIRVRDEMLLAASEALAAQVSEENYDKGLIYPPFTNIRKISANIAAKVAAKAYDLGLASHLKRPKDLVKYAESCMYSPGYRSYR

SEQ ID NO: 47670 - protein, 436 aa, Arabidopsis thaliana
MGFQNEASSSSYTLKIPPPAREDSPLLGKGPPLSSQFKTFANVFIAVVGAGVLGLPYAFKRTGWLMGVLLLVSVSVLTHHCMMLLVYTRRKLDSFNAGISKIGSFGDLGFAVCGSLGRIVVDLFIILSQAGFCVGYLIFIGTTLANLSDPESPTSLRHQFTRLGSEFLGVSSKSLYIWGCFPFQLGLNSIKTLTHLAPLSIFADIVDLGAMAVVIVEDSMIILKQRPDVVAFGGMSLFLYGMGVAVYSFEGVGMVLPLESEMKDKDKFGKVLALGMGFISLIYIAFGILGYLAFGEDTMDIITANLGAGLVSTVVQLGLCINLFFTFPLMMNPVFEIVERRFSRGMYSAWLRWVLVLAVTLVALFVPNFADFLSLVGSSTCCVLGFVLPALFHLLVFKEEMGWLQWSSDTAIVVLGVVLAVSGTWSSLSEIFSVKV

SEQ ID NO: 47671 - protein, 352 aa, Pseudomonas syringae pv. syringae
IKFPDMVRAFKPDPRTNLDNDSRRFDFFSRVPEATRTLTLLYSNEGTPAGYRFMDGNGVHAYKLVNAKGEVHYVKFHWKSLQGLKNLDPKEVAQVQSKDYSHLTNDLVGAIKKGDFPKWDLYVQVLKPEELAKFDFDPLDATKIWPDVPEKKIGQMVLNKNVDNFFQETEQVAMAPANLVPGIEPSETACCRPCVSYADTQMYRLGANGLSLPVNQPKVAVNNGNQDGALNTGHTTSGVNYEPSRLEPRPADDKARYSQLPLSGTTQQAKITREQNFKQAGDLYRSYSAKEKTDLVQSFGESLADTDTESKNIMLSYLYKADPDYGTRVAEVAKGDLSRFSSLAASLKELMI

SEQ ID NO: 47672 - protein, 403 aa, Ustilago maydis 521
MSAAQQRHGKKNILAEHDDDVVIVSALRTPITKAKKGGLSQCAPEEMLGWTLKGVLAESKIDPKLIEDVAVGTVLAPGGGSTQARMGSLWAGIPNTAGCNSLNRQCSSGLAAVNQIANQIALGQIDIGIGSGVESMTLNYGAGVMPSKMSDAVMENEEAADCLMPMGITSENVAKKYNIDRTKQDTFAAESFARAAAAQKAGKFKSEIVTVKYTDDDGNERTVDADDGIREGVTVESLAKLKPAFAKDGFTHAGNASQVSDGAASVLLARRSAAKKHGLPILGKFVTCAVVGVPPNIMGVGPAYAIPRLFELTGLTKDDIDIYEINEAFASQALFSIEHIGIDKKKVNPVGGAIAMGHPLGATGARQIATGLAEAKRQGGKKLIVTSMCVGTGMGCAALIVSA

SEQ ID NO: 47673 - protein, 251 aa, Lycopersicon esculentum
EGKVAIITGAASGIGEASARLFVEHGARVVVADIQDELGQKVVDSIGSDKASYRHCDVTDEKQVEETVAYAVEKYGTLDIMFSNVGTLNFCSVLDMDVLAFDETMAINVRIALAVKHAAKVMVDKKIRGSIICNASLEGILAGAASLAYIASKHAVVGIIKAAARELGPHGIRVNGVSPYGIATPLVTKAYGLDAALLEEAIYGNGHLKGVKLSTMHVAQSALFLASDESAYTSGQNLAVDGGLSSILKLQ

SEQ ID NO: 47674 - protein, 498 aa, Aeromonas hydrophila
DPGTMSPTQHGEVFVTEDGAETDLDLGHYERFIRTKMTRRNNFTTGRIYADVLRKERRGDYLGATIQVIPHITNAIKERVIAGAEGHQVAIVEVGGTVGDIESLPFLEAIRQLAAEVGRNNAMFMHLTLVPYLAAAGEVKTKPTQHSVKELLSIGIQPDVLICRSDRAIPANERAKIALFCNVPERAVISMKDVDSIYKIPALLKSQNLDSYITERFGIECKEADLAEWEQVIYEEANPTAEVTIGMVGKYVSLPDAYKSVNEALKHGGLKTRLSVNIKYIDSQDIETRGAELLEGLDAILVPGGFGERGVEGKILAAQYARENKIPYLGICLGMQVAMIEFARNVAGMAGAHSSEFKKDCAYPVVGLITEWVDDEGNVETRTEKSDLGGTMRLGSQLCHLVEDSKVRQMYGSPTIYERHRHRYEVNNKLLPQIEAAGLKVTGLSADKKLVEIIEIPDHPWFVAAQFHPEFTSTPRDGHALFAGFVKAAGEYQKRNLK

SEQ ID NO: 47675 - protein, 704 aa, GIBBERELLA ZEAE PH-1
MSSGGEQTRDIKNHLLFEIATEVAHRVGGIYSVIKSKAPVTTAEYGDRYTLIGPLNHQSAAVEVEEMEPTNPEIAATIQSMRDRGVHIVYGRWLIEGAPRVILIDTKTAYGRMDEWKADLWEAASIPSPPGDDETNEAIVFGYLVAWFLGEFVCHEKKKAVIAHFHEWLAGVALPLCKRRRIDVTTIFTTHATLLGRYLCAGSVDFYNNLQWFDVDAEAGKRGIYHRYCIERAAAHACDVFTTVSHITAFESEHLLKRKPDGVLPNGLNVTKFSAVHEFQNLHQQAKEKIHDFVRGHFYGHYDFDVDNTLYLFTAGRYEFRNKGVDMFIESLARLNHRLKASGSKITVVAFIIMPAQTTSLTVEALKGQAVIKSLRDTTHVIEQSIGRRLFERSLKWHEGEPLPDEKELISAQDRVLLRRRLFAMKRHGLPPIVTHNMLNDHEDPVLNQIRRVQLFNHPTDRVKVIFHPEFLNSANPVLPLDYDDFVRGCHLGVFSSYYEPWGYTPAECTVMGVPSITTNLSGFGCYMEELIENSSDYGIYIVDRRTKGVDDSVNQLTSFMFDFCGKSRRQRINQRNRTERLSDLLDWKRMGMEYVKARQLALRRAYPNSFVGDEEEEDFIPGVEQKISRPFSVPGSPRDRTGMMTPGDFASLQEGREGLNTEDYVAWKLPEEEDPEEYPFPLTLRKQPAPPSPSETVPVNGTQ

SEQ ID NO: 47676 - protein, 463 aa, Fragaria x ananassa
MASNQAGGHVAVLAFPFSTHAAPLLNIVCRLAAAAPSTLFSFFNTKQSNSSILASDTSVLRYTNVCVCEVADGVPEGYVFVGKPQEDIELFMKAAPDNFRKCLEASVAESGREVSCLVTDAFFWFGAHMADDMGGVPWVPFWTAGPASLSAHVHTDLIRNTTSGDCHDEKETITVIAGMSKVRPQDLPEGIIFGNLESLFSRMLHQMGLMLPLATAVFINSFEELDPVITNDLKSKFKRFLNVGPLDLLEPTASAATTTPQTAEAVAGDGCLSWLDKQKAASVVYVSFGSVTRPSPEELMALAEALEASRVPFLWSLRDNLKNPQLDEFLSKGKLNGMVVPWAPQPQVLAHGSVGAFVTHCGWNSVLESVAGGVPLICRPFFGDQKLNARMVEDVWKIGLRLEGGVFTKNGMLKSLDMLLSQDKGTKMKNKIHTLKQLAQQAVEPKGSSTRNFESLLEMATTN

SEQ ID NO: 47677 - protein, 465 aa, Fragaria x ananassa
MAPVSNQAGGHVAVLAFPFSTHAAPLLNIVCRLAAAAPSTLFSFFNTKQSNSSILASDTSVLRYTNVCVCEVADGVPEGYVFVGKPQEDIELFMKAAPDNFRKCLEASVAESGREVSCLVTDAFFWFGAHMADDMGGVPWVPFWTAGPASLSAHVHTDLIRNTTSGDCHDEKETITVIAGMSKVRPQDLPEGIIFGNLESLFSRMLHQMGLMLPLATAVFINSFEELDPVITNDLKSKFKRFLNVGPLDLLEPTASAATTTPQTAEAVAGDGCLSWLDKQKAASVVYVSFGSVTRPSPEELMALAEALEASRVPFLWSLRDNLKNPQLDEFLSKGKLNGMVVPWAPQPQVLAHGSVGAFVTHCGWNSVLESVAGGVPLICRPFFGDQKLNARMVEDVWKIGLRLEGGVFTKNGMLKSLDMLLSQDKGTKMKNKIHTLKQLAQQAVEPKGSSTRNFESLLEMATTN

SEQ ID NO: 47678 - protein, 645 aa, Rubrobacter xylanophilus DSM 9941
MSEARERPLDIICIGRTCVDLYAEQEGARLEDVQSFRKYVGGSAANIAFGTARLGVRSAMLTRVGEEQMGRYVRRALEEAGVDVSRVRFDPEHLTPYVLLAVRETEGFPRLFAYGEAADMALEPGDVEPGFIASARALLITGTPLSREGSRAACRKAVRAAREAGARVVFDLDYRPVFWGVVPRERGGEMFAESERVTREYRAVLPECDLVVGTEEEIRIAGGSADTREALLGIRERSGATIVLKVGAMGAVVFPDEIPEKIQDGVRVPGFRVEVFNSVGAGDAFMSGFLSGWLRGEPLEECLRLGNACGAIVVSRHGCSPAMPTREELGYFLSLGESPGDLRKDAWLEHLHRATTRRAPEELHVLAIDHRWQLEELADELGVERGRLADLKRLLARAFRRAAEGRGEAGVLLDDVYGRRALEELTGQGFWVARAVEAAGSRPVEFNGGANVAAAIRGWPQEHVVKCNLYMHPQDDPQTRRLQEQRVLQLYDACVSNERRLLLEVQPPRGASYGKSGAAEVLERLYRLGVRPDWWKLPPALEPEVWEGIGEVVRGHDPYCAGLLVLGQGLPEEKLAGSFAAASSEPLCRGFAIGRSIYAGPARRWLAGEIGDEELVSEVAAGYGRVSELWRRRVQRREKQPEAKR

SEQ ID NO: 47679 - protein, 346 aa, Bacillus subtilis subsp. subtilis str. 168
MKAARWHNQKDIRIEHIEEPKTEPGKVKIKVKWCGICGSDLHEYLGGPIFIPVDKPHPLTNETAPVTMGHEFSGEVVEVGEGVENYKVGDRVVVEPIFATHGHQGAYNLDEQMGFLGLAGGGGGFSEYVSVDEELLFKLPDELSYEQGALVEPSAVALYAVRSSKLKAGDKAAVFGCGPIGLLVIEALKAAGATDIYAVELSPERQQKAEELGAIIVDPSKTDDVVAEIAERTGGGVDVAFEVTGVPVVLRQAIQSTTIAGETVIVSIWEKGAEIHPNDIVIKERTVKGIIGYRDIFPAVLSLMKEGYFSADKLVTKKIVLDDLIEEGFGALIKEKSQVKILVRPN

SEQ ID NO: 47680 - protein, 308 aa, Arabidopsis thaliana; identical to SEQ ID NO: 1321

SEQ ID NO: 47681 - protein, 941 aa, Arabidopsis thaliana
MAARNLEKMASIDAQLRLLAPGKVSEDDKLIEYDALLLDRFLDILQDLHGEDVREFVQECYEVAADYDGNRNTEKLEELGNMLTSLDPGDSIVVTKSFSNMLSLANLAEEVQIAYRRRIKKLKKGDFADEASATTESDIEETLKRLLQLNKTPEEVFDALKNQTVDLVLTAHPTQSVRRSLLQKFGRIRDCLTQLYAKDITPDDKQELDEALQREIQAAFRTDEIRRTPPTPQDEMRAGMSYFHETIWKGVPKFLRRVDTALKNIGINERVPYNAPLIQFSSWMGGDRDGNPRVTPEVTRDVCLLARMMAANLYFSQIEDLMFEMSMWRCNEELRVRAERQRCAKRDAKHYIEFWKQIPANEPYRAILGDVRDKLYNTRERARQLLSSGVSDVPEDAVFTSVDQFLEPLELCYRSLCDCGDRPIADGSLLDFLRQVSTFGLALVKLDIRQESERHSDVLDAITTHLGIGSYKEWSEDKRQEWLLSELSGKRPLFGPDLPKTEEVADVLDTFKVISELPSDSFGAYIISMATAPSDVLAVELLQRECGITDPLRVVPLFEKLADLESAPAAVARLFSIEWYRNRINGKQEVMIGYSDSGKDAGRLSAAWQLYKTQEELVKVAKEYGVKLTMFHGRGGTVGRGGGPTHLAILSQPPDTIHGQLRVTVQGEVIEQSFGEEHLCFRTLQRFTAATLEHGMHPPVSPKPEWRVLMDEMAIIATEEYRSVVFKEPRFVEYFRLRRNRVAACNPVDLCVDSDEVHLPVWLGFGGAFKRVIQKDSKNLNMLKEMYNQWPFFRVTIDLVEMVFAKGDPGIAALYDRLLVSEELQPFGEQLRVNYQETRRLLLQVAGHKDILEGDPYLRQRLQLRDPYITTLNVCQAYTLKQIRDPSFHVKVRPHLSKDYMESSPAAELVKLNPKSEYAPGLEDTVILTMKGIAAGMQNTG

SEQ ID NO: 47682 - protein, 458 aa, Gloeobacter violaceus PCC 7421
MLRSLTLAWGGDQCFCNIEYSCLNPFVKGRSMVTSLNDSPSPAYICPNDMACSNLDRAAQILRLDPGVVEVLGTPHRVLTVSVPVRMDNGRIRVFAGHRVQHCNVLGPYKGGMRYHPDVTLREVSTLAMLMTWKCALMGIPYGGAKGGIAVNPTTLSVGELERLTRRFTSELVRDIGPQIDIPAPDVGTGPREMAWMMDTYSMSIGHASPGVVTGKPLSIGGSKGRDAATGRGVVIATREALDTAGLALRGATIAIQGFGKVGKAAALIFQQHGARVIALSDGSGGIYNPDGLDIEQAADFVRDGSRLAQYPFPGVKPIANPELLTLPCDVLVPAALEHQITEANAARVRARLVVEAANAPTTMEADRILEERGVTVLPDILANAGGVVVSYLEWVQGLSYLFWDEEKVNLELEKLMVGAYARVLQQATQFRLPLRPAAYTLAVGRVVEAFNHRGLYP

SEQ ID NO: 47683 - protein, 469 aa, Bacillus subtilis subsp. subtilis str. 168
MNQSQSGLKKELKTRHMTMISIAGVIGAGLFVGSGPVIHSTGPGAVVSYALAGLLVIFIMRMLGEMSAVNPTSGSFSQYAHDAIGPWAGFTIGWLYWFFWVIVIAIEAIAGAGIIQYWFHDIPLWLTSLILTIVLTLTNVYSVKSFGEFEYWFSLIKVVTIIAFLIVGFAFIFGFAPGSEPVGFSNLTGKGGFFPEGISSVLLGIVVVIFSFMGTEIVAIAAGETSNPIESVTKATRSVVWRIIVFYVGSIAIVVALLPWNSANILESPFVAVLEHIGVPAAAQIMNFIVLTAVLSCLNSGLYTTSRMLYSLAERNEAPRRFMKLSKKGVPVQAIVAGTFFSYIAVVMNYFSPDTVFLFLVNSSGAIALLVYLVIAVSQLKMRKKLEKTNPEALKIKMWLFPFLTYLTIIAICGILVSMAFIDSMRDELLLTGVITGIVLISYLVFRKRKVSEKAAANPVTQQQPDILP

SEQ ID NO: 47684 - protein, 162 aa, Arabidopsis thaliana; identical to SEQ ID NO: 1362

SEQ ID NO: 47685 - protein, 363 aa, Listeria monocytogenes EGD-e
MRTIDSSSKKDGFRMPGEFEKHAGCYIIWPERPDNWRLGAKPAQKAFVDVATAISHFEPVTVVASSSQYVNARYMLSDEIRVVEMDNDDAWVRDSGPTFVVNDSGDVRGVDWSFNSWGGLVDGLYFPWDKDDQVAQKICELERKDRYRLADFVLEGGSIHVDGEGTLVTTEECLLSEGRNPQLSKQQIEMVLKEYLNLEKIIWLKRGIYLDETNGHVDNIFNYVRPGVVALAWTDDETDPQYEISKECFDILSNETDAKGRKLEVHKINVPKPILITDEESKGVDAVEGTLPREEGDRLAASYINYYTANGGVIFPLFGDPNDELAREKLQQLYPNCEVVGVKAREILLGGGNIHCITQQVPR

SEQ ID NO: 47686 - protein, 252 aa, Pyrus communis
MPIRNIAVGRPEETYHPDALRAALAEFISTLIFVFAGEGSGMAFAKLTDDAANTPAGLVAAALAHAFGLFVAVSISANISGGHVNPAVTFGAFIGGNISLLRGILYWIAQLLGATVACGLLKFVTNGQTTAAFSLSSGVGVWNAFVFEIVMTFGLVYTVYATAIDPKNGSVGTIAPIAIGFIVGANILAGGAFDGASMNPAVSFGPALVSWSWENHWVYWAGPLIGAGLAGLIYEFVFIGNSGHEQLPSTDY

SEQ ID NO: 47687 - protein, 379 aa, Exiguobacterium sp. 255-15
MRAVTYQGTKNVEVKDVQDPSIEKNDDIIVKITSTAICGSDLHIYQGNMPAKKDYVIGHEPMGIVEEVGPDVTKVKRGDRVVLPFNVACGHCFFCEHDMESQCDNSNGNPHVDTGGYFGFTEEFGGHPGGQAEYLKVPFGNFMPLVVPESCELEDEALLFLSDVIPTAYWSVINSGVKKGDTVVILGSGPVGLMTQKFAWMQGAKRVIAVDQQVYRLNHAKMTNRVETVNLQDHKETGQYLKELTQGGADVVIDCVGLDGKMSAVEKVEQKVGLQGGTLSAINIAKDAVRKFGTVQLTGVYAKKYNQFPLGDFFTRNITLKMGQAPVVHLMPELFQKIINQEFDPTDIITHKIDLEQAAHAYQTFNDHEDGCIKVILKP

SEQ ID NO: 47688 - protein, 990 aa, Oryza sativa
MAAAAGKAAMERHQSIDAQLRLLAPGKVSEDDKLVEYDALLVDRFLDILQDLHGPHLREFVTYLLPRSCCSCPPPVRSIAHTVQECYELSAEYENDRDEARLDELGRKLTSLPPGDSIVVSSSFSHMLNLANLAEEVQIAHRRRIKLKRGDFADEASAPTESDIEETLKRLVTQLGKSREEVFDALKNQTVDLVFTAHPTQSVRRSLLQKHGRIRNCLRQLYAKDITADDKQELDEALQREIQAAFRTDEIRRTPPTPQDEMRAGMSYFHETIWKGVPKFLRRIDTALKNIGINERLPYNAPLIQFSSWMGGDRDGNPRVTPEVTRDVCLLARMMAANLYFSQIEDLMFELSMWRCSDELRIRADDLHCSSRKAAKHYIEFWKQIPPNEPYRVILGGVRDKLYYTRERTRHLLTTGVSEIPEEATFTNVEEFLEPLELCYRSLCACGDKPIADGSLLDFLRQVSTFGLALVKLDIRQESDRHTDVLDAITTYLGIGSYAEWSEEKRQDWLLSELRGKRPLFGPDLPQTEEIADVLGTFHVLAELPADCFGAYIISMATAPSDVLAVELLQRECHIKQPLRVVPLFEKLADLEAAPAAVARLFSIDWYMNRINGKQEVMIGYSDSGKDAGRLSAAWQMYKAQEELVKVAKHYGVKLTMFHGRGGTVGRGGGPSHLAILSQPPDTIHGSLRVTVQGEVIEHSFGEEHLCFRTLQRFTAATLEHGMHPPISPKPEWRALMDEMAVVATKEYRSIVFKEPRFVEYFRSATPETEYGRMNIGSRPSKRKPSGGIESLRAIPWIFAWTQTRFHLPVWLGFGGAFKHIMQKDIRNIHTLKEMYNEWPFFRVTLDLLEMVFAKGDPGIAALYDKLLVAGDLQSFGEQLRNNFEETKQLLLQVAGHKDILEGDPYLKQRLRLRESYITTLNVCQAYTLKRIRDPSFEVMSQPALSKEFVDSNQPAELVQLNAASEYAPGLEDTLILTMKGIAAGMQNTG

SEQ ID NO: 47689 - protein, 369 aa, Listeria monocytogenes EGD-e
MGQLKGLPVEDGFRMPGEYEPHIGCFMIWPERPDNWRLGGKPAQQNYKEVAVAISNFEPVTMFVSPNQYKNARKELPDTIRVIEMSNDDAWIRDYGPSFLVDDKGDMRGVDWGFNAWGGLLDGLYFPWDKDNQIAKKVCELERIDYYSQKDFILEGCSIHVDGEGTLVTTEECLLSEGRNPNLTKIEIEQTLKKYFHAQKVIWLKHGFYLDETNGHVDNIFNFVAPGEVVLSWTDNKSDPQYEISRECYDILANKTDAKGRTFIIHKLHCPDPVLITQTESEGVEAINGTFPRQAGDRLAASYVNYYTANGAIIFPLFDDPKDKDAQELLEKLYPDRKIVGIKAREILLGGGNIHCITQHLPDKSTIRE

SEQ ID NO: 47690 - protein, 577 aa, Exiguobacterium sp. 255-15
MSKYRKRFILKMLSFISLVLIALGFLLGQSFKDFYINNEKEKLVDETSLVESILRERTVPDMAAYVDKMYAESNFDMILFNGRGEIIAGTPIDVTKLNVRAINFSAIPNDGTFESKVDETSLQYTKPVLTADGGEVYISFIRYTKDLNMIYSRIWTVIILSLLTSFCIIFFAVYSSTKRFLRPIAEATEVLHELSHGNYKSRVYELTAPDESRDLGKSINLLARNLENASSGEAMQRARLESLIEYMGAGLMLIDEKGYVLLVNRTYREMFNIYGQSNGQLYYRVLPNEKMSQVIEDVYLTEKPNRKQSSVRFGLNSRTFMVSAAPIFGKNGRVQGTTVVFNDITEIKKLEQMRKDFVANVSHELKTPLTSIKGFAETLLDGAQDVPEIREQFLNIIHDESERMQTLVEDLLELSRLEQDNYQLETTIVDVTSLLHETATLLQRKATEKQMTIHLETEEEVFIRADLNRLKQVVVNLVANALNYTPNGGNVWISLEDGEEAVMLRIKDDGIGIHPKEMQRIFERFYRVDKARSRNSGGTGLGLAIVKHIIDLHHGTIDVESEENQGTTFTIRLPKKG

SEQ ID NO: 47691 - protein, 320 aa, Synechococcus sp.
MSTSSAQYSPDLVRAYLQEIGRVRLLTAEEELCFGRQVQRLMMLLDAQTELRDRLGHEPSKEEWAAAVDLNLEDLDREIEQGQRAKRKMIEANLRLVVSIAKKYQKRHMEFLDLIQEGTLGLERGVEKFDPSKGYKFSTYAYWWIRQAITRAIAQQSRTIRLPIHITEKLNKLKKTQRELSQQLGRSATASELAEVLELPLEQVREYIQMNRQPVSLDVKVGDSQDTELQELLEDEQSSPSDYVEQESLRRDLRNLMAELTPQQQAVIALRYGLDEGDSLSLAKVGERLNISRERVRKLERQAMDHLRRRSRLLAEYAAS

SEQ ID NO: 47692 - protein, 157 aa, Lactococcus lactis
MNFYDFSAVKMNGETVSMSDYKGKVVIVVNTASKCGFTPQFEGLEKLYETYKDQGLEILGFPCNQFANQDAGENTEINEFCQLNYGVTFTMFQKIKVNGKEAHPLYQFLKKEAKGALSGTIKWNFTKFLIDRDGQVIERFAPKTEPEEMEEEIKKLL

SEQ ID NO: 47693 - protein, 122 aa, Pholisma arenarium
ATDKYIDVHYDITTVMDAKPLLKEALQATVGLPVDRNIPLIGFIGRLEEQKGSDILAAAIPKLIGMNVQIVVLGTGKKKFEKQIEQLEVLYPDKARGVAKFNTPLAHMIIAGSDYMLIPSRF

SEQ ID NO: 47694 - protein, 496 aa, Zea mays
MFSHGADSAHDAGAVGVSSGGATVPTRFVWPYGGKRVFVSGSFTRWSEHLPMSPIEGCPTVFQAICSLSPGIHEYKFFVDGEWRHDERQPTISGEFGIVNTLYLTREYNQINTLSSPSTPGSRMNMDVDNENFQRTVTLSDGTVSEGTLRVSEAAIQISRCRVSEYLSLHTCYDLLPDSGKVIALDINLPVKQSFHILHEQGIPVAPLWDSFRGQFVGLLSPLDFILILRELETHGSNLTEEQLETHTISAWKEAKRQTNGRNDGQWRPQQHLVHATPYESLRDIAVKLLQNGISTVPVIYSSSSDGSFPQLLHLASLSGILKCICRYFKNSTGNLPILNQPVCSIPLGSWVPKIGDLNSRPLAMLRPNASLSSALNMLVQAGVSSIPIVDDNDSLLDTYSRSDITALAKAKVYTHVRLDEMTIHQALQLGQDANTPFGFFNGQRCQMCLRSDPLLKVMERLANPGVRRVFIVEAGSKRVEGIISLSDIFKFLLSL

SEQ ID NO: 47695 - protein, 501 aa, Oryza sativa
MDGSNENIQFSWGKKRAKGGIKMDTQFYDSFTFDNVKYSLYDNVYLFKSGESEPYIGKIIKIWQQNQAKKVKILWFFLPDEIQKHLSGPVMEKEIFLACGEGVGLADINPLEAIGGKCTVLCISKDERNRQPSPRELAMADYIFYRFFDVNSCTLSEQLPEKIAGVEGNLLLNSKVEQVTSCSDQEVHGVDQKMLNVPVPLPQSTVMEDESPVAAVSLPPSVFKEENVASAIPFPQPVVKEESAAAAIPPPHVALKEESVSKSTENITKPAQKVLPGERPPKRVKFSENVTVQNVPLDVPERPSRTGPLELAGRQADRSKWFKIPWDTRLRNADEQGTLVYIQNLDIQFAAADIEELIRDALQLNCIAKPINHPTYDDPNNGKAYAIFKTKSAADSAISKINSGLVVGGRPLYCSKGLLKVPKPSETLLGHLTINNIRMGIRQREEQKKAVSTSHCSQPNTMEYDLALDWMLVRAKQETKFRTLHKKHKDERKTFASKMGK

SEQ ID NO: 47696 - protein, 122 aa, Coldenia procumbens
ATDKYIDVHYDETTVMDAKPLLKEALQAAVGLPVDRNIPLIGFIGRLEEQKGSDILAAAIHEFIGVNVQIVVLGTGKKKFEKQLEELEVSYPDKARGVAKFNVPLAHMIIAGADYMLIPSRF

SEQ ID NO: 47697 - protein, 420 aa, Streptococcus pneumoniae TIGR4
MQTQEKHSQAAVLGLQHLLAMYSGSILVPIMIATALGYSAEQLTYLISTDIFMCGVATFLQLQLNKYFGIGLPVVLGVAFQSVAPLIMIGQSHGSGAMFGALIASGIYVVLVSGIFSKVANLFPSIVTGSVITTIGLTLIPVAIGNMGNNVPEPTGQSLLLAAITVLIILLINIFTKGFIKSISILIGLVVGTAIAATMGLVDFSPVAVAPLVHVPTPLYFGMPTFEISSIVMMCIIATVSMVESTGVYLALSDITKDPIDSTRLRNGYRAEGLAVLLGGIFNTFPYTGFSQNVGLVKLSGIKKRLPIYYAAGFLVLLGLLPKFGALAQIIPSSVLGGAMLVMFGFVSIQGMQILARVDFANNEHNFLIAAVSIAAGVGLNNSNLFVSMPTAFQMFFSNGIVVASLLAIVLNAVLNHKKK

SEQ ID NO: 47698 - protein, 324 aa, Pseudomonas putida KT2440
MKKTVLAFSRITPAMAERLQQDFNVILPNPKLGDISAQFNEALPEAHGLIGVGRKLGRAQLEGAARLEVVSSVSVGYDNYDLDYFNERGIALTNTPDVLTESTADLGFSLIMGCARRTAELDAWTKAGNWQATVGPAHFGSDVHGKTLGIVGMGNIGAAVARRGRFGFNMPILYSGNSRKTALEKELGAQFRSLDQLLAEADFVVIVVPLSDATRKLISSRELKLMKPSAFLINIARGPVVDEAALIEALQAGTIRGTGLDVYEKEPLSDSPLFKLPNALTLPHIGSATAETREAMANRAIDNLRAALLGERPRDLVNPQVWKG

SEQ ID NO: 47699 - protein, 308 aa, Staphylococcus aureus subsp. aureus MRSA252
MKNNKDEKIRISIINGFLGSGKTTLLTHYISELLKNDEKIKIIMNEFGTVDIDSNSISNEIEVHSLINGCVCCDLKQELVYELKAIALKGDVNHVIIEATGIAHPLELLVACQDPQIVNFFEKPIIYGVLDATRFLERHQYTENTVSLMEDQLKLSDMIIINKIDLVTDDSIEKIDKQLSLICASIPTYKTTYGQVSLEELDLPGKDREISSHHHHHHGIKSMTYTFTGPIDRQLFYQFIMKLSESVLRLKGYVSFRDQPNAIYEFQYAYGLPDYGIIGMQLPLTIVIIGETLDTNHIRNQLDMLQFT

SEQ ID NO: 47700 - protein, 401 aa, Geobacter metallireducens GS-15
MSAGVVAITGLGIFCGAGKDIPSFTDALMNGKSGVAPLDLFDVSDFPSKIGVQVKEYDPLDHFDRKAVSRLSRADQFGVIAAGEALRASGIGKHCSPYDMGVVVGGGAAGMFQSEQWLKERIAGRKGRPSLLRGLLPDKASTVIAETFGLAGYQGTITTACSSSATAIGWGADLVSSGRLKAVVCGGTDTLSLLTFAGFNSLRVVDPEPCSPFSLGRQGISLGEGAAFMVLEDADAARQRGATVYGHVRGYAAAGEAYHMTAPEPSGTAAARVMTEAMRIAGIDAGAVGWVNAHGTGTPLNDAVESKAMKLVFGEGVANVPLVSTKALTGHCLGAAGAVEGVATVIALNEGIIPQTLHFRGRDPECDLDYCHDGPRASGATVALSNSFAFGGNITTLVLSR

SEQ ID NO: 47701 - protein, 171 aa, Glycine max
MQSREVVSGLNYLLPSNPCPYPPNNNNYTTMFQNNINPTFQFQRFSNQIYGYNNINNTPYHKVPDLFSPQSSCISSNSTSDEADEQNLSLINERKHRRMISNRESARRSRMRKQKHLDELWSQVVWLRNENHQLMDKLNHVSESHDQVMQENAQLKEQALELRQMIRDMQI

SEQ ID NO: 47702 - protein, 457 aa, Staphylococcus aureus subsp. aureus MRSA252
MAIAVLLNRMFRMEHNPLFEYIYQQKEDIDACYFIIPEEDMSSASDLKAQFYRGTLQRFYQSLHAEKLTPYVMSYDDIISFCKENNISEVVIAGDIMSYHLEEYDILHQRSLFNEARIAVTLIRGNHYFKASKTMNQQGEPYKVFTSFSKKWRPYLRHRDVYHYDLKSFEDFVIASPDDLVFDDIAFGSSQIIEQNKWQHFLDQDIQNYESGRDYLPEVLTSQLSVALAYGLLDIIEIFNDLLARYDEDEANYEAFIRELIFREFYYVLMTQYPETSYQAFKSKYRQIKWSQNEADFNAWCEGQTGFPIIDAAIMELTQTGFMHNRMRMVVSQFLTKDLFIDWTWGEKFFRKHLIDYDAASNIHGWQWSASTGTDAVPYFRMFNPIRQSERFDPKALYIKTYLPIFNQIDAKYLHDTQRNESNLFELGIELGRHYPRQMVDHQEKRTQVLAAFKALD

SEQ ID NO: 47703 - protein, 464 aa, Mycosphaerella graminicola
MAKLYQNVDSAQLQRDADDCLLTYGTDFHPEIITNAEGQSITTASGHRMLDWTSGQMSTLIGHANPEIVETIHAHARNLDHLFSGMLSPPVISLAKRLTSVTPPGLDKALFLSTGGESNEAAIRLAKFYTGKFEIVGLASSWHGVTSGAIAAQYHAGRAGYGPNMPGNIALPTPNSYRSIFRHPDGSHDWKTELEYGFDLVDKQSCGSLAALILEPILSSGGMLVLPPGYLKAVKQHCERRGMLLIIDEAQTGIGRAGDMFAFQHFAEDDGVVPDILTLSKTLGNGLPLSAVVTSNKIASFAKENNFLFYTTHINDPLPAAVGDKVLEIVIRDHLVERSREMGKVFQERLRALQSRYGCIGDVRGRGLMAGVEIVADRVTKEGDIDLGAAIGKRMTENGLWAQLSTMASFGGVFRLAPPLTTTDEELMAGLDIIEEAFASTPGTKPLYERDVAAAYDSQVDARL

SEQ ID NO: 47704 - protein, 399 aa, Oryza sativa
  misc_feature (215)..(215): Xaa can be any naturally occurring amino acid
  unsure (1)..(399): unsure at all Xaa locations
MALSISTPPTSSSLLPASLQVGRWSSSAAMSARPVAFSLRRPVLAARVAAGGNAPSSSVDEVVTELDAVASFSEIVPDTVVFDDFEKFAPTAATVSSSLLLGIAGLPDTKFKSAIDTALADGECNTMEKPEDRMSCFLTKALANVGAEMAHLVPGRVSTEIDARLAYDTQGIIQRVHELLKLYSDHDVLSERLLFKIPATWQGIPGLQVLESEGXQTHLTFVYSFAQAAAAAQAGASVVQIFVGRVRDWARTHSGDPEIDEALKKGEDAGLALAKKVYAYIHKNGYKTKLMAAAIRNKQDVFSLLGIDYIIAPLKILQSLEESVTDTDVKYGYVPRLTPALGKTYNFTEEELVKWDQLSLAAAMGPAAEELLASGLEGYVNQARRVEELFGKIWPPPNV

SEQ ID NO: 47705 - protein, 228 aa, Zea mays
MATAMGAMAATCMASIPAAATFPGDLGVGRRRAVVPGWRAGGRRLRATPPARRPFLFSPKGVSDSRSSQTCLDPDASTSVLGIILGGGAGTRLYPLTKKRAKPAVPLGANYRLIDIPVSNCLNSNVSKIYVLTQFNSASLNRHLSRAYGNNIAGYKNEGFVEVLAAQQSPENPNWFQGTADAVRQYMWLFEEHNIMEFLILAGDHLYRMDYQKFIQAHRETDADITVA

SEQ ID NO: 47706 - protein, 537 aa, Streptococcus dysgalactiae subsp. equisimilis
MQKQWWHKATIYQIYPRSFKDTSGNGIGDLKGITSQLDYLQKLGITAIWLSPVYQSPMDDNGYDISDYEAIAEVFGNMDDMDDLLAAANERGIKIIMDLVVNHTSDEHAWFVEARENPNSPERDYYIWRDEPNNLMSIFSGSAWELDEASGQYYLHLFSKKQPDLNWENAHVRQKIYDMMNFWIAKGIGGFRMDVIDLIGKIPDSEITGNGPRLHDYLKEMNQATFGNHDVMTVGETWGATPEIARQYSRPENKELSMVFQFEHVGLQHKPNAPKWDYAEELDVPALKTIFSKWQTELKLGEGWNSLFWNNHDLPRVLSIWGNDSIYREKSAKALAILLHLMRGTPYIYQGEEIGMTNYPFKDLTEVDDIESLNYAKEAMENGVPAARVMSSIRKVGRDNARTPMQWSKDTHAGFSEAQETWLPVNPNYQEINVADALANQDSIFYTYQQLIALRKDQDWLVEADYHLLPTADKVFAYQRQFGEETYVIVVNVSDQEQVFAKDLAGAEVVITNTDVDKVLETKHLQPWDAFCVKLSV

SEQ ID NO: 47707 - protein, 248 aa, GIBBERELLA ZEAE PH-1
MSDSPQSPPKEVDQGAPSPDDEAQMNEQQDPQSANAAGYEFEGVKEQDRWLPIANARSAVHIWIPLMSCDSSSKSPKASRASKADRADELDANIRNFAPVARIMKNALPDNAKIAKEAKECMQECVSEFISFITSEASEKCQQEKRKTVNGEDILFAMTSLGFENYAEALKVYLSKYREQQNQSNRERVNMDNGQWGSGTMMGDAKAESGAVGDFGHDGNSVESGADPNYMYGSQPGHNGNAPEARER

SEQ ID NO: 47708 - protein, 219 aa, Brassica napus
MAVADDGKLNIEEHPPLWGSRSVDCFEKLEQIGEGTYGQVYMAKDIKTGEIVALKKIRMDNEKEGFPITAIREIKILKKLHHENVVELKEIVTSPGRDTDDQGKPDNNKYKGGIYMVFEYMDHDLTGLADRPGLRFTIPQIKCYMRQLLTGLHYCHAHQILHRDIKGSNLLIDNEGQLKLADFGLARMYSQDHSGNLTNRVITLGDRPPELLLGATKYG

SEQ ID NO: 47709 - protein, 309 aa, Mesorhizobium loti MAFF303099
MAAGKPVVILGVFVADTAYRADRQPRMGETILGNSFKLGPGGKGSNQAVAAGKLGADTTFLTRLGVDAFADMAKRTWQDAGVKSAVIDTPDSYTGAAYIFVEEGSGNNAIIVSPGAAMLISPTDIEANAALIRGAGVFVTQLEQPIDAAMRALEIARGAGVTTILNPAPAAKLPDRVYTLCDYLTPNETETEELTGLKVSSVDEARTASGKLLEKGVGTVIVTLGDKGALLHSKGRSEHVPAISAGPVVETTGAGDAFNGGFAAALSRGVEPLQAVRFACAVAGISVTRPGTAPSMPTLQEVEALLAKG

SEQ ID NO: 47710 - protein, 334 aa, Nocardia farcinica IFM 10152
MSTADRTAPVTVTVTGAAGQIAYGLLFRIASGAMLGPHTPIRLRLLEIPAAVASLEGVAMELEDGAFPLLDAIDISDDPWTGFAGANVALLVGARPRTAGMERADLLAANGPIFTDQGQAINAVAADDVKVLVVGNPANTNAFIAMSNAPDVPAERFTAMTRLDHNRAIAQLAKKTGAPATEIHRIAVWGNHSATQYPDLTHATVAGRPARELVDEQWLREDFIPTVQQRGTAIIQARGASSAASAASAAIDHIHDWVLGTPAGEWTSMAVPSDGSYGVPDGLISSFPVTCADGAYRIVEGLEVDAFSRERIDASVAELTAEREAVVELGFAKG

SEQ ID NO: 47711 - protein, 220 aa, Lycopersicon esculentum
MGRRPARCYRQIKNKPYPKSRFCRGVPDPKIRIYDVGMKKKGVDEFPFCVHLVSWEKENVSSEALEAARIACNKYMTKSAGKDAFHLRVRVHPFHVLRINKMLSCAGADRLQTGMRGAFGKPQGVCARVAIGQVLLSVRCKDGNANHAQEALRRAKFKFPGRQKIIVSRKWGFTKFSRTDYLKYKSENRIVPDGVNAKLLGCHGRLAARQPGRAFLEAAN

SEQ ID NO: 47712 - protein, 637 aa, Caulobacter crescentus CB15
MAATDCLRSGWGGHLSLLLGRHRDSDDLRSPAINPAAIRVRILRAVPAVCLIVGVAMAMDYIVTILLLNEPAAYVPIATLVISTIIAVPLAYWLAGQRLRLETMHAELKASLDAKQDAIEDAEVALAKYREVDRLYRLLGDNLTDHVALWSPLGERLYSSPSIERITGYTLEEFMALPPAALVGEADFRRVQGIIRSLEPGGEPVSADYESLCKDGSRIWVESTYSLLGDGSGILLVTSRDITERKRLELDIAKALQMAEAASAAKSDFLANMTHELRTPLTAIIGFAEVLRRSRNLNKTAARQVGHILDASNTLLSVVNDVLDFSRLEAGGLELDPAPFDPAAMASSCAGLVAERAEAKGLAVEVRAPRGLKPMNLDGPRLSQVLLNFLSNAVKFTSHGAITVALRQTIDGDQAVLRGEVTDTGIGIAPEHRENIFDRFSQADAAVSRRFGGTGLGLAISRRIIERMDGRIGVDSVEGQGSTFWFEVRGPLADLPTQEAVETSPLDADAGVRLLLVEDNAVNRELICAILEPFGVAIETANDGVAGVEAMRQGHYDLVLMDVQMPMMDGLTATREIRAMEGARGASTPIIAMTANVLPEQVANCMAAGMDDHLGKPISPAKLLEAVARWSGRSHAA

SEQ ID NO: 47713 - protein, 235 aa, Lactobacillus rhamnosus
MWTQTLGEFIGTFILVLLGDGVVAGVSLNKSKANGAGWIAITLGWGLAVTMGVYAAAFLGPAHLNPAVTLAFAAIGQFPWAWVMPFVGAQMLGALLGAAVVWLHYYPHWEATNDPATTLGVFATGPAIRNYAANFISEFIGTAVLIFGLLAFTKGKWTDGLNPIGVGILITAIGLSLGGTTGYAINPARDLGPRLAHAILPIAHKGDSDWPYAWVPILGPLAGGVVGALIFTVLP

SEQ ID NO: 47714 - protein, 558 aa, Bacillus cereus E33L
MEKQWWKESVVYQIYPRSFMDSNGDGIGDLRGIISKLDYLKELGIDVIWLSPVYESPNDDNGYDISDYCKIMNEFGTMEDWDELLHEMHERNMKLMMDLVVNHTSDEHNWFIESRKSKDNKYRDYYIWRPGKEGKEPNNWGAAFSGSAWQYDEMTDEYYLHLFSKKQPDLNWDNEKVRQDVYGMMKFWLEKGIDGFRMDVINFISKEEGLPTVETEEEGYVSGHKHFMNGPNIHKYLHEMNEEVLSHYDIMTVGEMPGVTTEEAKLYTGEERKELQMVFQFEHMDLDSGEGGKWDVKPCSLLTLKENLTKWQKALEHTGWNSLYWNNHDQPRVVSRFGNDGMYRIESAKMLATVLHMMKGTPYIYQGEEIGMTNVRFESIDEYRDIETLNMYKEKVMERGEDIEKVMQSIYIKGRDNARTPMQWDDQNHAGFTTGEPWITVNPNYKEINVKQAIQNKNSIFYYYKKLIELRKNNEIVVYGSYDLILENNPSIFAYVRTYGVEKLLVIANFTAEECIFELPEDISYSEVELLIHNYDVENGPIENIPLRPYEAMVFKLK

SEQ ID NO: 47715 - protein, 133 aa, Brassica napus
MGTYLSSPKTDKLSEEGENDKVRYGLSSMQGWRATMEDAHAAILDLDDKTSFFGVYDGHGGKVVAKFCAKYLHRQVLSHEAYGAGDFETSLQGAFFRMDDMMQGQRGWRELAVLGDKMNKFSGMIEGFIWSQE

SEQ ID NO: 47716 - protein, 586 aa, Bacillus cereus E33L
MLKEAIYHRPKDNYAYAYDEKTIHIRIRTKRDDVQSTTLIYGDPYEWKDGKWISSSTPMKKTGSTALFDYWFISIEPKFKRLRYGFELKNDTDTLIYAERGFFSTTPNDDVGNFFCFPFIHANDVFKAPSWIKDTVWYQIFPERFANGDHTLNPENTLPWGSAEPTPTNFFGGDFAGIIQNLDYLVKLGISGIYFTPIFKAHSNHKYDTIDYMEIDPQFGTKETFKELVQACHTHGIKVMLDAVFNHSGYFFDKFQDVLQNGEQSAYKEWFHIHEFPIRTEPLPNYDTFAFTPYMPKLNTAHPDVKEYLLEVGRYWVREFNIDGWRLDVANEVDHNFWREFRSEIKALNSEVYILGEIWHDALPWLQGDQFDAVMSYPVTNALLSYFANDSIKANEFMKQITESLHSYSMNVNEAAFHLLDSHDTPRILTTCNGDKNKLKLLYVFHLSFIGSPCIYYGDEIGMDGGMDPDCRKCMVWDTEEQDHTLFTHVQTLISLRKQYKAFGGHGTFQFIEANDEYNYISYTKTYEDETIFFVLNPTNSDITAALPLHVTGKKIINIYTNEEFSAEASVLQVTLPPYGFSILKW

SEQ ID NO: 47717 - protein, 101 aa, Cucumis sativus
HIQENWRILDFFSHHPESMNMFTFLFDDIGIPQDYRHMDGSGVNTYTLINKAGKAHYVKFHWRPTCGVKSLLEEDAIRVGGSNHSHATQDLYDSIAVETYP

SEQ ID NO: 47718 - protein, 430 aa, Zea mays
MGFGMGNNNNGASSSSSRLDPAAPLLPRHGSSGGREGGGLSSQPKTFANVFIAVVGAGVLGLPYTFSRTGWAVGSLLLFSVAALTFYCMMLLVACRRRLADEHPKIASFGDLGDTVFGAHGRFAVDVMLVLSQFSFCVGYLIFISNTMAHLYPIAASSSSALLSPKALVIWAMLPFQLGLNSIKTLTLLAPLSIFADVVDLGAMGVVLGQDVAAWLAKPVPVVAFGGAGALLYGLGVSVYAFEGIGMVLPLEAEAANKSKFGVTLGLSMAFIAVMYGLFGVMGYVAFGDATRDIITTNLGAGWLSAAVQLGLCINLFFTMPVMMNPVYEVAERLLHGKRYCWWLRWLLVVVVGLAAMYVPNFTDFLALVGSSVCVLLGFVLPASFHLKVFGAEMEWPGVLSDVLLVVIGLALAVFGTYTSLLQIFQSSSA

SEQ ID NO: 47719 - protein, 517 aa, Blumeria graminis
MSESIGPTRTLKRKNVKGLALSAPPRIVAPSDGDSQQPGGIGGENTRQTSQLEIGIEYKLDLKREDLEVLKDLGHGNGGTVSKVRHMATGTVMARKIIHVEANKEMRRRIVRELQIMHETNSEYIVTFYGAFLSETNDVIMCMEYMDVGALDRVSRKFGPVRVDVLGKIAEATLGGLTYLYTKHHIMHRDIKPSIILINSKGQIKLCDFGVSGELVNSVADTFVGTSTYMAPERIQGQKYTVKSDVWSFGLSIMELAIGKFPFDTSEQLSDDEGAPAGILDLLQQIVYEPAPRLPKSEAFPQILEDMIQKCMAKEPQERPTPQELYEREPFVQAAKRTPVNLKEWAVGLMEKDNRKSHLGPQLSPSTQQLLRSCDSPTAMRLNSPNNALPTPTSGDIPIGGDVRSAATSPTHEDSTNHSRLSTKLSSSQSRSHSGSSSQNSRHVSNNSATLAIPDRQSNIPSGKGVVFTSTKLPIRPAPSGPLPPPPVPRKEGTESDLRNLNRRQATFGNNGYGPGF

SEQ ID NO: 47720 - protein, 222 aa, Arabidopsis thaliana
MASLLARRSFSALRARHLAFSGQGLQGSHLCGLQSRAISYGSNKDDEEAEQLAKEISKDWSTVFERSMNTLFLTEMVRGLSLTLKYFFDPKVTINYPFEKGPLSPRFRGEHALRRYPTGEERCIACKLCEAVCPAQAITIEAEEREDGSRRTTRYDIDMTKCIYCGFCQEACPVDAIVEGPNFEFATETHEELLYDKEKLLENGDRWETEIAENLRSESLYR

SEQ ID NO: 47721 - protein, 455 aa, Blumeria graminis
MPGQSTPRARPSPQLKLSTPKKSSHTPLELQQTHHLVDRHGISISNIQSAGGGSESSEAHSRSGSFGLLDGRGSVPVSAGSQYSALSFAQNGLRHLQGTPDPSSAVGSLYSERSEIGVGVERDGSLNELDSFARLSLERARTLDVEELDDEGWRIASTENRIQELSSLGEGAGGAVTKCILRGGKTIFALKIITTNPDPDVKKQIVRELGFNKDCANEHICRYYGAFVEPSTATISIAMEFCEGGSLDSIYREVRKLGGRTGEKVLGKIAEGVLNGLTYLHGKKIIHRDIKPSNILLCRDGQVKLCDFGVSGEFGTKGDANTFIGTSYYMAPERITGQSYTITSDVWSTGVTLLEVAQHRFPFPADGTEVQPRAGLIDLLTYIVRQPVPKLKDEPEAGIKWSDNFKYFIECCLEKTPSRRASPWRMLEHPWMIEMQSKRVHMAHFLATVWGWEEK

SEQ ID NO: 47722 - protein, 489 aa, Exiguobacterium sp. 255-15
MSEKRLTTNQGVPIGDNQNSRTAGRRGPTLLEDYQLIEKMAHFDRERVPERVVHARGFGAHGVFTVKNSMKKYTKAAFLQNEGTEVPVFARFSTVIHGTHSPETLRDPRGFSVKFYTEEGNWDFVGNNLPVFFIRDSMKFPDMVHSLKPDPRTNIQDPDRYWDFMTLRPESTNMLMHLFTDEGIPASYRKMRGSSVHAFKWVNAHGNTVYVKLRWVPKVGVHNLSADEATEIQGKDFNHASNDTYQAIEDGEFPEWDLFVQVLDPADVDNFDFDPLDATKDWFEDVIPFQHVGTMVLNKNVDNYFAETESVGFNPGVLIPGMLPSEDKLLQGRLFSYSDTQRYRIGTNYQQLPINCPFAQVNNYQRDGAMPVGQQTSPVNYEPNRYQDEPKQTPEYTEENQPLYDDIHGRLEIEKTNNFGQAGEVYRRMTEEEQTALLNNLVDDLKQVRHENTVLLAICNFYRADESLGKKLSEALQVDIQPFLQQMQK

SEQ ID NO: 47723 - protein, 489 aa, Nicotiana glutinosa
MGFENEKNNSILSKLATNEEHGENSPYFDGWKAYDNDPFHPLKNPNGVIQMGLAENQLCFDLIEEWIKRNPNASICTTEGIKSFRAIANFQDYHGLTEFRRAIAKFMEKTRGGRVTFDPERVVMAGGATGANETIIFCLADAGDAFLVPSPYYPAFNRDLRWRTGVQLIPIPCDSSNNFQITTKAVKEVYENAQKSNIKVKGLILTNPSNPLGTTLDRDTLKNLLTFTNQHNIHLVCDEIYAATVFSTPQFVSIAEIVNDEMRHCNKDLVHIVYSLSKDMGLPGFRIGIVYSFNDTVVSCARKMSSFGLVSTQTQYLLAEMLSDEKFVSNFLTESSKRLAKRHKHFTNGLEQVGIKCLRSNAGLFCWMDLRPLLKESNFDAEMSLWRVIINDVKLNVSKGSSFDCQEPGFFRVFFANMDDETVDIALRRIRRFVSVKRTGDETTAMERKQQWKKNNLRLSFSKRMYDESVNLSPLSSPIPHSPLVRART

SEQ ID NO: 47724 - protein, 749 aa, Glycine max
MDADSSGEEVLIKTRKPYTITKQRERWTEEEHNRFLEALKLYGRAWQRIEEHIGTKTAVQIRSHAQKFFTKLEKEAFVKGVPIGQALDIDIPPPRPKRKPNNPYPRKTNVGGAPTLHSGARHGKPLISIVSSLGKQALGLEKEPLPEKHDVDLRPSTVKENKDQSCSKVFTILQEAPCSSVSSANKNSTSILVPLRNSCALRKFIPSVKDVITQDETNDSFVTDDLENQKLEIDDGKHTQKSNGTCKVSKSENSGASELVQTEKTDGLNCALTIEGVQGNQNYPRHVPVHVVDGNLGTSTQNPSPDMVFQDSIFQPKGGVNGQPNLVTISATSNISESQNNTARSSIHQSFPPCPTFTQDDYHSFLQVSSTFSSLIVSTLLQNPAAHAAASFAATFWPYANAETSADSPMCTPDFPSRQIGSPPSVTAIAAATVAAATAWWAAHGLLPLCAPLHTAFACPPASAIAVPLMNIDESPQKTEQEEIKPQNSSLQDQILDPEHSEAQHSAPKSPAVFSSKSEERGDANLNTSPKATNHETNQVISENPDSNKMKGRKPVDRSSCGSNTTSSSEETELLLKDEKEKEEPKTPDANILDTELSNRRSRSINNLTDSWKEVSEEGRLAFQALFSREVLPQSFSPTHDLINEDNQIDSIKDNDQNTDYKDEDLESKKCSSNCDGVQKNLLFVKDNNEEEGLLIIGLGPGKLKTRPTGFKPYKRCSVEANENRIGTACNQGEEKGPKRIRLNGEAST

SEQ ID NO: 47725 - protein, 2155 aa, Blumeria graminis
MTRKDLATRNSSATSSAPDGGRTRDILNLSASWTICPIQQGTRVCVNTNQNKLLATKTQVYCKEHQPVFSPTTFNAYLREREHCSSVLGNCSRNFAALETGKKECLPPNQHNISTPTAASLHHFEATWMASTRGPLTLPGSASFGTSFFSDANDQKPENSPLSPGPRLSTGLSTTSTVGDLTGETYFGEERRPSIASVHTASSQSSISSVSRPGIHKKLQTFFGDDFPGRNRADSSLPSQRNQGRSQSFVRKQRDRATSSGAETTRKREASPADSRPRTPVPSRDVVPFLYQDSQDISKYGEAPVRDKLSGLDRDRYAGDSVITSKLSSSFTGQSHVVSSGRFTKGTEDLRPSHPSLVREEFGSASRSRDRAPKAMGTALGSSSNSGQAKRSVSPTIIAAVIKNSTSNNINSNSNINSGNHDGSTSPTLPSKRGILGRFLKHKEKDSVPLRLKEVPNTSRTFSSPGSRNDTTRGPTSPETAMSSWSREGSITGLDSSSSKAETGRPNNGSYRQGAFSKLQLRKGKPKITDEQDSLAESTENNDIISGLMFSLDTNLNNMEGILAKPPPLTPLDNSLINSLEDEAKDEAENIGSLGWNAPDSWAVKKSNDDTMSRLSDINEAYVPPMEDEKSNPYCIRIFRLDGTFATLSTPLNATVAELMGQLGRKTYMTDSLANYQIVMKKHDLQRILGPGERPVVIQKRLLEQAGYEERDRIEDVGREDNSYLCRFSFIPARESGYASFATDPLAGRVQKYSHIDLSRRNLVTIPIALYSKASEIISLNLSRNLSLDLPKDFIQSCQNLRDIKFTNNEAWKLPLSLSHGTRLSILDVSNNRLEQLERSELDRLQNLASLKLANNRLGSLPSYFGNFKLLRTLNVSSNFLESFPTFLCDLESLVDIDMSFNGISSLPDEIGQLTNLERFIITNNRLNGSLPLTFGDLVNLKEVDIRYNALSSIDVIARLPKVEQISADHNSVSVCESEFTKIRILRLNSNPVTKFEILNSVPTLKTLNLSNAKLAHVPDAIFDRMPNLVKLILDINHFVSLPMHIGKLRKLEHFSIARNALNSLPQEIGCMTELRFLDVRQNNLKKLPIELWYASKLETLNVSSNVLDSFPMPASRPPQIPGEIFPMVPQNTSNGSLGPNSTASSFEEIGALEAFGQRRSSQASYSLLGVGGSPGSGVTERKTSVVSSYSKGGRQTSIVTRTGSEMTAGNITPLRKDSGISTRLISTFSRSLKNLYLADNQLDDDVFDKLILLGELRILNLSYNDLNDIPHRSIKSWPQLSELYLSGNELTSLPSDDFEEFSLLQVLHINGNKFQTLPAELGKAHRLAVLDCGSNSLKYNVSNWPYDWNWNWNTNLKYLNLSGNKRLEIKPSAPGGAGNRDGRDLTNFNALQNLRILGLMDVTLTISSIPDQTEDRRVRTSGSVAGHLSYGMADTLGKNDHLSIIDMVVPRFNSSEAETLMGMFDGQALSGSGSKIARYLHENFGHIFSEELKKLNSELGETPADALRRAFLSLNKDLAIAATQCAEERPLLTHRSTTASTALSHTDLQSGGVATVVFLQNSELYVANVGDAQAMLIHSEGGHRILTRKHDPAEPNERQRIRDAGGWVSRQGKLNDILEVSRAFGYVQIMPAVQAAPHITQVTVKEQDEMILIASRELWEYLSPELVVDVARYERGDLMRASQRLRDLAIAFGATNKLMVMMIGVSDLKKRAQIRPHRVQSLLFNPGTIIDETYAPTRRPRKKGETVEDSGLRRLQAEVDAPVGDVSIAFTDIKSSTLLWETYPSAMRSAIKLHNEVMRRQLRIIGGYEVKTEGDAFMVSFPTATSALLWCFAVQQALLEVQWPSEVLSSVLGQEVYDNDQTLIFKGLSVRMGVHWGHPVCETDPVTRRMDYFGPMVNRAARISAVADGGQITVSADFISEIQRCLETYSESARSDSMGSEEAFESDIYRQAIRRELRSLSSQGFEVKDMGERKLKGLENPEYIYLMYPHALSGRIHYQQRLAEGDKLVAVEGPARFSDTTQLNIDIDSLWGLWHVSLRLEMLCSSLEVENGIGMPLQAPETTILEKIRSRGGEITDRVLINSLAHQVTRIESCISSLVTRHLAVGQCPLYNFDQLRAPMTEVLGSIAVQLRELRILKAGYIDQDFSNLSKRRT

SEQ ID NO: 47726 - protein, 664 aa, Vibrio fischeri ES114
MSSRKHLANAIRALSMDGVQQANSGHPGAPMGMADIAEVLWRSHLNHNPQNPEWADRDRFILSNGHGSMLIYSLLHLSGYDLSIEDLKNFRQLHSKTPGHPEYGYAPGVETTTGPLGQGITNGVGMAMAEKALAAQFNREGHDIVDHNTYVFMGDGCLMEGISHEACSLAGTLGLGKLIAFWDDNGISIDGEVEGWFSDDTPKRFEAYGWHVIPAVDGHDSDAINAAIEAAKADPRPSLICTKTVIGFGSPNKQGTHDCHGAPLGAEEIAATKAQLGWEYGAFDIPADVYAGWDAKEVGAEKEAAWNAKFDAYAAAHPELAAEYKRRVNGDLPAEWEEKANTIIADLQANPANIASRKASQNALEAFGAMLPEFMGGSADLAPSNLTMWSGSKSLEANDFSGNYIHYGVREFGMTAIMNGIALHGGFVPYGATFLMFMEYARNAMRMAALMKVQNIQVYTHDSIGLGEDGPTHQPVEQIASLRLTPNMSTWRPCDQVESAVAWKLAIERKDGPSSLIFSRQNLAQQERTQEQVADIAKGAYILKDCEGQPELILIATGSEVELAVEAAAQLTAEGKAVRVVSMPSTDAFDKQDEGYREAVFPSAVTKRIAIEAGIADFWYKYVGFGGKIIGMTTFGESAPADELFKMFGFTTENVVNTAKELLA

SEQ ID NO: 47727 - protein, 395 aa, Bacillus licheniformis ATCC 14580
MAGCSKGFAMKDSVFIFSPSYQTYQFHQDHPFNQLRVYVTYDLLNTVGAFEPGETIAPRAATETELELVHTGDYIRAVQLAGAGKLPAAESENYGLGTEDTPVFAGMHEAASLLVGGTLTAADYVMTGKARHALNLGGGLHHGFRGRASGFCVYNDSSVVIRYLQKKYHAKVLYIDTDAHHGDGVQFTFYDDPSVCTVSIHETGRYLFPGTGQVQERGHGEGYGYAFNIPLDAFTEDESFLDSYRTAVSEIAEFFKPDVILSQNGADAHYYDPLTHLCTTMKIYEEIPKLAHELAHTYCSGRWIAVGGGGYDIWRVVPRAWARIWLEMKGMEPEEKMPEKWLKKWGKQASVRLPANWSDPEDLYPPIPRKTEITEKNAQTVAKALYPIRSAQRTT

SEQ ID NO: 47728 - protein, 234 aa, Glycine max
MLPTGAKETQLRESNSQKVHPQPIEEAMNQNPEAMETLISKVFMNISSLKSAYIELQAAHTPYDPDKIHTADKLVISELKNLSELKHFYRENNPKPVCVSPQDSRLAAEIQEQQSLLKTYEVMVKKFQSEIQNKDSEIHQLQQQIEQASQKRAKLEKNLKLRGLSTKESEDENGFFPVDLTPDLFTSAVEVAAKAIHDFSKPLINMMKAAGWDLDAAANSIEPDVVYAKRAHKC

SEQ ID NO: 47729 - protein, 214 aa, Saccharomyces cerevisiae
MSFNSPFFDFFDNINNEVDAFNRLLGEGGLRGYAPRRQLANTPAKDSTGKEVARPNNYAGALYDPRDETLDDWFDNDLSLFPSGFGFPRSVAVPVDILDHDNNYELKVVVPGVKSKKDIDIEYHQNKNQILVSGEIPSTLNEESKDKVKVKESSSGKFKRVITLPDYPGVDADNIKADYANGVLTLTVPKLKPQKDGKNHVKKIEVSSQESGGN

SEQ ID NO: 47730 - protein, 1313 aa, Geobacter metallireducens GS-15
MNRRELMAGVLLGSAGFLVNWFKLSLFFNVDFLFGSVFSMFALLRFGPATGLLAAVIAAGCTWLQWHHPWAIVIFGCEALCAGWLRNRKRMDLMLGDIIYWFSGGLVLVWLFYHQVMGFNAGATLLVALKQGMNGIINTLIAEALFLLSWRLRGGTELPSLRKWLGVILEGVVLVPAFVFAFLDTSWYFRQQMTRLQESTARTAEVGNLTISSWLDEEQHKLGMLVKLVGDPDHNPSQEMQRLLERYHAAHGSDTYRLGVMDRNHVTRAFSPRVDEKGVSTIGVWLGDRPYIAELNDPSHPIVFDAFMGKIGVPGPRLIMLAPCMVGGEYRGAVFSVVSLGHPAALLKGIVGKRDVNLTLLDRHRRVVASTDSGKKFLEQFALPKGGQLHSVGSNVSQWVPDPQPGGGPMKRWNRSFYMTEIALEPKSGFRLVVQSSLAPSLKEINNRASILLGVLAILTLVVVGLSRYFSRRLLAPFAMLGKVTSQLPVRIAQGEQISWRPAEVREEQELQDNFRLMENALQNSFSELTAINEELEHRVTERTAELRIAKEAAENSELQLRSITNSAHDAILMMDHQGSISYWNPAAEQILGYSAAEALGKNLHDLLTPERYLADHLTAFSEFQQTGSGNAVGKTLELFARRKDGQEIEVALSLSAVFLNGAWNAVGLLRDITEQKRINASLRMLSAAVEHSPVSIIITDRDGRIEYVNPKSCQMTGYAFEELRGQNPRIMKGPTHPPEFYKNLWETILSGREWYGEFHNRRKDGSLVWVMASISPIYDEKGEITHFVGVREEIEKQKKLQEELANIAQLEKVARDRAEQANRAKSEFLAGMSHEIRTPLNAIIGMSDLLAETRLDGEQSGYLSVVHSAGETLQGLINDILDLSKIEAGMLQLDSVPFSLRDCIRQLTDITSVKASSKGVTYSFSVKSAVPDWLMGDSLRLRQVLINLVGNAVKFTDSGGSVLLEVEPVQQSDAEVLIRFSVADTGIGIAPEKLDTIFESFSQADSSTTRRYGGTGLGLAISRHLAGMMGGEIGVESTVGKGSCFRFTVPFAISRRTEEPLPKEQLPGDKLGRPLSILVVDDNLANRTVLTAYFRRTEHTVECAVNGEEALAKIKGGGYDVVFMDMEMPVMDGYTAVRLVREWERETGRAPLPVIALTANALKEDQLRSLDAGCTAHLTKPIKKDKLLEIVGEYQQRPRTNGKQGTNMDRDNVPDKIVVVCDPDLEDIIPAYLEGRKTEGSVIRELAVNGQFDEVRTIAHGLKGSGGCYGFSRITEIGRDMELAANDGNLVEVLKQLDTLEAYLQAIEVRYE

SEQ ID NO: 47731 - protein, 241 aa, Petunia x hybrida
MACKTLTCSASPLVSNGVVSATSRTNNKKTTTAPFSVCFPYSKCSVRKPASRLVAQATGDNKDTSVDVHVSNNNQGGNNQGSAVERRPRRMALDVSPFGLLDPMSPMRTMRQMMDTMDRLFEDTMTFPGSRNRGTGEIRAPWDIKDDENEIKMRFDMPGLSKEEVKVSVEDDVLVIKGEHKKEESGKDDSWGRNYSSYDTRLSLPDNVDKDKVKAELKNGVLLISIPKTKVEKKVTDVEIK

SEQ ID NO: 47732 - protein, 148 aa, Sesbania rostrata
MGFTEKQEALVNASYEAFKQNLPGNSVLFYSFILEKAPAAKGMFSFLKDFDEVPQNNPSLQAHAEKVFGLVRDSAAQLRATGVVVLADASLGSVHVQKGVLDPHFVVVKEALLKTLKEAGGATWSDEVSNAWEVAYDELSAAIKKAMS

SEQ ID NO: 47733 - protein, 536 aa, Glycine max
  misc_feature (317)..(317): Xaa can be any naturally occurring amino acid
  unsure (1)..(536): unsure at all Xaa locations
MALAFDEFGRPFIILKEQEQKSRLRGLDAQKANISAGKAVARILRTSLGPKGMDKMLQSPDGDVTITNDGATILDQMDVDNQIAKLMVELSRSQDYEIGDGTTGVVVMAGALLEKAERLLERGIHPIRIAKGYEMASRIAVEHLERVANKFEFDESNLEPLIQTCMTTLSSKIVNRCKRSLAEIAVKAVLAVADLARKDVNLDLIKVEGKVGGKLEDTELIYGIVVDKDMSHPQMPKQIEDAKIAILTCPFEPPKPKTKHKVDIDTVEKFQTLRLQEQKYFDDMVQKCKDVGATLVICQWGFDDEANHLLMHRNLPXAVRWVGGVELELIAIATGGRIVPRFQELSPEKLGKAGMVREKSFGTTKDRMLYIEHCANSRAVTIFIRGGNKMIIEETKRSLHDALCVARNLIRNNSIVYGGGSAEISCSIAGEAAADRYPGVEQYAIRAFGDALEAIPMALAENSGLQPIETLSAVKSQQIKDNNPHFGIDCNDVGTNDMREQNVFETLIGKQQQLLLATQVVKMILKIDDVISPYEY

SEQ ID NO: 47734 - protein, 102 aa, Chlamydophila abortus
MSDQATTLRIKPLGDRILVKREEEDSTPRGGIILPDTAKKKQDRAEVLALGTGKRDKDGQVLPFEVKVGDTVLIDKYAGQELTIDGEEYVIVQESEVMAVLK

SEQ ID NO: 47735 - protein, 544 aa, Chlamydophila abortus
MAAKNIKYNEDARKKIHKGVKTLAEAVKVTLGPKGRHVVIDKSFGSPQVTKDGVTVAKEIELEDKHENMGAQMVKEVASKTADKAGDGTTTATVLAEAIYSEGLRNVTAGANPMDLKRGIDKAVKVVVDQIKKISKPVQHHKEIAQVATISANNDAEIGNLIAEAMEKVGKNGSITVEEAKGFETVLDVVEGMNFNRGYLSSYFTTNPETQECVLEEALVLIYDKKISGIKDFLPVLQQVAESGRPLLIIAEDIEGEALATLVVNRLRAGFRVCAVKAPGFGDRRKAMLEDIAILTGGQLISEELGMKLENTTLSMLGKAKKVIVSKEDTTIVEGLGNKEDIEARCENIKKQIEDSTSDYDKEKLQERLAKLSGGIAVIRVGAATEIEMKEKKDRVDDAQHATLAAVEEGILPGGGTALVRCIPTLEAFIPVLTNEDEQIGARIVLKALSAPLKQIAANAGKEGAIICQQVLARSSNEGYDALRDAYTDMIEAGILDPTKVTRCALESAASVAGLLLTTEALIADIPEEKSSSVPAMPGAGMDY

SEQ ID NO: 47736 - protein, 279 aa, Staphylococcus aureus subsp. aureus MRSA252
MLNEIQILNNGYPMPSVGLGVYKISDEDMTKVVNAAIDAGYRAFDTAYFYDNEASLGRALKDNGVDREDLFITTKLWNDYQGYEKTFEYFNKSIENLQTDYLDLFLIHWPCEADGLFLETYKAMEELYEQGKVKAIGVCNFNVHHLEKLMAQSSIKPMVNQIEVHPYFNQQELQEFCDRHDIKVTAWMPLMRNRGLLDDPVIVKIAEKYHKTPAQVVLRWHLAHNRIIIPKSQTPKRIQENIDILDFNLELTEVAEIDALNRNARQGKNPDDVKIGDLK

SEQ ID NO: 47737 - protein, 593 aa, Magnetospirillum magnetotacticum MS-1
MAAYKIIDHTYDVVVVGAGGAGLRATMGMGQAGFKTACITKVFPTRSHTVAAQGGIGASLGNMAEDNWKWHMYDTVKGSDWLGDQDAIEYMCREAVPAVHELEHFGVPFSRTPEGKIYQRPFGGHMSNFGEKPVQRACAAADRTGHAILHTLYSQCLKHQCEFFIEYFAIDLIMENGACRGVIAWNLDDGTLHRFRAHKVVLASGGYGRAFFSCTSAHTCTGDGHGLVARAGLPLQDMEFVQFHPTGIYGSGCLITEGARGEGGYVTNSAGERFMERYAPTAKDLASRDVVSRAMTMEIREGRGVGKENDHIYLHLEHLGAETLELRLPGISETAKIFAGVDVTKEPIPVLPTVHYNMGGIPTNLYGEVLRPTAENPDATVEGLMAIGEAACVSVHGANRLGTNSLLDIVVFGRASALRAAETLKPGTPHKPLPKDGSDLALSRFDRLRNANGSMHTSEIRLAMQKTMQMDAAVFRTSKSLAEGCAKMDQVASTLPQIKINDRSTVWNSDLVEALELENLMDCALATIVSAEARHESRGAHAHEDYPDRDDVNWQKHSLAWVENGKVKLDYRPVHTYTLTDEVEYIKPQKRVY

SEQ ID NO: 47738 - protein, 153 aa, Lupinus luteus
GALTESQAALVKSSWEEFNANIPKHTHRFFILVLEIAPAAKDLFSFLKGTSEVPQNNPELQAHAGKVFKLVYEAAIQLEVTGVVVTDATLKNLGSVHVSKGVADAHFPVVKEAILKTIKEVVGAKWSEELNSAWTIAYDELAIVIKKEMDDAA

SEQ ID NO: 47739 - protein, 378 aa, Arabidopsis thaliana
MSRLFLVVSSNVCSDSDFSFLLDPYSDSVSLFADLVRCCISAMDLASNLGGKIDKSDVLTAVEKYEQYHVFHGGNEEERKANYTDMVNKYYDLATSFYEYGWGESFHFAQRWKGESLRESIKRHEHFLALQLGIQPGQKVLDVGCGIGGPLREIARFSNSAVTGLNNNEYQITRGKELNRLAGVDKTCNFVKADFMKMPFPENSFDAVYAIEATCHAPDAYGCYKEIYRVLKPGQCFAAYEWCMTDAFDPDNAEHQKIKGEIEIGDGLPDIRLTTKCLEALKQAGFEVIWEKDLAKDSPVPWYLPLDKNHFSLSSFRLTAVGRFITKNMVKILEYIRLAPQGSQRVSNFLEQAAEGLVDGGRREIFTPMYFFLARKPE

SEQ ID NO: 47740 - protein, 762 aa, Bacillus cereus E33L
MAIQTSNLGYPRIGLQREWKKTLEAFWSNKINEEQFLTTMKEIRLQHVKVQQEKGIELIPIGDFTYYDHVLDTAYMLGFIPSRFSEFTSYLDVYFAMARGSKDHVASEMTKWFNTNYHYIVPEYEEGLQISLKDNRPLRLYEEAKQELGVDGKPVILGPYTFLKLAKGYTQEQFATILKQLVAPYVQLLSELHAAGAQIIQVDEPIFASLTKEEVQQAKEIYEAIRKEVPNATLLLQTYFDSVEENYENIITFPVSSIGLDFVHGKEGNLNAISKYGFPADKTLAVGCIDGRNIWRADLDEVLTLFTKLQTQVQTKDFIVQPSCSLLHTPIDKTEETHLSTELFDALAFANQKLEELVLIHSALTQGTESISNELETYRNVHHTIRSSAARNREDVKAARTALKEEDFSRPLPFEKRYKLQQVALKLPLLPTTTIGSFPQTTEVRQTRKEWRTGVISNKQYEQFIEKETEKWIRYQEEIGLDVLVHGEFERTDMVEYFGERLAGFSFTKNGWVQSYGSRCVKPPVIYGDVAFINGMTIKETVYAQSLTEKVVKGMLTGPVTILNWSFVRNDIPRKEVSYQIALALRHEIELLESSGIRVIQVDEPALREGMPLKEKDWDAYITWAVQSFLLATSSVANVTQIHTHMCYSNFEDIVDAIRALDADVISIETSRSHGEFIDTLKHTTYEKGIGLGVYDIHSPRVPSKDEMYKIVEQSLEVCDPKYFWINPDCGLKTRRTEEVIPALEHMVQAAKDARSLLKTNA

SEQ ID NO: 47741 - protein, 131 aa, Flaveria ramosissima
SNGGRVQCMKVWPPLGKKKYETLSYLPNLTETQLAKEVDYLLRNKWVPCLEFELEHGFVYRENHRSPGYYDGRYWTMWKLPMFGCTDSSQVMKELGECKKEYPQAWIRIIGFDNVRQVQCISFIASKPDGY

SEQ ID NO: 47742 - protein, 462 aa, Clostridium acetobutylicum ATCC 824
MKDEKTMDKIVSLAKNRGFVFAGSEIYGGLANSWDYGPLGVELKNNVKKLWWKKFVQDNTYNVGLDCAILMNSEVWVASGHLGGFSDPLMDCKECKSRFRADKIVEDYLTEQGAEVASADGWSNEKLENFIKDKHIKCPKCGKENFTSIRKFNLMFKTFQGVTEDASSEIYLRPETAQGIFVNFKNVQRSSRKKVPFGIGQIGKAFRNEITPGNFTFRTREFEQMELEFFCKPGTDLEWFKYWKDYCWSFLLDLGINKENLRFRDHSAEELVFYSKATSDIEYKFPFGWGELWGVADRTDYDLKKHMDHSGEDMNYLDPSTNEKYVPYVIEPSLGADRVALAFLIDAYDEEELEGGDQRIVLHFHPQIAPIKAAVLPLSKKLSEKALDVYSKISSKFNIEYDETGSIGKRYRRQDEIGTPYCITVDFDTLEDEAVTIRDRDSMSQVRVKIEELEKYLEEKIK

SEQ ID NO: 47743 - protein, 549 aa, Kineococcus radiotolerans SRS30216
MRAPGGQVRRRRGDRGAPGEGRRRRPPRPRLPRRGPHRRARGRGSRRRGAPGEGPRRRRRRRGVRRGHGRPRRVRGDLLRPRRAGAREHDRVRAQRPVHPRPAARRRGPHRHPPRVAAAAGDGGRRPGPGGTLGDGDPRRAGPADADPGRAVRPRRLRRLRRLRLRRLRLQPGGEPVVTVHKGLAGVVADTTAVSKVDPETNSLLYRGYPVQELATRCSSEQVARLLWDGELPSAAELERFRAREREGRRLDERVRRTIDDLPLTAHPMDVVRTAVSVLGALDPAAGDASPEAELAKAERLFAALPAVVAHAQRRRLGGQAPPPRDDLDHAANFLWMVTGAEPDAVAVRTFETSLVLYAEHSFNASTFAARVVTSTLSDLHSAVTAAVGALKGPLHGGANEAVWEAFEEIGLGEGSPGRARAWLAAALAGHRKVMGFGHRVYRHGDSRVPTMHAALRELATDRGRPDVLELYDALEAEMTRAKQILPNLDYPAGPAYHLLGLDTDLFTPVFVAARVVGWTAHVVEQRGANSLIRPLSEYDGPPLRHLPA

SEQ ID NO: 47744 - protein, 131 aa, Flaveria ramosissima
SNGGRVQCMKVWPPLGKKKYETLSYLPDLTEAQLAKEVDYLLRNKWVPCLEFELEHGFVYRENARSPGYYDGRYWTMWKLPMFGCTDSAQVMKELQECKKEYPQAWIRIIGFDNVRQVQCISFIASKPDGF

SEQ ID NO: 47745 - protein, 159 aa, Pinus taeda
DVGGGVGSTLNLIVSKYPHISGINFDMPHVVVDAPHYPAVKHVGGDMFDSVPSGQAIFMKWILHDWSDDHCLRLLKNCHKALPEKGKVIVVDTILPVAAETSPYARQGFHIDLLMLAYNPGGKERTEQEFRDLANEVGFAGGVKPVCCVNGMWVMEFHK

SEQ ID NO: 47746 - protein, 133 aa, Flaveria ramosissima
SNGGRVQCMKVWPPLGKKKYETLSSLPNLTETQLAKEVDYLPPNKWVPCLEFELEHGFVSPYNRRSPRYYDGRSWTIWKLPMFMFGCTDSSQVMKELGECKKEYPQAWIRIIGFDNVRQVQCISFIASKPDGF

SEQ ID NO: 47747 - protein, 419 aa, Methylobacillus flagellatus KT
MEDIKHYMQQLGSEARTASRAMARADTETKNKALRAIATAIRRERDTLLAANAADLEAARRHGLEPAMLDRLVLSEKGIDTMAEGLEQIAGLPDPIGEMSDFKYRPSGIQIGKMRVPLGVIGIIYEARPNVTVDAAGLCIKSGNAAILRGGSEAIQCNRALAAIVHEGLAAAALPASAVQVVATTDRAAVGELITMKDYVDVIVPRGGKGLIERISNEARIPVIKHLDGNCHVYIDESADLAKALRILENSKTQRLGTCNTAESLLVARSIAQEALPPLTAMLISKGVEIRGCSETRALVPQAKPATEEDYYTEYLAAIISVKVVADVDEAIAHINQYSSQHTEAIVTENYTNARRFLREVDSSSVIVNASTRFADGFEYGLGAEIGISTDKLHARGPVGLEGLTSLKYIVLGDGEVRA

SEQ ID NO: 47748 - protein, 131 aa, Flaveria palmeri
SNGGRVQCMKVWPPVGKKKYETLSYLPELTEAQLAKEVDYLIRNKWVPCLEFELEHGFVYRENASSPGYYDGRYWTMWKLPMFGCTDSAQVMKELQECKKEYPQAWIRIIGFDNVRQVQCVSFISPKPTGF

SEQ ID NO: 47749 - protein, 300 aa, Zea mays
MGNARRPAADSAAASDREVGFAKLHGECFEYYMQTYSIVLGRHSRRRSKGPVAAPPEADDGVDVDLGALGAGMNVSRRHARIFYDFLRRRFALEVLGKNGCLVEGVHHVPGSAPVKLDSQDLLQMGDTKFYFLLPSRSVFDAGITRRASAVQRAIPPPPSDDDEDEDEHEEAVAAAKRRRDGYNGSKSYREADDQLLLQLEEKDVISSAATILSDLCGPQEWISINKLHEVMFDKYGGMWHHSRVRKYLTSEDFAEAETDGRLWHGLALLLRKYPEHFVINIRKGGGLITEFVSLVSLQS

SEQ ID NO: 47750 - protein, 399 aa, Methylobacillus flagellatus KT
MPSMLESHPAEAATPLLDALQAELADRARLGLLRQRRVLHGMQGVYVEIEGKRLLSFCSNDYLGLASHPSLISAMRDCAVTTGAGTGASHLVSGHQQAHEALEHALQTFMGLPGVLLFTTGYMANLGIITALCGRQDAIFADKLNHASLNDAALLSRAELKRYAHNDLTGLERLLAQSQARRKLVVADAVFSMDGDLAPVPALLSLCERYDAYLMLDDAHGFGVLGAHGRGVLEHFGLDSPRIIYMATLGKAAGAAGAFVAGPTILTEYLMQTARPYIYTTASPAPVAAAAMAGVQLIEHDHARRAHLRALIADFRASCRLQRWQLMASETAIQPVVIGSNEEAVQVSKRLLEHGVLVPAIRPPTVPRGTARLRISLSAAHTHEDVQRLLDILHRLEEA

SEQ ID NO: 47751 - protein, 394 aa, Medicago truncatula
MGAEKPRSCATYFENSKPYFAMILLQFGYAGMNIITKLSLNGGMSHYVLVVYRHAFATIAIAPFAIIFEWKDQPKITFSVFMQILLLALLGPVIDQNFYYAGLKLTSPTFSCAMSNMLPAMTFVMAVLCRMEIVNLKKLRCQAKVIGTILTVAGAMLMTLYKGPVLELMWTKYIPHSNANITSSSSKDNWFLGSILLIIATLAWSSLFVLQAKAIETYKNHQLTLTSLICFFGTILAFATTLIMENKDSVWTIGWDMNLLAAAYAGIVTSSISYYIQGLVIKKKGPVFATSFSPLMMIIVAIMGFFILAEQLFLGSVIGSILVVIGLYSVLWGKHKEQVECKVSPDDIPLPIKSARINGNMGAFSASFDKHSEVKLDQKEESNISLVIINYNRS

SEQ ID NO: 47752 - protein, 148 aa, Sesbania rostrata
MGFTEKQEALVNASYEAFKQNLPGNSVLFYSFILEKAPAAKGMFSFLKDSDGVPQNNPSLQAHAEKVFGLVRDSAAQLRATGVVVLADASLGSVHVQKGVLDPHFVVVKEALLKTLKEAAGATWSDEVSNAWEVAYDGLSAAIKKAMS

SEQ ID NO: 47753 - protein, 418 aa, Frankia sp. EAN1pec
MILGTGSAWDTACVQLADAAQHLGLDDGMHDLLRTPRRSITVSVPLLRDDGQLLVLSGYRVQHNLARGPAKGGLRYHPACDLDEVKALAMWMTWKCALMGIPYGGAKGGIAVEPGLLSRQERERMTRRYAAELVPLIGPDKDIPAPDVGTDEQTMAWIMDTYSTHTGHTAPGVVTGKPLSIGGSAGRAGATSRGVQLAAFAALRELGRDPRETTVAVQGFGKVGALAAQYLHDAGCRLVAVSDVKGGIHNRAGLNPSALIRHLARGADTVVGYPGTDTITNTELLELNVDMLVPAALEGVINTGNADRVRAPLIVEGANGPVTAEADHVLTGKGTVIVPDILANGGGVAVSYFEWVQDIQAYFWTEDQVNDRLRALMQRSYQEVSALARERRVSLRTAAHIIGVARVAEAHRTRGLYP

SEQ ID NO: 47754 - protein, 569 aa, Medicago truncatula
MSLLKAVFVWCICLGLFELSLAKGKSHYKFDVEYIYKKPDCKEHVVMGINGQFPGPTIRAEVGDTLVIDLTNKLHTEGTVIHWHGIRQFGTPWADGTAAISQCAINPGETFQYKFKVDRPGTYFYHGHYGMQRAAGLYGSLIVDLPKSQREPFHYDGEFNLLLSDLWHTSSHEQEVGLSSAPMRWIGEPQNLLINGRRQFHCSLASKYGSTNLPQCNLKGGEECAPQILHVEPKKTYRIRIASTTSLASLNLAISNHKLIVVEADGNYVHPFAVDDIDIYSGETYSVLLTTDQDPKKNYWLSIGVRGRKPSTPQALTILNYKPLSASVFPTSPPPVTPLWNDTDHSKAFTKQIISKMGNPQPPKSSHRSIHFLNTQNKIGSFTKWAINNVSLTLPTTPYLGSIKFNLKNTFDKNPPPERFPMDYDIFKNPVNPNTTTGNGVYTFQLNEVVDVILQNANQLNGNGSEIHPWHLHGHDFWVLGYGEGRFRPGVDERSFNLTRAPLRNTAVIFPYGWTALRFKADNPGVWAFHCHIEPHLHMGMGVIFAEAVHKVRNIPKEALKCVLQPRCS

SEQ ID NO: 47755 - protein, 571 aa, Bacillus licheniformis ATCC 14580
MKGRRRVSHNKLNEQVIETRLRGFEVLATPLLNKGVAFPPEERDALGLTGLLPPKVLTLEEQAKRAYKQFQSQPDDLSKNVYLTALHDRNEVLFYRLLNDHMTEMLPIVYTPTVGTAIQQYSHEYRKPRGLFLSVNDPEGMKTAFENLAAKRSRIDLIVATDAEGILGIGDWGVGGIAISIGKLAVYTAAAGIDPNRVLPVVIDAGTNQERLLNDPLYVGNQHSRIRGERYESFIDQYVQIATETFPGVLLHWEDFGTQNARQILKKYKDKICTFNDDIQGTGAVTLAAVLAAVKISKMPLKDHKVVIFGAGTAGIGNAEQIRAALVQEGVSEEESYRRFWCVDRNGLLTDDMNDLQDIQQPYARPADEVKDFSRNGPGDAIDLLEVVKRVQPTILIGTSTVSGAFTEEIVKEMAKHVKRPAIFPMSNPTPLSEARPEDLINWTEGRALVATGSPFAPVEYSGTRYAIGQANNAFVFPGLGLGTLVSKARLITDNMFYASAAAIAGMVDTGRPGAALLPEVEDLRTVSATVATAVIKAAIEDGVAENEPDDVIQAVQDAMWHPVYRPIRAI

SEQ ID NO: 47756 - protein, 457 aa, Gracilaria gracilis
MQIFVKTLTGKTITLEVESSDTIENVKTKIQDKEGIPPDQQRLIFAGKQLEDGRTLSDYNIQKESTLHLVLRLRGGMQIFVKTLTGKTITLEVESSDTIENVKTKIQDKEGIPPDQQRLIFAGKQLEDGRTLSDYNIQKESTLHLVLRLRGGMQIFVKTLTGKTITLEVESSDTIENVKTKIQDKEGIPPDQQRLIFAGKQLEDGRTLSDYNIQKESTLHLVLRLRGGMQIFVKTLTAKTITLEVESSDTIENVKTKIQDKEGIPPDQQRLIFAGKQLEDGRTLSDYNIQKESTLHLVLRLRGGMQIFVKTLTGKTITLEVESSDTIENVKTKIQDKEGIPPDQQRLIFAGKQLEDGRTLSDYNIQKESTLHLVLRLRGGMQIFVKTLTGKTITLEVESSDTIENVKTKIQDKEGIPPDQQRLIFAGKQLEDGRTLSDYNIQKESTLHLVLRLRGGQ

SEQ ID NO: 47757 - protein, 524 aa, Frankia sp. EAN1pec
MAPRQGTRWPTLRCVRHMLGIGEFTAPGSEYPAQADLLIASNRGPVSFVVGDDGLLHPRRGGGGLVSGLAQVVQDTPEDGREIVWVCAALSDADRRAARSAPGGRIDRSGYDTGGASVRMLDLDRVLFDRAYNAVANRTLWFVLHLLHAPATEPSFGASFRKDWAAYEAYNAAFADALAELAAPGACVLVQDYHLTLVPARLRQMRPDLRIAHFSHTPWSPPEYFRMLPDDVSAAILHGMLGADRLGFLAPAWAAAFRDCCAEILGAEVVGDTVTAGGRTVRTSLYPLGVDAAELRDRAARPDVRARAAELRELAGGCRLVVRVDRTELSKNIVRGLDAYRELLRSHPEWHGRVMHLVCAYPSRHDLPEYREYTAAVQRLAAEIEDEFGTDTWLPVHLEINDDFPRSLAAMTLADVLVVNPIRDGMNLVAKEGMVVSADGGVLVLSREAGACSQMGADAVVVNPFDVTATAEAMHTALVMPAAERRERARRLAAVAGELPPRAWFRAQLDEIRGHAPAEPDRAG

SEQ ID NO: 47758 - protein, 363 aa, Triticum aestivum
  misc_feature (139)..(139): Xaa can be any naturally occurring amino acid
  unsure (1)..(363): unsure at all Xaa locations
MESGPAGTMGGPLSDVPAMLDGDRYELVRSIGSGNFGVARLMRNRASGELVAVKYIDRGEKIDENVQREIINHRSLRHPNIIRFKEVILTPTHLAIVMEYASGGELFERICTAGRFSVDEARFFFQQLISGVSYCHSMXCHRDLKLENTLLDGSTTPRLKICDFGYSKSSVLHSQPKSTVGTPAYIAPEVLLKKEYDGKIADVWSCGVTLYVMLVGAYPFEDPENPKNFKVTIQKILGVQYSIPDYIHIPMDCRNLLSRIFVANPATRITIPEIKNHPWFLKNLPADLMDGPTVSNQYEEPDQPMQNMNEIMQIMAEATIPAAGALGINKFLPDGLDLDDDMDDLDSDLDIDMDSSGEIVYAM

SEQ ID NO: 47759 - protein, 468 aa, Arabidopsis thaliana
  misc_feature (24)..(24): Xaa can be any naturally occurring amino acid
  unsure (1)..(468): unsure at all Xaa locations
MSCSATDLAVLLGPNATAAANYIXLFSAYLVFSMQLGFAMLCAGSVRAKNTMNIMLTNVLDDAAGGKFYYLFGYAFAFGSPSNGFIGKHYFGLKDIPTASADYSNFLYQWAFAIAAAGITSGSIAERTQCVAYLIYSSFLTGFVYPVVSHWFWSVDGWASPFRTDGELLFSTGAIDFAGSGVVYMVGGIAGLWGALIEGPRLGRFDNGGRAIALRGHSASLVVLGTFLLWFGWYGFNPGSFNKILVTYETGTYNGQWSAVGRTAVTTTLAGCTAALTTLFGKRLLSGHWNVTDVCHAPLGGFAAITGGCSVVEPWAAIICGFVAPLVLLGCYKLAEKLKYDDPLEAAQLHGGCGAWGLIFTALFAQEKYLNQIYGNNPGRPHGLFMGGGGKLLGAQLIQIIVITGWVSATMGTLFFILKKMKLLRISSEDEMAGMDMTRHGGFAYMYFDDDESHKAIQLRRVEPRSPS

SEQ ID NO: 47760 - protein, 319 aa, Triticum aestivum
MAFALNASCYPSSFQSSLLPRRMAAAVMIPRRRNVLPVIRAVAVAPPALAPAKPAAVRGRTVSDTMAKLMAKGKTALIPYITAGDPDLATTAEALRLLDACGADVIELGVPCSDPYVDGPIIQASSARALAGGATMDGVLAMLKEVTPELSCPVVLFSYYRPILCRGLAEIKEAGVHGLIVPDLPYVAAHALWSEAKKNNLELVLLTTPAIPEERMKEITKASEGFIYLVSVNGVTGPRENVNLRVESLIQEIKKVTDKPVAVGFGISKPEHVKQIAGWGADGVIIGSAMVRQLGEAASPKEGLKRLEAYARSMKNALP

SEQ ID NO: 47761 - protein, 366 aa, Arabidopsis thaliana
MENQEEDEVVLAKVTSEVEDNFEDEGLVSNSTLEKVAAAKKYIENHYNRRMRHIQQRKERRWVLEQKIASLDVSEKEQLELLEDLQRKETEYTRLMRNRLCVDDFDLLSIIGRGAFGEARLCREKKTGNIYAMKKLKKSEMLSRGQVEHVRAERNLLAEVASDCIVKLYYSFQDPEYLYLIMEYLSGGDVMTLLMREETLTETVARFYIAQSVLAIESIHKHNYVHRDIKPDNLLLDKYGHMKLSDFGLCKPLDCRNISAMNVNEPLNDENINESIDGDENCSIGRRGRRWKSPLEQLQHWQINRRKLAYSTVGTPDYIAPEVLLKKGYGVECDWWSLGAIMYEMLVGYPPFYSDDPVTTCRKVYL

SEQ ID NO: 47762 - protein, 456 aa, Saccharomyces cerevisiae
MSSSQQIAKNARKAGNILKTISNEGRSDILYKIHDALKANAHAIEEANKIDLAVAKETGLADSLLKRLDLFKGDKFEVMLQGIKDVAELEDPVGKVKMARELDDGLTLYQVTAPVGVLLVIFESRPEVIANITALSIKSGNAAILKGGKESVNTFREMAKIVNDTIAQFQSETGVPVGSVQLIETRQDVSDLLDQDEYIDLVVPRGSNALVRKIKDTTKIPVLGHADGICSIYLDEDADLIKAKRISLDAKTNYPAGCNAMETLLINPKFSKWWEVLENLTLEGGVTIHATKDLKTAYFDKLNELGKLTEAIQCKTVDADEEQDFDKEFLSLDLAAKFVTSTESAIQHINTHSSRHTDAIVTENKANAEKFMKGVDSSGVYWNASTRFADGFRYGFGAEVGISTSKIHARGPVGLDGLVSYQYQIRGDGQVASDYLGAGGNKAFVHKDLDIKTVTL

SEQ ID NO: 47763 - protein, 414 aa, Prosthecochloris aestuarii DSM 271
MPKDVFFGQSDKGLSSKGKPLPDFVEKKLKACDDETFAPRRNKKPLVIGNTLPGPDAIILQSNDYLNVSKHPDIIRAQVSVLEDVGKDLVMSAVFLHEGSYKDRFEKEIAAFTGFESAVLCQSGWAANVGLMQVIGDAATPVYIDFFTHMSLWEGIKTAGSPPYAFRHNDPGHLERLVREHGPGIILVDSLYSTIGDISPLPDIVDIADRYGCVSVVDESHSLGTHGFKGAGLVNEFGLTDKVHFITGSLAKAFAGRAGIIFCSEHFARYYPYLAFPAIFSSTLLPHEIAGLHETLNVIRSSDDRRQRLRNHSSFLREGLLNLEYNIASTSQIIAIESGLEHDTELFRDALEERNVFGSVFLTPATPKNRSLMRFSLHSELTREELEYVLKVCEEIRDEVNMWGWKSTRKGQKR

SEQ ID NO: 47764 - protein, 540 aa, Frankia sp. EAN1pec
MPKIIAFDEEARRGLERGMNQLADAVKVTLGPKGRNVVLEKKWGVPTITNDGVSIAKEIELEDPYEKIGAELVKEVAKKTNDVAGDGTTTATILAQALVREGLRNVAAGANPMGLKKGIEAAVERVSEELSSVAKDVETKEQIASTASISAGDPAIGSMIAEAMDKVGKEGVITVEESNTFGLELELTEGMRFDKGYISPYFVTDTDRMEAVLDDPYILIANSKISAVKDLLPILEKVMQAGKPLAIISEDVEGEALATLVVNKIRGTFKSTAVKAPGFGDRRKAMLTDIAVLTGGQVISEDVGLKLEGTTVDLLGRARKVVITKDETTIVEGAGDADQIAGRVNQIRNEIEKSDSDYDREKLQERLAKLAGGVAVIKVGAATEVELKEKKHRIEDAVSNAKAAVEEGIVAGGGVALLQAATSAFEKLDLSGDEATGANIVRLALEAPIKQIAFNSGLEGGVVVEKVRNLPTGHGLNAATGEYVDMVATGIIDPAKVTRSALQNAASIAGLFLTTEAVIADKPEKDKAPAMPGGGGEMDF

SEQ ID NO: 47765 - protein, 255 aa, Triticum aestivum
MDTKHADSFDERDVVVDAGCVRAVLGELVLTFLFVFTGVAAAMAAGVPELQGAAMPMATLAGVALAQALAAGVLVTAGFHVSGGHLNPAVTVALLARGHITAFRAVLYVAAQLLASSLACILLRYLSGGQATPVPVHTLGAGIGPMQGLVMEVILTFSLLFVVYATIIDPRTTVPGYGPMLTGLIVGANTIAGGNFSGASMNPARSFGPALATGVWTNHWVYWVGPLVGGPLAGFVYETVFMVTKTHEPLLGWDF

SEQ ID NO: 47766 - protein, 588 aa, Glycine max
YRAPPAISYLCPPPVENIEGEYGRIVQNPTEEIKVLCVNTLEAGVFSSGFPTVSDPVEAYTYPEYLKSGWNLNNILSLSGSLLCFESSEASRNFAPKIHMGMCFSPLNWKVEEHHLYSLYYVHLGEPKVWYGIPGKFAINFETIWKKYLPDLQAGQPDMHDNMVMQLSCSILKAEGIPVYRCIQYPREFVLVFPGSYHSGFDCGFNCSEAVSFAPLEWLLQGQNVVELYCEQRRKTLLSYDKLLLGAAREAVRVQWETNLCRKSTSDSLTYKDAYKKNGFLIKALNSRIQSESLKRKFLCTSLVSQRMDENFDATCKRECSICLRDLHLSAVGCSCSDNFACLDHAKQLCSCTWSNKTLFYRYEINNLNVLCQALDGKLSAVFKWAKEDLGLTLNSVASKRSKQSSKNIIGSTHPSQDLQMNEPVSQTASDESSKGKQRQLLDILNSSKTKENEVVPNSSKKKNEVVPNSSKKQNAVVSQVVRTFGGTHSSSYDIRSKMKTTVLQSTFADDKKGINSVGAKIDTKTLGHKFTISKEVGDPKVSKVPSVTNARYLPFLQDNVLADVSSDSSSTSMSSDSEDEDVQVANG

SEQ ID NO: 47767 - protein, 290 aa, Prosthecochloris aestuarii DSM 271
MKSTTKDIFYLWEYEPGKTARIRYRRYGPDKTRKPVLLFVHGYGGMLEHWNLNIPEFQNEYTIFALDLIGFGKSEKPNTRYRLELFADQINAFIRFLELEDVIIIGHSMGGASGLYYAHQNPDVLRGLILANPSGLFGDTMDPMAKAFFGLIASPLIGEFMFAAFANPIGVSQSLMPTYYNQKKVDLKLINQFTRPLQDKGAVWSFLSPSRRPNDFTLEHLPKPCNYRNKAFLIWGAEDSALPPHKIIPEFQEILPQAGAYIIPKASHCIHHDAHEDFNNRLRHILNHEL

SEQ ID NO: 47768 - protein, 1651 aa, Magnaporthe grisea 70-15
MSNEEVYAVANGDTIAVVPPKPTGLNSPPDSNNAMKLDGSDSELSDLDDAIAADLQAARPDGSATTAPAPTASEPGPEPKIDIGEVLPAEYSGTVPVFRPTMEQFRDFKLFMEKVNPYGMKSGIIKIVPPQEWRDSLPPIDDLVKTIRVREPIKQDIMGSNGTYRQVNVLHQRSYNLPQWRQLCDQSEHQPPARRGERRANAEKPKPAPRSKPAASATSNGTTTTTRGRPRGRRGRGGRGKSVASTRRESTVESETRPMTPESPTGEEHTIAESVENEPGIKIEEDEDDAPVMPRRMGAVSGGKGKVQSTSARRKYIRREGSAMIDEAAFKDWDYRMDISDYTPERCEELERTYWKTLTYAQPLYGADLAGTLFHEDTELWNLNKLPNLLDVLGTKVPGVNTAYLYLGMWKATFAWHLEDVDLYSINYLHFGAPKQWYSISQADARRFEAAMKNIWPTEAKACDQFLRHKAFLISPSHLQQYYNIKVNKCLSYPGEFVVTYPYGYHSGYNLGYNCAEAVNFALDSWLPMGKIAKKCECAQAQDSVWVDVYEIERKMRGESTEYEETEDEDEEDEEDDDVSMAGLPTPPSSLMVRVKARGRKRKRTGADAEDRPKVKRIRLRIRSHVEPPCCLCPNSIPGAEILPTDDGRKAHRLCALYLPEPFIEVVDNQEVIANVANIAKARLELKCLYCRSKKGACFQCSQKKCPRSYHATCAAAAGVFVEEGEVPIFGEDGTEYKEQAFEFSCRFHRNKRDKKLDGPALEINTRVRDAASALKVGETCQVQYYRGEIFAGVVAENRPDEETLLLDIIPNGYDTPSSKKDRNSRLTQHSDRVEVEWKWILVPDPSEFRLPKASPNAQPMPTSKKAQAEIHATKRAGEERPRADDMFAEGFRWAEFHTCDKDEFKNAPQGKVDLSKECQVWHYLGKTSTDLRPQYTEDLARPQHNPKSSFLESISKPTPPRRLSITSTSSAEPRRSYTPIPLPKLPPGALKTEKPYVYKPRKSIYESQFSPQTFAPKNPMPPPASPSSQPPAGSDPRFKVPSAPASSTTSAAAAPTAISGNATTTTNTTQANASTAPTPSTYVSPYTSSNATAANTARPAVGAPLGPPPPKSTWAKPALPASSRRHTVSGGAPPVPRRNSLSGVQPPARPTPAAGATPRQSKVPLPPYVLQQQQKQQQPQQQPQRSQLSSVAQKYAFFQVNHNRDSSRYRTPYATWGGFTNGYEGSLQRQLMISTTRARSRSTVQHRRGNSFNLGGGLTGLTKPARHLNYSDTEDSLDPMDTFKFPMSEPSSVPNSVPQSPSSISLDFSMPSPHLTAATAPSPTFPSLPDTSLTLFEPWDSAPSATSPMFPSPQYGSMWQQPFIGPLSFMESMSHTLGPLGSMGLGPLGPMGSGSQVGSFGGSADVVFTTPAMTMNPTTPPPMSPLTQHVPSTPPGSRGSQFVSGTPSVPTSPGSSVTTSHHQTPEQQLRQQLRRISDPPQSPYSPHIPFLLYPDSVTTNEQYRFRCLNQPRSRHRSRSSLSGFNQLQGQILNLYPSLPNNNLLLFGPSPKTSTQDGRELQHGETGDRAIHLFKRAMRSEDNVDTAEDGSGLHREMDGGRDFFSTARVGHSILVTCCPFWEHYHLYNGKWEVANKSSDIKRFTTALSIDG

SEQ ID NO: 47769 - protein, 1775 aa, Rubrobacter xylanophilus DSM 9941
MRERRRPGGAQTQTPDHHRGRLPGAGLRPLPHQAGGRRPAGGVGRHLQGRARCRLGGRPVPGEGGAPLVRGAHAPPRERPLDRELPAHQEHALPVHHRGLAGRVRDLALRGGEEARGRAAGGGGAAGGARDPRAGLLALEGRAPPADARRLRRRRVRGAARAAALRGGARADARAPRPLARDRLRQDPRGGGGPGAGPLRGLVRDVPPLAGERPGQERHLPGGRGAAGRALVDGLRRGVPHAHPPHREDQPQGAQQRPRGRARRPGQPLRHRERGGRAQGRPPRARDAGGLPALRCGRPRARDGGRARPRPAVLARPPLPQGAPRVVQAAARRHHKVRREPAQKVRGHRQRGLLLRGVGGSLAGVAGGHPVLGGAGRQDLPGGQPAHQALPLLGVGDRGGAAGAPRRHLPLRGLHPAQGDARSGQARLHPVLHLLHLAQHQAGAHRVPHRAHHGLAQGVHAPQLLRQHPRHPPAHPAVRGAARLHDAAGARGHPLPQLRHLQRVRAVREHPARGAGHHRLLPGLRGLRVQGLGLGQAREHKGLHPEGERDPAREPRAAGADQPLLPPRPGRQHHLLRQEERGERRLRGGQPGPAQPPRHPRAVPAVGARHRGGGALRGRGAHHPPRDPGPRQLVLGAARPPPEPGRDLPPQEGGMTQTARRGAARREEAYREDPLWYKDAIIYQLHVKAFFDSDNDGIGDFRGLTQRLEYIKDLGVNAIWLMPFYPSPMRDDGYDISEYKNVHPEYGTRRDFRNFVRRAHALGLKVITELVINHTSDAHPWFQRARKAPRNSVWRNFYVWSDTDKKYADARIIFTDTETSNWTWDPVAQQYYWHRFFSHQPDLNHDNPRVFDAIMRVMRFWLDAGVDGLRLDAIPYLIEREGTDCENLPETHEILRRMRAELDARYQNRIFLAEANQWPEDVLPYFGKGDECHMAFHFPLMPRIYMAVAQEDRHPIVEIMQQTPEIPEVCQWAIFLRNHDELTLEMVTDRERDYMYQTYAADPRARINLGIRRRLAPLMENDRARIELLNSLLMSMPGTPIIYYGDEIGMGDNVFLGDRNAVRTPMQWTSDRNAGFSRADPHSLYLPPIMDPVYGYEALNVEAQSRSPGSLLNWMKRIIAVRKAHKAFGRGTLEFLHPGNRKVLAYLREYGDETILCVANLSRSAQPVELDLSRFSGRVPVEMIGGSSFPPIGSLPYFLTLPGHSFYWFNLTTEAEAPSWHQESPRFFEPPVVVLPAGRQTARDIRRLPLRLQHRQVAQLEQEALPAFLSVRRWFAAKGSEIERVSLLARAEFGPDRLLALLRVGAGGAEHTYFLPLAAAWEDEDGERVSGLMPHALAKIRRRYRVGVLFDALADEGFCREVVAAMAGGRELEMGEGRVRFYATGALEELLAGEPVGELAVRRASVEQSNTSVILGERLVLKAYRRLQPGVNPELEIGRYLTEVRRFPNTPPLAGAVEYEDPRSGTVSLALLQGFVPSQGDGWSYVLGYLDRYLERRLLSASWSPEEEGPAEPPGQEGQEADEGFFMELMRTLGVRTGELHAALAAPTDDPSFSPEPAPPAEVSRWVEAVLDDLRLTLSLLERRRSGLPEEVRPEVDRLLRMEARAFDRLEAISARGIRAVKTRHHGDYHLGQVLVAGNDFQIIDFEGEPARTLEERRRKHSPLRDVAGMLRSFDYAAQTALMNLGADRAVGEDPEPVVRRWERSVREAFLGGYAEGVRGAGVLPGEGEEAAALVELFALEKALYEIRYELDNRPDWIGIPVRGVLDLLTREESP

SEQ ID NO: 47770 - protein, 210 aa, Arabidopsis thaliana
MSKKKESIGRQKIPMVKIKKESHRQVTFSKRRAGLFKKASELCTLCGAEIGIIVFSPAKKPFSFGHPSVESVLDRYVSRNNMSLAQSQQLQGSPAASCELNMQLTHILSEVEEEKKKGQAMEEMRKESVRRSMINWWEKPVEEMNMVQLQEMKYALEELRKTVVTNMASFNEAKDDVFGFLDNKVTVPPYVNMPSGPSNIYNFANGNGCF

SEQ ID NO: 47771 - protein, 131 aa, Flaveria palmeri
SNGGRVQCMKVWPPVGKKKYETLSYLPELTEAQLAKEVDYLHRNKWVPCLEFELEHGFVYRENASSPGYYDGRYWTMWKLPMFGCTDSAQVMKELQECKKEYPQAWIRIIGFDNVRQVQCVSFIASKPTGF

SEQ ID NO: 47772 - protein, 165 aa, Psilotum nudum
MFSMMNGLQHYGQQALRAARYIGQSFMVTLEHMNRLPITVQYPYEKIIPSERFRGRIHFEFDKCIACEVCVRVCPINLPVVDWELIKSMRKKQLKSYSIDFGVCIFCGNCVEYCPTNCLSMTEEYELATYDRHELNYDQIALSRLPFSIVQDSTIQAHSSLGYLS

SEQ ID NO: 47773 - protein, 131 aa, Flaveria palmeri
SNGGRVQCMKVWPPVGKKKYETLSYLPELTEAQLAKEVDYLIRNKWVPCLEFELEHGFVYRENASSPGYYDGRYWTMWKLPMFGCTDSAQVMKELQECKKEYPQAWIRIIGFDNVRQVQCVSFIASKPTGF

SEQ ID NO: 47774 - protein, 412 aa, Desulfitobacterium hafniense DCB-2
MEKQRAVITGMGVVSPVGSNLETFWNSLITGQSGIDFVTRFDVGDMPTKVAGEIKDFEPTDWLDRKESRHMDRFTQLAMAAAKMAVQDSGLNLDQVNKERASCIVGTGVGGVTTLEQQKEVLMNKGPGRISPFFIPMLISNMAAGHISLEFGLQGSSLSVATACASATNAIGEAMRLIEHGYADVVLCGGTEAPIVPLAFAGFCAMKAMSTEKENPREACRPFDARRSGFVMGEGAGILVLESLEHAQKRQARIYAELSGYGSTCDAYHITSPAPGGAGAIQSMQAALTGAEVRPEEVDYINAHGTGTNANDSAETAAIKALFGEAAQKVAISSTKSMTGHLLGAAGAIEAIACALTIKNSMIPPTINYGEPDPECDLDYVPNAARPKEVQVALSNTFGFGGHNATIVLKRY

SEQ ID NO: 47775 - protein, 391 aa, Pseudomonas fluorescens Pf-5
MTRHQHILAWLNDVASDLRAIRQDIHAHPELGFEENRTAALVARSLEEWGYEVHTGVGRTGVVGVLRNGSSPRTLGLRADMDALPIIENTGVPYSSRYSGCMHACGHDGHTTLLLGAARYLAATRQFDGTLNLIFQPAEEGQGGAEAMLADGLLERFPCDALFGLHNMPGLPAGHLGFREGPMMASQDLLNVIVEGVGGHGSMPHLTVDPLVAAASMVMALQTVVARNIDAQEAAVVTVGALQAGEAANVIPQQALLRLSLRALNAPVREQMLERVKAIIRTQAESFGCSVSIEHRPAYPVLVNSPEETEFARKIGVELVGAEAVNGNTPKLMGSEDFGWMLQRCPGSYLFIGNGVAQPMVHNPGYDFNDDILLTGAAYWGALAESWLKPS

SEQ ID NO: 47776 - protein, 131 aa, SYNECHOCOCCUS SP. WH 8102
MSERIERSPEEWRQTLSPEQFQVARCGGTERAFTGAYWNKKDSGTYHCICCDAPLFSSQTKFESGTGWPSFWDGVSSEAITTKQDLSHGMVRVEINCARCDAHLGHVFPDGPAPTRQRYCVNSASLDFKAS

SEQ ID NO: 47777 - protein, 390 aa, Oryza sativa
MGSSGADAPTKTSKASAPQEQQPPASSSTATPAVYPDWANFQGYPPIPPHGFFPSPVASSPQGHPYMWGAQPMIPPYGTPPPPYVMYPPGVYAHPSMPPGAHPFTPYAMASPNGNADPTGTTTTAAAAAAGETDGKSSEGKEKSPIKRSKGSLGSLNMITGKNSTEHGKTSGASANGAISQSGESGSESSSEGSEANSQNDSHHKESGQEQDGEVRSSQNGVSRSPSQAKLNQTMAIMPMTSSGPVPAPTTNLNIGMDYWANTASSTPAIHGKATPTAAPGSMVPGEQWVQDERELRRQRRKQSNRESARRSRLRKQAECEELAQRAEVLKQENTSLRDEVNRIRKEYDELLSKNSSLKEKLEDKQHKTDEAGVDNKLQHSGDDSQKKGN

SEQ ID NO: 47778 - protein, 405 aa, Zea mays
MATSGAGDHGQGQGQGHGRFASSLTARYSDWVLETLDELPGSFLLTDPALPGHPIVYASRGLAALTGYAPRDVLGRNARLFQGAATDRATVAGVREAVRAHRPHQAAILNYRRDGAPHWVLLHLAPLFHARDGTLLHFLAVQVPIAPAAVARGATCHTTGHLLAACRDEASRVAEDFPCATHAGKVFVDMDKRGLEAEEPRVASDSEKDMAISTANSIVSALNSYSKLTGLVVSRKRCDSIGIPALSSSLKLSLGRIKQSFVLTDSRLPDMPIIYASDAFTSLTGYSREEILGCNCKVLNGPGTSLEVLEEINQHICSEQACTVDLLSYRKDGSSFCDHLHVSPIRDTSGKAFHIWVHLDMGAKHDFSGLTPEKWLLGAVGAVRVAVRGLSASGSLLRPPSQYQF

SEQ ID NO: 47779 - protein, 168 aa, Zea mays
MDNNNQQPPPPTSAAVIPPPGSTPVSPSRGASSYHELLQQQLQMFWNYQRTEIEQVNDFKNHQLPLARIKKIMKADEDVRMISAEAPILFAKACEIFILELTIRSWLHAEENKRRTLQENDIAAAITRTDIFDFLVDIVPREEEEEEEAAAPAPYYYPPMGQPAGTMI

SEQ ID NO: 47780 - protein, 74 aa, Solanum tuberosum
MRFFATFFLLAMLVVATKMGPMRIAEARHCESLSHRFKGPCTRDSNCASVCETERFSGGNCHGFRRRCFCTKPC

SEQ ID NO: 47781 - protein, 136 aa, Saccharomyces cerevisiae
MARTKQTARKSTGGKAPRKQLASKAARKSAPSTGGVKKPHRYKPGTVALREIRRFQKSTELLIRKLPFQRLVREIAQDFKTDLRFQSSAIGALQESVEAYLVSLFEDTNLAAIHAKRVTIQKKDIKLARRLRGERS

SEQ ID NO: 47782 - protein, 1020 aa, Trichoderma atroviride
MEGFYQTNQLSSEEDQQQTHAQPSVLGMSIPDAAIQPQQLQSALGNHMIASQNAMAGNHMGDAMRHHDIQRRRSMPPNAHGNPMISALQDLPPRRMSTISPGDMMGFDSRAPDFNSYQYDPEIPSNFPDVGASVGMQDQMGSYMTDTGSFASISQDIMGTMMPTQFASMDMGGMTAEPQTIDLFSGTGGQVPGLTASPITGQLNAGQFAPGDDGFATMAGDSNSASLGIRPSSGPDGMGVVRDEDMMNASLQQFAPMNAGHSHINVESGMRGFAPNMSSSLHGPLPVIATQQNASPVDMAQPSPSGGATPVRDQSKERTIYSKSGFDMLKALWLVATRKAPKIHLGAVDMSCAFVVCDVTMNDCPIIYVSDNFQNLTGYSRHEIIGQNCRFFQAPDGKVEAGSKREFVDDGAVFNLKRMIKEGREVQQSLINYRKGGKPFLNLLTMIPIPWDTDEIRYFIGFQIDLVECPDAISGQEMGGVKVNYKHNDIGQYIWTPPPSNPLESENGQTLGVDDVSTLLQQYNPSGLVSDWHKQSWDKMLLENADDVVHVISLKGLFLYLSPSCKRILEYDAADLVGNSLSSVCHPSDIVPVTRELKDATAGTHVNIVFRIRRKQSGYTWFESHGSLFVDQGRGRKCIILVGRKRPVFALSRRTLETNGGIGDSELWSKLSTSGMFLSTSTNIRSLLDLQPESLIGTSIQELMRKESRAEFGRTVEKARRGKISTCKHEMLNRRGQGLQAQTTLYPGDALEGQKPSFLLAQTKLLKASSRHIPSSLTAGSSLFVANPLHNQGSLSGQISQPAGGALPPGSQDAALASDDNIFDELRTTKCSSWQFELRQMEKINRILAEELGGLLSNKKKRKRRKGVGNVVRDCANCHTRNTPEWRRGPSGQRDLCNSCGLRWAKQTGRVSPRNSTRGGHSGNTDAQSKKSASPIPSSPLHRSETPNPIPSNGENSLDLAQLAHKTAAAAAAAAAISSASIAGQHPTSAMPPPSQSSLATGTISSGMASIREERESSQT

SEQ ID NO: 47783 - protein, 95 aa, Prosthecochloris aestuarii DSM 271
MNLKPLADRVIVKPAPAEEKTKGGLYIPDTGKEKPQYGEIVAVGTGKVAENGQVLEMQVNIGQKVLYGKYSGTEVTVEGEDYLIMRESDIFAILD

SEQ ID NO: 47784 - protein, 213 aa, Triticum aestivum
  misc_feature (158)..(158): Xaa can be any naturally occurring amino acid
  unsure (1)..(213): unsure at all Xaa locations
MERRGGAAAPSLELPGFRFHPTEEELLEFYLKHHVTRNNKQQHLKAAPFDIIPTVHLYRHDPWDLPGLAAIASEREWYFFVPRDGARKHASGVAGGGRPSRTTERGFWKATGSDRAVRCAADPKRLVGLKKTLVYYQGRAPRGTKTDWVMNEYRLPDXPAPGAGEQQDVVLCKVYRKAVSLKELEQRVAMEELARARSSPPTTGLPTPTPTSN

SEQ ID NO: 47785 - protein, 549 aa, Prosthecochloris aestuarii DSM 271
MTAKDILFDAEARAKLKVGVDKLANAVKVTLGPAGRNVLIDKKFGAPTSTKDGVTVAKEVELEDAFENMGAQMVREVSSKTSDVAGDGTTTATVLAQAIYREGLKNVAAGARPIDLKRGIDLAVKDVVAELREISRDITGKKEIAQVGTISANNDPEIGELIAEAMDKVGKDGVITVEEAKGMDTELTVVEGMQFDRGYLSPYFVTNSEKMDADLEDPYILIYDKKISNMKELLPVLEKTAQSGRPLMIIAEDIEGEALATLVVNKLRGTLKVCAVKAPGFGDRRKAMLEDIAILTGGTVISEEKGYKLENATISYLGQAASITVDKDNTTIVDGKGQADDIKARIGEIKGQIEKSTSDYDTEKLQERLAKLSGGVAVLNIGASTEVEMKEKKARVEDALHATRAAVQEGIVAGGGVALIRAAKALDATNPENEDQKTGVDIIRRALEEPLRQIVANTGTTDGAVVVEKVKNSEGDYGFNARTEEYMNLIEAGVVDPTKVTRTALENAASVAGILLTTEAAITDIKEDGSDMPPMPGGMGGMGGMGGMM

SEQ ID NO: 47786 - protein, 178 aa, Glycine max
  misc_feature (93)..(93): Xaa can be any naturally occurring amino acid
  misc_feature (175)..(175): Xaa can be any naturally occurring amino acid
  unsure (1)..(178): unsure at all Xaa locations
MAKTGYKLQEFAAHSGNVNCLKLGRKANRLFITGGDDHSVNLWMIGKPTSLMSLCGHTSSVESVTFDSAEVLILSGASSGVIKLWDLEEAKIXVVRTLTGHRLNCTAVEFHPFGEFFASGSLDTNLNIWDIRKKGCIQTYKGHSQGISTIKFSPDGRWVVSGGFDNVVKVWDLTXGKL

SEQ ID NO: 47787 - protein, 154 aa, Bacteroides fragilis NCTC 9343
MMEKTLVILKPCTLQRGLVGEITRRFERKGLRLAGMKMVQLTDEVLSEHYSHLSSKPFFQRVKDSMMTAPVIVCCFEGVDAIQAVRALAGPTNGRLAAPGTIRGDYSMSFQENIVHTSDSPETAAVELNRFFKPEEIFDYKQATFDYLYANDEY

SEQ ID NO: 47788 - protein, 267 aa, Prosthecochloris aestuarii DSM 271
MAHNRITPLMNEQKKLLIAYYMPEYPVAGATLPVLEALQNSGADIIELGMPYSDPIGDGPVIQDAAQVAIRNGVHIGSLLDLVRKARAGEGCVKITVPIVLMGYCNPLIAYGGDCFLNDASEAGVDGLLIPDLPPEEAEDFLSRAKSFGLSVVFLISPVTQPERIRQIDALSTDFSYCLAVNATTGTGKLDEAERDADIESYLQRVSEHTRKKFVVGFGIRNRARVEKMCALADGAVVGTALLQAIAGAATPSQAASMAAGFWKTLR

SEQ ID NO: 47789 - protein, 348 aa, Prosthecochloris aestuarii DSM 271
MAQHPIVCVTGATGFIAAHLIKKLLQQGYAVRGTVRKLSKHSSYRFLENLDGAAERLELIEADLLSPGSFDAAIGGTQYVMHTASPYLINVRDPQKNLVEPALEGTRSVLESCRKASSVKRVVLTSSIAAITGAPDSNRVFTENDWNTTSSLKENPYHYSKTLAERAAWEFMQEQPGFDLVVINPFMVIGPSLGASLNTTNQMIRDIITGVYPGILDVNWGFVDVRDVALAHIRAIEKPAAHGRYLCSAEALDMRNVVAILRKAGYGNDYKLPSLDLSGKAATTLMKLVSWSQPRDTGAYLRTHLGRRMRYDNDKIRKELDIQFRNIESSLLETVEDLISWGHLKKKS

SEQ ID NO: 47790 - protein, 428 aa, Streptomyces resistomycificus
MREVVVTGLGVISPAGIGKEAFWDTVSAGKSVTKSLSDITSSSLFKSFEFASDAIAEVPGFEEQIPSLPPEVQRLDRYVQFAVAAALQAVRDAGLQDGGHDAERTGISLSTAICGTPRMEEEFLAVTDEGRRPIDPAKAGRDLYLAAMSNTPGTVLSALLGAQGPCVTLSTGCIGGIDAVGHAYESIAHGDADVMIAGASEAPITPVTVASFEIINCLSRAHRGHPEAASRPYDADRDGFVLGEGCGIVVLEEKEHALRRGATPYLQISGFSHTSNAIHMTDLLSDGEDLTRAMSQAIEVSGVAPGAIDHVSSHGSSTRQNDTCETSALKLALGERAREIPVNSAKSMLGHALAAASAMEIVLCALAGRHSFVHPTANYETPDPTCDLDYVPGTGRPWDGEVILKDASGFAGLHAAMVARTVRDGGRS

SEQ ID NO: 47791 - protein, 412 aa, Streptomyces resistomycificus
MSIVITGIGAVTPAGDGVEPLWNSAREGTSHLATIDRFDAGDYACPVAGQADFDADAELPSRFVKRTDRFTHLAVHTVRRALADAGVAVGTDVSPERTGVMVGNILGGWEFAERELRKLWTDGPRAVSPYQATAWFPAAPQGNICIDQGIKGPARTFVADRASGAYALIGAAETLLRGRADVVLAGGVEAPLSPYGWLCLETSGLVAKARGSLAPHELYRPFDAGHGGSVFAEGSVFLVMERREHAERRGARVLGELAGWGVSTDGYMPYYTVEPTGRVLGRAMRTATERAGISDGDLGAVFAHGSGIPFEDVTEGYGLWEAFGPGAARVPVTAPKSGFGHLLGAAAPADVALALRAMAAGSVPPTVNLDRQAPGIELDIVRGAARPAPEWEHTLVVSRGLGGVNACLLLRR

SEQ ID NO: 47792 - protein, 168 aa, Bradyrhizobium japonicum USDA 110
MRAVMGININATARSLLLSEFVSAFFLAMRYFFQPKPTLNYPFEKGPISPRFRGEHALRRYPNGEERCIACKLCEAVCPAQAITIEAGPRRNDGTRRTVRYDIDMVKCIYCGLCQEACPVDAIVEGPNFEFATETREELFYDKAKLLANGDRWEREIAKAIELDAPYR

SEQ ID NO: 47793 - protein, 441 aa, Escherichia coli K12
MTGKVMESLNQFVNSLAPKLSHWRRDFHHYAESGWVEFRTATLVAEELHQLGYSLALGREVVNESSRMGLPDEFTLQREFERARQQGALAQWIAAFEGGFTGIVATLDTGRPGPVMAFRVDMDALDLSEEQDVSHRPYRDGFASCNAGMMHACGHDGHTAIGLGLAHTLKQFESGLHGVIKLIFQPAEEGTRGARAMVDAGVVDDVDYFTAVHIGTGVPAGTVVCGSDNFMATTKFDAHFTGTAAHAGAKPEDGHNALLAAAQATLALHAIAPHSEGASRVNVGVMQAGSGRNVVPASALLKVETRGASDVINQYVFDRAQQAIQGAATMYGVGVETRLMGAATASSPSPQWVAWLQSQAAQVAGVNQAIERVEAPAGSEDATLMMARVQQHQGQASYVVFGTQLAAGHHNEKFDFDEQVLAIAVETLARTALNFPWTRGI

SEQ ID NO: 47794 - protein, 145 aa, Triticum aestivum
MVFGNTGSWAAQLITEAGGKVVSIRDVTGTVKNSNGIDIAKLMKHLAENRGIKGFDGGDAVDPTSLLTEECDVLIPAALGGVINKDNADAIKAKYIIEAVNHPTDPEANKILAKKGVLILSDIMANSGGVMVSCFEWAVGRPRGT

SEQ ID NO: 47795 - protein, 309 aa, Corynebacterium efficiens YS-314
MTDIPGSPGSIVVVGSINADLTTTVHRHPHPGETLLGGGGEISAGGKGANQAVAAAQLGAEVHMVGAVGSDTMADSALVHMRASGADMSAVHTVDGPTGLAVITVADDGENTIIVVPGANASVDADYVDRHARLIEQAGIVLLQGEIPADGFNRAVDLAQGRVVINLAPVVPVGHEQLRQADPLLVNEHEGALVLEMLGAPTTETDPSTLVAVLLGQGFPTVVMTLGADGALVGDAEGLTAIPTPTVEAVDTTGSGDAFAGALVAKLADGHSLVEAARFAARVGAFAATRRGAQASYPTLVDDLPTVTA

SEQ ID NO: 47796 - protein, 260 aa, Arabidopsis thaliana
MASTEPERENREDETEVNEDEDTGAQVAPIVRLEEVAVTTGEEDEDAVLDLYVTRSVNILVSLPLVKMYRFDKEGNQWKERGAGTVKLLKHKETGKVRLVMRQSKTLKICANHLISSGMSVQEHSGNEKSCLWHATDFSDGELKDELFCIRFASIERKMVWKILEWLTDSVASTDCKTFMEKFTEIAESQQVGKESTQGDEAAGLIENLSVEENISEEKAKEAEEKEPAKEDKETKKEKVTQSVIDMFGVAAKGTIMWCF

SEQ ID NO: 47797 - protein, 596 aa, Triticum aestivum
MGTSSGANFHQQPPPQGMLPPRHGARAPSLQTSLSLASSEQVGSPEMQEPVSNSDQGHDSATESASSRETWPVEPEHSNAAAASSGGAVKKVEMEKDIRNGIPKLQVIRGSSRIDRVSLREIARERVDLVVEKMKVMPEEHLEEIKNELRSILEGTGGSHHIEEFLYLQKFVQGRGDLTPTMLSMAHHVQLEILVAIKTGIQAFLHPSVTIPQSHLVEVFLYKRCRNIACQSALPAEECRCNVCANRNGFCNLCMCVICNKFDFEVNTCRWVGCDFCSHWTHTDCAIRVGQIGTGQSIKSGTGHAEMLFRCQACQKTSELFGWVKDVFQQCAPGWDRDALVRELEFVCKIFRLSEDPKGRNLFRKCANLIERLRNSSPDSVNPRMILHALRELEMDSPKSSENEESGRLITPQEACNRIAEVVQEAVRKMELVAEEKMGLYKKARTAVEACDRELDEKARQVQEFKAERLRKKQQVEELESIVRLKQAEAEMFQLKASEARQEAERLQSIALAKSERAEQDYASLYLKRRLEEAEAEKQFLFEKIKLQDGHRPPQASSSVPADSSQAPSQALMLSKIQDLLKNVRTMPTKSEAHSK

SEQ ID NO: 47798 - protein, 446 aa, Corynebacterium efficiens YS-314
MFMGAGKTISLAGPSVILVYAIIGFMLFFVMRAMGELLLSNLNYKSLRDAVSDILGPGAGFVTGWTYWFCWIVTGMADLVAITGYVQYWWSGVPLWLPGAGAILLLFVLNLAAVRLFGEMEFWFAIIKILAIVALIFTGLVMVVSHFESPDGSVAQFSNLVDHGGFFPNGITGFLAGFQIAIFAFVGIELAGTAAAETEDPVRTLPRAINSIPVRIVVFYVLSLAVIMMVIPWDRVHTDSSPFVQMFALAGLPAAAGIINFVVLTSAASSANSGIFSTSRMLFGLSLEGAAPRRWAKLSANQVPARGLLFSIVCLIPGVAVMYAGSSIIEAFTLITTVSSVLFMVVWAYILVAYIVYRRRNPQLHAASVFKMPGGVAMAVVVLVFFVGMVGVLTLENDTRSALLATPVWFLILGAGWWFSGGARGAASRSQLTGPTTPVTPATTAS

SEQ ID NO: 47799 - protein, 101 aa, Phaseolus vulgaris
MASSMISSPAVTTVNRAGAGAGMVAPFTGLKSLGGFPSRKMNNDITSVANNGGRVQCIQVWPTVGKKKFETLSYLPPLTKQQLAKEVDYLLRKGWVPCLEF

SEQ ID NO: 47800 - protein, 222 aa, Streptococcus pneumoniae TIGR4
MKKFVAELIGTFMFVFVGTGAVVFGNGLDGLGHLGIAFAFGLAIVVAAYSIGTVSGAHLNPAVSIAMFVNKRLSSSELVNYILGQVVGAFIASGAVFFLLANSGMSTASLGENALANGVTVFGGFLFEVIATFLFVLVIMTVTSESKGNGAIAGLVIGLSLMAMILVGLKITGLSVNPARSLAPAVLVGGAALQQVWIFILAPIAGGVLAALVAKNFLGTEE

SEQ ID NO: 47801 - protein, 376 aa, Bacillus cereus E33L
MAVSKFVQIRRDLHKIPEIGFKEWKTQQYILDYIGTLSNEHVEVKVWRTGVIVKVKGKNPEKVIGYRADIDGLPITEETGYEFASVHEGMMHACGHDLHTTIGLGLLTAAVTERIDDDLVFLFQPAEEGPGGALPMLESEELKEWKPNIILGLHIAPEYPVGTIATKEGLLFANTSELYVDLKGKGGHAAYPHTANDMIVAASHLVTQLQSVISRNVNPLDSAVITIGKITGGTVQNIIAEKSRLEGTIRTLSVESMSRVKSRIEAIVAGIEASFQCEAVIDYGAMYHQVYNHEALTREFMQFVSEQTDMKVITCTEAMTGEDFGYMLQEIPGFMFWLGVNSEYGLHHAKLKPDEEAIEKAIVFLDQYVKWKGTRK

SEQ ID NO: 47802 - protein, 279 aa, Conotrema sp. 2-MW-2004
SIEHGAVNVVAVNDPFIEAEYAAYMLKYDSTHGQFKGEIKVDGNDLVVNGQKVKFYQKKDPADIPWSETDAYYVVESTGVFTTTEKAKAHLKGGAKKVVISAPSADAPMFVMGVNEKEYKSDIEVISNASCTTNCLAPLAKVLHDNFTIIEGLMTTIHSYTATQKTVDGPSAKDWRGGRTAAQNIIPSSTGAAKAVGKVIPSLNGKITGMAMRVPTANVSVVDLTCRLEKSVSYDQIKETIKKASEGELKGILAYTEDDIVSTDLNGDNHSSIFDAKAG

SEQ ID NO: 47803 - protein, 456 aa, Salmonella enterica subsp. enterica serovar Paratyphi A str.
MDSQQHSEQLKRGLKNRHIQLIALGGAIGTGLFLGSASVIQSAGPGIILGYAIAGFIAFLIMRQLGEMVVEEPVAGSFSHFAYKYWGGFAGFASGWNYWVLYVLVAMAELTAVGKYIQFWYPEIPTWASAAAFFVIINAINLTNVKVFGEMEFWFAIIKVIAVIAMILFGAWLLFSDTAGPQATVRNLWEQGGFLPHGWTGLVMMMAIIMFSFGGLELVGITAAEADNPEQSIPKATNQVIYRILIFYIGSLAVLLSLLPWTRVTADTSPFVLIFHELGDTFVANALNIVVLTAALSVYNSCVYCNSRMLFGLAQQGNAPKALLNVDKRGVPVSSILVSAVVTALCVLLNYLAPESAFGLLMALVVSALVINWAMISLAHMMFRRAKQQQGVKTRFPALFYPFGNVLCLLFMAAVLIIMLMTPGMAISVWLIPVWLLILGVGYLCKEKTAKTVKAH

SEQ ID NO: 47804 - protein, 774 aa, Neurospora crassa
MRFADLLVDLAAVANASRSVAGKHVALRASQIDRYTKTSSIASLAKDLGRSKQQHQQQQQHYQQQKPESQQQEQRQQDVAQSQSQQPVQGARVEEVIQVKEEVPVEQPSASVAAQPKIPPSTLVSEARVSAATPESQKSTSKPFTPAPWADRKPLPQPSPFPKPPRIGVKSIIPGIPADLAALKGGANSEEAGVDLSSIFMTNKGSKILEELSKEPTVPAVEITPEPVPAVVPELKTTEVEVKAEEEVQVTQPLVEQESVQTVVEEARQPKPEEKPIPVAEAPASTPAPPPAAVKPTPQETKATKLSQEDADLVAELTGSPLPASTRHELRESKVPASRISRLWNYGGLAAGMMAGAIGEGFSRAIGGGSSGSVMLSPGNVERLVSRLSRMRGAALKLGQMMSIQDSKMLPPTIQEVFQRVQDRADYMPAWQRDRVLVSNLGADWRSLFDEFEEKPIAAASIGQVHRATLKSNGARVAVKIQFPGVADSINSDLDNLAILLAATKLLPKGLYLNKTIDNARTELAWECDYLREAECGARYRELLAADGQEDAVFAVPHIYAEASGKQVLTMEWMDGVGVTRVKDFSQEQKDWIGTQILRLCLREITEFKFMQTDPNWTNFLYNPEKQRLELLDFGASREYPEEFISLYIRLLEAASRGDRPAVKSLSEELGYLTGHESRAMLEAHITSVVTLAEPFLQSAPEVYDFRDQTITERVKAQIPVMIHERLAPPPEETYSLHRKLSGAFLLCARLGSRVRCREMFEKALEKTEYFGKK

SEQ ID NO: 47805 - protein, 863 aa, Rhodopseudomonas palustris CGA009
MLPPTRPNLKRSLVALRVTTIVLIATIVGTNLIFLGNLRESTLQTAETNLERYTLTLAEEADRSLKSMDLLLSSVRDYVSRAGVTDSESYRRLMSQQSVYSLLSEKITGMPQVDAVTMIDETGKLINFSRYWPIPDVNISDRDYFRALSSDSTLSTFVSAPTRNRGSGTWNIYLAQRLNDTRGGFIGLLLGAISVQYFENFFAATSPGAGTEIALLRSDGTLLVNYPHSDKLGTVVTDAGRLALAAGSRQREAGNSNKQIRVTRMLPNYPIVVRVTQPEDSALQNWQDMAVLMIAMSVISALVIITGSVAIARWWGKQHLYAEAAEAASAAKSSFVAMMSHEIRTPMNAVIGLATNLLETRLDAEQRQAVTSIHDAGDNLLQILDDILDFSKLEAGRLSLEPIPFAPRNIVDNTLSVIGPRAIAKGLVIRLEARGDIPEALTGDAGRIRQVLLNLISNAVKFTTAGEIVITTECISRDTTNARMRWIVTDTGIGIAADKIDSLFKDFVQADSSISRRFGGSGLGLAISKRLIEQMGGKIGVSSAPGRGSEFHFSLTLPIADHAAPPEQDDQDVYAQFRARIEAAGRPLRILVVDDNPTNRAIATQMLGEFRVQTNTACDGTEAVTAATRFGYDVVLMDVRMPEMDGLDATRAIRSHGGALANVPIIAFTANAFAEDAAACRAAGMNDHVAKPVRKKALIEAILRALPPLPAAESPRIVPVPAPLAPPPADNSDQTEVPSDVAGAGQIYVGRKAFGHLVEEIGEDATLAVLSVFARDTEARIALFDTLDIANERRRIEREAHSLKSAAATFGLDTLSGLARELEHAAPHLTQAEYVAMTRQIKAAFSAARRVPADDNQLVELAG

SEQ ID NO: 47806 - protein, 222 aa, Glycine max
MGRGKIEIKRIENTTNRQVTFCKRRNGLLKKAYELSVLCDAEVSLIVFSSRGRLYEYSNNNIRSTIERYKKACSDHSSASTTTEINAQYYQQESAKLRQQIQMLQNSNRHLMGDALSTLTVKELKQLENRLERGITRIRSKKHEMLLAEIEYFQKREIELENENLCLRTKITDVERIQQVNMVSGPELNVIQALASRNFFNPNMLEGGTVYPHSDKKILHLG

SEQ ID NO: 47807 - protein, 257 aa, Stictis sp. 2-MW-2004
AYMLKYDSTHGQFKGEIKVDGNDLVVNGQKVKFYQKKDPADIPWSETDAYYVVESTGVFTTTEKAKAHLKGGAKKVVISAPSADAPMFVMGVNEKEYKSDIEVISNASCTTNCLAPLAKVLHDNFTIIEGLMTTIHSYTATQKTVDGPSAKDWRGGRTAAQNIIPSSTGAAKAVGKVIPSLNGKITGMAMRVPTANVSVVDLTCRLEKSVSYDQIKETIKKASEGELKGILAYTEDDIVSTDLNGDNHSSIFDAKAG

SEQ ID NO: 47808 - protein, 474 aa, Salmonella enterica subsp. enterica serovar Paratyphi A str.
MSTEIKTQVVVLGAGPAGYSAAFRCADLGLETVIVERYNSLGGVCLNVGCIPSKALLHVAKVIEEAKALAEHGIVFGEPKTDIDKIRTWKEKVITQLTGGLAGMAKGRKVKVVNGLGKFTGANTLEVEGENGKTVINFDNAIIAAGSRPIQLPFIPHEDPRVWDSTDALELKEVPKRMLVMGGGIIGLEMGTVYHALGSEIDVVEMFDQVIPAADKDIVKVFTKRISKKFNLMLETKVTAVEAKEDGIYVSMEGKKAPAEAQRYDAVLVAIGRVPNGKNLDAGKAGVEVDDRGFIRVDKQLRTNVPHIFAIGDIVGQPMLAHKGVHEGHVAAEVIAGKKHYFDPKVIPSIAYTEPEVAWVGLTEKEAKEKGISYETATFPWAASGRAIASDCADGMTKLIFDKESHRVIGGAIVGTNGGELLGEIGLAIEMGCDTEDIALTIHAHPTLHESVGLAAEVFEGSITDLPNPKAKKK

SEQ ID NO: 47809 - protein, 308 aa, Glycine max
SVFLLCELCLWYQIDENVQREIINHRSLRHPNIIRFKEVLLTPTHLAIVLEYASGGELFERICTAGRFSEDEARYFFQQLISGVSYCHSMEICHRDLKLENTLLDGNPSPRLKICDFGYSKSALLHSQPKSTVGTPAYIAPEVLSRKEYDGKISDVWSCGVTLYVMLVGAYPFEDPEDPRNFRKTIGRIIGVQYSIPDYVRVSSDCRNLLSRIFVADPAKRITIPEIKQYPWFLKNMPKEIIEAERKGFEETTKDQPSQKVEEIMRIIQEARIPGQGSKAGEVGQVGTGSLDIEDDEEIDVSGDYEQV

SEQ ID NO: 47810 - protein, 321 aa, Nicotiana tabacum
MSTASINSCLTISPAQASLKKPTRPVAFARLSNSSSSTSVPSLIRNEPVFAAPTPIINPILREEMAKESYEQAIAALEKLLSEKGELGPIAAARVDQITAELQSSDGSKPFDPVEHMKAGFIHFKTEKYEKNPALYGELSKGQSPKFMVFACSDSRVCPSHVLNFQPGEAFVVRNIANMVPAYDKTRYSGVGAAIEYAVLHLKVENIVVIGHSACGGIKGLMSLPADGSESTAFIEDWVKIGLPAKAKVQGEHVDKCFADQCTACEKEAVNVSLGNLLTYPFVREGLVKKTLALKGGHYDFVNGGFELWGLEFGLSPSLSV

SEQ ID NO: 47811 - protein, 463 aa, Bartonella henselae str. Houston-1
MRYSFVGWFFWAIMAQISFHCAYAEIPQTQKEITLSFAPLVKKTIPSVVNIYAARQIRARSPFEGDPFFEQFFSRFQNNLPVRKQSSLGSGVIVDKRGLVVTNYHVIKDANEIKVALSDGREFESKVMLKDEATDIAVLEIDAKEAQFPVLPLGDSDAVKVGDLVLAIGNPFGVGQTVTSGIVSAQARTRVGISDFDFFIQTDAAINPGNSGGALIDMKGQLIGINTAIYSRSGGSVGIGFAIPANLVKVMLDTVRRGGKYFVPPYIGASFQNVTPDIAGGLGLERPYGALVIEVIKDSPAKKAGLRVGDVILSVQGIRVDSPDSLGYRLMTAGIGDSLVLEYLRSGKTFQTKITISSIPDAFSKSEKIIDEGPLSGAEVLDLTPQNSRRFHLSTSAKGVVISNLDEMSNAAGIFRTGDILRVINGHKIQTVSQLKKILMQDRPRVWQLEYERDGMYIRQFIR

SEQ ID NO: 47812 - protein, 581 aa, Bradyrhizobium japonicum USDA 110
MAQQIEVKVPDIGDFKDVAVIEVMVKPGETVAVDTSLIMVESDKASMEIPSSHAGIVKEVKVRVGDKVSEGSIILVLETAGAAAAPPPAPASKPAATSSAAAPVPASHSGKADIECEMLVLGAGPGGYSAAFRAADLGMKTVLVERYDTLGGVCLNVGCIPSKALLHTASVVDEVKHLPDHGISFGAPQIDLDKLRGFKDGVIKKLTGGLAGMAKARKVEVVTGVGAFLDPHHLEVVTAGGKKTIKFAKAIIAAGSQAVKLPFLPEDPRIVDSTGALLLKSIPKRMLVIGGGIIGLEMATVYSALGARIDVVEMLDGLMQGADRDLVKVWEKMNAKRFDKAMLKTKTVGAKATEAGIEVSFEGEQAPSGSQVYDLVLVAVGRSPNGKKIGAEKAGVAVTDRGFIDVDKQMRTNVAHIFAIGDIVGQPMLAHKAVHEGHVAAEVAHGEKSYFDARQIPSVAYTDPEVAWAGKTEDECKAEGIKFGKSVFPWAASGRAIANGRDEGFTKLLFDTATHRVIGGGIVGTHAGDLISEVCLAIEMGCEPADIGKTIHPHPTLGESIGMAAEVFEGHCTDLPPQKKK

SEQ ID NO: 47813 - protein, 407 aa, Streptococcus pyogenes MGAS8232
MPSMKHILKSLSVLLIGFLGGLIAIITFNNLYPHSPSKINSGKATTSNMVFNNTTNTTKAVKAVQNAVVSVINYQDNPSSSLSNPYTKLFGEGRSKENKDAELSIFSEGSGVIYRKDGNSAYVVTNNHVIDGAKRIEILMADGSKVVGELVGADTYSDLAVVKISSDKIKTVAEFADSTKLNVGEVAIAIGSPLGTQYANSVTQGIVSSLSRTVTLKNENGETVSTNAIQTDAAINPGNSGGPLINIEGQVIGINSSKISSTPTGSNGNSGAVEGIGFAIPSTDVIKIIKQLETNGEVIRPALGISMVNLNDLSTNALSQINIPTSVTGGIVVAEVKEGMPASGKLAQYDVITEIDGKIVNSISDLQSSLYGHDINDTIKVTFYRGTTKKKADIKLTKTTQDLTKTQ

SEQ ID NO: 47814 - protein, 402 aa, Pseudomonas putida KT2440
MPHCQAAGPCSFQDSFMFKALRYFGWPLLTGILIAMLIIQRFPQWVGLPSQDVNLQQAPQTTRIMQGPVSYADAVTLAAPAVANLYTTKVVNKSAHPLFEDPQFRRFFGDNLPKQRRWESSLGSAVIMSPEGYLLTNNHVTSGADQIVVALKDGRETLARVIGSDPETDLAVLKIDLKNLPAITIGRSDTIHIGDVSLAIGNPFGVGQTVTMGIISATGRNQLGLNNYEDFIQTDAAINPGNSGGALVDANGNLIGINTAIFSKSGGSQGIGFAIPVKLALEVMKSIVEHGQVIRGWLGIEVQPLSQELAESFGMKDRPGIVVAGIFREGPAAKAGLHLGDVILSINGEPAGDGRKSMNQVARIKPNEKITIEVMRNGQQLKLIAEVGLRPPPAPAASQEEK

SEQ ID NO: 47815 - protein, 385 aa, Geobacter metallireducens GS-15
MPAKTALIYSNDFSRFSYGDDHPFKIQRIILARELMGMLGLTELPGACIHDCPRADEASLLTFHSPDYLQRLREFSDSDEPRADFRYGLGDLDNPVFKGFYDWAILGVGGTMEAARLVTEEGYDIAFTMAGGWHHAHRSKASGFSYLNDAVIAINTLVAKGLRVAYLDIDAHHGDGVQEAFYDTDQVLTVSIHESGIYFFPGTGFEDEIGRGQGRGYSVNVPLVAHTDDALFMKAFDEVAYPLIAAYNPDVLVTQLGVDTFRTDPLTRLEITTHSYTYILRKLKALKIPWVAVGGGGYNMINVARGWTLAWGIMNGVELPPKLPAQFVDMIAPMGHPNRMLLDAMHWAEEDDRNRALDAVERSIAAIRETVFPVIIGNYAAAAGE

SEQ ID NO: 47816 - protein, 589 aa, Lactobacillus delbrueckii subsp. lactis
MKKTKIVSTLGPASNDIETITKLAEAGANVFRFNFSHGDHEEHLARMNMVREVEKKTGKLLGIALDTKGAEIRTTDQEGGKFTINTGDEIRVSMDATKAGNKDMIHVTYPGLFDDTHVGGTVLIDDGAVGLTIKAKDEEKRELICEAQNTGVIGSKKGVNAPGVEIRLPGITEKDTDDIRFGLKHGINFIFASFVRKAQDVLDIRALCEEANAPYVKIFPKIESQEGIDNIDEILQVSDGLMVARGDMGVEIPFINVPFVQKTLIKKCNALGKPVITATQMLDSMQENPRPTRAEVTDVANAVLDGTDATMLSGESANGLYPVESVQAMHDINVRTEKEMDTRNTLALQRFEEYKGSNVTEAIGESVVRTAQELGVKTIITATSSGYTARMISKYRPDATIVALTFDEKIQHSLGIVWGVEPVLAKQPSNTDEMFEEAARVAKEHGFVKDGDLVIIVAGVPFGQSGTTNLMKLQIIGNQLAQGLGVGTGSVIGKAVVANSAEEANNKVHEGDILVAKTTDKDYMPAIKKASGMIVEASGLTSHAAVVGVSLGIPVVVGAADATSKIADGSTLTVDARRGAIYQGEVSNL

SEQ ID NO: 47817 - protein, 339 aa, Arabidopsis thaliana
MATATSHQSVVSFASLRSSPSSTISQCGFKIDSSLSFTSKKTNFCKIKAMASSVSYDNTLLSPSKTIPDNSQKKSNEAALILIRHGESLWNEKNLFTGCVDVPLTEKGVEEAIEAGKRISNIPVDVIFTSSLIRAQMTAMLAMIQHRRKKVPIILHDESEQAKTWSQVFSDETKNQSIPVIPAWQLNERMYKYIWYGELQGLNKQETAERYGKEQVHEWRRSYDIPPPKGESLEMCAERAVAYFQDNIEPKLAAGKNVMIAAHGNSLRSIIMYLDKLTCQEVISLELSTGIPLLYIFKEGKFMKRGSPVGPTEAGVYAYTKRLAQYRQKLEDDSEVLCA

SEQ ID NO: 47818 - protein, 670 aa, Cryptococcus neoformans var. grubii
MTTMSNDIPNSPTSTSFTGTFSPAATAANTAANARTSDAPSPTTSSSGPKLETSKEQRLIVVSNRLPVTISKDDNGEYHFKMSSGGLVSALSGCKKTMSFTWIGWPGKDIPMQDRETVNRRLLDEYNCYPVYLSDELADSHYNGSFSNSILWPLFHYHPGEMNFDAAHWLAYREANMRFADVVSSLVQAGDMVWVQDYHLMLLPMLLRSMITGESAQGEMVRQELGRVKEGVDDTVVKEVLKMGPGVAQAEDEGVEMLDDVEEEGGEMDVKSSPKRPHYARGMSTFQKQELVAKEKGKEGIRIGFFLHTPFPSSEIYRILPVRREILLGVLQCDLIGFHTYDYARHFLSSCTRILGLETQPNGIEFDGRYCQVGTFPIGIDPNQFIEGLQKESIVKRLRSLEARFEGVKVIIGVDRLDYIKGIPQKLQALETFLTQHPEWIGKVVLVQLAIPSRQDVEEYQDLRACVNELVGRINGRFGTVESVPIHYMHKSVPFEELTAMYALADACLVTSTRDGMNLVAYEYISSQAERHGSMILSEFAGAAQSFNGSLLINPWDVQSTADAINQALTLSPQQRKTNWQKLFNYVSKYTAEAWGVSFVNELNRLSGQRPSGPTGLAGRRKSGSLSRTSSKASIQRRKSSQSGIVTGLGAAAGAAVNWAQAQVQGGSQT

SEQ ID NO: 47819 - protein, 157 aa, Brassica napus
MATEDVNEALAAAEVPATESTEKQPAHKLERKWSFWFDNQSKPKQGAAWGASLRKAYTFDTVQDFWGLHETIFIPSKLTPNAEIHMFKAGVEPKWEDPECANGGKWTFVVTSNRKPALDKAWLETMGIGKKWKEILDVTDKITFTNHDDSRRTRFTV

SEQ ID NO: 47820 - protein, 443 aa, Enterococcus faecalis V583
MSEKKQNNLHLTVGPEDSVSFGQATMLGIQHVLAMDVYVVPVIIASIIGISTAQTSSLIQATFIAAGLATIIQSHFCMRLPVAQGPSFIPIGAIAGIYFANNQQGNGWGAVLGASLVGAIVVIILGFTGIFNRLITKFVPPIVGGTIIFVVGLSLMPVALSDNIYHAKGELGQNILLAFIAAGTLIFFALLGSALKKGRIFRVSSVILALLFGSIAAQLLGVLDLSAVSKAAWFSLPQLPLVNFSFQFDWSAIATMLVIYLVLMAETTGTWFAVSHVVAEPLTEEKINRGVIGEGLGCLVSSFIGGTPVTSYSTNAGIISITGVASRKVFVAAGAWFVLFGLSGKLSTLISAIPAPVIGGVFVVVCGIISVSGMKVMSDVTIHEKEMYVIAVPIIMTLALTLLPKEFLETLPQFLQYLFSSPVATASIVAILLQAILPNVQEG

SEQ ID NO: 47821 - protein, 108 aa, Glycine max
MLMEVAVELEDDLFFADLSKQISQLIMDEDEDPLPTCPPDSLQSGFLYEQALIRQSKGTGVFIPQSTQPRRKHRKGRSSSNAKYQKQTQDTKTVSQVPITSSFKPKNG

SEQ ID NO: 47822 - protein, 167 aa, Zea mays
  misc_feature (50)..(50): Xaa can be any naturally occurring amino acid
  misc_feature (63)..(63): Xaa can be any naturally occurring amino acid
  misc_feature (80)..(80): Xaa can be any naturally occurring amino acid
  misc_feature (86)..(86): Xaa can be any naturally occurring amino acid
  misc_feature (98)..(98): Xaa can be any naturally occurring amino acid
  misc_feature (100)..(100): Xaa can be any naturally occurring amino acid
  misc_feature (103)..(103): Xaa can be any naturally occurring amino acid
  misc_feature (140)..(140): Xaa can be any naturally occurring amino acid
  misc_feature (148)..(148): Xaa can be any naturally occurring amino acid
  unsure (1)..(167): unsure at all Xaa locations
ITMDPTKFRPSSSHDTTVTTTNAGAPVWNDNEALTGGPRGPILLEDYHLXEKVAHFARERIPXERVVHARGASAKAFFEXTHDVTXSLTCADFLRAPXVXTPXVIVRSSTVSPERGSPEEIPDPGGFPVEFYPRGGNWDXLLGNNFPXVFFIPRGIRFPDVIPVVKA

SEQ ID NO: 47823 - protein, 396 aa, Bradyrhizobium japonicum USDA 110
MTITQRDRDLGTAYAMKPAQTRTELTSVVRGTPMGELLRRYWHPVGLIGDATDTPKKVRALGEDLVLFRDKHGRAGLLHARCCHRGTTLYYGKVEEDGIRCCYHGWKFDTEGHCLEQPCEPDGGQFKDKVRQPWYPVEERYGLIFAYMGPAEKRPVLPRYECLENMDDGEFVEADDSSIGGGGPAVIPCNWLQHFENVVDPYHVPVLHGSFSGPQFTDMMASMPEVKFDKTPRGIAVRSIRRQDDGKVFYRVTEAALPTLRVVPNPRVAQFARVESIGWTLPIDDTSFRIYVAGRVRTSGDIGRMRSKFNGKFWWDMTEAEHQQFPGDYEAQVGQGPLTVHSEEHFGQSDRGILMIRRMLSEQLEAMEADRDPIGVSFDVGAAPVEFEAGNYIRDA

SEQ ID NO: 47824 - protein, 516 aa, Escherichia coli K12
MFMATYMTFSLKQSGRAMSKHDTDTSDQHAAKRRWLNAHEEGYHKAMGNRQVQMIAIGGAIGTGLFLGAGARLQMAGPALALVYLICGLFSFFILRALGELVLHRPSSGSFVSYAREFLGEKAAYVAGWMYFINWAMTGIVDITAVALYMHYWGAFGGVPQWVFALAALTIVGTMNMIGVKWFAEMEFWFALIKVLAIVTFLVVGTVFLGSGQPLDGNTTGFHLITDNGGFFPHGLLPALVLIQGVVFAFASIEMVGTAAGECKDPQTMVPKAINSVIWRIGLFYVGSVVLLVMLLPWSAYQAGQSPFVTFFSKLGVPYIGSIMNIVVLTAALSSLNSGLYCTGRILRSMAMGGSAPSFMAKMSRQHVPYAGILATLVVYVVGVFLNYLVPSRVFEIVLNFASLGIIASWAFIIVCQMRLRKAIKEGKAADVSFKLPGAPFTSWLTLLFLLSVLVLMAFDYPNGTYTIAALPIIGILLVIGWFGVRKRVAEIHSTAPVVEEDEEKQEIVFKPETAS

SEQ ID NO: 47825 - protein, 766 aa, Hordeum vulgare subsp. vulgare
MASHIVGYPRMGPKRELKFALESFWDGKSSAEDLEKVATDLRASIWKQMSEAGIKYIPSNTFSYYDQVLDTTAMLGAVPDRYSWTGGEIGHSTYFSMARGNATVPAMEMTKWFDTNYHFIVPELSPATKFSYASHKAVSEYKEAKALGVDTVPVLVGPVSYLLLSKAAKGVEKSFSLLSLLDSILPIYKEVVAELKAAGASWIQFDEPTLVKDLAAHELAAFSSAYAELESALSGLNVLIETYFADVPAESYKTLTSLSGVTAYGFDLVRGTKTVELIKSTGIPSGKYLFAGVVDGRNIWADDLAASLSTLQSLESVVGKDKLVVSTSCSLMHTAVDLVNETKLDSEIKSWLAFAAQKVVEVNALGKALAGQKDEAYFAANAAAQASRRSSPRVNNEEVQKAAAALKGSDHRRATPVSARLDAQQKKLNLPVLPTTTIGSFPQTMDLRRVRREYKAKKISEEDYVSAIKEEISKVVKIQEELDIDVLVHGEPERNDMVEYFGEQLSGFAFTANGWVQSYGSRCVKPPIIYGDVSRPNPMTVFWSKMAQSMTPRPMKGMLTGPVTILNWSFVRNDQPRFETCYQIALAIKKEVEDLEAGGIQVIQIDEAALREGLPLRKSEHAFYLDWAVHSFRITNCGVQDTTQIHTHMCYSNFNDIIHSIINMDADVITIENSRSDEKLLSVFREGVTYGAGIGPGVYDIHSPRIPSTEEIADRVNKMLAVLDTNILWVNPDCGLKTRKYTEVKPALTNMVAAAKLIRTQLASTK

SEQ ID NO: 47826 - protein, 511 aa, Xanthomonas campestris pv. campestris
MTLPLAACAQQPEAPAKTSAPIAANRSTTPAPQLVAGLPDFTNLVEQVGPGVVNIETTITRKDAMARSQRGGPGGRGGGAMPDDEQMPEFFKRFFGPDFQMPGGPRQGPGQGDDDGGIAGKSMGSGFIISADGYVLTNHHVVDGASEVTVKLTDRREFKAKVVGSDEQFDVALLKIEAKGLPTVRIGDSNTLKPGQWVVAIGSPFGLDHSVTAGIVSATGRSNPYADQRYVPFIQTDVAINQGNSGGPLLNTRGEVVGINSQIFSASGGYMGISFAIPIDLAFSAAEQIKASGHVSRGMLGVAVGPIDTLKAQGLGLPDTRGALVNDIPAGSPAGKAGIEVGDVIRSVNGKEIAVASDLPPMIGLMPPGTKVSLNVLRDGKPRQVTVTLGTLENESGSSAPRTAADDSKPSAPASVELLGLQVADLTAAERSRMGLEAGEGVRIASVTGSAARSTQPPLAPGLVIARVGRTKVGSVAELNRALASYKKGDVVMLLVTDGKATSYVALKAGG

SEQ ID NO: 47827 - protein, 279 aa, Stictis sp. 3-MW-2004
SIEHGAVNVVAVNDPFIEAEYAAYMLKYDSTHGQFKGEIKVDGNDLVVNGQKVKFYQKKDPAEIPWSETDAYYVVESTGVFTTTEKAKAHLKGGAKKVVISAPSADAPMFVMGVNEKEYKSDIEVISNASCTTNCLAPLAKVLHDNFTIIEGLMTTIHSYTATQKTVDGPSAKDWRGGRTAAQNIIPSSTGAAKAVGKVIPSLNGKITGMAMRVPTANVSVVDLTCRLEKSVSYDQIKETIKKASEGELKGILAYTEDDIVSSDLNGDNNSSIFDAKAG

SEQ ID NO: 47828 - protein, 254 aa, Borrelia garinii PBi
MNYTKFQEFISEFLGTFILLALGTGSVAMTVLFPSSPEITGEIIKGGYTNIVFGWGLGVTFGIYTSARISGAHLNPAVSIGLASVGKFPVSKLLHYIVAQILGAFTGALMTLVVFYSKWMEIDPGLENTQGIMATFPAVPGFLPGFIDQVFGTFLLMFLISVVGEFVKKHDDSPFIPFIIGAVVLAIGISFGGMNGYAINPARDLGPRILLLFAGFKNHGFNNLSIFIVPIIGPIIGAILGATIYEFTLKNNKG

SEQ ID NO: 47829 - protein, 455 aa, Arabidopsis thaliana
MGEAAEQARGFHVTTTRKQVITAALPLQDHWLPLSNLDLLLPPLNVHVCFCYKKPLHFTNTVAYETLKTALAETLVSYYAFAGELVTNPTGEPEILCNNRGVDFVEAGADVELRELNLYDPDESIAKLVPIKKHGVIAIQVTQLKCGSIVVGCTFDHRVADAYSMNMFLLSWAEISRSDVPISCVPSFRRSLLNPRRPLVMDPSIDQIYMPVTSLPPPQETTNPENLLASRIYYIKANALQELQTLASSSKNGKRTKLESFSAFLWKLVAEHAAKDPVPIKTSKLGIVVDGRRRLMEKENNTYFGNVLSVPFGGQRIDDLISKPLSWVTEEVHRFLKKSVTKEHFLNLIDWVETCRPTPAVSRIYSVGSDDGPAFVVSSGRSFPVNQVDFGWGSPVFGSYHFPWGGSAGYVMPMPSSVDDRDWMVYLHLTKGQLRFIEEEASHVLKPIDNDYLKI

SEQ ID NO: 47830 - protein, 143 aa, Shewanella oneidensis MR-1
MAIERTFSIIKPDAVAKNHIGAIYNRFETAGLKIVAAKMLHLTKEQAEGFYAEHSERGFFGALVAFMTSGPIMVQVLEGENAVLAHREILGATNPAQAAPGTIRADFAQSIDENAAHGSDSLASAEREIAYFFSAEELCPRTR

SEQ ID NO: 47831 - protein, 495 aa, Zea mays
MTMDPTKFRPSSSHDTTVTTTNAGAPVWNDNEALTVGPRGPILLEDYHLIEKVAHFDRERIPERVVHARGASAKGFFESTHDVTSLTCADFLRAPGVRTPVIVRFSQVIPEPGSGRTIRDARGFAVKFYTREGNWDLLGNNFPVFFIRDGIKFPDVIHAFKPNPRSHVQEYWRVFDFLSHLPESLHTFFFLFDHVGVPSDYRHMEGFGVNTYTFVSAAGKAQYVKFHWKPTCGERSILTDEEARVGGRNHSHTQDLYDSIAAEGSFPEWTLYVQVMDPAQQEQYDFDPLDDTKTWPEDLLPLRPVGRLVLDRNVDNFLNENEQLAFGPGLVVPGIYYSDDKMLQCRVFAYADTQRYRLGPNYLMLPVNAPRCGTHNNHYDGAMNLMHRDEEVDYYPSRHARRCGRAAPTPLPPRPVAGRREKATIRKPNDFKQPGERYRSWDADRQDRFVKAIRRLARTPKRQPELRSIWIDLLAKVDASLGMKIATRLNMKANM

SEQ ID NO: 47832 - protein, 246 aa, Cucumis sativus
MAPREKAVAVKPSVGNVKEVHFRGVRKRPWGRYAAEIRDPSKKSRVWLGTFDTAEEAARAYDSAARDFRGVKAKTNFPLPSDDQLLNLNNKINNINNNQSPSQSSTVESSSREQALMVDSSPLNLNLGHGIGGLTNAGPISFPFQRYQIPMIGEVFTRGIPPSNHVLYFDAALRAGMINSHPNQRLHFDRIREAVSDFRREFAGSGVQSDSDSSSVVDMNGQDLKPRGGSGGRLDLDLNFPPPESA

SEQ ID NO: 47833 - protein, 266 aa, Triticum aestivum
VTYKSLYKKAGSYRSGIPGISSTHASGLKYRKLINSSFADLQNPQLDLDGKACAAVGQSGLMAIYDTLFSQLDVTSSQLLVTDRDFRDPSFGHQLRETVVSLLDLKVIPVFNENDAISTRRAPYEDSSGIFWDNDSLATLLAKELDADLLIMLSDVEGLYSGPPSDPQSKIIHTYINEKHGKLINFGEKSRVGRGGMQAKVAAAVTAASKGVPAVIASGFVTDSIIKIMRGEKIGTLFHNESNVWDCSKEVTTREMAVAAKDCSRH

SEQ ID NO: 47834 - protein, 496 aa, Zea mays
MTMDPTKFRPSSSHDTTVTTTNAGAPVWNDNEALTVGPRGPILLEDYHLIEKVAHFARERIPERVVHARGASAKGFFECTHDVTSLTCADFLRAPGVRTPVIVRFSTVIHERGSPETIRDPRGFAVKFYTREGNWDLLGNNFPVFFIRDGIKFPDVIHAFKPNPRSHVQEYWRVFDFLSHLPESLHTFFFLFDDVGVPSDYRHMEGFGVNTYTFVSAAGKAQYVKFHWKPTCGVRCILTDEEAALVGGRNHSHATQDLYDSIAAGSFPEWTLYVQVMDPDTEEQYDFDPLDDTKTWPEDLLPLRPVGRLVLDRNVDNFFNENEQLAFGPGLVVPGIYYSDDKMLQCRVFAYADTQRYRLGPNYLMLPVNAPRCAHHNNHYDGAMNFMHRDEEVDYYPSRHAPLRQAAPPTPLPPRPVAGRREKATIRKPNDFKQPGERYRSWDADRQDRFVRRFADSLGHPKVSQELRSIWIDLLAKCDASLGMKIATRLNMKANM

SEQ ID NO: 47835 - protein, 634 aa, Streptococcus pneumoniae
MSNLSVNAIRFLGIDAINKANSGHPGVVMGAAPMAYSLFTKQLHINPAQPNWINRDRFILSAGHGSMLLYALLHLSGFEDVSMDEIKSFRQWGSKTPGHPEFGHTAGIDATTGPLGQGISTATGFAQAERFLAAKYNREGYNIFDHYTYVICGDGDLMEGVSSEAASYAGLQKLDKLVVLYDSNDINLDGETKDSFTESVRDRYNAYGWHTALVENGTDLEAIHAAIETAKASGKPSLIEVKTVIGYGSPNKQGTNAVHGAPLGADETASTRQALGWDYEPFEIPEQVYADFKEHVADRGASAYQAWTKLVADYKEAHPELAAEVEAIIDGRDPVEVTPADFPALENGFSQATRNSSQDALNVVAAKLPTFLGGSADLAHSNMTYIKTDGLQDDANRLNRNIQFGVREFAMGTILNGMALHGGLRVYGGTFFVFSDYVKAAVRLSALQGLPVTYVFTHDSIAVGEDGPTHEPVEHLAGLRAMPNLNVFRPADARETQAAWYLAVTSEKTPTALVLTRQNLTVEDGTDFDKVAKGAYVVYENAADFDTILIATGSEVNLAISAAKELASQGEKIRVVSMPSTDVFDKQDAAYKEEILPNAVRRRVAVEMGASQNWYKYVGLDGAVLGIDTFGASA

SEQ ID NO: 47836 - protein, 955 aa, Chloris gayana
MATKAEKHHSIDAQLRLLAPGKVSEDDKLVEYDALLIDRFLDILQNLHGSALRELVQECYEMSAEYDVKRDETRLDELGAKLSGLDPADAITVASSFSHMLNLANLAEEVQIAQRRRSKLKHGDFSDEGSATTESDIEETLKRLVSEIGKSPQEVFDALKNQTVELVLTAHPTQSLRRSLLQKHTKIRNCLTQLYAKDITEDEKKELDEALQAEIQAAFRTDEIRRSQPTPQDEMRYGMSYFHETIWKGVPKFLRRVDTALKSIGINERLPYDAPVIKFSSWMGGDRDGNPRVTPEVTRDVCLLARMMAANLYVSSIEDLMFELSMWRCNDELRARADEHLASRETKKHYIEFWRAIPESEPYRVLLGYVRDKLYNTRERALHMLTKGYSEIKEEATITSVEEFMEPLEVCYKSLCDCGDKTIADGLLLDFMRQVNTFGLSLAKLDIRQESERHTDAVDAITTHLGIGSYKEWPEEKRQEWLLSELQGKRPLLVPDLPVTEEVEAVLGCFKVLAELPRDSFGPYIISMATAPSDVLAVELLQRECGVRQPLPVVPLFERLADLQNAPASVERLFSIDWYLNRIGGKQQIMVGYSDSGKDAGRLSAAWQLYQAQELVAQVAKKYDVKVTFFHGRGGTVGRGGGPTHLAILSQPPETINGSLRVTIQGEVIEHSFGEEHLCFRTLQRFTAATLEHGMHPPISPKPEWRKLMDEMAVVATDAYRSVVVKEPRFVEYFRSATPETEYGRMNIGSRPAKRRPGGGITTLRAIPWIFSWTQTRFHLPVWLGVGSAFKSAIDKDIKNFQLLKDMYREWPFFRVTLDLLEMVFAKGDPGIAALYDKLLVTDELKPFGEQLRSKYAETEQLLLQIAGHKEILEADPYLKQRLRLRDPYITTLNVFQAYTLKQIRDPNFKVKTQPPLNKEQDLVKLNPASEYAPGLEDTLIITMKGIAAGMQNTG

SEQ ID NO: 47837 - protein, 242 aa, Thermoanaerobacter tengcongensis MB4
MSDFAKYLAEFFGTMILIWLGDGVVANVVLNKSKGQNSGWIVITAGWGFAVMVGAYTVGWLSGAHLNPAVTIGLATIGKFSWSLVPGYIIAQVLGAFVGAIIVYLMYIDHFAATEDPTAKLGTFATIPAIRNLGKNFITEAFGTAMLLIGILGITNSNNPIGGMGPLLVGLLVWAIGLSLGGPTGYAINPARDFGPRLAHAILPIPGKRDSDWGYGLIVPIFGPIVGGIIGAWIYQLIMSVH

SEQ ID NO: 47838 - protein, 466 aa, Tagetes patula
MAMGLGLGSVYLLLLCFVLTSCCNGGISSSYSRTNDISADMPLNSDVFALPHGFNAPQQVHITQGDHEGRGVIVSWVTPNEPGSSKVIYWAENSNVKQHAVGSFVTYKYYNYSSPYIHHCTIKNLEYNTKYFYELGTGNVTRQFWFTTPPEVGPDVPYTFGLIGDLGQTFDSNRTLTHYESNPAKGQAVLFVGDLSYADAYPLHDNNRWDSWARFVERSVAYQPWIWSAGNHEIDYLPEYGEGEPFKPYTHRYYVPYEAPGVHLRFGYSIKRASAYIIVMSSYSAYGMYTPQYKWLMNELPKVNRSETPWLIVVMHCPLYSTYLHHYMEGETMRVMYEQYFVKYKVDVVFSGHVHAYERTERISNVAYNIENGLCTPRNDEYAPVYITIGDGGNQEGLLYEMVDPQPKYSAFREPSYGHATFEIKNRTTAYYAWHRNQDGYSVEADSVWFHNLYWKSLSDSSAASL

SEQ ID NO: 47839 - protein, 633 aa, Pseudomonas putida KT2440
MSHQSDLISEDILAYLAQHERKELLRFLTCGNVDDGKSTLIGRLLHDSKMIYEDHLEAITRDSKKVGTTGEEVDLALLVDGLQAEREQGITIDVAYRYFSTAKRKFIIADTPGHEQYTRNMATGASTCDLAIILVDARYGVQTQTRRHSYIASLLGIKHIVVAVNKMDLKGFDEGVFESIKADYLKFAEAINLTPSSLHFVPMSALKGDNVVNHSEQSPWYAGPTLMEILETVEVSADRNFTDLRFPVQYVNRPNLNFRGFAGTIASGVVHKGDEIVVLPSGKSSRVKSIVTYEGELENAGPGQAVTLTMEDEIDISRGDLLVHADNVPPVTDQFDAMLVWMAEEPMLPGKKYDIKRATSYVPGSIASITHKVDVNTLEQGAASALQLNEIGRVKVALDTSIALDGYDSNRTTGAFIVIDRLTNGTVGAGMIIAPPVLPHGSTGHHGKQAHVSTEERALRFGQQPATVLFSGLSGAGKSTLAYAVERKLFDMGRAVYVLDGQNLRHDLNKGLPQDRAGRTENWRRAAHVARQFNEAGMLTLAAFVAPDAEGREQAKALIGKERLVTVYVQASPLVCRERDPQGLYAAGGDNIPGESFPFDVPLDADLVIDTQATSVDEGVKQVLDVLRQRGAI

SEQ ID NO: 47840 - protein, 634 aa, Streptococcus pneumoniae
MSNLSVNAIRFLGIDAINKANSGHPGVVMGAAPMAYSLFTKQLHINPAQPNWINRDRFILSAGHGSMLLYALLHLSGFEDVSMDEIKSFRQWGSKTPGHPEFGHTAGIDATTGPLGQGISTATGFAQAERFLAAKYNREGYNIFDHYTYVICGDGDLMEGVSSEAASYAGLQKLDKLVVLYDSNDINLDGETKDSFTESVRDRYNAYGWHTALVENGTDLEAIHAAIETAKASGKPSLIEVKTVIGYGSPNKQGTNAVHGAPLGADETASTRQALGWDYEPFEIPEQVYADFKEHVADRGASAYQAWTKLVADYKEAHPELAAEVEAIIDGRDPVEVTPADFPALENGFSQATRNSSQDALNVVAAKLPTFLGGSADLAHSNMTYIKTDGLQDDANRLNRNIQFGVREFAMGTILNGMALHGGLRVYGGTFFVFSDYVKAAVRLSALQGLPVTYVFTHDSIAVGEDGPTHEPVEHLAGLRAMPNLNVFRPADARETQAAWYLAVTSEKTPTALVLTRQNLTVEDGTDFDKVAKGAYVVYENAADFDTILIATGSEVNLAVSAAKELASQGEKIRVVSMPSTDVFDKQDAAYKEEILPNAVRRRVAIEMGASQNWYKYVGLDGAVLGIDTFGASA

SEQ ID NO: 47841 - protein, 161 aa, Brassica napus
MDPTTPFLGNEVKEDYSPARTLSEVKRVFSMESAKLWKIAAPIGFNIICQYGVTSFTNIFVGHIGEIELSAVSISLSVIGTFSFGFLLGMGSALETLCGQAFGAGQVHMLGVYMQRSWIILSVSCIFLLPIYIFATPVLRLLGQAEEIAVAAGEFTLLTIP

SEQ ID NO: 47842 - protein, 634 aa, Streptococcus pneumoniae
MSNLSVNAIRFLGIDAINKANSGHPGVVMGAAPMAYSLFTKQLHINPAQPNWINRDRFILSAGHGSMLLYALLHLSGFEDVSMDEIKSFRQWGSKTPGHPEFGHTAGIDATTGPLGQGISTATGFAQAERFLAAKYNREGYNIFDHYTYVICGDGDLMEGVSSEAASYAGLQKLDKLVVLYDSNDINLDGETKDSFTESVRDRYNAYGWHTALVENGTDLEAIHAAIETAKASGKPSLIEVKTVIGYGSPNKQGTNAVHGAPLGADETASTRQALGWDYEPFEIPEQVYADFKEHVADRGASAYQAWTKLVADYKEAHPELAAEVEAIIDGRDPVEVTPADFPALENGFSQATRNSSQDALNVVAAKLPTFLGGSADLAHSNMTYIKTDGLQDDANRLNRNIQFGVREFAMGTILNGMALHGGLRVYGGTFFVFSDYVKAAVRLSALQGLPVTYVFTHDSIAVGEDGPTHEPVEHLAGLRAMPNLNVFRPADARETQAAWYLAVTSEKTPTALVLTRQNLTVEDGTDFDKVAKGAYVVYENAADFDTILIATGSEVNLAVSAAKELASQGENIRVVSMPSTDVFDKQDAAYKEEILPNAVRRRVAVEMGASQNWYKYVGLDGAVLGIDTFGASA

SEQ ID NO: 47843 - protein, 469 aa, Burkholderia pseudomallei K96243
MSRLIIVSNRVAPISEGEPAAGGLAIGVYDALKETGGMWFGWSGEVIASGVPQIRIEEHGPVTFATIGLSRRDYDQYYRGFSNATLWPAFHYRADLIQFDRHEFEGYSRVNVWLAQQLVPLLRDDDVIWVHDYHLIPFARALRTAGVKNRIGFFLHIPFPAAQVLVNVPPHRELVEALCSFDLLGFQTDTDLRAFFEYVEYEAGGTVDRAAHPARVDAFGRTLRAAAYPIGVYPDEIAALAKAGENGRAVKSLAASLRGRQLVMSVDRLDYSKGLVERFRAFEKLLEHETSFRNRVSFLQIAPSTRADLRAYQDIRRQLEGESGRINGRFAELDWAPILYIHRQYERPVLAALYRLARVGYVTPLRDGMNLVAKEYVSAQDPDDPGVLVLSRFAGAACELTGALIVNPIDIGGMADALSRALSMPLAERRARHADMLARLRENNVSVWRDHFLRDLGRQRAASGAGRGR

SEQ ID NO: 47844 - protein, 363 aa, Pisum sativum
CINSGINKVYILTQFNSASLNRHIARAYNSGTGVTFGDGYVEVLAATQTPGEQGKKWFQGSADAVRQFHWLFEDARSKDIEDVLILSGDHLYRMDYMDFVKDHRESGADITLSCLPMDDSRASDFGLMKIDNKGRILSFSEKPKGADPKAMQVDTTVLGLSKDEALEKPYIASMGVYVFKKEILLNLLRWRFPTANDFGSEVIPASAKEFYMKAYLFNDYWEDIGTIRSFFEANLALTEHPSKFSFYDAAKPMYTSRRNLPPSTIDNSKVVDSIISHGSFVNNAFIEHSVVGIRSRINSNVHLKDTVMLGADLYETEEEVAALLAEGRVPVGIGENTKIKDCIIDKNARIGKNVTIANSEGVP

SEQ ID NO: 47845 - protein, 528 aa, Trametes sp. C30
MSKFQSLAAFIALSLSTGRLAAAAIGPKADLTISNANISPDGFTRAAVVANNQFPGPLITGNKGDNFQINVIDNLSNDTMLTSTTIHWHGFFQKGTNWADGPAFVNQCPISEGNSFLYDFSAADQAGTFWYHSHLSTQYCDGLRGVMVVYDPNDPHQSLYDVDDESTVITLSDWYHTAARLGPRFPLGADTVLINGLGRFATGDPDAELAVITVTKGKRYRFRLANISCDPNFTFSIQGHTMNVIEVDSVNVTPYEVDSIQTFAGQRYSFVLTADQDVDNYWMWAIPNVGTINTDGGVNSAILRYDGAAEIEPEAASPSVNNQLVESNVVPLTDVAAPGNPTVGGVDYALNLDFSFDGTNFAINGESYTSPSVPVLLQILSGAQTAPDLLPNGSVYVLPSNATVELSFPMTATNAPGAPHPFHLHGHTFYVVRSAGQTDYNYVNPPQRDTVSVGAAGDNVTIRFRTDNPGPWFLHCHIDFHLEAGFAVVFAEDTPNVASVNKPSAAWEDLCPTYNSVYPNGDSGDARR

SEQ ID NO: 47846 - protein, 490 aa, Saccharomyces cerevisiae
MSGFRLIDIVKPILPILPEVELPFEKLPFDDKIVYTIFAGLIYLFAQFPLVGLPKATTPNVNDPIYFLRGVFGCEPRTLLEFGLFPNISSGLILQLLAGLKVIKVNFKIQSDRELFQSLTKVFAIVQYVILTNIFIFAGYFGDDLSVVQIGLINFQLVGAGIFTTLLAEVIDKGFGFSSGAMIINTVVIATNLVADTFGVSQIKVGEDDQTEAQGALINLIQGLRSKHKTFIGGIISAFNRDYLPNLTTTIIVLAIAIIVCYLQSVRVELPIRSTRARGTNNVYPIKLLYTGCLSVLFSYTILFYIHIFAFVLIQLVAKNEPTHIICKIMGHYENANNLLAVPTFPLSLLAPPTSFFKGVTQQPLTFITYSAFILVTGIWFADKWQAISGSSARDVALEFKDQGITLMGRREQNVAKELNKVIPIAAVTGASVLSLITVIGESLGLKGKAAGIVVGIAGGFSLLEVITIEYQQSGGQSALNQVLGVPGAM

SEQ ID NO: 47847 - protein, 149 aa, Petunia x hybrida
MAEQLTEEQIAEFKEAFSLFDKDGDGCITTKELGTVMRSLGQNPTEAELQDMISEVDADQNGTIDFPEFLNLMARKMKDTDSEEELKEAFKVFDKDQNGYISAADVRHVMTNLGEKLTDEEVDEMIREADMDGDGQVNYEEFVRMMLAK

SEQ ID NO: 47848 - protein, 269 aa, Burkholderia pseudomallei K96243
MRTFARRARPPAAILFSESMQSIPLSLPLSRTAFFFDFDGTLVDLAPTPDAIQVPPDVPVLVDALRQLSHGAVAIVSGRGIDSIDAYLNLPGLPVAGLHGAERRDANGDTQRIGFDDPRLLRIERELAALVDRHPGMLLEIKGAALALHFRNAPEREGVARAAAERLVADYADAYVLQPGKMVFEIKPKGVDKGRAVAAFLNEPPFAGRMPVFAGDDLTDEQGFAVANANGGLSIKVGAGDTTARARVDSVAALRAQLARWIAAGRAPA

SEQ ID NO: 47849 - protein, 634 aa, Streptococcus pneumoniae
MSNLSVNAIRFLGIDAINKANSGHPGVVMGAAPMAYSLFTKQLHINPAQPNWINRDRFILSAGHGSMLLYALLHLSGFEDVSMDEIKSFRQWGSKTPGHPEFGHTAGIDATTGPLGQGISTATGFAQAERFLAAKYNREGYNIFDHYTYVICGDGDLMEGVSSEAASYAGLQKLDKLVVLYDSNDINLDGETKDSFTESVRDRYNAYGWHTALVENGTDLEAIHAAIETAKASGKPSLIEVKTVIGYGSPNKQGTNAVHGAPLGADETASTRQALGWDYEPFEIPEQVYADFKEHVADPGASAYQAWTKLVADYKEAHPELAAEVEAIIDGRDPVEVTPVDFPALENGFSQATRNSSQDALNVVAAKLPTFLGGSADLAHSNMTYIKTDGLQDDANRLNRNIQFGVREFAMGTILNGMALHGGLRVYGGTFFVFSDYVKAAVRLSALQGLPVTYVFTHDSIAVGEDGPTHEPVEHLAGLRAMPNLNVFRPADARETQAAWYLAVTSEKTPTALVLTRQNLTVEDGTDFDKVAKGAYVVYENAADFDTILIATGSEVNLAVSAAKELASQGEKIRVVSMPSTDVFDKQNAAYKEEILPNAVRRRVAVEMGASQNWYKYVGLDGAVLGIDTFGASA

SEQ ID NO: 47850 - protein, 93 aa, Sequoia sempervirens
LKQVDYLLKNKWVPCIEFDEDAYIKRIHGNTPGYYDGRYWVMWKLPMFGCNDASQVMSEINEVRKAYPKAFVRIIGFDAVRQVQCISFIAHKP

SEQ ID NO: 47851 - protein, 401 aa, Escherichia coli
  misc_feature (4)..(4): Xaa can be any naturally occurring amino acid
  misc_feature (72)..(72): Xaa can be any naturally occurring amino acid
  misc_feature (79)..(79): Xaa can be any naturally occurring amino acid
  misc_feature (105)..(105): Xaa can be any naturally occurring amino acid
  misc_feature (161)..(161): Xaa can be any naturally occurring amino acid
  misc_feature (189)..(189): Xaa can be any naturally occurring amino acid
  misc_feature (211)..(211): Xaa can be any naturally occurring amino acid
  misc_feature (235)..(235): Xaa can be any naturally occurring amino acid
  misc_feature (294)..(294): Xaa can be any naturally occurring amino acid
  misc_feature (316)..(316): Xaa can be any naturally occurring amino acid
  misc_feature (334)..(334): Xaa can be any naturally occurring amino acid
  misc_feature (374)..(374): Xaa can be any naturally occurring amino acid
  unsure (1)..(401): unsure at all Xaa locations
GSHXRGEFYQQLTNDLETARAEGLFKEERIITSAQQADITVADGSHVINFCANNYLGLANHPDLIAAAKAGXDSHGFGXASVRFICGTQDSHKELEQKLAAFLGXEDAILYSSCFDANGGLFETLLGAEDAIISDALNHASIIDGVRLCKAKRYRYANNDXQELEARLKEAREAGARHVLIATDGVFSXDGVIANLKGVCDLADKYDALVXVDDSHAVGFVGENGRGSHEYCDVXGRVDIITGTLGKALGGASGGYTAARKEVVEWLRQRSRPYLFSNSLAPAIVAASIKVLEXVEAGSELRDRLWANARQFREQXSAAGFTLAGADHAIIPVXLGDAVVAQKFARELQKEGIYVTGFFYPVVPKGQARIRTQXSAAHTPEQITRAVEAFTRIGKQLGVIA

SEQ ID NO: 47852 - protein, 325 aa, Rubrobacter xylanophilus DSM 9941
MEEREMPERERLLDFYERMVRCMLWEQKLLRFIDEGKISGFYHAGRGQEGTQVGAVAALGPDDYMMYAHRGCGYMVARGMPMSKLFGDFLANTEGSTRGLGAGIVHIAWPQLGILGQSGTLGGCFPIAAGAALSAKYRGTDQVCLCFFGDGTANRGTFHEAANAASVWKLPVIWLCENNQWAVSVSVREATAVKQIADRAGAYGMPGEVVDGQDVVAVYEAVSRAVERARRGEGPSLIEAMTYRFRGHYEGDPDTYRDREEVERWRKERDPILLLANRLRSEGLASEQDLEQIRARVQREVDEAAEEALGAPMPERERIFEFVTA

SEQ ID NO: 47853 - protein, 245 aa, Brassica napus
  misc_feature (151)..(151): Xaa can be any naturally occurring amino acid
  unsure (1)..(245): unsure at all Xaa locations
MIGQLMNLNATELCLGLPGGAEAVESPAKSAVGNKRGFSETVDLMLNLQSNKEGAVDLNNVASASKETTLLKDPAKPPAKAQVVGWPPVRNYRKNIITQQKTSGKEEASSEKAGNSGGGASGSCIWGKVSMDRSSLPKEKWDLKMYKSYQXDLSDALAKMVSSFTMGNYGAQGMIDFMNESKLRDLLNSSDYVPSYEDKDSDWMLVGDVPWEMFVDSCKRLRIMKGAEAIGLAPRAMEKYCKNRS

SEQ ID NO: 47854 - protein, 357 aa, Rubrobacter xylanophilus DSM 9941
MPEKKMMRAAVYRGPRELRVEPVPVPEIGPSDVLVRVHSCGICGSDLHSYKAGMYIRPGQIMGHEFMGTVAAAGEDVEGVEEGDRVTGFSIGVCGSCYWCSRQQYILCPELFRNSTGYGLPGGFAEYVPIRNAVVGQSIHPVPSELDDETAATTEPVSVGVGAIEAAGVRPGDRVVVLGAGMIGNACMQAARAAGAGQVAVIDVSPVRLEAARSLGADAVFDARTGDALSWVKELWGVGRYHFNEGGMADVVVEAAGAPVTVQQAFEMVRSGGAIVFVGLPEEPAPIDVTKIVHKQPRIVGSLGGDFARAIELMASGSIRTKELITHRFPLEDAAEAFETQLRTGEAMKVMIQPREG

SEQ ID NO: 47855 - protein, 284 aa, Arabidopsis thaliana
MTAVTAAQRSVPAPFLSKTYQLVDDHSTDDVVSWNEEGTAFVVWKTAEFAKDLLPQYFKHNNFSSFIRQLNTYGFRKTVPDKWEFANDYFRRGGEDLLTDIRRRKSVIASTAGKCVVVGSPSESNSGGGDDHGSSSTSSPGSSKNPGSVENMVADLSGENEKLKRENNNLSSELAAAKKQRDELVTFLTGHLKVRPEQIDKMIKGGKFKPVESDEESECEGCDGGGGAEEGVGEGLKLFGVWLKGERKKRDRDEKNYVVSGSRMTEIKNVDFHAPLWKSSKVCN

SEQ ID NO: 47856 - protein, 271 aa, Bradyrhizobium japonicum USDA 110
MAEAVYGYIGNSTALLADAGHNLSDVLGLVVAWGAAIAARRAPSGRFTYGLRASTILAALANAVFLLVATGAIGWEAILRLREPEPVAGVTVMVVAGIGILVNGFTAMLFASGRKDDINIEGAYLHMAADAAVSLGVVVSAALIIWTGWLWLDPVTSLVICAAILWSTTSLLRGSIDMSMAAAPKGTDLAAIRALLLARPGVSAIHDLHVWPISTTETALTCHLVMPAGSGDAFLMETAQMLKASFRIGHTTLQVETHPDNGCALAPDDVV

SEQ ID NO: 47857 - protein, 359 aa, Escherichia coli K12
MSNSHHTSMRGNDMSDNIRVGLIGYGYASKTFHAPLIAGTPGQELAVISSSDETKVKADWPTVTVVSEPKHLFNDPNIDLIVIPTPNDTHFPLAKAALEAGKHVVVDKPFTVTLSQARELDALAKSLGRVLSVFHNRRWDSDFLTLKGLLAEGVLGEVAYFESHFDRFRPQVRDRWREQGGPGSGIWYDLAPHLLDQAITLFGLPVSMTVDLAQLRPGAQSTDYFHAILSYPQRRVILHGTMLAAAESARYIVHGSRGSYVKYGLDPQEERLKNGERLPQEDWGYDMRDGVLTRVEGEERVEETLLTVPGNYPAYYAAIRDALNGDGENPVPASQAIQVMELIELGIESAKHRATLCLA

SEQ ID NO: 47858 - protein, 92 aa, Brassica napus
MLLPPPRVSPPPPLLCTLHARFFRSQRYPRIKHAQKCYVRGSFAVPVLQRGSGTCLGVVEIPPPPQKMNSRLELENICTALEVSLSLLPTHV

SEQ ID NO: 47859 - protein, 220 aa, Salmonella enterica subsp. enterica serovar Paratyphi A str.
MKDIDTLISNNALWSKMLVEEDPGFFEKLAQAQKPRFLWIGCSDSRVPAERLTGLEPGELFVHRNVANLVIHTDLNCLSVVQYAVDVLEVEHIIICGHSGCGGIKAAVENPELGLINNWLLHIRDIWLKHSSLLGKMPEEQRLDALYELNVMEQVYNLGHSTIMQSAWKRGQNVTIHGWAYSINDGLLRDLDVTATNKKTLENGYHKGISALSLKYIPHQ

SEQ ID NO: 47860 - protein, 276 aa, Stictis sp. 1-MW-2004
HGAVNVVAVNDPFIEAHYAAYMLKYDSQHGQFKGEIKVDGNDLIVKGQKVKFYQEKDPANIPWSETGAYYVVESTGVFTTTEKAKAHLKGGAKKVVISAPSADAPMFVMGVNEKEYKSDIEVISNASCTTNCLAPLAKVLHDNFTIIEGLMTTIHSYTATQKTVDGPSAKDWRGGRTAAQNIIPSSTGAAKAVGKVIPSLNGKLTGMSMRVPTSNVSVVDLTCRLEKAVSYDQIKETIKKASEGEMKGILAYTEDDIVSTDLNGDNHSSIFDAKAG

SEQ ID NO: 47861 - protein, 427 aa, Triticum aestivum
MASSAPGGGSGKIERLSSIDAQLRLLVPAKVSEDDKLIEYDALLLDRFLDVLQGLHGDDLREMVQECYEVAAEYETKHDLEKLDELGEMITSLDPGDSIVIAKAFSHMLNLANLAEEVQIAYRRRVKLKKGDFADENSAITESDIEETLKRLVFDMKKSPAEVFDALKNQTVDLVLTAHPTQSVRRSLLQKHSRIRNCLVQLYSKDITPDDKQELDEALQREIQAAFRTDEIRRTQPTPQDEMRAGMSYFHETIWKGVPKFLRRVDTALKNIGINERVPYNAPLIQFSSWMGGDRDGNPRVTPEVTRDVCLLARMMAANLYCAQIEDLMFELSMWRCNDELRSRADELHRSSKKDAKHYIEFWKKVPPNEPYRVILGDVRDNLYNTRERSRELLSSGHSDIPEEATLTNLEQLLEPLELCYRSLCAC

SEQ ID NO: 47862 - protein, 415 aa, Anabaena variabilis ATCC 29413
MQAANISLEISSFDTMNTQDYIELEQQYGADNYHPLDVVITKGEGVWVWDIEGKKYLDFLSAYSALNQGHCHPKILQAMIKQAQQVTLTSRAFRNDQLGKFYQKLCQISGLPKVLPMNSGAEAVETAIKAIRKWAYKVKGIPENQAEIIVCSNNFSGRTISLISFSTEEQYQDGFGPLTTGFKVIPFGDAQALEQAITPNTAAFLVEPIQGEGGIIVPPHGFLKQAEQICRHHHVLLVFDEIQTGLGRTGKMFAHQYENVKPDGITVGKALSGGFYPISAFISTEEVMGIFQPGDHGSTFGGNPLAAAIGIAALDVLIEEKLPEKALKLGEYFIEKLQSIESTYIKEVRGKGLLIGMELYPEAGGARRFCKALAKEGLLAKETRDNVIRFAPPLVISEDEIDWALEKIERVLTTT

SEQ ID NO: 47863 - protein, 634 aa, Streptococcus pneumoniae
MSNLSVNAIRFLGIDAINKANSGHPGVVMGAAPMAYSLFTKQLHINPAQPNWINRDRFILSAGHGSMLLYAFLHLSGFEDVSMDEIKSFRQWGSKTPGHPEFGHTAGIDATTGPLGQGISTATGFAQAERFLAAKYNREGYNIFDHYTYVICGDGDLMEGVSSEAASYAGLQKLDKLVVLYDSNDINLDGETKDSFTESVRDRYNAYGWHTALVENGTDLEAIHAAIETAKASGKPSLIEVKTVIGYGSPNKQGTNAVHGAPLGADETASTRQALGWDYEPFEIPEQVYADFKEHVADRGASAYQAWTKLVADYKEAHPELAAEVEAIIDGRDPVEVTPADFPALENGFSQATRNSSQDALNVVAAKLPTFLGGSADLAHSNMTYIKTDGLQDDTNRLNRNIQFGVREFAMGTILNGMALHGGLRVYGGTFFVFSDYVKAAVRLSALQGLPVTYVFTHDSIAVGEDGPTHEPVEHLAGLRAMPNLNVFRPADARETQAAWYLAVTSEKTPTALVLTRQNLTVEDGTDFDKVAKGAYVVYENAADFDTILIATGSEVNLAVSAAKELASQGEKIRVVSMPSTDVFDKQDAAYKEEILSNAVRRRVAVEMGASQNWYKYVGLDGAVLGIDTFGASA

SEQ ID NO: 47864 - protein, 184 aa, Petunia x hybrida
MADQLTDDQISEFKEAFSLFDKDGDGCITTKELGTVMRSLGQNPTEAELQDMINEVDADGNGTIDFPEFLNLMARKMKDTDSEEELKEAFRVFDKDQNGFISAAELRHVMTNLGEKLTDEEVDEMIREADVDGDGQINYEEFVKVMMANRRRRRIEESKRSVNSNISRSNNGRKVRKRDRCTIL

SEQ ID NO: 47865 - protein, 778 aa, Thermoanaerobacter tengcongensis MB4
MKGIIMAGGEGSRLRPLTFDIPKPLVPVANKPAIKHIVEHLHKYGVGELAVTLFYLPHKIKDYLLEEYGNEIKFYTEEKPLGTAGSVKNAKDFLKETFIVMSGDVITDVNIKEVYDFHRKKGSKVTLVLKKVEIPLEYGVVIVDETGKIVKFLEKPSWGEVFSDTVNTGIYIIEPEILEFIPEDRPFDFSKDLFPLLLKENIPMYGYITEGYWCDIGNTAQYLSSHFDVLEGKLDLGYRKILLEEGKVIGKKVLMSSGAKLILPLIIGNEVVIEENAVVGPNVVIGRGTIIKKGSHVKNSVLWEDVYVGENSELNGAVVCNKVRIDSNARILENAVIGEGVRIKAFAEIRPDVKVWPFKVIEEEAVVSKDVVWGNGRKNLSFGYRGIRGIFNEEIGPYQAVEIGEAFGDLMKGKVIVGSDEELASSLIADLIAYGLAFSGCEVLKSNSFLLPALRVGIRLRSAKGGVYVERIGEEIRILFLDGEGMDIDRNLEKKIENKLKIHDISRRKIEDIKPIKEVDVEGDYKDYLVKNRADSFKIKVKPHDEWTKKVLLQIKGEQILDDQNYHLKVKLKKNGEEIELYDEKDRKFDEDEVNYLKMLIAREKGLKKVVLPFNSSKYLAEFAEELAVETVVGKISPRDLMRSMTNLEEGRQVYFDLSFDGINFLLEVIEYVRLKNKRLSEIKDSFPLRYKTVKRIRCDWKDKGRIIRELFETRKNNVTFLDGLRFEEDEGWVLVVPDSELPFCNVYVEALTPEKAERLFTIYEKKIQDILLKNDGK

SEQ ID NO: 47866 - protein, 348 aa, Zea mays
MSSSTSGTREMSSPNSTATSIGQVQKVPGFAKLQGENFVYFMQTYSIMLGRTSRSYTADFDLSKYECGSQCVSRCHACIFYDFELRHFAIEVLGRNGCTIRGVSYLPGSVPIKLNSQDLIEIAGIKFYFLLPSRSIFATLAARDATMLPPQSPSLLHPNYPGNPSANDCGRSNGENGVKISNDMQGKLVKQKRSFSGELDISYSYGTKKNVDRVGTLDGCVNKLHIQIADKDTDNQQILLEEEKDVTTCLTTLISELSGPKEWVPMERLLSEIFKRFGKKWLRDRVSKYLPQKGMSGSSTKVDHRPWCSLWELLRKHPEHFVMTTLTRGEETLDYVGLVHLVSVENEP

SEQ ID NO: 47867 - protein, 332 aa, Saccharomyces cerevisiae
MIRIAINGFGRIGRLVLRLALQRKDIEVVAVNDPFISNDYAAYMVKYDSTHGRYKGTVSHDDKHIIIDGVKIATYQERDPANLPWGSLKIDVAVDSTGVFKELDTAQKHIDAGAKKVVITAPSSSAPMFVVGVNHTKYTPDKKIVSNASCTTNCLAPLAKVINDAFGIEEGLMTTVHSMTATQKTVDGPSHKDWRGGRTASGNIIPSSTGAAKAVGKVLPELQGKLTGMAFRVPTVDVSVVDLTVKLEKEATYDQIKKAVKAAAEGPMKGVLGYTEDAVVSSDFLGDTHASIFDASAGIQLSPKFVKLISWYDNEYGYSARVVDLIEYVAKA

SEQ ID NO: 47868 - protein, 634 aa, Streptococcus pneumoniae
MSNLSVNAIRFLGIDAINKANSGHPGVVMGAAPMAYSLFTKQLHINPAQPNWINRDRFILSAGHGSMLLYALLHLSGFEDVSMNEIKSFRQWGSKTPGHPEFGHTAGIDATTGPLGQGISTATGFAQAERFLAAKYNREGYNIFDHYTYVICGDGDLMEGVSSEAASYAGLQKLDKLVVLYDSNDINLDGETKDSFTESVRDRYNAYGWHTALVENGTDLEAIHAAIETAKASGKPSLIEVKTVIGYGSPNKQGTNAVHGAPLGADETASTRQALGWDYEPFEIPEQVYADFKEHVADRGASAYQAWTKLVADYKEVHPELAAEVEAIIDGRDPVEVTPADFPALENGFSQATRNSSQDALNVVAAKLPTFLGGSADLAHSNMTYIKTDGLQDDANRLNRNIQFGVREFAMGTILNGMALHGGLRVYGGTFFVFSDYVKAAVRLSALQGLPVTYVFTHDSIAVGEDGPTHEPVEHLAGLRAMPNLNVFRPADARETQAAWYLAVTSEKTPTALVLTRQNLTVEDGTDFDKVAKGAYVVYENAADFDTILIATGSEVNLAVSAAKELASQGEKIRVVSMPSTDVFDKQDAAYKEEILPNAVRRRVAVEMGASQNWYKYVGLDGAVLGIDTFGASA

SEQ ID NO: 47869 - protein, 433 aa, Burkholderia pseudomallei K96243
MTPSDVKATLSFSDNSPSVELPIYKGTMGPDVIDIRKLYGQTGKFTYDPGFMSTASCNSAITYIDGDKGELLYRGYPIDNLAQNADFLESCYLLLKGELPNAAQKKEFVATVTKHTMVHEQMQFFFRGFRRDAHPMAILVAAVGALSAFYHDSLDINDPRHREVSAIRMIAKLPTLVAMAYKYSIGQPFVYPRNDLSYSANFMRMMFANPCEEYQVNDVLVRALDRILILHADHEQNASTSTVRLAGSSGANPFACIAAGIACLWGPAHGGANEAALNMLEQIGTPENIPEFIKQVKDKNSGVKLMGFGHRVYKNYDPRAKLMRETCYEVLNELGLHDDPLFKLAMQLEKIALEDEYFVSRKLYPNVDFYSGIVQRALGIPTSMFTCIFAMARTVGWIAQWNEMIADPEQKIGRPRQLFIGETPRTAKPIEQR

SEQ ID NO: 47870 - protein, 169 aa, Listeria welshimeri
VPERVVHARGAGAHGKFVTKKSMKKYTIANFLQEEGTETEVFARFSTVIHGQHSPETLRDPRGFSVKFYTEEGNYDFVGNNLPVFFIRDAIKFPDVIHSLKPDPRTNIQDGNRYWDFFSLSPEATTMIMYLFSDEGTPASYREIRGSSVHAFKWINEEGKTVYVKLRWI

SEQ ID NO: 47871 - protein, 591 aa, Burkholderia pseudomallei K96243
MAAIKTSLPRRKFDVVIVGAGGSGMRASLQLSRAGLSVCVLSKVFPTRSHTVAAQGGIGASLGNMSEDNWHYHFYDTIKGSDWLGDQDAIEFMCREAPNVVYELEHFGMPFDRNADGTIYQRPFGGHTANYGEKPVQRACAAADRTGHALLHTLYQQNVAAKTQFFVEWMALDLIRDADGDVLGVTALEMETGDVYILEGKTTLFATGGAGRIFAASTNAFINTGDGLGMAARSGIALQDMEFWQFHPTGVAGAGVLITEGVRGEGGILRNANGERFMERYAPTLKDLAPRDFVSRSMDQEIKEGRGVGPNKDHVLLDLSHIGAETIMKRLPSIREIALKFANVDCIKEPIPVVPTIHYQMGGIPTNIHGQVVGTSRDHKEPINGFYAVGECSCVSVHGANRLGTNSLLDLVVFGRAAGNHIVEHVKNQRDHKPLPAAAADFSLSRLAKLEKSTSGEYTQDIANDIRATMQKHAGVFRTSALLKEGVEQMAGLKERAAAVHLKDKSKVFNTARVEALELANLIEVARATMVSAEARKESRGAHAHSDYEHRDDENWLRHTLWYSEGDRLDYKPVQMKPLTVESVPPKARTF

SEQ ID NO: 47872 - protein, 418 aa, Medicago sativa
MASQNITPSPTASSDSVFAHLVRAPEDPILGVTVAYNKDPSPIKLNLGVGAYRTEEGKPLVLDVVRRVERQLLNDMSRNKEYIPIVGLADFNKLSAKLIFGADSPAIQENRVTTVQGLSGTGSLRVGGEFLAKHYHQRIIYLPTPTWGNHTKVFNLAGLTVKTYRYYAPATRGLDFQGLLEDLGSAPSGSVVLLHACAHNPTGVDPTLEQWEQIRQLIRSKSLLPFFDSAYQGFASGSLDADAQPVRLFVADGGELLVAQSYAKNMGLYGERVGALSIVSKSADVSSRVESQLKLVIRPMYSSPPIHGASIVAAILKDRDLYNDWTIELKAMADRIINMRQQLFDALRARGTPGDWSHIIKQIGMFTFTGLNPEQVSILTKEYHIYLTSDGRISMAGLSSKTVPHLAHAIHAVVTRVA

SEQ ID NO: 47873 - protein, 455 aa, Medicago sativa
MASSSLLSSVPSHSASLSILDTNIKGKLKLGINNFSNLRSSGRICMAVATNVSRFEGIPMAPPDPILGVSEAFKADTNDVKLNLGVGAYRTEELQPYVLNVVKKAENLMLERGENKEYLPIEGLAAFNKATAELLLGADNPAIKQQRVATVQGLSGTGSLRLGAALIERYFPGAKVLISNPTWGNHKNIFNDARVPWSEYRYYDPKTVGLDFEGMIEDIKSAPEGTFVLLHGCAHNPTGIDPTPEQWEKIADVIQQKNHFPFFDVAYQGFASGSLDEDAASVRLFESRGMEVLVAQSYSKNLGLYAERVGAINVISSSPESATRVKSQLKRLARPMYSNPPVHGARIVANIVGTPALFDEWKAEMEMMAGRIKTVRQALYDSISSKDKSGKDWSFILKQIGMFSFTGLNKSQSDNMTNKWHIYMTKDGRISLAGLSLAKCEYLADAIIDSYHNVS

SEQ ID NO: 47874 - protein, 214 aa, Arabidopsis thaliana
MVRGKTQMKRIENATSRQVTFSKRRNGLLKKAFELSVLCDAEVSLIIFSPKGKLYEFASSNMQDTIDRYLRHTKDRVSTKPVSEENMQHLKYEAANMMKKIEQLEASKRKLLGEGIGTCSIEELQQIEQQLEKSVKCIRARKTQVFKEQIEQLKQKEKALAAENEKLSEKWGSHESEVWSNKNQESTGRGDEESSPSSEVETQLFIGLPCSSRK

SEQ ID NO: 47875 - protein, 330 aa, Prosthecochloris aestuarii DSM 271
MNVYYEQDADLKHLQGKNIAVLGYGSQGHAHALNLKESGLNVCVGLRTDSSSCAKARQAGLEVNTIADAVKWADIIMILLPDQYQKAIYETEIAPNLETGNTLAFAHGFNIHYKQIVPPETVNVIMIAPKSPGHLVRRTFTEGNGVPCLIAVHQDYTGNAKEQALAWAKGLGGAKAGVIETTIKDETETDLFGEQAVLCGGSAELIKAGFETLVEAGYPEELAYFECLHELKLIVDLYYEGGLSRMNYSVSDTAEYGGMTRGPRLITPAVKAEMKKILEEVQDGRFAKEFIDECNSGYKNLTSLRESNTNHPIEKVGAKLRNMMSWLIKK

SEQ ID NO: 47876 - protein, 447 aa, Escherichia coli CFT073
MDQTYSLESFLNHVQKRDPNQTEFAQAVREVMTTLWPFLEQNPKYRQMSLLERLVEPERVIQFRVVWVDDRNQVQVNRAWRVQFSSAIGPYKGGMRFHPSVNLSILKFLGFEQTFKNALTTLPMGGGKGGSDFDPKGKSEGEVMRFCQALMTELYRHLGADTDVPAGDIGVGGREVGFMAGMMKKLSNNTACVFTGKGLSFGGSLIRPEATGYGLVYFTEAMLKRHGMGFEGMRVSVSGSGNVAQYAIEKAMEFGARVITASDSSGTVVDESGFTKEKLARLIEIKASRDGRVADYAKEFGLVYLEGQQPWSVPVDIALPCATQNELDVDAAHQLIANGVKAVAEGANMPTTIEATELFQQAGVLFAPGKAANAGGVATSGLEMAQNAARLGWKAEKVDARLHHIMLDIHHACVEHGGEGEQTNYVQGANIAGFVKVADAMLSQGVI

SEQ ID NO: 47877 - protein, 297 aa, uncultured archaeon GZfos17F1
MADIIGIGALNVDKLYLVERIGAAGEEIGINSVSEQPGGSAANTIAALTRLGIKTGFIGRVGDDADGAYLRSELVKEGVDTRGIEVARGRTGSAIVLVDPGGERSMYVHPGVNDVLSLTPENISYAKNAKYLHLSSFVGETVIDVQREILDRSKAEISFAPGMLYARRGVDTLRKIISNARVVFLNRDEIEMLTGSGYSEGAGELNDIGAEIVVVTLGGDGCYIRTSDAEISIPGLAARVVDTTGAGDAFCAGFLYGLLIDKPLSVCGRLGNFVAAKCIEAVGAREGLPRKIEIVEG

SEQ ID NO: 47878 - protein, 256 aa, Mesorhizobium loti MAFF303099
MTGRLKDKVALIIGSARGIGKGIALRFAEEGARLVLADSEAEAGQATADELGVPFIGTDISQMRDAEASVALALKRHGRLDIIVQNAGIYPWQLIENTSTDDWDRVMAVNLRGTFNATRAALVPMKAQRSGRMLYTSSITGPHVTSPGHGHYSATKAGINGFIRAAALEFSGYGITVNGVEPGNILTEAIQQHRGAAYIKNMEDSIPLGRLGSPRDVANAFLFLASDDAGYITGTTIVVDGGQLLPEGNDFRMVPP

SEQ ID NO: 47879 - protein, 645 aa, Pyrococcus furiosus DSM 3638
MYKLVSFRDSEIFGRVAEVEFSLIREGSYAYLLGDFNAFNEGSFRMEQEGKNWKIKIALPEGVWHYAFSIDGKFVLDPDNPERRVYTRKGYKFHREVNVARIVKSDDLVFHTPSLLYLYEIFGRVHVLLRTQKGVIKGATFLGEKHVPMRKKASDELFDYFEVIVEGGDKRLNYSFEVLTMEGAKFEYGQFKARPFSIEFPTWVIDRVFYQIMPDKFARSRKIQGIAYPKDKYWGGDLIGIKEKIDHLVNLGINAIYLTPIFSSLTYHGYDIVDYFHVARRLGGDRAFVDLLSELKRFDIKVILDGVFHHTSFFHPYFQDVVRKGENSSFKNFYRIIKFPVVSKEFLQILHSKSSWEEKYKKIKSLGWNYESFFSVWIMPRLNHDNPKVREFIKNVILFWTNKGVDGFRMDVAHGVPPEVWKEVREALPKEKYLIGEVMDDARLWLFDKFHGVMNYRLYDAILRFFGYEEITAEEFLNELELLSSYYGPAEYLMYNFLDNHDVERFLDIVGDKRKYVCALVFLMTYKGIPSLFYGDEIGLRGINLQGMESSRAPMLWNEEEWDQRILEITKTLVKIRKNNKALLFGNFVPVKFKRKFMVYKREHMGERTIVAINYSNSRVKELGITIPEYSGVIINEDKVKLIKY

SEQ ID NO: 47880 - protein, 403 aa, Rhizobium leguminosarum
MDRRVVITGLGGLCGLGTDASSIWTENARRPSAIGPISNSEIHELKGMIGTEIKVLPQHDIDRKQLISMDRFSLLAVLAAKQAMLQAGLSCNEGNAHRFGATVGVGFGGWDATEKAYRTLLLGGATRTELFTGVKAMPSAAACQVSMNLGLRGPVFGATSACASANHAIASAVDQIKLGRADVMLAGGSDAPLVWIVLKAWEAMRVLAPDTCRPFSADRKGLVLGEGAGMAVLESYEHAAARGATMLAEVAGIGLSADAYHIAAPAVHGPEAAMRACLVDASLNAEDVDYLNAHGTGTKANDQIETTAIKRVFGDHARSMSISSTKSTHAHCLGAASALEMIACVMAIQEGVVPPTANYREPDPDCDLDVTPNVPRERKVRVAMSNAFAMGGMNAVLAFKQVP

SEQ ID NO: 47881 - protein, 356 aa, Polaromonas sp. JS666
MSSPTSSQQTNSTDQGANSHRRQFLNLTAIGLTGAAALAAYPLVSAASSTTSAINSKGTPMSTSNLQNASANAPRASFHSVEADGVKVFYRESGPAQAPVILLLHGFPASSHMFRELIPRLASKYRVIAPDLPGFGFTSVPDTRHYAYSFDSLARTTEAFVEALGLKRYALYVFDYGAPVGFRLALAHPDRVTAIVSQNGNAYEEGLGEAWAPFQQYWAAPNSENRKALLSALTLETTHWAYTHGLPNPQAVAPESYQLDAALMARPGNSEVQLDLFLDYASNLKRYPAFQAYFREVKPRLLAIWGKYDQLFIPAGAHAFKRDNPNAVVKLLDASHFALETHVEEIAAEMHVFLRS

SEQ ID NO: 47882 - protein, 503 aa, Hordeum vulgare subsp. vulgare
MDLRVAAPASVAAAARRGALGCARVRPLQGRRQCRPSVRVSVATTESAAAAAAVSASADEDAETTNPRTVVAVILGGGAGTRLFPLTKRRAKPAVPIGGAYRLIDVPMSNCINSGINKVYVLTQFNSASLNRHLFRAYNFSNGVGFGDGFVEVLAATQRPGSEGKRWFQGTADAVRQFAWLFDDAKSKDIEDVLILSGDHLYRMDYMDFVQSHRQRDAGISICCLPIDDSRASDFGLMKIDDTGRVISFSEKPKGADLKAMQVDTTLLGLPKEEAEKKPYIASMGVYIFKKEILLNLLRWRFPTANDFGSEIIPAAAREINVKAYLFNDYWEDIGTIKSFFEANLALAEQPSKFSFYDASKPMYTSRRNLPPSMISGSKITDSIISHGCFLDKCRVEHSVVGIRSRIGSNVHLKDTVMLGADFYETDAERGDQLAEGKVPIGIGENTSIQNCIIDKNARIGKNVTIANTEGVQESDRTSEGFHIRSGITVVLKNSVIADGLVI

SEQ ID NO: 47883 - protein, 118 aa, ASPERGILLUS NIDULANS FGSC A4
MRSKFKDEHPFEKRKAEAERIRAKYADRIPVICEKVEKSDIATIDKKKYLVPADLTVGQFVYVIRKRIKLSPEKAIFIFVDEVLPPTAALMSSIYEEHKDEDGFLYITYSGENTFGDC

SEQ ID NO: 47884 - protein, 457 aa, Escherichia coli K12
MQKYISEARLLLALAIPVILAQIAQTAMGFVDTVMAGGYSATDMAAVAIGTSIWLPAILFGHGLLLALTPVIAQLNGSGRRERIAHQVRQGFWLAGFVSVLIMLVLWNAGYIIRSMENIDPALADKAVGYLRALLWGAPGYLFFQVARNQCEGLAKTKPGMVMGFIGLLVNIPVNYIFIYGHFGMPELGGVGCGVATAAVYWVMFLAMVSYIKRARSMRDIRNEKGTAKPDPAVMKRLIQLGLPIALALFFEVTLFAVVALLVSPLGIVDVAGHQIALNFSSLMFVLPMSLAAAVTIRVGYRLGQGSTLDAQTAARTGLMVGVCMATLTAIFTVSLREQIALLYNDNPEVVTLAAHLMLLAAVYQISDSIQVIGSGILRGYKDTRSIFYITFTAYWVLGLPSGYILALTDLVVEPMGPAGFWIGFIIGLTSAAIMMMLRMRFLQRLPSAIILQRASR

SEQ ID NO: 47885 - protein, 505 aa, Polaromonas sp. JS666
MSTLRRIAGQCPSPDTSQIPSCQDPNLMTYPNTQLFIAGEWQEAADGRSLAVFNPATGKEIGRVAHAAKVDLDRALAAAQQGFETWRKVPAFERSKIMRRAAGLMRERAGEIAAVLTQEQGKPLAEAKVEAMAAADIIEWFAEEGFRVYGRVVPSRNLATRQLVLKDPVGPVAAFTPWNFPINQAVRKLSAALATGCSIIVKAPEETPAGPAALIQAFADAGIPAGVIGLVYGNPAEISGYLIPHPVIRKITFTGSTPVGKQLAALAGQHMKRVTMELGGHAPVIVAEDADVELAVKAAGGAKFRNAGQVCISPTRFLVHESIRNDFAAALVKHAQGLKVGDGLGEGIQMGPLANPRRLTAMAEFTQDAVQRGAKVAAGGERIGDLGNFWAPTVLTDVPLDAKVFNDEPFGPMAAIRSFNTLDEAIAEANRLPFGLAGYAFTRSLKNAHALSQHVEVGMLWINQPAAPWPEMPFGGVKDSGYGSEGGPEALEAYLNTRAVSIMNV

SEQ ID NO: 47886 - protein, 632 aa, Solibacter usitatus Ellin6076
MCGIVAVYDAEGAGASAEVAAGLKTLRHRGPDAQHVWLSPDGAICLGHARLSIIDLAHGDQPLANEDESIHCVVNGEFYDFERIRRGLEGRGHRFRTHSDSEILLHLYEDLGVECLRELRGEFAFVLWDGRRRVLMAARDRFGIKPLFYSRTGERLLFASEVKALHAAGVPAAWDEQGFLETFSAMYASSPTLFRHVSAIPPGHYLLSRDLGCSLHKYWDFEFPAEGNLPERRDEECVAEFGAVLDEAVRLRLRADVPVGCYLSGGIDSCSVLALMAKHAPGRVRAFSLSFDHELYDEGPIAREMAQRTGAEFTMIPVSHAGMAADLSDALWHNESFFLNAGSAAKFALSRAVRDAGYKVVLTGEGSDEVLAGYAFFRQDMIRHASNNGGAAEAIERLRAANPASGGLMFTTKQVTPVAGYVDRLGYFPSFLEARKAGLEALRALLTIAYETDEVLTRLLNRVDIAGQLTGRHVLNQSLYLNNKTILPGYILSALGDRVEMAHSIEARLPFLDHHVVEYTRRIPVDLKIRGTVEKYILREAMKPMLTTTVYKRQKHPFLSPPALLKPDEPLHALLQDTLRGRALDRVPYLRRTEVAGFLDRAGGLDVAGKIAAEFPLMMMLSACLVAERFGL

SEQ ID NO: 47887 - protein, 141 aa, Brassica napus
MESSSTLLKSSNQRKSPSSPTRKPPRQKRKTTTTTSNNKPIKVRYISNPMRVETCASKFRELVQELTGQNAADLPPGPTTFAAKDPHKKEINPEPLDEGICEYYSPMDDEVFNAPQMSAALSAFFSSGFYNVNALESIGSL

SEQ ID NO: 47888 - protein, 1022 aa, Saccharomyces cerevisiae
MIKVDCNNQELSNNKQERSSSVTSASSHYIGLPQEAQINGEPLQRANVGSPATGVNYHNEMEMLSSEQFLEELTANATHAANSGIPPANNPVSSGSTAQRPSVEEFFSAPSARVCSPSQEASASSISASRSSAHHNDLSSSLMKNPNLSFDSHPPRVRSSSKSAVITPVSKSVPDVDPAVVDVAKVREEFQQQASLPSMKRVSGSTAGDSSIASSSSNLRYSQQFQDNFIEDTDSEDDIDSDLETDATKKYNVPKFGGYSNNAKLRASLMRNSYELFKHLPWTIVDSDKGNGSLKNAVNIAVAEKTVKEPVSWVGTMGIPTDELPHEVCHKISKKLEQDFSSFPVVTDDITFKGAYKNYAKQILWPTLHYQIPDNPNSKAFEDHSWDYYQKVNQKFSDRIVSVYKPGDTIWIHDYHLMLVPQMVREKLPKAKIGFFLHVSFPSSEVFRCLANRERILEGIIGANFVGFQTKEYKRHFLQTCNRLLAADVSNDEVKYHCNIVSVMYAPIGIDYYHLTSQLRNGSVLEWRQLIKERWRNKKLIVCRDQFDRIRGLQKKMLAYERFLIENPEYIEKVVLIQICIGKSSDPEYERQIMVVVDRINSLSSNISISQPVVFLHQDLDFAQYLALNCEADVFLVDALREGMNLTCHEFIVSSFEKNAPLLLSEFTGSSSVLKEGAILINPWDINHVAQSIKRSLEMSPEEKRRRWKKLFKSVIEHDSDNWITKCFEYINNAWESNQETSTVFNLAPEKFCADYKASKKHLFIFKISEPPTSRMLSLLSELSSNNIVYVLSSFTKNTFESLYNGVLNIGLIAENGAYVRVNGSWYNIVEELDWMKEVAKIFDEKVERLPGSYYKIADSMIRFHTENADDQDRVPTVIGEAITHINTLFDDRDIHAYVHKDIVFVQQTGLALAAAEFLMKFYNSGVSPTDNSRISLSRTSSSMSVGNNKKHFQNQVDFVCVSGSTSPIIEPLFKLVKQEVEKNNLKFGYTILYGSSRSTYAKEHINGVNELFTILHDLTAA

SEQ ID NO: 47889 - protein, 459 aa, Shewanella oneidensis MR-1
MKHSGFQAKRLIQLALPVLIAQVTQTMMGFIDTVMAGRVSAVDMAAVAVGTSLWLPAILFVQGLLMAFTPLFAHHNGANNQKAIQPLAFQGAYLALIGGLGVMVFLASAPLVLSHMNLEPQLYNLTIGYIDGILWGAPAFVLYQVLRGCSEGISYTLPTMVIGFVGLAVNIPANYIFIYGHFGIPAMGGAGCGIATALVFWAMLIAMAIYMQFHKKFAALAPFSQFHRPDFATMKKMTKLGLPIAMALFFEVSLFAIIALLLAPLGATVVASHQIALNFSAIVFMLPLSIGIAVSIRIGYYLGRDRADISAVVAKVGLLLALSLALSTAILTVLFRFQIAELYNSDPEVVVLAGSLMLMAALYQLSDSVQVVAAGALRGYKDTRSAFYITLFSYWGIGMSLGYTLAYTDFIVPAMGAHGFWTGLIAGLTSAALLFFIRLRYIQKHRVHLSLIEGDSVHH

SEQ ID NO: 47890 - protein, 173 aa, Glycine max
MAELVARTGRHQQRYEHGYRLIAGCVPFRYKDDCGDSCSEKIVEVLMINSTSGPGLLFPKGGWENDETVEEAAVREAIEEAGVRGDLMDFLGYYEFRSKTLQDECSPEGLCKAAMFALFVKEELESWPEQSTRKRSWVAVSEALANCRHAWMRDALHCFCKWHEECKGGSSLN

SEQ ID NO: 47891 - protein, 573 aa, Cryptococcus neoformans var. neoformans JEC21
MSFAEYIPKADDPISVPRPQLESSFQSLPDTAGPTAELQTRTSPVKISFGQPSGGAVKKGWKSISPKKKARVSLFDEDEEEIQGAKGEKEDKKEVMPEKEQDIMGEALPHPDTLIHRLTLASTRYTTLLTSLSAPLRAAFDSFSTLPSSPPPPPIDLFLDEYLGRKARDDEVKRVEEVWDAKKEWEREEEMGRRYLEEVGKGGRVEGVNVAPAEPGGARVSPAAVVVAPKPEPELAPIPVSGTELQAPAPGAEPHPQTQKVPIPLPPAATLVYQKLAAVGEGTYGKVYKALSLITHQPVALKRIRMENEKDGFPVTAMREIKLLQMLQHENVLRLVEMVVERGGVYMVLEYMEFDLTGLLAHPEIKFSPANIKSLSHQMLSGLSYLHRQSILHRDMKGSNILVNSRGELKLADFGLARVYAKKRREDYTNRVITLWYRSPELLMGETIYGPEVDMWSAGCIILELYTTKPIFQGSDELNQLEVIYALLGTPTEAEWPSVKELPWYELVKPKEEIGSKFRTSFAKWLSPAALDLVEGLLFYDPSQRLLADSALQTDYFLMEEPKMEKPTQYVPF

SEQ ID NO: 47892 - protein, 462 aa, Geobacter metallireducens GS-15
MSRLGVIIDLAICCHRHKEPAHPLQAKYSASRGTPTVTQTGTTAVTDADRIVELEHLLVELKAELAERKNIERDLKRAKVSAEAACHSKEDLLALVSHEIRSQIQMLTGAVELLRETPLDKKQTEYLNAFNHAGEFLLSLVNDLLDNSRLDAGRIHLDQIEFPFRELLERTAQLIAWQAGRKGLELEYHLSPDIPAQLVGDPKRLQQVILNLAGNAIKFTEQGKIIITVEPEASSLASQEMQLIFTIQDTGIGIPGDKLEEIFERYAQASPATFRTYGGTGLGLNIAKRLVGLMGGTIRVTSKEGKGTSFVFNARLGVTPPLLSSAVERRKSKSLPERSLRILLAEDAAEIRMLLGAFLGTTSHAVDMAHNGEEALKKFTSSNYDVIIMDIQMPVMDGLSATRKIREWERTHDRTPVPVVALTAGPERSDYLRAREAGCTTHLAKPIKKELLLNTISAVVLQ

SEQ ID NO: 47893 - protein, 374 aa, uncultured archaeon GZfos17F1
MDEKTIGSTLYDLKSKDTPYERVLSSMCTYPHPVAVAAHQQFIETNLGDPGLFAGTAEIEHEVVRMMGTLFGNPDAHGYVTTGGTESNIQAIHAIKTARKVRDPNIIVPASAHFSFDKVADILGIDVLKADLDPEFRADISSVEDLINETTIGIVGIAGTTEFGQIDPIKELSDLALSKNIFLHVDAAFGGFVIPFLTEKYEFDFTLPGVTSIGADPHKMGFATIPSGGLLFQDSSYLNRLSVDTPYLTVNSQQTLSGTRSGASAASAYAVFKHLGRTGYERIVQRCMELTYELVARASESGIEPLIDPVTNVLVLDVPDADSVRSALKKRGWDVSITRDPRALRLVIMPHISSENLNLFADDLADVVKWMSAN

SEQ ID NO: 47894 - protein, 588 aa, GIBBERELLA ZEAE PH-1
MNPIMVESPHKDGRSSDEEKNTAIPQTESAARPEGSDFESEGEYQEGIERVRAITSVWTKKTLVSMFLMLYLISFVDMIMNYVDSALNPYITSSFGAHGLLNIGSILASIIGACAPLPLAKAIDVWGRVEGFAFMMVVCLVGMIMKATCTTVQMYIGAHILYWVGHIGVMYVIGVMLADMTTLTNRAFIYGINTTPRIVATFASPEIATGFYEKLNFRWAFGAFAIIIAACSIPAMATMIYMFRSATKQGVITRQRSNRTIFQSFKFYFIEFDIIGILLLCACISCLLLPYSLAPYAPKVWATPYIIALEVLGVVLIPIFYIWEAKVAPVQFLPFKYLKQGTIIGSCLLNAIMFLSTFSWNAYFGSYLQVVNRLSISNANYVLNAYSLTSSVIAPGVGWFVARTGNIKWTAMAGAPIMLLGTALIIPFRKEDTNVGLLALTQILVGFGAGVFSTVDQVAVMAPVTHQYLAVTSALSGLFGGVGAGIGYAIAGAFWNNVMPVQLAQRLPESAQANASVIFGSIEVQKSFADGSLEREAIVGAYAHTMRLMAITGVATMPLCVLSIIIWRNINVKKVEEEKGKQTKGMVF

SEQ ID NO: 47895 - protein, 308 aa, Betula pendula
MAHKSKILIIGGTGYIGKFIVEASAKSGHPTFALVRESTVSDPVKGKLVEKFKGLGVTLLHGDLYDHESLVKAFKQVDVVISTVGHLQLADQVKIIAAIKEAGNIKRFFPSEFGNDVDRVHAVEPAKTAFATKAEIRRKTEAEGIPYTYVSSNFFAGYFLPTLAQPGLTSPPREKVVIFGDGNARAVFNKEDDIGTYTIRAVDDPRTLNKIVYIKPAKNIYSFNEIVALWEKKIGKTLEKIYVPEEKLLKDIQESPIPINVILAINHSVFVKGDHTNFEIEASFGVEASELYPDVKYTTVEEYLQQFV

SEQ ID NO: 47896 - protein, 485 aa, Burkholderia pseudomallei K96243
MTPLAAQSATAAPNVTTTPAATGAVPAARAGLPDFADLVERVGPAVVNIRTTANVPADTRGALPPGLDNGDMSEFFRRFFGIPLPQGPGGQKNAPSTPDAPDTEQNRGVGSGFILSPDGYVMTNAHVVDDADTIYVTLTDKREFKAKLIGVDERTDVAIVKINASSLPTVAIGDSNRVRVGEWVVAIGSPFGLDNTVTAGIVSAKGRNTGDYLPFIQTDVAVNPGNSGGPLINMQGEVIGINSQIYSRTGGFMGISFAIPIDEAMRVAEQLKASGKVTRGRIAVAIGEVTKEVADSIGLPKAEGALVSSVEPGGPADKAGLQPGDIILKFNGRPVEAASDLPRMVGDTKPGAKATVTVWRKGQSRDLPITIAEFPADKAAKADSRQAPQQKPRSSALGLTVSDLSPEQLKTLKLRNGVQIDAVDGPASRAGLQRGDIVLRVGDVDITSAKQFVDVTSKLDPQRAVAVLVRRGENTQFIPIRPRQK

SEQ ID NO: 47897 - protein, 403 aa, Polaromonas sp. JS666
MNLNFHPAGRHFLQIPGPSPVPDRLLRAMSYPTIDHRGPEFGALGRKVLSGIKDIFKTRHPVVIYPASGTGAWEAALVNTLSPGDAVLMFETGHFASLWNKMALRLGLKPEFIGLPGTEGWRNGVQADMIEQRLRNDAQHQIKAVCVVHNETSTGVTSNIAAVRRAIDAAKHPALLLVDTISGLASADYRHDEWGVDVTISGSQKGLMLPPGISFNALSPKAVAASRDALLPKSFWAWDEIVEMNQTGYWPYTPNTNLLYALSEALDMISAEGLPQVFARHERLGKACRNAVEAWGLEIQCADPAVYSPVLTGVMMPEGVDADRVRQIVYQHFNMSLGAGLGKVKGRMFRIGHLGECNDLTLLAALAGCEMGLKLAGVRLRESGTSAAMEFLAASAQPTATLG

SEQ ID NO: 47898 - protein, 621 aa, Listeria innocua Clip11262
MCGFVGCVHDRITEITGADKETFRQMNSMITHRGPDDEGYFTDDHVQFGFRRLSIIDVENGHQPLTYENERYWIIFNGEVYNYVELREQLVAEGMTFETESDTEVIIATYAKYKEKTAERLRGMFGFVIWDKQEELVYGARDPFGIKPFFYAEEDGKLFMGSEKKSILHALKEKELDEVSLQNYMTYQFVPEPDSLTKNVKRLEPGHQFTKKIGQPMEITTYWKASFAPVTKSEDAWIKEVRDVMYDSVKMHMRSDVPVGSFLSGGIDSSIIAAIAKEYHPAIKTFSVGFERDGFSEIDVAKETADKLGVENISYVISPEEYMKELPKIVWHMDDPLADPAAIPLYFLSREARKQVTVALSGEGADELFGGYNIYNEPNSLAMFNKMPGVFKSMLNSVARIMPEGMRGKSFLERGTTPMEERYIGNAKMFTEKEKQILLPKYQSGHDYTNITDPFYAETKNYHPVERMQYIDIHTWLRGDILLKADRMTMANSLEVRVPFLDKEVYNVARNIPDTMKTTNGTTKYILRKAAATFVPEHVLNRRKLGFPVPIRHWLKDEMNAWVKNIIKESPTDHLINKQYVLGLLDDHCAGKFDYSRKIWTVVIFMIWYDVYVADKYDFGK

SEQ ID NO: 47899 - protein, 462 aa, Bradyrhizobium japonicum USDA 110
MAEFDVDLFVIGGGSGGVRAARIAAGHGARVMIAEEYRMGGTCVIRGCVPKKLFVIGSHVRHEIEDAAGFGWTIPSMSFDWATLIANKDKEIARLEAAYTTNVEKSGAQIVKSRAVIEDKHTVRLLENDRKITARYILIATGGAPNHGASIPGIEHVISSNEAFHLKTLPKRIVIQGGGYIALEFAGIFAGYGSDVTVIYRGDNILRGFDEDVRTHVRSEMEKQGITILTGCTVAKVDRHGEEFTTHLSNGSSVASDQVMFAIGRHPSVANLGLEKACVAINPKNGGIAVDHFSKSSVDSIYAIGDVTHRHNLTPVAIREGHAFADTVFGKREVRVDHAYIPTAVFSQPEVGTVGLTETEARAQFSHVDIYKTTFRPIKATMSGRDTRVLMKLVVDGTSDRVLGCHIVGDAAAEITQAVAIAVKMKATKADFDATIALHPTAAEELVTMRTPTARHVRQAAE

SEQ ID NO: 47900 - protein, 204 aa, Zea mays
  misc_feature (19)..(19): Xaa can be any naturally occurring amino acid
  misc_feature (31)..(31): Xaa can be any naturally occurring amino acid
  unsure (1)..(204): unsure at all Xaa locations
RPGRVAGASWLPSRPPPLXCGRAAGGGSGYXQRSVPTPFLTKTYQLVDDPAVDDVISWNDDGSAFIVWRPAEFARDLLPKYFKHNNFSSFVRQLNTYGFRKIVPDRWEFANDCFRRGEKRLLCDIHRRKVTPPAAAATVVATIPMALPVDSPVYSGEEQVLSSSSSPEPPSLLQQQPTPSALVSGDLGEENERLWWENAWFARE

SEQ ID NO: 47901 - protein, 386 aa, Cucurbita cv. Kurokawa Amakuri
MANRVQVEVWNPNGKYRVVSTKPMPGTRWINLLIEQDCRVEICTEKKTILSVEDIVALIGDKCDGVIGQLTEDWGEVLFSALSRAGCKAFSNMAVGYNNVDVNAANKYGIAVGNTPGVLTETTAELAASLSLAAARRIVEADEFMRAGHYDGWLPNLFVGNLLKGQTVGVIGAGRIGSAYARMMVEGFKMNLIYFDLYQSTRLEKFVTAYGEFLKANGEVPVTWRRASSMDEVLREADVISLHPVLDKTTFHLVNKESLKAMKKDAILINCSRGPVIDEAALVEHLKENPMFRVGLDVFEDEPYMKPGLADMKNAIIVPHIASASKWTREGMATLAALNVLGKIKQYPVWADPNRVEPFLDENAPPPAASPSIVNAKALELPVSKL

SEQ ID NO: 47902 - protein, 607 aa, Arabidopsis thaliana
MDTKIGSIDACNPTNHDIGGPPNGGVSTVQNTSPLHSTTVSPCDATLGRYLARRLVEIGVTDVFSVPGDFNLTLLDHLIAEPNLKLIGCCNELNAGYAADGYARSRGVGACVVTFTVGGLSVLNAIAGAYSENLPLICIVGGPNSNDYGTNRILHHTIGLPDFTQELRCFQAVTCFQAVINNLEEAHELIDTAISTALKESKPVYISISCNLPAIPLPTFSRHPVPFMLPMKVSNQIGLDAAVEAAAEFLNKAVKPVLVGGPKMRVAKAADAFVELADASGYGLAVMPSAKGQVPEHHKHFIGTYWGAVSTAFCAEIVESADAYLFAGPIFNDYSSVGYSLLLKKEKAIIVQPDRVTIGNGPAFGCVLMKDFLSELAKRIKHNNTSYENYHRIYVPEGKPLRDNPNESLRVNVLFQHIQNMLSSESAVLAETGDSWFNCQKLKLPEGCGYEFQMQYGSIGWSVGATLGYAQAMPNRRVIACIGDGSFQVTAQDVSTMIRCGQKTIIFLINNGGYTIEVEIHDGPYNVIKNWNYTAFVEAIHNGEGKCWTAKVRCEEELVKAINTATNEEKESFCFIEVIVHKDDTSKELLEWGSRVSAANSRPPNPQ

SEQ ID NO: 47903 - protein, 381 aa, Cucurbita cv. Kurokawa Amakuri
MANRVQVEVWNPNGKYRVVSTKPMPGTRWINLLIEQDCRVEICTEKKTILSVEDIVALIGDKCDGVIGQLTEDWGEVLFSALSRAGCKAFSNMAVGYNNVDVNAANKYGIAVGNTPGVLTETTAELAASLSLAAARRIVEADEFMRAGHYDGWLPNLFVGNLLKGQTVGVIGAGRIGSAYARMMVEGFKMNLIYFDLYQSTRLEKFVTAYGEFLKANGEVPVTWRRASSMDEVLREADVISLHPVLDKTTFHLVNKESLKAMKKDAILINCSRGPVIDEAALVEHLKENPMFRVGLDVFEDEPYMKPGLADMKNAIIVPHIASASKWTREGMATLAALNVLGKIKQYPVWADPNRVEPFLDENAPPPAASPSIVNAKALGI

SEQ ID NO: 47904 - protein, 370 aa, Saccharomyces cerevisiae
MNIQSNNSPNLSNNIVSKQVYYAHPPPTIDPNDPVQISFPTTEVVGHGSFGVVFATVIQETNEKVAIKKVLQDKRFKNRELEIMKMLSHINIIDLKYFFYERDSQDEIYLNLILEYMPQSLYQRLRHFVHQRTPMSRLEIKYYMFQLFKSLNYLHHFANVCHRDIKPQNLLVDPETWSLKLCDFGSAKQLKPTEPNVSYICSRYYRAPELIFGATNYTNQIDIWSSGCVMAELLLGQPMFPGESGIDQLVEIIKILGTPSKQEICSMNPNYMEHKFPQIKPIPLSRVFKKEDDQTVEFLADVLKYDPLERFNALQCLCSPYFDELKLDDGKINQITTDLKLLEFDENVELGHLSPDELSSVKKKLYPKSK

SEQ ID NO: 47905 - protein, 753 aa, Escherichia coli K12
MSQHNEKNPHQHQSPLHDSSEAKPGMDSLAPEDGSHRPAAEPTPPGAQPTAPGSLKAPDTRNEKLNSLEDVRKGSENYALTTNQGVRIADDQNSLRAGSRGPTLLEDFILREKITHFDHERIPERIVHARGSAAHGYFQPYKSLSDITKADFLSDPNKITPVFVRFSTVQGGAGSADTVRDIRGFATKFYTEEGIFDLVGNNTPIFFIQDAHKFPDFVHAVKPEPHWAIPQGQSAHDTFWDYVSLQPETLHNVMWAMSDRGIPRSYRTMEGFGIHTFRLINAEGKATFVRFHWKPLAGKASLVWDEAQKLTGRDPDFHRRELWEAIEAGDFPEYELGFQLIPEEDEFKFDFDLLDPTKLIPEELVPVQRVGKMVLNRNPDNFFAENEQAAFHPGHIVPGLDFTNDPLLQGRLFSYTDTQISRLGGPNFHEIPINRPTCPYHNFQRDGMHRMGIDTNPANYEPNSINDNWPRETPPGPKRGGFESYQERVEGNKVRERSPSFGEYYSHPRLFWLSQTPFEQRHIVDGFSFELSKVVRPYIRERVVDQLAHIDLTLAQAVAKNLGIELTDDQLNITPPPDVNGLKKDPSLSLYAIPDGDVKGRVVAILLNDEVRSADLLAILKALKAKGVHAKLLYSRMGEVTADDGTVLPIAATFAGAPSLTVDAVIVPCGNIADIADNGDANYYLMEAYKHLKPIALAGDARKFKATIKIADQGEEGIVEADSADGSFMDELLTLMAAHRVWSRIPKIDKIPA

SEQ ID NO: 47906 - protein, 435 aa, Glycine max
KSLAEIRLGSSGTLPLLMERSGSLNSSQHVIEIAGSADASTSSASHHDRHFNGTNVTQHEERISGARMPLSQPSVSATSVSNGSNSRNSSFIRRGDTRRNRSPVHSGLWISIELVLLLSQIVASIIVLSLSRHEHPRTPLFQWIIGYASGCAATLPLLYWRYYHHNHMQEQESSQSRQTSPRINDPSGTLLFSSRTNGGEDGQSAVASSRSNQPSLLMNRRMKTLVEYFKISLDCFFAVWFVVGNVWIFGGHSSANEAPNLYRLCIVFLAFSCIGYAMPFIFCSTICCCLPCIISILGVREDMSQNRGATSESINALPIYKFKMKKNKRNGNGNSAAAEGGVVAAGTEKEHVISGEDAVCCICLAKYENNDELRELPCSHLFHKDCVDKWLKINALCPLCKSDVGENLTGSVSGEDASQQQGESRVENGLTNTSV

SEQ ID NO: 47907 - protein, 568 aa, Neurospora crassa
MKFVLVSGASSCGLLLKTLGLKVTAIKIDPYINVDAGTMNPKEHGECFVLHDGGETDLDLGNYERYLGVDLARDNNITTGKVYQQVIENERKGKYLGRTVQVVPHVIDAIIDTINRVSRVPVDKSGEEPDVCIIELGGTVGDIESMPFVEALTQLRHRAGKNNFINIHVSYVPVVNGEQKTKPTQHAVKSVRSAGLIPDLIACRCEKPLEQGTINKVASSCQVEVNQVLAVRDMPTIYQVPLLLEEQGLLRELKETLKLDDVKLSPARVSQGQEVWAKWQKIVPLGYAETVDIVLVGKYVELHDAYLSVIKALEHSAMRCGRKLNLIWVDSEHLEEKTQKEDPTKYHKAWHDVCVAKGILVPGGFGHRGTEGMIRAAQWAREQKTPFLGVCLGMQVAVIEAARNLCELKDATSEEFDANAEHRVIIFMPEGSKEKLGGTMRLGTRSTHFQPGSEFSKLRALYGEATTIEERHRHRYEVNPDYIEKLEQSGLIFIGKDDSGERMEVVEIKDHPYYVGVQYHPEYTSRVLDPSRPFLGFVAAAIGCLDQITKEILQDAGFANGSINGAHF

SEQ ID NO: 47908 - protein, 200 aa, Oryza sativa
  misc_feature (191)..(191): Xaa can be any naturally occurring amino acid
  unsure (1)..(200): unsure at all Xaa locations
MATSEEVVAAAPEAAAPEAGLKHKLERKWTFWCDNQSKPKQGAAWGTSLRKVYTFDTVEEFWCLYDQVFKPSKLQINADFHLFKTGIDPKWEDPECANGGKWSITSNSGRKANLDNMWLETMMALIGEQFEDAEDICGVVASVRQWQDKLSLWTKTAANEAAQMSIGRKWKEIIDVNDKITYNFHDDSRSXGSTKGRYTV

SEQ ID NO: 47909 - protein, 460 aa, Pseudomonas putida KT2440
MNAPFAPQRQTRDYQAADAAHHIHAFLDQKALNAEGPRVIVGGERLHLWDSEGKRYLDGMSGLWCTQLGYGRRDLTAAAATQMDQLAYYNMFFHTTHPAVIELSELLFSLLPGHYSHAIYTNSGSEANEVLIRTVRRYWQVVGQPGKKIMIGRWNGYHGSTLAATALGGMKFMHDMGGLIPDVAHIDEPYWYAEGGELTPAEFGRRCALQLEEKILELGAENVAGFIAEPFQGAGGMIFPPESYWPEIQRICRQYDVLLCADEVIGGFGRTGEWFAHEYFGFEPDTLSIAKGLTSGYVPMGGLVLSKRIAEALVERGGVFAHGLTYSGHPVAAAVAIANLKALRDEGIVRQVKDDTGPYLQRILREVFADHPLIGQVQGAGLVAALQFAEHKPTRKRFANENDLAWQCRTFGFEEGVIIRSTLGRMIMAPALIANHSELDELVEKTRIAVDRTARLVGKL

SEQ ID NO: 47910 - protein, 523 aa, Hordeum vulgare subsp. vulgare
MARGGGNGEVELSVGVGGGGGGAAAGAAEPAVQISLGRLILAGMVAGGVQYGWALQLSLLTPYVQTLGLSHALTSFMWLCGPIAGLVVQPCVGLYSDKCTSRWGRRRPFILTGCVLICLAVIIVGFSADIGAALGDSKEECSLYHGPRWHAAIVYVLGFWLLDFSNNTVQGPARALMADLSAQHGPSAANSIFCSWMALGNILGYSSGSTNNWHKWFPFLRTRACCEACANLKGAFLVAVLFLSLALVITLIFAKEVPYKAIAPLPTKANGQVEVEPTGPLAVFKGFKNLPPGMPSVLLVTGLTWLSWFPFILYDTDWMGREIYHGDPKGTPAEANAFQEGVRAGAFGLLLNSVVLGFSSFLIEPMCKRLGPRVVWVSSNMLVCLSMAAICIISWWATQDLHGYIQHAITASKEIKAVSLALFAFLGIPLAILYSVPFAVTAQLAANKGGGQGLCTGVLNIAIVIPQVIIAVGAGPWDELFGKGNIPAFGMASVFALIGGVVGIFLLPKISRRQFRAVSGGGH

SEQ ID NO: 47911 - protein, 314 aa, Zea mays
MATLKVPATVPPVADDCDQLRKAFQGWGTNEALIISILGHRDAAQRRAIRRAYAEAYGEELLRSITDEISGDFERAVILWTLDPAERDAVLANEAARKWKPGNRVLVEIACTRTSAQIFATRQAYHERFKRSLEEDIAAHVTGDFRKLLVPLVSTYRYDGPEVNTRLAHSEAKLLHEKIHHKAYSDDEIIRILTTRSKPQLIATFNHYNDAFGHRINKDLKADPQDEYLRTLRAIIRCFSCPDRYFEKVARQAIAGLGTDENSLTRVITTRAEVDLKLIKEAYQKRNSVPLERAVAGDTSGDYESMLLALLGQE

SEQ ID NO: 47912 - protein, 109 aa, Corynebacterium glutamicum
MAWFFAPEPVMVTADEALKGGRHPVLENPAPHTVLGTPVTGPWKEGQQRIWIGLGCFWGVEQMYWQMDGVEGTSVGYAGGFTPNPTYREVCSGRTGHTEIVEVVYDPSK

SEQ ID NO: 47913 - protein, 628 aa, Silicibacter pomeroyi DSS-3
MDTRTLPAQTVINGVTFNATPGQRPVLVDGTTTISALFQKRCAELGTRTAHREKDLGIWKAYSWADYWQHAKWIGLALRKLGLKRGEVVSILSEDRKEWAWFDMGIQAVGGIASGVYTTDSANQLKYLINDSDSRFLIAENEEQLDKYLQIEGEVPGLLNVIILEDEGLHDLNHPRCMMIDRLYEIGREAEKEEPGAFEAEIAQIRPEDVALLIYTSGTTGMPKGAMLTHENIMAGIEAGAHRLPTEETDEQLCFLPLCHILERDVSIYFPLASKCTVNFAESPETVFANLQEVSPATFTAVPRVWEKIYSQVLILAQEATPSGRAAFGMALRAGMKRAQYLVENKPVPAGVAANFWLWDRLVLRNLRRMLGMDKMRRGGTGAAPISPELLKWYWAIGVPLVEGYGMTETAGIATINTPEENRIGTIGRVVPGIDVRIAEGGEIQVRGLNIFKGYWRNNEKTAESFTDDGWLRTGDIGRMDDDGYVTITGRLKDIIITAGGKNITPAEIESRLKFSHYISDAVIVGDKRKFLTCLIMIDQENVEKFAQDRKVPFSNFASLCAAKEVRELIAAEVAQVNKEFARVEQIKDFRLIDVLLTAEDDELTATMKLKRSFVEKKHAHLIEDMYK

SEQ ID NO: 47914 - protein, 322 aa, Escherichia coli K12
MAKRNNDMDNLDVICIGAAIVDIPLQPVSKNIFDVDSYPLERIAMTTGGDAINEATIISRLGHRTALMSRIGKDAAGQFILDHCRKENIDIQSLKQDVSIDTSINVGLVTEDGERTFVTNRNGSLWKLNIDDVDFARFSQAKLLSLASIFNSPLLDGKALTEIFTQAKARQMIICADMIKPRLNETLDDICEALSYVDYLFPNFAEAKLLTGKETLDEIADCFLACGVKTVVIKTGKDGCFIKRGDMTMKVPAVAGITAIDTIGAGDNFASGFIAALLEGKNLRECARFANATAAISVLSVGATTGVKNRKLVEQLLEEYEG

SEQ ID NO: 47915 - protein, 161 aa, Brassica napus
MCEEKRARGNKNGFFASYVVCSGHREGLRHNRKRSIRRRQEGYADPHTESSKGEITRMVSSLLMSFAPATVRVYATTKGTSGGAKEEKNPLDFVLGYLTKQDQFYETDPILKKVEEKGGTRSGTTGGRGTVRGGKSTAPVPVAPKKNDGGFAGLGGFFNKK

SEQ ID NO: 47916 - protein, 459 aa, Staphylococcus aureus subsp. aureus Mu50
MENNELQRGLSARQIQMIALGGTIGVGLFMGATSTIKWTGPSVILAYLIAGIFLFLIMRAMGEMIYLNPTTGSFATFASDYIHPAAGYMTAWSNIFQWIVVGMSEVIAVGEYMKFWFPELPTWIPGVIAILLLMAANLFSVKAFGEFEFWFALIKVVTIILMIIAGFGLIFFGFGNGGHAVGISNLWTNGGFMPNGIVGFFFALSIVIGSYQGVELIGITAGETKDPQKNIVKAVNGVIWRILIFYLGAIFVIVSVYPWNQLGDIGSPFVATFAKIGITFAAGLINFVVLTAAMSGCNSGIFSASRMIYTLAHKGEMPKIFTKIMRNGVPLYTVVAVSLGILIGALLNVILPLYIDGAKSIFVYVYSASILPGMIPWFMILFSHLRFRKLHPEELEGHPFKMPGGAVTNYLTILFLILVLVGMVFNVETRISVLIGVIFLTIVTIYYFIRYNKNNVKAK

SEQ ID NO: 47917 - protein, 527 aa, Triticum aestivum
  misc_feature (423)..(423): Xaa can be any naturally occurring amino acid
  unsure (1)..(527): unsure at all Xaa locations
MSMEDSTPPAGAGASAGEGASSPSPSRRLPDFLQSVRLKYVKLGYHYLITHGMYLLLTPLIVLIAVHLSTLSPGDVADLWTHLRFNLLSVIACSTLLVFLSTVYFLTRPRSVYLVDFGCYKPGPERRCSRETFMRCSKLTGNFTEANLDFQRKILERSGLGEDTYIPPALVTVPPNPSMELARQEAQVCMFGAIDNMLAKTGVKPKDIGILVVNCSLFNPTPSLSAMVVNHYKLRGNIVSYNLGGMGCSAGLLSIDLAKDLLQVHPNSYAMVVSTENITLNWYFGNNRSMLVSNCLFRMGCAAILLSNKRSDRRRSKYELVHTVRTHKGADDKCFSCVTQEEDDSGKVGVALSKDLMAVAGDALKTNITTLGPLVLPFSEQLLFMVTLVGKKLFKMKIKPYIPDFKLAFEHFCIHAGGRAVLXDEIEKNMDLNRLGNNGAVPRMTLFRFGNTSSSSLWYELAYSEAKGRIRRRDRIWQIAFGSGFKCNSAVWKALRSVNPAKEQNNPWMDEIDTFPVDVPKVSKVAE

SEQ ID NO: 47918 - protein, 322 aa, Escherichia coli CFT073
MAKRNNNMDNLDVICIGAAIVDIPLQPVSKNIFDVDSYPLERIAMTTGGDAINEATIISRLGHRTALMSRIGKDAAGQFILDHCRKENIDIQSLKQDVSIDTSINVGLVTEDGERTFVTNRNGSLWKLNIDDVDFARFSQAKLLSLASIFNSPLLDGRALTEIFTQAKARQMIICADMIKPRLNETLNDICEALSYVDYLFPNFAEAKLLTGKETLDEIADCFLACGVKTVVIKTGKDGCFIKRGDMTMKVPAVAGITAIDTIGAGDNFASGFIAALLEGKNLRECARFANATAAISVLSIGATTGVKNRKLVEQLLEEYEG

SEQ ID NO: 47919 - protein, 347 aa, Escherichia coli CFT073
MKNSKAILQVPGTMKIISAEIPVPKEDEVLIKVEYVGICGSDVHGFESGPFIPPKDPNQEIGLGHECAGTVVAVGSRVRKFKPGDRVNIEPGVPCGHCRYCLEGKYNICPDVDFMATQPNYRGALTHYLCHPESFTYKLPDNMDTMEGALVEPAAVGMHAAMLADVKPGKKIIILGAGCIGLMTLQACKCLGATEIAVVDVLEKRLTMAEQLGATVVINGAKEDTIARCQQFTEDMGADIVFETAGSAVTVKQAPYLVMRGGKIMIVGTVPGDSAINFLKINREVTIQTVFRYANRYPVTIEAISSGRFDVKSMVTHIYDYRDVQQAFEESVNNKRDIIKGVIKISD

SEQ ID NO: 47920 - protein, 503 aa, Panax ginseng
MAIRIPTRQLFIDGEWREPAKKNRIAIINPATEQIIGNIPAATSEDVDIAVEAARRALARNGGSDWASASGAYRAKYLRAIAAKITERKSELAKLETLDCGKPLEEAAWDIDDVAACFEYNADLAEALDGKQKSPISLPMETFKSYILKEPIGVVGLITPWNYPMLMATWKVAPALAAGCAAILKPSELASVTCLELGEVCKEVGLPPGILNILTGLGPEAGAPLASHPHVDKIAFTGSTATGSKIMTAAAQQVKPVTLELGGKSPILVFEDVDLDKAAEWTIFGCFWTNGQICSATSRLLVHESIAAEFLDKLMKWTKNIKISDPLEEGCRLGPVVSGGQYEKVMESISTAKKEGATILCGGARPKHLEKGFFIEPTIISDVTTSMQIWREEVFGPVLCVKTFRTEDEAIELANDTRYGLGGAVISNDLERCERVTKALQSGIVWINCSQPCFCQAPWGGKKRSGFGRELGEWGLDNYLSVKQVTQYVSDEPWGWYQSPSKL

SEQ ID NO: 47921 - protein, 358 aa, Escherichia coli CFT073
MKALARFGKAFGGYKMIDVPQPICGPEDVVIEIKAAAICGADMKHYNVDSGSDEFNSIRGHEFAGCIAQVGEKVKDWKVGQRVVSDNSGHVCGVCPACEQGDFLCCTEKVNLGLDNNTWGGGFSKYCLVPGEILKIHRHALWEIPDGVDYEDAAVLDPICNAYKSIAQQSKFLPGQDVVVIGTGPLGLFSVQMARIMGAVNIVVVGLQEDVAVRFPVAKELGATAVVNGSTEDVVARCQQICGKDNLGLVIECSGANIALKQAIEMLRPNGEVVRVGMGFKPLDFSINDITAWNKSIIGHMAYDSTSWRNAIRLLASGAIKVKPMITHRIGLSQWREGFDAMVDKTAIKVIMTYDFDE

SEQ ID NO: 47922 - protein, 564 aa, Xanthomonas oryzae pv. oryzae KACC10331
MCSIFGIFGLQPGDDLQALRRQALECSQRQRHRGPDWSGVYVDAGAILVHERLAIVDPAGGSQPLLSEDGQLALAVNGEIYNHRELKAELLQPYAFQTGSDCEVINALYREDVPALYLNRLNGIFAFALWDKTEGRVIIARDPIGVVPLYWGHDREGRLRVASELKSLVDDCADAAQFPPGHWYDSATGALSRYYERAWREYAEVEGVQVQLQELREAFERAVHRQLMTDVPYGVLLSGGLDSSLVAAVAARYARHRVEENDTTEAWWPRLHSFAIGLKGSPDLAAAEVAAAALGTVHHGFEYTFEEGLDALPDVIRHIETYDVTTIRASTPMFLLARRIKAMGVKMVLSGEGSDEIFGGYLYFHKAPNAREFHEELVRKLDALNNYDCLRANKSMMAWGVEPRVPFLDREFLDVAMRMDASFKMIDKTSSGAARMEKGVLREAFAGYLPESILWRQKEQFSDGVGYGWIDGLKAHAAANVSERELAAADRRYPVNPPQTKEAYFYRTLFEQFFPGQSAAETVPGGKSIACSSPTAIAWDASFAAMADPSGRAIAGVHAQAMDS

SEQ ID NO: 47923 - protein, 147 aa, Escherichia coli CFT073
MSTIKVRCEQMANKPSAEELKKNLSEMQFYVTQNHGTEPPFTGRLLHNKRDGVYHCLICDAPLFHSQTKYDSGCGWPSFYEPVSEESIRYIKDLSHGMQRIEIRCGNCDAHLGHVFPDGPQPTGERYCVNSASLRFTDGENGEEING

SEQ ID NO: 47924 - protein, 334 aa, Escherichia coli CFT073
MEYMTIKVGINGFGRIGRIVFRAAQKRSDIEIVAINDLLDADYMAYMLKYDSTHGRFDGTVEVKDGHLIVNGKKIRVTAERDPANLKWDEVGVDVVAEATGLFLTDETARKHITAGAKKVVMTGPSKDNTPMFVKGANFDKYAGQDIVSNASCTTNCLAPLAKVINDNFGIIEGLMTTVHATTATQKTVDGPSHKDWRGGRGASQNIIPSSTGAAKAVGKVLPELNGKLTGMAFRVPTPNVSVVDLTVRLEKAATYEQIKAAVKAAAEGEMKGVLGYTEDDVVSTDFNGEVCTSVFDAKAGIALNDNFVKLVSWYDNETGYSNKVLDLIAHISK

SEQ ID NO: 47925 - protein, 347 aa, Saccharomyces cerevisiae
MKAIKLTGHERPLTQVKYNKEGDLLFSCSKDSSASVWYSLNGERLGTLDGHTGTIWSIDVDCFTKYCVTGSADYSIKLWDVSNGQCVATWKSPVPVKRVEFSPCGNYFLAILDNVMKNPGSINIYEIERDSATHELTKVSEEPIHKIITHEGLDAATVAGWSTKGKYIIAGHKDGKISKYDVSNNYEYVDSIDLHEKSISDMQFSPDLTYFITSSRDTNSFLVDVSTLQVLKKYETDCPLNTAVITPLKEFIILGGGQEAKDVTTTSANEGKFEARFYHKIFEEEIGRVQGHFGPLNTVAISPQGTSYASGGEDGFIRLHHFEKSYFDFKYDVEKAAEAKEHMQEAN

SEQ ID NO: 47926 - protein, 765 aa, Listeria innocua Clip11262
MVKAISSNLGYPRLGEKREWKRALEKFWNGAISEEELLAETKALRLHALKKQQDKGIDLIPVGDFSFYDQVLDTSVTFGIIPKRFQHDGGKVSLNTYFDIARGKSDAVASEMTKWFNTNYHYIVPELAEADPKVLDNRALYYYEEAKNELGIEGKPVLVGPVTYLKLGKGSDAESFEILLDKFIPAYIEILKELETAGATWVQIDEPYLATSFDKKEIALFEKVYKAFHDAVPNLKIELQTYFESLDYYEEVVNLPVAAVGIDFVHDHGDSIKALKAHGFPQNKYLAAGVIDGRNVWRSDLDAKLALLTDIAHYVAEDKLIVQPSNSLLHVPVTKLSEPDLDEVILGGLSFADQKLDEIAILTKALTEGAESVAAELNEAREAVKALNESSHRNNLEVQAAIANLENVRVDRELPFAERIKLQHEWLKLPLFPTTTIGSFPQSPEVRKTRADWLKGNITDAEYNAFIEKETARWIKIQEDLDIDVLVHGEFERTDMVEYFGQKLAGFQATKFGWVQSYGSRAVRPPLIYGDVAFTEEITVKESVYAQSLTKRPVKGMLTAPVTIINWSFVRDDVPESVVANQVGLALRKEVEALERNGIKVIQVDEPALREGLPLKQARWQKYLDDAVYSFKLTTASVQNDTQIHTHMCYSDFDDIIDTISALDADVISIETSRSHGEIISTFEEVTYDKEIGLGVYDIHSPRVPTVSEIQDNIRRALRAIDAKQFWINPDCGLKTRKEPETIAALQDMIKATKEVRAEYQVLEK

SEQ ID NO: 47927 - protein, 706 aa, Kluyveromyces lactis NRRL Y-1140
MVSHLWLLQYLILSIPLVLGAPPRANPNQGNAADPESKLPSPLTEANFDETIAKNLHIIEFFSPYCHHCKQLAPIWEKTYNGFYDESLQLNISLHQVDCIESGDLCMKEGINSYPTIRLYGPEGFIKAFPRGLERTETTLLNFARKEALDADNLDITKLSSKSKLLNDGELLKILSEPQTEPYFVSFWPTSDFEDIESSYQFKNCEDCSLFQRIWKLVSNKADSIGINTVHFNCVNPTDSSKNEAICRELSFDTLTQKRNSRLERAPEFALILPNRKSGSFIKFPFGPKRVDSESLIDFATRTLHNSNVPNIDQDEIEAFVKEPKSDILEANAEADKILLVFNYNPETVVPEDMQFLEQLIDPLGYIPNIYLYKNTDDLKKLSHTLYQTLYKDYNTDQRTEINEDHFITTSITQSPTFFIFKKSTFTPIIFPGYSTTETRNLDFILDWLTINSLPTVTEITSKNFEALKGFEQDFYDKLVIQLVNKKNNKFEEGSKKIVEGLRVAAHSYEILRNEAVYEGLKTAREEKKKLVQKLKNKNAPSVDIVTAMRKEINYSYNHKVIFAYLDINESPSLLNNKGLNVYFRKFKTGDIIVVDKQKAIYYEKDASGQYITLETLPEVLSILNFPARHPDLRIERIFLRTPLSGLLRLIDYLREFSGINYLFVVVTFLALWKIPRTIHHYKLKRRYAAKRDTHGILGKEAKLMD

SEQ ID NO: 47928 - protein, 60 aa, Nicotiana tabacum
TVVSIPNGPSALAVKEAAWGLARYAAISQDSGLVPIVEPEILLDGEHGIDRTFEVAQKVW

SEQ ID NO: 47929 - protein, 491 aa, Oryza sativa
MDPCKFRPSSSFDTKTTTTNAGAPVWNDNEALTVGPRGPILLEDYHLIEKVAHFARERIPERVVHARGASAKGFFECTHDVTDITCADFLRSPGAQTPVIVRFSTVIHERGSPETIRDPRGFAVKFYTREGNWDLLGNNFPVFFIRDGIKFPDVIHAFKPNPRSHVQEYWRVFDFLSHHPESLHTFFFLFDDVGIPTDYRHMDGFGVNTYTFVTRDAKARYVKFHWKPTCGVSCLMDDEATLVGGKNHSHATQDLYDSIAAGNFPEWKLFVQVIDPEEEERFDFDPLDDTKTWPEDEVPLRPVGRLVLNRNVDNFFNENEQLAFGPGLVVPGIYYSDDKMLQCRVFAYADTQRYRLGPNYLMLPVNAPKCAHHNNHYDGAMNFMHRDEEVDYYPSRHAPLRHAPPTPITPRPVVGRRQKATIHKQNDFKQPGERYRSWAPDRQERFIPLRRRVAHPKVSPELRAIWVNYLSQCDESLGVKIANRLNVKPSM

SEQ ID NO: 47930 - protein, 452 aa, Novosphingobium aromaticivorans DSM 12444
MSVPSISDLRGTNMIRKMIGGLAGTGASLFAATAAHAQEAAAATVDKGDTAWMLTSTILVLMMILPGLALFYGGLTRTKNMLSTMTQIGAVACFAMLLWVMYGYGLAFGPEGNAFISWGKWFLAGVTPASQAATFTAGVEIPEYVFICFQMTFAAITIALVLGSVVERMKFSAVMAFAAVWLTIVYFPIAHMVWAAGGLFFDMGALDFAGGTVVHINAGVSALVACLILGKRIGFQKDIMAPHSLTMTGIGTGLLWVGWFGFNAGSALEANGSAALAMINTFVATASAGLFWMLAERLSGHKGSALGFCSGIIAGLVAVTPAAGNSGPFGAIVLGGLASVVCFYMVTVVKPKLGYDDALDAFGIHGVGGMIGAVGTAVVYAPSLGGPGAADYDMGAKLVVQIMAVGTTIVWAAIGTVVAMYVAKALTGLRVTEEVEREGLDLGEHGERAYNY

SEQ ID NO: 47931 - protein, 519 aa, Anabaena variabilis ATCC 29413
MLNVLLIDDNINDRLLAICSLKKEFADLQIAEIKNPQELAQALENGVFDVVVTDYQISWIDGISILRTIKQHYPNCPVVMFTSSGSQEIAVEAMKSGLDDYVLKSPKSSSRLATAVRLAIEQAETRANAEAANRLKDEFLVTLSHELRTPLNAILGWAQILLKQTPNSSTTKRALETIVRNAKTQARIVEDILDISGIITGKFSLQVAPVDLVAIINTVIASVNPAIATKAIHLEAKLAPLDGQVLGDETRLQQIFGNLLLNAVKFTPEHGYILLQVKQVNIDAVITVKDTGIGINAEFLPFVFDRFSQADSSTTRSYRGLGLGLAIARQLTELHGGTIEATSLGEGYGATFTVKLPLMSKQFLETNYLTEVTYIDSNNIQDDCQVRNNKLCLTDLRILVVDDEVDTRDLLISILEQEGSEVITAASAQEAMVAVCNSQFDLFVFDIGLPQEDGYTLLTRVRQLEQQHNREIPAIALTAYAAKEYQQQALAVGFQKYLAKPVEPDELVVAISSLLEINE

SEQ ID NO: 47932 - protein, 426 aa, Salmonella enterica subsp. enterica serovar Paratyphi A str.
MSKSENLYSAARELIPGGVNSPVRAFTGVGGTPLFIEKADGAYLYDVDGKAYIDYVGSWGPMVLGHNHPAIRNAVIEAAERGLSFGAPTEMEVKMAELVTNLVPTMDMVRMVNSGTEATMSAIRLARGFTGRDKIIKFEGCYHGHADCLLVKAGSGALTLGQPNSPGVPADFAKHTLTCTYNDLTSVRAAFEQYPQEIACIIVEPVAGNMNCVPPLPEFLPGLRALCDEFGALLIIDEVMTGFRVALAGAQDYYGVVPDLTCLGKIIGGGMPVGAFGGRRDVMDALAPTGPVYQAGTLSGNPIAMAAGFACLNEVAQPGIHETLDELTTRLAEGLCEAAQEAGIPLVVNHVGGMFGIFFTDAETVTCYQDVMACDVERFKRFFHLMLEEGVYLAPSAFEAGFMSVAHSEEDINNTIDAARRVFAKL

SEQ ID NO: 47933 - protein, 589 aa, Bacillus subtilis
MMEYAAIHHQPFSTDAYSYDGRTVHIKIRTKKGDADHIRFIWGDPYEYNDGKWSANEQPMRKIAATEMHDYWFAEVVPPFRRLQYAFVVTDDHEDIFFGSSGVCPYNEKTLETIHYYFKFPFVHEADTFQAPEWVKSTVWYQIFPERFANGREDLSPKNALPWGSKDPGVNDFFGGDLQGIVDKLDYLEDLGVNGIYLTPIFSAPSNHKYDTLDYFSIDPHFGDPEIFRTLVSQLHQRGMRIMLDAVFNHIGSASPQWQDVVKNGDQSRYKDWFHIHSFPVTDDNYDRFAFTADMPKLNTANPEVQKYLLDIALYWIREFDIDGWRLDVANEVDHVFWKTFRQAVSTEKPDVYILGEIWHSAEPWLRGDEFHAAMNYPFTEPMIEYFADQTISASRMAHRVNAHLMNGMKQANEVMFNLLDSHDTKRLLTRCRNDEKKARALLAFMFAQTGSPCIYYGTEIGLDGENDPLCRKCMVWEKEKQNQDMLQFMKRLIALRKQENTLLTEGHLEWNLLDDKNDFISFSRTLDEKILIYFFNQGNVVQHISLRELNIDRNNKICDAWTEQPLHYHDVIAVQPGEFLILSAAAPV

SEQ ID NO: 47934 - protein, 476 aa, Arabidopsis thaliana
MEDDGYYLDTDLDLSFTSTATDRTFTSSSARSSLARSSLTLSFNDRLSTATTPSTTTSSAATTLHHRRYDPHWTSIRAATTLSSDGRLHLRHFKLVRHLGTGNLGRVFLCHLRDCPNPTGFALKVIDRDVLTAKKISHVETEAEILSLLDHPFLPTLYARIDASHYTCLLIDYCPNGDLHSLLRKQPNNRLPISPVRFFAAEVLVALEYLHALGIVYRDLKPENILIREDGHIMLSDFDLCFKADVVPTFRSRRFRRTSSSPRKTRRGGGCFSTEVEYEREEIVAEFAAEPVTAFSKSCVGTHEYLAPELVAGNGHGSGVDWWAFGIFLYEMLYGTTPFKGGTKEQTLRNIVSNDDVAFTLEEEGMVEAKDLIEKLLVKDPRKRLGCARGAQDIKRHEFFEGIKWPLIRNYKPPEIRGLVKKTKAHAGHVTAAVTPRRNKWLWWALSHLLRSKSLSKSSSKIQSNNNYYHYVGKKL

SEQ ID NO: 47935 - protein, 436 aa, Bacillus anthracis str. Sterne
MNTMQPSAPPHLESTKTIFSNSITKLVVFICWLAILADGYDLGIYGAVLPKLLEDNSWALSPAHAGTIASYALFGMFIGAILVGTITDLIGRKWTLICCLALFSITMGLAALAPSPELFGLWRFIGGIGLGGVIPTASALTVEYSPKKRQSFIYALMFTGYPLGIVLGAILSMFMLEDFGWRIMFGIGMIPLLLIPFIIRYLPESIQFLLSRNRQEEVDKILNRFQIEFYAKDETHQAPSNIRKKNGFLTLFSKEYIKATLLFWITYIMGMFLIYGLNTWLPQMMRQAGYPLGSSLSFLLMLNITAAIGALFAGAIADRIGAKIVISISYLMAAICIGLLTIKPSVSIIYLLIGLAGIGSVGITQILNAYVTQYFPSHIRATSLGWGLGLGRVGAIAGPILVGIIMTMQYDLAWNFYLFSFAGLLAAISVFFIPTK

SEQ ID NO: 47936 - protein, 107 aa, Arabidopsis thaliana
  misc_feature (63)..(63): Xaa can be any naturally occurring amino acid
  unsure (1)..(107): unsure at all Xaa locations
MVLTKTATNNEYVRNMFGYRYVRTTLPKYEIGEYSLPKDAAYQIIKDDLLLDGNPRLNLSSFXLNTWMEPECDKLIMDSINKNYVDMDEYPVTTELQVSPSLDLYIS

SEQ ID NO: 47937 - protein, 457 aa, Sphingobium herbicidovorans
MDEKDRDDSPSALLGEVIDKQSWNALVVTTVLLSTLMMFIDGYDLHTIAFAAPSIMSEWSLSSAAFGLVFAAASFGMLVGGIVFGWIGDRHGRKLGSLAALVVCGLGSLSVLHARDVNLLSLCRFLTGIGIGGLTPLLYALNQELVPHRFRATVVAVIMMGYMAGSASGGAVAAALMPHYGWEPLFWIGGAFSLLLAGVGYVLLPESVAFLSRRAARKAEMATLLRRIDPTITPETVARIATIPDAPQGAASRGLSPLFSGHLSTITPLLWLAYICSSATVFFMISWLPTLMLGAGLSKAESALGLSLFILAGSIGGLVISAVIDRLGVSSITVIPVVGCLLLATLALPNLSSSGYMIAVGICGYFVLGGHQGLNGAAGLLYPSPVRASGIGWALSIAKIGSIIGPLVGGLLLAAELPRMQLMMIIASPLPIFAVSLILLGMAKSRERHARAAPVRD

SEQ ID NO: 47938 - protein, 673 aa, Silicibacter pomeroyi DSS-3
MDLTALRTANPDHWTKATAIRALTLDAIAAANSGHSGMPMGMADVATVLFEKHLKFDAANPTWPDRDRFILSAGHGSMLLYSLLYLTGNPEITLDEVKNFRQMGAKTAGHPENFLAKGIETTTGPLGQGISNAVGFAIAEEIQRAQYGKKVVDHYTYVIAGDGCLMEGVSQEAIGLAGRLELSKLVVLWDNNNITIDGTVDIADRTDQVRRFAASGWHVIEIDGHDPAAIDAALTQAKGSKKPTMIACKTHIALGHAAQDTSKGHGALTDQGQLLAAKEGYGWAHGPFEVPSDVKSAWEAIGSRGAAERAAWEARFAELSERKQAEFTRAYAFEAPKKLAGAIRALKKQVSEDQPKWATRKSSEEVLKVVNPIMTETVGGSADLTGSNNTKTADLGIFLPENRKGRYIHWGIREHGMAAAMNGMALHGGIRPYGGTFMCFTDYARPAMRLAALMKIPSVFVMTHDSIGLGEDGPTHQPVEHLAISRATPNTYVFRPADTVETAEAWELALTFQNSPSVLSLTRQNLPTLRTEHKVKNLTAQGGYVLAEATGKRQVILIATGSEVEIAMQARATLEAEGIGTRVVSMPCMELFAEQDEAYRKRVLPAGPVRVGIEAAMRAGGWDRWLLGERGREAKAGFVGMTGFGASAPAEELYEKFGITAAATVAKVKDLLG

SEQ ID NO: 47939 - protein, 119 aa, Gossypium hirsutum
MAKSSFKLEHPLERRQAESGRIREKYPDRVPVIVEKAERSDIPDIDKKKYLVPSDLTVGQFVYVVRKRIKLSAEKTIFVFVKNTLPPTAALMSAIYEENKDEDGFLYMTYSGENTFGSP

SEQ ID NO: 47940 - protein, 493 aa, Neurospora crassa
MRFSDLLVAAATATAYTMNSQVRLAYHGDNGMMVSWNTFDVVKNPSVQWGLSRDRLDKIATSDVSVTYPTSQTYNNHVLISGLRPDTTYFYKPLQLMNSTTDVFNFTTSREAGDNTPFSVAVVVDLGTMGSKGLTTSAGTGVASTNILQPGEKNTIDSLEANIDNFDFLWHAGDIAYADYWLKEEIHGFLPNTTIQGGAAVYESILNEFYDEMMPITARKPYMVGPGNHEANCDNAGTTDKVHNITYDSSICMMGQTNFTGFKNHFRMPSDVSGGTGNFWYSFDHGMVHFIQLDTETDLGHGFIGPDQTGGSEGFTGVDPVNATMNAQTNWLEADLAAVDRSKTPWVVVAGHRAFYLSNTGDTCPTCKDVFEPLLLKYNVDLVLSGHSHIYERLAPIADGKIDPNELENPSSPWYITNGAAGHYDGLDSLDSPRQPYSRFGLDTSNATYGWSRLTFHNCTHLTHDFVASNNNTVLDSATLFKARTCDQDRRRH

SEQ ID NO: 47941 - protein, 960 aa, Arabidopsis thaliana
  misc_feature (219)..(219): Xaa can be any naturally occurring amino acid
  misc_feature (243)..(243): Xaa can be any naturally occurring amino acid
  misc_feature (271)..(271): Xaa can be any naturally occurring amino acid
  misc_feature (284)..(284): Xaa can be any naturally occurring amino acid
  misc_feature (291)..(291): Xaa can be any naturally occurring amino acid
  misc_feature (296)..(296): Xaa can be any naturally occurring amino acid
  misc_feature (831)..(831): Xaa can be any naturally occurring amino acid
  misc_feature (861)..(861): Xaa can be any naturally occurring amino acid
  misc_feature (874)..(874): Xaa can be any naturally occurring amino acid
  unsure (1)..(960): unsure at all Xaa locations
MAEPEKKRDQPFSQEKDEEKDLYLVHDEHESPLPLTVTSRVNFSDPKFVLGFRVLYMLGDIASGPAYRFTQWLDLVRKRSATYGSSGFPHRLHRIDDMLIQVLSSAGERNTDPKSPPSRQSSEISLWERLGKASTVDIDSSCFSWNMLSSLHHTEHSSSTDHSEEDQSKPLEVTVNSGGVVFFALFNSSSSEDASRKEEAAVIKFASSRMATQSERLGXYEFSKWLGGARFRRLRVIHSCNPXEGPLIKEATEKAQAKATSEGGPGLGEMXTCSELLEALELSXRCLLLMXYVHGXPMLESMSSFETEEKAERAAAALGRILVLDLVIRNEDRLPCRQLRWRGNPANLLLTDRIVSSAKHHECSFDEAFDSAIKRYHPKDYRSIQRERRASSVDSRSRLSISDQMLVSQASDFSDITESPRSYDTGLMSPMSDRSVAADFHLVAIDSGVPRRPPAGKRASDQEIYPRLVELLLNSSQYSSNLLHEITEGSLGYPQAEDGEETSNVRSVVTPVVREFRNGFRAGLRDLQEFHIFLVTLHQKLDVLLRAFFSMMDKTMCADFDREDFAVPESPSHTHGHEVNHYPSPSKDRVPSDNSSDHSESDMQKSVPRTPNSENKEDGSSPKSRESWHGRSGKGGESLSSQRLAAKLRDFHKFAKVDAESNKELDQWNETLRNEVMKLCQENGFNTGFFEGSDNNSCTDAYELKVRLEHILERISLISKAANTEKPSMIQENLFIGGGLAARSIYTLQHLGITHVLCLCANEIGQSDTQYPDLFEYQNFSCLPFDQITDDEDSNIESIFQEALDFIKHGEETGGKILVHCFEGRSRSATXVVLAYLMLQKKLTLLEAWSKLRKVHRRASXPNDGFARILINLXKKCHGKVSMEWRQRKPTMKVCPVCGKNAGLSSSSLKLHLQKSHRKLSSGSVDSAMNMEIQKALEALKLSTGRGSSASSNSFQSHPG

SEQ ID NO: 47942 - protein, 506 aa, Saccharomyces cerevisiae
MPESRLQRLANLKIGTPQQLRRTSIIGTIGPKTNSCEAITALRKAGLNIIRLNFSHGSYEFHQSVIENAVKSEQQFPGRPLAIALDTKGPEIRTGRTLNDQDLYIPVDHQMIFTTDASFANTSNDKIMYIDYANLTKVIVPGRFIYVDDGILSFKVLQIIDESNLRVQAVNSGYIASHKGVNLPNTDVDLPPLSAKDMKDLQFGVRNGIHIVFASFIRTSEDVLSIRKALGSEGQDIKIISKIENQQGLDNFDEILEVTDGVMIARGDLGIEILAPEVLAIQKKLIAKCNLAGKPVICATQMLDSMTHNPRPTRAEVSDVGNAVLDGADCVMLSGETAKGDYPVNAVNIMAATALIAESTIAHLALYDDLRDATPKPTSTTETVAAAATAAILEQDGKAIVVLSTTGNTARLLSKYRPSCPIILVTRHARTARIAHLYRGVFPFLYEPKRLDDWGEDVHRRLKFGVEMARSFGMVDNGDTVVSIQGFKGGVGHSNTLRISTVGQEF

SEQ ID NO: 47943 - protein, 632 aa, Streptococcus pneumoniae
NLSVNAIRFLGIDAINKANSGHPGVVMGAAPMAYSLFTKQLHINPAQPNWINRDRFILSAGHGSMLLYALLHLSGFEDVSMDEIKSFRQWGSKTPGHPEFGHTAGIDATTGPLGQGISTATGFAQAERFLAAKYNREGYNIFDHYTYVICGDGDLMEGVSSEAASYAGLQKLDKLVVLYDSNDINLDGETKDSFTESVRDRYNAYGWHTALVENGTDLEAIHAAIETAKASGKPSLIEVKTVIGYGSPNKQGTNAVHGAPLGADETASTRQALGWDYEPFEIPEQVYADFKEHVADRGASAYQAWTKLVADYKEAHPELAAEVEAIIDGRDPVEVTPADFPALENGFSQATRNSSQDALNVVAAKLPTFLGGSADLAHSNMTYIKTDGLQDDTNRLNRNIQFGVREFAMGTILNGMALHGGLRVYGGTFFVFSDYVKAAVRLSALQGLPVTYVFTHDSIAVGEDGPTHEPVEHLAGLRAMPNLNVFRPADARETQAAWYLAVTSEKTPTALVLTRQNLTVEDGTDFDKVAKGAYVVYENAADFDTILIATGSEVNLAVSAAKELASQGEKIRVVSMPSTDVFDKQDAAYKEEILPNAVRRRVAVEMGASQNWYKYVGLDGAVLGIDTFGASA

SEQ ID NO: 47944 - protein, 323 aa, Xanthomonas campestris pv. campestris str. 8004
MGLLVDGKWQDRWYDTDKSDGRFERSQSHFRHWVTADGRAGPHGEGGFQAAPGRYHLYVSLACPWAHRTLIFRQLKGLASLIDVSVVHWLMGTQGWTFEHGPGVVGDSIHHAKYLYEVYLKADPQYSGRVTVPVLWDRERDTVVSNESADIIRMFNSAFDAVGAAEGDYYPEALRAQIDTINQRVYDTVNNGVYKAGFATTQAAYEEAVVPLFDTLDWLDTCLSTQRYLSGDYLTEADWRLFTTLIRFDAVYVGHFKCNLRRIADYPQLSGFLRELYQMPGIAETVNFQHIKSHYYQSHAMINPTGIVPMGPVLDLDAPHGRG

SEQ ID NO: 47945 - protein, 248 aa, Triticum aestivum
  misc_feature (172)..(172): Xaa can be any naturally occurring amino acid
  misc_feature (177)..(177): Xaa can be any naturally occurring amino acid
  misc_feature (191)..(191): Xaa can be any naturally occurring amino acid
  misc_feature (232)..(232): Xaa can be any naturally occurring amino acid
  misc_feature (240)..(240): Xaa can be any naturally occurring amino acid
  unsure (1)..(248): unsure at all Xaa locations
MAPLGDAVAPEVAAAAPCLVVSFGEMLIDFVPDVAGVSLAESGGFVKAPGGAPANVACAISKLGGSSVFIGKFGDYKFGHMLVEILKKNGVNAKGCLFDQNARTALAFVTLKSNGEREFMFYRNPSDDMLLTEAELNLDLIRRARIFHYGSISLITEPCRSEHVAAMRAVKXTGILXSYDPNVRLPLWTSXPRADRDGIMSIWKDADFIKVSDDEVVFLTQGDRTEEKNVLXSFWLEGLXLLMVTDGE

SEQ ID NO: 47946 - protein, 740 aa, Pelargonium x hortorum
MEACNCFEPQWPADDLLMKYQYISDFFIAVAYFSIPLELIYFVKKSAVFPYKWVLVQFGAFIVLCGATHLINLWTFNLHTRTVEIVMTTAKLMTAAVSCVTALMLVHIIPDLLSVKTRELFLKNKAAELDREMGLIRTQEETGRHVRMLTHEIRSTLDRHTILKTTLVELGRTLGLEECALWMPTRTGLELQLSHTLRQQNPVGYTVPIHLPVLNQVFSSNRAIKISPNSPIARLRPLAGKYVPGEVVAVRVPLLHLSNFQINDWPELSTKRYAMMVLMLPSDSARQWHVHELELVEVVADQVAVALSHAAILEESMRARDLLMEQNVALDMARREAETAIRARNDFLAVMNHEMRTPMHAIIALSSLLQETDLTSEQRLMVETILKSSNLLATLINDVLDLSRLEDGSLQLDIATFNLHAVFRQVFNLIKPIASVKKLFITLNVSPDLPEYVIGDEKRLVQIMLNVVGNAVKFSKEGIISVTAFVAKSESVRDPRAPDFFPVSSDNQFYMRVQVKDSGSGINPQDMPKLFTKFAQSQPVATKNSGGSGLGLAISKRFVNLMDGHIWIDSEGPSKGCTVTFVVKLGIPEGSNEPKLPLMPKVSANNSQTDFPGLKVLLMDENGISRMVTKGLLMHLGCDVTSVSSSEECLRMVSQDHKVVFMDVRVPGLDGHELAVRIHEKFMKRHERPLIVALTSNADKVTKENCLRVGMEGVILKPVSVDKMRNVLSKLLEHRILFEA

SEQ ID NO: 47947 - protein, 364 aa, Nicotiana tabacum
MESSTKSQIPTQSEEERNCTYAMQLLSSSVLPFVLHSTIQLEVFEILAKSNDTKLSASQIVSQIPNCTKPEAPTMLNRMLYVLASYSLFTCSIVEDEKNNGGQKRVYGLSQVGKFFVKNENGASMGPLLALLQNKVFINSWFELKDAVLEGGVPFDRVHGVHAFEYPKSDPKFNDVFNKAMINHTTVVMKKILENYKGFENLKTLVDVGGGLGVNLKMITSKYPTIKGTNFDLPHVVQHAPSYPGVEHVGGDMFESVPEGDAIFMKWILHDWSDSHNLKLLKNCYKALPDNGKVIVVEAILPVKPDIDTAVVGVSQCDLIMMAQNPGGKERSEEEFRALATEAGFKGVNLICCVCNFWVMEFCK

SEQ ID NO: 47948 - protein, 319 aa, Prosthecochloris aestuarii DSM 271
MAKRQAIPSRVSINAVKHMEHNEQVLSERTFKGRKAKKGLRFAVSVTGLIFLVELIGGWVSGSLALMADAGHMATDLFALSISYLAIRLSARPSTKKRSYGYFRIEIIAALINGVILCITALFITIEAWKRISLPKEIDSAQMLVFGIIGLTANIASAIMLHREQKNSVNVKAAYIHILSDLAGSVGVVAGSILISLTRITTIDSIISFIIAILIVQSALKIIREAVDVLMESVPPELDIQEIEEALLNFRHVEGLHDLHVWALTSGVNALSCHLLVKNLDAGQNILVPIHRELKEKYNIDHVTIQLEDERFIAAHNKG

SEQ ID NO: 47949 - protein, 741 aa, Pelargonium x hortorum
MESCNCIEPQWPADELLMKYQYISDFFIAIAYFSIPLELIYFVKKSAVFPYRWVLVQFGAFIVLCGATHLINLWTFNMHSKTVEIVMTTAKIMTAVVSCATALMLVHIIPDLLSVKTRELFLKNKAAELDREMGLIRTQEETGRHVRMLTHEIRSTLDRHTILKTTLVELGRTLALEECALWMPTRTGLELQLSYTLRQQNPVGFTVPIHLPVINQVFSSNHAIKISPNSPIARLRPIAGKYMPGEVVGVRVPLLHLSNFQINDWPELSTKRYALMVLMLPSDSARQWHVHELELVEVVADQVAVALSHAAILEESMRARDLLMEQNVALDMARREAETAIRARNDFLAVMNHEMRTPMHAIIALSSLLQETELTPEQRLMVETVLKSSNLLATLINDVLDLSRLEDGSLQLDIGTFNLHALLREVHNLIKPIASVKKLCISLNVATDLPEYAVGDEKRLVQIILNVVGNAVKFSKEGNISITAFVAKSESLRDPRAPDFFPICGENQFYLRVQVKDSGLGINPQDIPRLFTKFAQTQPVATKNSGGSGLGLAICKRFVNLMEGHIWIDSEGPGKGCTATFVVKLGIPERSSEPKLLLMPKVPANHGQTNFSGLKVLLLDDNGVSRAVTRGLLAHLGCDVTTVSSSDELLRVVSQDYKVVFMDVCMPEVDGFEIAVRIHEKFMTRHERPLIVALTGNIDQVTKDNCTRVGMEGVVLKPVSIDKMRNVLSNLLEHRVLFEAI

SEQ ID NO: 47950 - protein, 432 aa, Listeria innocua Clip11262
MDHSMSKKLHDEALLHIVGGVNSPSRSNKGVGGGIPVTMERANGAYFYDVDGNKYIDYLAAFGPIITGHAHPHITEAITKAAQNGVLYGTPTKHEITFAKMLKEAIPSLEKVRFTNSGTEAVMTTIRVARAYTGRDKIIKFAGCYHGHFDLVLVEAGSGPSTLGIPDSAGVTRSTAEEVITVPFNDLTSFKEALAVWGDQVAAVLVEPIVGNFGMVAPAEGFLEAVNELAHENGSLVIYDEVITAFRFMYGGAQNYLGVIPDLTAMGKIIGGGLPIGAYGGRVDIMEKVAPLGPAYQAGTHAGNPASILSGIACLEVLQEEGLYDRFEKYGSMLKEGIEKAAIKHGIAVTVNQIVGALTVYFTDEPVTNYAEAGATNGDLFGRFFKGMLEEGINLAPSKYEAWFITSAHSEADILETIQAVDTVFGKLVQGK

SEQ ID NO: 47951 - protein, 172 aa, Arabidopsis thaliana
  misc_feature (122)..(122): Xaa can be any naturally occurring amino acid
  unsure (1)..(172): unsure at all Xaa locations
MVEQRYEDGSRLVAGCIPFRYVNSDKDGNSESGKVIQVLMISSSSGPGLLFPKGGWENDETVREAAAREAVEEAGVRGILMDFLGNYEFKSKSHQDEFSPEGLCKAAMYALYVKEELATWPXEHETRTRKWLTIEEAVESCSHPWMKDALVEGFCKWHKEKMVKGEEITGEH

SEQ ID NO: 47952 - protein, 350 aa, Pseudomonas putida KT2440
MNAPLRIALIGAGIMGRQHYQHLRNVPQAQLCAVADPGPQAEAFAAECGVPCFADHRQMLEQVRPEAVIVANPNTLHVATALDCVEAGVPVLVEKPVGVNLDEVRALVEASRRRGVPVLVGHHRRHNPLIAKAHQVINEGKLGRLINVTALWQLQKPDSYFETPWRREPGAGFLLTNLIHDLDLLRYLCGEVVQVQAFTRNDVRGFANEDSAAVLLQFANGALGSLTGSDAVAAPWSWELDAGESPVYPRQDGQPCYLLAGTQGALSIPQLKRWHYAEAGSGWHTPLLQSSESIPAGEALTLQLQHFVRVARGEQAPLIDAADGGRTLALIEAIRQAAQSGRACAPAHIG

SEQ ID NO: 47953 - protein, 200 aa, Arabidopsis thaliana
MESHNVSNSLNLDMEMDQEKAFDYSKRAQWLRAAVLGANDGLVSTASLMMGVGAVKQDVKVMILSGFAGLVAGACSMAIGEFVSVYSQYDIEVAQMKRENGGQVEKEKLPSPMQAAAASALAFSLGAIVPLMAAAFVKDYHVRIGAIVAAVTLALVMFGWLGAVLGKAPVFKSSARVLIGGWLAMAVTFGLTKLIGTHSL

SEQ ID NO: 47954 - protein, 675 aa, Bradyrhizobium sp. BTAi1
MTATALQKPAAKADPAHAEMANAIRFLAIDAVEKAKSGHPGMPMGMADVATVLFSRFMKFDPADPAWPDRDRFVLSAGHGSMLLYALLHLTGYEAVTIDEIKRFRQWGAKTPGHPEYGHTPGVETTTGPLGQGIATAVGMALAERLMNARYGDELIDHYTYVIAGDGCLMEGISHEAISLAGHLRLNRLIVLFDDNGISIDGSTGLACSDDQLGRFAASGWATSRIDGHDPEAIAAAIAAARQSDRPTMIACRTTIGFGSPGRQGSEKAHGAPLGPEEVEKTRAALHWPHRPFEIPADVLVSWREIGARGHSVRQAWKERARKLCTADRSPCHDALNKKLPAAYTERMAQFIAQLTAERPKIATRQASQNVIDVIATVLPNLLGGSADLTHSNLTKAKTHKSVTPATMDGNYVHYGVREHAMAAAMNGIALHGGFIPYGGTFLAFADYSRPAIRLAALMGIRVIHVMTHDSIGLGEDGPTHQPVEHVASLRAIPNLLVFRPADAVETAEAWDCALRAETSPSVLCLSRQALPAFRTEASDHNKVALGAYVVVEPETRRDVTLIATGSEVAIALEAAKLLAAEGVHAAVVSAPCFELFRQQTAEYRAQVLGNAPRIGVEAAIEGDWARWLGDSGEFVGMQGFGASAPADVLYREFGITPAAVADAAMRNIIRARAS

SEQ ID NO: 47955 - protein, 257 aa, Arabidopsis thaliana
MACVGGKDWYFYSQRDRKYATGLRTNRATATGYWKATGKDRTILRKGKLVGMRKTLVFYQGRAPRGRKTDWVMHEFRLQGSHHPPNHSLSSPKEDWVLCRVFHKNTEGVICRDNMGSCFDETASASLPPLMDPYINFDQEPSSYLSDDHHYIINEHVPCFSNLSQNQTLNSNLTNSVSELKIPCKNPNPLFTGGSASATLTGLDSFCSSDQMVLRALLSQLTKIDGSLGPKESQSYGEGSSESLLTDIGIPSTVWNC

SEQ ID NO: 47956 - protein, 181 aa, Arabidopsis thaliana
RLYEYANNSVRGTIERYKKACSDAVNPPTITEANTQYYQQEASKLRRQIRDIQNLNRHILGESLGSLNFKELKNLESRLEKGISRVRSKKHEMLVAEIEYMQKRVKEIELQNDNMYLRSKITERTGLQQQESSVIHQGTVYESGVTSSHQSGQYNRNYIAVNLLEPNQNSSNQDQPPLQLV

SEQ ID NO: 47957 - protein, 168 aa, Avena clauda
VMASSATSVAPFQGLKSTAGLAVSRRSNAGLGSVSNGGRIRCMQVWPIEGIKKFETLSYLPPLSEEALLKQIDFLIRSKWVPCLEFSKVGFIFRVHGSTPGYYDGRYWTMWKLPMFGCTDASQVIKEVEEVKKEYPDAYVRIIGFDNIRQVQCVSFIAFKPPGCEESG

SEQ ID NO: 47958 - protein, 492 aa, Polaromonas sp. JS666
MPLTLSQTDLLRQQNFINHQWQDAQSGARLPVSDPATGLDFAHVPDSGAADALAAVDAAHAVFPAWRARSARERAQFLKRWHALILANQHDLGRLISREQGKPLAEGVGEVAYAASYVEWFAEEATRTYGDMIPEPARGRKLMVVKEPVGVVAAITPWNFPAAMIARKIAPALAAGCTVVAKPAEDTPLTSLALVLLAQQAGLPPGVLNMVTASREKTPEVVDVWLADARVRKITFTGSTPVGKHLARESAGTLKKLSLELGGNAPFIVFDDADIDAAVNGLMVAKFRNGGQTCVCPNRVFVQDAVHDAFVEKLRARVGALKVGPASAPDSQIGPMINARAVEKIERHVADAVAKGARIAVGGQRMEGAAYASPNYYAPTVLTGAHSGMACSLEETFGPVVPVTRFGSEAEVIAAANDTPFGLAAYFYSSNIARVWRMADALESGIVGINEGALAAEVAPFGGVKESGYGREGSRYGLEDYMHTKYLCQGLV

SEQ ID NO: 47959 - protein, 549 aa, Pyrococcus furiosus DSM 3638
MAQLAGQPILILPEGTQRYVGRDAQRMNILAARIVAETIRTTLGPKGMDKMLVDSLGDIVITNDGATILDEMDIQHPAAKMMVEVAKTQDKEAGDGTTTAVVIAGELLRKAEELLDQNIHPSIIIKGYTLAAQKAQEILENIAKEVKPDDEEILLKAAMTSITGKAAEEEREYLAKLAVEAVKLVAEKEDGKYKVDIDNIKLEKKEGGSVRDTQLIRGVVIDKEVVHPGMPKRVEKAKIALINDALEVKETETDAEIRITSPEQLQAFLEQEERMLREMVEKIKEVGANVVFVQKGIDDLAQHYLAKYGIMAVRRVKKSDMEKLAKATGAKIVTNIRDLTPEDLGYAELVEERKVAGESMIFVEGCQNPKAVTILIRGGTEHVVDEVERALEDAIKVVKDILEDGKILAGGGAPEIELAIRLDEYAKEVGGKEQLAIEAFAEALKVIPRTLAENAGLDPIETLVKVIAAHKEKGPTIGVDVYEGEPADMLERGVIEPLRVKKQAIKSASEAAIMILRIDDVIAASKLEKEKEKEGEKGGGSEDFSSDLD

SEQ ID NO: 47960 - protein, 212 aa, Escherichia coli O6
MSLFDKKHLVSPADALPGRNTPMPVATLHAVNGHSMTNVPDGMEIAIFAMGCFWGVERLFWQLPGVYSTAAVYTGGYTPNPTYREVCSGDTGHAEAVRIVYDPSVISYEQLLQVFWENHDPAQGMRQGNDHGTQYRSAIYPLTPEQDAAARASLERFQAAMLAADDDRRITTEIANATPFYYAEDDHQQYLHKNPYGYCGIGGIGVCLPPEA

SEQ ID NO: 47961 - protein, 393 aa, Glycine max
  misc_feature (362)..(362): Xaa can be any naturally occurring amino acid
  misc_feature (368)..(368): Xaa can be any naturally occurring amino acid
  misc_feature (372)..(372): Xaa can be any naturally occurring amino acid
  misc_feature (378)..(378): Xaa can be any naturally occurring amino acid
  unsure (1)..(393): unsure at all Xaa locations
LYYNLKCLLYLQAYYGPRVTMPPYYNSAVASGHVPHPYMWGPPQVALLSSSRSRAAIYPHGGVYTHPAVPIGPLTHSQGVPSSPAAGTPLSIETPPKSSGNTDQGLMKKLKEFDGLAMSIGNGHAESAEPGGENRLSQSVDTEGSSDGSDGNTSGANQTRRKRSREGTPTTDGEGKTEMQGSPISKETAASNKMLAVVTAGVAGTIVGPVVSSGMTTTLELRNPSSVHSKASAPQPCPVLPAETWLQNERELKRERRKQSNRESARRSRLRKQAETEELARKVESLNAENATLKSEINRLTESSEKMRVENATLRGKLKNAQLRQTQEITLNIIDSQRATPISTENLLSRVNNNSGSNDRTXEDENGXCENXPNSGAXLHQLLDTIPLTDACA

SEQ ID NO: 47962 - protein, 469 aa, Solibacter usitatus Ellin6076
MSPISIEICSPATGELLGKVPDFDAEAVDCAVAAARASFENKTWRGLDPSKRERILWNIGELLLKYRDELSRLISQETGKTLREAAGADVAPAADCFHYYAGWVRKQYGETIPVDGPYLNYTLREPVGVVGAIVPWNFPLQTAAWKVAPALACGCSVVLKPSELTPLSALRFGEICAEAGLPAGVLVVATGYGETTGEALALHEDVDKISFTGSVTTARKLLQNSAVSNLKRLSLELGGKSPNIVFPDADFDAAVRAALWGIYGNKGEMCTAGSRLLLHEEIHDRFVEELASKARKLRLGNPLDPATQMGPQISGRQLDRILDYIEAGKTEGARLVCGGERDTEGDKAHGFFVKPTIFAGVHPDMRIAREEIFGPVLSVMRFRDAEEAVRIANATTYGLASAVWTNDLKLAHRMAAALKAGSVWVNTYNAFDSGSPFGGYKQSGFGRDLGSYALDQYTNVKSVWIALGK

SEQ ID NO: 47963 - protein, 225 aa, Arabidopsis thaliana
GQSIKPVYGRNPSFSKLYPCFTESWGDLPLKENDSEDMLVYGILNDAFHGGWEPSSSSSDEDRSSFPSVKIETPESFAAVDSVPVKKEKTSPVSAAVTAAKGKHYRGVRQRPWGKFAAEIRDPAKNGARVWLGTFETAEDAALAYDRAAFRMRGSRALLNFPLRVNSGEPDPVRIKSKRSSFSSSNENGAPKKRRTVAAGGGMDKGLTVKCEVVEVARGDRLLVL

SEQ ID NO: 47964 - protein, 213 aa, Cryptococcus neoformans var. neoformans B-3501A
MTDGSNYDYLFKVVLIGDSGVGKSNLLSRFTRNEFNLESKSTIGVEFATRSINVDGKTVKAQIWDTAGQERYRAITSAYYRGAVGALLVYDIAKHQTYENVTRWLKELRDHADANIVIMLVGNKSDLKHLRAVSTDEAKQFATENGLSFIETSALDASNVESAFQNILTDIYRIVSSKSLESSGDVIKPSGGETILVAPTADDGGAKSGSKCC

SEQ ID NO: 47965 - protein, 254 aa, Glycine max
MEVGLNKKENMGFEETELRLGLPGNVGGTGTEEVLIRKRGFSETETETEEDESATTVDLMLNLSSKEAAAAADPTDKHKTLPKEKTLLPADPAKPPAKAQVVGWPPVRSFRKNMLAVQKSVGEENEKNSSSPNASFVKVSMDGAPYLRKVDLKMYKSYRELSDSLGKMFSSFTIGNCESQGMKDFMNESKLNDLLNSSDYVPTYEDKDGDWMLVGDVPWEMFVESCKRLRIMKGKEAIGLGLAPRAMAKSKNRS

SEQ ID NO: 47966 - protein, 413 aa, Arabidopsis thaliana
MAEICYENETMMIETTATVVKKATTTTRRRERSSSQAARRRRMEIRRFKFVSGEQEPVFVDGDLQRRRRRESTVAASTSTVFYETAKEVVVLCESLSSTVVALPDPEAYPKYGVASVCGRRREMEDAVAVHPFFSRHQTEYSSTGFHYCGVYDGHGCSHVAMKCRERLHELVREEFEADADWEKSMARSFTRMDMEVVALNADGAAKCRCELQRPDCDAVGSTAVVSVLTPEKIIVANCGDSRAVLCRNGKAIALSSDHKPDRPDELDRIQAAGGRVIYWDGPRVLGVLAMSRAIGDNYLKPYVISRPEVTVTDRANGDDFLILASDGLWDVVSNETACSVVRMCLRGKVNGQVSSSPEREMTGVGAGNVVVGGGDLPDKACEEASLLLTRLALARQSSDNVSVVVVDLRRDT

SEQ ID NO: 47967 - protein, 178 aa, Rosa hybrid cultivar
ECAFWMPSRTGLNLQLSHTLTQVSSGANVSINLPIVTEVFNSARALRIPYTCPLARFRPLVGRYMSPEVVAVRVPLLNLSNFQINDWPELSAKSYAIMVLILPTDSARQWREHELELVEVVADQVAVALSHAAILEESMRARDQLMEQNVALDLARREAEMAIHARNDFLAVMNHEMR

SEQ ID NO: 47968 - protein, 173 aa, Arabidopsis thaliana
MANQGAKKRKEENAKHMAKLRRIIIASNAVYFVVRMLIFYSSFTWKHWIGLVITSLAYAFPYKQLDQMAKPSVTDDGELIDGGFDMTTGGICGYLHDVIYITCFVQLASIISGKFWYTYLVIPAFGVYKASGLIRGFMSQGSEGGVEDEKSRKKREKMERKASRGQVVKTRTR

SEQ ID NO: 47969 - protein, 634 aa, Streptococcus pneumoniae
MSNLSVNAIRFLGIDAINKANSGHPGVVMGAAPMAYSLFTKQLHINPAQPNWINRDRFILSAGHGSMLLYALLHLSGFEDVSMDEIKSFRQWGSKTPGHPEFGHTAGIDATTGPLGQGISTATGFAQAERFLAAKYNREGYNIFDHYTYVICGDGDLMEGVSSEAASYAGLQKLDRLVVLYDSNDINLDGETKDSFTESVRDRYNAYGWHTALVENGTDLEAIHAAIETAKASGKPSLIEVKTVIGYGSPNKQGTNAVHGAPLGADETASTRQALGWDYEPFEIPEQVYADFKEHVADRGASAYQAWTKLVADYKEAHPELAAEVEAIIDGRDPVEVTPADFPALENGFSQATRNSSQDALNVVAAKLPTFLGGSADLAHSNMTYIKTDGLQDDANRLNRNIQFGVREFAMGTILNGMALHGGLRVYGGTFFVFSDYVKAAVRLSALQGLPVTYVFTHDSIAVGEDGPTHEPVEHLAGLRAMPNLNVFRPADARETQAAWYLAVTSEKTPTALVLTRQNLTVEEGTDFDKVAKGAYVVYENAADFDTILIATGSEVNLAVSAAKELASQGENIRVVSMPSTDVFDKQDAAYKEEILPNAVRRRVAVEMGASQNWYKYVGLDGAVLGIDTFGASA

SEQ ID NO: 47970 - protein, 214 aa, Glycine max
  misc_feature (68)..(68): Xaa can be any naturally occurring amino acid
  unsure (1)..(214): unsure at all Xaa locations
MSLRRRTLLKVIVLGDSGVGKTSLMNQYVHKKFSQQYKATIGADFVTKELQIDDRLVTLQVGFVSCFXIWDTAGQERFQSLGVAFYRGADCCVLVYDVNVMKSFDTLENWHEEFLKQANPPDPRAFPFILLGNKIDIDGGNSRVVSEKKAKDWCASKGNIPYFETSAKEDYNVDAAFLCIAKAALANELEQDIYFQGIPEAAVPENEQRSGCAC

SEQ ID NO: 47971 - protein, 632 aa, Campylobacter jejuni subsp. jejuni NCTC 11168
MNIQILQEQANTLRFLSADMVQKANSGHPGAPLGLADILSVLSYHLKHNPKNPTWLNRDRLVFSGGHASALLYSFLHLSGYDLSLEDLKNFRQLHSKTPGHPEISTLGVEIATGPLGQGVANAVGFAMAAKKAQNLLGSDLIDHKIYCLCGDGDLQEGISYEACSLAGLHKLDNFILIYDSNNISIEGDVGLAFNENVKMRFEAQGFEVLSINGHDYEEINKALEQAKKSTKPCLIIAKTTIAKGAGELEGSHKSHGAPLGEEVIKKAKEQAGFDPNISFHIPQASKIRFESAVELGDLEEAKWKDKLEKSAKKELLERLLNPDFNKIAYPDFKGKDLATRDSNGEILNVLAKNLEGFLGGSADLGPSNKTELHSMGDFVEGKNIHFGIREHAMAAINNAFARYGIFLPFSATFFIFSEYLKPAARIAALMKIKHFFIFTHDSIGVGEDGPTHQPIEQLSTFRAMPNFLTFRPADGVENVKAWQIALNADIPSAFVLSRQKLKALNEPVFGDVKNGAYLLKESKEAKFTLLASGSEVWLCLESANELEKQGFACNVVSMPCFELFEKQDKAYQERLLKGEVIGVEAAHSNELYKFCHKVYGIESFGESGKDKDVFERFGFSVSKLVNFILSK

SEQ ID NO: 47972 - protein, 1074 aa, Neurospora crassa
MNCPSRNDDAELEHPFWNQQPHYLAADLTTRQDLNGIANSRVHRHGSQGSEVGVCALNHHAGGGIRLHEADRRPQVPPDRNNNSAGRRSLDPAPQKPPAAGGEDRACRTRTSVAPLLRSAAGSAVPGWVTWVLSVVVTSLIMSTIMTRQQHGNDRQIQVDAALHVSAVAEPGTSQVLKRASTCPKGGVSDEELYNTAFHGAALAIIFGVSFLACAFPVLMTRFPMIRLPPVFFFAVRHFGTGVLIATAFVHLLPTAFISLSNQCLDRFWTQQYPAMPGAIALAAIFMVTIVEMVFHPGRHVHHGSHEQEQISGAPAQSNTNDESIDPLSRLPSNARAPDDTTNNLPSRPKGALRGRAHSIGRRLSHVSRQGQDPHDRDAVLPALPSEDYYLDTTTPKFNKEIFQSDLTLSSPSTQQLESQLPHDGYMYLTAEMKRRKETMQCVLLECGILFHSVFIGMALSVSVGTDFVVLLIAIAFHQTFEGLALGSRIASITWPEGSKQPWFMALAYGCTTPIGQAIGLATHRLYSPESEVGLILVGTMNAISSGLLVFASLVELLSEDFLSDESWRTLRGKRRAAAFPAAWLLAPSGRKSVDPTSAAGPAFQPILGGSKSNTHCNIPLDPQGQTVRNMDQLKHTLAGLGEFAKENLPPQVTGTVTDLTSSVRSRLTLGSRRRTQPIDDEEAGDIIPLDAHAGGGHSTCKHGPQLRVSPALQSFIARNHILSSGETVADLLAKSHIAVPREVINRDYPLPEYFVSSSHNTYLCAHQLFGESSTDPYRHTLQAGSRCVEIDVWDNPDNLDEPKVTHGYTLVSNIPFREVCKIILQVVEEEEESGGGGGGGAPVLISLENHCGAQGQEALVRIMKEVWGRHLLDKPVETESHIEQDQHVRLRDLGSKIVVIVEHHLVNEASSDSSSDSSSEDEAEKKERKQRKQAKKDTPEAKLIIPSLAELGVYGQSVKPPDNSWFTSSDLLPSRDGPHHHLINVSESGLNALLSSGNGASIAKHNARHLMRVFPKGTRISSKNLKPLPFWGLGAQRGDGGISRKRVSRASGEDETQETIELGGGGRVGCSRS

SEQ ID NO: 47973 - protein, 288 aa, Cystobacter fuscus
MSEVQYTAEGVGRYYDAMAQFYQTVWGDSIHMGFWPDPTDATVSMSQAQKNFTDLMISHMGLQPGQRALDVGCGTGRPAIQLARATHTHVTAISISQSQIATATGYARESGVAPRAQVQGTDDAPSVRFELADAMAMPFRDGTFDAAWAFESIFHMPSRLQVFREMARVVRPGGRVVVADFVTLRPLTPEERAIAYPAFAANDLASLEDYIRDLKQVGLTNINCRDVTANTFRPSNRATARELQTEAAQAHLRNAYGHEQADSFRNGWVHIEKVNETLGYVLIQADKP

SEQ ID NO: 47974 - protein, 433 aa, Prochlorococcus marinus subsp. pastoris str. CCMP1986
MTDILKTTYSEEVFSSALELMPGGVSSPVRAFKSVGGQPIVFDRVKGPYAWDIDGNRYIDYIGSWGPAICGHAHPEVITALQEAIEKGTSFGAPCVLENKLAEMVIDAVPSVEMVRFVNSGTEACMAVLRLMRAFTGRDKVIKFDGCYHGHADMFLVKAGSGVATLGLPDSPGVPRTTTANTLTAPYNDLEAVKKLFSENPDAISGVILEPIVGNAGFITPEPGFLEGLRELTTENGSLLVFDEVMTGFRISYGGAQEKFGVTPDLTTLGKVIGGGLPVGAYGGKKEIMSMVAPSGPVYQAGTLSGNPLAMTAGIKTLELLKQEGTYEKLESTTSRLIEGIIQSAENNGIAINGGSVSAMFGFFLCEGPVRNFEEAKTNNSELFGKLHREMLKRGVYLAPSPFEAGFTSLAHSEEEIDRTLEAFDQSFSVIKN

SEQ ID NO: 47975 - protein, 403 aa, Bradyrhizobium sp. BTAi1
MNYEDYFRRQLDGLRREGRYRVFADLERKAGAFPIATYRGPHGERDVAVWCSNDYLGMGQHPKVLEVMHEALDRCGAGAGGTRNISGTNHYHILLEDELADLHGKQAALLFNSGYVSNWTSLSTLAARMPGCVILSDELNHASMIEGIRHSRCETRIWRHNDVADLRDKLSDLDPKVPKLIAFESVYSMDGDISPISDICDVADEFNAMTYLDEVHAVGLYGPRGGGISERDGVADRLTVIEGTLAKAFGVIGGYITASNTVCDFVRSFASGFIFSSSLPPAVAAGALTSIRHLKASHVERARHQDRVARLRRRLDEAGVSHLDNPSHIVPVMVRDPVLCKRISDILLDRYGIYVQPINYPTVPRGTERLRITPSPYHSDADIEHLVSALSEIWAEMGLAQAA

SEQ ID NO: 47976 - protein, 341 aa, Novosphingobium aromaticivorans DSM 12444
MSVFLRNAWYMACWSHEVPEGGFLARRLLDKPWVIWRKADGTPVIMADRCPHRFVPLSRGQRDGDMMRCGYHGLAFSSSGGCVHNPFTDEALPLARVEVLPVVEKHTGLWFWPGDADRADPALIPDFGFLDVERPLHRGHLKMDAGYELVTDNLMDLSHAEFIHRDSFGVNGSLLTCGQHEVVQDEGGAIWNNWTMPDSEPPSWAVAMLPEGARTDQWLHMRWNAPSCLALFLGLARSGTDRKDMVVPPMADPHILTPETVTSTHYFYTHEPTPEAHALLEKAFLEEDHPMLHAQQEAMGSADFWDLRPVVLPSDAGAIRVRRRMMQLRRAEAGLEEEAAA

SEQ ID NO: 47977 - protein, 179 aa, Oryza sativa
MQIFVKTLTGKTITLEVEPSDTIDNVKSKIQDKEGIPPDQQRLIFAGKQLEDGRTLSDYNIQKESTLHLVLRLRGGMQIFVKTLTGKTITLEVESSDTIDNVKSKIQDKEGIPPDQQRLIFAGKQLEDGRTLSDYNIQKESTLHLVLRLRGGMQIFVKTLTGKTITLEVESSDTIDNVK

SEQ ID NO: 47978 - protein, 353 aa, Bradyrhizobium sp. BTAi1
MIAMEGGAGNISTKMALEDTILTPRFYTTDFAAMDRLNVDLVRREWDAVMAELRADHNRKHFVRTPEFEKDLNELPEALRLEFKDFLVSSLTAEFSGCVLYAEIKKRITNPDIRELFSYMSRDEARHAGFINEILKDHGIGVDLGFLTKVKKYTYFKPKFIFYATYLSEKIGYARYITIYRQMERHPERQFHPIFKWFERWCNDEFRHGEAFALLMRADPKLLSGLNKLWIKFFLLAVFATMHVRDHMRPAFYEALGMPVDEYDMRVFRITSEISRQVFPVMLDIDNPRFWAGLNQLRKVSEAIADAKAQGGVMGAIKRAVLPLKAALTFGRLYMLPAKSNELPREIRLQPAW

SEQ ID NO: 47979 - protein, 468 aa, Burkholderia pseudomallei K96243
MSPTGFTRAAAAPPPTLSRHAADTARLAAPLAIAQLSQMAMSVTDTVLLGSLGPDALAAGGLGANLSFVVVTLLQGVLTSVSVSVAHARGAMAEDRVPHIYWTGFALSLLLAVPAFALLSFAQPLLLAFGEPAALARNVGEYAAVLRFAAPGSLIGVGLMRSFLPAIGAAKRLLWVSLAGVGVNAFLNYGLIHGAFGLPRLGFLGSATATTITIWLTAITLVALLHGRSTFRHFVAATRPRLPLMGELFGIGWPVAITYGVESTLFLATGLTVGVLGESSLAAHQIALNVASVAFMVPLAIGQAANVRVGYWAGAGAPVAARHAGFVALGLGVAFMSLSGLVLIVAPHAIVGLYLKLDDPANARTVVLATSLLGIAAVFQIVDGMQTVGSGCLRGLKDTRVPMLAAMLGYWGIGFPTGYWFAFHAGLGARGLWWGLAAGLASVAMLMTWRFHRKSAALGVRADARGQA

SEQ ID NO: 47980 - protein, 376 aa, uncultured archaeon GZfos18B6
MEERGISKQELESFLKEQKQRDLTYRKVLSSMCTYPREIAVYAHNLFLDSNLGDSGLFPGTKEIEDELIRMIGALLGNENAHGYISTGGTESNIQAIRAIRNRKRKEGLQQMNIIVPKTAHFSFDKIEDLLSLEVKKAGLDDELRVDVNLVEELIDDNTISIVGIAGTTEFGQIDPIKELADIAHNSDIFLHVDAAFGGFVIPFLDAEYQFDFSLDAVSSISVDPHKMGMSTIPAGCILFRDESYLADLAVNTPYLTTNEQCSLIGTRSGAPVAATYAVLKYLGRNGLRAIVDECMLLTRMLVRGAKAMDIYPVIEPVTNVVTLRFPDVDRVAKALEARGWRVSTTRAPKALRLVIMPHVTEDTIELFLNDLACVT

SEQ ID NO: 47981 - protein, 279 aa, Gossypium hirsutum
LILSCVVTLSLSVLGRPATFLEDFRITWSDSHIRQIDGGRAIQLVLDQNSGCGFASKRQYLFGRVSMKIKLIPGDSAGTVTAFYMNSVTDAVRDELDFEFLGNRTGQPYTVQTNIYAHGKGDREQRVNLWFDPAADFHTYSIMWNHHQIVFYIDEVPIRVYKNNEARNIPYPKLQPMGVYSTLWEADDWATRGGLEKIDWTKAPFLAYYKDFDIEGCPVPGPVNCATNSRNWWEGTAYQALNAMEAKRYRWVRMNHVIYDYCTDKSRYPVTPPECMSII

SEQ ID NO: 47982 - protein, 170 aa, Arabidopsis thaliana
MVAESDNRDLTVDTAASCLMLLSGIGEHDGRKKRVFRCKTCERDFDSFQALGGHRASHSKLTNSDDKSLPGSPKKKPKTTTTTTAHTCPICGLEFPMGQALGGHMRKHRNEKEREKASNVLVTHSFMPETTTVTTLKKSSSGKRVACLDFDLTSVESFVNTELELGRTMY

SEQ ID NO: 47983 - protein, 153 aa, Glycine max
  misc_feature (112)..(112): Xaa can be any naturally occurring amino acid
  misc_feature (115)..(115): Xaa can be any naturally occurring amino acid
  unsure (1)..(153): unsure at all Xaa locations
NFLYQWAFAIAAAGITSGSIAERTQFVAYLIYSSFLTGFVYPVVSHWFWSADGWASAISSADHVFSPGDRLLSTGVIDFAGSGVVHMVGGVAGFWGALIEGPRIGRFDHGGXRAXALRGHSASLVVLGTFMLWFGWYGFNPGSINKILVSYGN

SEQ ID NO: 47984 - protein, 466 aa, Triticum aestivum
MAVWLARRAVRRLASELRSHGPWPWPLSSSTAPVLGVPSGDQSRGFCSVRRFAGDSAAVEEPENGLAAGDLQFVDFPGGKLSFVGEMNFLPESQRERINCYRILDDDGGTIYSSRFQEVSKELALKMYSNMVTLQIMDTIFYEAQRQGRISFYLTSNGEEAINIASAAALSAQDIVLPQYREPGVLLWRGFTLQEFANQLFGNKLDYGKGRQMPIHYGSNRLNYFTVSSPIATQLPQAVGAAYSLKMDKKKACAITYFGDGGTSEGDFHAALNFAAVTEAPVIFFCRNNGWAISTPTAEQFRSDGVVTRGQAYGIRSIRVDGNDTLAVYSAVHTAREMAITEGRPILIEAMTYRVGHHSTSDDSTKYRPADEMEHWRTARDPVSRYRKWVQGNGWWCDTQESELRNNVRQELLQAIQVAERMPKHGLAELFTDVYDQMPSNLREQERSLLDTIKKHPAEYPADVPA

SEQ ID NO: 47985 - protein, 461 aa, Polaromonas sp. JS666
MPSNTSSLIDLDRAHLIHPVAPWRKHEQRGVTVLESGHGAWLKDAAGNELLDAFAGLWCVNVGYGQESVVQAATEQMRKLPYATGYFHFGSEPAIQLAAKLVEIAPPSLKHVYLTLGGSEAIDAAVRLIVHYYNATGRPGKKQFISLERGYHGSSSTGAGLTALPVFHRGFDLPRPEQHYIASPYLYRSPEGSTAQSVIDASVQSLRAKVASLGADNVAAFFCEPIQGSGGVIVPPTGWLKAMRQACTELGILFVVDEVITGFGRTGPMFACQAEGVEPDLMTMAKGLTSGYAPMGALMMSGAVYAGIADGAAPGVPIGHGATYSAHPVSAAIALEVIRIYQEGGMLAHAQKVAPHFAQGLDALTAHPLVGEARHRGLLGALELVSNKTTKAGFDPALGLSDLLFETGYRNGLVFRSFGDNILGFAPALCYTEGEFSQLFERLEKTLDEVLAVPDVRRALG

SEQ ID NO: 47986 - protein, 472 aa, Arabidopsis thaliana
MAATLTGSGIALGFSCSAKFSKRASSSSNRRCIKMSVSVEEKTKKFTLQKSEEAFNAAKNLMPGGVNSPVRAFKSVGGQPVVMDSAKGSRIRDIDGNEYIDYVGSWGPAIIGHADDEVLAALAETMKKGTSFGAPCLLENVLAEMVISAVPSIEMVRFVNSGTEACMGVLRLARAFTGKQKFIKFEGCYHGHANSFLVKAGSGVATLGLPDSPGVPKAATSDTLTAPYNDIAAVEKLFEANKGEIAAIILEPVVGNSGFITPKPEFIEGIRRITKDNGALLIFDEVMTGFRLAYGGAQEYFGITPDLTTLGKIIGGGLPVGAYGGRRDIMEMVAPAGPMYQAGTLSGNPLAMTAGIHTLKRLSQPGTYEYLDKITKELTNGILEAGKKTGHAMCGGYISGMFGFFFTEGPVYDFSDAKKSDTEKFGKFFRGMLEEGVYLAPSQFEAGFTSLAHTSEDIQFTIAAAEKVLSRL

SEQ ID NO: 47987 - protein, 261 aa, Triticum aestivum
  misc_feature (256)..(256): Xaa can be any naturally occurring amino acid
  unsure (1)..(261): unsure at all Xaa locations
MASSRIPLLCLLGLLLVASPAIADDSSGIYYQLALLWPGAYCEQTNAGCCKPTTGVSPARDFYITGLTVYNATTNAALTECSNQAPYNPNLITGIGLEQYWINIKCPANNGQRSWKNAWKKAGACSGLDEKAYFEKALSFRSKINPLVRLKQNGIEDDFELYGLKAIKKVFKSGINAEPVIQCSKGPFDKYMLYQLYFCANGNGTFIDCPAPAKYTCSNSVLFHPYKKWMLKQQLNDESADFYDSADPFVLPGLAXWTTDL

SEQ ID NO: 47988 - protein, 559 aa, Corynebacterium efficiens YS-314
MSTSRTTTNNKRHTKHVFVTGGVVSSLGKGLTAASLGQLLIARGLNVTMQKLDPYLNVDPGTMNPFEHGEVFVTEDGAETDLDLGHYERFLNRNLTANANVTTGKVYSTVIARERRGGYLGRTVQVIPHITDEIKARILAMGDPDEHGVVPDVVISEVGGTVGDIESQPFLEAARQVRQEIGRENCFFIHCSLVPYLATSGELKTKPTQHSVAELRSIGILPDALVLRCDREVPEALKTKIALMCDVDTDGVVSCPDSESIYTIPETLYHEHLDTFLIRRLDLPFRDVDWTGWRDLLDRVHHPEREITVGIVGKYVDLPDAYLSVVEAIRAAGYAHRTRTRITWITSDDCTTPAGAATALGGVDALVIPGGFGARGIEGKIAAVTYAREHRIPLLGLCLGLQCVVIEAARQAGLEQATSTEFDPGAAQPVISTMAEQQAAVSGQADLGGTMRLGSYPATLEQGSLVAQLYGITEVSERHRHRYEVNNAYRTQIGQRSPLIFSGTSPDGHLVEFVEYDRAVHPFLVATQAHPEYKSRPTQAHPLFSGLVAAALAAAVTDA

SEQ ID NO: 47989 - protein, 325 aa, Corynebacterium glutamicum ATCC 13032
MGTMKAILVSRTGGPEVLEFTDTDAPKPTDDQVLVEVDMAGVNFIDTYYRQGEYHARLPFIPGFEGTGRVLEDPQGLIAAGTKVAWCDAMGSYAQQVCVPRDRLVAVPEGVSSEVAASMLMQGITAHYLTNGVYELEEGDSCLITAGAGGVGLLATQMAAAKGVRVYSVVSTDEKAELALDAGAYEVFRYSDNLAEQVRRHNGGRGVDVVYDGVGQSTFNESLEAVRPRGTVCLFGAASGPVEPFDPQLLNTHGSIFLTRPSIGAWTSEEGEFAKRAQAVTQAIVEGTLRVRVTGTYSLADAYIAHRDLQARSTSGSLVLEIPKD

SEQ ID NO: 47990 - protein, 384 aa, Arabidopsis thaliana
MDMKSGHSSPVMTDSPPISNSRLTIRQNRLPYSSAAATAISQNNNLLLTVPRKKTGILDDVKSNGWLDAMKSSSPPPTILNKDNLSNDATDMTYREWMLKYPSALTSFEKIMSFAKGKRIALFLDYDGTLSPIVEEPDCAYMSSAMRSAVQNVAKYFPTAIISGRSRDKVYEFVNLSELYYAGSHGMDIMSPAGESLNHEHSRTVSVYEQGKDVNLFQPASEFLPMIDKVLCSLIESTKDIKGVKVEDNKFCISVHYRNVEEKNWTLVAQCVDDVIRTYPKLRLTHGRKVLEIRPVIDWDKGKAVTFLLESLGLNNCEDVLPIYVGDDRTDEDAFKVLRDGPNHGYGILVSAVPKDSNAFYSLRDPSEVMEFLKSLVTWKRSMG

SEQ ID NO: 47991 - protein, 107 aa, Lotus corniculatus
NEVIKPTINGVLDIMKACQKAKTVQRLVFTSSAGTLNAVEHQKQMYDESCWSDVEFCRRVKMTGWMYFVSKTLAEQEAWKFAQEHDIDLITIIPSLVVGSFLMPTMP

SEQ ID NO: 47992 - protein, 207 aa, Oryza sativa
  misc_feature (160)..(160): Xaa can be any naturally occurring amino acid
  unsure (1)..(207): unsure at all Xaa locations
MAGVAEEEGTDMPNGKKKVLGFTFSFPVRQRSVASGTLVKWTKAFSIDDAVGEDVVAELQTAMVKQGLDMHVAALINDAVGTLAGARYYDEDVVAGVIFGTGTNAAYVEKANATPKWEGELPNSGDMVINMEWGNFYSSHLPVTEYDEALDKESLNPAEXGEIVRRVLLKLSLQSGIFGSIDHSKLQNRIHLRTPYTSAMHHDERLT

SEQ ID NO: 47993 - protein, 170 aa, Zea mays
  misc_feature (25)..(25): Xaa can be any naturally occurring amino acid
  unsure (1)..(170): unsure at all Xaa locations
MAPTVMMASSATAVAPFQGLKSAAXLPVARRSTRSLGNVSNGGRIRCMQVWPAYGNKKFETLSYLPPLSTDDLLKQVDYLLRNGWIPCLEFSKVGFVYRENSTSPCYYDGRYWTMWKLPMFGCNDATQVYKELQEAIKSYPDAFHRVIGFDNIKQTQCVSFIAYKPPGSD

SEQ ID NO: 47994 - protein, 72 aa, Oryza sativa (japonica cultivar-group)
MLSGHSVDKFSRSNLPEMEKRKLHLPPGTALFVFVNNTLPQTAQLMGSVYESYKDEGDGFLYLCYSSEKTFG

SEQ ID NO: 47995 - protein, 676 aa, Corynebacterium glutamicum ATCC 13032
MDTKAVDTVRVLAADAVENCGSGHPGTAMSLAPLAYTLYQRVMNVDPQDTNWAGRDRFVLSCGHSSLTQYIQLYLGGFGLEMDDLKALRTWDSLTPGHPEYRHTKGVEITTGPLGQGLASAVGMAMAARRERGLFDPTAAEGESPFDHHIYVIASDGDLQEGVTSEASSIAGTQQLGNLIVFWDDNRISIEDNTEIAFNEDVVARYKAYGWQTIEVEAGEDVAAIEAAVAEAKKDTKRPTFIRVRTIIGFPAPTMMNTGAVHGAALGAAEVAATKTELGFDPEAHFAIDDEVIAHTRSLAERAAQKKAAWQVKFDEWAAANPENKALFDRLNSRELPAGYADELPTWDADEKGVATRKASEAALQALGKTLPELWGGSADLAGSNNTVIKGSPSFGPESISTETWSAEPYGRNLHFGIREHAMGSILNGISLHGGTRPYGGTFLIFSDYMRPAVRLAALMETDAYYVWTHDSIGLGEDGPTHQPVETLAALRAIPGLSVLRPADANETAQAWAAALEYKEGPKGLALTRQNVPVLEGTKEKAAEGVRRGGYVLVEGSKETPDVILMGSGSEVQLAVNAAKALEAEGVAARVVSVPCMDWFQEQDAEYIESVLPAAVTARVSVEAGIAMPWYRFLGTQGRAVSLEHFGASADYQTLFEKFGITTDAVVAAAKDSING

SEQ ID NO: 47996 - protein, 107 aa, Lotus corniculatus
NEVIKPTINGVLDIMKACQKAKTVRRLVFTSSAGTLDAVEHQKQMFDESCWSDVEFCRRVKMTGWMYFVSKTLAEQEAWKFAKEHDIDLITTIPSLVVGSFLMPTMP

SEQ ID NO: 47997 - protein, 369 aa, Triticum aestivum
  misc_feature (342)..(342): Xaa can be any naturally occurring amino acid
  unsure (1)..(369): unsure at all Xaa locations
MDRVLLPVRVKEEWPPPPPEEEEELEHGGLAPRPMEGLHETGPPPFLTKTFDLVADPATDGVVSWGRAGNSFVVWDPHLFAAVLLPRFFKHSNFSSFVRQLNTYGFRKIDPDRWEFANEGFIRGQRQLLKMIKRRRPLSYLPSPQHQALGSCLEVGQFGLDEEIEVLKRDKNALLEEVVKLRQEQQSSRADMRAMEERLHRVEQKQLQMMGFLARAIQNPDFFLQLIQQQDKLKDLEDAYSNKRRRSIDVMPFLGPEETSQSEPLESTFIFEDREFSELENLAMNIQGIRKGMEGDRGGRDQGCGEAELTDDFWEELLSEGMRDEAEMVELERRRSRYVDAXAPSMGHLSYSDPKSTRIHNHLIYIPLY

SEQ ID NO: 47998 - protein, 214 aa, Zea mays
  misc_feature (116)..(116): Xaa can be any naturally occurring amino acid
  unsure (1)..(214): unsure at all Xaa locations
MAPMKLYGAVMSWNVTRCATALEEAGSDYEIVPINFATAEHKSPEHLVRNPFGQVPALQDGDLYLFESRAICKYAARKNKPELLREGNLEEAAMVDVWIEVEANQYTAALNPILFXVLISPMLGGTTDQKVVDENLEKLKKVLEVYEARLTKCKYLAGDFLSLADLNHVSVTLCLFATPYASVLDAYPHVKAWWSGLMERPSVQKVAALMKPSA

SEQ ID NO: 47999 - protein, 621 aa, Cryptococcus neoformans var. neoformans B-3501A
MDNTVAPSKGKKPGGARPNPGTRPESGGPARPTGAGGVPKLSIPPDNVPGMHVDQAGQGGWHQPSSLPSLALRPMRPSPTPSSSSRPKLSLTPLTPTIPASSSSAPSSASPAPPNRPALLNAHSARGYGERNTPSLKLSIPGASSVGPGFSTEHDYPLELPDDTDALSSELKTPTPGRPAGGGLNLSLSSLSLTSSEDANPTLQARGRDYDEGESSYGYGCVGNGLIGPGGDAISAMTEDIRQALSRNRFETGSDRGGARSRAGSLMSDSSRATAGRDRSDSASLYNAASRRESPSASLSGGSARQSLDLPRAAEEVNEHKESPVFDPEGLVMMRRLGEGTGGSVDMVQDRATGRIMAKKVITRTSNPMVHKQLLRELEILNSCASPFIVEHYGSFLADHDSSIGILMEYCEAGSLDSLLGKMKKKSMRCSEHVLGRVASSVLKGLDYLHQRRIVHRDIKPSNILITRQGAVKLCDFGVSGELVESLAGTFTGTSFYMAPERIQNKPYSIKADVWSLGMTLHEIAHLRFPFPPEGENQSVAPIELLSYIVTAPVPVMIDDLSVGRVWSEPIKDFMGQCLIRSGTDRPYPWQLLQHPFIVASEAKKVNMAKWVAALCNWPLS

SEQ ID NO: 48000 - protein, 159 aa, Shewanella oneidensis MR-1
MALATFGAGCFWGVEYFFRQVNGVTNATCGYMGGNNEVTTYEEVKKGKTGHAEVVQVEFDPTIVSYDELLEVFWKNHNPTTLNMQGGDIGTQYRSTIFFHDREQKAAAEASKLAFARSGRWGLRHIVTEIVPLQQFHVAEEYHQNYIDKNNLPSCHLEY

SEQ ID NO: 48001 - protein, 658 aa, Shigella flexneri 2a str. 2457T
MSDDMSMGLPSSAGEHGVLRSMQEVAMSSQEASKMLRTYNIAWWGNNYYDVNELGHISVCPDPDVPEARVDLAQLVKTREAQGQRLPALFCFPQILQHRLRSINAAFKRARESYGYNGDYFLVYPIKVNQHRRVIESLIHSGEPLGLEAGSKAELMAVLAHAGMTRSVIVCNGYKDREYIRLALIGEKMGHKVYLVIEKMSEIAIVLDEAERLNVVPRLGVRARLASQGSGKWQSSGGEKSKFGLAATQVLQLVETLREAGRLDSLQLLHFHLGSQMANIRDIATGVRESARFYVELHKLGVNIQCFDVGGGLGVDYEGTRSQSDCSVNYGLNEYANNIIWAIGDACEENGLPHPTVITESGRAVTEHHTVLVSNIIGVERNEYTVPTAPVEDAPRALQSMWETWQEMHEPGTRRSLREWLHDSQMDLHDIHIGYSSGTFSLQERAWAEQLYLSMCHEVQKQLDPQNRAHRPIIDELQERMADKMYVNFSLFQSMPDAWGIDQLFPVLPLEGLDQVPERRAVLLDITCDSDGAIDHYIDGDGIATTMPMPEYDPENPPMLGFFMVGAYQEILGNMHNLFGDTEAVDVFVFPDGSVEVELSDEGDTVADMLQYVQLDPKTLLTQFRDQVKKTDLDAELQQQFLEEFEAGLYGYTYLEDE

SEQ ID NO: 48002 - protein, 107 aa, Lotus corniculatus
NEVIKPTINGVLDIMKACQKAKTVRRLVFTSSAGTLNVIEHQKQMFDESCWSDVEFCRRVKMTGWMYFVSKTLAGQEAWKFAKEHGIDFITIIPPLVVGSFLMPTMP

SEQ ID NO: 48003 - protein, 392 aa, Shewanella oneidensis MR-1
MSKATLNTDTVHRVGFLDKASLHIPILRILQADGTTYETAVLPVIDEALAIKIYDTCVFTRVLDERMLGAQRQGRISFYMTCTGEEAAIVGSVAALDPEDVILAQYREHAALRYRGFTTEQFMNQMFSNEKDLGKGRQMPIHYGCAALNYQTISSPLATQIPQATGVGYSLKMQGKRNVAVCYFGEGAASEGDFHAGLNMAAVLKCPVIFFCRNNGYAISTPTEEQFAGNGIASRGVGYGMHTIRVDGNDMLAVLAATQQARAYAIEHNAPVLIEAMTYRLGAHSSSDDPSGYRSKEEEAKWQQHDPVKRFKLWLINKGWLAEADDAQRYEKYREEVLAAVKVAEKLPIPMLDEIIEDVYDKPTPALKKQLSELKEHIKKYPQSYPKSAGRL

SEQ ID NO: 48004 - protein, 208 aa, Oenococcus oeni PSU-1
MLEADGNNTILVYGGANMQVSVEDVRAASSLIESADAIITQFETPVTAAVEAFEIAKRKDVLTILNAAPAQKIDPKLLSISDFVTPNESEAQVLIDQKVQFTKESLNNAALSFEKLGVKNTLITLGEHGSFYKFGQQEGIIPSFKVKAVDTTAAGDTFIGSFTANLKPDLSNLTDALTWATRSSSLTVQKAGALPSIPTFEEVETAMR

SEQ ID NO: 48005 - protein, 331 aa, Glycine max
MALNNGVPATGTGLIVSFGEMLIDFVPTVSGVSLAEAPGFLKAPGGAPANVAIAVSRLGGKAAFVGKLGDDEFGHMLAGILKENGVRADGINFDQGARTALAFVTLRADGEREFMFYRNPSADMLLKPEELNLELIRSAKVFHYGSISLIVEPCRSAHLKAMEVAKESGCLLSYDPNLRLPLWPSAEEARKQILSIWEKADLIKVSDAELEFLTGSDKIDDESALSLWHPNLKLLLVTLGEHGSRYYTKSFKGSVDAFHVNTVDTTGAGDSFVGALLAKIVDDQSILEDEPRLREVLKFANACGAITTTQKGAIPALPKEEAALKLIKGGS

SEQ ID NO: 48006 - protein, 393 aa, Candida albicans SC5314
MFKKSANDIVVIAAKRTPITKSIKGGLSRLFPEEILYQVVKGTVSDSQVDLNLIDDVLVGTVLQTLGGQKASALAIKKIGFPIKTTVNTVNRQCASSAQAITYQAGSLRSGENQFAIAAGVESMTHDYFPHRGIPTRISESFLADASDEAKNVLMPMGITSENVATKYGISRKQQDEFALNSHLKADKATKSGHFAKEIIPIQTTDENNQHVSITKDDGIRGSSTIEKLGGLKPVFKDDGTTTAGNSSQISDGGSAVILTTRQNAEKSGVKPIARFIGSSVAGVPSGLMGIGPSAAIPQLLSRLNVDTKDIDIFELNEAFASQSIYCIEKLGLDYDKVNPYGGAIALGHPLGATGARVTATLLNGLKDQNKELGVISMCTSTGQGYAALFANE

SEQ ID NO: 48007 - protein, 634 aa, Streptococcus pneumoniae
MSNLSVNAIRFLGIDAINKANSGHPGVVMGAAPMAYSLFTKQLHINPAQPNWINRDRFILSAGHGSMLLYALLHLSGFEDVSMDEIKSFRQWGSKTPGHPEFGHTAGIDATTGPLGQGISTATGFAQAERFLAAKYNREGYNIFDHYTYVICGDGDLMEGVSSEAASYAGLQKLDKLVVLYDSNDINLDGETKDSFTESVRDRYNAYGWHTALVENGTDLEAIHAAIETAKASGKPSLIEVKTVIGYGSPNKQGTNAVHGAPLGADETASTRQALGWDYEPFEIPEQVYADFKEHVADRGASAYQAWTKLVADYKEAHPELAAEVEAIIDGRDPVEVTPADFPALENGFSQATRNSSQDALNVVAAKLPTFLGGSADLAHSNMTYIKTDGLQDDTNRLNRNIQFGVREFAMGTILNGMALHGGLRVYGGTFFVFSDYVKAAVRLSALQGLPVTYVFTHDSIAVGEDGPTHEPVEHLAGLRAMPNLNVFRPADARETQAAWYLAVTSEKTPTALVLTRQNLTVEDGTDFDKVAKGAYVVYENAADFDTILIATGSEVNLAVSAAKELASQGEKIRVVSMPSTDVFDKQDAAYKEEILPNAVRRRVAVEMGASQNWYKYVGLDGAVLGINTFGASA

SEQ ID NO: 48008 - protein, 803 aa, Bradyrhizobium elkanii
MLLDLASRDGEFKEVTARMRRLMLNLLGGAKDYSVVPIQGGGSFAMEAALSSFVSRNDKPLVCINGIYGERIFKILRLWGVEALKLVKRATEPLEPQEVAEQLSRNPGVTHLCLVHCETTTGIVNPVDAIIEEARRRGVKTIVDGMSSFGAIDIDLSRGGPDVLVTSSNKCIEGPPGVAFVIASRELLEKAVQEPRSFVLDVRDQWLSLERTGEWRSTPPTHIVQATTKALEILEGEGIDARRRRYEKVRDDLVQELEGVVSPLLSAELQSPVCVAFRAPSGIADQAGFDGLYRHLAAHNLYIYSKLHLATRSFRVGCIGEIQPSWIEQLGCAFRTYFRSGPASSMGTPSTRQACERGVEMSSSFAKDSQLPFSAETAVLHAGYRRDPVTKAVAVPIYQNTAYELDGDLNHIADVYNVKADGFTYTRIINPTTRALEKRYAAVDMGSDSLAVASGQAATFLAIVNLSSGEVGDNIVASPYLYGNTWNLLHNTLKRLGISVRTADPRRPETFERAIDDRTICLFGEVISNPCLIPLPVKQLAEIGRKHGVPLVVDNTTTPLVCRPSDLGAAITTYSATKYICGHGTTLGGLIVDNGKFSYRGASRFPLFNSPDEAHGGIIWRNALQDVDDLGKSEVLLKARMTWLRDTGAAIAPFASFQLIQGLETLPLRMKQHCANARIVADVLKEHPKVRRVFYPGLFEGADRETVDQTLNPAYGHGAMVMFEVEDEQAGRKFIQNVDLMYHVSNVGDARTLVTHPVSTTHTTVPREKREAAGIFGGSIRLCVGIEDVDDIVRDLDRALSAI

SEQ ID NO: 48009 - protein, 453 aa, Triticum aestivum
  misc_feature (156)..(156): Xaa can be any naturally occurring amino acid
  misc_feature (167)..(167): Xaa can be any naturally occurring amino acid
  misc_feature (271)..(271): Xaa can be any naturally occurring amino acid
  misc_feature (279)..(279): Xaa can be any naturally occurring amino acid
  misc_feature (332)..(332): Xaa can be any naturally occurring amino acid
  misc_feature (335)..(335): Xaa can be any naturally occurring amino acid
  misc_feature (350)..(350): Xaa can be any naturally occurring amino acid
  misc_feature (352)..(352): Xaa can be any naturally occurring amino acid
  misc_feature (362)..(362): Xaa can be any naturally occurring amino acid
  misc_feature (385)..(385): Xaa can be any naturally occurring amino acid
  misc_feature (388)..(388): Xaa can be any naturally occurring amino acid
  misc_feature (403)..(403): Xaa can be any naturally occurring amino acid
  misc_feature (408)..(408): Xaa can be any naturally occurring amino acid
  misc_feature (415)..(415): Xaa can be any naturally occurring amino acid
  misc_feature (424)..(425): Xaa can be any naturally occurring amino acid
  misc_feature (428)..(428): Xaa can be any naturally occurring amino acid
  misc_feature (431)..(431): Xaa can be any naturally occurring amino acid
  misc_feature (433)..(435): Xaa can be any naturally occurring amino acid
  unsure (1)..(453): unsure at all Xaa locations
IPAPLLLASKVQTRHRSQQRNQQIPTQSRLRSTRGSSNPHRLKMQIFVKTLTGKTITLEVESSDTIDNVKAKIQDKEGIPPDQQRLIFAGKQLEDGRTLADYNIQKESTLHLVLRLRGGMQIFVKTLTGKTITLEVESSDTIDNVKAKIQDKEGIXPPDQQRLIFAXGKQLEDGRTLADYNIQKESTLHLVLRLRGGMQIFVKTLTGKTITLEVESSDTIDNVKAKIQDKEGIPPDQQRLIFAGKQLEDGRTLADYNIQKESTLHLVLRLXRGGMQIFXVRPSLGKTITLEVESSDTIDNVKAKIQDKEGIPPDQQRLIFAGKQLEDGRTLXDYXIQKESTLHLVLRLRXWXAVFVKTLTGXTITWRLKSPDTIRQCQGKIQDKXGIXPPDKQRLIFAGKQWXMSTSXGYNIQKXSTSNWDPSXXGSXMPXFXXXLPGLRGGPVIFRTGWFFP

SEQ ID NO: 48010 - protein, 93 aa, Triticum aestivum
MHPTRWELSYMVDLQAAALVISSGGPGRSITVDSTTSVTVRDRDSKDQIRVEVDEVALVVKEVTDGQSTWADIMWRWSAHTALATDEEEASET

SEQ ID NO: 48011 - protein, 379 aa, Sporosarcina ureae
MILVTLEQTLQDDKASVLDKMVEHEQILFCHDKATGLQAIIAVHDTTMGPALGGCRMAPYKTMDLALKDVLRLSKGMTYKCAAADVDFGGGKSVIIGDPLKDKTPEKFRAFGQFIESLNGRFYTGTDMGTTLEDFVHAMKETNYIVGKPVEYGGGGDSSIPTALGVFYGIKATNQNLFGDDKVEGRKYSIQGLGKVGYKVAEHIINEGGNVIVTDINEQAIADIQKLGGSAVRVVSSEEIYSQQADVFVPCAFGGVINDDTLKVLKVRGISGSANNQLAESRHGELLREKGILYAPDYIVNGGGLIQVADELYGTNPARVLAKTENIYTSLLEVFHQAEQDHMTTATAADRMCEKRIADAKNRNSFFTQSNRPKWNFHQ

SEQ ID NO: 48012 - protein, 242 aa, Saccharomyces cerevisiae
MTDRNFSPQQGQGPQESLPEGPQPSTMIQREEMNMPRQYSEQQQLQENEGEGENTRLPVSEEEFRMVQELQAIQAGHDQANLPPSGRGSLEGEDNGNSDGADGEMDEDDEEYDVFRNVGQGLVGHYKEIMIRYWQELINEIESTNEPGSEHQDDFKSHSLPFARIRKVMKTDEDVKMISAEAPIIFAKACEIFITELTMRAWCVAERNKRRTLQKADIAEALQKSDMFDFLIDVVPRRPLPQ

SEQ ID NO: 48013 - protein, 561 aa, Streptococcus pneumoniae
MSNLSVNAIRFLGIDAINKANSGHPGVVMGAAPMAYSLFTKQLHINPAQPNWINRDRFILSAGHGSMLLYALLHLSGFEDVSMDEIKSFRQWGSKTPGHPEFGHTAGIDATTGPLGQGISTATGFAQAERFLAAKYNREGYNIFDHYTYVICGDGDLMEGVSSEAASYAGLQKLDKLVVLYDSNDINLDGETKDSFTESVRDRYNAYGWHTALVENGTDLEAIHAAIETAKASGKPSLIEVKTVIGYGSPNKQGTNAVHGAPLGADETASTRQALGWDYEPFEIPEQVYADFKEHVADRGASAYQAWTKLVADYKEAHPELAAEVEAIIDGRDPVEVTPADFPALENGFSQATRNSSQDALNVVAAKLPTFLGGSADLAHSNMTYIKTDGLQDDTNRLNRNIQFGVREFAMGTILNGMALHGGLRVYGGTFFVFSDYVKAAVRLSALQGLPVTYVFTHDSIAVGEDGPTHEPVEHLAGLRAMPNLNVFRPADARETQAAWYLAVTSEKTPTALVLTRQNLTVEDGTDFDKVAKGAYVVYENAADFDTILIATGSEVNLAVS

SEQ ID NO: 48014 - protein, 921 aa, Yersinia pestis biovar Medievalis str. 91001
MTKYSLRARMMILILAPTLLLGLLLSTSFMVNRYNELQNQIVSAGTNIIEPLAVASEYGMSFRNRDTVRQLINLLHRRHSNIVRSISVFDVDNKLFVTSNYNYNSSQLRLPPGEPVPDSLMLSYRGDSLILRMPIVSESNLSSEQASGQGESDQILGYIAIDLDLQSVRLKQYKEIFISTLLLLFCMCVAILFAYRLMRDVTGPIRNMVNTVDRIRRGQLDSRVEGHMLGELDILKNGINSMAMSLAAYHEEMQQNIDQATSDLRETLEQMEIQNVELGLAKKRAQEASRIKSEFLANMSHELRTPLNGVIGFTRQTLKTSLTPTQTDYLQTIQRSANNLLCIINDVLDFSKLEADKLILEHIPFSLRETLDEVIILLAHTAHEKGLELTLHINNDVPDQVLGDAMRLQQIVTNLLGNAIKFTEEGNIDILVVVKAIASQQVTLMVEIHDTGIGISESQQAQLFQAFRQADASTSRRHGGTGLGLVITERLVKEMGGNISFQSQMSCGSIFRFHLTLELNESIPYRQPDMAHLEGKQLAYIERNSTAARATINILNTTPLQVTHRQSLAQLPEQHYDFLLVGVPIPFRNNMAIHQDKLLTALKIADHVILALPSQSQVEAEQLKQIGAKDCLLKPISSIRLIPLLLAEDTHSKVPSEEQPRKQPKLPFRVMAVDDNPANLKLIGTLLEEQIEETVLCDSGAMAITYAREHTLDIILMDIQMPEIDGIRASEIIHQIPHHQETPIIAVTAHAVKGQQEQLLRLGMADYLAKPIDEARLLQVLSRYQSDNPPLSTASTAESLPLPVPKGAGVIDWAQAVRQAANKEDLARDLLTMLLEFMPQITARVQAILAGADDGDILNLVHKFHGSCACSGVPRLRQLCMTIELQLRQQVNLQDLEPEWLELLDEIENVSEAAKTYLRTE

SEQ ID NO: 48015 - protein, 149 aa, Triticum aestivum
AATKLPKPPKGSPNLRLCLRHPNIIRFKEVVVTPTHLAIVMEYAAGGELFDRICNAGRFSEDEARYFFQQLICGVSYCHFMQICHRDLKLENTLLDGSPAPRLKICDFGYSKSSLLHSKPKSTVGTPAYIAPEVLSRREYDGKTADVWS

SEQ ID NO: 48016 - protein, 459 aa, Polaromonas sp. JS666
MQTFDFDLFVIGGGSGGVRAARMSAQRGARVALAEVAAMGGTCVNVGCIPKKLYSYAAHYGDSFEESHGFGWVGEAPTFDWDLLKANRAREISRLNGVYVQLLTSAEVTIIEGWARLLDAHTVEVDGRRFTAKNVLVSTGGTPTVPAITGREHVVTSDQMFDLSPFPKRLLVVGGGYIACEFASIFNGLGSQVTQVHRRDKLLTGFDDDVRRFIAGEMSKTGINLQLGTHISAITKTDDGLQVEVKDSQDKPASFLVDSVLYATGRVPNASGIGLETVGVAVNRVGAIQVNAQYQTSVPSIYALGDVTARLQLTPVALGEAMVVVDHLFGPTDGKKPRGMSYDFVPTAVFTHPNIGTVGYSEADAREQFGAIRVYRTDFKALKHTLSGSTERTLMKLLVEDATDRVVGLHMVGPDAGEIVQGFAVAMKAGATKAVFDSTIGIHPTAAEEFVTMREPVKA

SEQ ID NO: 48017 - protein, 291 aa, Brassica napus
  misc_feature (47)..(47): Xaa can be any naturally occurring amino acid
  misc_feature (52)..(52): Xaa can be any naturally occurring amino acid
  misc_feature (234)..(234): Xaa can be any naturally occurring amino acid
  unsure (1)..(291): unsure at all Xaa locations
VDPRVRPRVRGVEFLNRHLSAKLFHDKESLLPLLKFLRLHTHQGKTXMLNEXVQNLNSLQHILRKAEEYLAGLSPETPYEDFEAKFEEIGLERGWGNNAERVLDMIRLLLDLLEAPDPCTLENFLGRVPMVFNVVILSPHGYFAQDNVLGYPDTGGQVVYILDQVRAMETEMLQRIQQQGLNITPRILILTRLLPDAVGTTCGERLERVDGSEYCDILRVPFRTEKGIVRQWIXSRFEVWPYLETYTEDAAVELAKELKGKPDLIIGNYSDGNLVASILAHKLGVTQCTIA

SEQ ID NO: 48018 - protein, 314 aa, Arabidopsis thaliana
TLKVSDSVPAPSDDAEQLRTAFEGWGTNEDLIISILAHRSAEQRKVIRQAYHETYGEDLLKTLDKELSNDFERAILLWTLEPGERDALLANEATKRWTSSNQVLMEVACTRTSTQLLHARQAYHARYKKSLEEDVAHHTTGDFRKLLVSLVTSYRYEGDEVNMTLAKQEAKLVHEKIKDKHYNDEDVIRILSTISKAQINATFNRYQDDHGEEILKSLEEGDDDDKFLALLRSTIQCLTRPELYFVDVLRSAINKTGTDEGALTRIVTTRAEIDLKVIGEEYQRRNSIPLRAITKDNCGDYGKMLVAIFGEDDA

SEQ ID NO: 48019 - protein, 396 aa, Prochlorococcus marinus subsp. pastoris str. CCMP1986
MCPAATESKSSNPSSKKKINKKIDSNFKNDREEESIKYQDPIQNSKQKPLNDEGSIENKDEFNGSDEEAKAIGNVKLGPKGIYTEDSIRVYLQEIGRIRLLRPDEEIELARKIADLLQLEELATQYESEKGHFPSVREWAELTDMPLSKFRRRLLLGRRAKEKMVQSNLRLVVSIAKKYMNRGLSFQDLIQEGSLGLIRAAEKFDHEKGYKFSTYATWWIRQAITRAIADQSRTIRLPVHLYETISRIKKTTKVLSQEFGRKPSEEEIAESMEMTIEKLRFIAKSAQLPISLETPIGKEEDSRLGDFIEADIENPEQDVSKTLLREDLEGVLATLSPRERDVLRLRYGIDDGRMKTLEEIGQIFDVTRERIRQIEAKALRKLRHPNRNGVLKEYIK

SEQ ID NO: 48020 - protein, 85 aa, Chlamydia trachomatis
KIFYSLIPVSRFMIARTKIICTIGPATNTPEMLEKLLDAGMNVARLNFSHGTHESHGRTIAILKELREKRQVPLAIMLDTKGPEI

SEQ ID NO: 48021 - protein, 382 aa, Novosphingobium aromaticivorans DSM 12444
MAESTTRTGNLWSAHTADLAALGEKARLRSLAPRRGVDFASNDYLAMSSSPRLAGAVQEAVTRGVPLGSGGSRLLRGNDPEHELLETEAARFFGSESALFFSSGYAANVALLSTLPQRGDLIIYDELVHASMHEGLRLTRATSVSAAHNDPQSFDDAALDWRAKGNTGRVWLAFETLYSMDGDMAPVAEMAQIAERHDAVMLIDEAHATGVFGVDGRGLAASLDGRADTIVLRTCGKAMGCEGALVLAPRVVRDFLVNRGRPFIFSTAPSPLVCAAVREAMRMMADEPERRENLRTLVAHAERALVRHGAEPTGSQILPLILGEDARTMAVAASLQASGFDVRGIRPPTVPQGTSRLRISLTLNATRDDVDALGTALEEALR

SEQ ID NO: 48022 - protein, 133 aa, Antirrhinum majus
MASQQRSTSPGIDDDERKRKRKLSNRESARRSRMRKQQRLDELIAQESQMQEDNKKLRDTINGATQLYLNFASDNNVLRAQLAELTDRLHSLNSVLQIASEVSGLVLDIPDIPDALLEPWQLPCPIQADIFQC

SEQ ID NO: 48023 - protein, 140 aa, Antirrhinum majus
MAPEQQSPNSGSNSNIDERKRKRKQSNRESARRSRMRKQQRLDELMAQESQIQEENKKLQKIIDDSKQLYLNFASENNVLRAQLGELTDRLRSLNSVLEIASEVSGMAFDIPAIPDALLEPWLLPCPIQPIAASADMFRH

SEQ ID NO: 48024 - protein, 216 aa, Pyrococcus furiosus DSM 3638
MPFDRQKIVKAVKEAKARAKPRNFTQSVEVAVNLKDIDLKRPENRFKLEVVLPHGRGKDVKIAVIADGAVAEAARKLGLDVISSAELEEIASSPRQARKLAKKYDFFIAEAPLMPKIGRYLGRYLGPRNKMPVVVPPTLTDLTPIVEKLKKTVRIQLKNNPVVHAPVGTEKMSDEEIAENIEAVLNAIIGKLERGESQVKSVYVKTTMGPAVKIEG

SEQ ID NO: 48025 - protein, 292 aa, Magnetospirillum magnetotacticum MS-1
MLDVIAGMRAVLRAYGERVLIGEIYLPIERLVTYYGPDLTGADLPFNFQLIQTPWRADAVAALVEEYEAALPEGGWPNWVLGNHDQPRIAARVGEAQARVAAMLLLTLRGTPTLYYGDEIGLGHVPVPPERAQDPWERNEPGHGRDPARTPMQWDAGPHAGFTVGTPWLPQSADADRRNVDEMRDDSRSILTLYRRLLSLRRDWRALSVGGYRGLPLPPSLAEAVFAYERFSDGETLRILLNFGNTDCRVPLDGQETWTVLLSTRPGRSGEPVQGEIILAPDEGTILAPALR

SEQ ID NO: 48026 - protein, 315 aa, Arabidopsis thaliana
MANPWWTGQVNLSGLETTPPGSSQLKKPDLHISMNMAMDSGHNNHHHHQEVDNNNNDDDRDNLSGDDHEPREGAVEAPTRRPRGRPAGSKNKPKPPIFVTRDSPNALKSHVMEIASGTDVIETLATFARRRQRGICILSGNGTVANVTLRQPSTAAVAAAPGGAAVLALQGRFEILSLTGSFLPGPAPPGSTGLTIYLAGGQGQVVGGSVVGPLMAAGPVMLIAATFSNATYERLPLEEEEAAERGGGGGSGGVVPGQLGGGGSPLSSGAGGGDGNQGLPVYNMPGNLVSNGGSGGGGQMSGQEAYGWAQARSGF

SEQ ID NO: 48027 - protein, 1088 aa, Aspergillus fumigatus
MGGDVPLRAPSSLPRAPEHPVGQRIKSIYTDRLRQFTDSGQYREQSLISKLYEATTSDEDHVKLSVYSPPDLQRPTFEEATSHEFTPTHIGASFGPSWSTHWFRIRLTVPRDMLDKERLEFHWDANNEGLVWTDNGRPVQGLTGGGERIEWVIPDAWRDGKEHTFYIEMACNAMFGNAPGGDSIQPPAPDKYYTLHTARITAVNVEARALFYDFWIIGDAAREFPGDSWEAHEANMVANAIMDAFIAGHGSRDSVKEARRIAQKYLGDKVDSSDVYETDTQPIVYAIGHCHIDSCWLWPWAETKRKVARSWSNQCDLMDRYPEHRFTCSQAQQFKWLEQYYPSVFDRVKRWVKKGHFQPIGGSWVEHDTNLPSGESLVRQFIYGQRFFESRFGERCSTFWLPDTFGYSSQIPQICRLAGMSRFFTQKLSWNNINNFPHTTFKWVALDGSQVMCHMAPSETYTAEAHFGDVKRSVTQHKSLDHDNTSLLVFGKGDGGGGPTFEHLEKLRRCRGLSDKVGLLPRVKMGDSVDDFFTRLEQKVANGTEFVTWYGELYFELHRGTYTTQANNKRNNRKSEFLLRELEYLSTLASLTKTNGEYNYPKNDIDDMWEGVLLCQFHDCLPGSSIEMCYDDSDKLYAQIFETGERARQQALEALGFPDNSAGKSLVAINTLPWFRSEIVKIPDEFVALTGSRYALARGDPGLIQCQVLDAKRKPTVTVAEIRPGIFRLDNGKLRVDVQDGVITSLYDLEAEREVIAKGGKAGQLVVFDDKPLYWQAWDVEVYHLDSRKELQAGKTSIAEEGPHRVSVATTIQISDQSWVKTTISLAAAVDDQPSYVEFESEVEWQETMKFLKVEFPVDITNTEASYETQYGITRRPTHYNTSWDMAKFEVCCHKWADLSEYGYGVSILNDSKYGFATCGNLMRLSLLRAPKAPDAHADMGRHHIRYAILPHAGPLDARTVRAGYNFNSPLILRRCSGMQSADVFRSIAVRGSQSLILDVVKRGEDDEDVSRGELPKRPGKSIILRIYESLGGRSRGTIHAKFPVKEAWKCNVLEDNEERLEVCKGEDDVAVKIELRAFEVATYRLQL

SEQ ID NO: 48028 - protein, 397 aa, Shewanella oneidensis MR-1
MIFSQVVLAPADPILGLTDTFKADPRQDKVNLGVGIYKDEAGQTPVLQSVKKAEAILLEQEKTKNYLGIEGVQTYNRVVQELLFGEGSELVASGRAATAQAPGGTGALRIAAEFLLRNTPSRTIWVSNPTWANHQNIFETAGLTVKEFGYYNASAHDIDFDGMMTDLANAQAGDIILLHGCCHNPTGIDLTLAQWDLVANLCADKQLVPLFDFAYQGFGTGIEEDAAGLRLVASKVPELLVANSFSKNFGLYNERIGAVTVVAHNADEAVRAFSQVKRTIRANYSNPPAHGALIVSTILSDAALKALWVQELTEMRERIALMRTLFVQSLKDEGVTQDFSFISRQNGMFSFSGLNKSQVARLKDEFGVYIVGSGRISVAGMTKANMPAICKAIAQVV

SEQ ID NO: 48029 - protein, 175 aa, Triticum aestivum
MAPTVMASSATSVAPFQGLKSTAGLPVSRRSNGASLGSVSNGGRIRCMQVWPIEGIKKFETLSYLPPLSTEALLKQVDYLIRSKWVPCLEFSKVGFIFREHNASPGYYDGRYWTMWKLPMFGCTDATQVINEVEEVKKEYPDAYVRIIGFDNMRQVQCVSFIAFKPPGCEESGKA

SEQ ID NO: 48030 - protein, 128 aa, Brassica napus
NAIDALPSTAHPMTQFASGVMALQVQSEFQKAYENGIHKSKFWEPTYEDCLNLIARVPVVAAYVYRRMYKNGDYVPSDKSSDYGANIFHMLGFDDDKMKELMRLYITIHSDHERGNRSAHTGHLVRSA

SEQ ID NO: 48031 - protein, 634 aa, Streptococcus pneumoniae
MSNLSVNAIRFLGIDAINKANSGHPGVVMGAAPMAYSLFTKQLHINPAQPNWINRDRFILSAGHGSMLLYALLHLSGFEDVSMNEIKSFRQWGSKTPGHPEFGHTAGIDATTGPLGQGISTATGFAQAERFLAAKYNREGYNIFDHYTYVICGDGDLMEGVSSEAASYAGLQKLDKLVVLYDSNDINLDGETKDSFTESVRDRYNAYGWHTALVENGTDLEAIHAAIETAKASGKPSLIEVKTVIGYGSPNKQGTNAVHGAPLGADETASTRQALGWDYEPFEIPEQVYADFKEHVADRGASAYQAWTKLVADYKEAHPELAAEVEAIIDGRDPVEVTPADFPALENGFSQATRNSSQDALNVVAAKLPTFLGGSADLAHSNMTYIKTDGLQDDTNRLNRNIQFGVREFAMGTILNGMALHGGLRVYGGTFFVFSDYVKAAVRLSALQGLPVTYVFTHDSIAVGEDGPTHEPVEHLAGLRAMPNLNVFRPADARETQAAWYLAVTSEKTPTALVLTRQNLTVEDGTDFDKVAKGAYVVYENAADFDTILIATGSEVNLAVAAAKELASKGEKVRVVSMPSTDVFDKQDAAYKEEILPNAVRRRVAVEMGASQNWYKYVGLDGAVLGIDTFGASA

SEQ ID NO: 48032 - protein, 586 aa, Sporosarcina psychrophila
MRKTKIVCTIGPASESPELLEQLIEAGMNVARLNFSHGNHAEHKARIDSIRKVAREKGKVVGILLDTKGPEIRTHSMMNGKLELVTGQKIDISMTQVEGNNDVFSVSYDKLIEDVNEGSVILLDDGLIQLEVTGKDVARGLIHTLIINSGSLSNNKGVNIPGVSVQLPGMTEKDAEDILFGIREGVDFIAASFVRRASDVMEIRALLENNNGSNLQIIPKIENQEGVDNIDEILNVSDGLMVARGDLGVEIPPEEVPLVQKNLIEKCNQAGKPVITATQMLDSMQRNPRPTRAEASDVANAIFDGTDAIMLSGETAAGIYPVESVQTMDRIALTTEAAIDYRSVVSTRRREKHGNMTEAIGQAAAYTAINLKVKAVLAPTESGHTAKMIAKYRPGCPVIAVTSSEMCSRKLSLIWGVYPIVGKKASSIDEILQESVEESVKHQYVGHGDVVIITAGVPVGEAGTTNLMKIHVIGDLLARGQGIGKDVAYGRTVVAKNAAEALAYDTEGAILVTNASDRDMMPAIEKCAGLITEEGGLTSHGAIVGLSLGIPIIVGVENATELIQHGKEITMDAESGVIYNGHASVL

SEQ ID NO: 48033 - protein, 414 aa, Comamonas sp. JS46
MKSAYGLTTPQENAELTHVEPGTPMGELLRRFWQPVALSAELTDLPKKIKIMCEELVVFRTKDGALGCLTPHCSHRGTSLEWGRIEKDGLRCCYHGWLYAPDGRVTEMSCETKEFCARANIQHPAYPIMEYGGLVFIYMGPPEKKPLFPLYDIIDTRERNDVELRGMQLWDGYGIGYVKDCNWLQHHENVVDPWHLLVLHQQISGDQFDGALMQGRSKIDFESTDLGVRYRVIKDLPNGNRLVRYAEVVMPNIILVPNIHEQGTVPKNKDRCTEITWTVPVDNEHLTAFSIVAWPLVDGKPVDDWMPGTDVRIKVRPAGQGERTYEERQRNPDDREAQEGQRPIAIHALERLAPSDRGVVMLRRQLKEQIQIVKDGNDPMNIVRDEGANTRIRTNAWNTVLSPEQATKHQGEEA

SEQ ID NO: 48034 - protein, 349 aa, Zea mays
MGKIKIGINGFGRIGRLVARVALQSEDVELVAVNDPFITTDYMTYMFKYDTVHGQWKHSDIALKDSKTLLFGEKPVTVFGISCELVFEPLRVYRNPEEIPWGEAGAEYVVESTGVFTDKDKAAAHLKGGAKKVVISAPSKDAPMFVVGVNEDKYTSDVNIVSNASCTTNCLAPLAKVIHDNFGIIEGLMTTVHAITATQKTVDGPSAKDWRGGRAASFNIIPSSTGAAKAVGKVLPELNGKLTGMSFRVPTVDVSVVDLTVRIEKGASYEEIKKAIKAASEGPLKGIMGYVEEDLVSTDFTGDSRSSIFDAKAGIALNDHFIKLVSWYDNEWGYSNRVVDLIRHMFKTQ

SEQ ID NO: 48035 - protein, 634 aa, Streptococcus pneumoniae
MSNLSVNAIRFLGIDAINKANSGHPGVVMGAAPMAYSLFTKQLHINPAQPNWINRDRFILSAGHGSMLLYALLHLSGFEDVSMDEIKSFRKWGSKTPGHPEFGHTAGIDATTGPLGQGISTATGFAQAERFLAAKYNREGYNIFDHYTYVICGDGDLMEGVSSEAASYAGLQKLDKLVVLYDSNDINLDGETKDSFTESVRDRYNAYGWHTALVENGTDLEAIHAAIETAKASGKPSLIEVKTVIGYGSPNKQGTNAVHGAPLGADETASTRQALGWDYEPFEIPEQVYADFKEHVADRGASAYQAWTKLVADYKEAHPELAAEVEAIIDGRDPVEVTPADFPVLENGFSQATRNSSQDALNVVAAKLPTFLGGSADLAHSNMTYIKTDGLQDDTNRLNRNIQFGVREFAMGTILNGMALHGGLRVYGGTFFVFSDYVKAAVRLSALQGLPVTYVFTHDSIAVGEDGPTHEPVEHLAGLRAMPNLNVFRPADARETQAAWYLAVTSEKTPTALVLTRQNLTVEDGTDFDKVAKGAYVVYENAADFDTILIATGSEVNLAVSAAKELASQGEKIRVVSMPSTDVFDKQDAAYKEEILPNAVRRRVAVEMGASQNWYKYVGLDGAVLGIDTFGASA

SEQ ID NO: 48036 - protein, 598 aa, Bacillus clausii KSM-K16
MMLWQSVVGKLWFTILLLVTAVLTILMVLLLRFTEGNAIEEAESRLNSYANMAKTMYETHTDETSTYDYLQSLSNEFQINITIIKNGAKAWSAQGNRSGEINVATLLEEWSVEGLEKGERIVTEANYPASGQEQDPIEMIVVGVPLSEDYLTSSGIILYQPLSAVEEAAAETRRIIYLSAGIALVLTTVFAFFLSSRITAPLRKMRQAALEVAQGQFHTKVPILTQDEIGQLAIAFNRMRRELNRNISELNQEKEQLSHILASMADGVITLDRQGRILLTNPQAEEVLALLFYEEGQKPITGERKTLPVSLTPLFEQVVSAEKEELQELSVQGRSMAVLMAPLYAEEHVRGAVAVVRDVTEERRHDKLRKDFIANVSHELRTPISMLQGYSEAMVDGVTSSDEERKEVAQIIYDESLRMGRLVNELLDLARMEAGYIDLNLEEVDLDSYLERITRKFASFAREYDVTVELAKPGRGQIAVFDPDRIEQVLTNLIHNAIRHTNPGGLITVVHEQEEERDTFAVVDTGRGIPEEDLPYVFERFYKADKARTRQHGGTGLGLAIAKHIIDAHQGKITVHSRLGEGTTFHFTLPKQQGDKGK

SEQ ID NO: 48037 - protein, 380 aa, Bacillus badius
MSLVEKTSIIKDFTLFEKMSEHEQVVFCNDPATGLRAIIAIHDTTLGPALGGCRMQPYNSVEEALEDALRLSKGMTYKCAASDVDFGGGKAVIIGDPQKDKSPELFRAFGQFVDSLGGRFYTGTDMGTNMEDFIHAMKETNCIVGVPEAYGGGGDSSIPTAMGVLYGIKATNKMLFGKDDLGGVTYAIQGLGKVGYKVAEGLLEEGAHLFVTDINEQTLEAIQEKAKTTSGSVTVVASDEIYSQEADVFVPCAFGGVVNDETMKQFKVKAIAGSANNQLLTEDHGRHLADKGILYAPDYIVNSGGLIQVADELYEVNKERVLAKTKHIYDAILEVYQQAELDQITTMEAANRMCEQRMAARGRRNSFFTSSVKPKWDIRN

SEQ ID NO: 48038 - protein, 377 aa, Yersinia pestis CO92
MKEVRIGLIGTGYIGKAHAIAYAQAPTVFELRGKLVREMVAEVSPALAAQRAQAFGFNRFTCDWRELVADPAIDVVDICSPNYLHKEMALAAIHHGKHVYAEKPLALNARDASEMAAAATRAGVKTLVGFNYIKNPSAKLAKEIIERGEIGEVIHFYGTHNEDYMADPNTPIHWHCLHATAGLGALGDLAAHIVSMAQYLVGEITQVCGDLKTVVVTRPASVGSSARVAVENEDQAHAMVRFVNGAQGVIEASRVACGRKMGLSYMITGTQGAISFTQERMAELKLYLHNDPVNRQGFRTLLVGPAHPEYAAFCMAAGHGIGFNDQKTVEVRDLIDGIAMDTPLWPDFAEGWKVSRILDAIALSHQDSRWVNVTDIV

SEQ ID NO: 48039 - protein, 634 aa, Streptococcus pneumoniae
MSNLSVNAIRFLGIDAINKANSGHPGVVMGAAPMAYSLFTKQLHINPAQPNWINRDRFILSAGHGSMLLYALLHLSGFEDVSMDEIKSFRQWGSKTPGHPEFGHTAGIDATTGPLGQGISTATGFAQAERFLAAKYNREGYNIFDHYTYVICGDGDLMEGVSSEAASYAGLQKLDKLVVLYDSNDINLDGETKDSFTESVRDRYNAYGWHTALVENGTDLEAIHAAIETAKASGKPSLIEVKTVIGYGSPNKQGTNAVHGAPLGADETASTRQALGWDYEPFEIPEQVYADFKEHVADRGASAYQAWTKLVADYKEAHPELAAEVEAIIDGRDPVEVTPADFPALENGFSQATRNSSQDALNVVAAKLPTFLGGSADLAHSNMTYIKTDGLQDDTNRLNRNIQFGVREFAMGTILNGMALHGGLRVYGGTFFVFSDYVKAAVRLSALQGLPVTYVFTHDSIAVGEDGPTHEPVEHLAGLRAMPNLNVFRPADARETQAAWYLAVTSEKTPTALVLTRQNLTVEDGTDFDKVAKGAYVVYENAADFDTILIATGSEVNLAVSAAKELASQGEKIRVISMPSTDVFDKQNAAYKEEILPNAVRRRVAVEMGASQNWYKYVGLDGAVLGIDTFGASA

SEQ ID NO: 48040 - protein, 162 aa, Glycine max
  misc_feature (101)..(101): Xaa can be any naturally occurring amino acid
  misc_feature (113)..(113): Xaa can be any naturally occurring amino acid
  misc_feature (115)..(115): Xaa can be any naturally occurring amino acid
  misc_feature (140)..(140): Xaa can be any naturally occurring amino acid
  unsure (1)..(162): unsure at all Xaa locations
MVRSKTAYQTDVSDHSTFAYRYDRTYLARDKIAEESILEEAAYQIIHDQLMLDGNSRLNLAAFETTWMEPERDKVIVADIDKNDDHMDEDPVSTELQNRSXNMIPHLFNAPLXRXHTAIGGGTVGSSEAIMWDGLAFHRXWRNRKTLDGKPYDIPNIVTGAN

SEQ ID NO: 48041 - protein, 412 aa, Shewanella sp. ANA-3
MKRLAIPLQGAQMLFVAFGALVLMPLLTGLDTSVALFTAGIGTLLFQLITKRQVPIFLASSFAFIAPILYGVQTWGIPSTMGGIIAAGLVYVLLGALVKVRGTDFIHKLLPPVVVGPVIIIIGLGLAPVAVNMALGKSGDGSLTLVPTNTALIISLASLCTTIAVAIFAKGLLKVMPILAGIVVGYGLSLAFGIVDFAVVTAASWIAIPKFVAPEFNWHAIAFMIPVAIAPAVEHIGDILAISNVTGKDFMKKPGLHRTLTGDGVATIAAAAFGGPPNTTYSEVTGAVTLTRNFDPKIMTWTAITAITLAFVGKLGALMQTIPVPVMGGIMCLLFGSIAAVGLNTLIRNHVDLSEPRNLSIVGVTLVFGIGGMAFGIGSFSLTGISLCGIVAITMNLLLPASKHHERDAASH

SEQ ID NO: 48042 - protein, 635 aa, Caulobacter crescentus CB15
MAHQSALIAEDIEAYLHQHQHKSLLRFITCGSVDDGKSTLIGRLLYDSKMIFEDQMAALEVDSRKVGTQGGAIDFALLVDGLAAEREQGITIDVAYRFFSTEKRKFIVADTPGHEQYTRNMVTGASTADAAVILIDARKGVLTQTRRHSYLVSLLGIRHVVLAVNKMDLVGWDKGVFDAIVADYRAFAEQIGLSVFTPIPISGLGGDNMATRSDATPWFEGPILMDWLEAVEVEDDLQAKPFRMPVQWVNRPNLDFRGFSGLIASGSIKPGDRIRALPSGRESRVARIVTLPGDLDQAVAGQSVTLTLEDEIDISRGDVIAAADAPAPVANQFEATLVWMDDEPLPPGRTYLLKLGARTVGASITDIKHRVNVNTLEKTAAKRLELNEIGVCNLSLDQAIPFEAYAENRHMGGFILIDRLSNRTVGAGLINFALRRADNIHWQHTDVTKVSRAALKRQRGQVVWLTGLSGAGKSTIANLVEKRLHALGRHTYLLDGDNVRHGLNKDLGFTEEDRVENIRRVAEVAKLMVDAGLIVLTAFISPFRAERQLARDLLEPGEFIEVFVDTPLAVAEARDVKGLYKKARSGQLKNFTGVDSPYEAPESPELRIDTTAIDPVEAAERIVAWLEGQEIDYTI

SEQ ID NO: 48043 - protein, 338 aa, Prochlorococcus marinus subsp. pastoris str. CCMP1986
MIEKNNLFDLKKDIDLIGLGNAIVDIIVNVDDEFLEINTLKKGSMNLINSNESEALLKNCTVIKKISGGSSANTVVCLAELDNNVQFIGRVKNDNFGNFFSTDIKRSNTIFNTPPIDKGPSSAHSIIFITPDAQRTMCTYLGASIEFEPKDVNYKLIANSKYLYLEGYLWDSDLAKNAFLQAAKLAKESDTKIILSLSDSFCVDRHRESFLELIENYIDIVFCNESEVLSLFQENDLQRCQESISSICELVIITLGSKGSLVVNKDKSEEIKPKLLGKIIDTTGAGDLYAGGFIHGLINNYSLKKCGEIGSICAGQIITQLGSRSNINLQNLLRKHLI

SEQ ID NO: 48044 - protein, 420 aa, Sphingomonas paucimobilis
MTEAAAQPHALPADAPDIAPERDLLSKFDGLIAERQKLLDSGVTDPFAIVMEQVKSPTEAVIRGKDTILLGTYNYMGMTFDPDVIAAGKEALEKFGSGTNGSRMLNGTFHDHMEVEQALRDFYGTTGAIVFSTGYMANLGIISTLAGKGEYVILDADSHASIYDGCQQGNAEIVRFRHNSVEDLDKRLGRLPKEPAKLVVLEGVYSMLGDIAPLKEMVAVAKKHGAMVLVDEAHSMGFFGPNGRGVYEAQGLEGQIDFVVGTFSKSVGTVGGFVVSNHPKFEAVRLACRPYIFTASLPPSVVATATTSIRKLMTAHEKRERLWSNARALHGGLKAMGFRLGTETCDSAIVAVMLEDQEQAAMMWQALLDGGLYVNMARPPATPAGTFLLRCSICAEHTPAQIQTVLGMFQAAGRAVGVIG

SEQ ID NO: 48045 - protein, 147 aa, Myxococcus xanthus
MQTRNPFNSAVVVNPLMRDVDALFRELTQPMWRQAPRERTPAADITESESGLTLHLDMPGLEAKAIQVTVEKDILTVQSERKAEPRAEGVNVRRQERAFGTFARSFALPDTVDASRVEARYEQGVLTLTLPRREESKPRVIEVKVQG

SEQ ID NO: 48046 - protein, 426 aa, Vigna aconitifolia
MFKPHLLAVVSRCNSFFGCVDICCNWGNSAPRTLKGLKSVTSEQVFEREQKYGAHNYHHCSAYRAKGVSLDMEGKRYFDFLSAYSAVNQGHCHPKIVNTMVEQAQRLTLTSRAFYTDVLGEYEEFLTKLFNYDKVLPMNTGVEGGETACKIARCWAYMKKKVPENQAKIIFAENNFWGRTLSAISASTDPMSYDELRPYMPGFEIVKYNDTAALEKAFQDPNVCAYMVEPIQGEAGVVALDAGYLTEVRELCTKYNVLFIADEVQTGLARTGRMLAVDHEDVKPDLLILGKALSGGLYPVSAVLRDDHIMDCIQPGLHTAMDVMDPRMRILAASRYYVRVARERCENAQIQATYLRKELNTLPKDVVPVVRGKGLLNAIVINKKFDAWDVCLNLCKPTHGDIIRFATTGHHRGTDPRMCQYYQKYH

SEQ ID NO: 48047 - protein, 225 aa, Bradyrhizobium sp. BTAi1
MLDRVEQIEMAGCSTRPVSLLEAMRERTKALHVTAERTGVVAELLRGRGTRQAYALLLRNLLPVYETLEAELVRHQSSLVLSRIVRPELHRSPAIKADLATLDATGLPLLPEAITYVGAIKKAGSGSGHPLLAHAYTRYLGDLSGGQIIKKILARSLALPPEALSFYEFPEIADIRRFKDAYRDVLELAGAAMADPGAVVEEAATAFKLNITLSEALQAAAGLGA

SEQ ID NO: 48048 - protein, 436 aa, Propionibacterium acnes KPA171202
MMSVPNKKPEGGPTATLILDGQEYTLPVIAGTTGDRVIDISNLRQLTGGVTTFDPAFANTASCRSAISWIDGEEGVLTYRGLPIETLAKERVSFVETAWLLIFGHLPTEAQRDDFRNRLTEYSALHRSMNLHFNAFPPNGHPMAIMSSMINAMSTHDRPRITDEESFTDAAAKLMSKVRTIAAASYKASIGEPAIYPRYDLKYVENFMHMMFSLPYRAYEPDPVAARALNLFFVLHADHGQNCSTSTVRMVGSSGANLFTSCSAGVCALWGDRHGGANVNAVLALQRIRNSGLTPRQYLAKAKDSGERISGFGHRVYRNWDPRARIFRSVVGPLLDTMHKPDPLLDVAMELEEAVLADDYFIERRLYPNVDFYSGIVLRALGIPLNMFTVMFAIGRMAGWIAHWKEVFEDPTTRISRPRELYDGPVSTPWVPRGER

SEQ ID NO: 48049 - protein, 156 aa, Photorhabdus luminescens subsp. laumondii TTO1
MLEKSLILIKPDAVHRGLVGKIITEFEEKGFKIHNIRSLVLNDEDFYFLYPKILGKPFHKQFKTVMQSAPSTLLVLSGHNALGSIFNFAGAYSNPEEDTTRSIRQKYSVWTGADVIHRAADSNEAMKQIAYFFDEVCEYRHNNEAFMAKEYWEPNV

SEQ ID NO: 48050 - protein, 405 aa, ASPERGILLUS NIDULANS FGSC A4
MLFRTAWARQAAPLRRQAFAPLARRSVTTDAASSHAENIPEDENKPFTVRLSDESFETYEIDPPPYTLEVTKKELKQMYYDMVAMRRMEMAADRLYKEKKIRGFCHLSTGQEAVAVGIEHALTREDKIITAYRCHGYAMMRGGTIRSIIGELLGRREGIAYGKGGSMHMFAPNFYGGNGIVGAQVPVGAGLAFAQQYNEEKSTSVVLYGDGASNQGQVFEAFNMAKLWNLPVLFGCENNKYGMGTSAARSSALTDYYKRGQYIPGIKVNGMDVLATKAAVKYGKDYAISGNGPLVYEYVTYRYGGHSMSDPGTTYRSREEIQRMRSTQDPIQGLKQKILDWGVMSEEDLKGLDKSARAHVDEEVAIAEKMPLPENNSRILFEDIYVRGSEPRWMRGRTVDETFYY

SEQ ID NO: 48051 - protein, 362 aa, Solibacter usitatus Ellin6076
MTPLSKSSASTLKDAWYCAGWSHELRYPRILGRKLLNRQLALFRDQQGRLHALDAACPHRGADLSLGHLVEGHIQCPLHGWRFDDTGKCVCIPSQLPEVKIPPGAMASTYRVVERQGIIWIWMGAVRDPMPAPPHQDVWEASPARHRHFLPPQLWRCSFFNAVENAIDNTHLPFLHAGLLGPNQQQLYPTQNLVVDEDLRGFRGEDSPESPWGFPRSRQIFDGVLERVVAAWMGMNEIRREYYRFDLGGSLSFYVEWDSGTWDVLAGHWTPSDSFHSWYFGMSIRTRATHWVGDIFQKWFGKKLSLQDKLGVERLLSNEPDNLPSTVSVVGDEPALTFRRIHNYHVNHQQGDGLAASSTNWV

SEQ ID NO: 48052 - protein, 462 aa, Burkholderia sp. 383
MQPASPAQPAAHGADAADSARDLVYGPNDRPAPMVAFVAALQHLLAIIVPIVTPGLLICQALGVSSRDTTLIVSMSLVISGIATFVQCKRFGPLGAGLLIVQGTSFNFVGPLIAGGSLMVKQGTPVETVMAAIFGVVMAGSFVEMGVSRILPFVKRLITPLVTGIVVLLIGLTLIKVGLISMGGGFGAMAKGTFASAENLTLSGLVLGTIILLNRVPIVWVRSTALVIALVIGYLAAAFLGRLDFTGMHQAALFQVPTPLHFGIGFSWSLFVPMLIIYLVTSLEAIGDVTATSKISSEPVEGPVWMQRIKGGVLVNGANSLLAGVFNTFPSSVFAQNNGVIQITGVASRHVGIWIAGMLVVLGLFPVVAGVLQAVPEPVLGGAAMVMFGAVAASGINILSGVHLDRRALLIIAVSLALGLGVSQVPDILNSLPHALKNVLESGVATGGICALVMNWFLPEKK

SEQ ID NO: 48053 - protein, 267 aa, Bordetella parapertussis 12822
MTIPSFGVGTFRLTGQTVIDSVRNAIDLGYRAVDTAQIYGNETEVGQAIAESGVARSELFVTTKIWTDNYARAKLLPSLRASLEKLRTDYVDLTLIHWPAPGNGVALPEYMEALAEAKALGLTRRIGISNFNIALTRQAIAAVGQGEIATNQIELSPYLQSARLTAFLREQGIAVTSYMTLAYGKVLKDPVLARIADKHRSTVAQVALAWALQQGYAVIPSSTKRENLASNLLARGLALDADDMARIAALERNGREVDPEGLAPAWD

SEQ ID NO: 48054 - protein, 285 aa, Arabidopsis thaliana
MAKDVEGPEGFQTRDYEDPPPTPFFDADELTKWSLYRAVIAEFVATLLFLYITVLTVIGYKIQSDTKAGGVDCGGVGILGIAWAFGGMIFILVYCTAGISGGHINPAVTFGLFLARKVSLIRAVLYMVAQCLGAICGVGFRQSFQSSYYDRYGGGANSLADGYNTGTGLAAEIIGTFVLVYTVFSATDPKRNARDSHVPVLAPLPIGFAVFMVHLATIPITGTGINPARSFGASVIYNKSKPWDDHWIFWVGPFIGAAIAAFYHQFVLRASGSKSLGSFRSAANV

SEQ ID NO: 48055 - protein, 408 aa, Oryza sativa
MALHAAPPPPPPFTAGRLPTTSRRPCFSAGRIFRCSLPAAAARPRNAAFLAPLRTSSAVCTKAVSNSDGTPGTSSSPHVVCFGELLIDFVPTVNGVSLAEASAFKKAPGGAPANVAVGIARLGGSSAFIGKPQFELGRNIEKVGDDEFGYMLADILKENNVNNQGLLFDAHARTALAFVTLRNDGEREFMFYRNPSADMLLEEKELDLDLIRKAKIFHHGSISLITEPCKTAHIAAAKAAKDAGVLISYDPNLRLPLWSSADDARDGILSIWETADVIKISEEEVSFLTKGEDPYDDSVIKKLMHPNLKLLLVTEGPEGCRYYSKEFNGRVGGLKVNAVDTTGAGDAFVAGILSQLSVDFSLLQDEGRLKEALKFANVCGALTVTERGAIPALPTRQQVVDALTKVVA

SEQ ID NO: 48056 - protein, 143 aa, Saccharomyces cerevisiae
MSDVEEVVEVQEETVVEQTAEVTIEDALKVVLRTALVHDGLARGLRESTKALTRGEALLVVLVSSVTEANIIKLVEGLANDPENKVPLIKVADAKQLGEWAGLGKIDREGNARKVVGASVVVVKNWGAETDELSMIMEHFSQQ

SEQ ID NO: 48057 - protein, 70 aa, Glycine max
  misc_feature (21)..(21): Xaa can be any naturally occurring amino acid
  unsure (1)..(70): unsure at all Xaa locations
MHISGVVLVEKACPYLQTSRXVRIMEYLDLPFPQLGSLLQFVPLLVRDFADDTDANNLDLIPRCSEWCDI

SEQ ID NO: 48058 - protein, 233 aa, Thermoplasma acidophilum
MGLKESKKENLNLNSGWLTLSIILLWVGWFGFNPGSELAFTTETVIVVITTFLAAASAMVSTMLTKFLVSKQDPGLIYAVNGVLMGLIVITPLAGYVSPGSAIILGLISGPIFVSAESIFSKHKWYSDPIGVLPGHMVGGIFGLLMIAFFTQTPFADASGASNLPNGILFGGGIMALHQLGLEAMAVVVVGAFVFTVSYASVYAISLLLNGILRDSEYSPARPANRLAKDTGA

SEQ ID NO: 48059 - protein, 605 aa, Xanthomonas oryzae pv. oryzae KACC10331
MRRHWQSCPSFNPGSRMIQPAAARPNPLRKLGSLRTLWPFVQRQRGLFVAWLVALTISAAATLSLPAAVKRMIDQGFSGDAQINQAFALLFAVSVVLALASAARFYFVALLGEKVVADLRGRLYAHLIGLDAGFHDRSRSGELVSRLSADSELLRGLIGSTMSVALRSVATVIGSVVMLFVTSPRLAGFTLIGIPLAVLPIVLGARRLKKISRASQDRVADANTLAAETLGAVRTVQAHARERYESQRFSTALLTAIDTAKVRIRTQATVTAVAIMLIFGAIVAVLWSGAHDVVSGRMTPGTLGQFVLYAMIGGGSVGALAEVWNELQRAAGGMGRVGELLDEQPAIVAPAAPQPLPQPLRGAIHFDQVVFHYPQRPDAPALDGFDLHVSPGETVALVGPSGAGKSTVLAMLLRFHDPVSGKVRIDNIDLRDIDPVLLRERIALVPQQPTLFAASAADNIRYGRLQASDAEVEAAAAAAEADVFIRALPQGYRSELGERGTRLSGGQQQRVAIARALLKDVPILLLDEATSALDAQSERAVQQALDRLMEGRTTLVIAHRLATVLKADRIVVMDAGRIVAQGTHAQLIAEGGLYAELARLQFIDQ

SEQ ID NO: 48060 - protein, 505 aa, Cicer arietinum
MGSRNIVQQQNRAEAAVPGAMKQKNIAGEKKNRRALGDIGNLVTVRGVDGKAKAIPQVSRPVTRSFCAQLLANAQTAAADNNKINAKGAIVVDGVLPDRRVAAARVPAQKKAAVVKPRPEEIIVISPDSVAEKKEKPIEKEKAAEKSAKKKASTLTSTLTARSKVASGVKTKTKEQIVDIDAADVTNDLAVVEYVEDMYKFYKSVENESRPHDYMGSQPEINEKMRAILIDWLVQVHHKFELSPETLYLTINIVDRYLASETTIRRELQLVGIGAMLIASKYEEIWAPEVHELVCISDNTYSDKQILVMEKKILGALEWYLTVPTPYVFLVRFIKASMTDSDVENMVYFLAELGMMNYATLIYCPSMIAAASHQVYAARCTLNKAPFWNETLQLHTGFSEPQLMDCAKLLVAFHKMAGDQKLKSIYRKYSNLERGAVALLSPAKSLFVFLIELLMNAIEKMQCSLFFTSEIWCRFLTCFGRNISPGCSLVLLQRNFLIPLILYAL

SEQ ID NO: 48061 - protein, 60 aa, Brassica napus
  misc_feature (32)..(32): Xaa can be any naturally occurring amino acid
  misc_feature (48)..(48): Xaa can be any naturally occurring amino acid
  unsure (1)..(60): unsure at all Xaa locations
MAGGGAPAATADDPQAHPPKDQLPNISYCIIXPLPWPEPILPGCQYYXVMLGTTVLIPTA

SEQ ID NO: 48062 - protein, 550 aa, Kluyveromyces lactis NRRL Y-1140
MPSEYSSPPVYSTSNGFKYSHHPYGAQYSRPDGPLLLQDNHLIESLARFDRERIPERVVHAKGGGCHIEFELTDSLSDITYAAPYQSPGYKCPGIIRCSTVGGESGAPDTARDPRGFSFKFYTKWGNHDWVFNNTPVFFIRDANKFPHFIHTQKRSPRNHLGQASDTSMYWDYLTQNIESIHQITYMFGDRGTPASWSDMSAYSGHTYKFINAEGKLTYVQIHVLPENGFKTLSLEEANKLAGENPDYNNQLLFEKLEAGERPKFNCYVQTMTPEQAENFRYSINDLTKIWPHKEFPLRKFGTITLTHNVDNYFEEIEQLAFSPSNTCIPGIEPSNDSVLQSRLFSYPDTQRHRLGTNFMQLPVNRPVNMGREACPFAGANFQRDGPMCMFNFKDQPNYIASSGKNLVQFNTLDDNNAKSTHERFTGVVLEEDVVAEIKRQEENRVEHERVVNGKINEYYIVNGASPVDLEQPRALYEKVYNDKDKKTFVKNVVAHASKISNPEIKTRVSQYFGLLNEDLGKQIAEGLEIQWEPVSFETYARRISIASAF

SEQ ID NO: 48063 - protein, 909 aa, Caulobacter crescentus CB15
MRNPALSIDVDRPTSRHVRQNAHLLSDLLIEAITYLEGEEKAELVAKARKAASREDVVNGDAPLLDHLFSDLTTEQAVFLARAFASHSLLANIGEDVAGRRRHAEADAQPGDERPRTLIDAVKALKAAGKSDAELAKIFAAMNVVPVLTAHPTEVRRRSMVDRETEISRLMALRRHHLPPDLEAEIRESLFREIALMWRTRLYRPERITVKDEIRNALSIVRTSILPAIIDLYGDWTGKIGQHGQLAPLLKMGSWLGGDRDGHPGVNGQTLKLALSSQSRVILDWYAGEVRKLWSNLAVSTAYTPVSDELLALAAQAKDPSVHRIDEPYRLALELIFDRLTAVSQKLTGAPVAFASGVTSVEPYAHPDAFVADLSVIIDSLERNGGERLVGSALRTLVEVAKACGFHLMSLDLRQNADVHERTLDELFRRAGTGVEYLKLDEDARCKVLIDELSHQRPLVSPFTAYGEETSKELATMEAAAQAVRDYGHGCLGAYIISKSATLSDMLEPLVLLKQVGLVWGGAAPRASVKVAPLFETIGDLENGPAVLRQWLELPLSRTILGDRPVQEIMLGYSDSNKDGGYVASRRGVATGASALAHEADRMGVGLQLFHGRGGSVGRGGGPAAEAVLAQPAGTVQGRIRMTEQGEMIARRFGDQPTARRNLDGLAAAVLMASERPIPKRDPKVEGAMTALAQSSFEGYRALVYDDAAFEDFFWSVTPISEIVGLNIGSRPASRTASRKIEDLRAIPWVFSWSQARFMLPGWYGFASGVERAGLSVEQLRDLAGNFDFFASLLSNMELALAQSQMGIAARYVALSPDKANAERIFATIRREHEAATGLALAIRGGAALLDNQPDLAESVALASRSVDPLNHLQLELLSRRRAGDIDEELRLAIQLTVAGIAAGLRNTG

SEQ ID NO: 48064 - protein, 333 aa, Prochlorococcus marinus subsp. pastoris str. CCMP1986
MKSILEQLSSITVVVADTGDLDAIKKFQPRDATTNPSLILAAAKNPDYIKLIDQALESSRKSLPAGFSESELIKETIDQVSVFFGKEILNLISGRVSTEVDARLSFDTEATVTKARKLINHYKSFGINKERILIKIASTWEGIKAAEILEKEGIKCNLTLLFNFCQAVACANAKITLISPFVGRILDWHKAKTGKDNFAGCEDPGVISVTKIYNYFKEKGFKTEVMGASFRNIDEIKELAGCDLLTIAPKFLDELNREEGELIKKLDEDTQSQSSIDYKFDEKDFRLSMLEDQMASEKLSEGITGFSKAIEELEELLLKRLSEINNQKLISTT

SEQ ID NO: 48065 - protein, 525 aa, Xanthomonas oryzae pv. oryzae KACC10331
MIGCSLTPFRSGSLHIGNTGQATTAHPHPALRATFSRWRRERQRTLEMAENYDVVVIGAGPAGYHAAIRAAQLGMKVACIDAALGKDGKPALGGTCLRVGCIPSKALLDSSRQFWNMGHLFGDHGISFNDAKMDVPTMIGRKDKIVKQFTGGIAMLFKANKITPYYGFGQLQPGNIVKVTQHEGGEIALKGTNVILAAGSESIELPFAKFDGDTIVDNVGGLDFTAVPKRLAVIGAGVIGLELGSVWKRLGAEVTILEALPDFLALTDAEVAKTALKEFKKQGLDIKLGAKVGKTEITGSGDAKQVLLSYTDAAGEQTLTVDKLLVAVGRKAATKNLLAEGTGVKVTDRGQIEVDGHCHTGVDGVWAIGDCVRGPMLAHKGFEEGIAVAELIAGLPGHVNFDTIPWVIYTEPEIAWVGKTEQQLKAEGVAYKAGSFPFAAIGRAVAMGEPAGFVKVIADAETDRVLGMHLVGVGVSELVHEGVLTMEFNGSADDLARICHAHPTLSEAIHDAAMAVSKRAIHKAN

SEQ ID NO: 48066 - protein, 96 aa, Cronartium comandrae
IWIDGDGGLRCKTTTMDLPSSGQVTVADCKEWNFDGSSTNQAAGHDSDVFLRPAAVFKDPFRGGKNVLVLAECYNADGTPNKTNYRYAAKKTMDAA

SEQ ID NO: 48067 - protein, 367 aa, Escherichia coli K12
MSDSQTLVVKLGTSVLTGGSRRLNRAHIVELVRQCAQLHAAGHRIVIVTSGAIAAGREHLGYPELPATIASKQLLAAVGQSRLIQLWEQLFSIYGIHVGQMLLTRADMEDRERFLNARDTLRALLDNNIVPVINENDAVATAEIKVGDNDNLSALAAILAGADKLLLLTDQKGLYTADPRSNPQAELIKDVYGIDDALRAIAGDSVSGLGTGGMSTKLQAADVACRAGIDTIIAAGSKPGVIGDVMEGISVGTLFHAQATPLENRKRWIFGAPPAGEITVDEGATAAILERGSSLLPKGIKSVTGNFSRGEVIRICNLEGRDIAHGVSRYNSDALRRIAGHHSQEIDAILGYEYGPVAVHRDDMITR

SEQ ID NO: 48068 - protein, 637 aa, Shewanella sp. ANA-3
MNDWSIDAARAGYNVTHWSQGFYGISDQGEVTVSPDPKNPDHKIGLNELAKDMVKAGVALPVLVRFPQILHHRVNSLCQAFDQAIQKYEYQADYLLVYPIKVNQQKTVVEEILASQASKEVPQLGLEAGSKPELMAVLAMAQKASSVIVCNGYKDNEYIRLALIGEKLGHKVYIVLEKLSELKMVLAESKRLGVKPRLGLRARLAFQGKGKWQASGGEKSKFGLSAAQILTVVDQLKQEDMLDSLQLLHFHLGSQIANIRDIRQGVSEAARFYCELRELGASINCFDVGGGLAVDYDGTRSQSNNSMNYGLSEYANNIVNVLTDICNEYEQPMPRIISESGRHLTAHHAVLITDVIGTEAYQVEEIQPPAEESPQLLHNMWQSWTEISGRADQRALIEIYHDSQSDLQEAQSLFALGQLSLAERAWAEQANLRVCHEVQGLLSTKNRYHRPIIDELNEKLADKFFVNFSLFQSLPDAWGIDQVFPVLPLSGLDKAPERRAVMLDITCDSDGIVDQYVDGQGIETTLPVPAWSAESPYLMGFFMVGAYQEILGDMHNLFGDTNSAVVSIEENGMTNIESVLAGDTVADVLRYVNLDAVDFMRTYEELVNQHIAEEERAQILEELQVGLKGYTYLEDFS

SEQ ID NO: 48069 - protein, 417 aa, Escherichia coli K12
MLEQMGIAAKQASYKLAQLSSREKNRVLEKIADELEAQSEIILNANAQDVADARANGLSEAMLDRLALTPARLKGIADDVRQVCNLADPVGQVIDGGVLDSGLRLERRRVPLGVIGVIYEARPNVTVDVASLCLKTGNAVILRGGKETCRTNAATVAVIQDALKSCGLPAGAVQAIDNPDRALVSEMLRMDKYIDMLIPRGGAGLHKLCREQSTIPVITGGIGVCHIYVDESVEIAEALKVIVNAKTQRPSTCNTVETLLVNKNIADSFLPALSKQMAESGVTLHADAAALAQLQAGPAKVVAVKAEEYDDEFLSLDLNVKIVSDLDDAIAHIREHGTQHSDAILTRDMRNAQRFVNEVDSSAVYVNASTRFTDGGQFGLGAEVAVSTQKLHARGPMGLEALTTYKWIGIGDYTIRA

SEQ ID NO: 48070 - protein, 501 aa, Staphylococcus sp. 1863A
VESALEKIGAKNIESSYRRGEAVFELPDDIEVESAIKAIDEANYQAGEIEEVSSLENVALINEDNYDLLIIGSGAAAFSSAIKAIEYGAKVGMIERGTVGGTCVNIGCVPSKTLLRAGEINHLSKDNPFIGLQTSAGEVDLASLITQKDKLVSELRNQKYMDLIDEYNFDLIKGEAKFVDASTVEVNGTKLSAKRFLIATGASPSLPQISGLEKMDYLTSTTLLELKKIPKRLTVIGSGYIGMELGQLFHHLGSEITLMQRSERLLKEYDPEISESVEKALIEQGINLVKGATFERVEQSGEIKRVYVTVNGSREVIESDQLLVATGRKPNTDSLNLSAAGVETGKNNEILINDFGQTSNEKIYAAGDVTLGPQFVYVAAYEGGIITDNAIGGLNKKIDLSVVPAVTFTNPTVATVGLTEEQAKEKGYDVKTSVLPLDAVPRAIVNRETTGVFKLVADAETLKVLGVHIVSENAGDVIYAASLAVKFGLTIEDLTETLAPY

SEQ ID NO: 48071 - protein, 132 aa, Oryza sativa (japonica cultivar-group); identical to SEQ ID NO: 1308

SEQ ID NO: 48072 - protein, 334 aa, Nocardioides sp. JS614
MKVLVTGGAGYIGSTTAKALEEAGHTPVILDSLLTGPLAFVRDRIFYEGDIADRALVRRVFDEHPDIDATIHMAARIVVPESVEKPYEYYRDNVAKSLELFDELNTLGKGRVLFSSSASIYALKDDFEVSEGDRLEPASPYARTKRMMEEVLQDMSAATDLRAIILRYFNPIGSDPDLESGIYAKEPSHVLGQLVMAARGQKDAFTITGTDHPTRDGTGIRDYIHVWDLARAHVRAVERFDEVIDAAGEPSVIINVGTGSGVTVRELVTAFQNVFGQEVPVREAPPRPGDAVGAFANVDRSGRLLDWRTELSLEDAIASALAWGAKRQEILGYE

SEQ ID NO: 48073 - protein, 278 aa, Shewanella sp. MR-4
MSNTATQTIPHQAGRYHAAFSRLKAEGRGAFVPFVTLGDPSPELSLKIIDTLVQNGADALELGFPFSDPLADGPVIQGANLRALAAGTTPTQCFNLLAQIRAKYPELPIGLLLYANLVFANGIDAFYAKAQQAGVDSVLIADVPVEEAAPFIQAAKAHGIAPIFIAPPNADSDTLEKVSQSGEGYTYLLSRAGVTGTDTKAGTPVEEILAKLQAFNAPPPLLGFGIAEPAQVSAAIQAGAAGAISGSAVVKIIEAHQQDEAKLLSTLGEFTRAMKAAT

SEQ ID NO: 48074 - protein, 460 aa, SYNECHOCOCCUS SP. WH 8102
MKEKRKVPVTILTGYLGAGKTTLLNKILREEHGKKIAVIENEYGEVGIDQGLVINADEEVFEMSNGCICCTVRGDLIRVLGNLMKRRDKFDYVLVETTGLADPGPVAQTFFMDDEVRDEFTLDGIVTLVDSAHINQQLEHSTESAEQVAFADVLILNKTDLVSKNEVNVLESRLRDMNKMARILRSKEAGVDVEDVLNLGAFDLQQTLDRRPTFLEPEYPFEWTGVYELKKGNYRLYFDDGPDPTMLITAIEFNSSNGKDLDGYAEDCVRIFSKEPKQLMPGEAISFNEVIELQLQDAGQKAFELYIDNKSTIGLFTQHTAEEFNIRLDDNKDDQTRDKKFSNITKGIDTKTERIWVAEHEHDDEVGSIALESLGNINPDKLNDWISKLLREKGVDIFRTKGFISYAEESRKIVFQGVHMLFTAEPGSEWGNEPRKNQLVFIGRNLDEDALRTEFEKCLA

SEQ ID NO: 48075 - protein, 420 aa, Leuconostoc mesenteroides subsp. mesenteroides ATCC 8293
MTRVVITGLGAVTPLGNDTQSFLDGIFNEKIGIKPITKFDASETGITVAGQVDGFDPAARVGKRDARKMDLFSQYAVDAADQALTNAGLKAEEGAEAPTTVADPTRFGVILGNGIGGLTTIQDQVIKMHDKGPQRVSPLFVPESIPNMVSGNVSLRFGAKGINSTIVTACASATNAIGEAFWRIQSGKADVMLTGGSEATVNEIGIAGFAALTALSKEEDPTQASKPFDKNRHGFVLGEGSGILVIESLEHAQARGAHILAELVGYGASSDAYHMTSPSPDGEGAARAIRDALNDANLEANQISYINAHGTATGANDSGEAHAIATVFGENTVPVSSTKGMTGHLLGAAGAIEALISVGSLTRGELPVNVGLDEQDEDTKVVNLVDQENKHQAPEYVMSANYGFGGHNAVIVFKKWHEGV

SEQ ID NO: 48076 - protein, 592 aa, Polaromonas sp. JS666
MTQKTRFYVPDSVQHCTWTRQRYHRPMLLETLGAAREIGRINEIAGVLIRHGFGDTVRRLGLADRLERAGHIVKWEHAADLARLEPPVQVRLALEELGPTFVKLGQILAGRADLLGPEWIAELQRLHSQVPAVPLDDLRPQLREDLGDEPENIFARFDVEPLAAASIAQVHRAQLHDGSEVVVKIRRPGIREVIEADLRLLDRLAAIAEADMPSLKPYRPRRLVREFARSLRRELDLAVECHNAERVADNFAQTPHVLIPRVHWAHTSERINTQDFVDGIPGERLDLLPADAGFDRTVLAQRGARAVLKMIVEDGFFHADPHPGNVFYLPGNRIAFIDFGMVGSLSPQRREELLQLLLGLVTRDAQAVATVLLDWAGDDHGQSLSQLETEIEAFVDQYHGSPLAQLNLGEMLTRITTLLREHHLTLPPDLALLIKAFISLEGMGRGLDPGFHMATEAMPLLQEVARARYQPGAIAARGWKTLLRALRLAEQLPHDLSRLLRNARRGQLRVSIEVTHLKRVGDQLDRAANRLAMALVIAALIIGSSIVMTVRGGPTLFGLPVFGFLGFCGAVACALWLVRAIWRSSRPQDDDA

SEQ ID NO: 48077 - protein, 520 aa, Trametes hirsuta
MSRFQSLLAFVVASLAAVAHAAIGPTADLTISNAEVSPDGFARQAVVVNNVTPGPLVAGNKGDRFQLNVIDNLTNHTMLKSTSIHWHGFFQKGTNWADGPAFVNQCPISSGHSFLYDFQVPDQAGTFWYHSHLSTQYCDGLRGPFVVYDPNDPHASLYDVDNDDTVITLADWYHTAAKLGPAFPLGADATLINGLGRSPSTTAADLAVINVTKGKRYRFRLVSLSCDPNHTFSIDGHDLTIIEVDSINSQPLVVDSIQIFAAQRYSFVLNADQDVGNYWIRANPNFGNVGFAGGINSAILRYDGADPVEPTTTQTTPTKPLNEVDLHPLATMAVPGSPVAGGVDTAINMAFNFNGTNFFINGASFVPPTVPVLLQIISGAQNAQDLLPSGSVYSLPSNADIEISFPATAAAPGAPHPFHLHGHAFAVVRSAGSTVYNYDNPIFRDVVSTGTPAAGDNVTIRFRTDNPGPWFLHCHIDFHLEAGFAVVFAEDIPDVASANPVPQAWSDLCPIYDALDVNDQ

SEQ ID NO: 48078 - protein, 413 aa, Shigella flexneri 2a str. 301
MSKRRVVVTGLGMLSPVGNTVESTWKALLAGQSGISLIDHFDTSAYATKFAGLVKDFNCEDIISRKEQRKMDAFIQYGIVAGVQAMQDSGLEITEENATRIGAAIGSGIGGLGLIEENHTSLMNGGPRKISPFFVPSTIVNMVAGHLTIMYGLRGPSISIATACTSGVHNIGHAARIIAYGDADVMVAGGAEKASTPLGVGGFGAARALSTRNDNPQAASRPWDKERDGFVLGDGAGMLVLEEYEHAKKRGAKIYAELVGFGMSSDAYHMTSPPENGAGAALAMANALRDAGIEASQIGYVNAHGTSTPAGDKAEAQAVKTIFGEAASRVLVSSTKSMTGHLLGAAGAVESIYSILALRDQAVPPTINLDNPDEGCDLDFVPHEARQVSGMEYTLCNSFGFGGTNGSLIFKKI

SEQ ID NO: 48079 - protein, 349 aa, Oryza sativa (japonica cultivar-group)
MGKAPSPPKDHPALSPYLDWSNMQAYYGPGILPPTFFSPGIAAGHTPPPFILGPQPLVPSAFGKPYAAIYPPGGAFSHPFMPLMVSPLSMEPAKSVNSKDSCSNKKMKEIDGAAVSTGSGNSEKTSGDCSLEGSSDGNNQKASGTPKKRSIDDRPKSGVETGGALTPNDRPSEQAALPNLCIPVTAIKPDVSTASDFRVIATPVTEVPTKDDKESKRERRKQSNRESARRSRLRKQAETEELARKVELLTAENTSLRREISRLTESSKKLRLENSALMEKLTETGPDEAQEVPPVKTKAQQARGVENFLSMIDKTGTPRSSGHMDHAIATPKLRQLLGSGLATDAVAAR

SEQ ID NO: 48080 - protein, 634 aa, Streptococcus pneumoniae
MSNLSVNAIRFLGIDAINKANSGHPGVVMGAAPMAYSLFTKQLHINPAQPNWINRDRFILSAGHGSMLLYALLHLSGFEDVSMDEIKSFRQWGSKTPGHPEFGHTAGIDATTGPLGQGISTATGFAQAERFLAAKYNREGYNIFDHYTYVICGDGDLMEGVSSEAASYAGLQKLDKLVVLYDSNDINLDGETKDSFTESVRDRYNAYGWHTALVENGTDLEAIHAAIETAKASGKPSLIEVKTVIGYGSPNKQGTNAVHGAPLGADETASTRQALGWDYEPFEIPEQVYADFKEHVADRGASAYQAWTKLVADYKEAHPELAAEVEAIIDGRDPVEVTPADFPALENGFSQATRNSSQDALNVVAAKLPTFLGGSADLAHSNMTYIKTDGLQDDTNRLNRNIQFGVREFAMGTILNGMALHGGLRVYGGTFFVFSDYVKAAVRLSALQGLPVTYVFTHDSIAVGEDGPTHEPVEHLAGLRAMPNLNVFRPADARETQAAWYLAVTSEKTPTALVLTRQNLTVEDGTDFDKVAKGAYVVYENAADFDTILIATGSEVNLAVAAAKELASKGEKVRVVSMPSTDVFDKQDAAYKEEILPNAVRRRVAVEMGASQNWYKYVGLDGAVLGIDTFGASA

SEQ ID NO: 48081 - protein, 265 aa, Thermoanaerobacter tengcongensis MB4
MNSVLTKEKTDEFELFERLRNGDKKARDEIVEKNIGLVVSIAANFSKAYGVELDDLIQEGFIGLLAAIEGFDHTKGYRFSTYAVFYIKQKIQRYIWGRSRTIHLPVKTYQKLNQVLSAQLKLEQVKGEAFPEEIAEETGIKTEEVVNLLSLKNPTVSLNQQLYENDNTELIDVILDEQSENEIDRNYSLEELRKILKECLEVLPEKERSVLEMRYGLNGTPMTLKQIAEILNISKQRAGQIEKRALQRLRNSRKIRNALLDFLYN

SEQ ID NO: 48082 - protein, 395 aa, Bacillus clausii KSM-K16
MQESLFKKLESLYPEMVELRRDFHAEPELAFEEEVTPRKIASYLQNLGIDVRTQVGGRGVVGTIKGKKPGKTVALRADFDALPIQEETGLPFASKIPGKMHACGHDGHTATLLVLAKALVAMRDELEGTVVLIHQFAEEFAPGGAIAMIEDGCLDGVDAIFGTHLWSPLPYGEVGYSYDRLMAASDRFEVNIQGKGGHGALPHETVDAVMVGSSIALMLQQLVSRNVNPLEPAVVTIASFHAGGAFNVISDTAKLEGTVRTFSESVQDQLIARMEETIKGVCEASGATYSFTYAKGYPAVVNNSKMTELLMETAASFHPAEKLHEIEPVMGGEDFSYYLQRVPGAFFFTGAGNEEKGIVYPHHHPKFDIDERAMLVAAKHLGAAALSFLGTGDKK

SEQ ID NO: 48083 - protein, 634 aa, Streptococcus pneumoniae
MSNLSVNAIRFLGIDAINKANSGHPGVVMGAAPMAYSLFTKQLHINPAQPNWINRDRFILSAGHGSMLLYALLHLSGFEDVSMDEIKSFRQWGSKTPGHPEFGHTAGIDATTGPLGQGISTATGFAQAERFLAAKYNREGYNIFDHYTYVICGDGDLMEGVSSEAASYAGLQKLDKLVVLYDSNDINLDGETKDSFTESVRDRYNAYGWHTALVENGTDLEAIHAAIETAKASGKPSLIEVKTVIGYGSPNKQGTNAVHGAPLGADETASTRQALGWDYEPFEIPEQVYADFKEHVADRGASAYQAWTKLVADYKEAHPELAAEVEAIIDGRDPVEVTPADFPALENGFSQATRNSSQDALNVVAAKLPTFLGGSADLAHSNMTYIKTDGLQDDTNRLNRNIQFGVREFAMGTILNGMALHGGLRVYGGTFFVFSDYVKAAVRLSALQGLPVTYVFTHDSIAVGEDGPTHEPVEHLAGLRAMPNLNVFRPADARETQAAWYLAVTSEKTPTALVLTRQNLTVEDGTDFDKVAKGAYVVYENAADFDTILIATGSEVNLAVSAAKELASQGEKIRVVSMPSTDVFDKQNAAYKEEILPNAVRRRVAVEMGASQNWYKYVGLDGAVLGIDTFGASA

SEQ ID NO: 48084 - protein, 507 aa, Oryza sativa (japonica cultivar-group)
MAAVAVPPLSAWLVAARSSTQAECGGADEHHHHHHQQQHQCCVGGGSSTVMFGPRRRRFLGGGARRRGAARSGMAMAVALQPERRTVEKKPDVKQRRVVITGMGVVTPLGHDPDVFYNNLLDGVSGISEIERFDCSTFPTRIAGEIKSFSTDGWVAPKLARRMDKFMLYLITAGKKALEHGGLTEELRNELDKTRCGVLIGSAMGGMKVFNDAIEALRVSYKKMNPFCVPFATTNMGSAILAMDLGWMGPNYSISTACATSNFCILNAANHIRRGEADVMLCGGSDAPLIPIGLGGFVACRALSQRNSDPTKASRPWDVDRDGFVMGEGAGVLVLEELEHAKQRGAKIYAEFLGGSFTCDAYHMTEPHPEGRGIILCIEKALADSGVAREEINYVNAHATSTQSGDLKEYEAIVRCFGQNPQLRVNSTKSMTGHLIGAAGGIEAVAAIQAIRTGWVHPNLNLENPEKIVDVGVLVGSQKERCKVNVALSNSFGFGGHNSSILFAPFK

SEQ ID NO: 48085 - protein, 634 aa, Streptococcus pneumoniae
MSNLSVNAIRFLGIDAINKANSGHPGVVMGAAPMAYSLFTKQLHINPAQPNWINRDRFILSAGHGSMLLYALLHLSGFEDVSMDEIKSFRQWGSKTPGHPEFGHTAGIDATTGPLGQGISTATGFAQAERFLAAKYNREGYNIFDHYTYVICGDGDLMEGVSSEAASYAGLQKLDKLVVLYDSNDINLDGETKDSFTESVRDRYNAYGWHTALVENGTDLEAIHAAIETAKASGKPSLIEVKTVIGYGSPNKQGTNAVHGAPLGADETASTRQALGWDYEPFEIPEQVYADFKEHVADRGASAYQAWTKLVADYKEAHPELAAEVEAIIDGRDPVEVTPADFPALENGFSQATRNSSQDALNVVAAKLPTFLGGSADLAHSNMTYIKTDGLQDDTNRLNRNIQFGVREFAMGTILNGMALHGGLRVYGGTFFVFSDYVKAAVRLSALQGLPVTYVFTHDSIAVGEDGPTHEPVEHLAGLRAMPNLNVFRPADARETQAAWYLAVTSEKTPTALVLTRQNLTVEDGTDFDKVAKGAYVVYENAADFDTILIATGSEVNLAVSAAKELASQGEKIRVVSMPSTDVFDKQDAAYKEEILPNAVRRRVAVEMGASQNWYKYVGLDGAVLGIDTFGASA

SEQ ID NO: 48086 - protein, 593 aa, uncultured archaeon GZfos18C8
MIKVSPHQTMDKYEKIIGLAKRRGFLWNSFELYGGTAGFYDYGPLGAMLKRRIEDIWRKMYVIEEGFYEIETPTIGIAAIFDASGHTRGFSDPMVVCSGCDHAFRADHLIEGIVETPDALPASEIKRLIDEHGIECPQCGGVGTFGDVSSFNLMFKTTIGPGAERVGYLRPETAQGMFVDFEHLFRFYREKLPFGVTQIGKAYRNEISPRQGVIRLREFTQAEAEIFINPTDKNHPRFSMIEDTVLRYYPASHQRVSHPAYEDDGGIIELTTRDAVDRAIVAHEFLAYHLVLTHLFLVRVGIDPARLRFRQHQPDEMAHYAVDCWDAEVLTDRFGWVEIVGIADRSDYDLSSHAEHSKKDLSVLIEYDTPKQAERIVVKPDMSVIGPLYKGKAGKVRAALIGLGEEDLTGDEIKIEIDGEIVLIPRDLVEYETVIEEVRGERVIPHVIEPSFGIDRIIYAALEHSFSEEPVEGVTRNVLHLPAEVAPVQVAMLPLLTREELIEPALAIVKTLRENGVFVSYDDAGTIGRRYRRNDEIGTPFSVTIDYETLDDDTVTIRDRDSMAQIRVPVGELAETIRAMIRGGFSDTTQSSQ

SEQ ID NO: 48087 - protein, 634 aa, Streptococcus pneumoniae
MSNLSVNAIRFLGIDAINKANSGHPGVVMGAAPMAYSLFTKQLHINPAQPNWINRDRFILSAGHGSMLLYALLHLSGFEDVSMDEIKSFRQWGSKTPGHPEFGHTAGIDATTGPLGQGISTATGFAQAERFLAAKYNREGYNIFDHYTYVICGDGDLMEGVSSEAASYAGLQKLDKLVVLYDSNDINLDGETKDSFTESVRDRYNAYGWHTALVENGTDLEAIHAAIETAKASGKPSLIEVKTVIGYGSPNKQGTNAVHGAPLGADETASTRQALGWDYEPFEIPEQVYADFKEHVADRGASAYQAWTKLVADYKEAHPELAAEVEAIIDGRDPVEVTPADFPALENGFSQATRNSSQDALNVVAAKLPTFLGGSADLAHSNMTYIKTDGLQDDANRLNRNIQFGVREFAMGTILNGMALHGGLRVYGGTFFVFSDYVKAAVRLSALQGLPVTYVFTHDSIAVGEDGPTHEPVEHLAGLRAMPNLNVFRPADARETQAAWYLAVTSEKTPTALVLTRQNLTVEDGTDFDKVAKGAYVVYENAADFDTILIATGSEVNLAVSAAKELASQGEKIRVVSMPSTDVFDKQDAAYKEEILPNAVRRRVAVEMGASQNWYKYVGLDGAVLGIDTFGASA

SEQ ID NO: 48088 - protein, 384 aa, Bacillus anthracis str. A2012
MHEDLLGLEEIMMKAEEKFSPGLDGIVAAETKISFLDTVKGEIVIQGYDLIELSKTKEYLDIVHLLLEEHLPNEDEKATLEKKLKEEYAVPEGVFNVLKALPKETHPMDGLRTGVSALAGYDNDIENRSLEVNKSRGYKLLSKVPNIVANSYHILNNEEPIEPLKELSYSANFFYMLTGKKPTELEEKIFDRSLVLYSEHEMPNSTFTARVIASTQSDLYGALTGAVASLKGSLHGGANEAVMYMLLEAGNVEKFEELLQKKLYNKEKIMGFGHRVYMKKMDPRALMMKEALKQLCDVKGDYTLYEMCEAGEKIMEKEKGIYPNLDYYAAPVYWMLGIPIQLYTPIFFSSRTVGLCAHVIEQHTNNRLFRPRVNYIGERHVLSK

SEQ ID NO: 48089 - protein, 100 aa, Saccharomyces cerevisiae
IEISGTSPRDIAKQFKDQGMVINGKRETSIYRELKKIIPTAAAFGGATIGALSVGSDLLGTLGSGASILMATTTIYGYYEAAAKEGGFTKNLVPGFSDLM

SEQ ID NO: 48090 - protein, 421 aa, Bacillus clausii KSM-K16
MEKMDENQEDKLDVLAATQSIIHKALKKLGYPDEMYELLKEPVRMLTVRIPVRMDDGSTKIFTGYRAQHNDAVGPTKGGVRFHPDVSEKEVKALSIWMSLKAGIVNLPYGGGKGGIVCDPRQMSFREVERLSRGYVRAISQIVGPTKDIPAPDVFTNSQIMAWMLDEYSRIREFDSPNFITGKPLVLGGSHGREAATAKGVTICIMEAAKKKGIDLEGARVIIQGFGNAGSFLAKFMADAGALVVGIADAYGALYAEEGLDIDYLLDRRDSFGTVTNLFKDTITNEELLEKDCDILVPAAIENQITSHNAGKLKAAIVVEAANGPTTLEATQILAERGILLVPDVLASAGGVTVSYFEWVQNNQGYYWTDEEVEGRLRTVLTEAFNNIYNLALRRKVDMRLAAYMVGVRRMAEASRFRGWV

SEQ ID NO: 48091 - protein, 254 aa, Exiguobacterium sp. 255-15
MIMRLDGKVIIVTGAASGMGKAMAEIFAAEGAHVVVSDIHGEAARQVAQSITENGGTALAVETNVAEETAVQQLIDQTITTYGKLDVLVNNAGIMDGMEGVGDISDERWERVFSVNTTAVMRAMRLAVPLFQKQGHGVILNNISIGGLNGARAGAAYTASKHAVVGLTKNTAYLYAKEGIRCNGIAPGAVETNIGQSMTNINEFGMGRTMLGMGLNPRSAKPEEIARLALFLVSEESSFVNGAIVIADGGWSAY

SEQ ID NO: 48092 - protein, 851 aa, Oryza sativa
MQFPFSGAGPGVFTSSPALSLALADAVAGRNSGGGGKMVTAAHGGVGGGGGGGRAKARDALEVENEMSRSGSDHLDVVSCGDAGGGGGDDDDDEDAEHGNPPKRKKRYHRHTPQQIQELEAMFKECPHPDEKQRAELSKRLGLEPRQVKFWFQNRRTQMKMQLERHENSLLKQENDKLRSENLSIREATSNAVCVGCGGPAMLGEVSLEEHHLRVENARLKDELSRVCALAAKFLGKSISVMAPPQMHQPHPVPGSSLELAVGGIGSMPSATMPISTITDFAGAMSSSMGTVITPMKSEAEPSAMAGIDKSLFLELAMSAMDELVKMAQMGDPLWIPGASVPSSPAKESLNFEEYLNTFPPCIGVKPEGYVSEASRESGIVIIDDGAALVETLMDEFEFLRQRRWSDMFSCMIAKASTTEEISTGVAGSRNGALLLMQAELQVLSPLVPIREVKFLRFSKQLADGVWAVVDVSADELMRDQGITSASSTANMNCRRLPSGCVLQDTPNGFVKYLVQISVFSEVYNLSIDQFLDLPPAFMVTWVEHTEYDEASVHPLYRPLLRSGLALGAGRWIATLQRQCECLALLMSSIALPENDSSAIHPEGKRSMLKLARRMTDNFCAGVSTSSTREWSKLVGLTGNIGEDVHVMARKSVDEPGTPPGVVLSAATSVWMPVMPERLFNFLHNKGLRAEWDILSNGGPMQEVTSIAKGQQNGNTVCLLKASSSVPLTKNFTVQPTKDKQNSMLILQETCADASGSMVVYAPVDIPAMHLVMSGGDSSCVALLPSGFAILPAGPSIGADHKMGGSLLTVAFQILANSQPSAKLTVESVETVSNLISCTIKKIKTALHCDV

SEQ ID NO: 48093 - protein, 96 aa, Cronartium comandrae
DWNGAGAHTNYSTEATRAPGGIKAIHEYIEKLGKRHNEHIAVYGEDNDMRLTGRHETGHIGSFSSGVADRSSSIRIPRHVKATGQGYLEDRRPASN

SEQ ID NO: 48094 - protein, 528 aa, Thinopyrum ponticum
MALEAAYHYLQRAVGHGTSTEALLLTVLLLLIIRVAWVRAFTTTTASTKCKQQLPPTPPGKLPIIGHLHLIGSHPHVSFRDLAAKHGRDGLMLVHVGAVPTVVVSTPQAAEAVLRTHDHVFASRPRNPVADIIRYNSTDIAFAPYGDYWRRARKVVNTHPLSVKMVYSKRHDREEEVRLVVAKICELAMAAPGKALDMTELLGGYASDFVCRAVLGESHRKHGRNELFRELTEISASLLGGFNLEDYFPRLANLDVFLRVVCSKAMGVSKRWDNLFNELIAEYEHGKEDNAEDFVHLLLSLKKEYGLSTDNVKAILVNMLEAAIETSFLVLEYSMAELINNRHVMAKVRKEVRESTPKGEKLDLIMEEDLSRMPYLKATIKEAMRIHPPAPFLLPHFSTNDCEVNGYTIPAGTRVIVNAWALARDPSHWERVEEFYPERFLQEGRDAEVDMYGKDIRFVPFGAGRRICAGATFAIATVEVMLANLIYHIDWELPSEMEAIGAKVNMTDQFGMTLRRTERLHLVPKIYK

SEQ ID NO: 48095 - protein, 328 aa, SYNECHOCOCCUS SP. WH 8102
MGIPLDSSGSTAKSSRKSPALPSTGRRASTRQGGRLATDSIGFYLSSIGRIPLLTAAEEIELAHHVQEMKQLQELPEEELTSRHRHKIRMGKRARDRMMAANLRLVVSVAKKYQNQGLELLDLVQEGAIGLERAVDKFDPAMGYKFSTYAYWWIRQGMTRAIDNSARTIRLPIHISEKLSKMRRISRELSHRFGRQPNRLELASAMGIEPRELEDLISQSAPCASLDAHARGEEDRSTLGELIPDPNGEEPMEGMDRSIQKEHLGGWLSQLNEREQKILRLRFGLGGEEPLTLAEIGRQINVSRERVRQLEAKAILKLRLMTDHQQAA

SEQ ID NO: 48096 - protein, 1157 aa, Blumeria graminis
MNNDDEALSLVFKKIERERALLNAANQMRQQTQNEQVKARLDTQMREGRRNIQYLEERMQELQMRKMGQDMENMNLSPVGTGPGRRASEGYDGRSGPSTPLAKSPRTHIDAGQGTGYGMQETGGSQGELMPSRHPFAPPGPSSSLPKRPNYTKLDLIKYDTPFLGPRIQLMLSQIEFKLNVEKQYLKGIEKMVQLYAIEGDRKSRADAAGRRIESTQKIQILKQALKRYEDLHIDMESSADAPDDDSINTPNLRKPLTGQLSIRILAVKDVDHATTSRFARGPETFVTIRVEDNVVARTKISRNDKWEAEYHNITVDQANEIELIVYDKPTDHPLPMGLLWIRLSDIVEEMRRKRIEAEINNSGWVSADRMGSGSLPSSAPPQFPLSPSHATFTANPGSVVVAENPALSGSMVASQPIDAWFALEPTGAVQLSINFTKQIKEKRGFDAGLNRKGAIRQRKEEVHEMYGHKFVSQQFYNIMRCALCGDFLKYAGGMQCEDCKYTCHTKCYTSVVTKCISKSNAETDPDEEKINHRIPHRFEKFSNMSANWCCHCGYILPFGKKNCRKCSECNLTCHAQCVHLIPDFCGMSMAVANVIIDGIRNQKRRQTAQVPSVGQSKQNQSGIPTASLVESFGPGSRASFSQEPHRSTQSGSYGSASSSTGAAEAAKVMYNQGHPSQKRLSAPNPALPSSATAAAAAAMSGTKIPNTRESFSTPPTEYSQAGRSSATNYTGHPSPRTDNNLYNASSVPQSPSQVSYNPAAYAQVSGYPTQPLSPAYVQQHPLPSKNLYSSEAQNKAPISEPSSSQTPAMTRKAAPQANEPGTGRRIGLDHFNFLAVLGKGNFGKVMLAETKSTKKLYAIKVLKKEFIIENDEVESTRSEKRVFLIANKERHPFLTNLHACFQTETRVYFVMEYVSGGDLMLHIQRGQFGTKRAQFYAAEVCLALKYFHENGVIYRDLKLDNILLTLDGHIKMADYGLCKEDMWYGSTTSTFCGTPEFMAPEILLDKKYGRSVDWWAFGVLIYQMLLQQSPFRGEDEDEIYDAILADEPLYPIHMPRDSVSILQKLLTREPEQRLGSGPTDAQEIMSQPFFSNNNWDDIYHKRIPTPFKPSIKDETDTSNFDSEFTSVTPVLTPVQSVLTQAMQEEFRGFSYSTDAI

SEQ ID NO: 48097 - protein, 748 aa, Triticum aestivum
  misc_feature (290)..(290): Xaa can be any naturally occurring amino acid
  misc_feature (687)..(687): Xaa can be any naturally occurring amino acid
  misc_feature (702)..(702): Xaa can be any naturally occurring amino acid
  misc_feature (718)..(718): Xaa can be any naturally occurring amino acid
  misc_feature (738)..(738): Xaa can be any naturally occurring amino acid
  unsure (1)..(748): unsure at all Xaa locations
MAAHSVAAAHATIAARAGAAPSSPAAAPAERLGFRLSSLAGRALRSPLPARRAAAAASSSRRSGSQRVRASAAVETVEAAATGELLDKSVNAIRFLAIDAVEKAVSGHPGLPMGCAPMGHILYDEVMRYNPKNPYWFNRDRFVLSAGHGCMLQYALLHLAGYDAVKEEDLKQFRQWGSSTPGHPENFETPGVEVTTGPLGQGIANAVGLALAEKHLAARFNKPDSEIVDHYTYCIVGDGCNMEGILTEACSLAGHWGLGKLIVFYDDNHISIDGDTEIAFTEDVSGRFEXALGWHTLWVKNGNDGYDEIRKAIQEAKSVTDKPTMIKVTTTIGFGSPNKANSYAVHGAALGTSEVEATRANLGWPYEPFFVPEDVKSHWSRHIPQGAALEADWDAKFAQYEQKYPEDAATLKSIITGELPAGWADALPQYTTESPADATRNLSQQCLNALAKVVPGLIGGSADLASSNMTLLKMFGDFQKDTPEERNVRFGVREHGMGAICNGIALHTPGLIPYCATFFVFTDYMRGAMRISALSEAGVIYVMTHDSIGLGEDGPTHQPIEHLVSFRAMPNMLMFRPADGKETAGAYKVAVLNRKRPSILALSRQKLPHLPGTSIEGVAKGGYTISDNSTDNKPDYIIMSTGSEVEIAVKAAEELTKEGKTVRVVSFVCWELFDEQSDEYKESVLPXAVTARISIEAGSTLXGWQKYVGSKGKTIGIXDKFGASAPAPKIYKEYGITXENVIAAAKSL

SEQ ID NO: 48098 - protein, 327 aa, Yersinia pseudotuberculosis IP 32953
MAKHIQFTTTGGPDVLQYLEFTPSDPAPHEVQVENKAIGINYIDTYVRSGLYPPAHLPSGLGTEAAGIVSKVGAAVSSVKVGDRVVYAQSALGAYSEVHNVPADKIALLPEQISFEQAAASFLKGLTAYYLLRQTHEIKPGEVFLFHAAAGGVGLIACQWAKALGAKLIGTVGSDEKAQLAKAAGAWATINYRTENIAQRVAELTEGEKVGVVYDSVGKSTWEASLDSLKRRGLLVSFGNASGPVTGVNLGILNQKGGIYVTRPSLNVYVANRQELESASQQLFSMITSGAINVDVAQAQQFPLCDAQRAHETLEGRQTTGSSLLIP

SEQ ID NO: 48099 - protein, 486 aa, Oryza sativa (japonica cultivar-group)
MSTAAAGAAPVSLDTINPKVLKCEYAVRGEIVTHAQLQQELQKNPDSLPFDEILYCNIGNPQSLGQQPVTFFREVLSLCDHPALLDKSETHALYSDAIERAWQILDKIPGRATGAYSHSQGIKGLRDEIAAGIAARDGFHASGDNIFLTDGASPAVHMMMQLLIRSENDGILCPIPQYPLYSASIALHGGSLVPYFLDEETGWGLEVDELKKQLEEAQSKGITVRALVVINPGNPTGQVLAEENQKKIVEFCKNEGLVLLADEVYQENIYVEDKKFHSFKKIARSMGYTDDDLPLVSFQSVSKGYYGECGKRGGYMEVTGFSADVREQIYKVASVNLCSNVSGQILASLIMNPPKAGDESYESFMVEKDGILSSLARRAKALEEAFNSLEGITCNKAEGAMYLFPRIYLPQKAIGAAQAAGTAPDAYYARRLLEATGIVVVPGSGFGQVPGTWHFRCTILPQEDKIPAIISKFKEFHEKFMDEFRD

SEQ ID NO: 48100 - protein, 621 aa, Agaricus bisporus
MSHHGPRLSTRSQQIVAGYASVAANFDVEKLHREQGVNIPTSGASINQCPHAAAARAAARMADDLASAARAKKSLDAKGSLAGRPVHHKAATESTKAKHTGFDYEAFYKGELAKKHQDKSYRYFNNINRLARKFPVAHTANPRDEVEVWCSNDYLGMGNNPVVLETMHRTLDKYGHGAGGTRNIAGNGAMHLGLERELRLHRKEAALVFSSCYVANDATLSTLGTKLPGCVIFSDTMNHASMIQGMRHSTPKRVIFKHNDLEDLETKLQQYPKETPKIIAFESVYSMCGSIGPVKEICDLAEQYGAITFLDEVHAVGLYGPRGAGVAEHLDYDAHLAAGSSPDPIPGSVMDRIDIITGTLGKSYGAVGGYIAGSEEFVDMIRSYAPGFIFTTSLPPATVAGARASIVYQSEYLGDRQLKQINVREVKRRLAELDIPVVPGSSHIVPVLVGDAALARAASDKLLSEHDIYVQAINYPTVARGEERLRITVTPRHTMEQMEGLIRSLNQVFEELNINRLSDWKLAGGRAGVGIPGAADDVQPIWTDEQIGLLNGTAPRSLRNAEKSVVDMRAVTIARSRFDVLLGPVYGELQPTEDFDTPAVGATFKAPLVDREVAHDITVSA

SEQ ID NO: 48101 - protein, 364 aa, Streptomyces albus G
MTDVTGAPADVLHTLFHSDQGGHEQVVLCQDRASGLKAVIALHSTALGPALGGTRFYPYANEAEAVADALNLARGMSYKNAMAGLEHGGGKAVIIGDPEQIKSEELLLAYGRFVASLGGRYVTACDVGTYVADMDVVARECRWTTGRSPENGGAGDSSVLTSFGVYQGMRAAAQHLWGDPTLRDRTVGIAGVGKVGHHLVEHLLAEGAHVVVTDVRKDVVRSLTERHPSVVAVADTDALIRVENLDIYAPCALGGALNDETVPVLTAKVVCGAANNQLAHPGVEKDLADRGILYAPDYVVNAGGVIQVADELHGFDFDRCKAKAAKIYDTTLAIFARAKEDGIPPAAAADRIAEQRMAEARARR

SEQ ID NO: 48102 - protein, 606 aa, Arabidopsis thaliana
MSPPSATAGDINHREVDPTIWRACAGASVQIPVLHSRVYYFPQGHVEHCCPLLSTLPSSTSPVPCIITSIQLLADPVTDEVFAHLILQPMTQQQFTPTNYSRFGRFDGDVDDNNKVTTFAKILTPSDANNGGGFSVPRFCADSVFPLLNFQIDPPVQKLYVTDIHGAVWDFRHIYRGTPRRHLLTTGWSKFVNSKKLIAGDSVVFMRKSADEMFIGVRRTPISSSDGGSSYYGGDEYNGYYSQSSVAKEDDGSPKKTFRRSGNGKLTAEAVTDAINRASQGLPFEVVFYPAAGWSEFVVRAEDVESSMSMYWTPGTRVKMAMETEDSSRITWFQGIVSSTYQETGPWRGSPWKQLQITWDEPEILQNVKRVNPWQVEIAAHATQLHTPFPPAKRLKYPQPGGGFLSGDDGEILYPQSGLSSAAAPDPSPSMFSYSTFPAGMQGARQYDFGSFNPTGFIGGNPPQLFTNNFLSPLPDLGKVSTEMMNFGSPPSDNLSPNSNTTNLSSGNDLVGNRGPLSKKVNSIQLFGKIITVEEHSESGPAESGLCEEDGSKESSDNETQLSLSHAPPSVPKHSNSNAGSSSQVISRLEVIGIWNLNITWILTFQ

SEQ ID NO: 48103 - protein, 396 aa, Gossypium hirsutum
  misc_feature (195)..(195): Xaa can be any naturally occurring amino acid
  misc_feature (284)..(284): Xaa can be any naturally occurring amino acid
  misc_feature (301)..(301): Xaa can be any naturally occurring amino acid
  unsure (1)..(396): unsure at all Xaa locations
MSLSLQSSPSSFLSSSLPKLRLGFANGCPSSSLLFKFNASFPAIRASSGFSSSLDTGLRTELDAVSTFSEIVPDTVIFDDFEKFPPTAATVSSSLLLGILSLPDTIFRNAVDLALADSTCSRLDNPELRLACFFNKALVNVGGDLAKLVPGRVSTEVDARLAYDTHGIIRRVHDLLKLYNEIDVPPERLLFKIPXTWQGIEASRLLESEGIQTHLTFVYSFAQAAAAAQAGASVIQIFVGRVRDWARNHSGDPEIEAAIQRGEDPGLGLVTKAYNYIHKYGHKXKAYGLQQFETKQDLFSXLGVDYIIAPLKILQSLKESITAPDEKYSYIRRLSPQSAANHDFTAEELTKWDQLSLASAMGPASMQLLAAGLEGYVNQANRVEELLDKIWPPPNV

SEQ ID NO: 48104 - protein, 133 aa, Halobacterium sp. NRC-1
MAPRDTDADDTDWAATLTDDQYRVLREQGTERPFSGDHVDRDEDGTYSCVGCDTTLFDGETKFDAHCGWPSFWDAADDDAIERREDHSNGMERTEVVCAECGGHLGHVFQDGPDPTGERYCINSVALDFEPTE

SEQ ID NO: 48105 - protein, 356 aa, Neurospora crassa
MRGILQAARTASISRAPKYNLLVCFDAFETLYAPKEPVHKTYGQFARDNGLHHASDDVVAVYLHDRITTAAKEYPNYGKHVKGMDPEAWWMKVIKNIFVDVEPSLSNAAHKKQLDDLGHKLFQHFSTRDAYKTAPNMPKLLQSLKHHRSNGKLDSPSIDHVVLGVISNSDDRVGGILSSLGLDVSPLRFQRESKQDTHFESARPVDGKSYDIDFTVMSYDVEESKPHKVMWQAGEMLARRAVTHELGRFDESVPWLKLYVGDDIKKDVASAWGCGWNAVLLKEFITEHPPDERLESLEELLTMPVTQLLTGQPRMFTVNKLETLVEWIVKRGLEVPAGSTGADSSEERFKLVEEIE

SEQ ID NO: 48106 - protein, 243 aa, Bacillus licheniformis
MSYRVKRVLLLLVTGLFLSLSAVTSTASAQAGGSFFDTFNSYNSGVWQKANGYSNGGVFNCTWRANNVSMTSLGEMRLGLTSPSYNKFDCGENRSVQTYGYGLYEVRMKPAKNVGIVSSFFTYTGPTDGTPWDEIDIEFLGKDTTKVQFNYYTNGVGNHEKLVDLGFDASNSYHTYAFDWQPNSIKWYVDGQLKHTATSQIPTTPGKIMMNLWNGIGVDDWLGSYNGVTPLYAHYDWVRYTKR

SEQ ID NO: 48107 - protein, 369 aa, Shewanella sp. ANA-3
MILGHNHPKIREAVLAAVHNGLSFGAPTELEVQMAEKVIAMVPSIEQVRMVSSGTEATMSAIRLARGFTNRDKILKFEGCYHGHADCLLVKAGSGALTLGQPSSPGIPEDFAKHTLTAVYNDLDSVRSLFEQYPTEISCIIIEPVAGNMNCIPPIPGFLEGLRAMCDEFGALLIIDEVMTGFRVSRSGAQGHYGVTPDLTTLGKVIGGGMPVGAFGGRKEVMQFIAPTGPVYQAGTLSGNPIAMSAGLAQMEALCEEGLYEALSAKTKRIAEGFKAAADKHGIPMAINYVGGMFGFFFTEQEQITRFDQVTKCNIEHFRTFYHGMLDEGVYLAPSAYEAGFLSMAHGEEELRLTLEAADRVLGRMKAAM

SEQ ID NO: 48108 - protein, 319 aa, Nocardioides sp. JS614
MAVRTAVSAGTREIEGRDSVGLYLDEIARNPLLDAASEVELSKAIEAGLMAEHLLAEGRVGRKKGGAPMTATAEELEWLAEEGRKAVDTFITANLRLVVSIARKYGRAQMPMLDLIQEGNTGLIRAVEKFDYTKGYKFSTYATWWVRQAITRGIAQQARVVRLPVHVVEELNQVGGARRTLERKLGREPEPREIAEELGMEVDRVLDLMAWGREHVSLDSPVDEDGDTSLGDLMAQETAPGPDLNFIDVESRDRLNSLVGKLDDRAADIIRSRYGLVDGRQHKLADIGAKHGISAERVRQLEREALQKLRRLGDPDLAA

SEQ ID NO: 48109 - protein, 391 aa, Arabidopsis thaliana
MVQISDLPRDLTEEVLSRIPVTSMRAVRFTCKKWNTLSKDRSFTKKHLRGARAAAKKKQTKEFQVIMMIQFRVYLYSVNLLNPSIERIGKLISLDVEDHVDISKIFHCGGLLLCITKDISRLVVWNPYSGQTRWIKPRNSYHRLDRYALGYEEKNKSCRCYKILRFMDDYEDDRALRLIREFEIYDLNSDSWKVVNVTPDWDVEFYHRGLSLKGNTYWFAQEKLPPLPRGRVITISDMADFLLCFDFTRERFGPRLPLPFHSFVEDTVTLSSVRDKKLAVLFQPCSASTVKIWISRKIEPNAVSWRKVFLAVDMKSLTGFQFDINAASFFVDEKKKVAMVLDKDRFSYKFTRNIAYIIGKKGYFEKVDLGESTVSSCASLVCSYVPSSVQI

SEQ ID NO: 48110 - protein, 116 aa, Lolium perenne
DEWLNAGFIATVQQRGAAIIKARKLSSALSAASSACDHIRDWVLGTPEGTFVSMGVYSDGSYGVPAGLIYSFPVTCCGGEWTIVQGLPIDEFSRKKMDATAQELSEEKALAYSCLE

SEQ ID NO: 48111 - protein, 1027 aa, Propionibacterium acnes KPA171202
MHDHAPILDDRVHRHLAEKIRPAETTTVCHLNVEWAPVTDTVEGLNSRPGVVGQGEPISISAGLTLAYEPFRIGDTWGPPWGTTWFHLTATVPPEHRDDHLEMIVDLGGVWDSPGFQSEGLVVRPDGSIIKALNPRNTWIPVETDAEGHIDVYVEAASNPILLAQPPFQPTEDGDKLTASTDTYYSLKRADLVLVNDEVRELIADIVTLSGLADQLPEDSERHWDVRRALDRAMDRLDLFDVISSASAARSELAPALTRPAHDSAQTMTAIGHAHIDSAWLWPLRETRRKVARTISNQLNLIDTDPAHIFAFPAAQHSAWLEEDHPDLFARLQKAVKDGRIIPVGGMWVESDANLPGGESMCRQLLYGQRYFMAKFGHHCPEVWLPDSFGYSGALPQLAKLAGARWFLTQKISWNQVDKFPHHSFWWEGIDGTRIFTHFPPADTYGSDLSAHDLEHARANFQDKGRSNSSLVPFGYGDGGGGPTREMLAQARRVADLDGSPKLAIEPPATFFSRAESEHEDPGTWVGELYLELHRGTFTSQYEVKKGNRRNEHLLRDAELWCATAAVRGLMDYPGERLAEIWRTICLYQFHDILPGSAIAWVYREVVADHRRISDELTEFIHHAQELLAGRGDEEIVFDSAPMARPWASTVAMGGSKAPSITEGVHAEENEEEFIVDNGLLRMTVDAHGLITHLVDTASGRDAIPAGQRGNLLQIHPDFPNMWDAWDIDPFYANNVTDLDDGQATMSRKDGSVTISITRTFGHSSAIQSLTVNPGDPRVKVHTHVDWHEQDSLLKLAWPVDVHTDHADYEIEMGHITRPTHTNTSWDAFRFEVHAHRWVYLSEPGFGVAIANSGTYGWNVSRHPKDNGGTWSVARASLLKGARFPDPRADEGEHDFFHTLHTGADLTDAIRDGYAANLCVRRRQGSPVEPLVSVEGVAVEAVKLAEDGSGDVIVRLYEPYGRHVHTTMTLGFEATSAVEVDLLEDPLDGNPHAQVAPSVVTADLADGTIGLSMRPFQVATLRLGRNR

SEQ ID NO: 48112 - protein, 424 aa, SYNECHOCOCCUS SP. WH 8102
MIRDRRIGGQAFRLGLFFLPSSALLAGIGLLIACVSGSRGREQPLWRDRWCQPLLLAGLLMLIGACLAENVGLAWAGLANWLPFVWAFWAFQPHLAKASQRRQAVWMLLAGTLPVLVTGFGQMLLGWQGPWQVGGGAIIWFLHPDGRPIGRLSGLFDYANITGAWLAVVWPLMLAAVFRPDGWRRRGGALLLSMATALAVLLTQSRNAMGGLVLALPFVLGPWQWMWLLPLLLLLASPLLLAVLPGVPVGLQQWGMRLLPDQVLVRVLESQGETAWKHTRLGQWQYALQLVSARPWFGWGAAAFSVLYPIHAAKRWHGHVHNLPLELAVSHGVPAMLLIVGTVLFLLVLAAQRGMLQKAPLERAWWAATLVLVVMHATDLPLFDSRLNILGWTLLAGLCAFSRQCQEPGPDRDARAVSQEQADP

SEQ ID NO: 48113 - protein, 528 aa, Thinopyrum ponticum
MALEAAYHYLQRAVGHGTSTEALLLTVLLPLIIRLAWVRAFATTTASAKCKQQLPPTPPGKLPIIGHLHLIGSHPHVSFCDLAAKHGRDGLMLVHVGAVPTVVVSTPQAAEAVLRTHDHVFAPRPRNPVADIIRYNSTDIAFAPYGDYWRRARKVVNTHLLSVKTVYSKRHDREEEVRLVVAKIRELATAAPGKALDMTELLGGYASDFVCRAVLGESHRKNGRNEPFRELTEISASLLGGFNLEDYFPRLANLDVFLRVVCSKAMGVSKRWDNLFNELIAEYEHGKEDNAEDFVHLLLSLKKEYGLSTDNVKAILVNMFEAAIETSFLVLEYSMAELINNRHVMVKVQKEVRESTPGGEKLDLIMEEDLSGMPYLKATIKEAMRIHPPAPFLLPHFSTNDCEVNGYTIPAGTRVIVNAWALARDPSHWERAEEFYPERFLQEGRDAEVNMYGKDIRFVPFGAGRRICAGATFAIAIVEVMLANLIYHFDWELPSEMEAIGAKVDMSDQFGMTLRRTERLHLVPKIYK

SEQ ID NO: 48114 - protein, 397 aa, Yersinia pseudotuberculosis IP 32953
MFQNVDAYAGDPILSLMESFKADNRAHKVNLSIGLYYNEQGEIPQMQAVDAAEAQLSAQPHGTPVYLPMEGLQSYRTAIQQLLFGHDHPMLVQQRVATIQTVGGSGALKVGADFLNHYFPDSQVWVSDPTWENHVAIFSGAGFKVNTYPYFDNDKLAVKFDPMLATLQQLPARSIVLLHPCCHNPTGSDLTNAQWDRLIDVVKERELIPFLDIAYQGFGAGLNEDAYAIRAMAAAGLPCLISNSFSKIFSLYNERVGGLSVVCESDEAAGRVLGQLKATVRRNYSSPPNFGAQVVSKVLNDTVLRAQWQAEVEQMRLRILDMRHTLVEALKASLPERNFDYLLQQRGMFSYTGFSEAQVDRLREEFGVYLIASGRMCMAGVNHQNVEQVAVAFAAVQ

SEQ ID NO: 48115 - protein, 262 aa, Rickettsia sp. ARANHA
LAAVGSLSAFYPDLLNFKEADYELTAIRMIAKIPTIAAMSYKYSIGQPFIYPDNSLDFTENFLHMMFATPCTKYKVNPIIKNALNKIFILHADHEQNASTSTVRIAGSSGANPFACISTGIASLWGPAHGGANEAVINMLKEIGSSEYIPKYIAKAKDKNDPFRLMGFGHRVYKNYDPRAAVLKETCKEVLKELGQLDNNPLLQIAIELEAIALKDEYFIERKLYPNVDFYSGIIYKAMGIPSQMFTVLFAIARTVGWMAQW

SEQ ID NO: 48116 - protein, 316 aa, Arabidopsis thaliana
MATMKIPMTVPSPRVDADQLFKAFKGRGCDTSVIINILAHRNATQRALIEQEYETKFSDDLRKRLHSELHGHLKKAVLLWMPEAVERDASILKRSLRGAVTDHKAIAEIMCTRSGSQLRQIKQVYSNTFGVKLEEDIESEASGNHKRVLLAYLNTTRYEGPEIDNASVENDARTLKSAVARKHKSDDQTLIQIFTDRSRTHLVAVRSTYRSMYGKELGKAIRDETRGNFEHVLLTILQCAENSCFYFAKALRKSMKGLGTDDTALIRIVVTRAEVDMQFIITEYRKRYKKTLYNAVHSDTTSHYRTFLLSLLGPNV

SEQ ID NO: 48117 - protein, 539 aa, Zea mays
  misc_feature (504)..(504): Xaa can be any naturally occurring amino acid
  unsure (1)..(539): unsure at all Xaa locations
MGGHSKEDARRLEWATLNLERGVVGGGGETTGYGNASLKPAIGLVRLFSACMVSGGIQYGWALQLSLLSPYSQARVPACPASTLGISHSYVSLTWICGPIAGFVVQPIVGYYSDRCTSKMGRRRPFILAGCIIICLSVLMIGFSADIGRRLGDTTEHCSTFTGSRWYAAAVYIVGFWFLDFANNTVQGPARAMMADLAAGHHGPNVGQAIFSLWMALGSVLGYLAGANAKWHEWFPWLKTAACCDACANLKGAFLTAVVLIVVTMSATLWLAGEEQKQLDKDDVDASGGACSAFVDLFKCLKNLPPAMFSVLAVTAVTWLSWFPFILYNTDWMGREIYHGEPQGAGGKADLYNAGVREGAVGLLLCSVALGVTSLLIPKLCRKLTSRVVWSVSNLMVFILMAAMVILGIVSMKGYQPSLAATLSAGPNHSFRAGALAIFAFIGIPQAVLYSVPWAVASEVAAKDGGGQGLTIGVLNIAIVLPQLVIALGAGPIDGAFNKGNTPXFGIGAVFAFICAVLALILLPRTRGVSNATVMAGGH

SEQ ID NO: 48118 - protein, 610 aa, Candida albicans SC5314
MVLFPTINRLANPNNAGGLTGSRRRRLFVPPSTQYPLFIYGDGDDQRSFLSNIEVGSQIYSPEDDHSDVASVSTSRSLPSTLSSVQTADDQESFHDWLHEEHQRRISAASSPAGSSDEDDLELGRRRSGTMPTVISPQEDFLNLKTDYNLESKSLFKNSLPLILTFILEHIFSIVCLVVVGKLGTKQLGAVSLATMTSTITFAIFEGTATALDTLCPQAYGAGNYELMSIFVQRCNIFSMILFLPCALFWWFSGSILKYVIDDPEVVHLTQEFLRCLILGAPGYILFENSKRFLQAQGIFEAGTGILFVSAPINIGLSWFLVWNETYGIGYIGAPIATGINFWLMMILLVLYVRYIDGGKCWFGLASMEELFSNWNQIIHLAIPGIVMMESEYMAYEIMTLFASYFGTVQLAAQSAVSSIASLTYMVPFSVGIAATTRIANFIGGQNMVGAILATRVAMVAAVIVSTINCLALFSFRYEIARIFSDDPEVISLIVDLLNPLVSVLQIFDGIASVNSGILRAQGSQKIGGYINFIAYYAFALPLAMVLSKIVGLQVFGLWIGVGSGMAVIALSETAVIMFSNWDDILMKAGIMNEFGFDDSDDDGEDDDIF

SEQ ID NO: 48119 - protein, 369 aa, Gibberella moniliformis
MSRGQELVLLTGATGHVGYAVLVKTLQAGYNVRATLRDMSRADAILSSGPVQEALSAQDLDLSFVRVPNFTAPDAFGLVLSNVTHVVHVASALRRGTSTDLKEAIIDVAVQGTRNILRAAHNCPSVRRVVITSSVSAIVDQHPVVSQSPAGRCVTPLDRHADYDAEYYKGDSLKAYTAAKTAALNATDAFLATADGGPTTLPLHFDVINIMPSFVFGPKGLAATPSDVTNGSNIFGIGLVMRHKPWDGIRLEAVCCHVDDVAQVHVNALNDHELLPLKVGAHRDFILGVKFKPEEIGEIVRRRFPREWWESESATFGARGTYDWYHTDYDVGSAERLLGRPFKCLEEQIYDSGSQVMEMLKGMTTRSYN

SEQ ID NO: 48120 - protein, 283 aa, Oryza sativa
MGKEADVEAGGVRDYEDPPPAPLVDIDELGRWSLYRAVIAEFVATLLFLYVTVATVIGYKHQTDASASGDDAACGGVGVLGIAWAFGGMIFILVYCTAGISGGHINPAVTFGLFLARKVSLVRAILYIVAQCLGAVCGVALVKGFQSSFYDRYGGGANELAAGYSKGTGLAAEIIGTFVLVYTVFSATDPKRNARDSHVPVLAPLPIGFAVFMVHLATIPVTGTGINPARSLGAAVVYNNSKAWSDQWIFWVGPFIGAAIAALYHQIVLRASARGYGSFRSNA

SEQ ID NO: 48121 - protein, 334 aa, Candida albicans SC5314
MLRNFLLSPRTFVRMSSTKSQLISQPFKMENTQMIRETARKFPRPNFISFDLFGTLYVPKKPVPQQYYEIAYHEFGINKSIQSIEEEFPIVYDEMLQSYPNYGKGHPKFDNCDSWWKELIIRLFQLDRHDDQALALCHRLIHHFTSEEAYSVYDDVVPTLQALQKQGVKLIVASNSDPRALTILESLKIKQYFHCSEHFHCSGVFLSYDSDYSKPTKAFFDEIALVEYRAHVDANYRSKNYPPGDFLSDCWHVGDSYNNDYIGAVRAGWNGVLLDRNHTSEFFKNVRKPQNDGCFLNENPETKRDGQTGNEMLILANNRVVITKLTQLLDIFKL

SEQ ID NO: 48122 - protein, 576 aa, Gibberella moniliformis
MRGLNNIAVALALSAIWSFGLDLGRHGTSGSSLLLALFRTLCKAYPFVVISHFVWSAIIWPTFFSPLRQLPNVPSDGWLSKETLRLVSEPRGVPQSDWINSLSNRPVDLARYRSFLGFERLLIISPKALAEVLTTKSYDFRKPGLIVSELKQATGMGVLLAEGSEHKSQRKALQTAFNYRHIKNLYPVFWDVAGEFATVLEKQIPTGTPRTSDTTAVIDIVDWASRATLDIIGRAGMGQGFDAIQNDDSRLHQAYRMIFEPSRGAIFLALLRLIFPERLVNWLPLRRNKRMRHGIQVIRSKCQELIRERKEKIKRQKAGVDNSGNDILTVALLNGVFTDEQLIDQLMTFLAAGHETTATALTWAIYILCKQPEVQNRLREEIRMHFPNPKGWPRSERPSSNTLQQAIDFKLPYLNVVCLEVMRYFAPIPLTMREATCDTTILHTFVPAGTRIILAPRVTNRDSALWGPDANNFNPDRNQKRDSTAAPEVTQEEVRGRTEARSNYADLTFLHGPRSCIGQSFARVEFAILLATLIANFEFQIEDESLLDERNISISRGATSRIVGGLKVRVRPIAVV

SEQ ID NO: 48123 - protein, 227 aa, Xanthomonas oryzae pv. oryzae KACC10331
MRWITGVVLNYNTDTQAVNCLSSPTDGTPSPVRRLNYRRALLMLLNRLLVIVFIGFFAKSAFAAGTPVLDVDYRPLAGKTPINLNLTYGGKVVMVVNTASKCGYTPQYEGLEALNQRFASRGFTLLGFPSNDFHGQEPGSEKQIQEFCTLTYGVKFPMFEKVHVLGAEATPLYQRLTQATGVAPGWNFHKYLIGRDGRVVAQFPSKIKPDDPSVLAAIERELKAPSR

SEQ ID NO: 48124 - protein, 148 aa, Capsicum annuum
MEQTFIMIKPDGVQRGLVGEIIGRFEKKGFSLKGLKLITVDRAFAEKHYADLSAKPFFNGLVEYIVSGPVVSMVWEGKGVLTTGRKIIGATNPLESAPGTIRGDYAIDIGRNVIHGSDAVESARKEIALWFPEGVAEWQSSLHCWIYE

SEQ ID NO: 48125 - protein, 636 aa, Oryza sativa (japonica cultivar-group)
MDGCDCIEPLWPTDELLIKYQYISDFFIALAYFSIPLELIYFVKKSSFFPYRWVLIQFGAFIVLCGATHLINLWTFTTHTKTVAMVMTVAKVSTAVVSCATALMLVHIIPDLLSVKTRELFLKNKAEQLDREMGLIRTQEETGRHVRMLTHEIRSTLDRHTILKTTLVELGGTLGLEECALWMPSRSGSSLQLSHTLRHQITVGSTVSINLPVVNQVFSSNRAIIIPHTSPLARIRPLAGRYVPPEVAAVRVPLLHLSNFQINDWPELSAKSYAIMVLMLPSDSARKWHVHELELVEVVADQVAVALSHAAILEESMRARDLLMEQNVALDLARREAEMAIRARNDFLAVMNHEMRTPMNAIIALSSLLLETELTPEQRLMVETVLKSSNLLATLINDVLDLSKLEDGSLELEIKAFNLHAVFKEVMSFIKPIAAIKRLSVSVMLAPDLPLCAIGDEKRLMQTILNISGNAVKFTKEGHITLVASVVKADSLREFRTPDFHPTASDDNFYLKVQIKDTGCGISPQDLPQVFTKFAQSQPGGNRGYSGSGLGLAICKRFVTLMGGHIWLDSEGTGRGCTVTFVIQLGICDNTNAYQQKLIPLVWPSSGDADFVGPVPNAPNEEKGQASLKSRYQRSI

SEQ ID NO: 48126 - protein, 135 aa, Zea mays
  misc_feature (23)..(23): Xaa can be any naturally occurring amino acid
  misc_feature (40)..(40): Xaa can be any naturally occurring amino acid
  misc_feature (49)..(49): Xaa can be any naturally occurring amino acid
  misc_feature (57)..(57): Xaa can be any naturally occurring amino acid
  misc_feature (69)..(69): Xaa can be any naturally occurring amino acid
  misc_feature (122)..(122): Xaa can be any naturally occurring amino acid
  unsure (1)..(135): unsure at all Xaa locations
RTYMNARIPKRSTQDEAKEQIAXDLAQDWNAVFQRSINTXLLTEMVRGXRMLTIRYXFDTNATINYPDXKGTLETTVHAESTLSDLTESGEERCFACKLCKSICTAQAITTDAAERLDCSGXTSRYDIVMINCIY

SEQ ID NO: 48127 - protein, 231 aa, Shewanella sp. ANA-3
MNMSQKMAAEFLGTLWLVLGGCGSAVLAAAFPEVGIGLLGVALAFGLTVLTMAFAIGHISGCHLNPAVSFGLWAGGRFPASELLPYIIAQVAGGIVGAGVLYAIASGQEGFSLAAGFASNGFGEHSPGGYSMMSVLICEIVMTLFFLLVILGATDERAPKGFAPIAIGLCLTLIHLISIPVSNTSVNPARSTGPALFVGDWAVSQLWIFWVAPIVGAILAGMIYRYFKAAE

SEQ ID NO: 48128 - protein, 352 aa, Xanthomonas oryzae pv. oryzae KACC10331
MLPVHRVLRYLGLAFARCTGGGTRMSAAKHQVVCFGEALIDMLALPQASPAEARTFAQYAGGAPANVAVAVARLGGAAHFVGMLGRDMFGDFLLQSLQQSGVVTDGIVRTDQAKTALAFVALDEAGERSFSFYRPPAADLLFRPEHFAADGFMQAAVLHVCSNSMTEPEIAQCTLDGMRRARADGAIVSLDLNLRPMLWPQDVDPAPLLWDALALADVVKLSREELDYLAGTLDSDASAVTQKLWQGSASWLLVTDGGGPVHWQTRTDSGQVPAFRVQVRDSTAAGDAFVGGLLYQLAARASSLEQLCGDPAAINEVIRFAAAVGALAVTRKGAFAAMPSVDEVHTLIQEQS

SEQ ID NO: 48129 - protein, 586 aa, Lactobacillus plantarum WCFS1
MKKTKIVSTLGPASTDTDTIVKLIEAGANIFRFNFSHGDHEEHLDRLNKVHEAEKITGKTVGIMLDTKGAEIRTTVQANGKSEYKIGDKVRITMDDSLDTTHDKIAVTYKNLYDDVHVGGHVLFDDGLLDMKIDEKDEANRELVTTVQNAGVLGSRKGVNAPGVSINLPGITEKDSSDIRFGLDHEINYIAASFVRKPQDVLDIRELLEEKHMEHVQIFPKIESQEGIDNADEILKVCDGLMVARGDMGVEIPAENVPLVQKSLIKKCNALGMPVITATQMLDSMQENPRPTRAEASDVANAVFDGTDATMLSGESANGLYPVESVAMMAKIDEKAENTLAENGTLQLNRFDKTSVTETIGIAIARAAKNLNIKTIVAATESGYTAKMISKYRPNADILAITFDERTQRGLMVNWGVQPIVAEKPETTDDMFDLAASKAVELGFAKEGDLILITAGVPVGERGTTNIMKIQLIGSKLADGQGVGDETVIGKAVIATSAQEAIDKAVEGGVLVTKTTDKDYLPAIEKSSALVVENGGLTSHAAVVGISMGIPVIVGVKDATSVIADGQLITVDSRRGLVYRGASNAL

SEQ ID NO: 48130 - protein, 193 aa, Ochromonas danica
AGGISEMAELHKDVRTKTDALDSAGNTTAAIGKGFAIGSAALVSLALYGAFVVRIRVSSHNSDSHVEILQPMTFAFLLIGSMLPYWFSALTMKSVGDAAIEMVKEVQWQFEQNPELLNPNGTARPDYSRCVAISTKSALREMIAPGALVMLAPLVAGTFFGVHAVYGLLTGALLSGVQLAVSMSNTGGAWDNA

SEQ ID NO: 48131 - protein, 271 aa, Burkholderia sp. 383
MNRIQQTFAALAEQGRKGLIPFITAGDPDPAKTVEFMHALAEGGADVIELGVPFSDPMADGPVIQRSSERALARGVTLKSVLADVKRFRETDPKTPVVLMGYANPIERMGVDTFAAEAQAAGVDGVLVVDYPPEEAGVFAEKMRAAQIDPIFLLAPTSTDERIADVGKIASGYVYYVSLKGVTGAGNLDVSSIAGKIPAIKSRVPVPVGVGFGIRDAETARAVAEVSDAVVIGSRLVQLLESAAPEGAAAALKTFIAELRAALDGAGKTAR

SEQ ID NO: 48132 - protein, 742 aa, Oryza sativa (japonica cultivar-group)
MMGTAHHNQTAGSALGVGVGDANDAVPGAGGGGYSDPDGGPISGVQRPPQVCWERFIQKKTIKVLLVDSDDSTRQVVSALLRHCMYEVIPAENGQQAWTYLEDMQNSIDLVLTEVVMPGVSGISLLSRIMNHNICKNIPVIMMSSNDAMGTVFKCLSKGAVDFLVKPIRKNELKNLWQHVWRRCHSSSGSGSESGIQTQKCAKSKSGDESNNNNGSNDDDDDDGVIMGLNARDGSDNGSGTQAQSSWTKRAVEIDSPQAMSPDQLADPPDSTCAQVIHLKSDICSNRWLPCTSNKNSKKQKETNDDFKGKDLEIGSPRNLNTAYQSSPNERSIKPTDRRNEYPLQNNSKEAAMENLEESSVRAADLIGSMAKNMDAQQAARAANAPNCSSKVPEGKDKNRDNIMPSLELSLKRSRSTGDGANAIQEEQRNVLRRSDLSAFTRYHTPVASNQGGTGFMGSCSLHDNSSEAMKTDSAYNMKSNSDAAPIKQGSNGSSNNNDMGSTTKNVVTKPSTNKERVMSPSAVKANGHTSAFHPAQHWTSPANTTGKEKTDEVANNAAKRAQPGEVQSNLVQHPRPILHYVHFDVSRENGGSGAPQCGSSNVFDPPVEGHAANYGVNGSNSGSNNGSNGQNGSTTAVDAERPNMEIANGTINKSGPGGGNGSGSGSGNDMYLKRFTQREHRVAAVIKFRQKRKERNFGKKVRYQSRKRLAEQRPRVRGQFVRQAVQDQQQQGGGREAAADR

SEQ ID NO: 48133 - protein, 411 aa, Shewanella sp. MR-4
MYTMDSNKMKRVVITGMGVVSSIGNNKQEVTESLKAGRSGITHSAQFEEMQLRSHVWGNIKLDPSELIDRKALRFMGDAAAYAYIAMQEAIKDAQLTEEQYSNPRVGLIVGTGGASSSNQVQAADILREKGVKRVGPYIVPRIMSSTASACLATPFKIKGMNYSISSACATSAHCIGHAVELIQMGKQDMVFAGGSEEVDWTLTMGFDAMGALSTKYNDTPEKASRTYDADRDGFVISGGGGILIVEELEHALARGAKIYAEVIGYGASSDGYDMVAPSGEGAVRCMQMALADVDTPIDYINTHGTSTPVGDVRELEALREVFKDKCPPVASTKSMTGHALGAAGVHEAIYSLIMMENSFIAPSINIDNLDEAAKDMPIVREYRDAELNTVMSNSFGFGGTNATLVMRKYK

SEQ ID NO: 48134 - protein, 767 aa, Oryza sativa (japonica cultivar-group)
MGSACEAGTDEPSRDDVKGTGNGILENGHSHKPEEEEWRNGMGEDLPNGHSTPPEPQQTDEQKEHQVQIVRWERFLPVKTLRVLLVENDDSTRQVVSALLRKCCYEVIPAENGLHAWQCLEDLQNHIDLVLTEVVMPRLSGIGLLSKITSHKICKDIPVIMMSSNDSMGTVFKCLSKGAVDFLVKPIRKNELKNLWQHVWRRCHSSSGSGSESGIRTQKCTKPKVDDEYENNSGSNNDNEDDDDNDEDDDDLSVGHNARDGSDNGSGTQSSWTKRAVEIDSPQQMSPDQPSDLPDSTCAQVIHPTSEICSNRWLPTANKRSGKKHKENNDDSMGKYLEIGAPRNSSMEYQSSPREMSVNPTEKQHETLMPQSKTTRETDSRNTQNEPTTQTVDLISSIARSTDDKQVVRINNAPDCSSKVPDGNDKNRDSLIDMTSEELGLKRLKTTGSATEIHDERNILKRSDLSAFTRYHTTVASNQGGAGFGGSCSPQDNSSEALKTDSNCKVKSNSDAAEIKQGSNGSSNNNDMGSSTKNAITKPSSNRGKVISPSAVKATQHTSAFHPVQRQTSPANVVGKDKVDEGIANGVNVGHPVDVQNSFMQHHHHVHYYVHVMTQQQQQPSIERGSSDAQCGSSNVFDPPIEGHAANYSVNGSFSGGHNGNNGQRGPSTAPNVGRPNMETVNGIVDENGAGGGNGSGSGSGNDLYQNGVCYREAALNKFRQKRKVRNFGKKVRYQSRKRLAEQRPRIRGQFVRQSGQEDQAGQDEDR

SEQ ID NO: 48135 - protein, 445 aa, Saccharomyces cerevisiae
MREVISINVGQAGCQIGNACWELYSLEHGIKEDGHLEDGLSKPKGGEEGFSTFFHETGYGKFVPRAIYVDLEPNVIDEVRTGRFKELFHPEQLINGKEDAANNYARGHYTVGREIVDEVEERIRKMADQCDGLQGFLFTHSLGGGTGSGLGSLLLENLSYEYGKKSKLEFAVYPAPQLSTSVVEPYNTVLTTHTTLEHADCTFMVDNEAIYDICKRNLGISRPSFSNLNGLIAQVISSVTASLRFDGSLNVDLNEFQTNLVPYPRIHFPLVSYAPILSKKRATHESNSVSEITNACFEPGNQMVKCDPTKGKYMANCLLYRGDVVTRDVQRAVEQVKNKKTVQMVDWCPTGFKIGICYEPPSVIPSSELANVDRAVCMLSNTTAIADAWKRIDQKFDLMYAKRAFVHWYVGEGMEEGEFTEAREDLAALERDYIEVGADSYAEEF

SEQ ID NO: 48136 - protein, 683 aa, Gibberella moniliformis
MYHTVPYTIESPGYLKVAGESLPRRHPRAKHGLLRYPSAGVLTVFDIVRRSAKLYPDNKAVGSRRLIKMHREFKIIQDKEKEWIYYELGPYNYLSYSQYELLAIQIGSGLRKLGLSSSNKVYLFGTTSANWISMSHGCASQGIPIVTGYDTLSATDIQHSLSQTHAEVIYLDPHLLGTASIALENSQVKTVIINTGSIFSGGYDIDQFRNEHPQFNVITYEELIQLGRHNLKEPIPVKSSDLFCIMYTSGSTGLPNGCCITHENFLAGKLTRSSTVTGLLGGIDDFVSDQERVLAYLPLAHIFEMALENLVMYIGGTLGYGNPKTLTDASLRECNGDMVEFKPTIMVGVPQIWETIRKAVLSKLNCSGFVAKTVFWTAMSFKSFAVRYSLPGKGVFDDLVFGRVRQMTGGRLRYILNGSSGIADSTKEFLSLIVAEMLTGYGLTETCANGALSSPFEQTTSAIGSTSPAIDVKLVSIPELGYFTDADAGPCQGEILVRGPAVFKGYFNNPQGTEKAFAPGGWFKTGDIGEFDDRGHLKIIDRIKSLVKMQGGEYIALEKLESIYRTSQAILQVMVHADFEYTRPIVIIMPNTKFLQDKSRELGFSDDDSTLSSERMSAYVLDDLQDIARRSGLSKIETVTGVVITDIEWTPQSGLVTPTMKLNRRFILNYFRDEVEKCMQSIG

SEQ ID NO: 48137 - protein, 295 aa, Prunus mume
MSSSDLQLPPGFRFHPTDEELVKHYLCRKCQSQPISVPIIAEIDLYKYNPWDLPGLALYGEKEWYFFSPRDRKYPNGSRPNRAAGSGYWKATGADKPIGSPKPVGIKKALVFYAGKAPRGEKTNWIMHEYRLADVDRSPRKKSSSLRLDDWVLCRIYNKKGTVEKQQQQQQQQQQQTTSRMSSGSEFEDRKPENLACPPPPAAVAPTRPNDYVYFDTSDSVPRLHTDSSCSEHVVSPEFTCEVQSEPKWKEWEKALDFNYNYMDTSVENGFGPQFQSANQMSPLQDIFMYLQKPY

SEQ ID NO: 48138 - protein, 481 aa, Emericella nidulans
MPRSAIVQEYNPTPTLSVDRKSAQHQHEGIIARPSGYRVSWHANPAVELHHFGQSHPMKPWRLTLTKQLVLAYGMHHAMDLYHCRAATVEELSDFHTSDYLDFLQTVVPGDMNDAQSKDFSENIVRFNFGDDCPIFDGLFQYCSLYAGASLDAARKLCNNQADIAINWSGGLHHAKKAEASGFCYVNDIVLAILQLLRIHPRVMYIDIDVHHGDGVEQAFWSTDRVLTVSFHKYDKENFFPGTGPLDSTGPTHPLNPGAHHAVNVPLHDGIDDESYVQLFKDVVGACVSKFRPAAIVLQCGADSLGCDRLGCFNLNVAAHGACVAYTKTFGLPMLVVGGGGYTPRNVSRAWAHETSILIDAQDKINPVIPSNVAFRNHFGPDFSLFPPLSEMRKLENKNSRAYLATIVQTITEQLRYLQAAPSVQMSVIPPDLLGLREETEKEIEEEIAKLEEKREEAEGGKNSRRRDAEKGAGLRGELYS

SEQ ID NO: 48139 - protein, 338 aa, Glycine max
MAEEAQNSNSMNALPKVLVLGPPTCFITLQPLYSHKFHFLNPHTSSLSLQHFLHHHHHHHPSSISAVLCGASYSVTANVLCLLPALRLIVTTSAGTDHIDLAECRRRGIQVAGAGELFSEDVADMAVALLADVMRKISAADRYLRTQQNHDTTPWDFFTFGSKLAGKRVEIIGLGSIGMEVAKRLESFGCIILYNSKHKKASVSYPFYSSMVDLATTCDALVLCCALNEQTKHIINREVMLALGKQGFIVNVGRGGLIDEKELVKCLMEGEIGGAGLDVFENEPHVPKELLAMNNVVLSPHSAAFTVESMMNLCELMGGNLEAFFLNKPLITPVMLPQ

SEQ ID NO: 48140 - protein, 421 aa, Vibrio vulnificus CMCP6
MTAEPATAEVVPGFATDVLAFNGAIPAPTIRCRQGEEVIIHFTNKLNEPTTIHWHGLRVPIEMDGVPFLSQKPVMPGESFTYRFTPPDAGTFWYHPHMNSVKQLGMGLVGLIIVDEAEPVSFDEDHALMLKHWHLNEKGEWKSLLVPRLSARMGTPGEWGTVNGVHEPIYPLKANAMTRLRIANVDNTITYPIAIEGVDAWVIAIDGNPIKTPYKLSEHKIGPGMRVDVGLIAPGVGERFYVRQMKGKFPFPLCAFESVESDLLNQNILPTLPLNPIAPLDLDTAEQIDFVFEWEGAVTPMDKSGQALPTFWLVNKRAWEGMSQDSIPAPLATLERGRTYIFNLKNVTQYHHPIHLHGHTFTVLELNGQTLAEPFHTDTVLLGKNGSAKAAFVADNPGRWMYHCHVIEHMKTGLMGYIEVK

SEQ ID NO: 48141 - protein, 147 aa, Bacillus clausii KSM-K16
MERTYVMVKPDGVQRNLIGNIVSRFEQKGYTLAAAKLVTLSKETAETHYSEHRERPFFGELVSFITSGPVFAMVWEGEGVIKAARQLIGATNPSEAAPGTIRGDLAVNVGMNVVHGSDSPESAEREIAIFFKEEELNDYQKDSNKWV

SEQ ID NO: 48142 - protein, 469 aa, Bacillus cereus G9241
MKPPTDNNKEGAESQKLESESKPIWKSMSMFLVPLLLSNVLQSVGQLFGMVVVGRWLGVNDLAAISAFFPLFFLLVSFVIGIGSGSSILIGQAFGAKNEDRLKAIVGTTLTFTFIIGVVLAIVGSIFAMDIMRLMGTPENIIEISVHYARILFISMPVLFLYFAYTTFMRGTGDSKTPFYFLIVSTALNMILLPILIFGWLGAPKLDVYGAAYASVISTVITFIVMLVYLKKKNHPLQLDSTVRKYLRMDGELLKLLLRLGIPASINMILVSLSEIAVIAFVNRYGSDATAAYGVVNQVASYVQMPAVSLGITVSIFAAQSIGANQFDRLQKVVKAGIIMNYVIGGVLISLIYLFSRDILSLFLTSQTTIEIAHSLVMITLWSYLIFGHAQIISATMRASGTVLWPTVIGVVSIWLVEVPVAYYLSYHTSLGIEGIWIGYPAAFIVSLLLQYAYYKLSWQKKRIKRLVS

SEQ ID NO: 48143 - protein, 373 aa, Candida albicans SC5314
MTTSLTEQTAILAKYLELSQNGKILAEYVWIDAEGNTRSKCRTLSKKPTSVDDLPEWNYDGSSTGQAPGHDSDVYLRPVAFYPDPFRKGDNIIVLNECWNNDGTPNKFNHRHECAKLMKAHASEEVWFGLEQEYTLFDQYDYPYGWPKGGFPAPQGPFYCGVGTGKVVARDVIEAHYRACLYAGINISGINAEVMPSQWEFQVGPCEGIEMGDQLWIARYLLQRVAEEFAVKISFHPKPLKGDWNGAGCHTNVSTKSMRVPGGMKVIESALSKLAKRHKEHMLLYGADNDQRLTGRHETGHMDTFSSGVANRGASIRIPRQVAKEGYGYFEDRRPASNIDPYLVTGIMVETICGSIPDADMAKEFLRESSDDN

SEQ ID NO: 48144 - protein, 461 aa, Streptomyces coelicolor A3(2)
MPAVPERAPVTTRSETQSTLDHLLTEIELRNPAQPEFHQAAHEVLETLAPVVAARPEYAEPGLIERLVEPERQVMFRVPWQDDQGRVRVNRGFRVEFNSALGPYKGGLRFHPSVNLGVIKFLGFEQIFKNALTGLGIGGGKGGSDFDPHGRSDAEVMRFCQSFMTELYRHIGEHTDVPAGDIGVGGREIGYLFGQYRRITNRWESGVLTGKGQGWGGSLIRPEATGYGNVLFAAAMLRERGEDLEGQTAVVSGSGNVAIYTIEKLTALGANAVTCSDSSGYVVDEKGIDLDLLKQIKEVERGRVDAYAERRGASARFVPGGSVWDVPADLALPSATQNELDENAAATLVRNGVKAVSEGANMPTTPEAVHLLQKAGVAFGPGKAANAGGVAVSALEMAQNHARTSWTAARVEEELADIMTSIHTTCHETAERYDAPGDYVTGANIAGFERVADAMLAQGVI

SEQ ID NO: 48145 - protein, 341 aa, Bradyrhizobium sp. BTAi1
MKAVYTELHRSHDPQFYLVRGVVKRTTEQPERADRLLAGLKAGNHELVAPTHFGQEARARVHSPEYLNFLEEAWEAWAALGDAGTEMIPNMHPVRHAATYPTHIVGRLGWHTIDTSAPIGPGTWEGACAATDVATTAAQLLLDGEDAAYALCRPPGHHAYRDIASGFCFMNNSAIAAAHLRQRHERVAILDVDVHHGNGTQGIFYERPDVLTISIHADPAHYYPFVWGYAHERGAGAGLGANLNIPLALKSGDDTYLKAFETAAKTIHAFAPGALVVALGLDASEHDPLKGLSVTTPGFRRIGGAIARLGLPTVFVQEGGYLSDILGQNLTAVLAGFEAAR

SEQ ID NO: 48146 - protein, 391 aa, Daucus carota
MGKHSAFSVFLFSILVAHSHVSASSQTCDFPAIFNFGDANSDTGAFAAWFFGNPPFFGQSYFNGSAGRVSDGRLLIDFMATDLGLPFLHPYMDSLGANFSHGANFANILSTIALPTSNIIPGVRPPRGLNPVNLDIQVAQFAQFVNRSQTQGEAFDNFMPKQDYFSQALYTLDIGQIDITQEFLTNKTDDEIKAVVPGLISSLSSNIQILYSLGGRSFWIHNLGPNGCLPILLTLAPVPDDQLDSAGCAKRYNDLTQYFNSELKKGVDQLRTDLPLAAVTYVDVYTAKYSLYQEPAKYGFTHPLETCCGFGGRYNYGEFSLCGSTITVNGTQLTVGPCENPAEYINYEGQTYTQAADQITFNKISTGELSDPPNSLKTACPKLSLPRVSDI

SEQ ID NO: 48147 - protein, 704 aa, Oryza sativa (indica cultivar-group)
MMGTAHHNQTAGSALGVGVGDANDAVPGAGGGGYSDPDGGPTSGVQPPPQVCWERFIQKKTIKVLLVDSDDSTRQVVSALLRHCMYEVIPAENGQQAWTYLEDMQNSIDLVLTEVVMPGVSGISLLSRIMNHNICKNIPVIMMSSNDAMGTVFKCLSKGAVDFLVKPIRKNELKNLWQHVWRRCHSSSGSGSESGIQTQKCAKSKSGDESNNNNGSNDDDDDDGVIMGLNARDGSDNGSGTQAQSSWTKRAVEIDSPQAMSPDQLADPPDSTCAQVIHLKSDICSNRWLPCTSNKNSKKQKETNDDFKGKDLEIGSPRNLNTAYQSSPNERSIKPTDRRNEYPLQNNSKEAAMENLEESSVRAADLIGSMAKNMDAQQAARAANAPNCSSKVPEGKDKNRDNIMPSLELSLKRSRSTGDDANAIQEEQRNVLRRSDLSAFTRYHTPVASNQGGTGFVGSCSPHDNISEAMKTDSAYNMKSNSDAAPIKQGSNGSSNNNDMGSTTKNVVTKPSTNKERVMSPSAVKANGHTSAFHPAQHWTSPANTTGKEKTDEVANNAAKRAQPGEVQSNLVQHPRPILHYVHFDVSRENGGSGAPQCGSSNVFDPPVEGHAANYGVNGSNSGSNNGSNGQNGSTTAVDAERPNMEIANGTINKSGPGGGNGSGSGSGNDMYLKRFTQREHRVAAVIKFRQKRKERNFGKKVRY

SEQ ID NO: 48148 - protein, 420 aa, Kineococcus radiotolerans SRS30216
MTTTSTSSSRRVVVTGMGATTPLGGDVRTSWEAALAGRSGARPITDPWIEEFELPVTFAAQAAVRADTILERREIKRLDPSQQFAVIAAREAWADAGTPEVDPLRLGSVVATGIGGIWTLLTSYDTLKEKGARRVLPLTVPMLMANGPTAAISIEFTARAGAHTPVSACASGAEAIAYGADMIRTGRADIVICGGTEAAIHPLPIASFTSMHAMSRRNEDPERASRPFDTARDGFVLGEGAGILVLESEEHARARGARVHAEVLGVGLSADAYHVAAPEPEGAGTSRAMLDALHQADLTPADLCHVNAHATSTPVGDVAEDKGLRLAFGDATDGIAVSATKSMTGHLLGAAGAVESIFTILALRDRLAPPTINVDDLDPAITLDVVRKDPRPLPAEGRLVGLNNAFGFGGHNVSAVFATP

SEQ ID NO: 48149 - protein, 710 aa, SYNECHOCOCCUS SP. WH 8102
MGRGVRVLHLHLYGLFRSRDLELGRDADTGGQTLYVLDLVRSLAQRPEVDRVDVVTRLVQDRRVAADYERPLEVIAPGARILRFPFGPKRYLRKEQLWPHLEDLADQLVHHLTQPGHEVDWIHAHYADAGFVGALVSQRLGLPLVFTGHSLGREKQRRLLAGGGDRQQIEQAYAMSRRIEAEEQALTQADLVITSTQQEADLQYARYSQFRRDRVQVIPPGVDAGRFHPVSSAAEGDALDQLLSPFLRDPSKPPLLAISRAVRRKNIPALLEAFGSSSVLRDRHNLVLVLGCREDPRQMEKQQRDVFQQVFDLVDRYDLYGSVAYPKQHRRSQVPAFYRWAVQRGGLFVNPALTEPFGLTLLEAAACGLPMVATDDGGPRDIQARCENGLLVDVIDAGALQEALERAGKDASRWRRWSDNGVEAVSRHFSWDAHVCRYLGLMQAHLHQLPSVGPRPQGSPASSHRPDHLLLLDLDSTLDCPDGPSLTALRSQLERDGQRYGLGILTGRSLAAARQRYGDLHLPSPLVWISRAGSEIHLGEDLQPDHIWAQHIDTDWQRESVEAVMEDLHDLLELQSEEHQGPWKLSYLQRQPDESVLSHVRQRLRREGLSARPQRRCHWYLDVLPRLASRSEAIRHLALHWQLPLERVMVMASQQGDGELLRGLPATVVPADHDPCLVRHPQQKRVLLSGRPSLAAVLDGLSHYRFPSQR

SEQ ID NO: 48150 - protein, 438 aa, Prunus mume
MVVNVSVRETTLVKPAAETPRKALWNSNVDLVIPSIHTPSVYFYRPNQNGASSNFFDPAVLKLALSKALVPFYPMAGRLKRDDDGRIEIDCNGEGVLFVEAETSSVIDDFGDFAPTLELRRLIPAVDYSAGISSYALLVLQVTYFKCGGVSLGVGMQHHAADGFSGLHFVNTWSDMARGLDLTLPPFIDRTLLRARDPPQPAFHHIEYQPAPPLKTPLQSTKPGADSTTVSIFRLTREQLNILKAKSKEAGNTISYSSYEMMAGHIWRCVCKARELPNDQDTKLYIATDGRSRLQPPLPPGYFGNVIFTATPIAVAGDLQSKPTWFAASRIHDSLVRMDDNYLRSALDYLELQPDLSALVRGAHSFRCPNLGITSWVRLPIHDADFGWGRPIFMGPGGIAFEGLAFVIPSATNDGSLSVAISLQSEHMKSFSKLLYDI

SEQ ID NO: 48151 - protein, 540 aa, Leuconostoc mesenteroides subsp. mesenteroides ATCC 8293
MSFQDSNNDGIGDLAGITQRLQYIHNLGADVIWLNPIYVSPNKDNGYDIADYRNINPNYGTMQDFEDLLQQAHRLDLKIMMDLVVNHTSDQHVWFKESRKNQTNEYANYYIWRDPVDGHEPNNWLAAFGGSAWTYVPERKQYYLHMFAEGQPDLNWENLEVREAVFDIERFWLDKGVDGFRMDVINLISKPEGLPDVTEPVTAGTTMDFVADGHRLNEFLRQMNDEVLSKYDTITVGEMPSSTPEDAIKYTGLDSHELNMVFQFEHVSLSPNPDVRLGKWNDEPINLVELKASLNRWQIGLDGKGWNSLYWNNHDQPRAVSRFGNDQPEFRVLSAKMLATTLHMMQGTPYVYQGEELGMTNGHFESLEQYEDIESVNFYHEFVDEQKIVDSATMLKYLANMSRDNARTPMQWNNQQNAGFSNVTPWYAPNKNYTAINAENVLSDNDSVYYHYQKLIQLRHDSEIVRYGTFEAIDSEDNQVYAYLRHYKEQSVLVLSNFTDKVVTRDYGQTKFSELLINNYLDDQGTILRPYESKVYLLTK

SEQ ID NO: 48152 - protein, 626 aa, SYNECHOCOCCUS SP. WH 8102
MHQTPLTMTAELGDFIEAAGLLEYDPAAITRIYAGHPQRLIRRLWQTLVPIGLLLLGVAFDWLFQLLKDEERARSRARECAELLVDLGPAFIKAGQALSTRPDIVPPLLLEELSQLQDQLPGFDSDLAMACIEEDLGAPVDELYEQLDREPISAASLGQVHRGVLNNGQKVAVKVQRPGLREQITLDLYIVRNIAAWLNSNIGLIRSDLVALIDELGRRVFEEMDYLNEAANAEKFAELHRHNPRIAVPAIFHEATSRRVLTMEWIDGVKLTNLDAVRELGIDPDDMVDVGVNCSLQQLLEHGFFHADPHPGNLLALEDGRLCYLDFGMMSEVSRESRTGLIQAVVHLVNRNFGKLSKDFVTLGFLAEDVNLEPIVPAFESVFSQALEAGVNRMDFKAVTDDMSGVMYKFPFRVPPYYALIIRSLVTLEGIALSVDPQFKILGAAYPYFARRLMEDPDPQLRQSLKEMLFDGDAFRWTRLENLVSSAASQAQLDLEALLDQLLDFLFSPKAGLLRDQLVEATVDRLDAIGWSTVQRLGRRLPKRIQPNAFQSRGLPPADPLLQLEPIRELINVLQSLPDFTPDLLLKRMPRLLNEPDTRRMGVQVAQGLAERGVVRLVRVAAGVST

SEQ ID NO: 48153 - protein, 219 aa, Arabidopsis thaliana
MTSNVQLSETNSPRNQKTRPRAEKEEVDYMQRAQWLRAALLGANDGLVTVASLMMGVGSIKEDVKAMLLVGFAGLVAGACSMAIGEFVSVCTQRDIETAQMKRAIEHKTSLSAIDEQEEEEKKERLPNPGQAAIASALAFSVGAAMPLLGAVFIENHKVRMVVVAVVATIALVVFGVTGAVLGKTSVVKSSVRVVIGGWMAMALTFGLTKFIGSAAMQI

SEQ ID NO: 48154 - protein, 381 aa, Haloarcula marismortui ATCC 43049
MSVISAPSEQPAMTLDIGMLGYRFMGKAHANALDRLPMFFPEAPAVNKDVLVGRDEDALADAADQFDFDRTATDWRAIVDEVDVFYNLGPNHVHAEPSIAALEAGTPTFCEKPLAPTLDTAEEMAEAAADADVPAGAAFNYRFVPAIQYAKGLIDDGVLGEIHHFRGQYLQDWLVDPEAPWSWRNDEEMAGSGALGDLGSHTVDLARFLLGDAAGEITDVSGHLRTFTEERPVEGSDETRPVTVDDAYSAQIVFDSGAMGTLEASRVANGHKNAHTIEIEGSKGAVKFDLERLNELQVLTEGDRGFQQVLVTDEDDPYVDHWWPPGHVIGWEHTFVHENYEFLSAVADGRQQEPSFADGLAAQRVLDAIEQSDDRGERVSL

SEQ ID NO: 48155 - protein, 330 aa, Leuconostoc mesenteroides subsp. mesenteroides ATCC 8293
MAILVLGGAGYIGSHMVKRLIEADRDVVVVDALFTGHREAVNPKAKFYQVDIRDKTALSEVFDKENIEQVVHFAAFSIVPESVANPLKYFDNNTSGMITLLEVMKEHDVKQIVFSSTAATYGNPVNIPIKETDPQRPINPYGESKLMMEKIMAWSDQADGVKWVALRYFNVAGAAEDGTIGEDHAPETHLVPIILQAGLGQREYIEMFGDDYNTPDGFNVRDYVHVLDLADAHILALKYLADGNDSNQFNLGSATGFSVKEMVEAARSATGVDIPAKIGPRRAGDPDILIANSDKARDVLGWAPKYDNVQDIIKTAWNWHKNHPSGYNDK

SEQ ID NO: 48156 - protein, 365 aa, Frankia sp. CcI3
MDKTTDMVPAERRQPALAYTGQGRFERERELVLRSPQLVGYRSELPAPGSYCTKTVMGVPVLLTRGEDGTVRAFQNVCAHRQAPVAEGCGAAERFVCPYHAWVYDAQGDFVGGPGREGFPSTMAGKPRLTQLPAAEHSGFLWVGLQPDSGPLDIDAHLGELGPELASWDIGSWASVGEKVLDFPINWKFALDTFAENYHFATVHRDTFALITKSNCALFDSFGPHHRLVFPMRHITDLADKPEEEWEPLHNLVVIYALFPNIVLSVTVANGEVFRVYPGSGPGHSITYHQNASPMDLTDEATRTAADEIFEYAHATVRDEDYRMAIDIQKNMASGVRPELVFGRNEPGLHHRHAVIDEALAAFGG

SEQ ID NO: 48157 - protein, 510 aa, Burkholderia sp. 383
MDALQAAAETAAPSGTALKRRLQGRHIAMIAIGGSIGTGLFVASGASVAQAGPGGAIAAYIAIGLMVYFVVTGLGEMAALMPVSGSFAIYGEKYVDEGFGVALGWTYWYSWAVTIAIELVAAQIVMRYWFPTIPGIWWGAGFLVLIFLLNTLSVRGFGESEYWFSLIKVVTVVAFIAAGLLIAAGLIGNGHPVGMRNFTTGDAPFVGGVHAMMSVALIAGFSFLGTELVGITAGESENPRKTIPRAVKQIFWRIMLFYVFAIFVIGLLVPYTDPNLLKSDVTDIGVSPFTLVFSHAGFRLAAGAMNLVILTAVLSAGNSGTYAATRMLYNLAAEGRAPAMFATLSPGGVPRNALYATMAVGGLCFLTSLTNNQSIYLWLLNTVGITGFIAWLGIAVCHYRFRKGFLKQGYRLDQLPYRAKWFPFGPLFAIAICIVISLGQDYQAFFAARIDWMEVLSIYVWIPLFVAIWWAYRRARKSRLVRYEEMDIGPWLTRSVEAVDATVTQHGQPH

SEQ ID NO: 48158 - protein, 216 aa, Triticum aestivum
MASGEKVDYVFKVVLIGDSAVGKSQILARFARNEFSLDSKATIGVEFQTRTLVIDHKSVKAQIWDTAGQERYRAVTSAYYRGALGALLVYDITKRQSFDHIPRWLEELRGHADKNIVIMLVGNKSDLEDERAVSTEDAKEFAEKENLFFLETSALQATNVESAFQTVLSEIFKIHSKKNIVTDPKANGAAPPLAGKKVLVPGPAQEIPKSKCCSSM

SEQ ID NO: 48159 - protein, 208 aa, Synechococcus elongatus PCC 6301
MIADPASRNVVWHDATITRSDRERLNGHRGVILWFTGLSGSGKSTLAHAVEAQLFERGCRTFVLDGDNVRHGLCADLGFSDSDRQENIRRIGEVAKLFMEAGVITLAAFVSPFRADRDRVRALVADGEYIEVYCQASLDICEQRDVKGLYAKARAGQIPEFTGISSPYEAPEAAELQIDTGSRSLEDCVAQVLDYLASQGIIPASDRA

SEQ ID NO: 48160 - protein, 332 aa, Bacillus cereus E33L
MLKTTESKGNGITKEQARWMYEKMLEIRKFEDKVHELFAQGVLPGFVHLYAGEEAVAVGVCAHLTDSDSITSTHRGHGHCIAKGCDLNGMMAELFGKATGLCKGKGGSMHIADLDKGMLGANGIVGGGFPLACGSALTAKYKGTKDVSVCFFGDGANNEGTFHEGVNLAAIWKLPVIFIAENNGYGEATTFEYASSCDSIADRAKAYNIPGVQVDGKDLLAVYKAAEEAVERARNGDGPTIIECMTYRNYGHFEGEAQTYKTSEEKEEHLNEKDAIVNFRKHLIHEALLTESELVDMEKAVDDAVQKSIEFSENSPYPEDEELLKDVYVSYK

SEQ ID NO: 48161 - protein, 159 aa, Brassica napus
MGRSPCCEKDHTNKGAWTKEEDQKLISYIKSHGEGCWRSLPASAGLLRCGKSCRLRWINYLRPDLKRGNFTLEEDDLIIKLHSLLGNKWSLIATRLPGRTDNEIKNYWNTHMKRKLWSGGMAPATHRPTKAPRDASEARETEDSLVKLLSFGPPPSPPS

SEQ ID NO: 48162 - protein, 633 aa, Phalaenopsis equestris
MEGCDCIEPQWPADELLVKYQYISDFFIALAYFSIPLELIYFVKKSSFFPYRWVLIQFGAFIVLCGATHLINLWTFTMHSRTLAIVMTVAKVSTAVVSCATALMLVHIIPDLLSVKTRELFLRNKAEELDREMGLIRTQEETGRHVRMLTHEIRSTLDRHTILRTTLVELGRTLDLVECALWMPSRTGLNLQLSHTLNNQIPVGSVVSINLPVVNQVFNSSCAVRIPHTCPLARFQPHTGRYVPPEVVAVRVPLLHLSNFQINDWPELSAKNFAVMVLMLPSDSARKWHVYELELVEVVADQVAVALSHAAILEESMRARDQLMDQNVALDLARREAEMAIRARNDFLAVMNHEMRTPMHAIIALSSLLLETELTPEQRLMVETILKSSNLLATLINDVLDLSKLEDGSFELEVTVFNLHTVFREVVNLIKPIAAVKKLSLIVFLSPDLPSCAVGDEKRLMQTMLNVVGNAVKFTKEGSISITASIAKPDSLRDPRDPEFYPIPSDGHFYLRVQIKDTGCGISPQELPHLFTKFAHAQNGSDKGYNGSGLGLAICKRFVNIMKGHIWPESEGIGKGCTTIFIVKLGISEDPAHRFQHKLLPPIRAGQSEADAFGSKPTPTDLIPLKNRYQRSL

SEQ ID NO: 48163 - protein, 459 aa, Bacillus cereus E33L
MSKLVVIGGGPAGYVAAITAAQNGKNVTLIDEADLGGTCLNVGCMPTKSLLESAEVHDIVRKSNHYGVTLNNGSISIDWKQMQVRKSQIVTQLVQGIQYLMKKNKIKVIQGKAKFETDHRVRVTYGDKEIVVDGEQFIIATGSEPTELPFAPFDGKWILNSTHAMSLKNIPKSLLIVGGGVIGCEFASIYSRLGTKVTIVEMAPQLLPGEDEDIAHILRRELENDGVKIFTGATLKGLNSYKKQALFEYEGSIQEVNTEFVLVSVGRKPRVQQLNLEKAGIQYSNKGISVNEHMQTNVSHIYAAGDVIGGIQLAHVAFYEGTTAALHASGEDVKVNYHAVPRCIYTAPEIASVGLTEKDAREQYGDIQIGEFPFTANGKALIIGEQMGKVKVIVEPKYQEIVGISIIGPRATELIGQGTVMIHTEVTADIMRDYIAAHPTLSEAIHEALLQAVGHAVHA

SEQ ID NO: 48164 - protein, 583 aa, Mycobacterium avium subsp. paratuberculosis K-10
MRKHPQTATKHLFVSGGVASSLGKGLTASSLGQLLTARGLYVTMQKLDPYLNVDPGTMNPFQHGEVFVTEDGAETDLDVGHYERFLDRDLSGSANVTTGQVYSTVIAKERRGEYLGDTVQVIPHITDEIKGRILAMAQPDAQGNRPDVVITEIGGTVGDIESQPFLEAARQVRHDLGRENVFFLHVSLVPYLAPSGELKTKPTQHSVAALRSIGITPDALILRCDRDVPEALKNKIALMCDVDIDGVISTPDAPSIYDIPKVLHREELDAYVVRRLNLPFRDVDWTEWDDLLRRVHEPHETVRIALVGKYVELSDAYLSVTEALRAGGFFHHAKVEMVWVASDDCESASGAAAALGEVHGVLIPGGFGIRGIEGKIGAIHYARTRGLPVLGLCLGLQCIVIEAARAAGLAGANSAEFDPDTPDPVISTMADQVDIVAGAADLGGTMRLGAYPAVLEEDSIVARAYGTTQVSERHRHRYEVNNAYRDKIAESGLRFSGTSPDGHLVEFVEYPPDVHPFIVGTQAHPELKSRPTRPHPLFVAFVGAAMDYKAGELLPVEIPEQSSNGIQHRDSAARPIPEPAARG

SEQ ID NO: 48165 - protein, 457 aa, Mesorhizobium loti MAFF303099
MLANSLIELDRAHLIHPVSSYRGHEALGVRVLKSAKGATVTEASGRQLVDGFAGLWCVNAGYGHDSIVEAAARQMRELPYATAYFDLGAEPAIRLASELAERAPGDLNHVFFTLGGSDAVDSTVRFVRYYWNARGAPKRDQFISIEQGYHGSSVVGAGLTALPAFHAGFGIPFEWQHKIPSPYPYRNPVGEDANAIIAASLAALKAKIEELGPERVAAFYAEPIQGSGGVIVPPKGWIKAMRELCREYGILFIADEVITGFGRTGPLFACTDEEIVPDFMTTAKGLTSGYVPMGAVFMADHVYDVIADGAGASSVGHGYTYSAHPVSAAVALEVLKLYEDGLLENGIKAGARLMAGLSGLSDHPLVGDVRGRGMLAAIELVVDKEKKTPLPASAMPARRIFDRAWDNGLIIRAFANGVLGYAPPLCCTDADIDAIIERTRRTLDQTLADPDVRQALA

SEQ ID NO: 48166 - protein, 1238 aa, Bordetella parapertussis 12822
MPAPHRLYPRSLICLAQALLVWALLAWAPAQASQELTLVGKAAVPDVEIALDGDDWRWLARKRVLTLGVYAPDIPPFDVTYDERYEGLTADYMAIIAHNLGVQAKVLRYPTREQAVGALESGQIDLIGTVNGIEGRLQSLRLSVPYAADHPVLVMPIGARRAPPADLAGQRLAVDANYLPRETLQQAYPQATLHYFPSSEQALAAVAYGQADVFIGDALTTSHLVSQSYFNDVRVVAPAQIVTGGESFGVRADNTRLLRVVNAVLEAIPASERRSLIYRWGLGSSISLDFARPAYSAREQQWMANHPVVKVAVLNLFAPFTLFRTDEQFGGISAAVLQLLQLRTGLDFQIIGVDTVEELIAKLRSGEADMAGALFVNAARESVLSFSRPYVRNGMVIVTRQDPAAPADADHLDGRTIAMVRNSAAIPLLQQRYPQAKVVTADNPTEAMLLVADGQADAVVQTQISASYYVNRYFAGKLRIASALDLPPAEIALATARGQTELISILNKALYSISNDELASIVSRWRGSDGDPRTWYAYRNEIYLLIGLGLLSALLFLSWIVYLRRQIRQRKRAERALNDQLEFMRVLIDGTPNPIYVRDKEGRMLLCNDAYLDTFGVTADAVLGKTIPEANVVGDPALAREMHEFLLTRMAAEREPRFEDRDVTLHGRTRHVYQWTVPYGDSLGELKGIIGGWIDITERAELLRELHDAKESADAANRAKTTFLATMSHEIRTPMNAIIGMLELALLRPADQEPDRQSIQVAYDSARSLLELIGDILDIAKIEAGKFDLAPVRTALRALPEGAIRLFDGLARQKGIELVLKTDIVGVDDVLIDPLRMKQVLSNLVGNAIKFTTEGQVVLTVTARPDGEAAHVQFSVSDTGCGISEADQRQLFKPFSQVGGSAEAGPAPGTGLGLSISRRLVELMGGTLVMRSAPGVGTTVSVDLRLTMIEKSAQATPPAAAAQATPSKPQVSLRVLVVDDHKPNLMLLRQQLDYLGQRVVAADSGEAALALWHEHAFDVVITDCNMPGINGYELARRIRAAEAAPGYGRTRCILFGFTASAQMDEAQRCRAAGMDDCLFKPIGVDALRQRLNEAAARAALPTPPSPQAAAPATHDATPAAFSAESILALTQNDEALIRQLLEEVIRTNRADVDQLQKLHQQADWPKVSDMAHRLAGGARVVDAKAMIDTALALEKKAQGQAGPSPEIDGLVRTLAAQSAALETQLRAWLEQRPHQGQP

SEQ ID NO: 48167 - protein, 449 aa, Bdellovibrio bacteriovorus HD100
MNQSRGGRNDPEAQRQVQRIFLEQSRDIHIRVDRGFSILLLIQWVAAIVMGILLTPTTWLGSFSGAVENAFVGLIFGGLFSLPAVYCVYVFPGEKWTRYVVAVSQMCFSILFIHLSGGRIETHFHVFVSLAALAFYKDVGLLGVASFIVITDHILRGCLLPISLYGVAESNQWRWLEHAAWILIEDIILIIGIERIRGELHEMAYSKYQLVQAREEALQLSSIKSTFLSNMSHEIRTPLNSIIGFSDILRDTRLDKDQTDYVQTIQRCSDSLLHIINDVLDISKIENGLLQIDRHKFDVKELHTDIFKIFEAKCQEKNLQLEVDIDESIPAFALGDSHRLRQILMNLVGNAVKFTDKGRVCISLQRQPGSGHYVWKVSDTGRGIRLENMSKLFRSFSQEDVSISRTYGGSGLGLMICKNLVEMMGGDIKVESKLGEGTTFHFTLPLEEA

SEQ ID NO: 48168 - protein, 276 aa, Yersinia pestis biovar Medievalis str. 91001
MNPYSLSIDELVRKARAIRRRIVLLNANSPAGGHTGADLSQVEILTALYFRILNCAPERLTDPERDIYVQSKGHAVGGYYCCLAEARYFPEEWLATYQRADSHLPGHPVKHKTPGIELNTGALGHGLPVAVGIALAAKRANSKRRVFVLTGDGELAEGSNWEAALVAAHYQLDNLVIINDKNKLQLAGTTKSIMNTDPLADKWRAFGLQVTECRGNDMQSVVETLETLPQNGKPNVVIANTEKGAGISFIQGRVEWHHRVPKGAEIDLALEELNDE

SEQ ID NO: 48169 - protein, 269 aa, Bacillus clausii KSM-K16
MNKRLRDAVKKGNLFIPFITAGDPVREATIALALSLQRSGADVLELGIPYSDPLADGPVIQNASKRALAGGMTLAKAMALVPEMRKEGLTIPVIVFTYANPLLQFGFERFCETACDYGIDGLLVPDLPFEESETLANECEKQGLALISLVAPTSQQRIKAIASRAQGFLYCVSSLGVTGARKTLHPQVEAFLKLVKEASPVPFVVGFGISSYEQVEEMGRHADGVVIGSAIVEQIGLRCEALKQAESRDEAVKEIEQYVNSLLHPAPTY

SEQ ID NO: 48170 - protein, 169 aa, Brassica napus
GSGQPTPPVPQTRASDPVVIVITVLFFVIFSMVFGSIFCRRSSVYSRPSVFGLTDADAAVGVVRIRRSAARGLEPEVIESFPTFIYSDVKAVRIGKGGVECAVCLCEFEDEETLRLMPPCCHVFHADCVDVWLSERSTCPLCRADLVQKQGDGGSDLSSDPGTVSSGSD

SEQ ID NO: 48171 - protein, 485 aa, Mesorhizobium loti MAFF303099
MKTLKDKNLFREAGLIGGEWVAAGSGKTVDVIDPATQAAIGTVPDMAGSDTRAAIDAAASAYGDWKKKTNAERADLLEAWHGLMLAHLDDLALILTTEQGKPLDEAKGEIRYGASFVKWFAEEARRINGHTIPSPTQDRRIIVLKEPVGVCGIITPWNFPNAMITRKVAPALAAGCTVVIKPSEFTPYSALALGVLAERAGIPAGVINIVTGMPAEIGNEIMANETVRKISFTGSTRVGSLLMRGAADSVKRLSLELGGNAPFIVFDDADLDLAVEGALVSKFRNGGQTCVCANRILVQAGVYEAFAAKLSARVNAMTVGPGTQPGVAIGPMINMAAVEKINRHVEDALAKGAAIITEKPALPEGPQYVAPLVLSGATKDMQLAGEETFGPVAPLFRFETEEEAIALANGTPYGLASYFYTENLKRAWRVGEALEFGMVGLNTGSVSMEVAPFGGIKQSGLGREGAQAGIEEYLEMKSFHIGGLG

SEQ ID NO: 48172 - protein, 387 aa, Vibrio vulnificus CMCP6
MKNVVIVDCLRTPMGRSKGGAFRHTRAEDLSAHLMKGILARNPQVNPSEIEDIYWGCVQQTLEQGFNVARNAALLAGLPIEIGAVTVNRLCGSSMQALHDGARAIMTGDAEICLIGGVEHMGHVPMNHGVDFHPGMSKHVAKAAGMMGLTAEMLGKLHGISREQQDEFAARSHARAHAATMEGRFKNEILPTEGHAADGTLFTLDHDEVIRPETTVEGLSQLRPVFDPANGTVTAGTSSALSDGASAMLIMSEEKANELGVTIRARIKGMAIAGCDPSIMGYGPVPATQKALKRAGLSIEDMDVIELNEAFAAQSLPCAKDLGLLDVMDEKVNLNGGAIALGHPLGCSGARISTTLINLMEAKDAKYGLATMCIGLGQGIATVFERP

SEQ ID NO: 48173 - protein, 261 aa, Capsicum annuum
MALEALNSPTGTPTPPPFQFESDGQQLRYIENWRKGKRSKRSRSMEHQPTEEEYLALCLIMLARSGGSVNHQRSLPPPAPVMKLHAPSSSSAAEEEKEKMVYKCSVCGKGFGSYQALGGHKASHRKLVPGGDDQSTTSTTTNATGTTTSVNGNGNRSGRTHECSICHKCFPTGQALGGHKRCHYDGGIGNGNANSGVSASVGVTSSEGVGSTVSHRDFDLNIPALPEFWLGFGSGEDEVESPHPAKKSRLCLPPKYELFQH

SEQ ID NO: 48174 - protein, 419 aa, Arabidopsis thaliana
MDSINKNYVDMDEYPVTTELQNRCVNIIARLFNAPLEESETAVGVGTVGSSEAIMLAGLAFKRKWQNKRKAEGKPYDKPNIVTGANVQVCWEKFARYFEVELKEVNLSEGYYVMDPDKAAEMVDENTICVAAILGSTLNGEFEDVKRLNDLLVKKNEETGWNTPIHVDAASGGFIAPFIYPELEWDFRLPLVKSINVSGHKYGLVYAGIGWVVWRAAEDLPEELIFHINYLGADQPTFTLNFSKGSSQIIAQYYQLIRLGFEGYKNVMENCIENMVVLKEGIEKTERFNIVSKDQGVPVVAFSLKDHSFHNEFEISEMLRRFGWIVPAYTMPADAQHITVLRVVIREDFSRTLAERLVADISKVLHELDTLPSKISKKMGIEGIAKNVKEKKMEKEILMEVIVGWRKFVKERKKMNGVC

SEQ ID NO: 48175 - protein, 449 aa, Porphyra yezoensis
MGKEKQHVSIVVIGHVDSGKSTTTGHLIYKCGGIEKRAIEKFEKEAAEMGKGSFKYAWVLDKLKAERERGITIDIALWKFETEKYSFTIIDAPGHRDFIKNMITGTSQADLAILVIASPPGEFEAGISQNGQTREHALLAYTLGVKQMIVACNKMDDKNVNWSQDRYEEVSKEMDLYLKKVGYNPAKVPKVPTSGWTGENLFERTDKTHALGKWYKGPCLLEALDNCDPPKRPVDKPLRLPLQDVYKIGGIGTVPVGRVETGLIKPGMVVTFAPSGLSTEVKSVEMHHEALPQAGPGDNVGFNVKNVSVKDLKRGYVCGDSKNDPPKGCASFNAQVIILNHPGEIHAGYAPVLDCHTAHIACKFSELILKMDRRSGKKLEDTPKMIKSGDAAMVKMVASKPMCVEAFTQYPPLGRFAVRDMRQTVAVGVIKSVEKKEVEGKMTKSAAKK

SEQ ID NO: 48176 - protein, 164 aa, Sesamum indicum
DEIDFEFLGNVSGEPYTVHTNVYAGGKGDKEQQFHLWFDPTAAFHTYSIVWHPQRIIFLVDNSPIRVFNNHKSIGIPFPTSQPMRVHCSLWNADDWATQGGRVKTDWTKAPFVAYYRNFKIDGCPVGTSGGSCGFQSQTQELDAKGRNRMRWVQQKHMIYNYCT

SEQ ID NO: 48177 - protein, 462 aa, Xanthomonas axonopodis pv. citri str. 306
MPLPTDSVAETAAPAAPALRHALKPRQLMMMGLGTAIGAGLFLGSGVGIHAAGPAVLISYLIAGALVIIVMNALGEMAAAKPASGAFSVYAADAMGPTAGATVGWLWWFQIVVVIAAEAVGAAGLLATVWPALPVPLLSLLFMATFTAINLLGVRNFGEFEFWFAILKVLAIVVFLLIGVALLAGWLPGVASPGLSNFTQNGGFAPKGLAGIGSALLVVVFAFGGTEIVAVAAAETADPGRSLARTIRTVAWRILVFYIGSISVIVAVVPWTSAALSSPFAAVLEVARIPGAATAITLVAVVALLSALNANLYGASRMIFSLAQRGEAPRLLARTSGEQVPLVAVIASVLFGFAAAALELLYPNKVLPMLLNIVGATCLLVWTISLVSQLILRARADRAGLALPFRMRGYPFLTVLALVILAVIFVLLASSADTRAQFLSMVALTAVIAAVSEIARRVRARM

SEQ ID NO: 48178 - protein, 446 aa, Pseudomonas aeruginosa PAO1
MNRQSAAAVIDAARFNRTHWLILGWGCFIMLFDGYDMVIYGSVVPRLMQEWQLSPVQAGTLGSCALFGMLFGGTLLAPLADRFGRRRLVIATTLLASLAAFLTGHARDPLELGAGRFFTGLALGALVPSAINLISEFAPAGRRSTLVTVMSAFYSVGAVLSALLAIAMIPAWGWQSVFYVAVLPVLAVPLMLRWLPESAAFLELKGRRAELDALLRKVDPDYRPGAERANAVAAEAPSGRVAQLFEGRQAVGTLLLWVAFAMCMLMSYGLNTWLPKLMAGGGYALGSSLAFLVTLNVGATLGALFGGWLADRLGAGRTLVLFFALAAASLAALGLGPGPWLLNGLLVVAGATTIGTLAVIHAYAAQFYPAWVRSTGVGWAAGVGRLGAIAGPMLGGSLLALELPFQQNFLAFAAPGVIGALAIACIHLRPRVPAEASVDATAKKPL

SEQ ID NO: 48179 - protein, 268 aa, Photorhabdus luminescens subsp. laumondii TTO1
MERYEQLFKQLESRKQGAFVPFVTLGDPTPELSLKIIDALITGGADALELSIPFSDPLADGPTIQNANLRAFSSNVTPTLCFELLTKIRAKYPDIPIGLLMYANLVFHHGIDEFYRRCKDTDIDSVLVADVPMSESRPFRTAAMKHGIAPIFICPPDAEDELLREIASYGRGYTYLLSRAGVTGIERRGEKPLNHLVNKLREYHAAPPLQGFGISEPKQVKETLASGAAGAISGSAIVKIIEENLSQPEIMLKELTEFVSKMKSATQL

SEQ ID NO: 48180 - protein, 353 aa, Zea mays
  misc_feature (22)..(22): Xaa can be any naturally occurring amino acid
  misc_feature (68)..(68): Xaa can be any naturally occurring amino acid
  misc_feature (92)..(92): Xaa can be any naturally occurring amino acid
  unsure (1)..(353): unsure at all Xaa locations
MADFSKVENKKPFAPLREVHVXITHSMPSHKIKIFKYDSARDNILTHLKSVEKCWQPHDFLPDPASEXFHVEVKEFRDRAKESYDVACTRTXARNSARATYQTMLNTLDGVRDETGASPTAWAVWTRAWTAEENRHGDLLNKYMYLTGRVDMRQIEKTIQYLIGSGMDPRTENNPYLGFIYTSFQERATFISHGNTARHAKDFGDLKLAQICGIIASDEKRHETAYTKIVEKLFEIDPDGTVVALADMMKKKIAMPAHLMFDGQDDKLFEHFSMVAQRLGVYTARDYADILEFLVDRWKVADLTGLSGEGNKAQDYLCTLASRIRKLDERAQSRAKKAGTLPFSWVYGREVQL

SEQ ID NO: 48181 - protein, 450 aa, Kineococcus radiotolerans SRS30216
MTSVLWFRRDLRLSDHPALLAAAADGDVLPLFVIDPALWGPSGDVRRTYLLRSLRSLDAALGGALVVERGDPAVVVDRVAARIGASRVHVTADAGPLGRRRDDAVGRALAAGGRELVRTGTPYAIGPGTLRTGSGSPFQVFTPFSRAWRAHGWPAPADSPGAVRWVGDGEGVDGGHWPDEPDLGGLTLPEAGEDAAHERWHRFLDHALADYDGDRDRPDRDGTSQLSHALKWGELHPRTLLAALRGQSSKGAETYATELCWRDFYADVLWHRPDSAREYYKPQLAGLRYAEPGEQFRAWAEGRTGFPIVDAGMRQMRAVGWVHNRVRMITASFLVKDLHVEWQHGGREFMHWLRDADLASNMHGWQWVAGSGTDASPFFRVFNPVTQGQRFDPDGDYVRRFVPELRHLPGKSVHTPWEAADGYAHGYPERIVDHAHEREVALAEYARVRG

SEQ ID NO: 48182 - protein, 186 aa, Brassica napus
MAFSFSFTALALLISSLAAAFLLLFRRTRYRRMGLPPGSVGFPLIGETLQLIKAYKTEDPEPFIDERVARYGSVFTTHLFGEPTVFSADAETNRFVLQNEGKLFECSYPDSISNLMGKHSLIRMEGSLHKRMHSFTMSFANASAMKDHLMVDIDRLVRFNLGSWSSRVLLMEESKKMTFDVAVKQL

SEQ ID NO: 48183 - protein, 186 aa, Brassica rapa subsp. pekinensis
YIGLKQRRATGQEYAEFLHEFMCAVKQNYGEKVLVQFEDFANHNAFDLLSRYMDSHLVFNDDIQGTASVVLAGLIAAQKVLGKSLADHTFLFLGAGEAGTGIAELIALKISKETGAPIEETRKKIWLVDSKGLIVSSRKESLQHFKQPWAHEYEPVKDLIGAVNAIKPTVLIGTSGVGQTFTKEVV

SEQ ID NO: 48184 - protein, 94 aa, Brassica napus
MSLFLKDDSIQIREVWNDNLLEEMDLIRQVVDDFPYVAMDTEFPGIVVRPVGTFKSNADYHYETLKLNVNILSIIQLGLTFSNEQGNLPTCGTD

SEQ ID NO: 48185 - protein, 115 aa, Brassica rapa subsp. pekinensis
GHVHTYERSERISNIAYTVVNGICSPVKDQSAPVYITIGDGGNIEGLATKMTEPQPKYSAYREASFGHAIFSIKNRTHAHYAWHRNQDGYAVEADTMWFYNRFWHPVNDSPSSDS

SEQ ID NO: 48186 - protein, 466 aa, Frankia sp. CcI3
MALHRQASGDRAEETVDVRPHLAPLGEEVVVPRFRMPQESTAPETAYQIVHDELMLDGKARLNMATFVTTWMDSYADRLMAECAPKNMIDKDEYPQTAALEERCVNILADLWHAPDAEHAVGCSTTGSSEACMLAGLAMIRRWRARRRSAGAPADRPNIVMGVNVQVCWEKFARYWDVEARLVPMAPGRTHLTADEAVAHCDENTIGVVAILGSTFDGSYEPVAGIVAALDHLAASGGPDVPVHVDAASGGFIAPFCDPDLVWDFQLDRVVSINTSGHKYGLVYPGVGWVLWRDRAHLPAELVFQVDYLGGTMPTFALNFSRPGAQVVAQYYTLLQLGYKGYRRVAQACRDNARWLAAEVAAMGPFELVSDGSGIPAFAFKLRDDITDYTVFDVSELLRTRGWLVPAYRFPPGLTDLAVLRVVVRHEFSRDLAGLLIADLRRVVNRLAHPGRRTAGDRPGESSFHH

SEQ ID NO: 48187 - protein, 592 aa, Burkholderia sp. 383
MAAIKSNLPRRKFDVVIVGAGGSGLRAALQLSRAGLSVGVLSKVFPTRSHTVAAQGGIGASLGNMSEDNWHFHFYDTIKGSDWLGDQDAIEFMCREAPNVVYELEHFGMPFDRNADGTIYQRPFGGHTANYGEKPVQRACAAADRTGHALLHTLYQQNVEAKTQFFVEWMALDLIRDAEGDVLGVTALEMETGDVYIMEGKTTLFATGGAGRIFAASTNAFINTGDGLGMAARSGIALQDMEFWQFHPTGVAGAGVLITEGVRGEGGILRNANGERFMERYAPTLKDLAPRDFVSRSMDQEIKEGRGVGPNKDHVLLDLSHIGAETIMKRLPSIREIALKFANVDAIKEPIPVVPTIHYQMGGIPTNIHGQVVGTTRGGHKDPVNGFYAVGECSCVSVHGANRLGTNSLLDLVVFGRAAGNHIVEHVKNQKEHKPLPADAGEFSLARLAKLDKSTSGEYTQDVANDIRATMQKHAGVFRTSKLLKEGVDEMAGLAARVQNIHLKDKSKVFNTARVEALELENLIEVARATMVSAEARKESRGAHAHSDYEHRDDENWLRHTLWYSEGDRLDYKPVQMKPLTVESVPPKPRTF

SEQ ID NO: 48188 - protein, 660 aa, Arabidopsis thaliana
MKSFAAKVEEGVKGIDGKPSVGPVYRNLLSEKGFPPIDSEITTAWDIFSKSVEKFPDNNMLGWRRIVDEKVGPYMWKTYKEVYEEVLQIGSALRAAGAEPGSRVGIYGVNCPQWIIAMEACAAHTLICVPLYDTLGSGAVDYIVEHAEIDFVFVQDTKIKGLLEPDCKCAKRLKAIVSFTNVSDELSHKASEIGVKTYSWIDFLHMGREKPEDTNPPKAFNICTIMYTSGTSGDPKGVVLTHQAVATFVVGMDLYMDQFEDKMTHDDVYLSFLPLAHILDRMNEEYFFRKGASVGYYHGNLNVLRDDIQELKPTYLAGVPRVFERIHEGIQKALQELNPRRRFIFNALYKHKLAWLNRGYSHSKASPMADFIAFRKIRDKLGGRIRLLVSGGAPLSPEIEEFLRVTCCCFVVQGYGLTETLGGTALGFPDEMCMLGTVGIPAVYNEIRLEEVSEMGYDPLGENPAGEICIRGQCMFSGYYKNPELTEEVMKDGWFHTGDIGEILPNGVLKIIDRKKNLIKLSQGEYVALEHLENIFGQNSVVQDIWVYGDSFKSMLVAVVVPNPETVNRWAKDLGFTKPFEELCSFPELKEHIISELKSTAEKNKLRKFEYIKAVTVETKPFDVERDLVTATLKNRRNNLLKYYQVQIDEMYRKLASKKI

SEQ ID NO: 48189 - protein, 417 aa, Erwinia carotovora subsp. atroseptica SCRI1043
MLEQMGKAAKAASYQLAVLNTAQKDRALLTIADLLEVESATILAANVLDLADARQNGMSEALLDRLLLTQERLSAIASDVRQVCRLTDPVGQVIDGSMLDNGLKLERRRVPLGVVGVIYEARPNVTIDVASLCLKTGNAVILRGGKETYRTNAATVKVIQQALSQCDLPAAAVQAIESPDRELVNQLLKLDRYIDMLIPRGGAGLHKLCREQSTIPVITGGIGVCHIYADDSIDFDKALTVIESAKVQRPSACNSLETLLVNRSIADRFLPELSKKMAASGVTLHASSLAMPYLTSGPANVVAVEDANYNDEWLSNDLNVTLVDDLDAAVAHIREHGTQHSDAILTRSLSNAERFVREVDSSAVYVNASTRFTDGGQFGLGAEVAVSTQKLHARGPMGLEALTTYKWIGYGDDLIRA

SEQ ID NO: 48190 - protein, 367 aa, Erwinia carotovora subsp. atroseptica SCRI1043
MSGSQTLVVKLGTSVLTGGSRRLNRAHIVELVRQCAQQHAAGHRIVIVTSGAIAAGREHLGYPELPATIATKQLLAAVGQSRLIQLWEQLFSIYGIHVGQMLLTRADMEDRERFLNARDTMRALLDNNIVPVINENDAVATAEIKVGDNDNLSALAAILADADKLLLLTDQAGLFTADPRNNPDAELIREVTGINDALRSIAGDSVSGLGTGGMSTKLQAADVACRAGIDVVIAAGSKPGVIGDVIADISVGTRFHALDTPLESRKHWIFGAPPAGEITVDDGALSAILERGSSLLPKGIRTVEGNFSRGEVIRVRSLAGRDVAHAVTRYNSDALRLIAGHHSQQIAEILGYEYGPVAIHRDDMIIN

SEQ ID NO: 48191 - protein, 628 aa, Synechococcus elongatus PCC 6301
MSGLTFWAVNSIQEDARLNDTRFGRDLGLLLAANATPLIADEDIAGLTRFSYRFYRSTSSVRYLLYADTEGEIYLGIPFSQSEVRNSLTIQRRIQLPPDYLRQGDRPYVRQHLTPAGLVTDVFVPLFQNDRYLGVLAIGTNPSPAVVASSGLTRDVTIAVFITIWVMVIVGAVFNALIITRPIRELVEGVRSIASGNFKQRIDLPPSGELGELIASFNDMAEQLEGYAAQNIDELTSEKAKLETLVSTIADGALLLDADLNLVLVNPAAIRIFGWEGRSLKGDDVIDHLPSPLAQELHDPLKAIANGDREAVELRLTLPERSNRTVRILVSNVLDTARANVKGIAVTVQDITREVELNEAKSQFISNVSHELRTPLFNIKSFIETLHDYGDDLSEEERREFLSTANHETDRLTRLVNDVLDPSWLESNRRYNFEGIDLVQPIEQTLRTYQLNAREKGIELRSEIARDLPAVRANYDLLLQVFANLVGNALKFTASGGCVAMRAYLVGQPLRTEAVNHSEIVSSLPNIRIEINDTGIGIDAEDQEAIFDRFFRVENRVHTLEGTGLGLSIVRNIVEKHQSRIHLISEVGIGTTFWFDLPIYQPEEAIAAPAKPEAITATNGTEVSVSTG

SEQ ID NO: 48192 - protein, 137 aa, Brassica napus
  misc_feature (101)..(101): Xaa can be any naturally occurring amino acid
  misc_feature (128)..(128): Xaa can be any naturally occurring amino acid
  unsure (1)..(137): unsure at all Xaa locations
MVQTKKFRGVRQRHWGSWVAEIRHPLLKRRIWLGTFETAEEAARAYDEAAVLMSGRNAKTNFPLNNNNTGDTSEGKTDISASSSSSSLSSILSAKLRKCCXSPSPSLTCLRLDTASSHIGVWQKRAGXKSDSSWVMT

SEQ ID NO: 48193 - protein, 405 aa, Nostoc punctiforme PCC 73102
MVSTFPNSSSVDLSRIRLAIRSLQPQLVEWRRRLHQQPELGFQEKLTAEFVSQKLQEWGVEHQTGIAHTGIVATIKGNKLGAEKVLAIRADMDALPIQELNEVPYKSQHDGVMHACGHDGHTAIALGTAYYLQQHRQDFSGTVKIIFQPAEESPGGAKPMIEAGVLKNPDVDAIIGLHLWNNLALGTVGVRPGALMAAVECFNCTILGKGGHGALPHQTVDSVVVAAQIVNALQTIVARNLNPIDSAVVTVGELHAGTKRNVIADTAKMSATVRYFNPSLKGFFNQRVEQIIAGICQSHGASYDLEYWSLYPPVINDIKMAELVRTVAEEVVETPLGIVPECQTMAAEDMSFFLQEVPGCYFFLGSANPEQDLAYPHHHPRFDFDETALGMGVEIFVRCVERFFS

SEQ ID NO: 48194 - protein, 362 aa, Saccharum hybrid cultivar
MGSTAEDVAAVADEEACMYAMQLASASILPMTLKNALELGLLEVLQAEAPAGKALAPEEVVARLPVAPTNPDAADMVDRMLRLLASYDVVKCQMEDKDGKYERRYSAAPVGKWLTPNEDGVSMAALTLMNQDKVLMESWYYLKDAVLDGGIPFNKAYGMTAFEYHGTDPRFNRVFNEGMKNHSVIITKKLLEFYTGFEGVSTLVDVGGGIGATLHAITSHHPQIKGINFDLPHVISEAPPFPGVQHVGGDMFKSVPAGDAILMKWILHDWSDAHCATLLKNCYDALPENGKVIVVECVLPVNTEAVPKAQGVFHVDMIMLAHNPGGRERYEREFHDLAKGAGFSGFKATYIYANAWAIEFIK

SEQ ID NO: 48195 - protein, 601 aa, Mycobacterium avium subsp. paratuberculosis K-10
MCGVTGEVRLDGRAPDVAAVSAMAAVLTPRGPDAGGAWSQGRVALGHRRLKIIDLTEAGAQPMVDSELGLSIAWNGCIYNYKELRSELSGYGYRFFSHSDTEVLIKAYHRWGDDFVSHLFGMFAFAIVERDSGRVLLGRDRLGIKPLYLTEDSHRVRFASTLPALLAGGGVDTRIDPVALHHYMSFHSVVPAPATILRGVRKVPPASLVAIEPDGKRTVTTYWAPDFTRHADRADWSERDWEDAVLSTLRLAVKRRLVADVPVGCLLSGGVDSSLIVGLLAEAGQHGLSTFSIGFESAGGVKGDEFQYSDIVAQRFETNHHQIRIDSDRMLPALDGAIGAMSEPMVSHDCVAFYLLSQEVARHVKVVQSGQGADEVFAGYHWYPPMGEPAAATLDGAVAQYRRAFFDRDTAGVAQLVGPGILAPGDPSLRFVTEHFAQAGAETGIDRALRLDTTVMLIDDPVKRVDNMTMAWGLEGRVPFLDHELVELAATCPPEYKIAHEGKGVLKQAARRVIPSEVIDRPKGYFPVPALTHLEGPYLDMDRDALYAPTAKERGLFNTDAVDALLANPNGKLTPLRGNELWQIALLELWLQRHGVTGPVA

SEQ ID NO: 48196 - protein, 250 aa, x Aranda deborah
MGRGRVELKMIENKINRQVTFAKRRKRLLKKAYELSVLCDAEVALIIFSNRGKLYEFCSSTSMLKTLEKYQKCNFGSPESTIISRETQSSQQEYLKLKNRVEALQRSQRNLLGEDLGPLGSKELEQLERQLDSSLRQIRSTRTQFMLDQLADLQRREQMLCEANKTLKRRFEESSQANQQQVWDPSNTHAVGYGRQPAQHHGEAFYHPLECEPTLQIGYHSDITMATATASTVNNYMPPGWLGQISGSYE

SEQ ID NO: 48197 - protein, 351 aa, Pseudomonas aeruginosa PAO1
MFPKNAWYVACTPDELAGKPLGRRICDEPMVFYRGEDGRVAALEDFCPHRGAPLSLGFVEDGVLVCGYHGLAMGEDGRTRAMPGQRVRGFPCIRRFPVQERHGFVWVWPGAEEQADDALIPRLEWAESPDWAYGGGLYHIHCDYRLMIDNLMDLTHETYVHASSIGQKEIDEAAPTTRVEGDEVITSRHMQNVMAPPFWRMALRGNGLADDVAVDRWQICRFTPPSHVLIEVGVAHAGHGGYQAPAERKAASIVVDFITPESATSIWYFWGMARNFQAHDQALTESIREGQGKIFGEDLEMLESQQRNLLRHPRRDLLKLNIDAGGVQARRIIERLLADERQAAAPNRAQA

SEQ ID NO: 48198 - protein, 296 aa, Triticum aestivum
  misc_feature (149)..(149): Xaa can be any naturally occurring amino acid
  misc_feature (154)..(154): Xaa can be any naturally occurring amino acid
  unsure (1)..(296): unsure at all Xaa locations
MMAEAWADVLPPPAPYFAGQPCWAVQPERRGGGAWTLEENKVFEEALAAIDLDAPDRWEMVALMLPRKTVADVVNHYRALENDVGFIEAGLVPFPHYDSSSPSSGFTLDWDGGAAGAGGFRRGYCLKRGRPPTRRREEGRFPWTEEEHXGLFLXGLEKLRGEGNWRNISRNYVTSRTPTQVASHAQKYFIRLTSGGKDNKRRSSIHDITTVNVPDDDDRGSPSGSPPSALTTVDTKPSPPYGGQRHAFVPSTLQPGTLGGGHPYGSVKLEDQGSFMDGMVVDLDDSLLLQMQCGQL

SEQ ID NO: 48199 - protein, 248 aa, Mesorhizobium loti MAFF303099
MSTPVVLITGALTGIGRETAIAFAKEGSRLVIAGRHEEAGRKLATELQSFGAEVEFIRADVRHDDEVRDLIDRAVARFGRLDVAVNNAGTEGKPGPVTEQTAETYAATFDTNVLGTLLSLKHELRIMLTQGGGSIVNISSTYGHEGAKGASIYAASKHAVEGLTKSAALEAAASGVRVNAVAPGPTNTGMLDRFTGTSEVKASLALTVPMGRVGQPSELARAIVFLASKEASFITGHVLTVDGGKTAG

SEQ ID NO: 48200 - protein, 476 aa, Bacillus cereus ATCC 10987
MQNKIIVMFQKDFRLYDNPALFKATQSGEVVPVYVHDETFSMGSASKWWLHHAIIDVKKQLEALGSTLIIRKGSTEEEILSLIEQLGITAVYWNICYDPDRLQFNQNMKMMLEDKGITCKEFNSHLLLEPWMIKKKDNTEYKVFTPFYNAFQKQVISKPISKVQSIKWGSSLPESLSVTELHLLPTIPWTSHIESIWDPTEEGAYKTCKKFFSSKLASYSEGRDFPNQNAHSMLAPYLSFGQISVRWMYHYLINKSTERQCSLFEKQVNSFIRQLIWREFSYYLLYHYPFTVYKPLNKNFEHFPWNNEEELLTVWQKGETGYPFIDAGMRELWQTGFMHNRARMAVASFLVKHLLIPWQEGAKWFMDTLLDADIANNTMGWQWVAGSGADASPYFRIFNPITQGEKFDKDGEYIRKWVPELKDMPNKYIHKPWEAPEHILQKANIKLGDTYPLPVVDHKAARERALCAYKSMKEFV

SEQ ID NO: 48201 - protein, 352 aa, Yarrowia lipolytica CLIB122
MSTVLVTGATGFIAGHVVGDLLASGHKVIGTIRHLDKAVKLMEAFPEANSSNQLLFETLTDIRHEDELKRIFEKHKDISVVIHTASPFFFNSKNVVKDLLEPAVEGTRAVLQATQVAGTNVNKVVVTSSIAAMLDPFKKNDPNYVATEFTWNPVTWTQAADSDDGELAYVASKTFAEREAWDYVERNKPRYTLTTVNPAAVFGPHATKIDPKQLNTSNDVINNLALDTKPGDPPSEFAFVWVDVRDVARAHTLAIDHKLDNRRLLLCNGKFAAQDILDIINRDFPDIRGKIATGNPGTGKEVTSNIFNYNNDVTRQELPTLKWIGLEQSIVDFTKQYEEILHEKKKKHWWNI

SEQ ID NO: 48202 - protein, 211 aa, Brassica napus
  misc_feature (188)..(188): Xaa can be any naturally occurring amino acid
  unsure (1)..(211): unsure at all Xaa locations
MSSILSNVLPAPEDPVLSVIFACRDDPCPVKLNLSAGAYRTEEGKPLVLEVVRKAEQQLANDLSCDKGYLPIDGLADFNKLSAKLILGDDSHAVEENRVVTIQCLSGTGSLRVGAEFLAKHHQQRVVFVPNPTWGNHPNIFSLAGFSVEYYRYYDPKTRGLDFKGMLEDLGAAPSGAIVVLQACAHNXTGVDPTLQQWEQIRQVVRSKSLL

SEQ ID NO: 48203 - protein, 674 aa, Halobacterium sp. NRC-1
MTSVQNTESETAAGATTIGVLFAGSDPETGPAACDLDEDGRFDVTQIRDFVAARDRVDDPDIDCVVAVHEPDGFDGVAFLEAVRQTHAEFPVVVVPTAVDEDVARRAVDADATGLVPAVSEDATAAIADRIEQSAPAHSEDTETRMPISDLTVESERRLKEQALDEAPIGITISDATDPEEPIIYINDSFEDITGYSPDEVVGANHRFLQGPKTNEDRVAEFWTAITEDHDTQVVLRNYRRDGSLFWNQVDISPIYDEDGTVSHYVGFQMDVSERMAAQQELQGERQSLDRLLDRVNGLMNDVTSALVRAADREEIETRITDRIGTGGEYAGAWFGRYDATEDTITVAEAAGDCEGCDGDVFDLASAGEAVALLQDVVEQREALVSTDADGVSGTADGDACVLVPVTYRSTTYGVLAVSTAEHRIDDREQVLLRSLGRTTGASINDALTRRTIATDTVLNIGVELSDTALFLVELAGATDTTFEQEATIADSQTQGVLMLVTTPHDDPQAVVDTALGYDAVQDAEVIVSTDDESVVQFDLSSSPLVDVLSECGSRVIRMHADRTTLELDVRVGTEGAARRVLSTLRDKYADVELVAYHEDDPEQTPHGFREELRNDLTDRQLTALQKAYVSGYFEWPRRAEGKQLAESMDIVPSTYHQHLQAAKQKLVGAFFEE

SEQ ID NO: 48204 - protein, 302 aa, Glycine max
MSNISMVEAKLPPGFRFHPRDEELVCDYLMKKVQHNDSLLLIDVDLNKCEPWDIPETACVGGKEWYFYTQRDRKYATGLRTNRATASGYWKATGKDRPILRKGTHVGMRKTLVFYQGRAPKGRKTEWVMHEFRIEGPHGPPKISSSKEDWVLCRVFYKNSEVLAKPSMGSCYEDTGSSTLPALMDSYISFDQTQTHADEFEQVPCFSIFSQNQTNPIFNHMTTMEPKFPLNHATTTYGGAPNLGYCLDPLSCDRKMLKAVLNQITKMERNPLNQSLKGSPSLGEGSSESYLSEVGMPHVWNY

SEQ ID NO: 48205 - protein, 450 aa, Escherichia coli K12
MNAFRQEIIMNKYQAVIIGFGKAGKTLAVTLAKAGWRVALIEQSNAMYGGTCINIGCIPTKTLVHDAQQHTDFVRAIQRKNEVVNFLRNKNFHNLADMPNIDVIDGQAEFINNHSLRVHRPEGNLEIHGEKIFINTGAQTVVPPIPGITTTPGVYDSTGLLNLKELPGHLGILGGGYIGVEFASMFANFGSKVTILEAASLFLPREDRDIADNIATILRDQGVDIILNAHVERISHHENQVQVHSEHAQLAVDALLIASGRQPATASLHPENAGIAVNERGAIVVDKRLHTTADNIWAMGDVTGGLQFTYISLDDYRIVRDELLGEGKRSTDDRKNVPYSVFMTPPLSRVGMTEEQARESGADIQVVTLPVAAIPRARVMNDTRGVLKAIVDNKTQRMLGASLLCVDSHEMINIVKMVMDAGLPYSILRDQIFTHPSMSESLNDLFSLVK

SEQ ID NO: 48206 - protein, 387 aa, Shewanella sp. ANA-3
MKQAVIVDCIRTPMGRSKAGVFRNVRAETLSAELMKGLLLRNPQLDPNTIEDVIWGCVQQTLEQGFNIARNASLLAGIPKTAGAVTVNRLCGSSMEAIHQAARAIMTGMGDTFIIGGVEHMGHVPMNHGVDFHPGLANNVAKASGMMGLTAEMLGKLHGITREQQDAFAVRSHQRAHAATVEGRFAKEIYGIEGHDANGALIKVLHDEVIRPETSMESLAALRPVFDPANGTVTAGTSSALSDGASAMLVMEESKARALGLPIRARIRSMAVAGCDAAIMGYGPVPATQKALARAGITVNDLDVIELNEAFAAQSLPCVKDLGLLDVVEDKINLNGGAIALGHPLGCSGARISTTLINLMEHKDATLGLATMCIGLGQGIATVFERV

SEQ ID NO: 48207 - protein, 309 aa, Thermoplasma volcanium GSS1
MKVSAVLPNFLPVGEIRKLAASVLPDINIITDLDFKSDESDILIVTAFTKVDKALLDKFPRLKFIQVASTGYDNVDVTEVKSRNILMCNSPSSNKESVAEHVIGMALYFLKDFGHLDREIRNGNWPILTFSRDLMGKVFGIIGMGAIGRKLAERLIQFGVGIIYYDVKRLPEEVEDELGITYVTLDELISSADIISIHVPLTETTKGMIGRKEFEKMKDGCIFINTSRAEVVVTKDLVWALKQGKIKAGIDVYDREPPDFSSELFQMDNALFSPHIAGVTVESQRRFIEETVANVIRYMQGVDPLNRVL

SEQ ID NO: 48208 - protein, 546 aa, Kineococcus radiotolerans SRS30216
MSEPNRPDVPWWRDAVIYQVYPRSFADGDGDGMGDLPGVTARLGHLADLGVDAVWLSPVYPSPQRDAGYDVADYRGIEPVFGTLDDFDRLTARARELGLRVVVDLVPNHTSAEHAWFRAALAAGAGSPERARYVFREGRGEHGERPPNSWRSVFGGPAWTRVADGSWYLHLFDSSQPDLDWSHPEVVAEFEDVLRFWLDRGVDGFRVDVAHGLVKAEGLPEWDHDQAMLDGANASGERPPMWDQEGVHEIYRGWRRVLDAYPGDRLLVAEAWVSPPERLVRYLRPDEMHQAFNFDHLRAPWRARELREVVDATLAAHAVEDAPATWVLSNHDVVRHASRLGYPAGSEPTTGVGPDDAQPDAELGLRRARAATTFTLALPGGAYLYQGEELGLPEVTTLPAEVRQDPTFARTGGADVGRDGCRVPIPWEGTSASYGFGPGPASWLPQPARWAELSVAAQTGVAGSTLELYRTLVRLRRELRLGRRELRWHELSGPDVLAFTSGDVLVVANLGAEPVAVPDGASPLVASGDLVEGRVPTDTAAWFRLG

SEQ ID NO: 48209 - protein, 323 aa, Arabidopsis thaliana
MAKSQIWFGFALLALLLVSAVADDVVVLTDDSFEKEVGKDKGALVEFYAPWCGHCKKLAPEYEKLGASFKKAKSVLIAKVDCDEQKSVCTKYGVSGYPTIQWFPKGSLEPQKYEGPRNAEALAEYVNKEGGTNVKLAAVPQNVVVLTPDNFDEIVLDQNKDVLVEFYAPWCGHCKSLAPTYEKVATVFKQEEGVVIANLDADAHKALGEKYGVSGFPTLKFFPKDNKAGHDYDGGRDLDDFVSFINEKSGTSRDSKGQLTSKAGIVESLDALVKELVAASEDEKKAVLSRIEEEASTLKGSTTRYVTLLETRKELHRKRFRLC

SEQ ID NO: 48210 - protein, 1264 aa, Magnetococcus sp. MC-1
MLDKSLLDLLWVTLCIGLVLLMQAGFLCLESGLTRSKNSINVAMKNLVDFSVSVTAFLALGYPLMFGTSMEGWLGWGTPFSIGSEEPLQMVFFLFQAMFCSTSVTIVSGAVAERLGFRAYLFLAAGMALLIYPIVGHWAWNGLDRGLSLGWLGQAGFVDWAGSTVVHAVGGWFSLALLLVIGPRTGRFNPDGSVNPITASNLPLTTLGALILWFGWIGFNGGSTLSLDARIGPVVLATCLGAVGGSMGALLWSWWREGRPSVLSAINGTLAGLVAVTAGAHALSPLAALGAGLLAAPVALLMENWMLRHGIDDAVGAVPVHLGAGVWGTLAVALLGDLHKLGTGLSRLEQLWAQLQGVLAAALVAFVIPWLVLRVINRRFPMRVTPEQEWQGLNISEHGTQTELSSFLGVLRAQAEGGDLSLRAEVDPFSEVGLIADRYNHVMDAMEAAVAKTRAVFQTAGDAILIIDPHSGQITAHNPMAEAVFGRSSAAFAHLTLSDLVVGVTPQRFWLGLHEEGEGRLPDGHTFPLELAITRASHGDGEMLIGTFRDIRARKQAELAIKASEARFRTLFASAALGMALIDAKQRVVDANPALMQMLELSHHRDALPPLAQLAHPQDQQEVAARLDAVIEGRSPQENCEVRCLCEARHLTIWTRMVISPIVLESNLTPMVVVIVEDVTQRRRSEEALRLAATVYESTNESVVIFNGEGRVEQVNQAFCRLSGYTAREVRGLELRHLLSARYEKSQFDEMAQALALTGHWSGEVMGQRKQGALASERLSLSLVRRPDGSTQNTIAVFTDLTEQKAQEELIWRQANFDPLTSLPNRRLFQDRLHQALAQADRSAGRVALFFLDLDRFKPINDTMGHQAGDELLQKCAERINAAVRSSDTVARLGGDEFTVILPNIQNGQDLSRIAEGIIKTLTEPFYLKAGEANISTSVGVAVYPDDSQDDEGLMRAADAALYQAKDHGRNNVQFFTESLNQQILERIALEKGLRRGLGAGELFLVYQPQVEVSSGRLSGAEALVRWRLPTGEVVMPDRFIPMAEESGLIVQVGEVVVSLAVQQIRAWLDAGFEPPRISINASPKQFHLDGGGLTSILMSTCDAYQISPSRLAVEIVESGLMANPERSGEILAGLAKLGVEVELDDFGTGYSSLARLSRLQIQALKLDRRFLVGIPEDPQNRILVTAMVQMARGMGIEVIAEGVEDLRQMGFLQDLGCHRAQGFGIARPMEPEAFVVFCQTPKLEHPPYGNCIVGWAAPEPVRT

SEQ ID NO: 48211 - protein, 352 aa, Coxiella burnetii RSA 493
MKTKTTKKTIKKAAKKIKKPSKRKIKKTAKKSRPKKPIKASDHGLIFAKTKKETTEKEDAELANAKAKTKKRRETRSSDPTQIYLRELGFQPLLNAKEELKIARRVHKGDPKARKQMIEANLRLVVKIARHYVNRGLPFLDLIEEGNLGLLTAVEKFDPERGFRFSTYATWWIRQTIERAIMNQSRTVRLPIHVIKELNVYLRTAKKLTQEVDHEATPEDVAHLIDKPVQEIRRIMDLAPSATSIDVPISEDGQKSLVDTLADDNNIDPARLIQNVDLQDHIERWLAQLDERHREVVILRFGLHENEKGTLEAVGKAVGLTRERVRQIQIDALQQLRHILEMEGVTGEEVED

SEQ ID NO: 48212 - protein, 260 aa, Ralstonia eutropha JMP134
MTGLQNAGRLVPDLSGRQALVTGGSSGIGEAIATAMGQAGARVILAARRQSQLDAAASRLDAMGIAVDTHVFDVSDLDAIPAAADALQQQHGTIDILVNAAGMNLRETYASVTPSSWRLQLDTHLGAPFFLTQALAPAMQTQGWGRILNIASLQSYRAFANSAPYGAAKGGIVQLTRAIAEEWSRHGITCNAIGPGFFPTALTGPVFADAGLTEYHASRTCIGRNGELADLHGLVAFLASDMAAYITGQTFMVDGGYTAR

SEQ ID NO: 48213 - protein, 649 aa, Synechococcus elongatus PCC 6301
MTGTALAQPRAITPHEQQLLAKLKSYRDIQSLSQIWGRAASQFGSMPALVAPHAKPAITLSYQELAIQIQAFAAGLLALGVPTSTADDFPPRLAQFADNSPRWLIADQGTLLAGAANAVRGAQAEVSELLYVLEDSGSIGLIVEDAALLKKLQPGLASLSLQFVIVLSDEVVEIDSLRVVGFSDVLEMGRSLPAPEPILQLDRLATLIYTSGTTGRPKGVMLSHGNLLHQVTTLGVVVQPQPGDTVLSILPTWHSYERACEYFLLSQGCTQVYTTLRNVKQDIRQYRPQFMVSVPRLWESIYEGVQKQFREQPAKKRRLIDTFFGLSQRYVLARRRWQGLDLLALNQSPAQRLAEGVRMLALAPLHKLGDRLVYGKVREATGGRIRQVISGGGSLALHLDTFFEIVGVDLLVGYGLTETSPVLTGRRPWHNLRGSAGQPIPGTAIRIVDPETKENRPSGDRGLVLAKGPQIMQGYFNKPEATAKAIDAEGWFDTGDLGYIVGEGNLVLTGRAKDTIVLTNGENIEPQPIEDACLRSSYISQIMLVGQDRKSLGALIVPNQEAIALWASEQGISQTDLQGVVQKLIREELNREVRDRPGYRIDDRIGPFRLIEEPFSMENGQLTQTLKIRSNVVAEHYAAMIDGMFESAS

SEQ ID NO: 48214 - protein, 658 aa, Streptococcus pneumoniae R6
MSNLSVNAIRFLGIDAINKANSGHPGVVMGAAPMAYSLFTKQLHINPAQPNWINRDRFILSAGHGSMLLYALLHLSGFEDVSMDEIKSFRQWGSKTPGHPEFGHTAGIDATTGPLGQGISTATGFAQAERFLAAKYNREGYNIFDHYTYVICGDGDLMEGVSSEAASYAGLQKLDKLVVLYDSNDINLDGETKDSFTESVRDRYNAYGWHTALVENGTDLEAIHAAIETAKASGKPSLIEVKTVIGYGSPNKQGTNAVHGAPLGADETASTRQALGWDYEPFEIPEQVYADFKEHVADRGASAYQAWTKLVADYKEAHPELAAEVEAIIDGRDPVEVTPADFPALENGFSQATRNSSQDALNVVAAKLPTFLGGSADLAHSNMTYIKTDGLQDDANRLNRNIQFGVREFAMGTILNGMALHGGLRVYGGTFFVFSDYVKAAVRLSALQGLPVTYVFTHDSIAVGEDGPTHEPVEHLAGLRAMPNLNVFRPADARETQAAWYLAVTSEKTPTALVLTRQNLTVEDGTDFDKVAKGAYVVYENAADFDTILIATGSEVNLAVSAAKELASQGEKIRVVSMPSTDVFDKQDAAYKEEILPNAVRRRVAVEMGASQNWYKYVGLDGAVLGIDTFGASAPAPKVLAEYGFTVENLVKIVRNLK

SEQ ID NO: 48215 - protein, 186 aa, Triticum aestivum
  misc_feature (17)..(17): Xaa can be any naturally occurring amino acid
  misc_feature (58)..(58): Xaa can be any naturally occurring amino acid
  misc_feature (72)..(72): Xaa can be any naturally occurring amino acid
  misc_feature (89)..(89): Xaa can be any naturally occurring amino acid
  misc_feature (117)..(117): Xaa can be any naturally occurring amino acid
  misc_feature (127)..(127): Xaa can be any naturally occurring amino acid
  unsure (1)..(186): unsure at all Xaa locations
MDYMNGPCRNHLFVPGXPVNIPDQVIRAMSRKNEDYRSPAFPALTKTLLEDVKKIFKXTTTGTPFLFPTTGXTGAWDSALTNSSLPGGXIVSFSLGQFIQLWIDQQERLGFPEYVVXSNWGYGANLXAALDSNLRTDSQHIHQGHSASFQFLERSTGCHPTNLSTPVRHSFLSFALQRTQCAWLAE

SEQ ID NO: 48216 - protein, 755 aa, Gluconobacter oxydans
MFRPGARPLDFGNDARRNVAGCHQAQERVSQYGLPISHCVRRDFASCRGSRCGGYRCVSSRQSQAGDPIPMSTLPQLAINTIRTLSMEGVERANSGHPGTAMALAPAMYAVWQHDLKYDPADPCWPARDRFVLSVGHASMLLYSTLFLTGVKDIRDGKVVDAPSLTVEDLSQFRQLNSKTPGHPEYRFTAGVETTTGPLGQGCGNSVGMAIAQKWMSARYDRPGFKLFDYHVTVFCGDGDMMEGVASEAASTAGHLALGNLTWIYDSNQISIEGSTDLAFTENVGKRFEAYGWHVQTLTDGNDVDAILAALKAARAVTDRPSLIVLKTVIGYGAPKKAGTASAHGEPLGADEIKGAKQAYGWPEDAPDFYVPDGVKEHFAEGLGKRGAEAHAEWRELFSAYREAHPELAAEIDCIIEHRLPEGWDKDIPTFDADAKGIASRASSGQVLNAVAKNLPWMIGGSADLTPSTKTDTKGGGSFQPEKWNGSYGGRNIHFGVREHAMGSICNGIALSGIRAYGSGFLIFSDYMKAPIRLSAIMELPVLYIFTHDSIGVGEDGPTHQPIEQLAQLRATPGIMTIRPSDANEVAEAWRTLIPMTHKPAVLALSRQNLPTIDRTKYASAAGLAKGGYVLASCEGKPDVILIASGSEVSLVVAAYEKLTEEGIKARVISMPSFDLFEEQSQEYRDSVLPPDVIGRVAVEQAAAFGWDRYVGLGGAIIAMNTFGASAPASALLTKFGFTPEAVYDAAKRQALRGK

SEQ ID NO: 48217 - protein, 577 aa, Bacillus cereus G9241
MNRGRDVMSKFTVASNGSLETTLRGVEVLSTPLLNKGVAFTQEEREELGLKGLLPPAVLTLEEQARRAYEQFCSQPDDLLKNVYLTALHDRNEVLFYRILTDHLREMLPIVYTPTVGVAIQRYSHEYRKPRGVYLSINDPSGIEEAFANIGATAENIDLVVVTDGEGILGIGDWGVGGINIAIGKLAVYTAAVGIDPSRVLPVILDVGTNREELLDNPFYIGNRHPRITGEAYDEFIDTFVQAVNKQFPKALLHWEDFSSRNARKILDKYRHDICTFNDDIQGTGAVSLAAVLSAVKASGVPLSEHRVVVFGAGTAGIGIADQVRDAMVRVGVSEEESYKCFWCIDRNGLVTDNMEDLLDFQMPYARKEAEVSEWKQNGVIGLAEVVKHVKPTILIGTSTVAGAFKEEIIKDMASHVERPIILPMSNPTPLAEAKPADLIEWTEGKALVATGSPFEPVTYNGVTYVIGQSNNALIFPGLGLGTIVVRASVMTDGMFAAAAEAVASMVDTSQPGAPILPEVEELRNISEMVAIEVAKVAVAEGVARENLSDNDIKIAVKEAIWEPEYRQIKAVEKVRI

SEQ ID NO: 48218 - protein, 574 aa, Oryza sativa (japonica cultivar-group)
MRRPPEFAAVAAVAVVAALVLAAGAGAAPLPAALRLERALPHKGVAVEHLRERDRARHGRRGLLGGGGGGVAGVVDFPVEGSANPFMVGLYFTRVKLGSPPKEYFVQIDTGSDILWVACSPCTGCPSSSGLNIQLEFFNPDTSSTSSKIPCSDDRCTAALQTSEAVCQTSDNSPCGYTFTYGDGSGTSGYYVSDTMYFDTVMGNEQTANSSASIVFGCSNSQSGDLTKTDRAVDGIFGFGQHQLSVVSQLNSLGVSPKVFSHCLKGSDNGGGILVLGEIVEPGLVYTPLVPSQPHYNLNLESIVVNGQKLPIDSSLFTTSNTQGTIVDSGTTLAYLADGAYDPFVNAITAAVSPSVRSLVSKGNQCFVTSSSVDSSFPTVSLYFMGGVAMTVKPENYLLQQASIDNNVLWCIGWQRNQGQQITILGDLVLKDKIFVYDLANMRMGWTDYDCSTSVNVTTSSGKNQYVNTGQFDVNGASPRPPYSGLVPAVAVAVALIFGGFSLSGFTPHVEFSRYIFPYWDDDVTVWFCPPPPPSPTRWRKSRYGPKPTARTLAEILLRPNLNGLQAHGNSVPA

SEQ ID NO: 48219 - protein, 957 aa, Gluconobacter oxydans
MADTISNTGLNEVGSVLRDLEKYGQSPWLDFIQRSFTEDGSLSKLVEEDGLRGVTSNPAIFEKAIGHGTEYDPQIRKLLEGEGLSPGELYEHLAIDDIRSACAVLDPVFEKTKGLDGYVSLEVSPYLAFDAHGTITEERRLWKAVGRPNLMIKIPGTVEGTGAIREAIADGINANVTLLFSLDAYKAVLEAYISGLEARVARGEEISRISSVASFFVSRIDAKIDAEIDRRVAAGDPEAEAPKAIRGKVAIANAKMAYQYYLEVRNSPRWKALAEKGANPQRLLWASTGTKDKAYSDVLYVEELIGPETVNTIPPATFDAYRDHGKSRASLTENVDQARHVMAEAERLGLGPDGITAKLVKDGCAAFSVSFDTLLTAVATKREAVLGDRLLRVSADLPPDLRDDVAAAEKDWSHSGGLRRIWKKDPSVWTNGPEAGWLNWLTVVQDRLWHIEELEVLARDVRSRGFKDILLLGMGGSSLGPEVLAETFGKREGWPKPHVLDSTDPQQVTAFEKAIDPKNTLFIVASKSGGTLEPNILFAHFWQVAGQALGKKPGDSFIAITDPGSHMQKVAEENGFWRIFYGDPKIGGRYSVLSNFGLVPAAASGIDVRKLLTVTRLMVESCGGSAPPSANPGAVLGLILGHAAHCFNRDKVTILASEGIASLGAWLEQLIAESTGKKGLGLIPIDEEELGTPDVYGTDRVFVDLLLGDDAPDSRLGALRAAGAPVVTIRLADKAQIGQAFFLFEFATAVAGAVLGIDPFDQPDVEFSKLETRKLTSAYAETGSLPPETPFAKDGPLSFYADAKNTEASGNKGDAVSILKALFDRVKPGDYVGLLAYIRRDQQTRDWAQSVRMELRDALKVATAAEFGPRFLHSTGQAYKGGPDSGVFLQVTATDAADVPVPGHGFSFSVVKAAQARGDFEVLAARGRRALRVHIDGPLEDGLKALETAIHKALAGA

SEQ ID NO: 48220 - protein, 162 aa, Rhodopseudomonas palustris CGA009
MNVTATARSLLLTEFVSAFFLAMRYFFKPKPTINYPFEKNPISPRFRGEHALRRYPNGEERCIACKLCEAVCPAQAITIEAGPRRNDGTRRTVRYDIDMVKCIYCGFCQEACPVDAIVEGPNFEFATETREELYYDKARLLANGDRWEREIAKAISLDAPYR

SEQ ID NO: 48221 - protein, 618 aa, Saccharomyces cerevisiae
MPLMSNSERDKLESTLRRRFFYTPSFEIYGGVSGLFDLGPPGCQLQNNLIRLWREHFIMEENMLQVDGPMLTPYDVLKTSGHVDKFTDWMCRNPKTGEYYRADHLIEQTLKKRLLDKDVNPQDMKNMEKILTTIDGFSGPELNLVMQEYNINDPVTNDVLDALTSFNLMFETKIGASGQLKAFLRPETAQGQFLNFNKLLEINQGKIPFASASIGKSFRNEISPRSGLLRVREFLMAEIEHFVDPLNKSHAKFNEVLNEEIPLLSRRLQESGEVQLPVKMTIGEAVNSGMVENETLGYFMARVHQFLLNIGINKDKFRFRQHLKNEMAHYATDCWDGEILTSYGWIECVGCADRAAFDLTVHSKKTGRSLTVKQKLDTPKERTEWVVEVNKKFFGSKFKQKAKLIESVLSKFSQDELIRRHEELEKNGEFTCQVNGQIVKLDSSLVTIKMKTTLQHIREYIPNVIEPSFGLGRIIYCIFDHCFQVRVDSESRGFFSFPLQIAPIKVFVTTISNNDGFPAILKRISQALRKREIYFKIDDSNTSIGKKYARNDELGTPFGITIDFETIKDQTVTLRERNSMRQVRGTITDVISTIDKMLHNPDESDWDKSTFGLSPVKI

SEQ ID NO: 48222 - protein, 78 aa, Ipomoea nil
RQVTSCKRRNGLLKKAYELSVLCDAEVALIVFSTRGRLYEYANNSVRATIDRYKKHHSDSTNTGSVSEANTQYYQQEA

SEQ ID NO: 48223 - protein, 78 aa, Ipomoea nil
RQVTFCKRRNGLLKKAYELSVLCDAEVALIVFSSRGRLYEYANNSVKATIDRYKKACSDSTNTGSISEANTQYYQQEA

SEQ ID NO: 48224 - protein, 149 aa, Arabidopsis thaliana
MADQLTDDQISEFKEAFSLFDKDGDGCITTKELGTVMRSLGQNPTEAELQDMINEVDADGNGTIDFPEFLNLMARKMKDTDSEEELKEAFRVFDKDQNGFISAAELRHVMTNLGEKLSDEEVDEMIREADVDGDGQINYEEFVKVMMAK

SEQ ID NO: 48225 - protein, 361 aa, Haloarcula marismortui ATCC 43049
MKQSLTRRAMLGALGTAVAATAGCQSPGTGSDSGSDTGEQPESADAVAQSDSVYTNVYQEVADAVVSIRVYAEDSRGGQGSGFLIDDEHIVTNEHVVAGGDEYYVRFADTGWRTASVVGADVYSDLAVLRIGATPDVTPLSFVETEPTVGTEVVAIGNPFGLSGSVSAGIVSGVDRTLQSANNFSIADAVQTDAPVNPGNSGGPLVTLEGDVVGVINSGGGDNVAFAISAPLTQRVVPSLIQTGDYDHPYMGVGLRSVSPRVAEANNLDPGSGVYITRVVSDGPAAGVLQGSDGETTISGTAIPTGGDVVRQMDDTPTPTRQALGSFLALETSPGETVDVLVERDGAQETVELTLGTRPEP

SEQ ID NO: 48226 - protein, 360 aa, ASPERGILLUS NIDULANS FGSC A4
MASKTWNVGIVGYGFSAKIFHIPFVQENPQFKLYAVVQRTPKPDDDAEKDHPGIKSYRSAEDLVQDAGVDVVVITTAPDSHHYLAKLALENGKHVICEKPFTPTYKEAAELVDISKKQNKFLAVYQNRRWDADFVTLSKLVKTGQLGRVVEFETHFDRHRPEEPAPTVSKWKNKVVPGGSAIHDLGSHLLDQALYLLGKPERVTGFVGSQREVNTSGFQDSFTVLLHYKSGTLVTAKAGVVSPEEEQLRFWVRGDKGSFKKFHLDCQEDQLKAGMRPGDSGYGREPSERYGTLTTIKDGKPVREVTPTVEPPTYSEYYRKIARALAGEGELPASGEEAAEVIRLIELAQESSKQGKTLDF

SEQ ID NO: 48227 - protein, 213 aa, GIBBERELLA ZEAE PH-1
MLARRQLASSSLSTRATSIVGLVQQRGYATPHGPPPANFRTSKPVRWTWDNESTLDRMGKFFLMTEMARGMYVLLEQYFRPPYTIYYPFEKGPISPRFRGEHALRRYPSGEERCIACKLCEAICPAQAITIEAEERADGSRRTTKYDIDMTKCIYCGFCQESCPVDAIVESPNAEYATETREELLYNKEKLLSNGDKWEPELAAAIRADSPYR

SEQ ID NO: 48228 - protein, 91 aa, Quercus suber
MSLVPNFFNRRSNVFDPFSLDVWDPFEGFPPLSSHSNFPSETSSFAAAKLDWKETPNAHVFADVPGQKKEEVKVEIEDRRVLQISGERSQD

SEQ ID NO: 48229 - protein, 129 aa, Haloarcula marismortui
SEETEDINGIAHVHASFNNTIITITDQTGAQETLAKSSGGTVVKQNRDEASPYAAMQMAEVVAEKALDRGVEGVDVRVRGPGGNLQTSPGPGAQATIRALARAGLEIGRIEDVTPTPHNGTRAPKNSGF

SEQ ID NO: 48230 - protein, 227 aa, Pseudomonas fluorescens PfO-1
MSAASDPAYAACPFTGKEADMLKIWGRKNSSNVRKPLWAAEELGLAYEAIDAGGAFGVVDTPEYRAMNPNGRVPVIQDDGFVLWESNAIVRYLLAKHAADTSWYPADPQTRATADKWMDWTTSSFAGPFRTVFWGVLRTPADKQDWPAIHAAIKECDSLLAMADQALKHQPYLSGSEIGMGDIPLGSFIYAWFEMPIERAPQPNLEAWYARLKQRPAYQKAVMTALT

SEQ ID NO: 48231 - protein, 372 aa, Mycobacterium avium subsp. paratuberculosis K-10
MRMHDTDEIRLIEAQAVPTRFARGWHCLGLIRDFGDGKPHPIDAFGQKLVVFRGGDGAINVLDGYCRHMGGDLSRGEVKGNEIACPFHDWRWGGDGRCKQVPYSRRTPRLARTRAWTTLQQDGMLFVWNDPEGNPPPPEVTIPRIEGAGSDEWTDWHWYSTVVQSNCREIIDNVVDMAHFFYIHGSLPKQFKNIFEGHVATQYMNSAGRPDIGGEGARMLGTTSVASYWGPSFMIDDLTYHYEDADHQTVLINCHYPIDANSFVLQYGIIVKKSDALPDDLAMQTAIALGDFVKLGFEQDVEIWRHKARIDNPLLVEEDGPVYQLRRWYQQFYVDVADVQPDMVDRFEFELDTTRPYAAWMKEVEANLAARA

SEQ ID NO: 48232 - protein, 96 aa, Bacillus cereus ATCC 14579
MFMLKPLGDRVVIELVQAEEKTASGIVLPDTAKEKPQEGKVVAVGTGRVLENGERVALEVAAGDLIIFSKYAGTEVKYEGTDYLILRESDILAVIG

SEQ ID NO: 48233 - protein, 113 aa, Glycine max
  misc_feature (84)..(84): Xaa can be any naturally occurring amino acid
  misc_feature (112)..(112): Xaa can be any naturally occurring amino acid
  unsure (1)..(113): unsure at all Xaa locations
MSLIRRSNVFDPFSLDFFDPFDGFPFGSGSSNSGGSLVPRTSSDTAAFAGARIDWKETPEAHVFKADVPGLKKEEVKVEVEDGXILQISGERIKEQEEKTDTWHRVERSSGXF

SEQ ID NO: 48234 - protein, 544 aa, Bacillus cereus ATCC 14579
MAKDIKFSEEARRSMLRGVDTLANAVKVTLGPKGRNVVLEKKFGSPLITNDGVTIAKEIELEDAFENMGAKLVAEVASKTNDVAGDGTTTATVLAQAMIREGLKNVTAGANPMGLRKGIEKAVTAAIEELKTISKPIEGKSSIAQVAAISAADEEVGQLIAEAMERVGNDGVITLEESKGFTTELDVVEGMQFDRGYASPYMITDSDKMEAVLDNPYILITDKKISNIQEILPVLEQVVQQGKPLLIIAEDVEGEALATLVVNKLRGTFNVVAVKAPGFGDRRKAMLEDIAILTGGEVITEELGRDLKSATVESLGRAGKVVVTKENTTVVEGVGSTEQIEARIGQIRAQLEETTSEFDREKLQERLAKLAGGVPVIKVGAATETELKERKLRIEDALNSTRAAVEEGIVAGGGTSLMNVYTKVASIVAEGDEATGINIVLRALEEPVRQIAINAGLEGSVVVERLKGEKVGVGFNAATGEWVNMLESGIVDPAKVTRSALQNAASVAAMFLTTEAVVADKPEPNAPAMPDMGGMGMGGMGGMM

SEQ ID NO: 48235 - protein, 477 aa, Bacillus cereus E33L
MKIVLRKESNIPYYKQIYMQIVERVQSGMLSHGDSLPSLRSMAEDLQISLLTVRKAYKQLEKKEYIRIEQGKGAYIHKHVKKDSKPIPYKWQQTKTINVMRSQYAMNQHRKYYDFSQAILYPRLLPNPFLADEMHKILNKDQMILATYGPVQGDYELRVEITKYLHEHQKLVTDPSQLLITSGAQQGIDLIAQTLLKPGDIVLVESPCYSAALDIFINKGAQIIPVPLDNHGARSDLIDDICQGKNPVLLYTNPTFQNPTGTVMSKERRMELIELAELYKFFIIEDDSFGEIYFEDAIVPPPIKNFDTNGHVLYIKGFSKTLAPGLRIASLIADGPIFAWLYAVKGSMDIGSPLLTQKALLPFLRAERMKNHLEKLRTALQIRRDITIDMLSPLKEIQFEIPDGGFNLWITLPNSIDPFTLLQKANEVDVSFLPGTACLLNNERNNNQLRISYSMLNEKDMSIGLEKLHDSIRNYKL

SEQ ID NO: 48236 - protein, 284 aa, Synechococcus elongatus PCC 6301
MAIAEQKQTVGSLEWFYREAEPTQADPAKLPVVCLHGLVSQSYGWRQVLPAIADAGFRAIAPDWIGAGFSSQPERREFAYTPEAFVSALEAWRAELGIERLHLVVQGYLGAVGLLWAAQHPDRVERIALFNTPFYAGASVPWKIRQLGLPLAGEMLCQDPLTVDRVLEGGGGYRVEDADLDVYRRPYLSSSAAGRALLATVRQLDQARVSTEIASALAQWSQPILVGWGDRDPWLTWVEAEAGAGKLTSAEFVRFEETGHYPQEDWPEKLCQALLLFLRGADLR

SEQ ID NO: 48237 - protein, 445 aa, Listeria monocytogenes str. 1/2a F6854
MIQEGLKNVTAGANPVGVRRGIEKAVATAIEELKAISKPIESKESIAQVAAISSGDEEVGKLIAEAMERVGNDGVITIEESKGFATELDVVEGMQFDRGYTSPYMVTDSDKMEAVLEKPYILITDKKINNIQEILPVLEQVVQQGRPMLIIAEDVEGEAQATLVLNKLRGTFNVVAVKAPGFGDRRKAMLEDIAILTGGQVITEDLGLELKTATVDQLGTANKVVVTKDDTTIVEGAGDSTQISARVNQIRAQMEETTSEFDREKLQERLAKLAGGVAVVKVGAATETELKERKLRIEDALNSTRAAVEEGIVAGGGTALVSIYNKVAALEAEGDVETGINIVLRSLEEPVRQIAHNAGLEGSVIVERLKHEAVGVGFNAANGEWVNMIDAGIVDPTKVTRSALQNASSVAALLLTTEAVVADKPDENGPAAVPDMGMGGMGGMM

SEQ ID NO: 48238 - protein, 414 aa, Erwinia carotovora subsp. atroseptica SCRI1043
MSSELYAQINPPHRLLMGPGPINADPRVLRAMASQLVGQYDPAMTNYMNQVMELYRQLFRTENRWTMLVDGTSRAGIEAILLSAIRPGDKVLVPVFGRFGHLLCEIARRCRAEVHTIEVPWGEVFSPDQIEDAIKTVRPRLLLTVQGDTSTTMLQPLEALGEICRRHGVLFYTDATASFGGNPLETDKWGLDAVSAGLQKCLGGPSGSSPITLSPQMEAVIRRRKCVEQGIRTDAHQDGDDEMIYSNYFDLGMVMDYWGPERLNHHTEATSMLFAARECARVILEEGLDRSIVRHALHGNALVAGIQGMGLETFGDLSHKMNNVLGVVIPDGVHGEQVRKLLLEDFAIEIGTSFGPLQGKIWRIGTMGYNARKDCVMQTLTALEAVLNRFGFRTVQGEALQAAWNSYAANEERA

SEQ ID NO: 48239 - protein, 250 aa, Bdellovibrio bacteriovorus HD100
MKTGAAFITGAGSGIGRATAMAYAQAGIPVAVVDFSEQGANETIALIRKNSDVPADAYVCDVSIDGDVSRTFFAAVERFGHIRYAFNNAGVEGDSSLLQDVTDENWDGVLNVNLRGVWLCMKYQLYHMAKAGGGSIVNCSSIAGLVGFENLAPYVASKHGVIGLTKAAALEYAKKNIRVNAVCPGVIKTPMLDRAMKHLHQDPEQFAKAAPIGRMGTPQEIAETVLWLNSDKASFVTGHSLIADGGWTAQ

SEQ ID NO: 48240 - protein, 116 aa, Triticum aestivum
ALSLDHHAFASLNGLPGDTLHSYIEDQNVANDPWHGFEEWYLKEEVNKLLNSNLTERERDIIQLYHGIGKQCHTWEDISRQFGLSRERVRQVGLIAMEKLKHAARRKKLDALLQDY

SEQ ID NO: 48241 - protein, 892 aa, Methanosarcina mazei Go1
MPDLFKGLFGKKSNELFIILAVGLLFTFFASYFGLFESIVLFVEEYNPRKLGGLLTLSVYLAFALGIFSLRRWMELENALVLQEKTEESLKEKDKRYRALFEHSNDAIIILNGEKVLDLNKKGREAFGLGARELDNISIGSLLSEKDLPAVRDALKTTLENGSACFEMKFRKQNGEVIDVEVSSSFLSLEEGEIQCVARDITTRKKAEKNERESRERLKKIIDNALCGILLVDASTHEIVDANPAAVEAIGLPGHRLTGNVCHKFICPVEEGKCPITDFKQSVDKSERMLLNGKGESFPVLKSVVPVKIGENEYLIESFIDLSERKKTEEELLQAKLAAESANRAKSEFLTNMSHELRTPLTAIIGFSDVMLGGISGEFSEQNKKFLNNIANSGKHLLTLINNILDLSKIEAGKMELEFEMFSVSEVFNDTRAVTSALALKKDISMKYNVDSEILVYADRVRFKQIIYNLVSNAIKFTPDRGSVIVSALKTEDSVRISVSDTGIGISEENQKLLFQPFRQIDASINRHYEGTGLGLALVKKFVNLHGGRVWAESEPGKGSTFEFELPLKCGITSETRINNPDASKKIASSPAEKTVPENHVSDKPAFEKPEREENIKPEANNKSRLPEIIEPSGDSGEKNLVMVVEDDEMAKELLTITLSEAGYRVVTVSSGREALLLARELKPSVITLDIMLPGVSGWDILKNLKHDSATSDIPILVISMNDEKNCSILWGAVDHLIKPVEKERLLSSLQKVKGAINAKSSPRVLIVDDEPTIVELFSSIIKEEGYEPVCAYGGKEAVDKIRNGHPDIIILDLMMPHFTGFDLIKVLKENPETIDIPVIVCTAKELTFEEKDQLNRNVSYIMKKGNITREVLLSVLQKVEDKKFKSKQTNS

SEQ ID NO: 48242 - protein, 445 aa, Propionibacterium acnes KPA171202
MDRQLENAYESVLRRNPGEAEFHQAVREIFESLGPVLDTNPQYVEAAVLSRICEPERQIIFRVPWVDDEGKIRINRGFRVEYSSVLGPYKGGLRFHPSVYLGTIKFLGFEQIFKNALTGMPIGGAKGGSDFDPHDASEAEVMRFCQSFMTELYRHLGEHTDVPAGDIGVGSREIGFLFGQYKRITNRHESGVLTGKGLTWGGSLVRTEATGYGTVFFVQRMLATNGKSLDGLRVTVSGSGNVAIYAIEKAQDLGATVVACSDSSGYVVDEKGIDVALLKQIKEVERARICEYAARRDSATFHSDGSIWDVPVDVALPCATQNELNGQAAATLIRNGVVAVAEGANMPCTPEAVHSFQDAGVIFAPGKASNAGGVATSALEMQQNAARDSWDFDATEARLQQIMADIHDRCIETADEYGHPGDYVMGANIAGFTKVADAVIAMGVV

SEQ ID NO: 48243 - protein, 57 aa, Neurospora crassa
MAFTASDICKIIVAVILPPLGVFFERGCGADLFINILLTILGYLPGIVHALYIILKY

SEQ ID NO: 48244 - protein, 764 aa, Triticum aestivum
SGPAPRLRRWRPNATAGKGVGEVCAAVVEAATKVEDEGEEDEPVAEDRYALGGACRVLAGMPAPLGATALAGGVNFAVYSGGATAAALCLFTPEDLKADRVTEEVPLDPLMNRTGNVWHVFIEGELHNMLYGYRFDGTFAPHCGHYLDVSNVVVDPYAKAVISRGEYGVPARGNNCWPQMAGMIPLPYSTFDWEGDLPLRYPQKDLVIYEMHLRGFTKHDSSNVEHPGTFIGAVSKLDYLKELGVNCIELMPCHEFNELEYSTSSSKMNFWGYSTINFFSPMTRYTSGGIKNCGRDAINEFKTFVREAHKRGIEVILDVVFNHTAEGNENGPILSFKGVDNTTYYMLAPKGEFYNYSGCGNTFNCNHPVVRQFIVDCLRYWVTEMHVDGFRFDLASIMTRGSSLWDPVNVYGAPIEGDMITTGTPLVTPPLIDMISNDPILGGVKLIAEAWDAGGLYQVGQFPHWNVWSEWNGKYRDIVRQFIKGTDGFAGGFAECLCGSPHLYQAGGRKPWHSINFVCAHDGFTLADLVTYNKKYNLPNGENNRDGENHNLSWNCGEEGEFARLSVKRLRKRQMRNFFVCLMVSQGVPMFYMGDEYGHTKGGNNNTYCHDSYVNYFRWDKKEQYSELHRFCCLMTKFRKECEGLGLEDFPTAKRLQWHGHQPGKPDWSENSRFVAFSMKDERQGEIYVAFNTSHLPAVVELPERAGRRWEPVVDTGKPAPYDFLTDDLPDRALTIHQFSHFLYSNLYPMLSYSSVILVLRPDV

SEQ ID NO: 48245 - protein, 152 aa, Glycine max
MSSVCISNCINDARDPRVPVRASYVNLYKWPESDAEFVRSRSCNREKGSQILYGHPRVVDSISCRQMFLRSYTFSREEENEHEKTHKCFGRAKMKKKKDIGSETLKPNDKAKKTKCCLVWSKAKEVSCSALSGILRRVLSCSASVDVVDEKY

SEQ ID NO: 48246 - protein, 555 aa, Coxiella burnetii RSA 493
MTRYIFITGGVVSSLGKGITSASLGAILEAQGLTVTLLKLDPYINVDPGTMSPFQHGEVFVTEDGAETDLDLGHYERFVNATMTRKNNFTTGRVYADVIRKERRGDYLGGTIQVIPHITDEIKAKIREGADGADVALVEVGGTVGDIESLPFLEAIRQMRIELGDQQTLFIHLTLVPYVAVAGEIKTKPTQHSVKELRSIGIQPDILVCRSEQPLPDAERAKIALFTNVPEPSVISLSDVKSIYEIPLILRDQGLGNRVCEKLNIKATAADLDDWKKVVQAQKNPRHTVTVAVVGKYVDLEDSYKSLSEALIHAGIHTQTRVVIEYIDSEAIELHGTELLKKVDAILVPGGFGSRGIEGKILAAQYARENGIPYFGICLGMQIAIIEFARDKAQMENANSTEFDPKTPFPVVALVSEWMAKEGIIEKRKWGDDLGGTMRLGGQPCRLKIDSLARRLYGEDRVIERHRHRYEVNNDLIGELEKKGLVISGRSIDDRLVEMIELADHPWFVGCQFHPEFTSTPRKGHPLFIGFIKAGLAAKEAKKAVLAAPSQEKTD

SEQ ID NO: 48247 - protein, 249 aa, Xanthomonas campestris pv. vesicatoria str. 85-10
MTRKLVLLRHGQSQWNLDNRFTGWVDVELTDQGRQEAVAAGKLMKDEGLQFDVAHTSVLKRAIHTLQGALKELDQDWLPVSKSWRLNERHYGGLQGLDKAETAAKHGEEQVKIWRRSYDIPPPAMDVNDPGHPCHDRRYATLDRNALPGTESLATTLVRVLPYWHDAIAPQLKAGQTVLVTAHGNSLRALYKYLNDVSNEQILELNIPTGIPLLFELDDNLQVRSFRYLGDPEAAKRAAEAVANQGKAK

SEQ ID NO: 48248 - protein, 81 aa, Gaertnera arenaria
  misc_feature (9)..(9): Xaa can be any naturally occurring amino acid
  unsure (1)..(81): unsure at all Xaa locations
TPQDEMRAXMSYFHETIWKGVPKFLRRVDTALKNIGINERVPYNAPVIQFSSWMGGDRDGNPRVTPEVTRDVCLLARMMAA

SEQ ID NO: 48249 - protein, 81 aa, Gaertnera arenaria
TPQDEMRAGMSYFHETIWKGGPKFLRRVDTALKNIGINERLPYNAPLIQFSSWMGGDRDGNPRVTPEVTRDVCLLARMMAA

SEQ ID NO: 48250 - protein, 159 aa, Glycine max
AVIRIWDSETGKLLKESDKESGHKKTVTSLAKSADGSHFLTGSLDKSARLWDTRTLTLIKTYVTERPVNAVAMSPLLDHVVLGGGQDASAVTTTDHRAGKFEAKFYDKILQEEIGGVKGHFGPINALAFNPDGKSFSSGGEDGYVRLHHFDPDYFNIKI

SEQ ID NO: 48251 - protein, 81 aa, Gaertnera capitulata
  misc_feature (15)..(15): Xaa can be any naturally occurring amino acid
  misc_feature (19)..(19): Xaa can be any naturally occurring amino acid
  misc_feature (77)..(77): Xaa can be any naturally occurring amino acid
  misc_feature (80)..(80): Xaa can be any naturally occurring amino acid
  unsure (1)..(81): unsure at all Xaa locations
TPQDEMRAGMSYFHXTIGXGVPKFLRRVDTALKNIGINERVPYNAPVIQFSSWMGGDRDGNPRVTPEATRDVCLLAXMMXA

SEQ ID NO: 48252 - protein, 196 aa, Zea mays
YVLSLLCPFQDPRTENNPYLGFIYTSFQERATFISHGNTARHAKDFGDLKLAQICGIIASDEKRHETAYTKIVEKLFEIDPDGTVVALADMMRKKISMPAHLMFDGQDDKLFEHFSMVAQRLGVYTARDYADILEFLVDRWKVASLTGLSGEGNKAQDYLCTLASRIRRLEERAQSRAKKAGTLPFSWVYGRDVQL

SEQ ID NO: 48253 - protein, 337 aa, Salmonella typhimurium
MRVLVTGGSGYIGSHTCVQLLQNGHDVVILDNLCNSKRSVLPVIERLGGKHPTFVEGDIRNEALITEILHDHAIDTVIHFAGLKAVGNSVARPLEYYDNNVNGTLRLVSAMRAANVKNLIFSSSATVYGDQPKIPYVESFPTGAPQSPTGKSKLMVEQILTDLQKAQPEWSIALLRYFNPVGAHPSGDMGEDPQGIPNNLMPYIAQVAVGRRESLAVFGNDYPTEDGTGVRDYIHVMDLADGHVVAMEKLADKSGVHIYNLGAGVGSSVLDVVNAFSKACGKPINYHFAPRDGDLPAYWADASKADRELNWRVTRTLDEMAQDTWHWQSRHPQAYPD

SEQ ID NO: 48254 - protein, 162 aa, Trema orientalis
MSSSEVDKVFTEEQEALVVKSWAVMKKNSAELGLKFFLKIFEIAPSANNLFSYLKDSPIPLEQNPKLKPHAMTVFVMTCESAVQFRKAGKVTVRESNLKRIGAIHFKNGVVHEHFEVTRFALLETIKEAVPEMWSPEMKNAWGEAYDQLVAAIKFEVKPSST

SEQ ID NO: 48255 - protein, 480 aa, Campylobacter jejuni subsp. jejuni NCTC 11168
MLKKTKIVATVGPASEKEEILRQMIINGVNVFRLNFSHGTHEYHKKNLDTIRRVAKELHTRIGILQDISGPKIRTGELKEPFELKKGDRLDFYRETILGEKIAQNHYKISINQKSILDMLKIDEYIYLYDGSIRAKVVNIDNQKIETIIENDGFLNSNKGINFPNTKINIDVITQKDKNDLLWGIKNEVDFLAISFVQNAHDIDEVREILAQNNAKISIFAKIEKFDAVENIDEIIKSSDGIMVARGDLGIEVPYYKVPNIQKEIIQKANNASKPVITATQMLFSLAKSKTATRAEISDVANAVLDGTDAVMLSEESAVGIDPANAVDIMCQTIIETEKRYPYNKFNDFNDLDNTDKIMRSSAHLATDLNADAIFSLTSSGKSAIKIARYRPNIEIIAVGHSEKTLNSLSIVWGVNPAILVNKSNELTELLKDSVRSSVEKGFMDEDKCYLLTAGFPTGVEGTSNLIRILNKEQIAYYLQ

SEQ ID NO: 48256 - protein, 423 aa, Ehrlichia canis str. Jake
MYINTCAWFNKGYQNIWMPYTQMKNSPLPLSVKSASGCYIILEDGKRLLDGISSWWSVCHGYSHPHIVQKVQDQVAKLSHVMFSGLAHEQSYVLASRLVKISPEQKKVFFSDSGSTAVEVAMKMAVQYHQNLGNKNKYNFVSFVNGYHGDTMGCMSISDPTKIHGTKFKKYHPSQFILPLPSTEEEIKNFANTIYSIRDQVAAVILEPILQAAGGMLIHSANILKKIYDIAKANNILFIADEVATGFGRTGTMFGCNQANIVPDIIVIGKALTGGFCTLAATLTTQEVYDAFLSDNIDDAFMHGPTFMANALACAAANASLDIFESQDLIRNIGLIENQLKSELGVFKQLDCVTDIRVKGATGVIELKDGLIDKHDIINKGVELNIWIRPLNNVIYVMPPFIINSNELTQLITSIYKILKSNI

SEQ ID NO: 48257 - protein, 599 aa, Vibrio parahaemolyticus RIMD 2210633
MQIITTDIAVIGAGGAGLRTAIAAAEANPDLEVALISKVYPMRSHTVAAEGGSAAVIKDEDSLDNHFNDTVGGGDWLCEQDVVEYFVENATREMIQMEQWGCPWSRKENGEVNVRRFGGMKVERTWFAADKTGFHMLHTLFQTSMKYSNIKRFDEYFVLDLLVDEGEVQGLIAIHMSEGELVTIKAKSVVLATGGAGRVYHCNTNGGIVTGDGMAMAYRHGVPLRDMEFVQYHPTGLPGTGILMTEGCRGEGGIIVNKNGYRYLQDYGMGPETPVGQPKNKYMELGPRDKVSQAFWHEQQKGNTIKHPLGDVVHLDLRHLGEEYLQERLPFICELAKAYVNVDPAKEPIPIRPTVHYTMGGIETDGGCETRIKGLFAVGECASVGLHGANRLGSNSLAEFVVFGRVAGENAVKRAAEFKGWNDAAIDAQVKAVEERIAKLMNQEGDENWAEIRTEMGHTMEAGCGIYRQEDLMQATIDKITELKERYKRISIKDKGKVFNTDLLYAIEVGYGLEVAEAMVHSAILRKESRGAHQRLDDGCTERDDVNFLKHSLAFYKPDSAPSIDYSNVTITKSQPKARLYGEAAEKAAAEEKNAEEQV

SEQ ID NO: 48258 - protein, 237 aa, Guillardia theta
MSNNLAIQLREGTSKSHSMAENVSFVKSFLSGVIDTNSYKKMMSNLYFVYKAMEEEMEYHKENDLIKPIYFVELNRSESLALDLNFYYGDTWKDIIEPSEATRVYINRIKKISKEKPLLLIAHAYTRYLGDLSGGQILKKIAQRALNVPNSQGLAFYEFDKIDDEQAFKQKYKKALDTLPVTDKMISQIVAEANIAFNLNMRMFQELEMSYIRIFTKILMQFLINSKDKLRVMLNFS

SEQ ID NO: 48259 - protein, 274 aa, Arabidopsis thaliana
MEEEGYQWARRCGNNAVEDPFVYEPPLFFLPQDQHHMHGLMPNEDFIANKFVTSTLYSGPRIQDIANALALVEPLTHPVREISKSTVPLLERSTLSKVDRYTLKVKNNSNGMCDDGYKWRKYGQKSIKNSPNPRSYYKCTNPICNAKKQVERSIDESNTYIITYEGFHFHYTYPFFLPDKTRQWPNKKTKIHKHNAQDMNKKSQTQEESKEAQLGELTNQNHPVNKAQENTPANLEEGLFFPVDQCRPQQGLLEDVVAPAMKNIPTRDSVLTAS

SEQ ID NO: 48260 - protein, 538 aa, Staphylococcus aureus subsp. aureus MRSA252
MVKQLKFSEDARQAMLRGVDQLANAVKVTIGPKGRNVVLDKEFTAPLITNDGVTIAKEIELEDPYENMGAKLVQEVANKTNEIAGDGTTTATVLAQAMIQEGLKNVTSGANPVGLRQGIDKAVKVAVEALHENSQKVENKNEIAQVGAISAADEEIGRYISEAMEKVGNDGVITIEESNGLNTELEVVEGMQFDRGYQSPYMVTDSDKMVAELERPYILVTDKKISSFQDILPLLEQVVQSNRPILIVADEVEGDALTNIVLNRMRGTFTAVAVKAPGFGDRRKAMLEDLAILTGAQVITDDLGLDLKDATIDMLGTASKVEVTKDNTTVVDGDGDENSIDARVSQLKSQIEETESDFDREKLQERLAKLAGGVAVIKVGAASETELKERKLRIEDALNSTRAAVEEGIVAGGGTALVNVYQKVSEIEAEGDIETGVNIVLKALTAPVRQIAENAGLEGSVIVERLKNAEPGVGFNAATNEWVNMLEVGIVDPTKVTRSALQHAASVAAMFLTTEAVVASIPEKNNDQPNMGGMPGMM

SEQ ID NO: 48261 - protein, 94 aa, Staphylococcus aureus subsp. aureus MRSA252
MLKPIGNRVIIEKKEQEQTTKSGIVLTDSAKEKSNEGVIVAVGTGRLLNDGTRVTPEVKEGDRVVFQQYAGTEVKRDNETYLVLNEEDILAVIE

SEQ ID NO: 48262 - protein, 537 aa, GIBBERELLA ZEAE PH-1
MEDASSSETQSLLIANSSPSDKSSRTSMSTTPDKESEARKAYGAIDHNGDARRSSLVDAAEDEAIIPKGALDPVYEAKARILNRAVSFGWASDNLWPIVTSLILTPVANEFGVSNPPFLPLAQNIGLLAGAMFWGFGCDVFGRKWAFNITLGLTAVWGLISASAPNFAAIAIFDALWSFGVGGNLPVDSAIFLEFLPASHQYLLTILSIDWAIAQVIGTLIAWPLLGNYTCQQDTVCRREDNMGWRYFTITIGGLTLLMFLARFLLFKIYESPKYLMSKGRDEEAVKVMHTVAKKNGKTSTLTIEDLKACEPEGYVAQTDASAALKRYLEKVDISHIKALFVTRKLGLSTGLIMSVWALIGLGYPLYNAFIPYIQATKGADFGDGSTYITYRNSLIIAVLGVPGALLGGWLVELPKLGRKGTLSASTVLTGVFLYCSTTATTSGALLGWQCAFNFFSNIMYAVLYSFTPELFPTPHRGTGNALCASCNRIFGIMAPIIAIFANLETSAPVYTSGALFIAAGLLVLLMPFESRGKAAL

SEQ ID NO: 48263 - protein, 368 aa, Nostoc punctiforme PCC 73102
MTTNVTSSIVERGKTNVKAQVFRGVNQLSYEDIPVPTVEPDEVLVQVRVVGLCQSDIKKIRYPLYEPPRIFGHETAGTIAAIGNNVKGWQVGQRVAVMHHIPCMRCAYCLNDNFSMCDVYKNISTTAGFNASGGGFADYVKVPGHIVENGGLIPIPDNISFEEASFVEPTNCCLKAVRKAQIAPGQTVLVTGAGPIGLMFIMLVKYFGAKAIATDLLPSRIDKALSVGAEAAFDARDPDLPAKISALTGGLGVDVTLLAVPSEKAFFQALDSTRKGGKILFFAEFPDEVEIPINPNILYRREIDLIGSYSSSYRLQNLSADIVFNQRIDVKALISDRYPLKDLSAAVEQAIAPTPDTYKILIYPQKED

SEQ ID NO: 48264 - protein, 282 aa, Glycine max
  misc_feature (226)..(226): Xaa can be any naturally occurring amino acid
  unsure (1)..(282): unsure at all Xaa locations
MGAYAVWCFYCSLWSNSFPPSRSNFIVFKHMIETVLKSSNVLATLINDVLDLSRLEDGSLELEMGKFNLHGVLGEIVELIKPIASVKKLPITLILSPDLPTHAIGDEKRLTQTLLNVVGNAVKFTKEGYVSVRVSVAKPESSQDWRPPEFYPASSDGHFYIRVQVKDSGCGILPQDIPHLFTKFAQSRSGPARPSSGAGLGLAICKRFVNLMGGHIWIETDGPNKXITRTYMIKLQILNYPYPYDHQATDRSQPYREHVLLSRCIPLIIYQDDTICVTRHTR

SEQ ID NO: 48265 - protein, 81 aa, Gaertnera longevaginalis
  misc_feature (13)..(13): Xaa can be any naturally occurring amino acid
  misc_feature (75)..(75): Xaa can be any naturally occurring amino acid
  unsure (1)..(81): unsure at all Xaa locations
TPQDETRAGMSYXHETIWKGVPKFLRRVDTALKNIGINERVPYNAPLIQFSSWMGGDRDGTPRVPPEVTRDVCLXARMMAA

SEQ ID NO: 48266 - protein, 294 aa, Salmonella typhimurium
IVFRAAQKRSDIEIVAINDLLDAEYMAYMLKYDSTHGRFDGTVEVKDGHLIVNGKKIRVTAERDPANLKWDEVGVDVVADATVIFLTDETARKHITAGAKKVVLTGPSKDNTPMFVKGANFDKYEGQDIVSNASCTTNCLAPLAKVINDNFGIIEGLMTTVHATTATQKTVDGPSHKDWRGGRGASQNIIPSSTGAAKAVGKVLPELNGKLTGMAFRVPTPNVSVVDLTVRLEKAATYEQIKAAVKAAAEGEMKGVLGYTEDDVVSTDFNGEVCTSVFDAKAGIALNDNFVKLV

SEQ ID NO: 48267 - protein, 81 aa, Gaertnera longevaginalis
TPQDEMRAGMSYFHETIWKGVPKFLRRVDTALKNIGINERLPYNAPLIQFSSWMGGDRDGBPRVTPEVTRDVCLLARMMAA

SEQ ID NO: 48268 - protein, 208 aa, Zea mays
MVSLKPQKRLAAGVLKCGKGKVWLDPNEVYEISMANSRQNIRKLVKDGFIIKKPQKIHSRSRARRAHEAKQKGRHSGYGKRRGTREARLPTKILWMRRMRVLRRLLRKYREAKKIDKHMYHDMYMKVKGNMFKNKRVLMESIHKSKAEKAREKTLSDQFEAKRAKSKASRERKIARREERLAQGPREPAAAPVSATAPAAAAPKKAKK

SEQ ID NO: 48269 - protein, 231 aa, Bacillus cereus E33L
MMSYKAMLFDLDDTLLNRDMAVNTLFLFVLEKCYEDVSDTVKNNMLRKFKEYDKREYGMSDKTIVLESLFDEFPPKYRLSRNYIQDFWNENFPKCFSLDQNTIHFLNHIKKYFEIGIITNGSSLRQRAKIINTNLNNYFDTIIISEEVGFSKPDKRIFELALNKLDVQPEDVLFIGDDLEKDIAGPQNTNIKGIWFNPHRIMNKTEIKPYSEIDTFNSLLSYVTPQCFYNK

SEQ ID NO: 48270 - protein, 507 aa, Xanthomonas campestris pv. phaseoli
MRPGHLMVLALLAPTLIAPPVFAQSVLTRDNGAKVGDNQNSQTAGATGPTLLQDVQLIQKLQRFDRERIPERVVHARGTGVKGEFTATADLSSLTKAKVFSAGEKTPVFVRFSSVVHGNHSPETLRDPHGFATKFYTSEGNWDLVGNNFPTFFIRDAIKFPDMVHAFKPDPRTNLDDDSRRFDFFSHVPEATRTLTLLYSNEGTPAGYRFMDGNGVHAYKLVNAQGEVHYVKFHWKTLQGIKNLDPKQVAAVQAKDYSHLTNDLVGAIKKGDYPKWDLYVQVLKPEDLAKFDFDPLDATKIWPDVPEQKVGQMVLNKNVDNFFQETEQVAMAPANLVPGIEPSEDRLLQGRIFSYADTQLYRIGANGLSLPVNRPRVAVNNGNQDGQGNIGQTTSGVNYEPSRLEPRPQDTAARYSELPLSGTTQQAKITREQNFKQAGELYRSYSKKDRADLVQSFGESLATTDTESKHLMLSFLYKADPEYGTGVTRVAKGDLARVKQLASSLQD

SEQ ID NO: 48271 - protein, 378 aa, Burkholderia fungorum LB400
MKALVYEGPRKVTVKEMPDAKIERPTDVLVKITTTNICGSDLHMYEGRTNMETGRILGHENLGVVVEVGAGVERIKVGDRVCLPFNIGCGFCKNCERGLTGFCLTTNPGMAGAAYGFAGMGPYSGGQAEYLRVPFGDFNCLVLPPDAEEKENDYVMLSDIFPTGYHATVLAGVEPGDSVVIYGAGPVGLMAALSASIKGASKIMVVDSHPDRLKLAEKIGAIPVDDTDGSSAERILEMTGGEGADRGCECVGYQCSCKGHEVPNLTMNNLIKAVRPTGGIGVVGVFVAEDPKAGDELAKKGQLALDFGQLWMKGQHIATGQANVKAYNRKLRDLIAAGKARPSQIISHELPLDKAPDGYKHFDERDDGWTKVVLKPAA

SEQ ID NO: 48272 - protein, 308 aa, Salmonella sp.
INGFGRIGRIVFRAAQKRSDIEIVAINDLLDAEYMAYMLKYDSTHGRFDGTVEVKDGHLIVNGKKIRVTAERDPANLKWNEVGVDVVAEATGIFLTDETARKHITAGAKKVVLTGPSKDNTPMFVKGANFDKYAGQDIVSNASCTTNCLAPLAKVINDNFGIIEGLMTTVHATTATQKTVDGPSHKDWRGGRGASQNIIPSSTGAAKAVGKVLPELNGKLTGMAFRVPTPNVSVVDLTVRLEKAATYEQIKAAVKAAAEGEMKGVLGYTEDDVVSTDFNGEVCTSVFDAKAGIALNDNFVKLVSWYDN

SEQ ID NO: 48273 - protein, 551 aa, Pseudomonas fluorescens PfO-1
MSSAFRLPLDVFYEREARHPRQRFLVQPIGGGQVETLTWADVGHQARCAAHWLRSRELPQGSHIALISKNCAHWIIADLAIWMAGHVSVPLYPNLTAESVNQVLTHSESVLAFIGKLDDWPGMSPGVPAGLTTVSLPLHPPGTFDFNWDDLQRSSPIQDDPRPAAEQLATIIYTSGTTGLPKGVMHSFANLGFATTRGTQLFGLNENDRLLSYLPLCHVAERMFVELASIYTGQTVFFAESLDTFLADLKRARPTAMFGVPRIWTKFQMGVYSKIPAKRLDFLLGLPFIGKRVGHKVLAGLGLDALRVALSGAAPVPLTLLRWYQKLGLDVLEVYGMTESCGYSHICLPGQYKEGWIGRPCPEVEVRIDESGEVQVRSQANMLGYFKEPQKTAETLTEDGFLRTGDKGEQDAEGRLRLTGRLKEIFKTSKGKYVAPAPIENRLAVHSRIEQVCVVGDGLSAPLGLCVLSAVGREEPRAPLHSSLEKLLEEVNAVLDKHERLRRLVVVKDSWAVENGFLTPTLKIKRNIIEDTYGARFEEWSERSEAVLWQD

SEQ ID NO: 48274 - protein, 449 aa, Pseudomonas syringae pv. tomato str. DC3000
MTLTASGPATGTLDVQAFINAQPLSGYQWRIVALCFLIVFLDGLDTAAMGFIAPALSQDWGIDRASLGPVMSAALIGMVFGALGSGPLADRFGRKVVLVVAVFLFGIFSLASAYSSNIDQLLVLRLLTGLGLGAAMPNATTLLSEYTPERLKSLLVTSMFCGFNLGMACGGFVSAKLIPSMGWHSLLMLGGILPLVLAVVLMVWLPESARFLVVRNRGAEQIRKVLAPIAPKAVAGVTAFTVPEQKTVSSRNVLKVIFSGTYSAGTLLLWLTYFMGLVIVYLLTSWLPTLMRDSGASMEQSAFIGALFQFGGVLSAVGVGWAMDRYNPHKVIGFAYALAGVFAYLVGQSLGNVAVLATLVLLAGMCINGAQSAMPSLAARFYPTQGRATGVSWMLGIGRFGAILGAWAGATLLGLGWNFEQVLTALVIPAALAALAILIKGWVSHSDAT

SEQ ID NO: 48275 - protein, 296 aa, Erwinia carotovora subsp. atroseptica SCRI1043
MNTDIAMTPETQVHYRYEQVGNVNIFYREAGKPSSPSILLLHGFAASSYMFRELIPALADNYHVIAPDLPSFGFTESPGSDEYDYTFDNLAKTIDQFTEQLKLPRYAIMVHDYGAPVGWRLATAHPDRITAIISQNGNAYEEGLAQGWDAIRRYWQSPTAENRAALHDFPTAASVKWQYLEGVSDTSLVSPDGYTLEGLHVSRLGNADIQLDLLLDYASNVQRYPEFQAYFREQQPPLLAVWGRHDPYFLPAGAEAWKRDIPHADIRFYDTGHFALETHGNDIIPVIHAFLDDNIK

SEQ ID NO: 48276 - protein, 308 aa, Salmonella bongori
INGFGRIGRIVFRAAQKRSDIEIVAINDLLDAEYMAYMLKYDSTHGRFDGTVEVKDGHLIVNGKKIRVTAERDPANLKWDEVGVDVVAEATGLFLTDETARKHITAGAKKVVMTGPSKDNTPMFVKGANFDTYAGQDIVSNASCTTNCLAPLAKVINDNFGIVEGLMTTVHATTATQKTVDGPSHKDWRGGRGAAQNIIPSSTGAAKAVGKVLPELNGKLTGMAFRVPTPNVSVVDLTVRLEKAASYEEIKKAMKAASEGAMKGVLGYTEDDVVSTDFNGEVCTSVFDAKAGIALNDNFVKLVSWYDN

SEQ ID NO: 48277 - protein, 141 aa, Bdellovibrio bacteriovorus HD100
MSIEQTFSIIKPNAMKKNAIGDIVSMFEANGLKIAAAKITVLTTAKAEEFYAEHKARPFFGELVSFMTSGPVMLMCLQGEGAVLKNREIMGATDPKKANPGTVRAKFGDNVGENAVHGSDSPESAARELALFFEKHEICNV

SEQ ID NO: 48278 - protein, 198 aa, Brassica napus
  misc_feature (31)..(31): Xaa can be any naturally occurring amino acid
  unsure (1)..(198): unsure at all Xaa locations
WVGGVELELIAIATGGRIVPSIQELTPEKLXGKAGMVREKSFGTTKERMLYIEHCANSKAVTIFIRGGNKMMIEETKRSIHDALCVARNLIRNKSIVYGGGAAEITCSLAVDAAADKYPGVEQYAIRAFAEALDSVPSQQLKENIPFYGIDCNDVGTNDMREQNVFETLIGKQQQILLATQVVKMILKIDDVISNSEY

SEQ ID NO: 48279 - protein, 467 aa, Bartonella quintana str. Toulouse
MNCKQNLEENLQNKLQRGLDNRHVQLIAIGGTIGTGLFMGSGKTISVAGPSIILVYAIIGCALYFVMRAMGELLLSNSQYRSLIDFSTDILGPGIAFFAGWSYWLSWVVTGAADIIAIITYMHFWWPTLNPWIIVFACVTFFLTLNLLAVKMFGELEFWFGLIKVVAILALIIVGFYMIATGFTSPNGTVASLSHIWNDGNIFPRGITGFFAGFQIAIFSFVGIEIAGTAAAEVKEPKKVLPKAINAIPIRIVLFYIFSLVVIMSVTPWDQVIPDKSSFVTMFWLAGIPTAAGLVNFIVLTSAASSANSGIFSTSRMIYGLATQKGAPRLLGKLSNHHVPANALFFSCLCILLGYTIASLSPSIINAFTIVTSISAISFIFVWSVILVSYIVYRRNRPQLHIESIYKMPGGVIMCWIILAFFAFILYLLTLESDTLIAFKYSLLWFIFLGVTYFIMFVRKKTAQHTK

SEQ ID NO: 48280 - protein, 339 aa, Bartonella quintana str. Toulouse
MHVYYDHDANVNLIKGKKVAIVGYGSQGHAHALNLKDSGVQDVRIALHSRSATAKKAIADGFEVVRVAEAAKWADLIMMATPDELQADIYKEHMHDDLRDGAVIAFAHGLSIHFGLIEPKKTVDVVMIAPKGPGHKVRNEYQRGCGVPCLIAVAQDVSGHAHDIALSYACGIGGGRAGVMETTFKEECETDLFGEQAVLCGGLVELIRAGYETLTEAGYAPEMAYFECLHEVKLIVDLLYEGGIANMNYSISNTAEWGEYISGPRVITDKTKAEMRRILKDIQTGKFTSNWIQECKAGAIHFKSMRRLNDSHPIEEVGKKLRSMMPWIKSNALVDKKRN

SEQ ID NO: 48281 - protein, 261 aa, Staphylococcus aureus subsp. aureus MRSA252
MKVQIYQLPIIFGDSSKNETQITQWFEKNMNAEVDVVVLPEMWNNGYDLEHLNEKADNNLGQSFSFIKHLAEKYKVDIVAGSVSNIRNNQIFNTAFSVNKSGKLINEYDKVHLVPMLREHEFLTAGENVAEPFQLSDGTYVTQLICYDLRFPELLRYPARSGAKIAFYVAQWPMSRLQHWHSLLKARAIENNMFVIGTNSTGFDGNTEYAGHSIVINPNGDLVGELNESADILTVDLNLNEVEQQRENIPVFKSIKLDLYK

SEQ ID NO: 48282 - protein, 376 aa, Rhodopseudomonas palustris CGA009
MYQSLEADLRSLADAGRRRKLQPRAGVDFTSNDYLGLAESDELRQAAANAVARGVPIGAGGSRLLRGNHEEHEALEAEAADYFGAESALYLGGGFSANHAIFATLPQRGDLVLYDELIHASVHEGMRRGRATCESVPHSDIDAFDARLRQWRASGGRGRAWIAVESVYSMDGDSPRLDELVAVADRHDAILVIDEAHATGVAGPEGRGLAASFEGRANVITLHTCGKALGTMGGFVLGPKIVRDFLVNRARPFIFATAPSPLIAAVTRAALDISRTRPERRERLAALVAFADRELKQRCGITSSGSHILPIIVGANSTAVALAASLQRRGFDVRAIRPPTVPEGTARLRIALSANLSEDVIASLFAALAEDMRAAA

SEQ ID NO: 48283 - protein, 140 aa, Chlamydomonas reinhardtii
  misc_feature (1)..(1): Xaa can be any naturally occurring amino acid
  unsure (1)..(140): unsure at all Xaa locations
XMVWTPVNNKMFETFSYLPPLSDEQIAAQVDYIVANGWIPCLEFAESDKAYVSNESAIRFGSVSCLYYDNRYWTMWKLPMFGCRDPMQVLREIVACTKAFPDAYVRLVAFDNQKQVQIMGFLVQRPKSARDWQPANKRSV

SEQ ID NO: 48284 - protein, 151 aa, Geobacter metallireducens GS-15
MLNLRKKILVAIDGSPFSDKAAEEAVRMAAGNPSQFKSKIYAMLVLPNAPRSTFTDFVPPPPITETKEWDELRERVFYVIEKNAREADIPLEIKVVYGDPADELIDFAEKEQIDVIVIGSSGKGFLKRKLLGSVSHKVVKNSPCSVYIVRG

SEQ ID NO: 48285 - protein, 332 aa, Zea mays
MASAAATATMGTGKVVCVTGASGYIASWIVRLLLDRGYTVRATVRDTADPKKTLHLTALDGAKDRLHLFKASLLEEGSFDAAVHGCDTVFHTASPFYHNVKDAKAELLDPAVKGTLNVLGSCKKASIKKVVVTSSMAAVAYNRRPRTPEVTVDETWFSDPQICETNQQWYILSKTLAEEAAWKFSRDNGLEIVTINPAMVIGPLLQPTLNTSAEAILKLINGSSSTYPNFCFGWVNVKDVALAHILAYEVPSSNGRYCMVERVVHYSELVNIIRNMYPTLPLPDKCADDKPFVPPYQVSKEKIKSIGIELIPLETSVKETIESLKEKGFASF

SEQ ID NO: 48286 - protein, 547 aa, Vibrio parahaemolyticus RIMD 2210633
MAAKDVKFGNDARVKMLEGVNVLADAVKVTLGPKGRNVVLDKSFGAPTITKDGVSVAREIELEDKFQNMGAQMVKEVASKANDAAGDGTTTATVLAQAIVNEGLKAVAAGMNPMDLKRGIDKAVAAAVEQLKELSVECNDTKAIAQVGTISANSDASVGNIIAEAMERVGRDGVITVEEGQALQDELDVVEGMQFDRGYLSPYFINNQEAGSVELENPFILLVDKKISNIRELLPTLEAVAKASRPLLIIAEDVEGEALATLVVNNMRGIVKVAAVKAPGFGDRRKAMLQDIAILTGGTVISEEIGLELEKVTLEDLGQAKRVSITKENSTIIDGAGEEAMIQGRVAQIRQQIEDATSDYDKEKLQERVAKLAGGVAVIKVGAATEVEMKEKKDRVEDALHATRAAVEEGVVAGGGVALIRAASKIVDLEGDNEEQNVGIRVALRAMEAPIRQITKNAGDEDSVVANNVKAGEGSYGYNAATGEYGDMLEMGILDPTKVTRSALQFAASVAGLMITTEAMVTDLPQKESAGMPDMGGMGGMGGMGMM

SEQ ID NO: 48287 - protein, 505 aa, Bartonella quintana str. Toulouse
MGRDVIDKNTSVKCFFIRIFICFVLFLSGSVSFSWAGKENNTPLSIPDLAAELLETVVNISTAQTVDGTEQDEHILVPVIPEDSLLKEYFSDFFTPKDGQKDRQFQKVRSLGSGFVIDALRGLIVTNYHVIVDADEIEVNFTDGTKLEARLLGKDSKTDLALLQVDAGSKKLKAVRFGDSEKARIGDWVMAIGNPYGFGGSVTVGIISARNRDLNAGPYDNFIQTDAAINRGNSGGPLFDRNGEVIGINTAIISPSGGSIGIGFAIPSDMALSVINQLRSFGEIRRGWLAIRIQPVTEDIAKSLKLENAVGALVAGKMEQTGVDNSQLQIGDIILCFGKTKIKHARDLPRLVAESPAGKVVDITVFRNGQEKTVKVKLGRLIETDANENIVEESDDEKNGAGSKSVTMQFMGMTLSELTADLRQRYSITDKLQGLVVTSVAKNSAADKKRIRTGEVIVDINQSAVTTIYEAKKRVHKLREAGRKNALFIVARSDGELRFVTLSMD

SEQ ID NO: 48288 - protein, 96 aa, Vibrio parahaemolyticus RIMD 2210633
MNIRPLHDRVIVERKEVESKSAGGIVLTGSAAEKSTRGVVLAVGKGRILENGTVLPLDVKVGDTVIFAEGYGTKTEKIDGKEVLVMSENDIMAIVE

SEQ ID NO: 48289 - protein, 166 aa, Zea mays
  misc_feature (89)..(89): Xaa can be any naturally occurring amino acid
  misc_feature (99)..(99): Xaa can be any naturally occurring amino acid
  misc_feature (119)..(119): Xaa can be any naturally occurring amino acid
  misc_feature (145)..(145): Xaa can be any naturally occurring amino acid
  misc_feature (152)..(152): Xaa can be any naturally occurring amino acid
  unsure (1)..(166): unsure at all Xaa locations
MAPLGDGGAAAAAASNNLVVSIGEMLIDFFPDMAGLSLVESGGFVKAPGGEPANVACAIEKFGGSSAFFGKFCDYEIWHMLVNILKQTXLNAEGCLFNXHCSTELVYGTLKHDCEREFXFYRNSSDDMLLTEAELDLCLEQRARXVHYGCTXLISQRCRTGKMSSG

SEQ ID NO: 48290 - protein, 541 aa, Arabidopsis thaliana
MVGASSSYASPLCTWFVAACMSVSHGGGDSRQAVALQSGGRSRRRRQLSKCSVASGSASIQALVTSCLDFGPCTHYNNNNALSSLFGSNSVSLNRNQRRLNRAASSGGAMAVMEMEKEAAVNKKPPTEQRRVVVTGMGVETSLGHDPHTFYENLLQGNSGISQIENFDCSEFPTRIAGEIKSFSTEGWVAPKLSKRMDKFMLYLLTAGKKALADGGVTDEVMAEFDKTKCGVLIGSAMGGMKVFYDAIEALRISYKKMNPFCVPFATTNMGSAMLAMDLGWMGPNYSISTACATSNFCILNSANHIIKGEADVMLCGGSDAVIIPIGLGGFVACRALSQRNNDPTKASRPWDTNRDGFVMGEGAGVLLLEELEHAKKRGATIYAEFLGGSFTCDAYHMTEPHPDGAGVILCIERALASAGISKEQINYINAHATSTHAGDIKEYQALAHCFGQNPELKVNSTKSMIGHLLGVAGAVEAVATVQAIRTGWVHPNINLENPDSGVDTKLLVGPKKERLDIKAALSNSFGFGGHNSSIIFAPYK

SEQ ID NO: 48291 - protein, 319 aa, Staphylococcus aureus subsp. aureus MRSA252
MRRLFSIGEALIDFIPNITNANLKDVQTFTKQIGGAPCNVACTVQKLGQQAHMITQLGNDAFGDSIIETISSIGVDVSKVYRTNEANTALAFVSLTEAGERDFSFYRKPSADMLFEPSFVNDIDVNENDVVHFCSVDLVDSPMRDAHYQLITKTLNANGTVVFDPNVRLPLWDNAEDLRQTIHTFLPLAHIVKVSDEELEFITGIHDENEAIQSLFTGNVTVVIYTKGADGAAVYLKNGINHYHSGYKVKSVDTTGAGDAFIGAVISRILATDVLNLTQLFENEGEEILAFSNRVAAIVTTKYGAINSLPTLQEVEQAF

SEQ ID NO: 48292 - protein, 258 aa, Magnetospirillum magnetotacticum MS-1
MSPIDRIRSYADELTALRRDLHAHPELGFEEVRTSGIVAAQLERFGIEVHRGLGKTGVVGLLQGRPGPRRIGLRADMDALPITEETNLPYRSTAPGKMHACGHDGHTTMLLGAARYLAETRDFAGTAVFVFQPAEEGLGGARAMIADGLFRKFPVDEIYAIHNAPHGPHGVLQLRPGPIMAAADFFDIRITGRGAHAAMPHQGIDPIVVATALAQAMQSIVSRNSNPLKSAVVSITQIHAGAAYNVIPEGAHLAGTCG

SEQ ID NO: 48293 - protein, 448 aa, Ureaplasma parvum serovar 3 str. ATCC 700970
MSTKQNEPLFVNLEDLKQKVKLSFTEEFSFSYALSELEAGIFESRNLKGADAGDPEEILLNVVLDVSKKKRSRNEIKFNKLQNYFIHMNLREEHFSEIIDVLEAIGIRVPDYDLVMQSKSKTNTKKKDEYGIDDTLEISTSKIGFSSTTTEKVDDGIKAYLGVLGESKMLRSDEETEYAKMVISDDPSLVKIGKNQLYTSNMRLVTSIAKKYLNRGLDLEDLIQEGSSGLLKAIDKFDHEKGHKFSTYATWWIRQSITRAIADQARQIRIPVHMVETINKLTKAERNLIQELGRDPTAEEIAQAMNKVSQAKNQKEQLITAQKVVEIKKLNVDPVSLDKQIGHDEESQFSDFISDDEIISPEKYTEKKALNDQINEMFEKVLNDNEQRVIKMRYGLLPFERPYTLEEVGEYLGVTRERARQIESKAIRKLKHPSKTAKLRSFIGESEN

SEQ ID NO: 48294 - protein, 191 aa, Lycopersicon esculentum
AGINISGTNGEVMPGQWESQVGPSVGIEGGDHIWCARYLLERITEQAGVVLSLDPKPIEGDWNGAGCHTNYSTLSMRGEGGFEVIKKAILNLSLRHKEHISAYGEGNERRLTGKHETASIDQFSWGVANRGCSIRVGRDTEKEGKGYLEDRRPASNMDPIVVTGLLAETTILWEPTLEAEALAAQKISLKV

SEQ ID NO: 48295 - protein, 416 aa, Staphylococcus aureus subsp. aureus MRSA252
MNLNDTIFMFLCTLLVWLMTPGLSLFYGGLVQSKNALNTVMQSMAAIVLVTFVWITVGFTISFGEGNLWFGNWEYTFLNHVGFATQEDISPHIPLALFMLFQMMFCTIAISILSGSIAEKMKFIPYLLFVVIWTALVYSPVAHWVWGGGWINKLGVLDFAGGTVVHITSGVSGLVLAIMIGKGNKHSESTPHNLIITLIGGIFVWIGWYGFNVGSAFTFDQIAMLAFTNTVISASAGAIGWLILEYIFKKTTSLLGLLLGALAGLVVITPAAGYVTYLSATIMALIGGICCYIVINYIKVKLKYHDALDAFGIHGVGGIIGAVLTAFFQSKKANPDIENGFIYTGDVHIILVQILCVTAVVIFSIVMTFIIAKVIKLITPLSVTEQETNIGLDKIVHGEHAYFEGELNRFNKHIRY

SEQ ID NO: 48296 - protein, 402 aa, Triticum aestivum
  misc_feature (104)..(104): Xaa can be any naturally occurring amino acid
  misc_feature (133)..(133): Xaa can be any naturally occurring amino acid
  misc_feature (160)..(160): Xaa can be any naturally occurring amino acid
  unsure (1)..(402): unsure at all Xaa locations
MEVVSSSHSCLAFHQTPTSARRSLGTGLGPRHTKLARPRKSSVLCVGRASNPGDSGKLNVSRSFGVSDVDAALQGISKKVGQIEKVAIPGLPEGPDSSQISTGXWEWKPKLTVYYEKSGTKNSKAPAVLFLPXGFGVGTFHFEKQLMDLVKGVTLLNATXPFWGFLPNPARSPRLSKIFPWAGTFPLPSVVRKLTETVWQKISDPRSIQKILRQVYADHSTNVDKVFSRIIETTEHPAAAASFASIMFAPMGQISFQEALSRCQRQDIPISLMYGKEDPWVTPYWGIRVKQQVPEAPYYEISPAGHCPHDEVPEVINYLLRGWLKNVESEGSVDLPFLEDSSFQEHGVSKELEFVRTGSKKSVSVRLFGSQISLWSQLSSFLKRHASNCLNTIKLEREGGKE

SEQ ID NO: 48297 - protein, 512 aa, Ralstonia eutropha JMP134
MQGADTPAHARPPYRIDHQFDRGLVWFRRDLRSTDHAALHYALKHCREVWCVFVFDRDILDPLLARGLKGDRRVDFIRASLIELDATLRAAGGGLIVMNDSAASAIPALARELGVQAVFANHDYEPDAVARDAAVRDSLAGDARVLFTFKDQVIFERDEILTSQGKPFAVFTPYKNAWLKTIQPFDLRPYPIEPYLHALAPLPSKRLVPLPSLEDLGFAPSNLAEVAMPTGSSGGQALFEEFTSRMGDYGRRRDYPALRGPSYLSVHLRFGTVSIRTLARAAHGAVLRGGADSAGAATWLSELVWRDFYFMILHHHPRVAAGEAFHPAYDIIRWRDGETGDRYFESWRDAATGYPLVDAAMLQIRQSGYMHNRLRMVTASFLVKDLGVDWRRGEHYFADQLNDFDFAANNGGWQWAASTGCDAQPWFRIFNPVTQSEKFDPQGRFIRKYLPQLAALPDKYVHAPWTAPQDVLLAAGVRLGENYPRPLVQHDVARKETLERYAVVKEWRRPEG

SEQ ID NO: 48298 - protein, 1112 aa, GIBBERELLA ZEAE PH-1
MADIMIPNVRSPLSEASNRINSNHPPQEAHRYKPRHDRPPASTNNPPRASYGHPAAYFSGRPPPTQPQSTGPKPQGNPTLKPPTDMDDDRRHSGASYDSSGSGHSKKNYKTHIGPWQLGKTLGKGSSARVRLCRHNVTHQLAAVKIVNRRMAYLVQDSSLAALSKWDNNLPEQIDGEIRVPMAIEREVAILKLIEHPHIMKIYDIWENRSEVYLILEYIDQGDLFTFINMKGRLSEEVSVYFFRQIISAISYCHSFNICHRDLKPENILISANLKIKIADFGMAALHQTDTHRLNTACGSPHYAAPELLKNRQYRGDKADLWSMGVILFAMLTATLPFDDPDIRVMMSKTKKGQYEMPDYLSPEAEDLIRRMLQVNPDRRITLKEIWRHPLVKKYAYLDNLDDLNSQPPDIRKGFQYTPVPAQDVDSQLVRQLRSMWHTFSENDLKLKLTCDEPNDQKAFYWLLYQYREQQLEDFKPEIAHSTSDYHHMKPGTWKKHPQAASLSKKTTMALTPGNQKGFEVDQVRAVDVEHQLEPPPQDAYYHREARCRPCTAVDKARRMHATRATNEESTSRMSGSVPPYVTEQGSTYQLEMARPFTPDVSELPSTVLPKTKDRHEAQVNTKRASGQAMRIALGSRYASEIFKEELRHFSSNIAKDCDEAFKSSLIEEDSIAGSLTEPDRTQYESTPISFTIDAPDESAPDILDLTAKSFSNRPLPPLPTPLQGHDERSLAPTPIGSRPTTGDSHLEELRAEQVKVAQPVILTRHAERRVVSAPAYHQKSKMNPALPSINETGAISNDKARIVSAPPHTPTKRGVDRIRGIEYLSQVENSIRVVNSPGDESPVKMPKPLNVRKKFCDSEEEEEDVMVKRASKVESTHGRESVDWQDCNSYLTSSDGKRSDSTTTDAPSKKKTFNFNFWKSNKQRDSIMSITKEPDDKEERPSVELSVVGKTNTSTKVSQSRWHESNSGPVRNIEVKQNWLARLFRVKPATDHICMTISRRRARQEVTILLREWRKYGIRDIQVDKQRNIVFARVADKNFLNLKEVSFAAEVITVIEHGKKQPLSIIRFTQERGAASSFYRVVDTMRMMFETRALVISDKNKQKMMIKTLNS

SEQ ID NO: 48299 - protein, 422 aa, ASPERGILLUS NIDULANS FGSC A4
MSRMWEVDPETKAKLLQYSKVNGNDRCCDCGAPSPQWASPKFGTFICLNCAGTHRGLGVHISFVRSITMDAFKNSETQRMELGGNDPWKKFFDSHPITQSEGRTFEDSTIKERYEGEVGEEWKERLSAKVEGREFVPGQRPAQQTKKSAVDIGESRSSTPLSNAGLTRGSSASPALQEGPGGLENAGVSRKARNEAYFAKMGSENAMRSESLRPSEGGKFTGFGGGLPVEESPKPRAGAGIPALDDFQKDPVAALTKGFGWFTTTVGKSAKTVNDSFIQPTAKTLAESDFAAQARQHAAQLGQNIQVGARGAADSFNRFVEGSDVPSTRRARAEPERKDFWDDFASLGAQDNHRRNTSRSGALGTTAMKPGPGASSSATASTSVSSGSGSAPVGSGTGTGRGSSPTPASRKSQDEGAWDDNW

SEQ ID NO: 48300 - protein, 387 aa, Arabidopsis thaliana
MASSPLTANVQGTNASLRNRDEETADKQIQFNDQSFGGNDYAPKVRKPYTITKERERWTDEEHKKFVEALKLYGRAWRRIEEHVGSKTAVQIRSHAQKFFSKVAREATGGDGSSVEPIVIPPPRPKRKPAHPYPRKFGNEADQTSRSVSPSERDTQSPTSVLSTVGSEALCSLDSSSPNRSLSPVSSASPPAALTTTANAPEELETLKLELFPSERLLNRESSIKEPTKQSLKLFGKTVLVSDSGMSSSLTTSTYCKSPIQPLPRKLSSSKTLPIIRNSQEELLSCWIQVPLKQEDVENRCLDSGKAVQNEGSSTGSNTGSVDDTGHTEKTTEPETMLCQWEFKPSERSAFSELRRTNSESNSRGFGPYKKRKMVTEEEEHEIHLHL

SEQ ID NO: 48301 - protein, 364 aa, Cryptococcus neoformans var. neoformans B-3501A
MTFSFLEKGALQHILIALAWLAIARADSIDAIADSADSSCASGDVAGHYDLGLHIASVFVLLVASGLGVFLPVILGEKGSRSVWFGNTFFVLKYFGTGIIISLAFCHLLQESFKTFSNECIGELAYEPTAPAIAMGSMFVIWLIDFFGSRRLANRKALSSLDVHQSCEPCEPSSPDTKSPVADLCCDSGLKSVAETSDRANRRAHWDVQLLEGGIVFHSIMIGVSLGAQTDGFSATFAALIFHQLFEGLGLGARISLLIWPSGITSSVKKHLLCLAYTLTTPVGIAIGIGVHQSFNENGEAELLAIGVLNSVSAGILLYSGLCQLLYSEWVVGDMRDASNMRVAVALIALVSGLFGMSLIGKWT

SEQ ID NO: 48302 - protein, 343 aa, Haloarcula marismortui ATCC 43049
MSDELTTTVYYDEDADVSTINDETVAVLGYGSQGHAHALNLHESGVDVIVGLRQDSSSWADAEDAGLRVETPDVAAGEADRVVMLVPDTIQPAVYEAIEDELDAGDTLQFAHGFNIHYGQIEPPEDVDVTMVAPKSPGHLVRRTYERGEGTPGLIAVYQDATGNAKQESLAYAKGIGCTRAGVIETSFQEEVETDLFGEQAVLCGGVTEMVKAGFETLVDAGYAPEMAYFECLNELKLIVDLMYEGGHMGMWNSVSDTAEYGGLTRGEEVIDREGMEKILEEVQNGEFAREWINENQANRPAYKQYRDAEQNHQIEAVGENLRELFAWGEDADAETTEAPADD

SEQ ID NO: 48303 - protein, 357 aa, Cryptococcus neoformans var. neoformans B-3501A
MPTVLLTGITGFLSAHVAHTFLKHDWIVHGTLRSSSKVALVEVIPEYSPYISSGKLKLFVVGPLENADYTEAMKGVDAVVHTASPVEFGGENFRESHLKPALEGTRGVLRAVAKEKNVKSVVYTSTFGAVGDHRYHPTEIKGKVVTEDNWNPYTLEELDKMVESGESGNPTFPPGYLFYKGAKKYAELAAWECQKEAREQGAEWSLVTMNCVMIWGPPIQPLTSLSHGGMSTEFLWMLAGGKDAHIMDSLYPYYVDVRDAAEAHYQATVRRAQGRFIISAGPYDFQEFADMLRELYPEQKERFALGAPGKYMYRDPGVYVLTNEKSQRELGITYRPKQETLKDAFDRFFALEKQGLK

SEQ ID NO: 48304 - protein, 168 aa, Avena agadiriana
VMASSATTVAPFQGLKSTAGLPVSRRSSGSLGSVSNGGRIRCMQVWPIEGIKKFETLSYLPPLSEEALLKQIEFLIRSKWVPCLEFSKVGFIFREHGSTPGYYDGRYWTMWKLPMFGCTDASQVIKEVEEVKKEYPDAYVRIIGLDNIRQVQCVSFIAFKPPGCEESG

SEQ ID NO: 48305 - protein, 308 aa, Salmonella sp.
INGFGRIGRIVFRAAQKRSDIEIVAINDLLDAEYMAYMLKYDSTHGRFDGTVEVKDGHLIVNGKKIRVTAERDPANLKWNEVGVDVVAEATGIFLTDETARKHITAGAKKVVLTGPSKDNTPMFVKGANFDKYEGQDIVSNASCTTNCLAPLAKVINDNFGIIEGLMTTVHATTATQKTVDGPSHKDWRGGRGASQNIIPSSTGAAKAVGKVLPELNGKLTGMAFRVPTPNVSVVDLTVRLEKAATYEQIKAAVKAAAEGEMKGVLGYTEDDVVSTDFNGEVCTSVFDAKAGIALNDNFVKLVSWYDN

SEQ ID NO: 48306 - protein, 633 aa, Pseudomonas fluorescens PfO-1
MIFRRWDINTRTQLISLGPALLLTLLLISFFTFVRIQDLRQELNHTGQLIANQLAPATEYGVISGNNEVLESLLKATLATPNVRFLEVQDSANRILSYVEQPADAHNRPHQVEVFQAPVRLQRIALHNDFFQDGKSSPGVASEDYLGRVIVGLSNDAFSQRQQEILLKAGILALFALLFTFVLARRLAGSLSQPIRDIGNAVKAIQDGDYKTPLPIVDDTELGALSQHINNLAQALEQASREQHQAMAQLIQTREEAEKANNAKSDFLAMMSHELRTPMNGVLGMLQLLETTDMTEEQVEYAALASESTEHLLKVINDILDFSRIERSELELEHIPFNLAEVIGACAQSFQHSAAQRGLALQLRIPEDLRDLQVQGDPTRIRQILVNLVGNALKFTEQGRVSIEAQWQSLDHELLWFTCAVRDSGIGISPESLELMFNAFQQADSSISRRYGGTGLGLPIARTLAERMGGTLRAQSEEGRGSVFTLEIPLALYKQALPALAAPRTLNGASHGEGRNVLLVEDNPVNQTVIEAMLRSLGFTVSVATDGVQAVRSAGDNRFEAILMDCRLPLIDGYEATRRIRQLPGCGQVPIIALTANALQGDRENCLAAGMNDYLAKPFKHNDLQQILQRWVQ

SEQ ID NO: 48307 - protein, 168 aa, Avena strigosa
VMASSATSVAPFQGLKSTAGLPVSRRSNAGLGSVSNGGRIRCMQVWPIEGIKKFETLSYLPPLSEEALLKQIDFLIRSKWVPCLEFSKVGFIFREHGSTPGYYDGRYWTMWKLPMFGCTDASQVIKEVEDVKKKYPDAYVRIIGFVNIRQVQCVSFIAFKPPGCEESG

SEQ ID NO: 48308 - protein, 308 aa, Salmonella typhimurium
INGFGRIGRIVFRAAQKRSDIEIVAINDLLDAEYMAYMLKYDSTHGRFDGTVEVKDGHLIVNGKKIRVTAERDPANLKWDEVGVDVVAEATGIFLTDETARKHITTGAKKVVLTGPSKDNTPMFVKGANFDKYEGQDIVSNASCTTNCLAPLAKVINDNFGIIEGLMTTVHATTATQKTVDGPSHKDWRGGRGASQNIIPSSTGAAKAVGKVLPELNGKLTGMAFRVPTPNVSVVDLTVRLEKAATYEQIKAAVKAAAEGEMKGVLGYTEDDVVSTDFNGEVCTSVFDAKAGIALNDNFVKLVSWYDN

SEQ ID NO: 48309 - protein, 168 aa, Avena clauda
VMASSATTVAPFQGLKSTAGLPVSRRSSASLGSVSNGGRIRCMQVWPIEGIKKFETLSYLPPLSEEALLKQIDFLIRSKWVPCLEFSKVGFIFREHGSTPGYYDGRYWTMWKLPMFGCTDASQVIKEVEEVKKEYPDAYVRIIGFDNIRQVQCVSFIAFKPPGCEESG

SEQ ID NO: 48310 - protein, 663 aa, Campylobacter jejuni subsp. jejuni NCTC 11168
MNIQYSDALVIGGGLAGLRAAIEVAKSGQSVTLLSICPVKRSHSAAVQGGMQASLANGAKGEGDNEDLHFADTVKGSDWGCDQEVARMFAQTAPKAVRELAAWGVPWTRVTKGPRTVVINAQKTVIEEKEEAHGLINARDFGGTKKWRTCYIADATGHCMLYGVANEAIKHQVKIIDRMEAVRIIHDGKKCLGVIARDLTNGQLIAYIARGTMIATGGYGRIYKQTTNAVICEGTGAAIALETGLCRLSNMEAVQFHPTPIVPSGILLTEGCRGDGGILRDVDGYRFMPDYEPEKKELASRDVVSRRMMEHIRKGKGVKSPYGDHLWLDISILGRAHVEKNLRDVQDICKTFNGIDPADEGPKGWAPVLPMQHYSMGGIRTKPTGESQWLNGLFACGEAACWDMHGFNRLGGNSCAETVVAGMIVGDYFADYCKNNGEVIDTNVVKDFLTKEYQYLKSLVDKEGKHNVFEIKNRMKEIMWDKVAIFRTGEGLKEAVDELEKLYKDSQDVKVHCKELDCANPELEEAYRVPRMLKIALCVAYGALLRTESRGAHYREDYPKRDDLNWMKRTNTFWVEGETLPRIEYEELDIMKMEIPPAFRGYGAKGNIIENPLSEKRQAEVDAIREKMEAEGKGRYEIQNALMPYELQAKYKAPNQRIGVDYE

SEQ ID NO: 48311 - protein, 504 aa, Solanum tuberosum
MSSRGGGIAESPYLRNYRVGKTLGHGSFGKVKIAEHLLTGHKVAIKILNRRKMKTPDMEEKLRREIKICRLFVHPHVIRLYEVIETPTDIYVVMEYVKSGELFDYIVEKGRLQEDEARKIFQQIIAGVEYCHKNMVVHRDLKPENLLLDARRNVKIADFGLGNIMRDGHFLKTSCGSPNYAAPEVVSGKLYAGPEVDVWSCGVILYALLCGTLPFDDENIPNLFKKIKSGVYTLPSHLSPLARDLIPRMLIVDPMKRISVPDIRQHQWFKIHLPRYLAVPPPDARQHLKKLDEEILQQVSRMGLDRDQLLDSLQKRIQDDATVAYYLLYDNRSMASSGYLGAEFQESVDCYSPGLFPNLDLQLSTGNGVSEESLRRPFRKEKMWLVGLQSPANPKEIMNQVLGTLLELNVRWKKIGHYNMKCLWCHDLHLHSMANNHMNDDDHFISNATAISTHLQPQPTVKFEMQLYKTEDEKYLLDLQRISGPQFLFLDFCAGFIRQLEGPQ

SEQ ID NO: 48312 - protein, 334 aa, Nostoc punctiforme PCC 73102
MSKNLLEQLREVTVVVADTGDIQAIEKFKPQDATTNPSLITAAAQMPEYQGIVDQTLLQAKKDAGDGATQAQIVSLAFDRLAVAFGLKILQIIPGRVSTEVDARLSYDTEATLTKARDLIAQYKAAGIGRDRVLIKIASTWEGIRAAEILEKEGIHCNLTLLFGLHQAIACAEAGVTLISPFVGRILDWYKKDTGRDSYPATEDPGVLSVTKIYNYYKKFGYKTEVMGASFRNLGEITELAGSDLLTISPSLLAELQSTVAELPRKLDPAKAASLSIEKISIDKASYDKMHAADRMATDKLDEGIKGFTKALEDLEKLLADRLVRLEGEVVASH

SEQ ID NO: 48313 - protein, 348 aa, Solanum tuberosum
ADFGLGNIMRDGHFLKTSCGSPNYAAPEVVSGKLYAGPEVDVWSCGVILYALLCGTLPFDDENIPNLFKKIKSGVYTLPSHLSPLARDLIPRMLIVDPMKRISVPDIRQHQWFKIHLPRYLAVPPPVARQHLKKLDEEILQQVSRMGLDRDQLLDSLQKRIQDDATVAYYLLYDNRSMASSGYLGDEFQESVDCYSPGLFPNLDLQLSTGNGVSEESLRRPFRKEKMWLVGLQSPANPKEIMNQVLGTLLELNVRWKKIGHYNMKCLWCHDLHLHSMANNHMNDDDHFISNATAISTHLQPQPTVKFEMQLYKTEDEKYLLDLQRISGPQFLFLDFCAGFIRQLEGPQ

SEQ ID NO: 48314 - protein, 474 aa, Ehrlichia ruminantium str. Welgevonden
MIKKYRKKCMQNYDIVVIGGGPGGYKCAIRSAQLGLKVACVDKNEILGGTCLRVGCIPSKALLHFSHEYYHIKNHLDEVGITCNSLSFNLDKIMSFKNKNITELSNGINYLFASNKIDRLCGVGKIRSINSNNFDITVTGNNGEEKITAKYVVIATGSEVASFPGIEIDEKNVVSSTAALSFKEVPKKLVVVGAGAIGLEMSSVWSRFGSEVTVVEFFDKIAPSMDIDISKALLASLKKQGINFKLSTKVTSIDKSSDNLTIHLESVKDGKSEIIEAEKVLISIGRMPYTDGLIDQNCIECDSRGFIKVNNKYETNIPGIFAIGDVIGGAMLAHKAEEEGIAVAELIAGNIPHVDYDIIPSVIYTHPAVASIGKTEESLKNINYAYNVGKSNFSANSRSKITNNGEGFVKVLTSKENNAILGVHIIGAYADTIINEAAIAMAYRASSEDVFRISHSHPDVNEAFKDACEAAYLK

SEQ ID NO: 48315 - protein, 459 aa, Rickettsia sibirica 246
MQEFDLVVIGSGPAGYTGSIRAAQLGMKVACIEKSDTLGGTCLNIGCIPSKVLLNSSEKYEAALKHFENIGIIADVKLDLQKMLANKDKVVLDLTQGIESLFAKNKVTRIKGEAKISSSNIVEVNKEQIKAKNILITTGSSVIEIPNIKIDEEFIVSSTGALKLSKVPENLIVVGGGYIGLELGSVWRRLGAKVTVIEYAPSIVPMLDKEIATQFMKLQQKQGIEFKLNTKVLSAEVKSGKVNLTIEEDGKSSVVTSNVVLMAVGRKAYTQNLGLESVGIITDKQGSIEINDRFQTAISNIYAVGDVVKGAMLAHKAEEEAVAAVEIMAGQAGHVNYNLIPSVIYTYPEVASVGETEEQLKEKGINYKVGKFPFLANSRARAIGSTEGMVKILADSKTDRVLGAHIIGADAGTLIAALTAYMEFGAASEDIARTCHAHPTLSEAIKEAALSVDKRTINM

SEQ ID NO: 48316 - protein, 178 aa, Bacillus cereus G9241
MSEKTYELATFAGGCFWCMVKPFDELPGIHKVLSGYAGGHVENPTYEQVKAGTSGHLEVVQITFDPSIFPYKKLLDLYWPQIDPTDDGGQFFDRGPSYRTAIFYHNETQKELAEKSKQALAESGMFKEPIVTEIRPAAPFYEAEEYHQHFYKKNPEKYATEQKESGREDFIKENWQKK

SEQ ID NO: 48317 - protein, 176 aa, Triticum aestivum
MANQGSKKIVERNRKRMDLLWRIILVSNVIYIVVRMAVMYSSFTWKHWIGLVVTSAAYFLSYKQLASMTKPEYSDADNRELLSSGYDLATGGLSEYIEDVIYITAFVQLTSIISGKFWWTYLVIPAFGGYKIFFLLKGTFFGGGSEGEVEDEKSRKKREKMEKKASRGKMVKTRTR

SEQ ID NO: 48318 - protein, 335 aa, Bacillus cereus G9241
MKTYYEKDANVDLLQGKTVAVVGYGSQGHAQAQNLRDSGVEVVVGVRPGKSYEVAKADGFEVMSVSEAVRTAQVVQMLLPDEQQAHVYKAEVEENLREGQMLLFSHGFNIHFGQINPPSYVDVAMVAPKSPGHLVRRVFQEGNGVPALVAVHQDATGTALHVALAYAKGVGCTRAGVIETTFQEETETDLFGEQAVLCGGVTALVKAGFETLTEGGYRPEIAYFECLHELKLIVDLMYEGGLTNMRHSISDTAEFGDYVTGSRIVTDETKKEMKRVLTEIQQGEFAKKWILENQAGRPTYNAMKKAEQNHGLEKVGAELREMMSWIHAPKELVKK

SEQ ID NO: 48319 - protein, 347 aa, Thermoanaerobacter tengcongensis
MDGLMTAVVKQYHKEGADIVKKEIPKIGPDEVLIKVKATSICGTDVHIYVWNEWAKSRIKPPKTMGHEFVGEVVEIGENVTSVKVGDLVSAETHIVCGKCRACRTGNAHICENTLILGVDTDGAFAEYIKVPESNVWINDKNIPLEILSIQEPLGNAVHTVFSGDVVGKSVAVIGCGPIGMMAIPLLKRTGAAAIFAIEPADYRRELAHKLGATRVINPLREDVVSIIKSETEGYGADVVLDFSGNPTAIRQGLEYIAKGGRMSILGLPDNEVPIDITNNVVFKGITIQGITGRRMYDTWYTVKGLLKSGLAEDLKPIITHTFPLTEYQKGMELMIKGQCGKVVLYP

SEQ ID NO: 48320 - protein, 359 aa, Glycine max
MDRPATGPGVDMPIMHDSDRYDFVRDIGSGNFGVARLMRDKQTQELVAVKYIERGDKIDENVKREIINHRSLRHPNIIRFKEVILTPTHLAIVMEYASGGELFEKICNAGHFNEDEARFFFQQLISGVSYCHAMEVCHRDLKLENTLLDGSPALHLKICDFGYSKSSVLHSQPKSTVGTPAYIAPEVLLKQEYDGKIADVWSCGVTLFVMLVGSYPFEDPNDPKDFRKTIQRVLSVQYSIPDNVQVSPECRHLISRIFVFDPAERITIPEILQNEWFLKNLPPYLMDEKIMGNQFVESDQPMQSIDTIMQIISEATIPAAGTYSLDQFMADNIIDDDMDELDSDFELDVDSSGEIVYAI

SEQ ID NO: 48321 - protein, 547 aa, Myxococcus xanthus
MAAKEIFFHQSAREAILRGVRTLSDAVAVTLGPKGRNVVIEKSFGSPTITKDGVTVAKEIDLENKFENMGAQMVKEVASKTSDKAGDGTTTATVLARAIYEEGLKLVAAGHSPMDLKRGIDKAVEVVVGELKSLSKPTADKKAITQVGTISANGDETIGAIIADAMEKVGKEGVITVEEAKGLETTLDVVEGMQFDRGYVSPYFVTNRERMEAVLEDPYILISEKKVSSMQDMIPLLEQVARSGKPLIIIADDIEGEALATLVVNKIRGVLNVCAVKAPGFGDRRKEMLQDIAVLTGGTVVSEDLGHKFETLTLTDLGRAKRVTVDKDNTTVVDGVGTKAAIEGRIKLIRTQIDSVTSDYDREKLQERLAKLVGGVAVINVGAATETEMKEKKARVEDALHATRAAVEEGIVPGGGVAYLRALPALEKLKPGGEQDFGVAIIRRALQEPLRKIASNAGVEGAVVINKVREGTGAFGYNARTEVYEDLEKAGVIDPTKVERTALQNAASVASLLLTTEAMVAERPKGKAKGGGAGAGMPDYGGDDMDY

SEQ ID NO: 48322 - protein, 557 aa, Rubrivivax gelatinosus PM1
MTKFVFVTGGVVSSLGKGVAAASLAALLESRGLKVTLIKLDPYLNVDPGTMSPTQHGEVFVTDDGAETDLDLGHYERFIDTRMRRANNFTAGQVYKTVLEKERRGDYLGKTVQVIPHVTNEIQEFVKRGAGFGTPDAVDVAIVEIGGTVGDIESLPFLEAVRQLSLHLGPNNSAFVHLTYVPWIAAAGELKTKPTQHTVQKLREIGIQPDALLCRADRRVPAEECAKISLFTNVAKWGVISVWDVDTIYKVPRVLHEQGLDALVCDKLRIPTPPANLTRWDNLVQALATPASQVRIAMVGKYTELSDSYKSLNEALRHAGIHNNAGVQVTYVDAETLSPDNVSQLDAFDAILVPGGFGKRGIEGKILAARRAREQRIPYLGICLGMQVATIEYARHVAGLAGANSTEFEPDTPHPVIAMIDEWQDRDGTIQRRDANSDLGGTMRLGAQSSDVVPGTIAHSIYGDVVTERHRHRYEANEHYLQRLRDAGLVISAITQREKLTEIVELPQAVHPWFVGVQFHPEFKSTPWGGHPLFKAFIAAALGDSGKVRPAQLKRAA

SEQ ID NO: 48323 - protein, 308 aa, Zea mays
  misc_feature (188)..(188): Xaa can be any naturally occurring amino acid
  misc_feature (221)..(221): Xaa can be any naturally occurring amino acid
  unsure (1)..(308): unsure at all Xaa locations
MAENPAPSSPLVTSPDAAAPPLPAEFTKLTFRSLYIRRTGPGSREMTVDGRPSDQLGRRFVSDFPIYDGRGSGARLVARLQGVTVQIGSSHQLVSIVFEAERLKGSTLLTNGVITDGSDEWAIYGGTGVFAMATGVIRRRFLAGSNDGNSDELTSIEVFCPAFGSAQQQPNKQDSVSVTRIGVWGGKXGRVPRRDIPDDGAHPQRLHSITRSKLVFAVDSXIEFTYRSLRSPEGHFRDVSGTYGTFEGATTLTSIRILTSSRAWGPWGVEDGTRFCITAPIGSSIVGFYGRSTSRLVAAIGVYLRQQL

SEQ ID NO: 48324 - protein, 729 aa, GIBBERELLA ZEAE PH-1
MAPSAIAPETQYDHTALSNVVKLIKNDDARTIDLALRQFRCLIADLCEQFKGGHPGFRGAMGMAAIGLALWKYIMQYSPNDPDYFNRDRFVLSNGHTCLFQYTFLHLVGYKAMTFDHLKSYHSSNYDSLAPGHPEIEHEGIEVTTGPLGQGIANAVGLAMATKNLAATYNKPNFELVNNMTYCMIGDACLQEGVALEAIQLAGHWKLNNLVVMYDNNQITCDGSVDLCNTEDVNAKMRACGWDVIEVEDGCYDVEGIVKALIKAKASTDKPTFINIHTVIGVGSKVAGDAKAHGVAFSPEGVKAVKEHFGMDTDKQYVVSDEVYTFFRDRKARGDRLVEDWNILVDCYAKEYPELHQEFIKRVEGRFTEDWRSIIPAKESLPTTPTPSRKSAGIICNPLAAKLKNFMVGTADLSPSVNMIWKDKVDFQHPELRTTCGINGDYSGRYIHWGIREHAMASISNGLAAYSKGTILPVTSSFFMFYIYAAPGVRMGALQNLQAIHIATHDSIGTGEDGPTHQPIALPALYRSMPNILYIRPCDTEETAGAFITALEAKDTPSIISLSRQNLEQYPQHSSREGTQKGAYVFIEDEDADVTLIGVGAEMVFAVKTREVLKNKFGIRARIVSFPCQRLFNSQPLEYKRQVLQYRSNAPRVVIEAYAVNGWERYADAGYSMSTFGKSLPGKDAYKYFGFDETVIAPEVARLVEEVKEEGIESLRGEFRDLNNVTHEH

SEQ ID NO: 48325 - protein, 404 aa, Zea mays
MAKGRAHPSKRPTHQLILAAVLSVSVLLPLLVPAAATVAVAVAVAEGGGKQLAVGKDEGKLVAEGDAGGGGLVEENEFAGGFGSLDSMLQWAIGNSDPEKLKEGAVDVQKLSADELLERRQEIKELMEKLKMPSDADLMKIAIDDLNNSSISLEDRQRALQELLVLVEPIDNANDLEKLGGLLPVIQELNNANEEIRTTSAWVLGTASQNNELVQNQILGYGALARLVKMGYSTSTEEAAKALYAISSLIRNNVNGQEAFHSENGSAMLQHILVSNNIDVRLQKKAVFLVTDLADFQLNSGIAQLPFLSDRLFLKSIVDMLSRFDLDLHEKVLLAIKSLLKLSSTDVEDFEFYDLDSVLLRLGVQLEDLTPEDQKEFAVEVDALRREVQTLFQQKLKQGKATST

SEQ ID NO: 48326 - protein, 648 aa, Arabidopsis thaliana
MNQIKNKTLPEMTTEQALLSMEALPLGFRFRPTDEELINHYLRLKINGRDLEVRVIPEIDVCKWEPWDLPGLSVIKTDDQEWFFFCPRDRKYPSGHRSNRATDIGYWKATGKDRTIKSKKMIIGMKKTLVFYRGRAPRGERTNWIMHEYRATDKELDGTGPGQNPYVLCRLFHKPSDSCDPAHCEEIEKVNFTPTTTTRCSPDDTSSEMVQETATSGVHALDRSDDTERCLSDKGNNDVKPDVSVINNTSVNHAETSRAKDRNLGKTLVEENPLLRDVPTLHGPILSEKSYYPGQSSIGFATSHMDSMYSSDFGNCDYGLHFQDGASEQDASLTDVLDEVFHNHNESSNDRKDFVLPNMMHWPGNTRLLSTEYPFLKDSVAFVDGSAEVSGSQQFVPDILASRWVSEQNVDSKEAVEILSSTGSSRTLTPLHNNVFGQYASSSYAAIDPFNYNVNQPEQSSFEQSHVDRNISPSNIFEFKARSRENQRDLDSVVDQGTAPRRIRLQIEQPLTPVTNKKERDADNYEEEDEVQSAMSKVVEEEPANLSAQGTAQRRIRLQTRLRKPLITLNNTKRNSNGREGEASHRKEKEDISSSSSWQKQKKSLVQFSSVVIIVAVIVVLVEIWKESRDAKCSFLFHQLDSFKGMFT

SEQ ID NO: 48327 - protein, 495 aa, Nostoc sp. PCC 7120
MTKNTVRTYIKQTWKTLTRSHQHLLESAQDTKLEHQPNTPWIIYISPQEDCNTVQSVLERSLSAKEMQQIEIRTLPSEVEAIQEHGLLYLPGAYVVPGGRFNEMYGWDSYFILLGLLQDEEWELAQSQVDQLLYQVQHYGTILNANRTYMLTRSQPPVLSMMVLALFQHTQDQAWLKSTLPLLEQFYYYWVVPPHLNSATGLSRYYALGEGAAPEVLFSELDETGRSHYERVKEYYKTFEIDDYDVSLFYDSERDELTDLFYKGDRSMRESGFDITNRFGPFSVDIVHYAPVCLNSLLYQMEQDLAQIHKILDNPELAEQWSDRATLRRERINQYLWDEEKGIYLDYHFYSGKRRHYEFATTFYPLWTGLSSPEQAQRIVENLSLFTAPGGIFTSTHVTGNQWDAPFGWAPLTLIAVQGLYRYGYRKEGDDIAHKFLTMAIQEFTKYGFFVEKYDVERCSAQVSDEICFGYSSNEIGFGWTNGVILELLANLDDS

SEQ ID NO: 48328 - protein, 1065 aa, Cryptococcus neoformans var. neoformans B-3501A
MSRVPSGSQQPQYTQQPLYHPSSVHSQSTPIQQTHQQYHPHTGQPMTFQGDAHAYSYDRQSQINTWQANPGAAGSMEYHSAVAGSSRGADPYQPYSQSHRSSPSQSVTASRTQPASAQQYTPWAPVQTSATTPSSRGGGVKLEDLMSSDSRAGGKNQPLSGIPLSVSASFDTRSQFSAGPQGASAEKEKDKERDKATQQQGPSEFIKKLYKMLEEEQAQYGNSRTKKGEKGKRGSVGWGANGTSFVVWDMNDFTTKILPQTFRHSNFSSFVRQLNKYGFSKIKHVDAGTGSIKENIWEFQHPNFQAGGKSDLESIKRKPVAPKKANNQEGDENSPRHIGLSNEDQTRMHLMEDRINMLEDALAKSRSEADEARMREMAMMGLVRDMIGHIAASESEAIGSPAATTGHSPRVLHLLKSLDNLARAYPPEMYHSNIARQPTTMPYTPAQPQSHQSFLNAAYNPAFSGNSVGGAAQAQASPHTDGTGSRGSFSGPSTGEIKPPASSSRLRAASNAGAAPSGSVNASVPLASQPTGNPPAGPVARAEDPAEDVIEIPNQMQDMYGGESVGIAPLFVETPAWLTEGTTVPLTMYRKQSDGQVLKAVYQAFAAGGKLPAGEGQDEDGNAIASGSSTSAAEIMAGSSQMGLQQSYGAGSSTSTGIPLPMEGSPSSESSSRKGKGKKSRGTSLKEQRESKLKPHWAQTPRILVVEDDIVYRTLSKKFLQKFGCETETVENAQGAVDKMNGTKYDLVLMDIFFGPNMDGRKATSLIRQFNNYTPIISMTSNAQPQDVDSYYQSGMNDILAKPFTKNHLFTILDKHLVHLRHAQLYERLIPLGVGVPPLSDQHVQEALAVSAANLQNTNGQLQLENGPTAETQNEQQDSNGELELGIRNPLAGSGWSDEAYQLVLAQFLQTGVMPDITTISAVSSSPNPNGIDGTIGTSIVFGESSGFSRKRSIEAISDDNWDGQAQTSASVQAQAQAQAQAQAQAQAQAQAQAQAQAQAQTQAQVQNTIMQGDQQQGMSLQMPMNVGMGMEVNMGNMPESGMMNQDISNGSDGREAKRARGMAG

SEQ ID NO: 48329 - protein, 465 aa, Burkholderia fungorum LB400
MTQLDQLFDADRAHFMHPSTHAHDHASGALPGRIVTGAQGIRIEDHQGKSYIDAFAGLYCVNIGYGRTEVAEAIYEQAKKLAYYHTYVGHSTDTIIELSSRIIEWAPQGMKKVYYGMSGSDANETQIKLVWYYNNVKGRPDKKKIISRQRGYHGSGIVTGSLTGLASFHQYFDLPIGRVKHTVCPHWYRHAPAGMNEAQFVAYCVEELEKLIAQEGADTIAAFIAEPVMGTGGILPPPAGYWPAIQQVLKKHDILLICDEVVCGFGRLGSKMGAQHYGIAPDLITVAKGLTSAYAPLSGVIVSEGVWDVIDKASQEFGAMGHGWTYSGHPICAAAALANLDILERENLTQNAAQTGAYLLEQLHAAFDSHPLVGEVRGAGMLAALEFMADKDGRQPFDAALKVGPRVSAAALQRGLIARAMPHGDILGFAPPLITSRSEVDEIVKLAREAVDEVASAVLSPAASA

SEQ ID NO: 48330 - protein, 507 aa, Burkholderia fungorum LB400
MLLGHPVLFKSLCYVDGRWVHSASAASVAVHNPADQQVLGHVPMLDAAQITEAVGAAQRAFSTWRWLPVSQRSALLLRWHELILRHQHDLAAILSLEQGKPLAEARGEIAYGASFVEWFAHEVRRLNGRTIPTHIDGAHLGTMIEPVGVAALITPWNFPCAMITRKAAAALAAGCTVVVKPAHETPFSALALAQLAEEAGFPAGVFNVVLGEPQMAMERLVGDSRVRSVSFTGSTRVGALVMQAAARAGIKKTALELGGNAPFIVTGDADLDQAVRVAVAAKFQTSGQDCCAANRIFVARPLYEAFVAQYSDAVKALKVGAAFEANVDVGPLMHQAAFDSTAQRVADAKARGARITAGGGAHERGGWFFEPTVVADAAPGMRIYDEENFAPISAVSPFDSLDEVVERANDTEYGLAAYVCARDLNTVFQLIRRLDFAMVSVNGAKFTGAPIPFGGIKSSGLGREGGAEGFEPFVETRYFCLGQLGLPVTESLPAHRLAAATGAAATA

SEQ ID NO: 48331 - protein, 261 aa, Zea mays
  misc_feature (176)..(176): Xaa can be any naturally occurring amino acid
  unsure (1)..(261): unsure at all Xaa locations
MKIQCDACEGAAATVVCCADEAALCARCDVEIHAANKLASKHQRLPLEALSAKLPRCDVCQEKAAFIFCVEDRALFCQDCDEPIHVPGTLSGNHQRYLATGIRVGLASASACSDACDAHDSDHHAPPKATIEPPHAAVSAAVQQVPSPPQFLPQGWAVDELLQFSDYESSDKARRXQAPPTLGFKELEWFADIDLFHEQAPKASRTLAEVPELFGYQAANDAAYYRPAKAAGGGGAGVRQSKKARIEVTDDEDYLIVPDLG

SEQ ID NO: 48332 - protein, 356 aa, Arabidopsis thaliana
MSDISQDLLEEILSRVPITSLRAVKSTCKRWKDLLNDPSFSKKYGGKRDNEFLAIMTSGSRASLMSVNLHGPRDNKDLEDPFIKQIGELNQDQIFKVFHCDGLLLCITNEDNTRLVVWNPYLAQTRCIQPIDKFYIYDWYCLGYDKDKNHKILVVYSPMFGRIEYEIYSFLSKSWIVLSFPTDWQISRDECLSLKGNTYFIAYKKMEVEEVGFQEFLLCFDFTNERFGPLLPLPFQCYNQTSLVLSTVQEEQLAVLCKRCDAYETKIWITTKIEPNAVSWSYFLKFDFKVDISGGSFFVDVEEKVAVLFCINREKEKGINNKTYMIGEDGYYKEVDLGESNWCPSMCSYVPSCVQV

SEQ ID NO: 48333 - protein, 922 aa, Pseudomonas fluorescens PfO-1
MQEKGVLKKLGIKGRVLLLTLLPTSLMALVLGGYFTWTQQSDLQTQLMQRGEMIAEQLAPLVAPAMGHGDAELLERIATQSLEQPDVRAVTFLAPDRSPLAHAGPTMLNQAPSGDSAHLLRRSGNDATRYLLPVFGKHRNLAGELIPQESDRLLGWVELELSHNGMLLRGYRSLFASLLLIGAGLAGAALLALRMGRTINRPLSQIKQAVAQLKDGHLETRLPPLGSQELDELASGINRMAGTLQNAREELQHSVDQATEDVRQNLETIEIQNIELDLARKEALEASRIKSEFLANMSHEIRTPLNGILGFTHLLQKSELTPRQLDYLGTIEKSADSLLGIINEILDFSKIEAGKLVLDHIPFNLRDLLQDTLTILAPAAHAKQLELVSLVYRDTPLSLVGDPLRLKQILTNLVSNAIKFTREGTIVARAMLEEENDDSVQLRISIQDTGIGLSNQDVRALFQAFSQADNSLSRQPGGTGLGLVISKRLIEQMGGEIGVDSTPGEGSEFWISLNLPKTRDDAEDLPAAPLLGRRVAVLENHELARQALQHQLEDCGLDVTPFNTLESLTNGVTGAHQTDQAIDLAVLGITSNDMPPERLNQHIWDLEHLGCRVLVLCPTTELTLYHLSVPNPHSQLQSKPACTRKLRRALSDMVNPRQSRSEPGEPLSSRAPKVLCVDDNPANLLLVQTLLEDMGAKVLAVESGYAAVKAVQSESFDLVLMDVQMPGMDGRQSTETIRQWESERHCTPLPIVALTAHAMANEKRALLQSGMDDYLTKPISERQLAQVVLKWTGLALRNQAPDRGGESLLGNQELPILDHEEGLRLAAGKADLAADMLAMLLASLEADREAIRTARDHQDQNALLERVHRLHGATRYCGVPQLRAACQRSETLLKQDDPKASAALDELERAINRLAAQAKISA

SEQ ID NO: 48334 - protein, 625 aa, Musa acuminata
MDGCDCIEPQWPADELLIKYQYISDFFIALAYFSIPLELIYFVKKSSFFPYRWVLIQFGAFIVLCGATHLINLWTFALHSRTLAIVMTVAKVSTAVVSCATALMLVHIIPDLLSVKTRELFLKNKAEELDREMGLIRTQEETEGNVRMLTHEIRSTLDRDTVLKTTLVELGRTLDLKDCMLWMPSHSGTSLQLSHTLHHQIPTGSAVPINLPVVNQIFSSNHAMIIPHTCRLARIWPLSVRHVPPEVAAVRVPLLHLSNFQISDWSELSTKSYAVMVLILPSDSGRKWHVHELELVEVVADQVAVALSHAAILAESMRARDLLTEQNVALYLARQEAELAIRARNDFLAVMNHEMQTPLHATITLSSLLLETELSPEQRSMVETVLKSSSLLATLINDILDLSRLEDGRLELEIGDFNLHSVFREVMNFIKPIRAVKKLQVSLMLSPDLPLYAIGDEKRLMQIMLNVAANAVRFTKEGDISLTASVARTDYLREFRALDFYPVASDGHFYLRVTIKDTGCGISHQDLPNLFTKFSQSQNVSSQGYSGNGLGLAICERYVSLMQGHIWVESDGIGKGCTATFVVRLRLCENPDGSQQKILPLPWKKQTQKFSSSRGMPTDPGGLFD

SEQ ID NO: 48335 - protein, 329 aa, Pseudomonas fluorescens PfO-1
MRTIVFSSQSYDRDSFLAADCPAGIELHFQPARLSLDTAALAEHHEVVCAFINDDLSAPVLERLAAGGTRLIALRSAGYNHVDLAVAKRLELAVVRVPAYSPHAVAEHAVALILALNRRLHRAYNRTREGDFSLHGLTGFDLVGKTVGIVGTGQIGATFAKIMHGFGCELLAYDPYPNPAVEALGARYLSLPDLLAQSRIISLHCPLNEQSRHLINRDSLAHMQPGAMLINTGRGGLVDTPALIDALKDGQLGYLGLDVYEEEAQLFFEDRSDLPLQDDVLARLLTFPNVIVTAHQAFLTHEALGAIAATTLHNIATWATGTPQNQVEG

SEQ ID NO: 48336 - protein, 516 aa, Solanum tuberosum
MENGTKREGLGKLTVSSSLQVEQPLAPSKLWKIIVVASIAAGVQFGWALQLSLLTPYVQLLGIPHKFASFIWLCGPISGMIVQPVVGYYSDNCSSRFGRRRPFIAAGAALVMIAVFLIGFAADLGHASGDTLGKGFKPRAIAVFVVGFWILDVANNMLQGPCRALLADLSGGKSGRMRTANAFFSFFMAVGNILGYAAGSYSHLFKVFPFSKTKACDMYCANLKSCFFIAIFLLLSLTTIALTLVRENELPEKDEQEIDEKLAGAGKSKVPFFGEIFGALKELPRPMWILLLVTCLNWIAWFPFFLYDTDWMAKEVFGGQVGDARLYDLGVRAGAMGLLLQSVVLGFMSLGVEFLGKKIGGAKRLWGILNFVLAICLAMTILVTKMAEKSRQHDPAGTLMGPTPGVKIGALLLFAALGIPLAATFSIPFALASIFSSNRGSGQGLSLGVLNLAIVVPQMLVSLVGGPWDDLFGGGNLPGFVVGAVAAAASAVLALTMLPSPPADAKPAVAMGLSIK

SEQ ID NO: 48337 - protein, 588 aa, Arabidopsis thaliana
MGSTPTDLPGEDVADNRSGVGGGISDVYGEDSATLDQLVTPWVTSVASGYTLMRDPRYNKGLAFTDKERDAHYLTGLLPPVILSQDVQERKVMHNLRQYTVPLQRYMALMDLQERNERLFYKLLIDNVEELLPVVYTPTVGEACQKYGSIFRKPQGLYISLNEKGKILEVLKNWPQRGIQVIVVTDGERILGLGDLGCQGMGIPVGKLSLYTALGGIRPSACLPITIDVGTNNEKLLNDEFYIGLKQRRATGQEYAEFLHEFMCAVKQNYGEKVLVQFEDFANHNAFDLLSKYSDSHLVFNDDIQGTASVVLAGLIAAQKVLGKKLADHTFLFLGAGEAGTGIAELIALKISKETGAPITETRKKIWLVDSKGLIVSSRKESLQHFKQPWAHEHKPVKDLIGAVNAIKPTVLIGTSGVGQTFTKEVVEAMATNNEKPLILALSNPTSQAECTAEQAYTWTKGRAIFGSGSPFDPVVYDGKTYLPGQANNCYIFPGLGLGLIMSGAIRVRDDMLLAASEALAAQVTEEHYANGLIYPPFSNIREISANIAACVAAKTYDLGLASNLPRAKDLVKFAESSMYSPVYRNYR

SEQ ID NO: 48338 - protein, 634 aa, Bipolaris oryzae
MPPKRKSNGIPHNVKSANKYTDASGNAPNKRSRIAKPLDKASTNSAPLIDAIVRNSKNGAPGDAVKKEEGNFDHSRPEERAGIVDRQYYPAEMSNERCAMYNANEIPRPIAILEKTLKDTKQRRDKIQSGNENGHGDAVMHWFKRDLRVRDNTGLSKAAELAKSKGIGLVAVWIMSPQDWEAHLVSPPKCDFELRSVQLLKQELEELDIPLYIETVHERKNIKKRLVEMALEWNVKSVFCNLEYEPDELRREERLVRMMLEKGINMDPQHDDCVVPPGSLKTGTGKQYAVYTPWYRAWIAYLHAHPHLLNERSMPEKNPTGFREKFTKLFDSRVPDLPDCKSLTAEEKERFHHLWPAGEAAAIDRLERFLTEKVIKYKDTRNFPALNSTGRISAHHAAGTLAARTSVRMARDINSVKKLDGGKEGIKGWIGEVAWRDFYRHVLVHWPYVCMNKPFKYEYTNIEWEYNDAHFEAWTQGRTGYPIVDAAMRCLKHTGYMHNRLRMITASFLAKHLLLDWRLGEQYFITHLIDGDFASNNGGWGFSASTGVDPQPYFRIFNPWTQSEKFDEQGEFIRLWVKELEDVQGAAIHNPYQAKGEAAKIAKKNGYPEPIVEHKFARERCLARYKAGIGRETA

SEQ ID NO: 48339 - protein, 545 aa, Azospirillum lipoferum
MKLAEALLRALKDRGAQAMFGIPGDFALPFFKVAEETQILPLHTLSHEPAVGFAADAAARYSSTLGVAAVTYGAGAFNMVNAVAGAYAEKSPVVVISGAPGTTEGNAGLLLHHQGRTLDTQFQVFKEITVAQARLDDPAKAPAEIARVLGAARALSRPVYLEIPRNMVNAEVEPVGDDPAWPVDRDALAACADEVLAAMRSATSPVLMVCVRSAATGLEAKVAELAQRLGVPVVTTFMGRGLLADAPTPPLGTYIGVAGDAEITRLVEESDGLFLLGAILSDTNFAVSQRKIDLRKTIHAFDRAVTLGYHTYADNPLGGLVDALLEWLPRSDRTTRGKEPHAYPTGLQADGEPIAPMDIARAVNDRVRAGQEPLLIAADMGDCLFTAMDMIDAGLMAPGYYAGMGFGVPAGIGAQCVSGGKRILTVVGDGAFQMTGWELGNCRRLGIDPIVILFNNASWEMLRTFQPESAFNDLDDWRFADMAAGMGGDGVRVRTRAELKAALDSAFATRGRFQLIEAMIPRGVLSDTLARFVQGQKRLHAAPRD

SEQ ID NO: 48340 - protein, 330 aa, Erwinia carotovora subsp. atroseptica SCRI1043
MSQSTLKVNELHEDTDFEENGLDVFDDKALAEEDTNDNDSAEDELLSQGVPQRVLDATQLYLGEIGYSPLLTAEEEVYFARRALRGDVPSRRRMIESNLRLVVKIARRYNNRGLALLDLIEEGNLGLIRAVEKFDPERGFRFSTYATWWIRQTIERAIMNQTRTIRLPIHIVKELNVYLRTARELSHKLDHEPSAEEIAEQLDKPVDDVNRMLRLNERITSVDTPLGGDSEKALLDILADEKDNGPEDTTQDNDMKQNIVKWLFELNAKQREVLARRFGLLGYEAATLEDVGREIGLTRERVRQIQVEGLRRLREILQVQGLSIEELFRE

SEQ ID NO: 48341 - protein, 410 aa, Arabidopsis thaliana
MESRVLLRATANVVGIPKLRRPIGAIHRQFSTASSSSFSVKPIGGIGEGANLISGRQLRPILLLDSSAINGGEKREILKPVKAAAAEGGDTAGDAKVGFLAKYPWLVTGFFFFMWYFLNVIFNILNKKIYNYFPYPYFVSVIHLFVGVVYCLISWSVGLPKRAPIDSNLLKVLIPVAVCHALGHVTSNVSFAAVAVSFTHTIKALEPFFNAAASQFIMGQSIPITLWLSLAPVVLGVAMASLTELSFNWLGFISAMISNISFTYRSIFSKKAMTDMDSTNVYAYISIIALFVCIPPAIIVEGPKLLNHGFADAIAKVGMTKFISDLFWVGMFYHLYNQLATNTLERVAPLTHAVGNVLKRVFVIGFSIVIFGNKISTQTGIGTGIAIAGVAMYSIIKAKIEEEKRQGKKA

SEQ ID NO: 48342 - protein, 324 aa, Arabidopsis thaliana; identical to SEQ ID NO: 1181

SEQ ID NO: 48343 - protein, 396 aa, Bartonella koehlerae
LGQAIVQEGVKAVAAGMNPMDLKRGIDAAVDEVVANLFKKAKKIQTSAEIAQVGTISANGAAEIGKMIADAMEKVGKEGVITVEEAKTAETELEVVEGMQFDRGYLSPYFVTNAEKMVTDLDDPYILIHEKKLSNLQSLLPVLEAVVQSGKPLLIIAEDVEGEALATLVVNKLRGGLKIAAVKAPGFGDRRKAMLEDIAILTSGQVISEDIGIKLENVTLDMLGRAKKVNISKENTTIIDGAGQKSEISARVNQIKVQIEETTSDYDREKLQERLAKLAGGVAVIRVGGATEVEVKEKKDRVDDALNATRAAVEEGIVAGGGTALLRAANALTVKGSNPDQEAGINIVRRALQAPARQIATNAGEEAAIIVGKVLENNADTFGYNTATGEFGDLIA

SEQ ID NO: 48344 - protein, 221 aa, Arabidopsis thaliana
MASLISDIEPPTSTTSDLVRRKKRSSASSAASSRSSASSVSGEIHARWRSEKQQRIYSAKLFQALQQVRLNSSASTSSSPTAQKRGKAVREAADRALAVSARGRTLWSRAILANRIKLKFRKQRRPRATVAVPAMTTVVSSSSNRSRKRRVSVLRLNKKSIPDVNRKVRVLGRLVPGCGKQSVPVILEEATDYIQALEMQVRAMNSLVQLLSSYGSAPPPI

SEQ ID NO: 48345 - protein, 396 aa, Bartonella schoenbuchensis
FWPAIVQEGVKAVAAGMNPMDLKRGIDSAVAEVVESLFKKAKKIQTSAEIAQVGTISANGASEIGKIIADAMDKVGNEGVITVEEAKTAETELEVVEGMQFDRGYLSPYFVTNAEKMVADLDDPYILIHEKKLSNLQSLLPVLEAVVQSGKPLLIIAEDVEGEALATLVVNKLRGGLKICAVKAPGFGDRRKAMLEDIAILTSGQVISEDVGIKLENVTLDMLGRAKKVHISKENTTIVDGSGQKAQISARVSQIKAQIEETTSDYDREKLQERLAKLAGGVAVIRVGGATEVEVKEKKDRVDDALNATRAAVEEGIVAGGGTALLRAANAITVKGSNADQEAGINIVRRALQAPARQIATNAGEEAAIIVGKVLENNSDTFGYNTATGQFGDLIS

SEQ ID NO: 48346 - protein, 297 aa, Arabidopsis thaliana
MWYFLNVIFNILNKKIYNYFPYPYFVSVIHLFVGVVYCLISWSVGLPKRAPIDSNLLKVLIPVAVCHALGHVTSNVSFAAVAVSFTHTIKALEPFFNAAASQFIMGQSIPITLWLSLAPVVLGVAMASLTELSFNWLGFISAMISNISFTYRSIFSKKAMTDMDSTNVYAYISIIALFVCIPPAIIVEGPKLLNHGFADAIAKVGMTKFISDLFWVGMFYHLYNQLATNTLERVAPLTHAVGNVLKRVFVIGFSIVIFGNKISTQTGIGTGIAIAGVAMYSIIKAKIEEEKRQGKKA

SEQ ID NO: 48347 - protein, 334 aa, Staphylococcus aureus subsp. aureus MRSA252
MTTVYYDQDVKTDALQGKKIAVVGYGSQGHAHAQNLKDNGYDVVIGIRPGRSFDKAKEDGFDVFPVAEAVKQADVIMVLLPDEIQGDVYKNEIEPNLEKHNALAFAHGFNIHFGVIQPPADVDVFLVAPKGPGHLVRRTFVEGSAVPSLFGIQQDASGQARNIALSYAKGIGATRAGVIETTFKEETETDLFGEQAVLCGGVSKLIQSGFETLVEAGYQPELAYFEVLHEMKLIVDLMYEGGMENVRYSISNTAEFGDYVSGPRVITPDVKENMKAVLTDIQNGNFSNRFIEDNKNGFKEFYKLREEQHGHQIEKVGRELREMMPFIKSKSIEK

SEQ ID NO: 48348 - protein, 270 aa, Zea mays
MSLLSKLRLITVDVTGTLIAYKGHLGDYYCMAAKSAGMPCPDYNRMHEGFKLAYTEMARQYPCFGFAAKMPNIEWWRTCVKNSFVKAGYDYDEETFEKVFRRIYSAFGSSAPYSAFPDSQPFLRWAREKGLTVGIVSNAEYRYKDVILPALGLNQSSEWDFGVFSGVVGVEKPDPRIYKIALEMAGNVAPEEALHIGDSMRKDYTPARSIGMHALLLDRFKTADAESWRQSGATVLPDLVATQEWLTKDQNDEQEETVAARVLKRMSEKL

SEQ ID NO: 48349 - protein, 802 aa, Saccharum officinarum
MAAKLTRLHSLRERLGATFSSHPNELIALFSRYVNQGKGMLQRHQLLAEFDALFDSDKEKYAPFEDFLRAAQEAIVLPPWIALAIRPRPGVWDYIRVNVSELAVEELSVSEYLAFKEQLVDGNSNSNFVLELDFEPFNASFPRPSMSKSIGNGVQFLNRHLSSKLFQDKESLYPLLNFLKAHNYKGTTMMLNDRIQSLRGLQSSLRKAEEYLLSVPQDTPYSEFNHRFQELGLEKGWGDTAKRVLDTLHLLLDLLEAPDPANLEKFLGTIPMMFNVVILSPHGYFAQSNVLGYPDTGGQVVYILDQVRALENEMLLRIKQQGLDITPKILIVTRLLPDAVGTTCGQRLEKVIGTEHTDIIRIPFRNENGILRKWISRFDVWPYLETYTEDVASEIMLEMQAKPDLIVGNYSDGNLVATLLAHKLGVTQCTIAHALEKTKYPNSDIYLDKFDSQYHFSCQFTADLIAMNHTDFIITSTFQEIAGSKDTVGQYESHIAFTLPGLYRVVHGIDVFDPKFDIVSPGADMSVYYPYTETDKRLTAFHPEIEELIYSDVENDEHKFVLKDKNKPIIFSMARLDRVKNMTGLVEMYGKNARLRELANPVIVAGDHGKESKDREEQAEFKKMYSLIDEYNLKGHIRWISAQMNRVRNAELYRYICDTKGAFVQPAFYEAFGLTVIESMTCGLPTIATCHGGPAEIIVDGVSGLHIDPYHSDKAADILVNFFERCKADPSYWDKISQGGLQRIYEKYTWKLYSERLMTLTGVYGFWKYVSNLERRETRRYLEMFYALKYRSLASAVPLSFD

SEQ ID NO: 48350 - protein, 341 aa, Methylococcus capsulatus str. Bath
MKRKGILVTGGAGYIGSHVVKTLGEAGERLVVLDNLSTGFRDAVLYGDFIEGDTGDDVLLDKIMRDYEVEAVMHFAAHTIVPESVENPLKYYGNNTCKTRTLLESCRKAGVSHFIFSSTAAVYGIPEGEFALETSPLAPINPYGSSKLMSEIMLRDLSTASPLRHVVLRYFNVAGSDPEGRIGQSTAKATLLIKVAAEVATGKRDRLCIFGTDYPTPDGTGIRDYIHVSDLADAHVAALAYLRAGGESRTLNCGYGHGYSVREIIDTMNRVNGTPIAVEERPRRPGDPPRLVAGVERIREILEWTPRYDDIELIVRTSLEWERKLAARKAPEVCQRESPAR

SEQ ID NO: 48351 - protein, 160 aa, Glycine max
EGSWLVFLHVGNRCGAKKVTESSTIHVKRNECAKTSSQGGIWSSDDDARRADIIIACAGVAGAPLAYTLAKDGRREHESERDLSEPDRITGELLQPEGYLRIIELVLQDCVNESDSQQVFGYALNMDGRNTKLSYPLKLCSSDISGRSLHNGPMIQRMRE

SEQ ID NO: 48352 - protein, 564 aa, Desulfovibrio vulgaris subsp. vulgaris str. Hildenborough
MEELSLYTLRHVLERSAVLYADQPSLSQLGCEPLTFRDLHDHAEHLALWLRDNGVGTGDRVALLAENSPNWGIAYFAITGMGAIAVPILPEFHADAVQHILRHSEAKAVFVSERLFPKLEEGEGIADSLMCISMETFQSIAQGTTRDMLRELKSKGLREFRKLRDKAKRLANMADAAPAEDDVAAIIYTSGTTGHSKGVVLTHRNIVWDADAVKSIVKLGPGDRMLSILPLSHTYECTLGLVLPVLNGAHVHYMDKPPTARALLPAMAQVRPTAMLSVPLVIEKIFKTALLPKLTGSWLKQRLYAIPFVRRKLHALAGRKLLESFGGALRIFCIGGAGIAPDVERFLREANFPYAIGYGLTETAPLVAGSGPASTRLTSTGFTLDGVDIAIDAPDPATGEGEIIVRGPNVMREYYKAPQITASAFTPEGWFRTGDLGKFDADGYLYIKGRLKNVIIGPSGENIYPEEVEAIIHQSPFVLESLVFQQDGRLVARIHLDAARLDESFGDLPALKQREKIDALLETLRNEVNTKVSTFARLAKVIEQTEPFEKTPTHKIKRYLYVEQ

SEQ ID NO: 48353 - protein, 399 aa, Bordetella bronchiseptica RB50
MSMSKLDSLFTAALEQAAQRQVRRRLRRATAAPPGRLALDGRTLVNFSSNDYLGLARHPLLAERASLWATRHGAGAQASRLVCGNLDLHEQVEAKLARLKGTEAALLLASGWQANAAVLPALFKAAAAQGEPQVYTDRLNHASLHHGCQAAGVRQIRFRHNDLAHLEHLLAERAGAPGARFIVTESVFSMDGDRADVPALAALAARHHAFLYLDEAHATGVLGPRGMGLAGLAPGGVDLAMGTFSKGLGSFGAYVAGSRALCDYLVNACSGFIYTTALPPAVLGAIDAALDLVPRLDQARAALLGHGERLRASLAAQGIDCGASSTQIVPAIVGDAGHALALAAELERRGLLAVAIRPPTVPAGTSRLRIALSAAHGEAELDQLIEALAAGWRAVRQAA

SEQ ID NO: 48354 - protein, 534 aa, GIBBERELLA ZEAE PH-1
MSSHKDEVKDETTVATPHDEELGSTDGEGQLKRHLQNRHMQMIAIGGAIGAGLFVGSGSALHKGGPAALVIGYLIIGIMLLCTNLALAEMAVLYPVNGAFYTYIVRFVDPSWGFACGWEYALSWLTVLPFELIAASKTIEFWRSDIHMAVWVTVFLVALTIVQIFGVRGYGEVEFVLSAIKIAACLGFIILGIIINCGGVGDQGYLGTKYWHDPGAFTDFKGFCAVFVVAAFAFGGTEMVGLAAAETADPRKSVPTASKQVFWRIALFYVINLFIVGTILRSDDDRLQGASGANTKASPFVLAIQDAGIKVLPSIFNAVITISVLSVANTCTFGSTRTMQAMAMRGHAPKFLNYIDGKGRPIYCVIIQLGFGLLAYIGESPKGGTIFDWLLALSGLAFLFVWGTICLAHARMRSGMKAQGVNMNLIPYKTPFGVWGSYLGVFLNVLALVATFYSALFAPDGSAPNAESFFMSFLAGPIILVLYLGYKVYSRDWKLYVRAIDMDLQTGISLLDEEIPEEPKTWASLPRRILSAVI

SEQ ID NO: 48355 - protein, 376 aa, Desulfovibrio vulgaris subsp. vulgaris str. Hildenborough
MRTQEGPLGHPLRNIKALLLMGDGPSGVPDSVYSALALPTVGPLDPGFDEILDRLQGQLRNIFNVSDGVCAVLDGPAAVGMETCLVNLLEPGERLLVLDNGMGGERLRETAQRLGLAVDVLTVPWGDPVLSEQVAQRLARSDYHAVVMVHAESSTGVRSPVGAVGDLVSMHGALFIVDCETSLGGMDVDMARWRADALFASSHKCLSCPPGLAPVAFSMRALDRVGRRRTPIPGRYFDIALHLDYWQGAPRVCHLMPSVNLLYALHMALEGVLNEGLPNVFARHRAAHEQLVTGLAALGLRPLADVPWRLPMLHVVPAPEGVDAEDVRGRLRAEHGIEIGGGVGRLAGRVWRIGLMGHSARTTNVVALLEALGRLL

SEQ ID NO: 48356 - protein, 627 aa, Saccharomyces cerevisiae
MESVHSRDPVKEEKKHVFMGMEHELNPETHNDSNSDSYGLPQLSEKYNALRQNRSLIIQQTEIIGSAYNKWYLQAILLLSAFICGYGYGLDGNIRYIYTGYATSSYSEHSLLSTINVINAVVSAASQIIYARLSDVFGRLYLFISAVILYVVGTIIQSQAYDVQRYAAGAIFYNAGYVGVILILLIILSDFSSLKWRLLYQFVPTWPFIINTWIAGNITSRANPVVNWSWDVGMWAFIFPLSCVPIVLCMLHMQWRARKTPEWHALKGQKSYYQEHGFIKILKQLFWMLDVVGVLLMGCSLGCILVPLTLAGGVKTTWNDSRLIGPFVLGFVLIPILWIWEYRFARDPILPYRLVKDRAVWSSMGISFLIDFIYYMAADYLYTVMIVAVNESVKSATRIATLSSFVSTVASPFFALLVTRCTRLKPFIMFGCALWMVAMGLLYHFRGGSQSHSGIIGALCVWGVGTTLFTYPVTVSVQSAVSHENMATVTALNYTLYRIGSAVGSAVSGAIWTQTLYKQILKRMGDVALATTAYESPYTFIETYTWGTPQRNALMNAYKYVQRLETIVALVFCVPLIAFSLCLRDPKLTDTVAVEYIEDGEYVDTKDNDPILDWFEKLPSKFTFKRE

SEQ ID NO: 48357 - protein, 446 aa, Thermoplasma volcanium GSS1
MRYVIASSRCPFSHDVVMGRELVKENVGGVATALKRAISKHGGTWICWGDGKADNRYVNEDVGTYKIKRIILTPQEKRGYYDMYSNRTLWPLFHYFRERVQYTDNGYETYRKVNEKFAEEILNNTSQEDIVWVHDYQLSLVPGILRQKGLKNRIIFTWHIPWVSREMFETLTESDEIKESVGSADFITFHTDLYRKNFESLFENRKHGKSIAVPLGIDYRYFEKAKSSQIKSYALKDKIMLFSIDRLDYTKGLTNRVLSIERLIRNHPETSGKFVYVMIVTPSRTSVSDYVSMKRELEMNIGRVNGEFGTISWMPILYMYRKISDHSLVSYYKSADIALITPLIDGLNLVSKEFIASTEKGILVLSKFAGASNCLRGALIVNPNSPDEVADAIYKAMNMERKEADERLLKMKAIVKARDTDWWIKRIYRLAIAKEHDRRVTNNRIE

SEQ ID NO: 48358 - protein, 246 aa, Thermoplasma volcanium GSS1
MIDGLLITELNKLTPGSSYIFLDYDGTLVPIIMNPEQSLADPELIEMLTELRSKYKLFIVSGRSPEEIKRFIPLDLNLICYHGACSIVNGKTYYYNNAQSFLGIFNEIYQSSLNLVNEFPGLRIYKKNLAVLYHFGLMKPQDVPALERVIVEISQKEHVDVYKGKMIFELRVPGVNKGIAIKNVRDEETALIAGDDATDECSFKYNEDAITIKVGPGKTSAHFRVNDYSEMREVLKLLLNNAEKRS

SEQ ID NO: 48359 - protein, 270 aa, Thermoplasma volcanium GSS1
MRVTVVQMASTSDKSENIEKTFKFLDSIGNSNLIIFPEYQIFVPDFKNGSDMINIAESESGEFMSNIANYAKERKSKILVNIPEKNAFNLKPFNTAVLIDELGTTMKYRKLHLFDAFNFKESAFFEKGNMSPMVFNSSETPFGVQICYDLRFPEAARILTLYGAKILVYQAGWFSGERKYDQWKTLLRARAMENGVFVIGSAQTGDMFTGHSMVVSPYGDVVAELDKDENYISMDIDLGVVEKYRSEVPLLKERRTDIYDVLDVSLFEKI

SEQ ID NO: 48360 - protein, 612 aa, Arabidopsis thaliana
MEQYEFLEQIGKGSFGSALLVRHKHEKKKYVLKKIRLARQTQRTRRSAHQEMELISKMRHPFIVEYKDSWVEKACYVCIVIGYCEGGDMAQAIKKSNGVHFQEEKLCKWLVQLLMGLEYLHSNHILHRDVKCSNIFLTKEQDIRLGDFGLAKILTSDDLTSSVVGTPSYMCPELLADIPYGSKSDIWSLGCCIYEMAYLKPAFKAFDMQALINKINKTIVSPLPAKYSGPFRGLVKSMLRKNPEVRPSASDLLRHPHLQPYVLDVKLRLNNLRRKTLPPELPSSKRIMKKAHFSEPAVTCPAFGERQHRSLWNDRALNPEAEEDTASSIKCISRRISDLSIESSSKGTLICKQVSSSACKVSKYPLAKSSVTSRRIMETGRRSDHLHPVSGGGTTSKIIPSARRTSLPLTKRATNQEVAAYNPIVGILQNVKSPEYSINEPQVDKIAIFPLAPYEQDIFFTPMQRKTSSKSSSVSDRSITKDKCTVQTHTTWQGIQLNMVDNISDGSSSSDQNATAGASSHTTSSSSRRCRFDPSSYRQRADALEGLLEFSARLLQEGRYDELNVLLKPFGPGKVSPRETAIWIAKSLKENRDKTKMVDLNVSREIPHVGLL

SEQ ID NO: 48361 - protein, 569 aa, GIBBERELLA ZEAE PH-1
MASEINPKTEAFDAHDGSPRYDEKHGTTEPIQTPKGSWALRNGLTIESFKAHDDYAKGTVELSRDMKPRHLNMIAIGGSIGAGFFVGSGGALQTGGPGSLTIGFLIMGVMIFNVVYALGELAVMYPVSGGFYTYANRFVDPSWGFAMGWNYVMQWAFVLPLELTVFLAVIIIVNIFGTLGYAEEEFWAALLKLSATVIFMIVAVVLVCGGGPSNGIYDEYWGARLWHNPGAFQHGFRGFCGVFVTAAFSFSGTELVGLAAAEAKNPAKALPGAIKQVFWRITLFYVVGLLLVGFLVSSTDERLLNAGNNNPSASPFVIAASNAGLKGYDSFMNVIILVSVLSIGVSCVYGGSRTLVALAQQGYAPKFFSFIDKSGRPLPAVVSIIAIGALGYISVDGEGTTVFIWLQALSGLAALFTWGSICLCHIRFRSAWKYHGHTLDEIPFQHVFGVWGSWLGLAIIVIVLIAQFYTAITNIDGSIGTAEGFFQSYLAMPVVILFYIIGYIWKREGWRKISEIDLDTGRREHDWDAINAYRQQLANGPAWKHGVQTFPVTGGLIIHVLPWTQMGPE

SEQ ID NO: 48362 - protein, 163 aa, Phoenix dactylifera
MFSMVTGFMNYSQQTIRAARYIGQSFVITLSHTNRLPITIQYPYEKSITSERFRGRIHFEFDKCIACEVCVRVCPIDLPVVDWRFERDIKKKQLLNYSIDFGVCIFCGNCVEYCPTNCLSMTEEYELSTSDRHEDYTIQTVMNSTQIKIDKDKPFDSRTITNY

SEQ ID NO: 48363 - protein, 542 aa, Streptococcus pyogenes M49 591
MTIDKKKVVYQIYPKSYKDTTGNGVGDLRGIIDKLPYLQELGIDMIWLNPFYPSPQRDNGYDVSDYTAVNPDFGTMADFENLVKAAKEHQIELMLDMVLNHCSTDHEWFQKALAGDPYYQDFFILRDQPTDWVSKFGGNAWAPFGDTGKYYLHLFDVTQADLNWRNPHVREELAKVVNFWRDKGVKGFRFDVINLIGKDEELVDCPVNDGKPAYTDRPITHTYLHDLNQASFGQDDSFMTVGEMSATTIDNCLLYTAPEREELSMAFNFHHLKVDYENGQKWTIMAFDFAALRDLFHAWGEGMGQGNGWNALFYNNHDQPRALNRFIDVTHFRNEGATMLAASIHLSRGTPYIYMGEEIGMLDPDFDSMDDYVDVESLNAYSSLLVSGKSAEEAFAIIKAKSRDNARTPMQWDASEHAGFTTGKPWLEVGKSYRDINVETEKEGRIFPFYQRLIALRKELPIIAEGDYRAAFKDSQAVYAFERHLGDQCLLVLNHFYADEVELELPPRYQHGQVLISNYEKVSICEKVILKPYQTLAILAEN

SEQ ID NO: 48364 - protein, 81 aa, Brassica napus
MAPGGSALKEVLESNSTGMDYEVKTTKVEVNNSNNSKSTKSGGAGTGKYGMHSNNGVYELLECPVCTNLMYPPIHQCSNGH

SEQ ID NO: 48365 - protein, 388 aa, Frankia sp. CcI3
MTILDDSTAPGFVGPPSSHGPRRDPAPLLPDPEPVRVLGTEAAGKVDTDLLRVLYHRLVLGRRFNQQATTLARQGRLAVYPASTGQEACQIAAAMVLRESDWLFPSYRDTLAVVSRGVRPVDALTLMRGNAHSGYDPREHRIAPLSTPLATQACHAVGLAHAARLRAASDPWAAEDVVALALIGDGGTSEGDFHEALNFAGVLNAPVVFLVQNNGYAISVPLAQQSAAPTLAHKAVGHGIIGRLVDGNDAPAVHGVLRAAVEHARSGRGPVLVEAVTYRLEAHTNADDATRYRTSEEVAAWQARDPLTLLERQLRKAGLLDDAGVAAVARAAEELAAEMRAQFDRVPDLDPGSLFTHVYAQPTSQLREQAAELMAWQAADAAKSDDAR

SEQ ID NO: 48366 - protein, 414 aa, Bacillus anthracis str. 'Ames Ancestor' [sequence omitted]

SEQ ID NO: 48367 - protein, 243 aa, Oenococcus oeni PSU-1
MFDRLKGKVAIVTGGNSGIGKAIAADFIAEGAKVVITGRNQEKGRQTALEIAGDILFIQQDVSQEADWQKVISKTIEKFGKFDILVNNAGVGGVGKPLAEMSLSEFNWTQSINLSGNFLGIHFALNKMTEPGSIIDVSSAAGLRGFPGAADYSASKGGTRLLTRAAALEALQMGKKIRVNSIHPGWIDTDIVPKDMREQVIAMTPMHHLGQPKDIAKLATYLASDESEYTTGSELAADGGLMA

SEQ ID NO: 48368 - protein, 308 aa, Salmonella sp.
INGFGRIGRIVFRAAQKRSDIEIVAINDLLDAEYMAYMLKYDSTHGRFDGTVEVKDGHLIVNGKKIRVTAERDPANLKWDEVGVDVVAEATGIFLTDETARKHITAGAKKVVLTGPSKDNTPMFVKGANFDKYEGQDIVSNASCTTNCLAPLAKVINDNFGIIEGLMTTVHATTATQKTVDGPSHKDWRGGRGASQNIIPSSTGAAKAVGKVLPELNGKLTGMAFRVPTPNVSVVDLTVRLEKAATYEQIKAAVKAAAEGEMKGVLGYTEDDVVSTDFNGEVCTSVFDAKAGIALNDNFVKLVSWYDN

SEQ ID NO: 48369 - protein, 447 aa, Salmonella typhimurium
MDQTCSLESFLNHVQKRDPHQTEFAQAVREVMTTLWPFLEQNPRYRHMSLLERLVEPERVIQFRVVWLDDKNQVQVNRAWRVQFNSAIGPYKGGMRFHPSVNLSILKFLGFEQTFKNALTTLPMGGGKGGSDFDPKGKSEGEVMRFCQALMTELYRHLGPDTDVPAGDIGVGGREVGFMAGMMRKLSNNSSCVFTGKGLSFGGSLIRPEATGYGLVYFTEAMLKRHGLGFEGMRVAVSGSGNVAQYAIEKAMAFGARVVTASDSSGTVVDESGFTPEKLARLCEIKASRDGRVADYARDFGLTYLEGQQPWSVPVDIALPCATQNELDVDAARVLIANGVKAVAEGANMPTTIEATDLFLEAGVLFAPGKAANAGGVATSGLEMAQNAARLSWKAEKVDARLHHIMLDIHHACVEYGGDNKHTNYVQGANIAGFVKVADAMLAQGVI

SEQ ID NO: 48370 - protein, 233 aa, Ralstonia solanacearum
MPNMSTHFHHQPVEAFIIDLDGTMVDTIDDLAIAFNTALNQLGLAPVATAFVERMINKGPEHLVRAALGDAGTDMALYERCLQLYRKAYGEINGKYARVYPGVGESLAELRALGMKLACLTNKPGSFARALLKEKQLDGFFSVVFGGDAFPCQKPDPLPVIRTCEALGTAPSRTLMVGDSNNDALAAKAAGCRVVLVKYGYHHGESRSRTHVDGVIDGLHQLRPFCRLADQDA

SEQ ID NO: 48371 - protein, 431 aa, Salmonella typhimurium
MVSLEKNDRVMLARQLPLKSVALILAGGRGTRLKDLANKRAKPAVHFGGKFRVIDFALSNCLNSGIRRIGVITQYQSHTLVQHIQRGWSLFSEEMNEFVDLLPAQQRMKGENWYRGTADAVTQNLDIIRRYKAEYVVILAGDHIYKQDYSRMLIDHVEKGARCTVACMPVPIKEATAFGVMAVDESDKIIDFVEKPANPAMLGDASKSLASMGIYVFDADYLYELLAADDKDDASSHDFGKDIIPKITREGMAYAHPFPLSCVQSDPQAEPYWRDVGTLEAYWKANRDLASVTPQLDMYDQNWPIRTHMESLPRAKFVQERSGSHGMTLKSLVFGGCIISGSVVVQSVLFPRVRINSFCNIDSAVLLPEVWDGRSCRLRCCVIDRACIIPEGMVIGENAEEDARRFYRSEEGIVLVTREMLRKLQGHKQER

SEQ ID NO: 48372 - protein, 516 aa, Arabidopsis thaliana
MLEKVETFDMNRVIDEFDEMTRNAHQVQKQTLKEILLKNQSAIYLQNCGLNGNATDPEEAFKSMVPLVTDVELEPYIKRMVDGDTSPILTGHPVPAISLSSGTGSATTNVYRNPMYKAGMNTITSPSCSPDEVIFSPDVHQALYCHLLSGILFRDQVQYVFAVFAHGLVHAFRTFEQVWEEIVTDIKDGVLSNRITVPSVRTAMSKLLTPNPELAETIRTKCMSLSNWYGLIPALFPNAKYVYGIMTGSMEPYVPKLRHYAGDLPLVSHDYGSSEGWIAANVTPRLSPEEATFAVIPNLGYFEFLPVSETGEGEEKPVGLTQVKIGEEYEVVITNYAGLYRYRLGDVVKVIGFYNNTPQLKFICRRNLILSINIDKNTERDLQLSVESAAKRLSEEKIEVIDFSSYIDVSTDPGHYAIFWEISGETNEDVLQDCCNCLDRAFIDAGYVSSRKCKTIGALELRVVAKGTFRKIQEHFLGLGSSAGQFKMPRCVKPSNAKVLQILCENVVSSYFSTAF

SEQ ID NO: 48373 - protein, 483 aa, Bacillus cereus ATCC 14579
MDKKATFVSIDKKAMYINGEWITLQEQIEVNNPATKEIFATVPKGGVTEAKQAVDAAHEAFKTWSKLTAADRATKLKKWFTLIDENKEEIAAIMTKEQGKPFAEALGEVNYANSFVEWYAEEGKRVYGEMIPAAHPNKRILVMKQPVGVMAAITPWNFPAAMITRKVAPALAAGCTAVVKPASQTPLTALKLAELAHEADIPKGVINIITGSAKAIADTWMEDGRVRKVSFTGSTEIGKELMASAAQTMKKVSLELGGHAPFIVMNDADLDKAVEAVIGSKFRNAGQTCICTNRVFVQEEVYEVFVEKFQKAVGQLKVGDGFGDGTTVGPLIDENAVSKVQEHIEDAIQKGGTVLYGGQKVAELEGHFIQPTVIGLANDTMLCMNEETFGPVAPVAKFKTVDEVIERANNTPYGLAAYIFTKDISQAFQISEALEYGIIGLNDGLPSVAQAPFGGFKESGIGREGGHFGIEEYLEIKYISLGL

SEQ ID NO: 48374 - protein, 419 aa, Synechococcus elongatus PCC 6301
MSRFCGMQLMVYSAADRSTAALSPANLLSQLAESRASGCLTILSQDVSWIFYLHNGNLFYGITSIDPFDCLERNLKAFSAEIPNIDRPIRQQIRSLFEKQEGSNSTAVYQALSWLRSEGFINQFQTDLLIKNLIKETLESFLSLQTASHRFLALDPSLPILTEFTVFPLLDETFQRLREWSGLSEKVYSPFQSPYLFSQSTSNNKFSPEKLQKLGNLLKGYSLRHLAALIHQDEIKLMRSLDPYIQEGVVFFREPQPPFDKLPPLLRSDLISGNTAIAGPVDTSNNLTSSPSATARPVKIVCIDDSPIILSELRRFLDEDRFEVITIIDSVKALMEVMRIEPDLILLDVGMPNVDGYKFCKVVRNHPNFKTTPIIMVTGNTGLIDRAKAKMSGATDYLTKPFTQEGLLNIVNQHLHKQF

SEQ ID NO: 48375 - protein, 364 aa, Arabidopsis thaliana
MTKSHVIFSASIALFLLLSISHFPGALSQSNKDCQSKSNYSCIDKNKALDLKLLSIFSILITSLIGVCLPFFARSIPAFQPEKSHFLIVKSFASGIILSTGFMHVLPDSFEMLSSPCLNDNPWHKFPFAGFVAMMSAVFTLMVDSITTSVFTKSGRKDLRADVASVETPDQEIGHVQVHGHVHSHTLPHNLHGENDKELGSYLQLLRYRILAIVLELGIVVQSIVIGLSVGDTNNTCTIKGLVAALCFHQMFEGMGLGGCILQAEYGWVKKAVMAFFFAVTTPFGVVLGMALSKTYKENSPESLITVGLLNASSAGLLIYMALVDLLAADFMGQKMQRSIKLQLKSYAAVLLGAGGMSVMAKWA

SEQ ID NO: 48376 - protein, 330 aa, Mycobacterium avium subsp. paratuberculosis K-10
MTQSAKTSPDIHRRLYALMVLMKTADDRLSRGIGTGEFLCVYWPSRGQEAIAAAMGVTLRPDDQLVTTYRGLHDLIGKGVGLEEIYGEMMGRTIGAGRGKGGTMHIAKPEVGVMLSTGIVGAGPPVAVGLAMAARRKGLDRVTVVSFGDGATNTGSFHEAANMAALWDLPIVFVCQNNRYAEMTPTTDTMKLEHVADRAAGYGMPGVRVDGNDPLAVTAALEEALRRARAGSGPTFLECETFRFRGHYFGDRMPYIPADQLQAALAADPVPRFRRRLAETGVCGEAELARIDDDAAATVEAALRTVLGADSPAADELDRDVYAAPIPFPT

SEQ ID NO: 48377 - protein, 205 aa, Erwinia carotovora subsp. atroseptica SCRI1043
MSLRHSPTDDNVVWHAHNVTRESREKLRGHQGVVIWFTGLSGSGKSTLAGALEQALHQRGVSTYLLDGDNVRHGLCRDLGFTDDDRRENIRRVGEVAKLMVDAGLVVLTAFISPHRAERKMVQDLLGEGQFIEVFVDTPLATCEARDPKGLYKKARAGELRNFTGIDSAYEAPEAPDSHLDGEQFVTNLTDQLLDLLGKRAIIKL

SEQ ID NO: 48378 - protein, 233 aa, Escherichia coli CFT073
MDMFRKLAAECFGTFWLVFGGCGSAVLAAGFPELGIGFAGVALAFGLTVLTMAFAVGHISGGHFNPAVTIGLWAGGRFPAKEVVGYVIAQVVGGIVAAALLYLIASGKTGFDAAASGFASNGYGEHSPGGYSMLSALVVELVLSAGFLLVIHGATDKFAPAGFAPIAIGLALTLIHLISIPVTNTSVNPARSTAVAIFQGGWALEQLWFFWVVPIVGGIIGGLIYRTLLEKRD

SEQ ID NO: 48379 - protein, 405 aa, Haloarcula marismortui ATCC 43049
MYFIDDSRSFSLETLADEFSKTIREEMDYQREGRMLTEIRENFRDNDRICIPEVKESHSTRRVLTMEYVPGTKINDIDSLDAGGINRTELAETLQRAYLQMIIDDGVFHADPHPGNLAVQDDGTLVFYDFGMSGRVDPFVQDKIIDFYAAVADQDIDAILDALIEMGTLSPEADRQVMGDVMELAIADARGEDIEQYRVQQIIQQVEDTIYEFPLRLPANLALVLRVATVVEGVCVTLDEDFDFIGVATDYLREEGYLAEGVRNFVEDRATEVSDAARSAVRIPPKLESALDRVEREDFRVQADIEDSDGLLATMTKRLILGMLLASTLFSTAFLYTQASLPATGVGIAGTVGLSLALWWSFRSKKAVRAKPQFTRQSMREQDRESPGGLNTSFGEDTDDAYSGD

SEQ ID NO: 48380 - protein, 671 aa, Listeria monocytogenes str. 4b F2365
MKKTLDRQAVDTIRSLSIDMIEKANSGHPGMPMGAAPMAYMLFAKHLVFNPANPEWFNRDRFVLSAGHGSALLYSMLHLFGYDVKMEDLKQFRQLDSLTPGHPEFGWTAGVDATSGPLGQGIGMAAGMALAESHLAAEYNQPNYPIVDHYTYAICGDGDLMEGVASETASLAGHLGLGKLIVLYDSNDICLDGDLSATFSENAADRFRAYGWQVLRVEDGNNLAAIQEKIVQAKLETSKPTLIEVKTVIGYGAPTKAGSSASHGAPLGEKEANGAKEHYEWAEEPFTVPAEVRDYLRNYKARGEKLEGAWNTMLANYKKEFPELASQLDRVLAGEVAADWNANLPTFEAGTNVATRSASGKMINAIAAELPELFGGSADLGCSNKTFIDASPAYSIQDPAGKNIWFGVREFAMGAMLNGMALHSGLRVFGSTFFVFSDYVRPAMRMAALMQLPVTYVFTHDSIAVGEDGPTHEPIEQLASLRAMPGLTVIRPADAKETRAAWEIAATNTNGPIALVLSRQDLPVLENAQEEVDAGVDKGAYIVAPANSSKPDAIIIATGSEVSLAIEAKAELAKKDIDVSVVSLSSWERFEKTTDAYKESILPKEVTARFAIEAGATFGWKEFIGSEGDMLGIDHFGASAPAKDLFNAYGFTPENVADRVETVIAKAGVRV

SEQ ID NO: 48381 - protein, 449 aa, Gibberella zeae
MREVISINVGQAGCQIANSCWELYCLEHGIQPDGYLTEERKAQDPDQGFSTFFSETGNGKHVPRAIYCDLEPNVVDEVRTGPYRNLFHPEMMITGKEDASNNYARGHYTVGKELIDGVLDKIRRVADNCAGLQGFLVFHSFGGGTGSGFGALLMERLSVDYGKKSKLEFCVYPAPQTATSVVEPYNSILTTHTTLEHSDCSFMVDNEAIYDICRRNLGLERPNYENLNRLIAQVVSSITASLRFDGSLNVDLNEFQTNLVPYPRIHFPLVAYSPVISAAKAAHEANSVQEMTMSCFEPNNQMVKCDPRHGKYMATCLLYRGDVVPNDAHAAVATLKTKRTIQFVDWCPTGFKLGICYQAPENVPNGDLAKVSRAVCMLSNTTAIAEAWSSLSLKFDLMHSKRAFVHWYVGEGMEEGEFSEAREDLAALERDYEEVATDSMGDEELEAEY

SEQ ID NO: 48382 - protein, 637 aa, Saccharomyces cerevisiae
MIEVPEDNRSSQTKRKNTEKNCNELMVDEKMDDDSSPRDEMKDKLKGTKSLIIRKSELMAKKYDTWQLKAIFLFSAFICTFAYGLDSSIRGTYMTYAMNSYSAHSLISTVSVIVLMISAVSQVIFGGLSDIFGRLTLFLVSIVLYIVGTIIQSQAYDVQRYAAGAVFYYVGLVGVMLQVVLMLSDNSSLKWRLFYTLIPSWPSIITTWVSGSVVEAANPLENWSWNIAMWAFIFPLCCIPLILCMLHMRWKVRNDVEWKELQDEKSYYQTHGLVQMLVQLFWKLDVVGVLLFTAGVGCILVPLTLAGGVSTNWRNSKIIGPFVLGFVLVPGFIYWESRLALVPFAPFKLLKDRGVWAPLGIMFFICFVYQMAAGYLYTILVVAVDESASSATRIINLYSFVTAVVAPFLGLIVTRSSRLKSYIIFGGSLYFITMGLFYRYRSGQDADGGIIAGMVIWGLSSCLFDYPTIVSIQSVTSHENMATVTALNYTVFRIGGAVAAAISGAIWTQSLYPKLLHYMGDADLATAAYGSPLTFILSNPWGTPVRSAMVEAYRHVQKYEVIVALVFSAPMFLLTFCVRDPRLTEDFAQKLPDREYVQTKEDDPINDWIAKRFAKALGGHKKDLQNPNRICVRKNDL

SEQ ID NO: 48383 - protein, 161 aa, Glycine max
MNREKLMKMAGSVRTGGKGTVRRKKKAVHKTTTTDDKRLQSTLKRIGVNAIPAIEEVNIFKDDVVIQFLNPKVQASIAANTWVVSGSPQTKKLQDILPSIIHQLGPDNLENLKKLAEQFQKQAPEGAAGSTTAQEENDDDVPELVPGQDFETAAEETKAAS

SEQ ID NO: 48384 - protein, 289 aa, Zea mays
MSDLHPPEHQVAGHRASASKLGPLIDGSGLFYKPLQAGDRGEHEVAFYEAFSAHAAVPARIRDTFFPRFHGTRLLPTEAQPGEPHPHLVLDDLLAGFQAPCVADIKIGAITWPPSSPEPYIAKCLAKDRGTTSVLLGFRVSGVRVVGPEGAVWRTERPEVKAMDTAGVRRVLRRYVSSVADEGMDCALAAAVYGGKGGVLSQLRELKAWFEEQTLFHFYSASILLGYDAAAVAAGGDGGGVTVKLVDFAHVAEGDGVIDHNFLGGLCSLIKFVSDIVPETPHTQPLGPS

SEQ ID NO: 48385 - protein, 251 aa, Desulfovibrio vulgaris subsp. vulgaris str. Hildenborough
MKEISLGKEMLSEFMGTMVLIIFGAGNVAMTVLFGKTLNITWDNITFGWGLAVLLGIMAGLPSGAHINPAVSLALAATGRFPWRKVLPYSVAQVAGGFAGAAIVFLDFKAKWLGVDPQLASTAGIFCTFPAITTSYLPGFIDQIIGTAVLMFGILAIGDFAGKNNVGWMGPVLVAALIVAIGMSLGAMHGYAINPARDFGPRFFALVAGFTQPNLMEPGIVLVPIVGPIIGGPLGAFIYDWTTGAVNKAQG

SEQ ID NO: 48386 - protein, 260 aa, Lycopersicon esculentum
MCGGAILADIIPPRDRRLSSTDLWPTDFWPISTQNVPLNPKRARPSTGGEQMKKRQRKNLYRGIRQRPWGKWAAEIRDPRKGVRVWLGTFNTAEEAARAYDREARKIRGKKAKVNFPNEDDDHYCYSHPEPPPLNIACDTTVTYNQESNNCYPFYSIENVEPVMEFASYNGIEDGGEEMVKNLNNRVVEEEEKTEDEVQILSDELMAYESLMKFYEIPYVDGQSVAATVNPAAETAVGGGSMELWSFDDVSRLQPSYNVV

SEQ ID NO: 48387 - protein, 202 aa, Glomerella lindemuthiana
MSSNRNYDFLIKLLLIGDSGVGKSCCLLRFSEDSFTPSFITTIGIDFKIRTIELDGKRVKLQIWDTAGQERFRTITTAYYRGAMGILLVYDVTDERSFNNIRTWFANVEQHATEGVNKILIGNKCDWEEKRVVSTERGQQLADELGIPFLEVSAKSNINIDKAFYSLAADIKKRLIDNQKNEQPAASGVNVGESSGSGGKCC

SEQ ID NO: 48388 - protein, 472 aa, Xanthomonas axonopodis pv. citri str. 306
MHRHVHEPEILADPAAAQTAEHWRQRDLAVVWHPCTQMREHPHTLPLVPIVGGEGAWLVGHDGRRYLDAVSSWWTNLFGHTEPRIGAAIARQAGELEQVMLAGFTHTPAVQLAEQLLAIAPRQAGRAPLSKVFYADNGSAGVEVALKMAFHYFHNRGDHRRTRFIALENGYHGETIGALSVGDIPLYRRVYAPLLLEAMFTPSPDAYLAEPGQSAEDHALQAADALQALFEHSPGEICALILEPRVQCAGGMRMYHPAYLRRARELCDAHGAFLIADEIATGFGRTGTLFACEQAGVMPDLLCLSKGLTGGFLPLSAVLATQQLYDAFLDDSRERAFLHSHSYTGNPLACAAALATLKIFADDDVIARNQPIAARMRALAAQIGEHPSVADVRQAGMIVAFELTQGGNKRTPFASAARVGLKAYRAALEKGVVLRPLGDVLYWMPPYCVDEAQLALLADTTRHAITEAVACA

SEQ ID NO: 48389 - protein, 715 aa, Nostoc sp. PCC 7120
MSELWTYFFNSTPFIPHGHCYLWQTDLVWLHIISDGLIALAYYSIPATLFYFVRKRQDLPFYWIFLLFSGFIVACGTTHIMEVWTLWYPTYWVSGFLKAITAIISVFTALTLIPLVPKALLLPSSAQLERANKDLQNEIGERLKVEAELRKYQNHLEELVTIRTNEITNANEKLQQQINERQHIVEILRESEERYRYLAEAIPQLVWTADANGECDYFNQNWCDYTGLNLEESLGSGWLAALHLEDLERSYETWSKAVETGALYENEYRFKRAADGSYRWLLGRGLPLKDHQGRVVKWFGTCTDIHEQKQILEERARLLELEQTARAEAETANRIKDEFLAVLSHELRTPLNAILGWSKLLQERKLDPTRTFQALATIERNATLQVQLIEDLLDISRILQGKLVINITKVNLVTVILAALETMRLAAESKLIQVLTNFPPNIGQVMGDSARLQQVVWNLLSNAVKFTPNGGKIEVTLDKMEGYAQIVVSDTGKGIQPEFLPYVFDYFRQADSSSTRRFGGLGLGLAIVRKIVEIHGGTVTAQSLGEEQGASFTVRLPILPEEDGSVTYQQHRSASLVTNSLPLEGIKVLVVDDDADSRDFLAFILEQEGADVSLATSALEVLQLLPEIKPDVLVSDISMPDMDGYTLIRQMRTWTAEQGGAIPAIALTAFARQYDREQALQAGFQLHLPKPLNAEEFIAAVVELVKSQHSIVSFH

SEQ ID NO: 48390 - protein, 1183 aa, Gloeobacter violaceus PCC 7421
MQTFKAGRQRGFVLTESGWCKLQAKMRDWEFRTGVRCTARKLSLQAQLAGLPGMHHNTVKRILDRKDGVDFSSIGLLFQVFELTLEASDCAYARLPEADGRATRVDCSEAIDVTHFCGRTEELALLRRWIVEERCRVVSLLGMGGIGKTALAARFVEGQRPAFERVIWRSLRNAPPVEQILSEVLRFLEEGPEAEAPSHLDGKLHRVLQLMQQQRCLLVLDNIETVLREGGWAGHYREGYEGYGELLRSAGEIAHQSCLLVTGREKPRELSALEGDALPVRSLALPGLGEAEGRQVFQSRGAFFGSEADWRTLIDHYAGNPLALKMVAPTVQELFEGDIGELVDLIRGGMALFGDIEELLQKQFNRLSEPERDAAFWLAVERAPTTFARLRECFVSPAAQPRLVEVLRSLSRRSLIEKTGEGFTLQPVVLEFVTNRLIDRVCHEILAGEVGLLESHALLNARGRDYLREAQLRLIVEPTVHRLRALCGGKSALEAHLGQVLARLQGGRAGYAAGNLLNMLVHLGTDLRGWNFSGLTIRHADLREACLREAHFAGSRFIRSAFADHFCGVLALAFSPDGRWLAMADTRGEVRLCLVQSREQRFVCAGHSGWVEGLAFSPDSEILASAGLDGTIRLWQVVSGQLQATLTGHNKGVRSVAFAPDGHLIASGSLDGTIKLWDAQSGQCRLTLTGHRNVVASVVWSPDGQYLASGSNDGTVKFWRPVGGRCLRTLRGHTDEVWSVAFGPDSRTLLSGSSDGTLRMWDTHGGTCKQALSGHQDKVRTVAWSLDGQRLASGSWDATVRVWNADGRCQSILRGHSGIIRSVAFAPDGGLLATGSIDQTVKLWDLQSGQCVYSFKGHSGGVAAVAVGGHGTLASGDADHRVRIWSTEDGRCTRVLSGHTHPIWSVAFAPGGATLASASADHAVRLWDGASGRCTHILQGHTSWVWSVAFSPDGRRLASGGADRTVRLWDTATGQCLRTSTEADHRVLAVAFMPDGLTLAGSVDQTVRLWDAATGRCLRTLAGHTSWIWSLAASADGRLMATGSADRSVRIWEVATGRCLKHLEEHGGWVWSVAFSPDERRLAVGSMDGTIRLWSFPEGELLRSMACESAVRSIAFESHGQVLIAGCEDGTIRFWSVACGECLRVLRAPGPHAGMDISGAVGLSEAQRASLIALGAVEHGGRI

SEQ ID NO: 48391 - protein, 492 aa, Arabidopsis thaliana
MDPYKYRPASSYNSPFFTTNSGAPVWNNNSSMTVGPRGPILLEDYHLVEKLANFDRERIPERVVHARGASAKGFFEVTHDISNLTCADFLRAPGVQTPVIVRFSTVIHERGSPETLRDPRGFAVKFYTREGNFDLVGNNFPVFFIRDGMKFPDMVHALKPNPKSHIQENWRILDFFSHHPESLNMFTFLFDDIGIPQDYRHMDGSGVNTYMLINKAGKAHYVKFHWKPTCGVKSLLEEDAIRVGGTNHSHATQDLYDSIAAGNYPEWKLFIQIIDPADEDKFDFDPLDVTKTWPEDILPLQPVGRMVLNKNIDNFFAENEQLAFCPAIIVPGIHYSDDKLLQTRVFSYADTQRHRLGPNYLQLPVNAPKCAHHNNHHEGFMNFMHRDEEVNYFPSRYDQVRHAEKYPTPPAVCSGKRERCVIEKENNFKEPGERYRTFTPERQERFIQRWIDALSDPRITHEIRSIWISYWSQADKSLGQKLASRLNVRPSI

SEQ ID NO: 48392 - protein, 318 aa, Listeria monocytogenes EGD-e
MTASVFVAGKLLPETMEALSKWDVKAFSGEENITEAELINNVTEVDAIICPLSSPISAKVLESAKNLKIVANIGAGFDNIDVKKAQELGIAVTNTPDVSTEATAELTLGLILDVARRISEGDRLCRETPEQFKGWAPTFFLGTELSGKTLGIIGLGRIGQAVAKRAAAFGMNIIYSGHQPKEAAKEWNAEFVSQKELLKRSDVVTIHAAYSPSLKHLLNETTLKTMKSSAFLINAARGPVVEEAALIKALETGVIAGAALDVFEFEPKIGEDFAKLDNVVLTPHIGNATVETRAAMGKIAIANVEAVLAGKAPLHSVY

SEQ ID NO: 48393 - protein, 178 aa, Bacillus cereus ATCC 10987
MSEKTYELATFAGGCFWCMVKPFDELPGIHKVRSGYAGGHVENPTYEQVKAGTSGHLEVVQITFDPSIFPYKKLLDLYWPQIDPTDDGGQFFDRGPSYRTAIFYHNETQKELAEKSKQALAESGMFKEPIVTEIRPAAPFYEAEEYHQHFYKKNPEKYATEQKESGREDFIKENWQKK

SEQ ID NO: 48394 - protein, 525 aa, Triticum aestivum
RLVGCCNELNAAYAADGYARARDGGVGACAVTFTVGGLSAINAVAGAFSENLPVICIVGGPNSNDYGSNRILHHTIGIPDFTQELRCFQNVTCYQAVVNNLEDAHEQIDTAISTALKESKPVYISISCNLPSIPHPTFSRHPVPFFLSPKLSNQMTLEAAVETAAAFLNKSVKPVLVGGPKMRVAKACEAFVELADACGYPVAAMPSAKGLVPEHHSRFIGTYWGAVSSPFCAEIVESADAYLFAGPIFNDYSSVGYSLLLKKEKAIIVQPDRVVIGNGPAFGCVLMKDFLHALGTRLKKNTAAYDNYSRIFVPQGEPLSSAPGEPLRVNVLFKHIQKMLSGDSAVIAETGDSWFNCQKLKLPEGCGYEFQMQYGSIGWAVGATLGYAQAAKGKRVISFIGDGSFQVTAQEVSTMLRWEQNNIIFLINNGGYTIEVEIHDGPYNVIKNWNYTGVVEAFHNGEGKCYTAKVRTEEELKKAIEASLGPNKDSLCFIEVIVHKDDTSKELLEWGSRVSAANSRPPNPQ

SEQ ID NO: 48395 - protein, 387 aa, Rauvolfia serpentina
MGFARLLHLVFSLLVFAGITNGLICPFDSIYQLGDSFSDTGNLIRLPPDGPTFTAAHFPYGETFPGTPTGRCSDGRLIIDFIATALNLPLLNPYLQQNVSFRHGVNFAVAGATALDRSFLAARGVQVSDIHSHLSAQLNWFRTYLGSICSTPKECSNKLKNALFILGNIGNNDVNYAFPNRTIEEIRAYVPFITEAVANATREIIRLGGSRVIVPGIFPIGCVARNLNFLNFFPDGDKDDLGCLSSLNNLSIYFNSLFQRALASLSIEFPQAVIIYADYYNAWRFLFRNGPALGSNSTSLLKCCCGIGGPYNYDPDRECGSRGVPVCPNPTQYIQWDGTHFTQAAYRRVAEYVIPGIIKALKCSYSNIQPFLREGEGRQALRLNERE

SEQ ID NO: 48396 - protein, 343 aa, Listeria monocytogenes str. 4b F2365
MKAVVKTNPGYDQMELRDVEEPQVYGDKVKIKVAFTGICGSDIHTFKGEYKNPTTPVTLGHEFSGVVVEVGPDVTSIKVGDRVTSETTFETCGECIYCKERDYNLCSNRRGIGTQANGSFAEFVLSREESCHVLDERISLEAAALTEPLACCVHSALEKTTIRPDDTVLVFGPGPIGLLLAQVVKAQGATVIMAGITKDSDRLRLAKELGMDRIVDTLKEDLAEVVLGMTDGYGAERVFDCSGAVPAVNQGLPLTKKKGDFVQVGLFAEKKNAIDEESIIQREIAYIGSRSQKPSSWILALDLLANGKINTDKMITKVYGLDDWREAFEAVMAGNEIKVLVKS

SEQ ID NO: 48397 - protein, 442 aa, Solanum tuberosum
QTCLDPDASRSVLGIILGGGAGTRLYPLTKKRAKPAVPLGANYRLIDIPVSNCLNSNISKIYVLTQFNSASLNRHLSRAYASNMGGYKNEGFVEVLAAQQSPENPHWFQGTADAVRQYLWLFEEHTVLEYLILAGDHLYRMDYEKFIQAHRETDADITVAALPMDEKRATAFGLMKIDEEGRIIEFAEKPQGEQLQAMKVDTTILGLDDKRAKEMPFIASMGIYVISKDVMLNLLRDKFPGANDFGSEVIPGATSLGMRVQAYLYDGYWEDIGTIEAFYNANLGITKKPVPDFSFYDRSAPIYTQPRYLPSSKMLDADVTDSVIGEGCVIKNCKIHHSVVGLRSCISEGAIIEDSLLMGADYYETDADRKLLAAKGSVPIGIGKNCHIKRAIIDKNARIGDNVKIINKDNVQEAARETDGYFIKSGIVTVIKDALIPSGIVI

SEQ ID NO: 48398 - protein, 350 aa, Listeria monocytogenes str. 4b F2365
MRAAVLYENNVIKAEQIDEATCGKDQVRVEVKAVGICGSDIHKMQTRWKYPLPAVMGHEFAGVVTEIGSEVTNVAIGDRVAGIPLEPCMECNYCKAGDFALCDNYRMVGSHFHGGFAENVVMKADNVISIGDLDFEEGAMIEPLAVSMHGVLGIQPRLGDTVIVFGIGTIGILVVQCLLLAGVKDIIAVDISDKKLADAREFGCKYTINPKNEDLKERVFAYTNGLGADIALECAGSKITQEQCLLVTKKKGKVGYLGIAYADVLLHEEAFENIFRRELTLKGFWNSYSAPFPGEEWRTSIEFVKQGRIKLKPLISHRYKLEETKEAFDMILSREHDYNKVMILPQKGDD

SEQ ID NO: 48399 - protein, 335 aa, Bacillus cereus ATCC 10987
MKTYYEKDANVELLKGKTVAVIGYGSQGHAQAQNLRDSGVEVVVGVRPGKSFEVAKTDGFEVMSVSEAVRTAQVVQMLLPDEQQAHVYKAGVEENLREGQMLLFSHGFNIHFGQINPPSYVDVAMVAPKSPGHLVRRVFQEGNGVPALVAVHQDATGTALHVALAYAKGVGCTRAGVIETTFQEETETDLFGEQTVLCGGVTALVKAGFETLTEGGYRPEIAYFECLHELKLIVDLMYEGGLTNMRHSISDTAEFGDYVTGSRIVTDETKKEMKRVLTEIQQGEFAKKWILENQAGRPTYNAMKKAEQNHQLEKVGAELREMMSWIDAPKELVKK

SEQ ID NO: 48400 - protein, 442 aa, Solanum tuberosum
QTCLDPDASRSVLGIILGGGAGTRLYPLTKKRAKPAVPLGANYRLIDIPVSNCLNSNISKIYVLTQFNSASLNRHLSRAYASNMGGYKNEGFVEVLAAQQSPENPDWFQGTADAVRQYLWLFEEHTVLEYLILAGDHLYRMDYEKFIQAHRETDADITVAALPMDEKRATAFGLMKIDEEGRIIEFAEKPQGEQLQAMKVDTTILGLDDKRAKEMPFIASMGIYVISKDVMLNLLRDKFPGANDFGSEVIPGATSLGMRVQAYLYDGYWEDIGTIEAFYNANLGITKKPVPDFSFYDRSAPIYTQPRYLPPSKMLDADVTDSVIGEGCVIKNCKIHHSVVGLRSCISEGAIIEDSLLMGADYYETDADRKLLAAKGSVPIGIGKNCHIKRAIIDKNARIGDNVKIINKDNVQEAARETDGYFIKSGIVTVIKDALIPSGIVI

SEQ ID NO: 48401 - protein, 286 aa, Magnaporthe grisea 70-15
MEQAKALNALEPFLALSKAATAPRAAADLVLQATSAPNTFIFTELLAQPEIQALVTSADYSPALTVLQVFSYGTWATYAQTPGLPPLNDAQALKLRQLSLLTMARDKDALKYDVLMSGLQLQTKSELESLVVSAVYAGLITAKLDPAHGIVRVSSVSPLRDLAPGTVPDLINELHQWYDRCRSALDDLDAEIATIRQTAATRVTEKSEWDSKMQRLIEDEKNATDSGGGGTSSSRKLPTGLGSGRRLGFGKRANVGSMADAGDEAMDVDTDDDDSNTKKRSSRRKL

SEQ ID NO: 48402 - protein, 414 aa, Xanthomonas campestris pv. campestris str. 8004
MTIKSLALQCRDAAQVLSQLSADAKQALLLAMANALDTDATQILQANQRDVDAAREKGTGAAMLDRLTLTPARLSAVGAALREVAVLPDPVGQVTRDDVRPNGIRVQKVRVPLGVIAMIYEARPNVTADAAALCIKAGNGVILRGGSEAIHSNTAIARALQRALREAGVPEAALTLVEDLRRETMLELLQLSDIVDLAIPRGGEGLIRFVAEHARVPVIKHYKGVCHLFVDASADVDLAVRLLVDGKASRPSACNSLETLLVHADIAERFLPAAAAALRARNVELRGDAATRAVLPEIAAASDDDYAAEFLDLILAIRVVPDLDTALAHIRQYGSDHTEVIATQTPANAETFVQSLRSAVVMVNASSRFSDGGELGLGAEIGISTTRLHSYGPMGLEALTVERFVVRGEGQVRH

SEQ ID NO: 48403 - protein, 581 aa, Neurospora crassa
MCGIFACHNHPDVAKFKPTALKLSKAIRHRGPDWSGSVTCHNTILCHERLSIVGVESGAQPLTNADESIAVAANGEIYNHRLIRKHLKNPYHFKTTSDCEVIIPLYLEHGVDAPKHLDGMFSFVLYDKKQDRTIAARDPIGITTLYKGYNSQEPGTVYFASELKSLHPVCDKIEAFPPGHVFDSLTGETTRYFEPSWWDEKKCPQTPLDLKLLRETLEKSVRKRLMAEVPYGVLLSGGLDSSLVAAIAQRESLRLRKLAEEQAALNQEVDPEAQDKGEGLVGIDDENKLSTVTFLPQLNSFSIGLPGSPDNKAALEVAKFLGTKHHVMTFTIEDGLNALSDVIYHLETYDVTTIRASTPMYLLSRKIKAMGIKMVLSGEGSDEIFGGYLYFHGAPNKEEFHEECVRRVKNLHLADCLRANKSTSAWGLEARVPFLDKEFLEVALNIDPQEKMITKEKLEKYILRKAFDTKDQPEGAYLPDNILYRQKEQFSDGVGYGWIDALKDQAELQVTDEMMKNPKPEWGDDIPDTKEAYWYRCMFDEHFPPSCASTVMRWTPKWVKQTDPSGRAISIHQAKYDHVDE

SEQ ID NO: 48404 - protein, 401 aa, Cucumis melo
MDYVYAPGKNHLFVPGPVNIPEPVLRAMNRNNEDYRSPAVPALTKTLLEDVKKIFKSTTGTTFLIPTTGTGAWESALTNTLSPGDRIVSFLIGQFSLLWIDQQQRLNFNVDVIESDWGQGANLDVLESKLATDGGHTIKAICIVHNETATGVTNDLSKVRFLLDKYKHPALLLVDGVSSICALDFRMDEWGVDVALTGSQKALSLPTGLGIICASPKALEASKTSKSVKVFFDWKDYLKFYNLGTYWPYTPSIQLLYGLRAALDLLFEEGLDNVIARHSRLGKATRLAVEAWGLKNCTQKEEWFSDTVTAVLVPSYIDSAEIVRRAWKRYNLSLGLGLNKVAGKVFSIGHLGNLNELQLLGCLAGVEMILKDVGYPVKLGSGVAAASAYLQNNIPLIPSRI

SEQ ID NO: 48405 - protein, 334 aa, Geobacter metallireducens GS-15
MHAETHLDQSITGRFKYAIILTTFTLVAEVAGGIWTNSLALLSDAAHVFLDLFALILSLAAIKLAGYPASDTRTFGWHRTEVFASFINGATVFLMAIGIFYEAWERLRHPVEVKSLPMLVIAAVGLVMNLVAASALHSHSHDDLNVRSAFLHVIGDAAASVGVIIGGVIMYYTSWYLLDAIISAGIGCVIFWGSWRVIRESSHILMEGVPRGMSTREVAIAMQEVEGVNTVHHLNIWTICSHILALSAHVDVEPEHKERQADVLRRLEELLFERYHISHTTLQAECTRCAETPPIIKELRHRPRHGQHHDHHGHDHGHGHDHHGHDHDHCHHDH

SEQ ID NO: 48406 - protein, 348 aa, Deinococcus radiodurans
MRALSKQQPGEGIWMIETEVPTPGPNDLLIRIRKGSICGTDVHIYKWDDWASQTVPVPMVVGHEYVGVVAGMGSEVRGFEIGDRVSGEGHVTCGHCRNCRAGRRHLCRNTQGVGVNRPGSFAEYLVLPAFNAFKLPDDIPDDVAAIFDPFGNAVHTALSFDLVGEDVLITGAGPIGCMAAAVARHVGARNVVITDVNDYRLDLARQMGVTRAVNVAREDLWTVATQELDMHEGFDVGMEMSGSGPAFAQMVSVMNNGGKVALLGIPSGEVQIDWNAVIFKMLTIKGIYGREMFETWYKMAALIQSGLDLTPVITHHYGIGDFQQGFDAMLSGQSGKVILDWETEEQSA

SEQ ID NO: 48407 - protein, 168 aa, Meiothermus ruber
TYATWWIRQAINRAIADQARTIRIPVHMVETINKLTRTARRMQQELGREPSYEEIADAMGPGWDAKKVEETFKIAQEPVSLETPIGDEKDSFYGDFIPDEHMASPVDSAAQSMLSEELEKALGKLSEREAMVLKLRKGLIDGREHTLEEVGAYFGVTRERIRQIENKA

SEQ ID NO: 48408 - protein, 328 aa, Arabidopsis thaliana
MRPILMKGHERPLTFLRYNREGDLLFSCAKDHTPTLWFADNGERLGTYRGHNGAVWCCDVSRDSSRLITGSADQTAKLWDVKSGKELFTFKFNAPTRSVDFAVGDRLAVITTDHFVDRTAAIHVKRIAEDPEEQDAESVLVLHCPDGKKRINRAVWGPLNQTIVSGGEDKVIRIWDAETGKLLKQSDEEVGHKKDITSLCKAADDSHFLTGSLDKTAKLWDMRTLTLLKTYTTVVPVNAVSLSPLLNHVVLGGGQDASAVTTTDHRAGKFEAKFYDKILQEEIGGVKGHFGPINALAFNPDGKGFSSGGEDGYVRLHHFDSDYFNIKI

SEQ ID NO: 48409 - protein, 401 aa, Cucumis melo
MDYVYGPGRNHLFVPGPVNIPEQVLRAMNRNNEDYRSPAVPALTKTLLEDVKKIFKTTSGTLFLFPTTGTGAWESALTNTLSPGDRIVSFLIGQFSLLWIDRQQRLNFKVDVIESEWGEGAKLDVLAAKLAADTDHTIKAVCIVHNETATGVTNDLSLVRRILDEYRHPALFLVDGVSSICALDFRMDDWGVGVALTGSQKALSLPTGVGIVCASPRALEASKTAKSLRVFFDWKDYLKFYNLGTYWPYTPSIQLLYGLRAALDLVFEEGLENVIARHKRLGQATRLAVEAWGLKNCTQKEEWHSDTVTAVVVPPYIDSAEIVRRAWKRYNLSLGLGLNKVAGKVFRIGHLGNLNELQLLGCLAGVEMILKDVGYPVKLGSGVAAASSYLQNNIPLIPSRI

SEQ ID NO: 48410 - protein, 450 aa, Triticum aestivum
MGKGAGAAGVDEPLLPELSGGHGGGASVSGAVFNLSTSIIGAGIMSIPAAMRVLGVVPALALIAAVALLSDVSVEFMLRYTAWASGTPSYAGIMGDAFGRRAGAAALNIFIAFTTAGTLVVYLIIIGDVLSGSVEGGGEHAGVLQELFGRQWWTGREFVILATAVVVLLPLVLLRRVDSLRYTSAVSILLAAVFMLITMGIAVYTVFTGTAKMPRMLPDFSTLASPFELFTAVPVIVVAFTFHFNVHPIRAELSKTSDMKSAVRISLVLCAAIYAAVGFFGFLLFGDATMPDVLANFDRSSGSGVPQALNDAARLSYALHLVLVFPLLHYSLRVNVDELLFPGRRPLATDTRRFVALTAVLMAVLYVLAIAIPSIWTLFQYSGSTFAVCISLIFPGAIVLRDVHGIAKRKDKAMAAMMITLAVITSSIAIASNVMSSIKGEVKGVNAGAS

SEQ ID NO: 48411 - protein, 401 aa, Cucumis melo
MDYVYAPGKNHLFVPGPVNIPEPVLRAMNRNNEDYRSPAVPALAKTLLEDVKKIFKSTTGTTFLIPTTGTGAWESALTNTLSPGDRIVSFLIGQFSLLWIDQQQRLNFNVDVVESDWGQGANLDVLESKLATDGGHTIKAICIVHNETATGVTNDLSKVRFLLDKYKHPALLLVDGVSSICALDFRMDEWGVDVALTGSQKALSLPTGLGIICASPKALVASKTSKSVKVFFDWKDYLKFYNLGTYWPYTPSIQLLYGLRAALDLLFEEGLDNVIARHSRLGKATRLAVEAWGLKNCTQKEEWFSDTVTAVLVPSYIDSAEIVRRAWKRYNLSLGLGLNKVAGKVFRIGHLGNLNELQLLGCLAGVEMILKDVGYPVKLGSGVAAASAYLQNNIPLIPSRI

SEQ ID NO: 48412 - protein, 360 aa, Triticum aestivum
MGSTAADMAASADEEACMYALQLVSSSILPMTLKNAIELGLLETLVAAGGKLLTPAEVAAKLPSTANPAAADMVDRMLRLLASYNVVSCTMEEGKDGRLSRRYGAAPVCKFLTPNEDGVSMAALALMNQDKVLMESWYYLKDAVLDGGIPFNKAYGMSAFEYHGTDPRFNRVFNEGMKNHSIIITKKLLEVYKGFEGLGTIVDVGGGVGATVGAIVAAYPAIKGINFDLPHVISEAPPFPGVTHVGGDMFQKVPSGDAILMKWILHDWSDEHCATLLKNCYDALPAHGKVVLVECILPVNPEATPKAQGVFHVDMIMLAHNPGGRERYEREFEALAKGAGFKAIKTTYIYANAFAIEFTK

SEQ ID NO: 48413 - protein, 401 aa, Cucumis melo
MDYVYGPGRNHLFVPGPVNIPEQVLRAMNRNNEDYRSPAVPALTKTLLEDVKKIFKTTSGTPFLFPTTGTGAWESALTNTLSPGDRIVSFLIGQFSLLWIDQQQRLNFKVDVIESEWGEGAKLDVLAAKLAADTDHTIKAVCIVHNETATGVTNDLSLVRRILDEYRHPALFLVDGVSSICALDFRMDDWGVDVALTGSQKALSLPTGIGIVCASPRALEASKTAKSLRVFFDWKDYLKFYNLGTYWPYTPSIQLLYGLRAALDLVFEEGLENVIARHKRLGQATRLAVEAWGLKNCTQKEEWHSDTVTAVVVPPYIDSAEIVRRAWKRYNLSLGLGLNKVAGKVFRIGHLGNLNELQLLGCLAGVEMILKDVGYPVKLGSGVAAASSYLQNNIPLIPSRI

SEQ ID NO: 48414 - protein, 811 aa, Cryptococcus neoformans var. neoformans B-3501A
MTGGAFFAPAADNDEEYDMGPVGEAHAVQWIGTAGVKGPKWARLPLLTVGMLGIQCVWSIEMGYASPYLLELGLSKSFMSLVFMAGPLSGLIVQPLVGIFADRSRSPLGRRRPFMLAGCLICVSAMMLLGWSREVAAIFGGGQWLAITLAVWAIYCIDFSINAVMSTDRALVVDTLPPREQEEGSAWAGRMFGFGSVAGFFVGNLDLAPVLPFLGKTQLQILSFLTSAVLMVTHSFTSWAVSERVLLRDDRPQSKSSLKSNLKSIWENMFSLPPGIRTVCIVQFFASLGWFPILFFTTVWVSEIYKSSVPSDGIDPATFDSRAVRSGARALLLQALVNIITSIGMPFLVAESGVQPSESVDGYEAIEGSSSRRVGLETANGDGRSPQASVATPPNSALWKRAREDLENGTVFRRFLHSVQSMVNNVKKGELGIPIKGLTLVKVWWISQFVFAAAMAGSWFVKSVGGAYVIIATTGFCWALSQWAPYSLLGELILIDGSIQRNQSINLSRMRARRNSSDAQSRPSSALFDAEETSHPIIPPSNTNFSRVSTPLHSRHASRTSLVLDRSNRHSRDRTRPSSPSSNLDRPANFDREKFMSHKSNLSLEGEGLSPLVIQGDTPVEPAFGSTVVLRHSDEMSRSEGEDDEYEMGQVRGNSSSTHHSPRASGDYDMNGTKGTADKAGVILGIHNVFLVLPQFIVTVLSSVIFWLMEPSKSLPTHHPGSVPVTDTNTTAAIAAIANSSVLEDAVSATMEVAEQVAKRTVELVSREGVDVDVSSPDAVGLIFRIGGVSAAVGGWICWRLARDWARGQGV

SEQ ID NO: 48415 - protein, 447 aa, Lactococcus lactis subsp. lactis Il1403
MAANKKRISQISKETGVQNRVLVEKAQEIGLLVKSHSSSVGPGEERRLLEALNVKPVVVEKMDSPKTLARVEVKENGDTFNVKAYEKAVKSYITKRKPLGEALDEEIMDELSVKFGIVDDALEDLFKQIQDAGISIVDKDGNPSPLALVTDEIEKEEVSDTAMDEIVTNVRIDDPVRMYLKEIGRYPLISLDEETKLAEAIIAGGEGAEFAKQMLAEANLRLVVSIAKRYSGRGMQFLDLIQEGNMGLMKAVDKFDHTKGFKFSTYATWWIRQAITRAIADQARTIRIPVHMVETINKLIRVQRNLLQELGRDPSPEEIGKELHMAPDKVREVLKIAQEPVSLETPIGEEDDSHLGDFIEDDVIESPVDYTNRILLREQLDEVMDTLTDREENVLRMRFGLDDGRMHTLEDVGKQFKVTRERIRQIEAKAIKKLRHPRRSKPLRDFM

SEQ ID NO: 48416 - protein, 597 aa, GIBBERELLA ZEAE PH-1
MTVNKRTKQWWKQATIYQIYPASFCDSNGDGMGDLQGIISKLDYISSLGVDVIWVCPMYDSPQVDMGYDISNYEDVYAPYGTLQDMEELIRKTHEKGMKIMLDLVINHTSDKHAWFEESRLSKDSPKRDWYIWRPAKYSPDGQRLPPNNWRSNFGKGSVWEWDEATGEYYLHLFAKEQPDLNWENPETRRAIYASSMEFWLDRGVDGFRVDTVNMYSKIQDFPDAPIVDLKAEYQPAGLLYCNGPRMHEFLSEMSEVLERYGAITVGELPHTPDLERVLRYVSAKEKQLNMVFQFDVVDVGFGKTHKYETTPRNYTLPQLKDAFGRTQSLIHGTDAWTTVFMENHDQARSVSRFTNDSPQYRVAGAKLLALLQSCLSGTQYVYQGQEIGSVNAPKESYPLENYVDIESYQFLDIVKERSNNDEQEIDKAFNALQHLARDHARIPICWSDSKHGGFSEAAEKAGLPIKKPWMQAHPLSQEVNVASQLDDPQSVLSFWKKAISFRKEFPDLTVYGDYKVIRQDDPDIYAFVKESLADGSKVAVVLNFTTENKAWSAPTSEELGVHSGKDIKLVPIMSTHSGKEKTAVLSPFEGRVYLVT

SEQ ID NO: 48417 - protein, 530 aa, Colletotrichum trifolii
MPTLGFLKKKRTREGNQDPQGSLPTSPVTPTSSKPFDSSISTTLSSLSNNSQATSQPSGPGQKQQEDPASSEAAKNQQMYPVTVHPAPNQQHYNQQGEPQQNLPSISNLINPTQHDASSNGHNYLAHATQTSQPNPSPGTDPTRLQQQQAQSMLHPPTQPQQQQQQQQQQQQQQQQQQQQQQQQQQTQTQQPTAKERHAATGAGPAGRQTKGKYTLQDFDILRTLGTGSFGRVHLVQSKHNQRFYAVKVLKKAQVVKMKQVEHTNDERRMLGEVKHPFLITLWGTFQDSKNLYMVMDFVEGGELFSLLRKSGRFPNPVAKFYAAEVTLALEYLHSRDIIYRDLKPENLLLDRHGHLKITDFGFAKRVPDKTWTLCGTPDYLAPEVVSNKGYNKSVDWWSLGILIYEMLCGYTPFWDSGSPLKIYENILKGKVKYPAYINPDAQDLLSKLITADLTKRLGNLYGGPNDVKTHPWFQEVTWDRLARKDIDAPYTPPVKAGAGDASQFDRYPEDPERYGSSGHDEYGHLFTDF

SEQ ID NO: 48418 - protein, 371 aa, Bacillus cereus ATCC 14579
MKTLELQERLTEIFQHLHENPEVSWKEYETTAYITDFLKEEGISYRTFDDCPGVIAEIGGGNPVIAIRADMDALWQEVNGEFKANHSCGHDAHMTIVMGLILQLKNMRWKSGTVRFIFQPAEEKGNGALKMVEKGAVDDADFLFGVHLRPIEELSLKQAAPSIRHGAAGFLEGMIHGEDAHGARPHQGVNAIDVISMINIGLKNIWLPPQSSYSVKMTRCQAGGDNLNIIPGNGHFSLDVRAESNILLEELKKKIEHVIESAASMGSKTSYEWMDLAPGAEVSEEAERFMRKGILEVYGEERCTGPLYTTGSDDFHYYTVKRPHLKAVMLGLGADLQPGLHHPYMRFDHSCIMDGVEILKQTVLKVLEDRG

SEQ ID NO: 48419 - protein, 402 aa, Oenococcus oeni PSU-1
MGAVTPLGSSVNEFVSGLRKQQVGFRPISTFDSSATGVTLAGEAADFDPLVRLSKKDLRRMDRFSQFAVYSALEAYQQAGLEDQTPDPERFGVIYGSGIGGLTTIQEQVIRMHDLGADRVSPMFVPTAIANMAAGNLAIRFHAQNICMTIVTACSSGANAIGEAFRAIESGRADIMLTGGSEASINEIGIGGFAALSTLSKATDPTKASLPFDKNRNGFVMGEGGGTLILESLEHAQKRGAEILGELVGYGASEDAYHITSPDPAGTQAARAMRLAIEEAGLKAEQIGYINAHGTATHGNDFAEAAAINQVFSKDQQVLVSSSKSMTGHLLGAAGAIEAVATVSALRDGQLPVNVGITEQDPECQVNLVTEENAQTKVDYALSNSFGFGGHNAVLAFKKWSD

SEQ ID NO: 48420 - protein, 290 aa, Vicia faba
MEAKEQDVSLGANKFPERQPIGIAAQSHDDGKDYKEPPPAPLFEPSELTSWSFYRAGIAEFVATFLFLYITILTVMGVNKSQSKCATVGIQGIAWSFGGMIFALVYCTAGISGGHINPAVTFGLFLARKLSLTRAVFYIVMQVLGAICGAGVVKGFEGKAFFGEKGGGANFVAPGYTKGDGLGAEIIGTFVLVYTVFSATDAKRSARDSHVPILAPLPIGFAVFLVHLATIPITGTGINPARSLGAAIIFNQDRGWNDQWIFWVGPFIGAALAALYHTVVIRAIPFKSRS

SEQ ID NO: 48421 - protein, 57 aa, Zea mays
MPFTASDICKILLAIILPPVGVFLERGCGADFLINILLTILGYIPGIIHALYIIFKF

SEQ ID NO: 48422 - protein, 525 aa, Streptococcus criceti
MAKDIKFSADARSAMVRGVDVLADTVKVTLGPKGRNVVLEKSFGSPLITNDGVTIAKEIELEDHFENMGAKLVSEVASKTNDIAGDGTTTATVLTQAIVREGLKNVTAGANPIGIRRGIERAVATAVEGLKAIAQPVSGKEAIAQVAAVSSRSEKVGEYISEAMEKVGNDGVITIEESRGMETELDVVEGMQFDRGYLSQYMVTDNEKMVADLDNPYILITDKKISNIQDVLPLLEEVLKTSRPLLIIADDVDGEALPTLVLNKIRGTFNVVAVKAPGFGDRRKAMLEDIAILTGGTVITEDLGLELKDASIASLGQAAKITIDKDSTVIVEGAGQADAIAERVNVIKSQLETTTSDFDREKLQERLAKLSGGVAVIKVGAATETELKEMKLRIEDALNATRAAVEEGIVAGGGTALVNVIEKVASLDVKGDEATGRNIVLRALEEPVRQIARNAGYEGSVIIEKLKASAVGTGFNAADGSWVDMVEAGIIDPVKVSRSALQNAASVASLILTTEAVVADHPEEK

SEQ ID NO: 48423 - protein, 235 aa, Glycine max
MAMASSTRRLAFVLLGLAFSAALAESRDAYMRSADRYACILTQESFPVASKGSGLTSANGKLCVLCEQYSTEALIYLRQNETQAEILSALHHTCASLGPLRQQCITLVDYYIPVFFLEVSVVKPEELCESAHLCPKGAATRSSTRGDACGLCHHVLVEVLMMLKDPNTKLEIVGLLFKTCSKAKNYEPQCKRLVLDYIPLILVKTQEFLETTDVCFATHACKTGMQATIPLSAAL

SEQ ID NO: 48424 - protein, 229 aa, Magnetospirillum magnetotacticum MS-1
MDKDFPDLSRIETWVFDLDNTLYPASSSLFPQIDVRMRRFIAERLNLSLDDAYALQKRYYKEFGTTLRGLMLVHKIEPEAFLAFVHDIDCTVLDAAPRLDAALSSLSGRKLIFTNGSERHAENVLARLGLARHFEGIFDIRAARFIPKPQPECYQLMIDRHAVDPRSALMVEDIHRNLRPAAAIGMTTLWVKEDGHPDTEVLGQDGGDLSHVHHITDDLAAWLERAARG

SEQ ID NO: 48425 - protein, 228 aa, Capsicum annuum
MATAEMEKTTTFDEAEKVKLNANEADDEVEEGEIVEETDDTTSYLSKEIATKHPLEHSWTFWFDNPEAKSKQAAWGSSLRNVYTFSTVEDFWGAYNNIHHPSKLVVGANLHCFKHKIEPKWEDPVCANGGTWKMSFSKGKSDTSWLYTLLAMIGHQFDHEDEICGAVVSVRGKGEKISLWTKNAANETAQVSIGKQWKQFLDYSDSVGFIFHDDAKRLDRNAKNRYTV

SEQ ID NO: 48426 - protein, 670 aa, Bartonella quintana str. Toulouse
MATKVKQKDNTEVKGQASVDSPLLDFSDDAIKKMVKLAKKNGYVTMDELNAVLPPDEVTSEQIEDTLAMFSEMGINVVDDEDEGESEHYEEEVTVEGGDLVEVTRNAIATTTKREVTDRTDDPVRMYLREMGAVELLSREGEIAIAKRIEAGRETMIAGLCESPLTFQALIIWREELKEQRILLREIIDLEMTYAGPEAKQAPVIERSEIGKIKEEKSFSGTRDMEENITRDIGVEDDEEEDDDVNLSLAAMENELCPQVMETLDFIAEAYIKLRKLQDQHVESSLAERKEGTLSLSQKKKYIQLKSELIQAVKSLSLNQNRIEALVEQLYDINKRLIHNEGKLKRIANNYGVSHEEFLKEYQGRELDADWINYIATLSGRGWKEFSMREVKEIQSLRSEIQNLAQETAISIGEFRRIVTQVQKGERESTIAKKEMVEANLRLVISIAKKYTNRGLQFLDLIQEGNIGLMKAVDKFEYRRGYKFSTYATWWIRQAITRSIADQARTIRIPVHMIETINKIVRTSRQILHEIGREPTPEELSSKLSMPLEKVRKVLKIAKEPISLETPVGDEDDSHLGDFIEDRNALLPIDAAIQANLRDTTTRVLASLTPREERVLRMRFGIGMNTDHTLEEVGQQFSVTRERIRQIEAKALRKLKHPSRSRKLRSFLDS

SEQ ID NO: 48427 - protein, 434 aa, Cattleya bicolor
MSKVFGIEAPLSKIALSKAHGEDSPYFAGWKAYEENPYDAMNNPNGVIQMGLAENQLSFDLLEEYLEQHPDAFGWGSDLSGFRENALFQDYHGLQTFRKAMASFMEKIRGGRSKFDPNRIILTAGATAANELLTFILANPGDAILVPTPYYPGFLRDLQWRTGVTIFPVHCDSSNGFQLTLSSLEKAYADAKASNFKVKGLLITNPCNPLGTTASFSLLQDIILFISDKNIHLISDEIYSGSVFSSTNLFSISDLITDAVSEQIHIVYSLSKDLGLPGFRVGALYSYNDRVVKTARRMSSFSLVSSQTQKLLAFMLSDEEFTVRYIEKNRERLTERYELVVEGLKEARIECLKGEAGLFCWVNMEELMEEKTMEEELKLWKVIVEELKLNITPGSSCCCSEPGWFRVCFANMSRETLEVALRRLKDFAQKKDCR

SEQ ID NO: 48428 - protein, 214 aa, Arabidopsis thaliana
  misc_feature (103)..(103): Xaa can be any naturally occurring amino acid
  misc_feature (117)..(117): Xaa can be any naturally occurring amino acid
  misc_feature (126)..(126): Xaa can be any naturally occurring amino acid
  misc_feature (148)..(148): Xaa can be any naturally occurring amino acid
  misc_feature (154)..(154): Xaa can be any naturally occurring amino acid
  misc_feature (173)..(173): Xaa can be any naturally occurring amino acid
  misc_feature (186)..(186): Xaa can be any naturally occurring amino acid
  misc_feature (210)..(210): Xaa can be any naturally occurring amino acid
  unsure (1)..(214): unsure at all Xaa locations
ITYKTFFLYFLLTLIFPSPPPPLLLKFLQPPYFKHNHTPLFPTLSPPIPSFTIKTPTLFLTLLLFPFYHHTLNPKSLLLFSPYIIQYFHPTIIYPLDLFRSSXPIAVKSGFPITIAXALAFTFNLXLNGYRQGRWVSHYKDDYEDGNXFWWRFXVIGMVVFITGMYINITSDXRTLVRLKKENREXVIHEEGGWFKLVSCPNYLERQMSXLGWA

SEQ ID NO: 48429 - protein, 905 aa, Geobacter metallireducens GS-15
MGLAEKSDKILRYLPSPKKQLLALLLIVFVIELFLMVLLPRTADGGTPLAISLLDALLLVILSAPIIWLSIVRPLRSVAFTASLHTDLLLDHIADGIISFDGAGRLLSLNPAAEQLFGYQSAEATGRSLGDILAIRSTGKDNPLLTPLVCCGEEHSRLTCEAEGIRSDGSRFPAALSLSRVQMKGVWHFLGIVRDVTESRETGERLRETNEKLDTLIQASPQGIVAVDCGGKVTLWNRAAVEIFGWSAEEVLGKPYPVAPAERAAEHRKLRELVLQGKRITDVELRRRRKDGSPIDVSLSAAPICDGSGTPLGVITIISDISARKRNEQELVLLKRAMESSINGITITDATHPDNPIIYVNPAFERITGYGVDEVIDKNPRFLRGDDRDQAELKKLVQAFKEEREGCFVLRNYRKDGSPFWNELFIAPVRDRDGVVTNYIGVMNDITEHRRYEEQLVYQATHDPLTGLPNRNLLQDRLGQALALEAFRRRNPICVMFLDLDNFKKVNDTLGHTVGDMLLKAVANRLKNCLRGGDTVARLGGDEYIIVLPNVREVPDVITVAKKMINVFAAPLLLMGNEIYVTASIGIALFPTDGETVDALLKNADAAMYHAKEQGKNNYQFYSAEMNIRVFERLSLETSLHRAVKNQEFLLHYQPRVDLRNGRICGVEALVRWNHPEMGLVSPAKFIPLAEETGLIVPMGEWVLRTACAQNKAWQDAGLPPLRMAVNLSARQFRQENLIAMVEEILMETGLAPQWLELELTESLVMQEAEKSAAILRELTDRGIEVAIDDFGTGYSSLSYLKRFPIANLKIDQAFIRDMTRDPDDATLVKTIITMAHGLGMKTIAEGVELAEQIDFLCRHQCEEMQGYYFSRPITAEELGRLLADGKTLDLSPVNVDPRDRIRAV

SEQ ID NO: 48430 - protein, 581 aa, Saccharomyces cerevisiae
MSKQFSHTTNDRRSSIIYSTSVGKAGLFTPADYIPQESEENLIEGEEQEGSEEEPSYTGNDDETEREGEYHSLLDANNSRTLQQEAWQQGYDSHDRKRLLDEERDLLIDNKLLSQHGNGGGDIESHGHGQAIGPDEEERPAEIANTWESAIESGQKISTTFKRETQVITMNALPLIFTFILQNSLSLASIFSVSHLGTKELGGVTLGSMTANITGLAAIQGLCTCLDTLCAQAYGAKNYHLVGVLVQRCAVITILAFLPMMYVWFVWSEKILALMIPERELCALAANYLRVTAFGVPGFILFECGKRFLQCQGIFHASTIVLFVCAPLNALMNYLLVWNDKIGIGYLGAPLSVVINYWLMTLGLLIYAMTTKHKERPLKCWNGIIPKEQAFKNWRKMINLAIPGVVMVEAEFLGFEVLTIFASHLGTDALGAQSIVATIASLAYQVPFSISVSTSTRVANFIGASLYDSCMITCRVSLLLSFVCSSMNMFVICRYKEQIASLFSTESAVVKMVVDTLPLLAFMQLFDAFNASTAGCLRGQGRQKNRWVHQPSRILLPRCAHGICVSIPVSSGCRRLMVGYN

SEQ ID NO: 48431 - protein, 423 aa, Saccharomyces cerevisiae
MTKAYTIVIKLGSSSLVDESTKEPKLSIMTLIVETVTNLKRMGHKVIIVSSGGIAVGLDALNIPHKPKQLSEVQAIAAVGQGRLIARWNMLFSQYGEQTAQILLTRNDILRWNQYNNARNTINELLAMGVIPIVNENDTLSISEIEFGDNDTLSAITAALVGADFLFLLTDVDCLYTDNPRTNPDARPIVLVPELSEGLPGVNTSSGSGSEVGTGGMRTKLIAADLASNAGIETIVMKSDRPEYVPKIVDYIQHHFRPPRHIGNGTQQQFLDLQDTELEQLRRYDVPMHTKFLANDNKHKLKNREFWILHGLITKGAIIIDENSYDKLLSKDMASLTPNAVIEVRDNFHELECVDLKIGQRLPNGELDISKPIQSVGCVRSNYTSLELAKIKGLPSEKIHDVLGYSVSEYVAHRENIAFPPQF

SEQ ID NO: 48432 - protein, 447 aa, Nicotiana paniculata
MGKEKVHINIVVIGHVDSGKSTTTGHLIYKLGGIDKRVIERFEKEAAEMNKRSFKYAWVLDKLKAERERGITIDIALWKFETTKYYCTVIDAPGHRDFIKNMITGTSQADCAVLIIDSTTGGFEAGISKDGQTREHALLAFTLGVKQMICCCNKMDATTPKYSKARYDEIVKEVSSYLKKVGYNPDKIPFVPISGFEGDNMIERSTNLDWYKGPTLLEALDQINEPKRPTDKPLRLPLQDVYKIGGIGTVPVGRVETGVLKPGMLVTFGPTGLTTEVKSVEMHHEALQEALPGDNVGFNVKNVAVKDLKRGFVASNSKDDPAKGASSFTSQVIIMNHPGQIGNGYAPVLDCHTSHIAVKFAEILTKIDRRSGKELEKEPKFLKNGDAGMVKMIPTKPMVVETFSEYPPLGRFAVRDMRQTVAVGVIKNVDKKDPTGAKVTKAAQKKK

SEQ ID NO: 48433 - protein, 346 aa, Arabidopsis thaliana
MGTSSDPIQDGSDEQQKRSEIYTYEAPWHIYAMNWSVRRDKKYRLAITSLLEQYPNRVEIVQLDESNGEIRSDPNLSFEHPYPPTKTIFIPDKECQRPDLLATSSDFLRLWRIADDHSRVELKSCLNSNKNSEFCGPLTSFDWNEAEPRRIGTSSTDTTCTIWDIEREAVDTQLIAHDKEVFDIAWGGVGVFASVSADGSVRVFDLRDKEHSTIIYESSEPDTPLVRLGWDKQDPRYMATIIMDSAKVVVLDIRFPALPVVELQRHQASVNAIAWAPHSSCHICTAGDDSQALIWDISSMGQHVEGGLDPILAYTAGAEIEQLQWSSSQPDWVAIAFSTKLQILRV

SEQ ID NO: 48434 - protein, 233 aa, Brassica napus
QTGRLAYMHNVAEVCHRDLKPQNLLVDPLSHQVKICSFGGSKQTLQVLDAHSYILVRFRSLPELIFGATEYTTSIDIWSAGCVLAELLLGQPLFPGENAVDQLVEIIKVLGTPTREEIRCMNPHYTDFRFPQIKAHPWHKIFHKRMPPEAIDFASRLLQYSPSLRCTALEACAHPFFDELREPNARLPNGRPFPPIFNFKQEVAGASPELVNKLIPDHIKRQLGLSFLNQSGT

SEQ ID NO: 48435 - protein, 182 aa, Oryza sativa
  misc_feature (31)..(31): Xaa can be any naturally occurring amino acid
  misc_feature (64)..(64): Xaa can be any naturally occurring amino acid
  misc_feature (112)..(112): Xaa can be any naturally occurring amino acid
  misc_feature (119)..(119): Xaa can be any naturally occurring amino acid
  unsure (1)..(182): unsure at all Xaa locations
MSLIRRSNVFDPFSLDLWDPFDGFPFGSGGXSSGRCFPSFPRGDSSETAAFAGARIDWKETPEXHVFKADVPGLKKEEVKVEVDDGNILQISGERIKEQEEKTDKWHRVERXSGKFLRXFRLPENTKPEQIKASMENGVLTVTVPKEEPKKPDVKSIQITGLEHWANLKRFICGFKCIDHLC

SEQ ID NO: 48436 - protein, 308 aa, Oryza sativa
MGNSRRPAAAATAPSPSPPASDLEVGFAKLQGEDFEYYMQTYSIVLGRHSRRRNQPVGVGVGVGVGGGGGGGGDAAADDVDVDLGILGGGMNVSRRHARIFYDFPRRRFALEVLGKNGCLVEGVLHEPGGEPVKLDSQDLLQMGDAQFYFLLPTRSVFATDAARRASAAARRAVPPPPSSSSDGDDGEEEREAAVAKRPRNGDAGSLAGRKSEKGSKVTDNQITLNSCSWKRQMLSHQQMFEKYGDLWHHNRVRKYLTSEDWPKSETDGRPWHGLSLLLRKYPEHFVINIRMSGGRSIEFVSLVSLQP

SEQ ID NO: 48437 - protein, 1565 aa, GIBBERELLA ZEAE PH-1
MRETIQSYIVRISPPGSDKASPPVKGRDKGKAPRKRVGLTQVYPEPGSKRNHQKLKNDIIALHGLDATSPETWIGWKVDGDPNSGDVNWLEDKHMLPRFMPDSRILTYQWNANYDAYASSDRFSGHATSLLQDLHADRFSECRSNCPIIFIVSCFGGLLLAQALVIASHPTEPGHRQHSSILRHTIGAAFLGTPFGGSPLDDLANQFGNLIHSDKYKFPVMCVYETRHTDLSAYKRRLGANFSSMGLDENYHGIVVDSKSATISGMEAYGFDVRHNMLHKFNDSNDVNFKKIRHWLVKTADIAGETLGCKASNDRPVNDLYDDRSHSGSKSDTRLFDLPGSRVRKNPRKPEAREKLYNKLHFKTLGERYKNIWPAHRATCKWLLKNKEYQAWLDKGKLEDHHGVLWLKGNPGTGKSTLMKFAVSKLSMENPKDIHIFFFFNARGDALEQSTVGMYQSLLHQLFSQIPRLKYVFDDFAQFDLPETDIYESWALQTLESLLMHAISELGSHKLWVFVDALDEGNEKEVRKMITFFGGLGKEAKDANVDMRVLFASRHYPQITISHKVEIILESEKEHYLDIKRYVQSELYIKDGMTAQGIQDEVINRASGFFLWVVLVVEILNETAAKGMNQKEKLKELPDHLSTLFEGILTRDRENMKGTLLCIQWVLFSRKPLTREELYYAILHGANEKETRSWAADYVTIEIMDAFILTCSKGLVQFSGETAQFIHETVRDFLIHDNGMQLIASDATKSIKGAAHDTLKSCCLNCISSTLKIIWGSGRPVRFDNLDRLRGIYDSIVESGRKNYSKSKPLYKTPFLHYALFHLLHHANAAEAGGVSQVSFIQAFQLRSWVYLRKVFLELGTFNSLRSTFLYTLAEEGLGSLIMAMLHADPGKTPHLLVEELLRHEDVELNFRDAEKGRTPMWCDAEEGYEAIVKLLLERQGVDVESKDTEYGQTPLCVAARFGHREVVRLMLYGSSLAGSLKLFSSPRPISHPSHSLRCWNRDAEFNMAYQREFEMQAIPPPSPKTLPSTEPSSNTPTPDPDPDSTSPGALHRLLTSFTRAPPPSHSEDEYSLSSYNTSYATNGRLFNMSKANYNSANTALARELKNRHLQMIAFGGSIGTGLFVASGVALFRGGPASLLIAFITMGTMQFFTMQALGELSVAFPVGVLPLEIIAGAFTTNYWNPDASKSIFIILFFFLILGINLLGVKGYGEAEFIFSAVKITAVMGFILLGIIINIAGEPEGGYIGFSHWQNPGAFNNGFKGFASVLVTATFSFAGTEMVGLAAAETSNPKKSLPAAVKQVFWRISLFYILSILLIGLLVPYNEPRLLGAKYGSDAAASPFVIAIEMSGSDILPDIMNAVILISLISVGNTAVYASSRTIAALAEQSLAPKIFAYIDRAGRPLIAIICCGTVGLLAFVANSDIHNEIFNWLLAISGLSTLFTWASICVCHIRFRKAWRLSGYKLSQLAFKSQVGVWGSWVALAAYTTVLLLQFWVAISPIQPTDQAPFTTPERIKNFFLQVLTVPVILIFYIVHKLWMRTKIVRDKDIDIHTGRRYLQEYAAY

SEQ ID NO: 48438 - protein, 395 aa, Zea mays
MSPSSYFSIPPGLSPAELLDSPVPLHSSSNFFASPTTGAIPAQRRQQDDSRAAVGGAFNDFSFHAPTMPAQTTLFPSFKEQQQQQVEAATKSAVPSSNKASGGGGGTKLEDGYNWRKYGQKQVKGSENPRSYYKCTYHSCSMKKKVERSLADGRVTQIVYKGAHNHPKPLSTRRNSSGGVAAAEEQAANNSSLSGCGGPEHSGGATAENSSVTFGDDEAENGSQRSGGDEPDAKRWKQEDGENEGSSAGGGGKPVREPRLVVQTLSDIDILDDGFRWRKYGQKVVKGNPNPRSYYKCTTAGCPVRKHVERACHDARAVITTYEGKHNHDVPVGRGAASRAAAAAPLLGSGGGQMDHRHQQPYTLEMLSGGGGGYGGGYAAKDEPRDDLFVDSLLC

SEQ ID NO: 48439 - protein, 600 aa, Colletotrichum trifolii
MKEPSLPPRRWRKPSRQPSEAWYSRRGAARGFGILPTRTTQTALASSHPQGSLSTGGALSVAGSVRPGSSQRVAGSFINGAARPQTSGGSGFSGIPTNHGRISGKYMPYALLDFDKMQVFVNSVEGTPENPLWAGGNTQYKFDVSRVTELVIHLYIRNPMAPPGAGRSQDIFLGVVRINPRFEEKQAFVEDPKLSKKDREKAASESPVGTSPRQSESIWVDVQYGTGKLKIGVEYVETRAGKLKIEDFELLKLVGKGSFRKVMQVRKKDTNRIYALKTIRKPHIISRSEVAHTLAERSVLAQINNPFIVHLKNPFIVPLKFTFQSPEKLYFVLAFVNGGELSITCKGTEISRQPLRIYTAEAHVRPRVSHGFNVIYRDLKPENILLDYQGHIALCDFGLCKLDMKDEDATNTFCGTPEYLAPELLMGQGYNKTVDWWTLGVLLYEMLTGLPPFYDENTNEMYRKILSEPLHFPGHDVVPPAAKDLLTKLLNRDPKERLGANGSAEIKAHPFFHAIDWRKLLQRKYEPAFKPKVTDALDTANFDPEFTSEAPQDSYVEGPMLSQTMQNQFQGFSYNRPIAGLGDAGGSVKDPSFVGSIQDR

SEQ ID NO: 48440 - protein, 411 aa, Silicibacter sp. TM1040
MPRPRMGSCPGASAPWCFASNPSPASRPSPCQVLRSRRHKPPALRPKTPQTHLRCKAQRIDPKGRSHMTSLNKIPVTVITGFLGAGKTTLIRHLMQNPQGKRLAVVVNEFGTAGVDGDILKSCADDNCPAENIMELANGCICCTVADDFIPTIESLMALPEPPEHIVIETSGLALPKPLLKAFDWPAIRSRITVDGVIALADAEAVAKGQFAPDLDAVQAQREADESLDHETPLSEVFEDQIACADIVLLSKADLAGEAGVDKARAIIESEAPRKLPILPMTEGVIDPRVILGLEAAAEDDLDARPSHHDGHHDHEHDDFESIVVEMGEVSDPEDLQKRIIEMARSRNILRVKGYVAVEGKPMRMLVQAVGERLRAQYDQPWGAQERKTQLVVIAEHDNVDTAGIHADLGA

SEQ ID NO: 48441 - protein, 726 aa, Arabidopsis thaliana
MTEIDRSRAFAKDVKRIVVKVGTAVVTGKGGRLALGRLGAICEQLAELNSDGFEVILVSSGAVGLGRQRLRYRQLVNSSFADLQKPQMELDGKACAGVGQSSLMAYYETMFDQLDVTVAQMLVTDSSFRDKDFRKQLSETVKAMLRMRVIPVFNENDAISTRRAPYKDSTGIFWDNDSLAALLSLELKADLLILLSDVEGLYTGPPSDSTSKLIHTFIKEKHQDEITFGEKSKLGRGGMTAKVKAAVNAAYGGVPVIITSGYAAENISKVLRGLRVGTLFHQDAHLWAPVVDTTSRDMAVAARESSRKLQALSSEDRKQILHDIANALEVNEKTIKAENDLDVAAAQEAGYEESLVARLVMKPGKISSLAASVRQLAEMEDPIGRVLKKTQVADDLILEKTSSPIGVLLIVFESRPDALVQVSSLAIRSGNGLLLKGGKEARRSNAILHKVITDAIPETVGGKLIGLVTSREEIPDLLKLDDVIDLVIPRGSNKLVSQIKNSTKIPVLGHADGICHVYVDKSGKLDMAKRIVSDAKLDYPAACNAMETLLVHKDLEQNGFLDDLIYVLQTKGVTLYGGPRASAKLNIPETKSFHHEYSSKACTVEIVEDVYGAIDHIHQHGSAHTDCIVTEDSEVAEIFLRQVDSAAVFHNASTRFSDGFRFGLGAEVGISTSRIHARGPVGVEGLLTTRWIMRGKGQVVDGDNGIVYTHKDLPVLQRTEAVENGI

SEQ ID NO: 48442 - protein, 549 aa, Legionella pneumophila str. Paris
MKSIKQLIRLIHINYILAKNGLDNVVVSIKLFAPLRFIVYLNPWNWLRKEKLTRGEALRKSLEELGPIFIKFGQALSTRPDILPEDIAKELSKLQDKVPPFPSHIAMNIIEQAYKQSAYDVFAQFDPIALASASMAQVHAATLKTGENVVVKILRPNMRRLIEQDLSIMYTIAALTDRYWPEGKRFKPKEIVKEFEHTLLDELDLMREAANAAQLRRNFNQSPMLYIPEIYWDYCHHNILVIERIHGIPVTDIVSLRDHGIDIKKLAERGVEIFFTQVFRDCFFHADMHPGNIFVSYQNPKDPQYICVDFGIIGTLTDNDKRYLAENLVAFFNRDYKRVAELHVESGWVSRDTPVAEFESSIRTVCEPIFEKPLKDISFGQVVFRLFQVARRFHMEVQPQLILLQKTLLAIEGLGRQLYPELDLWATAKPFLEKWVREQMGPKAFIKRLKQNLPFFTEQLPHMPKLIFDILEMKKDQLLTVHEFTRLQSENNNQTIQWKSVGLGVFFSFLSLGVISYFDLLDYNHLTTITIAGSVLAGIFVLINRKIRN

SEQ ID NO: 48443 - protein, 151 aa, Triticum aestivum
MSIVRRSNVFDPFADLWADPFDTFRSIVPAISGGNNETAAFANARMDWKETPEAHVFKADLPGVKKEEVKVEVEDGNVLVVSGERTKEKEDRNDKWHRVERSSGKFVRRFRLPEDAKVEEVKAGLENGVLTVTVPKAEVKKPEVKAIEISG

SEQ ID NO: 48444 - protein, 140 aa, Populus balsamifera subsp. trichocarpa x Populus deltoides
LAMDINRENYELGLPVIQKAGLEHKIEFKEGPALPVLDQMIEDGKYHGTYDFIFVDADKDNYINYHKRLIELVKVGGLIGYDNTLWNGSVVAPADAPMRKYVRYYRDFVLELNKALAADPRIEICMLPVGDGITLCRRIK

SEQ ID NO: 48445 - protein, 387 aa, Burkholderia fungorum LB400
MRGRIAGPDALHLSSNDYLAIARHPDIIGSMAATLLENGNGLLMSGIFLHGDCPQLQFENRLATFMQAEAGVLCQSGYAANTGLIQSIASEQTPVYIDMMAHMSLWEGVRSAGAVPVAFRHNDAAHLEQQIGRYGQGIVLVDSVYSTTGSVCRLVSLADVCERHACVFVVDESHSLGTHGPRGAGLVVELGLQSRVAFRTASLAKAFAGRAGFISCPVDFQEYFKFESNPAIFSSTLLPHEISGLDATLSVIECADRRRTRLASSAAWLRQRLTELGYNLNGSRSQIIALEAGTEQRTIVLRDALESRGIFGSVFCAPATARNRALIRLSIHAALSDAQVEKIASVCRDIRSEVELDKWPSTRRLGDELSARRRQRETASEETAVTA

SEQ ID NO: 48446 - protein, 278 aa, Pseudomonas syringae pv. tomato str. DC3000
MNAFRYDAQQIKEQARLIRRNVITLNAGSPAGGHTGADLSETDILATLYFRILDISPERIEDPERDIYIQSKGHGVGGLYCCLAQAGYIPEAWLPEYQHFNSRLPGHPVRQKTPGIELNTGALGHGLPVAVGLALAAKMSGSNKRIYVLTGDGELAEGSNWEAAMAAAKYGLDNLFVIVDKNKLQLAGLTAEIMPLDPLDAKWAAFGFTVSECDGNDVGQLVTALEHMQLRKGAPQVLIAHTIKGRGVSFIEGRPEWHHRVPKGDEVSAALEELNHVE

SEQ ID NO: 48447 - protein, 197 aa, Beta vulgaris subsp. vulgaris
MSASRFIKCVTVGDGAVGKTCLLISYTSNTFPTDYVPTVFDNFSANVVVNGATVNLGLWDTAGQEDYNRLRPLSYRGADVFILAFSLISKASYENVSKKWIPELKHYAPGVPIVLVGTKLDLRDDKQFFIDHPGAVPITTAQGEELRKLIGAPAYIECSSKTQQNVKAVFDAAIKVVLQPPKTKKKKSKAQKACSIL

SEQ ID NO: 48448 - protein, 784 aa, Solenostemon scutellarioides
MALSFFLDTSVSVPLRCQGKMASHIVGYPRMGPKRELKFALESFWDGKSSAEDLEKCQLILGIHLKQMSDAGIKYIPSNTFSYYDQVLDTTAMLGAVPPRYNWTGGEIGFSTYFSMARGNASVPAMEMTKWFDTNYHFIVPELGPDVKFSYASHKAVNEYKEAKALGVDTVPVLVGPVSYLILSKPAKGVEKTFPLLSLLDKILPIYKEVIAELKAAGASWIQFDEPTLVLDLESHQLDAFTKAYAELESSLSGLSTLIETYFADVPAPAYKTLTSLSGISGFGFDLVRGAQTIELIKGGFPSGKYLFAGVVDGRNIWANDLASSITTLQALEGIVGKDKLVVSTSSSLLHTAVDLVNEPKLDQEIKSWLAFAAQKIVEVNALAKALTGHKDEAFFSPNAAAQASRKSSPRVNNEAVQKAAAALRGSEHRRVTNVSARLDAQQKKLNLPILPTTTIGSFPQTVELRRVRREFKPTRISEEEYVKAIKEEINKVVKLQEELDIDVLVHGEPERNDMVEYFGEQLSGFAFTANGWVQSYGSRCVKPPIIYGDVSRPKPMTVFWSTAAQSMTQRPMKGMLTGPVTILNWSFVRNDQPRFETCYQIALAIKDEVEDLEKAGITVIQIDEAALREGLPLRKSEHAFYLDWAVHSFRITNVGVQDTTQIHTHMCYSNFNDIIHSIINMDADVITIENSRSDEKLLSVFREGVKYGAGIGPGVYDIHSPRIPSTEEIADRINKMLAVLETNILWVNPDCGLKTRKYAEVKPALENMVAAAKLLRTQLASAK

SEQ ID NO: 48449 - protein, 894 aa, Oryza sativa (japonica cultivar-group)
MERGAPAAAGGRGGMGSTSVSTRGTEGGHGGVERKEQQQQRGYQLPRDSRGSLEVFNPSSASSFRTAAAAPKSASPFLAIPDREEDNVVAQQRAAEWGLVLQTDHHTGLPQGVSARPSSGSARTSSEDNPQQQQSAAAIPRVSEELRAALSVFQQTFVVSDATHPNHPIMYASAGFFNMTGYTSKEVVGRNCRFLQGSGTDPHEIDKIRQSLANGSNYCGRILNYKKDGTPFWNLLTIAPIKDEDGRLLKFIGMQVEVSKYTEGKKDTVVRPNGLSESLIKYDARQKDHARSSVSELLLALKNPRSLSESSNNTLKRKSQESLSMSMSEVPSKRSSESGSRRNSRSGTRSSLQKINEVPDQVNRTRKSGLRAFMGFLGMGHGSVEKNMLKPRDEDPLIDSDDERPESFEDEFRRKEMRRGIDLATTLERIEKNFVITDPRLPDNPIIFASDSFLQLTEYNREEILGRNCRFLQGPETDRATVRKIRDAIDNQAEVTVQLINYTKSGKKFWNLFHLQPMRDQKGDVQYFIGVQLDGTEHVQDDAAKEGVVLVKKTADNIDEAAKELPDANLRPKDLWANHSKVVLPNPHMKDTASWRAIQKVLESGESIGLKHFRPVKPLGSGDTGSVHLVELLNTGEYFAMKAMDKSIMLNRNKVHRATAERQILDLLDHPFLPTLYASFQTKTHICLITDYCPGGELFVLLDNQPLKVLHEDAVRFYAAEVVVALEYLHCQGIIYRDLKPENILLHRDGHISLTDFDLSCLTSCRPQVFLPEDADEKKGRKNGSYPIFFAEPMRASNSFVGTEEYIAPEIITGAGHTSAVDWWALGILLYEMLYGYTPFRGKTRQRTFANILHKDIRFPASISVSKSSVIFFKLEKLNRFEFSGQPSGEAANV

SEQ ID NO: 48450 - protein, 305 aa, Oryza sativa
MAAVAGGAARALSQAEQDVQMMLAADVHLGTKNCDFQMERYVYKRRSDGIYIINLGKTWEKLQLAARVIVAIENPQDIIVQSARPYGQRAVLKFAQYTGAHAIAGRHTPGTFTNQLQTSFSEPRLLILTDPRTDHQPIKESALGNIPTIAFCDTDSPMRYVDIGIPANNKGRNSIGCLFWLLARMVLQMRGTILPGHKWDVMVDLFFYRDPEEAKEQEEEAPAQDFAAITDYTAPEQWSADQWTSDVAAPPAATVGDWGAAPAPVAAAEGWDQAGAPVATEAAVVPPVAPTGWDPAAQPAAQGWD

SEQ ID NO: 48451 - protein, 482 aa, Brevibacterium flavum
MNANVRVFILNSLAMNDPQRPPTLLWFRDDLRLSDNAALKWAADHGPVIGLFIDETINRSIGAAARWWREQSLNALAQDLSFYGVPLLRRTGNPLEILPKIVSEMEVKAVTWNRRYHQPLCEVDATLKKNLRDQGIEVHSHPGFLLTEPWEVSTATGTPYKVFTPFSKAAWEVARGHAYETVKNNVTVPSHLTGPEGVELPIPEMEQPFWATTLVKECAPGEKNASEKLFDFLEHLQDYPQARDSLARSATSKLSAHLRFGEISIHRVWAETAAIDSEGTELFLKELLWRDFAWHRLYALPHMDTQNVRMQFNRFGWSWDPSEKDKLNTPSTPLIPTKADQFHEDLAAWRAGKTGIPLVDAGMRELWATGSMHNRVRMVVASFLTKNLQIHWRHGEEWFWETLVDADPASNAFNWQWAAGSGDDASPYFRIFNPVTQAKKFDPDETYIRRWVPEYGTPSYPDPIVDLKESRQIALDAYSAIK

SEQ ID NO: 48452 - protein, 141 aa, Arabidopsis thaliana
MDQSSSTLLINQRKSSSSPTRIPPKQKRKSTTTHKPIKVRYISNPMRVETCPSKFRELVQELTGQDAADLPPSPTTFTAVDLHRPCESEMNLEPLDGEVRGEYYSPLDEEVFNAPQMSAGLSGFFSSGFYNVNALGSIGSL

SEQ ID NO: 48453 - protein, 487 aa, Methanosarcina mazei Go1
MRGIRMKDYDLIVIGTGSGMNYVNSIIDSNPKMKIAVIDKDEPGGICLTRGCIPSKLLLYPAELVRDLETAPLFGIKLEIKDIEFRTIMERMRKRIGEDIEMIRQGLTENDYLDYYPETAEFISPYTLKAGDEILHSEMIFLCTGSKPAVPPVRGLEEAGYLTSDTVLGLNECPKSLAILGGSYIGAEYGHFFSAMGAEVTVIGRNQHFLPQEEPEVSELARIKMSEYMRILTNHEAIEVRKEKGGQKTVIAKDRDSGEETEVTADEILVATGRAPNNDILHPEKAGIKTDPHGWILVNEYLETSQPNIWAFGDANGKYLLKHVGNYESGIVYLNAIMQEKVKVDYHAVPHAVFSYPEIAGVGMSEKEAIEEFGEKRVIIGFKLFEDTAKGSAMETRDYFVKVILDGLEDKILGAHIIGPHASVLIHQIIPLMYTASRSAKPMMQMMDIHPALSEVVKRAFYSRLSPEHYHHVMKHLGLEDEDSVEG

SEQ ID NO: 48454 - protein, 486 aa, Neurospora crassa
MSSSNSRRLNIDNINPHVRAAKYAVRGELAVKSEEFRAALLRGTSDIPFSQVISANIGNPQQLDQKPITFFRQVLSLLENPLLLEHEDVLINHLGYKTDVIERAKWFLKNVGSVGAYSASNGAPAIRQHIAEFLERRDGFPANWQDIYLSAGASSGVNTLLHIICADEKSGILVPIPQYPLYTASLSILNATCVPYLLDESKNWGTDINTIKESYQKAKDAGVDTRAIVIINPGNPTGASLSEEDIRAVLEFARQERLVVLADEVYQTNVFIGEFISFKRVLRQLQKENPDGKYDCVELASLHSISKGMVGECGHRGGYFELVNFDPEVQAEIYKFVSIMLCAPVIGQCLVELMVNPPKPGEPSYELYEKEYRGIYEGMRERANALHKAFEQMEGVECGAPQGAMYLFPTINLPPKAAEAAAKEGRTPDEFYCMKLLEATGVCVVPGSGFGQKEGSLHFRTTFLAPGTEWVGSIVKFHKEFMDQYR

SEQ ID NO: 48455 - protein, 337 aa, Petunia x hybrida
MENSSQESQHLRSENSVTYDSTYPIYSMAFSSFPTPRRRIAVGSFIEELNNRVELLSFNEETLTLNPIPNLSFDHPYPPTKLMFHPNPIKSNNDILASSGDYLRLWEVKESSIEPLFTLNNSKTSEYCAPLTSFDWNEVEPKRIGTSSIDTTCTIWDVEKGVVETQLIAHDKEVYDIAWGEAGVFASVSADGSVRIFDLRDKEHSTIIYESPTPDTPLLRLAWNKQDLRYMATILMDSNKVVILDIRSPAMPVAELERHQASVNAIAWAPQSCRHICSGGDDGQALIWELPTVAGPNGIDPMSMYSAGAEINQLQWSPAQRDWIAIAFSNKLQLLKV

SEQ ID NO: 48456 - protein, 361 aa, Streptomyces avermitilis MA-4680
MTDVSDGVLHTLFRSDQGGHEQVVLCQDRATGLKAVIAIHSTALGPALGGTRFYPYASEEEAVADALNLARGMSYKNAMAGLDHGGGKAVIIGDPERIKTEELLLAYGRFVASLGGRYVTACDVGTYVADMDVVARECRWTTGRSPENGGAGDSSVLTAFGVFQGMRASAQHLWGDPTLRGRKVGIAGVGKVGRHLVRHLLDDGAEVVITDVRTDSVQRILDQHPTGVTAVADTDALIRVDGLDIYAPCALGGALNDDSVTVLTAKIVCGAANNQLAHTGVEKDLADRGILYAPDYVVNAGGVIQVADELHGFDFDRCKAKAAKIFDTTLAIFARAKEDGIPPAAAADRIAEQRMAEARRG

SEQ ID NO: 48457 - protein, 375 aa, Ureaplasma parvum serovar 3 str. ATCC 700970
MAKRDYYEILGVSKSATPEEIKAAFRKLAKEHHPDRNKSADDTLFKEINEAYEVLSDSKKRAQYDQFGHDGPQGFSSASGFSGFSGGFGGVDFDINDIFGSFFNNASSSHNSSNQYETYDIHLRLHLDFMEAVNGISKNINYDRKITCHKCQGTGAKDPKDVKICTKCHGRGTSIENVHSLFGTIQQEVECHECEGTGKVASSKCEQCYGKKVINERVNLTVEIPAGTREGEKLLVSKKGNIVNNQEFDLYLHISVKPSKYFALDGLDIYSETYIDPIKAIVGGIIEVVTINGIKTIEIPSNTPEGKKFRISGSGIVNKKSNIFGKKNGDFYTTIRYAKPVELSKDEIAYLKNISTRTNQNVEYYKNKVLKEISK

SEQ ID NO: 48458 - protein, 213 aa, Sinapis alba
MVRGKTQMKRIENATSRQVTFSKRRNGLLKKAFELSVLCDAEVSLIIFSPKGKLYEFASSNMQDTVDRYLRHTKDRVSSKPVSEENMQHFKHEAANMMKKIEQLEASKRKLLGEGIGSCSIEELQQIEQQLEKSVKCVRARKTQVFKEQIEQLKQKEKALAAENEKLAEKWGSHEIEVWSNKKQESGRGDEESSPSSEVETQLFIGLPCSSRK

SEQ ID NO: 48459 - protein, 289 aa, Legionella pneumophila str. Paris
MSNYLDKTASLTPATKRIVCNKATEYPHTGSYNQVATHGTYLCRRCGLALFRGVSQFSSGCGWPSFDDEIANAVARKPDADGQRTEILCARCDAHLGHVFTGEYMTYKNLRHCVNSASLDFVADNEVLDTEEAILAGGCFWGVEYYLKRIPGVLKVESGYTGGHVSEPSYEQVCSGTSGHYEAVRVVYNSAKTNYHDIVKRFFEIHDPTQANGQGPDLGHQYLSAVFYFNQEQLQEAELLIQLLKKRGYQVVTQLLQAQPFWPAEDYHQDYYFKHHKIPYCHKPVDRFG

SEQ ID NO: 48460 - protein, 410 aa, Arabidopsis thaliana
MTMISDLSKDLVEEILSKAPITSLGAVRSTHKQWNALSKGRLLYKAEAKDQFLGFMVMDHRFLSMIFHLNGILKGDGEGFDRPSIREVGDIVNQIDISKVFQCDGLVLCVPSDNSSVVVWNPYLGQTKWIEAREPHDESDMFALGYDKDKNHKILRLYDECYYYYEVYNFKTESWGEEDHLPGWDIDSYNRGVSLNGNTYFLTQEQRAKDKYRVFLLCFNFTTEKFENFIAMPFKYHRKYVGTLSCVGNEKLAALYQRWDTGEMAIWVTTKIESNEVLWSNLFKVDMKPLVRFGFQQCKDEAGSFFIDEEKKLAVVFNLDKKRGKRNNKTRCYHTAYIIGEKGYLKKEVLGEAVEVRKDVYRSALVCSSSYVPSLEKINQIEEEEEDKCKSIKMVDTKRQRKKRKRKSKR

SEQ ID NO: 48461 - protein, 611 aa, Natronomonas pharaonis
MTIHEHDVIVVGAGGAGLRAAIAAHEEGADVAMVTKLHPVRSHTGAAEGGINAAIRDGDDWELHAYDTMKGSDYLGDAPAIETLAQDAPEEVIQLEHWGMPFSREDDGRVSQRPFGGLSFPRTTYAGAETGHHLLHTMYEQVVKRGIKVYDEFYVSELAVTDHDDPEDRECHGCVAYDIKSGDIVGFRATGGVILATGGDGQVFDHTTNAVANTGDGPAMAYRAGVPVEDMEFVQFHPTTLPSTGVLISEGVRGEGGILYNSEGERFMFEYGYANNDGELASRDVVSRAELTEVNEGRGINDEYVFLDMRHLGDERINDRLENIIHLAEDFEGVNPVEEPMPVKPGQHYHMGGVETNEHGETCIDGLYAAGECACASVHGSNRLGGNALPELIVFGARAGHHAAGRDLGTAEVPTGPSAETEREEGLETPVEPGALDTGDSDVAADGALVEPDELVEQAVETERQRVEELLESDGINHAEIREDLQKAMTENVNVFREEEGLKEALEVIRECRERYQNVAVSDPSRTFNTDLIHTIETRNLIDIAETITLGALAREEFRGAHWRQQYQERRDDEWLKHTMISWNDGSPKLYYKPVILEGENKEYEPKVRSY

SEQ ID NO: 48462 - protein, 239 aa, Nostoc sp. PCC 7120
MSATQSNDLPLWVQDRDLVIAESTDVQWRYQTPPDYSRSKENLANESTRNHLEGTLEAIVQNLVRTFEMEVSFKTDPQQWLSIVNDQFRVSTNGGAEFTAEDVSAQGTYNLFMADSEHYKASQESFESSAKLFHTTFPQGFPWEVLEVYSGPPTVTFKWRHWGHFQGAYKDYAPTGETIEIIGLSVAHVTDDLKIISLEHYFDNTLFLDKLTGGGKQANSKPAGKGCPFGSWFKKSPKS

SEQ ID NO: 48463 - protein, 434 aa, ASPERGILLUS NIDULANS FGSC A4
MSNTTNSNGFRRESSEQDALLGDSRRNSAQHKREVHWTGWPAHVWHLTWATLSRDYVNVLLVFVPLGIIAGALKWDSTVIFTLNFLAIVPLASLLSFATEELAATLGQALGGLMNATFGNAVELIVSIIALKDKQIRVVQASMLGSILSNILLVLGCCFVVGGIKFPEQSFNTTVASTMSSLMTVSSASLIIPATLYASLSSAKDPSHKTENILFLSHWTAIILLVLYVIYLYFQLKSHAELFEEVNNQTTGDPEAAGEQVAEEEEEHLLNPWAASAALIVVTILVAICADYLVGSIDSIVEKTGMSRTFIGLVLIPIVGNAAEHVTAVVVAYKGKMDLAIGVAIGSSLQIALFVTPFLVILGWIMNVEMTLHFHIFETVAFFISGLVVTFLIQDGKSNYLEGCLCLGMYLILALAFYVYPDNVNEDALFHALK

SEQ ID NO: 48464 - protein, 161 aa, Arabidopsis thaliana
  misc_feature (123)..(123): Xaa can be any naturally occurring amino acid
  unsure (1)..(161): unsure at all Xaa locations
MGSSMGFLGKGVPPTQMMNMVMGSLYKQFTQKAINNFDDFHVAVLDIFNNFNSALPGRHFDFPTPDQIKVCFTRWKEAKDEEEKKKLFIEFMSKSVKPSKLDDVTMITGIVSPPAAMAAKRAXENVPQLKLIKLIPDVIFVPTVTILAIVSAKLSRRMYLK

SEQ ID NO: 48465 - protein, 279 aa, Stictis sp. 1-MW-2004
AIEHGAVNVVAVNDPFIEAHYAAYMLKYDSQHGQFKGEIKVDGNDLIVKGQKVKFYQEKDPANIPWSETGAYYVVESTGVFTTTEKAKAHLKGGAKKVVISAPSADAPMFVMGVNEKEYKSDIEVISNASCTTNCLAPLAKVLHDNFTIIEGLMTTIHSYTATQKTVDGPSAKDWRGGRTAAQNIIPSSTGAAKAVGKVIPSLNGKLTGMSMRVPTSNVSVVDLTCRLEKAVSYDQIKETIKKASEGEMKGILAYTEDDIVSTDLNGDNHSSIFDAKAG

SEQ ID NO: 48466 - protein, 436 aa, Exiguobacterium sp. 255-15
MSLTNQNSKSKAAFERALPLMPGGVNSPVRAYKSVGMTPIFAERAQGSRLYDIDGKEYIDYVLSWGPMILGHADPIVTAAIQEQATRGWSYGTPTEIESAMAEVVISRVPSVEVVRMVNSGTEATMAALRLARGYTGKTKILKFEGCYHGHGDSLLIKAGSGVATLGLPDSPGVPAQIASMTLTVPYNDMDAVRIAFEKHGDDIAGVIVEPAAGNMGFVPPQPGFLEGLREITEQHGTLLIFDEVMTGFRVGFNCAQGHFGVTPDITCLGKVIGGGMPVGAYGGRRDIMEQIAPQGPIYQAGTLSGNPLAMAAGLATLTQLKPEHYEEFDRKANRLSEGYLAAAAKYNIPLTTNRAGAMFGVFFTDQPVTNFEQAKSSNLDMFRSYYQKMAARGVFLPPSQFEGLFLSTVHTDDDIEQTLAAVELTFKELQLEFNR

SEQ ID NO: 48467 - protein, 112 aa, Brassica napus
MQDQLVCHGCRNTLLYPRGATNVRCALCNTINMVPPHPHPPPPHAHAGMDMAHIVCGGCRTMLMYTRGASSVRCSCCQTVNLVPATPPTNQPAHVNCGNCRTTLMYPYGAPS

SEQ ID NO: 48468 - protein, 149 aa, Achlya klebsiana
MADQLTEEQIAEFKEAGSLFDKDGDGTITTKELGTVMRSVGQNPTEAELQDMINEVDADGNGTIDFPEFLTMMARKMKDTDSEEEILEAFQGFDKDGNGFISAAELRHMMTNLGEKLTDEEVDEMIREADIDGDGQINYEEFVKMMMSK

SEQ ID NO: 48469 - protein, 372 aa, Methylobacillus flagellatus KT
MTSLLLNAKCLVVKVGSSLVTNNGAGLDKGAIAAWADQIARLVKSGRQVVLVSSGAVAEGMQRLGWKKRPVAINELQAAAAVGQMGLVQMYESCFASHGLHTAQILLTHADLADRKRYLNARTTLRTLLDLGVIPIINENDTVVTDEIRFGDNDTLGSLVANLIEADALVILTDQPGLYSADPRKHPDAQFIQYETAGNPALEKMAGGAGTLIGSGGMLTKILAAKRAARSGAHTVIASGREPDILVRLAQGEVVGTHLKAGQVKTLARKQWLADQLRVAGKVVVDEGAAKALREGGRSLLPIGVMAVEGSFERGEVVSCVNTAGEEIARGLVNYSALETARILRQPSHEIEHILGYIDGPELIHRDNLILV

SEQ ID NO: 48470 - protein, 600 aa, Arabidopsis thaliana
MASTFTATSSIGSMVAPNGHKSDKKLISKLSSSSFGRRQSVCPRPRRSSSAIVCAAKELHFNKDGTTIRRLQAGVNKLADLVGVTLGPKGRNVVLESKYGSPRIVNDGVTVAREVELEDPVENIGAKLVRQAAAKTNDLAGDGTTTSVVLAQGFIAEGVKVVAAGRNPVLITRGIEKTAKALVTELKKMSKEVEDSELADVAAVSAGNNDEIGNMIAEAMSKVGRKGVVTLEEGKSAENNLYVVEGMQFDRGYISPYFVTDSEKMSVEFDNCKLLLVDKKITNARDLVGVLEDAIRGGYPILIIAEDIEQEALATLVVNKLRGTLKIAALRAPGFGERKSQYLDDIAILTGATVIREEVGLSLDKAGKEVLGNASKVVLTKETSTIVGDGSTQDAVKKRVTQIKNLIEQADEDYEKEKLNERIAKLSGGVAVIQVGAQTETELKEKKLRVEDALNATKAAVEEGIVVGGGCTLLRLASKVDAIKATLDNDEEKVGADIVKRALSYPLKLIAKNAGVNGSVVSEKVLSNDNVKFGYNAATGKYEDLMAAGIIDPTKVVRCCLEHAASVAKTFLMSDCVVVEIKEPEPVPVGNPMDNSGLGY

SEQ ID NO: 48471 - protein, 595 aa, Shewanella oneidensis MR-1
MSQQSSYASVSQRAVLPWIWQFLKPYRPRVVAAIVFLLIGSLAWLSLGQGVRLMVDEGFIKDNAQRLNEIILFVLVITAVSGTAVFCRFYLMTWLGERVSADIRLAVYNQLLKLSPAFYAKVRTGEVISRFTADSTLLQTVVGSSLSMALRSGVTVIGGLAMMGITSVKMTLLVLLAVPLVLGPVSFFGRKVRTLARESQDRVADLGAYVDETLHEIHTVQAYGHEDKDRSLFNGRVEDVMTAASGRIRYRALLISSVMFLSIAAIALVTWVGAHDVMSGKMTGGELSAFMFYAVMVAGAVATISEVVGEIQRASGAAERLIELAETEVDIPAPLVPKTLPTKVRGELQLHQLNFHYPEQTQLVLSDLNLVINAGERVALVGPSGAGKSTLFQLLQRFYVPSSGSILLDGIDIAALSPQDLRAQFALVPQDSVIFATSVLENVRYGRVDASEQEVIDACIAARAHEFISEFSEGYQTYLGERGVRLSGGQKQRIAIARAILADRPILLLDEATSALDALSEQKVKQALDELMAGKTTLIIAHRLATVINADRIIVFDKGRIVASGKHQDLIKTNALYREFATLQLLTDEAMPLSD

SEQ ID NO: 48472 - protein, 163 aa, Chlamydomonas reinhardtii
MAANTEQLTEEQIAEFKEAFALFDKDGDGTITTKELGTVMRSLGQNPTEAELQDMISEVDADGNGTIDFPEFLMLMARKMKETDHEDELREAFKVFDKDGNGFISAAELRHVMTNLGEKLSEEEVDEMIREADVDGDGQVNYEEFVRMMTSGATDDKDKKGHK

SEQ ID NO: 48473 - protein, 518 aa, Oryza sativa (japonica cultivar-group)
MEFMMPLDTNACAQPMRRAGEGAGTERLMERLNIGGMTQEKALRKRCFGDGVTGTARCVFTSDADRDTPHLRTQSSRKNYADASHVSAVILGGGTGVQLFPLTSTRATPAVPVGGCYRLIDIPMSNCFNSGINKIFVMTQFNSASLNRHIHHTYLGGGINFTDGSVQVLAATQMPDEPAGWFQGTADAIRKFMWILEDHYNQNNIEHVVILCGDQLYRMNYMELVQKHVDDNADITISCAPIDGSRASDYGLVKFDDSGRVIQFLEKPEGADLESMKVDTSFLSYAIDDKQKYPYIASMGIYVLKKDVLLDILKSKYAHLQDFGSEILPRAVLEHNVKACVFTEYWEDIGTIKSFFDANLALTEQPPKFEFYDPKTPFFTSPRYLPPARLEKCKIKDAIISDGCSFSECTIEHSVIGISSRVSIGCELKDTMMMGADQYETEEETSKLLFEGKVPIGIGENTKIRNCIIDMNARIGRNVIIANTQGVQESDHPEEGYYIRSGIVVILKNATIKHGPII

SEQ ID NO: 48474 - protein, 104 aa, Rhizobium leguminosarum
MSFRPLHDRILVRRVDSEEKTKGGIIIPDTAKEKPQEGEVIAVGPGARNDAGQIQALDVKAGDRILFGKWSGTEIKINGEDLLIMKESDVMGIIEAQGEKKQAA

SEQ ID NO: 48475 - protein, 280 aa, Listeria monocytogenes str. 4b F2365
MTLSFSDTYRLNNGIEMPRHGFGVYKLTDEARMRTALETAVDVGYRLFDTASFYHNEKELGDFFASSGLKRDEFFVTTKMWNTEQGYDETLRAFEKSQKKLQLDKIDLYLVHWPKQDTFFDTWRAVEKLYDEGLVRAIGVSNFEAHHLDRLRTSANVLPVVDQLETHPHFPNHLLHRYLEELHIVHQAWSPLGRGGVLQEQILIDLAEKYGKSPAQIVLRWHLQNNISIIPKSETPSRIRENAAIYDFELSEADMRQVERLNTGERVSHAPDVMYVRSEI

SEQ ID NO: 48476 - protein, 542 aa, Rhizobium leguminosarum
MAAKEIKFSTEAREKMLRGVDILANAVKATLGPKGRNVVIDKSFGAPRITKDGVSVAKEIELEDKFENMGAQMVREVASKTSDIAGDGTTTATVLAQAIVKEGAKAVTSGMNPMDLKRGIDLAVAAIVAELKANARKISNNSEIAQVGTISANGDAEIGRFLAEAMEKVGNDGVITVEEAKTAETELEVVEGMQFDRGYLSPYFVTNADKMRVEFEDPYILIHEKKLSNLQSMLPVLEAVVQSSKPLLIIAEDVEGEALATLVVNKLRGGLKIAAVKAPGFGDRRKAMLEDIAILTAGTVISEDLGIKLESVTLDMLGRAKKVSIEKENTTIVDGSGAKTDIEGRVAQIKAQIEETTSDYDREKLQERLAKLAGGVAVIRVGGSTEVEVKEKKDRVDDALHATRAAVEEGILPGGGVALLRAVKALDAVKTANGDQRVGVDIVRRAVEAPARQIAENAGAEGSVIVGKLREKSEFSYGWNAQTGEYGDLYAQGVIDPAKVVRTALQDAASIAGLLVTTEAMIAEKPKKDAPPPMPAGPGMDF

SEQ ID NO: 48477 - protein, 419 aa, Bordetella bronchiseptica RB50 [sequence omitted]

SEQ ID NO: 48478 - protein, 465 aa, Methylococcus capsulatus str. Bath
MDPLAMRFRKIIDRGNSMRMKSIGALLLLTASGLSLCPPVWADLPASVNGLPLPSLAPVLKKAMPAVVNISTKTQIEIAENPLMQDPFFRHFFGIPNQPRRRESSSLGSGVIVDARRGYILTNNHVIDKADEISVTLRDGRQLSAKLVGADPESDLAVIKVEPKNLTELPIGDSSQLEVGDFVVAIGNPFGLGQTVTSGIVSALGRSGLGIEGYEDFIQTDASINPGNSGGALINLRGELVGVNTAIIAPTGGNVGIGFAIPSNMAASIMTQLVEKGEIRRGQIGITIQDLTPDLAQAFGLKQSQGAVITGVQKDSPAASSGLEAGDVVVSVNDRPVKNSADVRNTIGLLPIGEEVRVEVMHKGERVVREVVIRAPKLVQEEGNKIHPRLSGVILKNNEEGGVQVEKIHTSSYAFQAGLRPGDVIVMANREEIETLDDLKRATKGRSELLLSVQRGSGSFFLMLK

SEQ ID NO: 48479 - protein, 423 aa, Desulfovibrio vulgaris subsp. vulgaris str. Hildenborough
MSQRSSELFERAQQLIPGGVNSPVRACLGVDSEPLFIARAAGSRLHTVDGETFIDFVESWGPMLLGHTHPEVTAAVHAAVDRGTSYGAPCEDEVVLAAKVVDALPGVDMVRMVNSGTEATMSALRLARGYTGRTKLVKFVGCYHGHADPFLASAGSGVATLSIPGTPGVPESTVRDTLLAPYNDLAAVKDLFALHGKDIAAIIVEAVAGNMGLVPPKAGFLEGLRELCDQHGALLIFDEVITGFRVSFGGAQQRFGITPDLTTLGKIIGGGLPVGAYGGKREIMQRIAPCGEVYQAGTLSGNPLAMAAGIATLDVLSRSDYAGLEARVAAFVKELEAILKGKGVPVRINTLASMFTVFFTNDPVTDFASAKTADGALYTSFYKQMRAQGIYLAPSPFEAAMVSFAHTDDDLAAMLDAARKVTF

SEQ ID NO: 48480 - protein, 489 aa, Trichophyton rubrum
MVVEAPPCPQSGNGFANGSAKPKVYRDEAERRRYEHHEADVVIIGAGIAGCTLAVALGNQGRSVILLERSLKEPDRIVGELLQPGGVRALEQLGLRDCLEGIDAVRTYGYDVIYFGNGVKIPFPSDANDKILEGRCFHHGRFIMRLREAAAANPNVTIVETKAVSTIKSTHTGEVLGVQCQTDGKQDFYFGPLTVVADGYASTFRKEYLPIQPVAKSKFWGLELIDAKLPIPGHGHVVLGDFPPILIYQIGEHETRILIDIPDNLPSASVANGGVKGHMRNVVLPSLPECIRPSFEAALEKGGFRSMPNSFLRPVTNRIPGLMFLGDSLNMRHPLTGGGMTVAFNDVVLLRDLLSPEAVPDLSDTKLVLKQLSKFHWQRKSLISVINILAQAFYSIFAAGDPNLKVLQRGCFRYFQLGLIDGPIGLLSGIIRSPLVLLRHFYSVAFLAIWLHLTSKPIYLLPLTLFECIIVFLTACRVILPFIFAELQS

SEQ ID NO: 48481 - protein, 509 aa, Brassica rapa
MTSVNVKLLYHYVITNLFNLCFFPLTAIVAGKAYRFTIDDLHHLYYSYLQHNLITIASLFAFTVSGFGLYIARLPKPLYLVEYSCYLPPRHLKVSVSKIMDIFYQIKADTSSRNVACDDPSSLDFLRKIQERSGLGDETYSPEGLIHVPPRKSFAGSREETEKVIIGGIENLFENTKVKPKDIGILVVNSSKFNPTPSLSAMVVNTFKLRSNIKSFNLGGMGGSAGVIAIAIDLAKDLLHVHKNTYALVVSTEGITQGIYAEENRSMMFSNCLFRVGGAAILLSNKSGDRRRSKYELVHTVRTHTGADDKSFRCVQQGDDEDGKTGVCLSKDITNVAGTTLTKHIAICRPLILPLSEKFLFFATSVAMKLLKDKIKHYYVPDFKLAVDHFCIQPGGRAVIDELEKNLGLSPIDVEASRSTLHRFGNTSSSSIWYELAYIEPKERLKKGNKKGWQIALGLGFKGNSAVWVALNNVKASANSPWEHCIDRYPVKNDSDLSKSKHQVQNGRS

SEQ ID NO: 48482 - protein, 544 aa, Rhizobium leguminosarum
MSAKEIRFSNDARDRLLRGVELLNNAVKVTLGPKGRNVVIDKAYGAPRITKDGVSVAKEIELADKFENMGAQMVREVASKTNDLAGDGTTTATVLAASIFREGAKLVAAGMNPMDLRRGIDLGVTAVVKEIKARAMKVKSSSEIAQVGTIAANGDAAIGEMIAKAMDKVGNEGVITVEEARTAETELDVVEGMQFDRGYLSPYFVTNAEKMRVELEDPYILVHEKKLGSLQAMLPILEAVVQTGKPLLLISEDVEGEALATLVVNKLRGGLKVAAVKAPGFGDRRKAMLEDIAVLTSGQMISEDLGIKLDNVTLDMLGHAKRVLIDKESTTIIDGSGEKAAIQARIQQIKAQIEETTSDYDKEKLQERLAKLAGGVAVIRVGGATETEVKEKKDRIDDALNATRAAVEEGIVPGGGVALLRAKSALTGLTGENADVTAGISIVLRALEAPIRQIADNAGFEGSIVVGKLAGSNNHNQGFDAQTETYVDMIEAGIVDPAKVVRTALQDAGSIAALLITAEVMIADIPARDSAPAAGNGGMGDMGY

SEQ ID NO: 48483 - protein, 193 aa, Candida albicans SC5314
MRYKYWCATNIVFKTFFHFFFFTNPTFLVRKKHSYLPTSQFKMQIFVKTLTGKTITLEVESSDTIDNVKSKIQDKEGIPPDQQRLIFAGKQLEDGRTLSDYNIQKESTLHLVLRLRGGGKKRKKKVYTTPKKIKHKHRKHKLAVLTYYKVDNEGNVERLRRECPAPTCGAGIFMANMKDRQYCGKCHLTLKAN

SEQ ID NO: 48484 - protein, 111 aa, Brassica napus
WWVVPAKVAFDQTVWSAIWNTIYYTVLGLLRFQSPDKIFGEIKTTFWPMITAGWKLWPLAHLVTYGVIPVDQRLLWVDCIELIWVTILSTYSNEKAEAQTIGETNSSSTED

SEQ ID NO: 48485 - protein, 261 aa, Methanosarcina mazei Go1
MDDGRVLETRRKNVFGAITGKPTSLGGSAGRFDATAKGGLYAVREAAKKLGIELEDAKVAVQGFGNVGYHAAYLAKKLFGCRVVAVSDSKGAIYSGKGLDPEDVSGYKHSTGSVLGYPEAENLSNKELLELDVDILIPAALEDVVSIENAEKVRPKILAEMANGPTTREAEEVLISNGVHIIPDILYNGGGVIVSYFEMVQNESSIQWDEKEVEMRLEKKMKEAYHSVFDFAEKNNAGMRQAAYTLAVGRVVEAMQLRGWI

SEQ ID NO: 48486 - protein, 517 aa, uncultured bacterium
MKKSILTTSIFALVAFSSCEKKPAPEVKNYWPQAGVTYEIFVQSFYDSNGDSIGDFNGVTQKLDYVKELGANAIWFMPIMPSPTYHKYDVTDYKAVHPDYGTLDDFKKLLDEAHKRDIKIVIDLIINHTSNEHPWFLEAKSGRDNPYRDYYVWAQKDTIADFLNKKTITFDLDNIRQWHDPGQGEDFYYGFFWGGMPDLNFDNPKVREEIYEIGRFWLEEVGVDGFRLDAAKHIFPDDRPLDNHAFWKEFRAKMEVIKPDVYLVGEVYDKKEVVAPYLPGLPALFNFDFHYTLLETMNTGDGMLLAKKQKEILDFYQGITSSFIDATISSNHDQPRLLNELGSDPAKYKQAIAVMLSMPGAPYLYYGEEIGMLGLKPDEHIREPFLWDEKSKDTGRTKWIKPKYSKDSTVTSLEVQKKDSNSYFNHYKNLIALRNSYPALAIGSLELPAEELPKSVMAYFRKSGDQEIFVVHNVDKEEVDIQLPEGFEEVIFYLGEGKNSSGKLQLKGNSSMVFLKD

SEQ ID NO: 48487 - protein, 176 aa, Arabidopsis thaliana
MEEEYVRVISITTIGVISWGLIFILVRRIFSSYSFDFSTRIVSTLHATIAVTLATLSIQDWSCPVCPIASTSSLRQMETLAFSLSYMIYDLICSHFDQVLSIDNAVHHSVCILGFVAGLFYQKCGSEMVAALWITEISSPFLHLREILKEIGYRDTDLNLAADVSTLHTYFLMNYS

SEQ ID NO: 48488 - protein, 74 aa, Hordeum vulgare subsp. vulgare
MSCSCGSSCGCGSNCNCGKMYPDLEEKSGATMQVTVIVLGVGSAKVQFEEAAESGEAAHGCSCGANCKCNPCNC

SEQ ID NO: 48489 - protein, 137 aa, Brassica napus
MDPTTPLLSHGGKVEDYAPARTWSDVKRVLCTESAKLWLIAAPIGFNVICQYGVSSVTNIFVGHIGEVELSAVSISLSVIGTFSFGFLLGMGSALETLCGQAFGAGQVHMLGIYMQRSWIILFVSCLLLLPIYIFAT

SEQ ID NO: 48490 - protein, 287 aa, Streptococcus pneumoniae TIGR4
MIALNVAGALDIYDDVEVGRQVLVDDGKLGLRVVAKDDATREFEVEVENDGIIAKQKGVNIPNTKIPFPALAERDNDDIRFGLEQGINFIAISFVRTAKDVNEVRAICEETGNGHVQLFAKIENQQGIDNLDEIIEAADGIMIARGDMGIEVPFEMVPVYQKMIIKKVNAAGKVVITATNMLETMTEKPRATRSEVSDVFNAVIDGTDATMLSGESANGKYPLESVTTMATIDKNAQALLNEYGRLDSDSFERNSKTEVMASAVKDATSSMDIKLVVTLLRQVILHV

SEQ ID NO: 48491 - protein, 267 aa, Clostridium acetobutylicum ATCC 824
MNTREKYLSNVNRLVIKVGSSTLTHPSGLLNFYKIEHIVRQIADLHNQGIKVILVSSGAIGAGIGKLRLKERPKTIPEKQAAAAVGQGVLMHTYEKLFAEYGQIVGQILITREDLSSKKRVVNVQNTFSALLDHGIIPIVNENDATVVEEIKFGDNDTLSARVASLIKADLLILLSDIDGLYDSNPAVNKNAVLIDTVNEVNEEVKASAGGAGSKLGTGGMATKIRAAEIATENGISMVIANGEKQEAIRNILNFENEGTLFIPKNK

SEQ ID NO: 48492 - protein, 418 aa, Clostridium acetobutylicum ATCC 824 [sequence omitted]

SEQ ID NO: 48493 - protein, 148 aa, Euglena gracilis
AEALTHEQIAEFKEAFSLFDKDGDGTITTKELGTVMRSLGQNPTEAELQDMINEVDQDGSGTIDFPEFLTLMSRKMHDTDTEEEIKEAFRVFDKDGNGFISAAELRHVMTNLGEKLTDEEVDEMIREADVDGDGQINYEEFVKMMMSK

SEQ ID NO: 48494 - protein, 632 aa, Bacillus licheniformis ATCC 14580
MCGFVGVFNHRPSSETAAQEELIKQMNEMIVHRGPDDDGYYHDEHVGFGFRRLSIIDVENGGQPLSYEDDSYWIIFNGEIYNYIELKDELLSKGYEFKTDSDTEVLLATYRHYKQEAASKLRGMFAFLIWDKKEQLLYGARDPFGIKPLYFTKTDGHVYFASERKSLMAVDADLELNEKALQQYTSFQFVPEPETLDKKVQKVESGHQFTVRPGEDIQFKTYWKVQFKPVQTEEDKLVQEVRDAIFDSVKVHMRSDVPVGSFLSGGIDSSFIVSVAKQFHPNLKTFSVGFEHEGFSEVDVAKETADKVGVENFSAIISPEEYMNELPKIVWHLDDPLADPAAIPLYFVAKEAKKQVTVVLSGEGADELFGGYNIYREPLSLKPFERIPSPLKKMLLRVASAMPEGMKGKSFLMRGCTPLEDRYIGNAKIFEEGMKSKLLRQYDSNLSYCDVTKPYFEESRSYSEINKMQYVDIHTWLRGDILLKADKMTMANSLELRVPFLDKVVFEAASKIPEELKTKNGTTKYLLRKAAEGIVPEHVLNRKKLGFPVPIRHWLKNEMHDWAVNIIKESETDAYIHKDYVLQLLEDHCANKADNSRKIWTVLIFMIWHSIFVEKRFVPEELNHQPKEVIIV

SEQ ID NO: 48495 - protein, 396 aa, Salmonella enterica subsp. enterica serovar Typhi Ty2
MFENITAAPADPILGLADLFRADDRPGKINLGIGVYKDETGKTPVLTSVKKAEQYLLENETTKNYLGIDGIPEFARCTQELLFGKGSALINDKRARTAQTPGGTGALRIAADFLAKNTPVKRVWVSNPSWPNHKSVFNAAGLEVREYAYYDAENHSLDFEALQASLSEAQAGDVVLFHGCCHNPTGIDPTLEQWQVLAELSVEKGWLPLFDFAYQGFARGLEEDAEGLRAFAALHKELIVASSYSKNFGLYNERVGACTLVAADAETVDRAFSQMKSAIRANYSNPPAHGASIVATILSNDALRAIWEQELTDMRQRIQRMRQLFVNTLQEKGANRDFSFIIKQNGMFSFSGLTKDQVLRLREEFGVYAVASGRVNVAGMTPDNMAPLCEAIVAVL

SEQ ID NO: 48496 - protein, 458 aa, Triticum aestivum
MAASGEGASLPSPAGGEDSRRRRVSYFYEPTIGDYYYGQGHPMKPHRIRMAHSLVIHYGLHRLLELSRPFPASEADISRFHSDEYVSFLASATGNPTILDPRAVKRFNVGEDCPVFDGLFPFCQASAGGSIGAAVKLNRGDADITVNWAGGLHHAKKGEASGFCYVNDIVLAILELLKFHRRVLYVDIDVHHGDGVEEAFFTTNRVMTVSFHKYGDFFPGTGHITDVGAGEGKHYAVNVPLSDGIDDDTFRDLFQCIIKRVMEVYQPEVVVLQCGADSLAGNRLGCFNLSVKGHADCLRFLRSFNIPMMVLGGGGYTIRNVARCWCYETAVAVGVEPDNKLPYNDYYEYFGPDYNLHIQPRIVENLNTTKDLENIKNMILDHLSKLEHVPNAQFHERPSDPEGPEEKEEDMDKRPAQRSRLWSGGAYDSDTEDPDNMKTEANDLSANSIMKDASNDDL

SEQ ID NO: 48497 - protein, 338 aa, Zea mays
MERAAPVRSSHTSTAGLLAWPQPDGAASQAPRRPNQPTEEFRKVVFGGQVTEEADGLNKTKMRTTASAPKSKETTGIGMFKAESAAAAVTTASRDRQVHNFGSAFYMWGGSVEHCLAISIDVLHRVLLYVLGIVPFVSHGMSAGSMKNAYRICRIKCQDRYQASQITFSQDGTIPPRKPTSVAGVARQRELSHTVESSGDGKMKRQVSNAKSKELSGHNIFADHEDPSPNRSSSSAAALAHVKNANVSSFSFGKADMDSTVKTAKKKGSSNKSTDLMNGKAISERDSAPAGKQPLNRAKPKGLSGSSIFADGKASTTGDHAGRRTRQPPGGDSSILLG

SEQ ID NO: 48498 - protein, 193 aa, Triticum aestivum
  misc_feature (12)..(12): Xaa can be any naturally occurring amino acid
  misc_feature (102)..(102): Xaa can be any naturally occurring amino acid
  misc_feature (172)..(172): Xaa can be any naturally occurring amino acid
  misc_feature (175)..(178): Xaa can be any naturally occurring amino acid
  misc_feature (184)..(184): Xaa can be any naturally occurring amino acid
  unsure (1)..(193): unsure at all Xaa locations
YEPTQGRITVAXEDIRVFDKREWSQIVSLVNQDPVLFSASVGENIAYGLPDDVVSKDEIIKAAKAANAHEFIISLPQGYDTLVGERGSLLSGGQRQRIAIAXALLKDAPFLILDEATSALDTTSERLVQEALDLLMKGRTSLVIAHRLSTVQNAHRIAVCSDGKIMELGTHXELXXXXGSYAAXVGTQRLAFE

SEQ ID NO: 48499 - protein, 456 aa, ASPERGILLUS NIDULANS FGSC A4
MSLTESTAIDIAKAASSASRHLAILSEADRNEALTALHAALSRNKDAILEANARDIQAATQAVNGGSLNHSVLKRLDLSRPGKYDDMLQGILSVRSLRDPIGNVTLRTLLDDGLTLEKVACPIGVLLIIFEARPEVIANIAALSIKSGNAAILKGGKESTESFVTIANVISEAISHTRVPQSSIQLVKTRAAVSDLLAQDSLIDLVIPRGSNDLVRFVKENTKIPVLGHADGLCSAYIHSDADPEIALKVIVDSKTDYPAACNSLETLLVHQDALKEVLPPLAKALIAKGVTLRCDESSKAALIENLTLKEAGMLRDACESDFRTEFLDLTLAVKTIPSNSPLTDVEAAIAHINSHSSKHTDIIITESENIANIFMKGVDSAGVFWNASTRFADGMRYGFGTEVGISTNKIHSRGPVGLDGLTIYKYLIRGSGHRAGDYFDGEGGRKYKHQNLELS

SEQ ID NO: 48500 - protein, 550 aa, Neurospora crassa
MALNLDLSNAVMMKDEQGRPLIVVRDQGKKKRQYGNEAVKNHILAARTVANIVKTSLGPRGLDKILISPDGDITVTNDGATILQQMEITNHVAKLLVELSKSQDDEIGDGTTGVVVLAGALLEQAAELIDKGIHPIRIADGYDQACDIAVAELDRISDVIEFSKEETANLVKVARTSLGSKIVSKAHDQFANIAVDAVLSVADLERKDVDFELIKVDGKVGGALEDTILVKGVIIDKDFSHPQMPSEVRDAKIAILTCAFEPPKPKTKHRLDITSVEEFKKLQTYEREKFIEMIQQIKNTGANLAICQWGFDDEANHLLLQNNLPAVRWVGGPEIELIAIATNGRIVPRFEDLKPEKLGRAGVVREMTFGTTREKMLVIEECANTRAVTVFVRGSNKMIIDEAKRSLHDALCVVRNLVRDNRVVYGGGSAEIACSLAVEDAAVKSPGLEQYAMRAFADALDTIPMTLAENSGLNPIATLAEVKSQQVKDPAGRGRLGVDCMGRGSNNMKEAFVIDPLIGKKQQLMLATQLCRMILKINNVIVSGSGEEDY

SEQ ID NO: 48501 - protein, 418 aa, Streptomyces peucetius
MNRRIVITGIGVVAPAVGTKPFWELLLSGTTATRAISTFDATPFRSRIAAECDFDPVAAGLSAEQARRLDRAGQFALVAGQEALADSGLRIDEDSAHRVGVCVGTAVGCTQKLESEYVALSAGGAHWVVDPGRGSPELYDYFVPSSLAAEVAWLAGAEGPVNIVSAGCTSGIDSIGYACELIREGTVDAMVAGGVDAPIAPITVACFDAIRATSDHNDTPETASRPFSRSRNGFVLGEGGAIVVLEEAEAAVRRGARIYAEIGGYASRGNAYHMTGLRADGAEMAAAITAALDEARRDPSDVDYVNAHGTATKQNDRHETSAFKRSLGEHAYRVPISSIKSMIGHSLGAVGSLEVAATALAVEYGVIPPTANLHDPDPELDLDYVPLTAREKRVRHALTVGSGFGGFQSAMLLSRLER

SEQ ID NO: 48502 - protein, 425 aa, Streptomyces peucetius
MTGTAARTASSQLHASPAGRRGLRGRAVVTGLGIVAPNGLGVGAYWDAVLNGRNGIGPLRRFTGDGRLGRLAGEVSDFVPEDHLPKRLLSQTDPMTQYALAAAEWALRESGCSPSSPLEAGVITASASGGFAFGQRELQNLWSKGPAHVSAYMSFAWFYAVNTGQIAIRHDLRGPVGVVVAEQAGGLDALAHARRKVRGGAELIVSGAVDSSLCPYGMAAQVKSGRLSGSDNPTAGYLPFDRRAAGHVPGEGGAILTVEDAERAAERGAKVYGSIAGYGASFDPPPGSGRPSALARAVETALADAGLDGSDIAVVFADGAAVPELDAAEAEALASVFGPRRVPVTVPKTLTGRLYSGAGPLDVATALLALRDEVVPATAHVDPDPDLPLDVVTGRPRSLADARAALLVARGYGGFNSALVVRGAA

SEQ ID NO: 48503 - protein, 591 aa, Bordetella bronchiseptica RB50
MNSAARNAPAGSQPVKAELWKRVYSRVGSYWKGLVLAVLLMAGAAATQPTLAVIMKPLLDDGFSGAKPHYVWFLPLAVVGLILLRGICNFFSDYLLAWVANNVLRGIRGEMFERLLGLPDADFKRGDTGRLLNRFTIDAGNVTGYATDVITVLVRETLVVIALIGVLLYMSWALTLIILVMLPVSVGIARAFTRRLRRINRETVNMNAELTRVVSEGIDGQRVIKLFDGYDAERRRFDFVNSRLRRFAMRSATADAALTPLTQVCISVAVGAVIAVALSQANSGALTVGSFASFMAALAQIFDPIKRLTNLAGKMQKMLVAAESVFTLVDQTPEADAGTRALPEPVRGKVEFRAVSHRFPDADRDTVSAVSFLVEPGQTVALVGRSGSGKTTLVNMLPRFVLPDGGDILFDDVPIQDLTLRSLRSHLSLVSQDVVLFDDTIAANVGYGAGGTVDDARVRDALAAANLLEFVDGLPLGIHTPVGQNAARLSGGQRQRLAIARALIKNAPVLILDEATSALDNESERQVQASLERLMRGRTTLVIAHRLSTVQNADRIIVLDAGKIVEHGPHSELLAANGLYASLYNMQFRED

SEQ ID NO: 48504 - protein, 437 aa, Corynebacterium glutamicum ATCC 13032 [sequence omitted]

SEQ ID NO: 48505 - protein, 209 aa, Arabidopsis thaliana
MATPPTLPVTNQQAVQSRPPINTPAFRTFFSRLSTSIRDGLSQRRPWTELIDRSSMARPESLTDALSRIRKNLAYFKVNYVAIVSLVLAFSLFSHPLSLLVLIGLLGGWMFLYLFRPSDQPLVVFGRTFSDRETLLALVLSTIVVVFMTSVGSLLTSALMIGVAIVCVHGAFVVPDDLFLDEQEPANAGLLSFLGGSATSAAAAVSGRV

SEQ ID NO: 48506 - protein, 333 aa, Oryza sativa
MADASSRTDTSTVLDTDDKNQMVDGQSGAIVPSNSSDRSDRSDKPMDQKVLRRLAQNREAARKSRLRKKAYVQQLESSKLKLASLEQEINKARQQGIYISSSGDQTHAMSGNGAMTFDLEYARWLEEQNKQINELRTAVNAHASDSDLRLIVDGIMAHYDEIFRLKGVAAKADVFHILSGMWKTPAERCFLWLGGFRSSELLKLLVNQLEPLTEQQLLGLSNLQQSSQQAEDALSQGMEALQQSLAGTLAGSLGPSGSSGNVANYMGQMAMAMGKLGTLENFLRQADSLRQQTLHQMQRILTIRQAARALLAIHDYFSRLRALSSLWLARPRE

SEQ ID NO: 48507 - protein, 492 aa, Zea mays
MDPYKHRPSSGSNSSFWTTNSGAPVWNNNSALTVGQRGPILLEDYHLIEKLAQFDRERIPERVVHARGASAKGFFEVTHDVSHLTCADFLRAPGVQTPVIVRFSTVVHERGSPETLRDPRGFAVKFYTREGNFDLVGNNMPVFFIRDGMKFPDMVHAFKPNPKTNLQENWRIVDFFSHHPESLHMFTFLFDDVGIPLNYRHMEGFGVNTYTLINRDGKPHLVKFHWKPTCGVKCLLDNEAVTVGGTCHSHATKDLYDSIAAGNYPEWKLYIQTIDLDHEDKFDFDPLDVTKTWPEDIIPLQPVGRMVLNKNVDNFFAENEQIAFCPAIIVPGIHYSDDKLLQTRIFSYADTQRHRLGPNYLMLPVNAPKCAHHNNHHDGFMNFMHRDEEVNYFPSRFDPARHAEKVPIPPRVLTGCREKCIIQKENNFKQAGERYRSFDPARQDRFIQRWVDALTDPRVTHEHRTIWISYWSQCDAALGQKLASRLNLKPSM

SEQ ID NO: 48508 - protein, 163 aa, Kineococcus radiotolerans SRS30216
MTSPLDVPLTALTGGPLDPAQLTGRAVLVVNVASRCGSTPQYAGLQELQEEYGERGFTVLGVPCDQFGGQEPGTEEEIAEYCSATWGTTFPMTAKVEVNGPGRHPLYGALTATPDADGTAGDVAWNFEKFLVSPAGEVVARFRTRTTPQDPALRAAIEARLPA

SEQ ID NO: 48509 - protein, 294 aa, Brassica napus
  misc_feature (225)..(225): Xaa can be any naturally occurring amino acid
  unsure (1)..(294): unsure at all Xaa locations
MATNGSATTGQLSQKEADIKMMCAAEVHLGTKNCNYQMERYVFKRRNDGIYIFNLGKTWEKLQMAARVIVAIENPQDIIVQSARPYGQRAVLKFAQYTGANAIAGRHTPGTFTNQMQTSFSEPRLLILTDPRTDHQPIKEGALGNIPIIAFCDTDSPMRFVDIGIPANNKGKHSIGCLFWLLARMVLQMRGTIRPAQKWDVMVDLFFYREPEEAKPEDEDEVAPXAEFGLPAPEYGGDPRVRAAIPDAAWPGEAQAPISAAPAAASWNDSTVAPAAEGGWDAAVPPTTAAAGWE

SEQ ID NO: 48510 - protein, 148 aa, Pleurotus cornucopiae
ADQLSEEQISEFKEAFSLFDKDGDGTITTKELGTVMRSLGQNPTEAELQDMINEVDADGNGTIDFPEFLTMMARKMRDTDSEEEIKEAFKVFDKDGNGYISAAELRHVMTNLGEKLTDNEVDEMIREADIDGDGQINYEEFVKMMLSK

SEQ ID NO: 48511 - protein, 388 aa, Arthrobacter nicotinovorans
MTKTAIVRVAMNGITGRMGYRQHLLRSILPIRDAGGFTLEDGTKVQIEPILVGRNEAKIRELAEKHKVAEWSTDLDSVVNDPTVDIIFDASMTSLRAATLKKAMLAGKHIFTEKPTAETLEEAIELARIGKQAGVTAGVVHDKLYLPGLVKLRRLVDEGFFGRILSIRGEFGYWVFEGDVQAAQRPSWNYRKEDGGGMTTDMFCHWNYVLEGIIGKVKSVNAKTATHIPTRWDEAGKEYKATADDASYGIFELETPGGDDVIGQINSSWAVRVYRDELVEFQVDGTHGSAVAGLNKCVAQQRAHTPKPVWNPDLPVTESFRDQWQEVPANAELDNGFKLQWEEFLRDVVAGREHRFGLLSAARGVQLAELGLQSNDERRTIDIPEITL

SEQ ID NO: 48512 - protein, 712 aa, Methylobacillus flagellatus KT
MKNKTEKVKSQLAGSTAPDKKNTTAKTRDLESYKSDATGQPLRTNQGVKIADNKNSLRAGSRGPSLLEDFILREKITHFDHERIPERIVHARGVGAHGYFESYADHSSLTKAGFLGEKGKQTPVFVRFSTVQGPRGSADTVRDVRGFAIKFYTEEGNFDLVGNNIPVFFIQDAIKFPDFVHAVKPEPHNEIPTGASAHDTFWDFVSLQPESAHAVIWAMSDRAIPRSLRAMQGFGVHTFRLINAKGVAKFVKFIWTPKQGVLSLVWDEAQKIAGKDPDFHRRDLGESIELGNYPEWEFGVQIIDEQDEHSFDFDILDPTKIVPEELVPITPLGKLVLNRNPDNFFAETEQIAFCPGHIVPGLDFSNDPLLQGRLFSYTDTQLSRLGGPNFHEIPINKPVCPFHNNQRDALHRTTIHKGQAAYEPNSIDGGWPQETPPAAKDGGFESYYERIDAHKVRERSASFKDHFSQPRLFYKSLSATEQLHIAEAYSFELGKVKRQHIRERVVNEILSNIDLGLAGTVAQKLGIPAPKKPTIKVPEPSLKQSSALSQMKLTPQDLQGKKIAALVFDGLSAKAIRPLLDWAQQHSIALQLLGPTSAPVKTSEGKSLAVDGSIKGEPSILFDAAIVPDIPTDHTALLDNGQAVHFILETFKHLKPLALTGPGASLIKALHLEEDAGLLQAKDFSAVREQFERALLAHRVWEREKKAERIPA

SEQ ID NO: 48513 - protein, 373 aa, Staphylococcus aureus subsp. aureus Mu50
MGLKDQAVTWRRYFHQFPELSDKEFKTTQKIKDILTEHHIRILDLPLMTGLVAEVGQGLSCIAVRADIDALPIQELVEQDFKSENEGVMHACGHDIHMASILATAVKLKEIEGTLTGRVKFIFQPAEELGHGAFKIIETDALKDVQAVLGFHNDPSRSVGTFAIKTGAITSAVDRFEFHIKGVGGHAAKPEQCNDPVIVLAQLINSIQSIVSRNLSAFDEAVVTIGQISCGNTWNVIADHAYVQGTVRSFDPVVRKLVETRLQDIADGLAQAYNMKINLNYTHLPGAVMNDEALTHKAIAVAQHVGYKVEMMEQPLTIGEDFSGYSQHFPSVFALIGSHSEYDLHHPQYKPDERILEKVPEYFVEFVKRLLHE

SEQ ID NO: 48514 - protein, 149 aa, Solanum tuberosum
MAEQLTEEQIAEFKEAFSLFDKDGDGCITTKELGTVMRSLGQNPTEAELQDMISEADADQNGTIDFPEFLNLMARKMKDTDSEEELKEAFKVFDKDQNGFISAAELRHVMTNLGEKLTDEEVDEMIREADIDGDGQVNYEEFVRMMLAK

SEQ ID NO: 48515 - protein, 148 aa, Spinacia oleracea
AZZLTDEQIAEFKEAFSLFDKDGDGCITTKELGTVMRSLGQNPTEAELQDMINEVDADGNGTIDFPEFLNLMARKMKDTDSEEELKEAFRVFDKDQNGFISAAELRHVMTNLGEKLTDEEVDEMIREADVDGDGQINYEEFVKVMMAK

SEQ ID NO: 48516 - protein, 582 aa, Salmonella enterica subsp. enterica serovar Typhi Ty2
MHNDKDLSTWQTFRRLWPTIAPFKAGLIVAGIALILNAASDTFMLSLLKPLLDDGFGKTDRSVLLWMPLVVIGLMILRGITSYISSYCISWVSGKVVMTMRRRLFGHMMGMPVAFFDKQSTGTLLSRITYDSEQVASSSSGALITVVREGASIIGLFIMMFYYSWQLSIILVVLAPIVSIAIRVVSKRFRSISKNMQNTMGQVTTSAEQMLKGHKEVLIFGGQEVETKRFDKVSNKMRLQGMKMVSASSISDPIIQLIASLALAFVLYAASFPSVMDSLTAGTITVVFSSMIALMRPLKSLTNVNAQFQRGMAACQTLFAILDSEQEKDEGKRVIDRATGDLEFRNVTFTYPGREVPALRNINLKIPAGKTVALVGRSGSGKSTIASLITRFYDIDEGHILMDGHDLREYTLASLRNQVALVSQNVHLFNDTVANNIAYARTEEYSREQIEEAARMAYAMDFINKMDNGLDTIIGENGVLLSGGQRQRIAIARALLRDSPILILDEATSALDTESERAIQAALDELQKNRTSLVIAHRLSTIEQADEIVVVEDGIIVERGTHSELLAQHGVYAQLHKMQFGQ

SEQ ID NO: 48517 - protein, 516 aa, Gibberella fujikuroi
FDGRDNAPAPPGVHATRKPTSASPTAAAAAAGFHSPGKFDYEGFYNAELEKKHKDKSYRYFNNINRLAKEFPRAHMSDKEDRVTVWCANDYLGMGRNPHVLQKMHETLEEYGAGAGGTRNISGHNRHAVELESTLAKLHAKEGALVFSSCYVANDATLATLGSKMPDCVILSDSLNHASMIQGIRHSGTKKIVFKHNDVQDLEAKLASLPLHVPKIIAFESVYSMCGSIGPIEEICDLADRYGAITFLDEVHAVGMYGPHGAGVAEHLDWEAHANGAPRGTIMDRIDIITGTLGKAYGCVGGYIAGSAKFIDMIRSLAPGFIFTTSLPPATMAGAQASIEYQMGFDGDRRLQQLHTRAVKEAMNARDIPVIPNPSHIVPILVGNAETAKEASDMLLNDYGIYVQAINYPTVPVGQERLRVTPTPGHIKEYRDQLVEAIDEIWTRLDIKRTSDWAAEGGFIGVGEQDNVQEPLWTDKQLNIEQATKEIKATGQAANGVTEALLELEIKQTSQAATVA

SEQ ID NO: 48518 - protein, 529 aa, Arabidopsis thaliana
MSHNQNQPHRPVPVHVTNAEPNPNPNNLPNFLLSVRLKYVKLGYHYLISNALYILLLPLLAATIANLSSFTINDLSLLYNTLRFHFLSATLATALLISLSTAYFTTRPRRVFLLDFSCYKPDPSLICTRETFMDRSQRVGIFTEDNLAFQQKILERSGLGQKTYFPEALLRVPPNPCMEEARKEAETVMFGAIDAVLEKTGVKPKDIGILVVNCSLFNPTPSLSAMIVNKYKLRGNILSYNLGGMGCSAGLISIDLAKQMLQVQPNSYALVVSTENITLNWYLGNDRSMLLSNCIFRMGGAAVLLSNRSSDRSRSKYQLIHTVRTHKGADDNAFGCVYQREDNNAEEAGKIGVSLSKNLMAIAGEALKTNITTLGPLVLPMSEQLLFFATLVARKVFKVKKIKPYIPDFKLAFEHFCIHAGGRAVLDEIEKNLDLSEWHMEPSRMTLNRFGNTSSSSLWYELAYSEAKGRIKRGDRTWQIAFGSGFKCNSAVWKALRTIDPMDEKTNPWIDEIDDFPVQVPRITPITSS

SEQ ID NO: 48519 - protein, 189 aa, uncultured bacterium
MDIDFKKLAPWNWFKKEQEEQQSTASLPVQRNDLPVAGGPVSPILQLHREIDRLFDDAFRGFGFPTLAMPRWPSDWPGMLKPALDIQETDKQYKIALEVPGIEEKDIQITLDNDVLLVRGEKRQEQETKDGGFHRVERSYGSFQRALNLPADANQDTIKAAFKNGVLTITMDKREASTPKQGRSIPING

SEQ ID NO: 48520 - protein, 401 aa, Candida albicans SC5314
MYRATATSRQLVGTTANILVAKRSMAKAASDLVTIELPASSYEGYNLEVPALSFETEKETLLKMYKDMIIIRRMEMAADALYKSKKIRGFCHLSVGQEAIAVGIENAITPTDTVITSYRCHGFAFMRGASVKSVLAELMGRRSGIANGKGGSMHMFTNGFYGGNGIVGAQVPLGAGLAFSHKYKNDKAVTFDLYGDGASNQGQVFEAYNMAKLWNLPVIFACENNKYGMGTSAARSSAMTEYYKRGQYIPGLKINGMDVLATYQASKFAKDWASQGNGPLVLEYETYRYGGHSMSDPGTTYRTREEVQHMRSRNDPIAGLKAVLLEKEIASEDEIKSYDKAARKYVDEQVAAAEADAPPEAKMDILFEDVYVPGSEIPVLRGRISDDSWDFKNKTFLNKVY

SEQ ID NO: 48521 - protein, 282 aa, Saccharomyces cerevisiae
MDPSLVLEQTIQDVSNLPSEFRYLLEEIGSNDLKLIEEKKKYEQKESQIHKFIRQQGSIPKHPQEDGLDKEIKESLLKCQSLQREKCVLANTALFLIARHLNKLEKNIALLEEDGVLAPVEEDGDMDSAAEASRESSVVSNSSVKKRRAASSSGSVPPTLKKKKTSRTSKLQNEIDVSSREKSVTPVSPSIEKKIARTKEFKNSRNGKGQNGSPENEEEDKTLYCFCQRVSFGEMVACDGPNCKYEWFHYDCVNLKEPPKGTWYCPECKIEMEKNKLKRKRN

SEQ ID NO: 48522 - protein, 327 aa, Petunia x hybrida
MENYQHFDCSDSNLPPGFRFHPTDEELITYYLLKKVLDSNFTGRAIAEVDLNKCEPWELPEKAKMGEKEWYFFSLRDRKYPTGLRTNRATEAGYWKATGKDREIYSSKTSALVGMKKTLVFYRGRAPKGEKSNWVMHEYRLDGKFAYHYISRSSKDEWVISRVFQKSCSTVGTTSNGGKKRLNSSFNNMYQEVSSPSSVSLPPLLESSPYNNTATSAAASKKEHVSCFSTISTPSFDPSSVFDISSNSNTLHSLPAPSFSAILDPSSTFSRNSVFPSLRSLQENLHLPLFSGGTSAMHGGFSSPLANWPVPETQKVDHSELDCMWSY

SEQ ID NO: 48523 - protein, 1061 aa, Bacillus subtilis subsp. subtilis str. 168
MKETSPIPQPKTFGPLGNLPLIDKDKPTLSLIKLAEEQGPIFQIHTPAGTTIVVSGHELVKEVCDEERFDKSIEGALEKVRAFSGDGLFTSWTHEPNWRKAHNILMPTFSQRAMKDYHEKMVDIAVQLIQKWARLNPNEAVDVPGDMTRLTLDTIGLCGFNYRFNSYYRETPHPFINSMVRALDEAMHQMQRLDVQDKLMVRTKRQFRYDIQTMFSLVDSIIAERRANGDQDEKDLLARMLNVEDPETGEKLDDENIRFQIITFLIAGHETTSGLLSFATYFLLKHPDKLKKAYEEVDRVLTDAAPTYKQVLELTYIRMILNESLRLWPTAPAFSLYPKEDTVIGGKFPITTNDRISVLIPQLHRDRDAWGKDAEEFRPERFEHQDQVPHHAYKPFGNGQRACIGMQFALHEATLVLGMILKYFTLIDHENYELDIKQTLTLKPGDFHISVQSRHQEAIHADVQAAEKAAPDEQKEKTEAKGASVIGLNNRPLLVLYGSDTGTAEGVARELADTASLHGVRTKTAPLNDRIGKLPKEGAVVIVTSSYNGKPPSNAGQFVQWLQEIKPGELEGVHYAVFGCGDHNWASTYQYVPRFIDEQLAEKGATRFSARGEGDVSGDFEGQLDEWKKSMWADAIKAFGLELNENADKERSTLSLQFVRGLGESPLARSYEASHASIAENRELQSADSDRSTRHIEIALPPDVEYQEGDHLGVLPKNSQTNVSRILHRFGLKGTDQVTLSASGRSAGHLPLGRPVSLHDLLSYSVEVQEAATRAQIRELASFTVCPPHRRELEELSAEGVYQEQILKKRISMLDLLEKYEACDMPFERFLELLRPLKPRYYSISSSPRVNPRQASITVGVVRGPAWSGRGEYRGVASNDLAERQAGDDVVMFIRTPESRFQLPKDPETPIIMVGPGTGVAPFRGFLQARDVLKREGKTLGEAHLYFGCRNDRDFIYRDELERFEKDGIVTVHTAFSRKEGMPKTYVQHLMADQADTLISILDRGGRLYVCGDGSKMAPDVEAALQKAYQAVHGTGEQEAQNWLRHLQDTGMYAKDVWAGI

SEQ ID NO: 48524 - protein, 501 aa, Oryza sativa (japonica cultivar-group)
MDGSNENIQFSWGKKRAKGGIKMDTQFYDSFTFDNVKYSLYDNVYLFKSGESEPYIGKIIKIWQQNQAKKVKILWFFLPDEIRKHLSGPVMEKEIFLACGEGVGLADINPLEAIGGKCTVLCISKDERNRQPSPRELAMADYIFYRFFDVNSCTLSEQLPEKIAGVEGNLLLNSKVEQVTSCSDQEVHGVDQKMLNVPVPLPQSTVMEDESPVAAVSLPPSVFKEENVASAIPFPQPVVKEESAAAAIPPPHVALKEESVSKSTENITKPAQKVLPGERPPKRVKFSENVTVQNVPLDVPERPSRTGPLELAGRQADRSKWFKIPWDTRLRNADEQGTLVYIQNLDIQFAAADIEELIRDALQLNCIAKPINHPTYDDPNNGKAYAIFKTKSAADSAISKINSGLVVGGRPLYCSKGLLKVPKPSETLLGHLTINNIRMGIRQREEQKKAVSTSHCSQPNTMEYDLALDWMLVRAKQETKFRTLHKKHKDERKTFASKMGK

SEQ ID NO: 48525 - protein, 220 aa, Silicibacter sp. TM1040
MNAEFASSSAPIKLYRHPLSGHCHRVEMMLSILDLPYELVDLDLLQGAHKAPAFLDLNPFGQVPVLDDNGTIVSDSNAILVYLVEAYGKETGWLPRAPGVAAAVQRWLSLTVSHLATGPARARWRTLTGASDTPETETARAISHAFLEQMEGLISGQHYLAGEAPTIADVSAYAYIAHAPEGGVSLAAYPKVRAWIDRVEALQGFVPMQASPLPELARGA

SEQ ID NO: 48526 - protein, 454 aa, Nocardia farcinica IFM 10152
MVATTRQTAGSADADSEEPTAARPVRKAAAKKAPAKKAAAKKAPAKKAAAKKAPAKKATTKKAGPDGEPGADEPIDEEAIDLEDLDDLEVDEGDLADDPEIAEAAEEPAEDEEAEEEPSAADKASGDFVWDEEESEALRQARKDAELTASADSVRAYLKQIGKVALLNAEEEVELAKRIEAGLYAAEKMREFAESGEKLPVAMRRDYNWIVRDGNRAKNHLLEANLRLVVSLAKRYTGRGMAFLDLIQEGNLGLIRAVEKFDYTKGYKFSTYATWWIRQAITRAMADQARTIRIPVHMVEVINKLGRIQRELLQDLGREPTPEELAKEMDITPEKVLEIQQYAREPISLDQTIGDEGDSQLGDFIEDSEAVVAVDAVSFTLLQDQLQSVLETLSEREAGVVRLRFGLTDGQPRTLDEIGQVYGVTRERIRQIESKTMSKLRHPSRSQVLRDYLD

SEQ ID NO: 48527 - protein, 133 aa, Arabidopsis thaliana
  misc_feature (131)..(131): Xaa can be any naturally occurring amino acid
  unsure (1)..(133): unsure at all Xaa locations
RGSTQASILIRNNDRRGEKVVDLFGVGEANSQKLLEGGKDLSEIQQGLFIGSVAEANNKDFLKSSNITHVLTVAVALAPPYPDDFVYKVIEVVDRSETDLTVYFDECYSFIDQAIQSGGGVLVHCFMGMSXRF

SEQ ID NO: 48528 - protein, 553 aa, Nostoc punctiforme PCC 73102
  misc_feature (539)..(539): Xaa can be any naturally occurring amino acid
  misc_feature (551)..(551): Xaa can be any naturally occurring amino acid
  unsure (1)..(553): unsure at all Xaa locations
MSKTQTASSFLSNISEQEREALKRLVDYTKVESLPEVWPLASQRFGDVVALRSPHAKPEIVITYTQLAEQIQLFAAGLQALGVKLGDRISLISDNSPRWFIADQGIMTAGAVDAVRSSQAEKEELLFIIANSGSTAIVVEDLKTLKKLQDRIQDLPIQFAILLSDEAPPTDGTLKVLNFAQLIEIGKNHNFVPVKQNRDALATLIYTSGTTGRPKGVMLSYSNLMHQITTFGTVLQPNAGDIVLSILPSWHSYERTVEYYLLSQGCTQIYTNLRSVKGDLRQFKPNYMVGVPRLWESIYEGVQKQFREQPAKKQRLINFLLGISDKYIKARRVAQGLDLNNLHASAIERLTAKIQAAALLPLHALGERLVYAKVREATGGHVKQMISGGGALPRHIDNFFEIIGVQILQGYGLTETSPVTHVRRPWRNLIGASGLPLPATEAKIVDPETKAPLPIEKRGLVLLRGPQIMQGYYQNPEATAKAIDAEGWFDSGDLGWLTPQDDLVLTGRAKDTIVLTNGENIEPQPIEEDVFAIAYMGFXRPVISFARQLGXSR

SEQ ID NO: 48529 - protein, 152 aa, Triticum aestivum
  misc_feature (19)..(19): Xaa can be any naturally occurring amino acid
  unsure (1)..(152): unsure at all Xaa locations
MSIVRRSNVFDPFADLWAXDPFDTFRSIIPAISGNNSETAAFANARMDWKETPEAHVFKADLPGVKKEEVKVEVEDGNVLVVSGERTKEKEDKNDKWHRVERSSGKFVRRFRLPEDAKVEEVKAGLENGVLTVTVPKAQVKKPEVKAIQISG

SEQ ID NO: 48530 - protein, 77 aa, Arabidopsis thaliana
MKFSMRLISAVLFLVMIFVATGMGPVTVEARTCASQSQRFKGKCVSDTNCENVCHNEGFPGGDCRGFRRRCFCTRNC

SEQ ID NO: 48531 - protein, 388 aa, Bdellovibrio bacteriovorus HD100
MAEYINPDYVPEPEKMNVKKGLDGVVMDTSSVSKVNPHTNSLIYRGYPVQDLAENCSFEEVAFLMYNGELPNAGQLAEFSKKERSYREISTTLLNVIKALPQKCHPMDSIRTAVSFLGAEDARIWDASPATNMDKAMMLLAKIPTMVAADYRFKKGLDFIPPKADLSIAENFFHMCFGKVPQKEVVKAFDVSLILYAEHSFNASTFTARVVTSTQSDIYSATVAGIGALKGPLHGGANEMVMHMMKEIADPAKAEQWMLDALAQKKKVMGFGHRVYRSGDSRVPTMKKYAQVMADVTGEQKWMQMYTALEKVMVDKKKIYPNLDFPAGPAYYMMGFEIDFFTPIFVMARTTGWSAHIMEQTADNRIIRPLSEYVGAEQRKVTPISERK

SEQ ID NO: 48532 - protein, 466 aa, Bartonella henselae str. Houston-1
MDYKQNSENNPKKKLQRGLHNRHVQLIALGGAIGTGLFMGSGKTISVAGPSIILVYAIIGCALYFVMRAMGELLLSNSRYRSLIDFSTDMLGPGIAFFVGWSYWLSWVVTGAADIIAIITYMHFWWPTLNSWIIVFSCVIFFLTLNLLAVKMFGELEFWFGLIKVLAILALIVVGFYMICTGFTSPNGTVASLSHVWNDGNIFPRGIPGFFAGFQIAIFSFGGIEIAGTTAAEVKEPKKVLPKAINAIPLRIVLFYIFSLVVIMSVTPWDQVVPEKSPFVSMFWLAGIPIAAGLINFVVLTSAASSANSGIFSTSRMIYGLATQKGAPRFFGKLSKYHVPANALFFSCLCILLGYTIASSSPSIISAFTIVSSIPAIAFLFVWSVILVSYIVYRHNHPHLHTESVYKMPGGVITCGIILAFFAFMLYLLTLESDTLTALKYSIFWFIFLGITYFMFIRKKTAQDNK

SEQ ID NO: 48533 - protein, 301 aa, Methanosarcina barkeri str. fusaro
MNYLWMIDKFMGDREKNVGFAAVLNILFTFIELIGGFLTNSLALIADALHDFADSFALIIAWYAEKKAKKPATSKMTFGYRRLSLLSATFTIIVLVAGSLFVLTQAIPRLISPEPVNAEGMVLIAVIGVTINSLGYFRLKKGMSQSEKVLSWHLLEDILGWVVLLTGSIIIRFWNKPVIDPIMTIGFTVFVLWGVSKNAKEIFNLLLEGVPEYIDIDEIKKSILSVEGVKMVHDLHIWSLEGETVLLTAHVVVEDKYLQTPDKMRQSIKSKLEKHHIEHSTLELESEGFCSATECIFESKN

SEQ ID NO: 48534 - protein, 345 aa, Candida albicans SC5314
MTTSNRPKVLRLGKIEFAQKKWDEVAQIADVIDCESQNREEFIKDLQTKYSDITNIARTYASVEQTGRFDAELAQHMPKTLVSLSHNGAGYDQIDVQPFTDKGIQVSNVTVPVEGPTAVTAVFLVLSCLRNYQEGHQILYDGGWDSKKCGGAKLGHSPEGKVVGILGMGGIGRAIRDRLKPFGFTKILYHNRKPLSSDLEGGAEYVSKEDLFKQADIICISVPLNAHTKHSINKEAISQMKDGVILINTARGAVIDEKELPELLKSGKIGAFGADVFEKEPEVSPELYRLPNVVSLPHMGTHTYEAIKDMEDWVAENVESCLKTGKVKTIVPEQYNLEIKQGPLV

SEQ ID NO: 48535 - protein, 339 aa, Bartonella henselae str. Houston-1
MRVYYDRDANVNLIKEKKVAIVGYGSQGRAHALNLRDFGVKNVKIALRSESATVKKAVADGFEVVCVAEAAKWADLIMMATPDELQADIYKEHIHDHLRDGAVIAFAHGLSIHFGLIEPKKTVDVVMIAPKGPGHTVRNEYQNGCGVPCLIAVAQDASGHAHNVALSYACGLGGGRAGVIETTFKEECETDLFGEQAVLCGGLVELIRAGYETLTEAGYAPEMAYFECLHEVKLIVDLMYEGGIANMNYSISNTAEWGEYMSGPRVITDETRAEMKRILKDIQTGKFTSNWIQEYKAGAAHFKGMRRLNDSHPIEEVGKKLRSMMPWIKANALVDKERN

SEQ ID NO: 48536 - protein, 447 aa, Vicia faba
MGKEKVHINIVVIGHVDSGKSTTTGHLIYKLGGIDKRVIERFEKEAAEMNKRSFKYAWVLDKLKAERERGITIDIALWKFETSKYYCTVIDAPGHRDFIKNMITGTSQADCAVLIIDSTTGGFEAGISKDGQTREHALLAFTLGVKQMICCCNKMDATTPKYSKGRYEEIVKEVSSYLKKVGYNPDKIPFVPISGFEGDNMIERSTNLDWYKGPTLLDALDNINEPKRPSDKPLRLPLQDVYKIGGIGIVPVGRVETGVVKPGMLVTFAPTGLTTEVKSVEMHHEALTEALPGDNVGFNVKNVAVKDLKRGFVASNSKDDPAKEAANFTSQVIIMNHPGQIGNGYAPVLDCHTSHIAVKFAELITKIDRRSGKEIEKEPKFLKNGDAGMVKMIPTKPMVVETFAEYPPLGRFAVRDMRQTVAVGVIKSVEKKDPTGAKVTKAAAKKK

SEQ ID NO: 48537 - protein, 592 aa, Arabidopsis thaliana
MAFMRLGSKSEAFHREGQTWLCTTGLVSDVTIEVGDMKFHLHKFPLLSRSGLLERLIEESSTDDGSGCVLSLDEIPGGGKTFELVTKFCYGVKIELTAFNVVSLRCAAEYLEMTDNYGEGNLVGMTETFLNEVFGNWTDSIKALQTCEEVIDYAEDLHIISRCVDSLAVKACADPSLFNWPVGGGKNATSGQNTEDESHLWNGISASGKMLQHTGEDWWFDDASFLSLPLFKRLITAIEARGMKLENIAMAVMYYTRKHVPLMNRQVNMDEQVIETPNPSEEDQKTCLEEIVGLLPSKKGVNPTKFLLRLLQTAMVLHASQSSRENLERRIGNQLDQAALVDLLIPNMGYSETLYDVECVLRMIEQFVSSTEQAGIVPSPCIIEEGHLVKDGADLLTPTTLVATLVDGYLAEVAPDVNLKLAKFEAIAAAIPDYARPLDDGVYHAIDVYLKAHPWITDSEREHICRLMNCQKLSLEASTHAAQNERLPLRVIVQVLFFEQLRLRTSVSGWFFVSENLDNPDNQHGANGGLLKPRGENVRERVSELEKECMNMKQELHKLVRTKRSWKNFTRKLNFKKKSECCKPKDQATPAI

SEQ ID NO: 48538 - protein, 341 aa, Zea mays
MELDSIECMSYSDSMGDDDTDAVTSSQLPRPFLKSSSTAGTAAVNVVVVSDRVGAAGPVAGAGSLVISPATGVHELLECPVCTNSMYPPIHQCQNGHTLCSTCKTRVHNRCPTCRQELGDIRCLALEKVAESLELPCKYYSLGCSEVFPYYSKLKHESQCNFRPYNCPYAGSECSVVGDISFLVAHLRDDHKVDMHSGCTFNHRYVKSNPREVENATWMLTVFHCFGQYFCLHFEAFQLGMAPVYMAFLRFMGDENDARNYSYSLEVGANGRKMIWEGTPRSIRDSHRKVRDSHDGLIIQRNMALFFSGGERKELKLRVTGRIWKEQQNPDSGACIPNLFS

SEQ ID NO: 48539 - protein, 625 aa, Desulfovibrio desulfuricans G20
MLTDFFMPPSGGAATAGQLCALPANAIAVACRDDRFRRLVRWLGLARCQGAEGAFTCRVADMPGVFGLACEEVCSSGCTQQARFGIYYFPHADEQLCDAMRLDAAVLTQHTAYAARVRGFATDPDFAGLFRTGTLDVLYGSVPAAFGLRLVAENRLRIRCDAGLYSEETGWVVEPGGLEEDLPALLLSRRIYDVLGAALSACLQEAPVFFSRTEYGCGLRHRQADGSVRLDERAEGADAGRRTGELLVWGNVGSLTADIDAGPQPGAEVLSYVACTDCNVQKGNMPEEVAAAPCWVAHDLESEACGRMHPVLNDRRPALVVVSGFLGSGKTTFLNNCIEYHRARERFVAVIQNEMGATGVDGHLLGDSASVLALDEGCVCCTLAGSLAAGVRDLTARFNPQVILLETTGLANPLNLLEEMGSLRELVRLECMVTVVDAANGISTLSDSEVARDQIRGADVVVCNKCDVAGPQAVAALKDAVQGLNPRAMIHTTEFGSVHPALFMDAGDGRSGSGLMPAVPAAHADHRHEGYGAVRFFMPHPVSREQLRQAVQQCPGQPFRIKGIVTSAGQDADLRESLLVQHVAGRTDFELLGGFEGKPFVVVIGKNLDDEALYSHWQRLGATRE

SEQ ID NO: 48540 - protein, 505 aa, Bartonella henselae str. Houston-1
MGRNVIGKNTSMKCFLIRAFVCVLLFLLGSMNSSWAVETKNRSLSVPDLAAQLLETVVNISTAQTVDGTEQDEHTSVPVIPEDSLLQEYFTDFFSPKDGQKESQFQKVRSLGSGFVIDAQKGLIVTNYHVIVDADDIEVNFTDGTKLKAKLLGKDSKTDLALLQVDAGSKKLKAVRFGDSEKARIGDWVMAIGNPYGFGGSVTVGIISARNRDLNAGPYDNFIQTDAAINRGNSGGPLFDRNGEVIGINTAIVSPSGGSIGIGFAIPSDMALSVINQLRDFGEIRRGWLAIRIQPVTEDIAKSLKLESPVGALVAGKMEQTDVDNSQLQIGDIILSFGNAKIKHARDLPRLVAESLEGKVVDITVLRNGQEKTVKVKLGRLIETDTNENMVEESDNERSGPISKSGTMQFMGMTLSELTADLRQHYSITDKLQGLVVISVAKNSAADKKRIRTGEVIVDINQSTVTTIGEAKKRIHKLREAGRKNALFIIARPDGELRFVTIPMD

SEQ ID NO: 48541 - protein, 141 aa, Euryale ferox
FSEEQEALVVKSWGVMKKDAGQLGVKFFAKIFEIAPSAKRMFSFLRDSDLPLEQNPKLKPHALSVFAMTCESAVQLRKAGKVTVRESSLKDLGATHFKYGVVDEHFDVRFAFSRSVFSSIRDLFQPEMKIAWGEAYDKLAA

SEQ ID NO: 48542 - protein, 147 aa, Euryale ferox
MGSIGFSEEQEALVKEAWELMKPNVQELGLKMFFLSWADVAGGAGMFYFLKDQNEIPRNNPQLRSHVVKVFTMTCESAAQLHKNGKVEAVGSTLKKMGAIHLKKGVQESHFEVIKVAFLKVVKEAVEEKWSEEMGAAWAEAYDKLAA

SEQ ID NO: 48543 - protein, 537 aa, Glycine max
MKYLLLSLFHGSSTFSTEREMEAASWPTIILLLIIMIWAWKMLNWLWLRPKRLERLLREQGLQGNSYTLFVGDLKEFGKMRNEALSKPMNLFSHDIAPRVLSFIQHTVNKHGKNSFIWFGPIPRVTLTDPEQIKDVLNKIYDFGKPDMNPHVRLLAPGLVSHEGEKWSKHRKIINPAFNLEKLKNMLPLFIKCCDDLISKWEGMLSSDGTSETDIWPFFQNLASDVISRTAFGSSYEEGRRIFQLLKEQTELTIQTFLKVNIPGWRFVPTTTHRRMKEINKDIEASLMDMINKRETALKAGEATKNNLLDILLESNHKEIQEQGNKNVGMNLEEVIEECKLFYFAGQETTSVLLVWTMILLSMYPDWQTRAREEVLQVFGNRKPNFEGLNHLKIVTMILNEVLRLYPPVVGLARKVNEDVKLGNLSLPAGVQISLPIVLVHHDCELWGDDAKEFKPERFSEGLLKATNGRVSFFAFGGGPRICIGQNFSFLEAKIALSMILQRFSFELSPTYTHAPTSVITLQPQHGAHLILHKVEI

SEQ ID NO: 48544 - protein, 585 aa, Saccharomyces cerevisiae
MSHPHSHSIYLSELPVRKPQALGNPLLRKIQRACRMSLAEPDLALNLDIADYINEKQGAAPRDAAIALAKLINNRESHVAIFALSLLDVLVKNCGYPFHLQISRKEFLNELVKRFPGHPPLRYSKIQRLILTAIEEWYQTICKHSSYKNDMGYIRDMHRLLKYKGYAFPKISESDLAVLKPSNQLKTASEIQKEQEIAQAAKLEELIRRGKPEDLREANKLMKIMAGFKEDNAVQAKQAISSELNKLKRKADLLNEMLESPDSQNWDNETTQELHSALKVAQPKFQKIIEEEQEDDALVQDLLKFNDTVNQLLEKFNLLKNGDSNAASQIHPSHVSAPLQQSSGALTNEINLIDFNDLDEAPSQGNNNTNGTGTPAAAETSVNDLLGDLTDLSISNPSTANQASFGLGGDIVLGSSQPAPPVTTTNNSNNTLDLLGLSTPQSPTNSQAVNSSGFDLLMGFNPTTGTTTAPARTLVNQSPNLKIEFEISRESNSVIRIKSFFTNLSSSPISNLVFLLAVPKSMSLKLQPQSSNFMIGNAKDGISQEGTIENAPANPSKALKVKWKVNYSVNSTQAEETAVFTLPNV

SEQ ID NO: 48545 - protein, 155 aa, Zea mays
FYCFVLDPTYLLTTIHSGGSQLIWIAPSGGRDRPNPSTGEWYPVYFICYMQKQGQAPFDSSAVDNMRRLLEHAGVPGHIYPLSLLCYEVMPPPQQVEKEIGEQRVISFHGAGLSVTEEINYGDITAHTKNADEWQTVELVSTVDWRVETVGRQPI

SEQ ID NO: 48546 - protein, 411 aa, Nostoc sp. PCC 7120
MMTTDLLTNPAHEIVDVKTTDCCIVGGGPAGAVLALLLARQGVSVILLEAHKDFDRDFRGDTIHPSVMEIMEELGLSDRLLQLPHAKMRQIRVKTTENTFTLADFSHLKTRYPYITMLPQVKFLEFITQEAQKYPSFKLVMGANVQELIQENGVIQGVRYRGGGGWHEIRAILTVGADGRHSRLRQLGNFAATETSPPMDILWFRLPRQPEDGEGGMGRFAPGHIIAMLDRGNEWQMAYVIPKGGYQQLRSTGLEALKKSVVEVVPELANRIHNLHDWSQVAFLSVESNLVQRWYRPGLLLIGDAAHIMSPVAGVGINYAIQDAVVTANVLTKPLQNHHVKLRDLAKVQRRRELPTRIIQAFQTFIQKRVFAPILAENLNFQPPMLLRLPILRDLPARLIALGVFPVHVQT

SEQ ID NO: 48547 - protein, 96 aa, Triticum aestivum
NKFVQKSRLVPVRNSRDIVDPRVRISFHGVGLSVAEEIKYGDVTAQSRNADEARGTFSEALYNSVVDQYNVLKSAIFRDRGAVSSNPAISLSQPWG

SEQ ID NO: 48548 - protein, 558 aa, Vibrio fischeri ES114
MNQPFFDHKTNPQLPHEAMLEWAEKKPHDLFLRQIKNREFTDYSFADVVDKALRLVSALQEMGIKPKDRVALISKNCAEWFITDLALMLGDFVSVPIFPTAGLDTIEHCLTHSESKVLIVGKLDNSEATQQAITNLPDILTIAFDYDSAAKCQYQFEVLLTTHNPSSFKAEHNDNTLMSIVYTSGTSGLPKGAMLTFGGFSHASKHLINHIGMQQDDRLFSYLPLAHITERVYILGSAFFGGIQTAFPESLDTFIEDVKMHRPTLFISVPRLWTVFQQRIQDKLPQKKLAILLKIPFVSGLIKRKLADGLGLDKARVLGCGSAPVSASLLKWYESIGLNITEAWGMTETFAYSTLNHPYRSDKVGSVGAAGPGVELKIADDEEILVRGDSLFAGYYKNDEATAETFNKDGWLHTGDIGSIDSEGFLTIQGRKKDTFKTAKGKFVAPVPIEKHIFDLSNLEMMCLIGSGLPGPILLAVPHAYPNFDQARYERTALKNLETINDGLESHEKLKGILMIKEPWSIENGILTPTLKIKRHVLEKKYHDFASNWPQDKKIIWE

SEQ ID NO: 48549 - protein, 476 aa, Neurospora crassa
MAPPKIRIATASPSTQSTTPETLSQIAHLARRAASNHVDILLLPEAYIGGYPRGTNFGCVMGSRSAEGRDEYLRYFQAAVDLGDIVGEGGAGGLEKWVRRELAGDEIQGRAQEGDKGDKVKNKRGDGTREELERIARETGVFLVTGCIEKAGGSLYCSAVYVCPKMGMIGKRRKVMPTAIERLVWAQGSPATLRAVSTVIRGVRINLAAAICWENYMPMLRQSLYSQNINLYLAPTADGRDTWLPLMRTVAIEGRCFVVSSNMCVRKDGDKQQAKTNGDPALAQQQQEQQQQTGMSAVADPSPYSRSDSHSRPKHIRRQSIFDEDGNEIVLPCCNEQGVVEVEAEAEVDDEAVSTTTAKTSLSSAATPAASAPAPALASKPDNNGKTFKSPIIDRSTGAKTEEEFVSRGGSAIVSPFGDVLAGPQWEDDEGIIWADVDFEDCIRGRLDLDTAGSYSRNDSFKLTVEGLDLSPLPYQ

SEQ ID NO: 48550 - protein, 143 aa, Glycine max
HALVKRLKSKLIAPRRHTLDQPCALFAVQSAEDSSECGDAALPSPDRSRYTNSVHEERPKGYLFNRTPTPAGQYRKWEEWELACYVTSLVTISILGVELNYKADLSIETWLHEKALEHVKMENWLAAGAINSSSESSSYDESE

SEQ ID NO: 48551 - protein, 336 aa, Galiella rufa
MVVKVGINGFGRIGRIVFRNAIEHEDIEIVAVNDPFIAADYAVYMLKYDSTHGRFKGEVSHKDGDLIVNGKTIKMYQERDPASIPWSETGAYYVVESTGVFTTIEKASAHLKGGAKKVVISAPSADAPMFVCGVNLEKYSKDINILSNASCTTNCLAPLAKVINDNFGIVEGLMTTVHSYTATQKTVDGPSAKDWRGGRTAAANIIPSSTGAAKAVGKVIPALNGKLTGMSMRVPTQNVSVVDLTVRLEKGASYEEIKKVVKAAAEGDYKGVLEYTEDELVSSDLNGNNASSIFDARAGISLNEKFVKLVAWYDNEWGYSRRVLDLISYIAKVDAK

SEQ ID NO: 48552 - protein, 159 aa, Pinus taeda
DVGGGVGSTLNLIVSKYPHISGINFDMPHVVVDAPHYPAVKHVGGDMFDSVPSGQAIFMKWILHDWSDDHCLRLLKNCHKALPEKGKVIVVDTILPVAAETSPYARQGFHIDLLMLAYNPGGKERTEQEFRDLAKEVGFAGGVKPVCCVNGMWVMEFHK

SEQ ID NO: 48553 - protein, 271 aa, Sporobolus stapfianus
NEVEEEGEEFAAYCRRGKGRRRVEMEDRHVAKVALGGDPKAALFGVFDGHGGKNAAEFAAENMPKFVAEEMTKADGGESEIEGAVKRGYLKTDEEFLRRGESGGACCVTAVLQKGGLVVSNVGDCRAVLSRSGKAEALTSDHRASREDEKERIENLGGFVVNYRGTWRVQGSLAVSRGIGDAHLKQWIVADPDTRTLLVDQHCEFLILASDGLWDKIDNQEAVDLARPLCTSNDKASRMAACRMLVETSISRGSTDDISVVIIQLQNFSSS

SEQ ID NO: 48554 - protein, 604 aa, Candida albicans SC5314
MTSYQSSNNHSSEEDKHLSGDEKTFSPSDIVEKAIVEEKSIGVEKAEILANQWKHTFWFKLLLGFSAFLCGYAYGLDSQTRYVYTAYATASWSEHSLLTTVNAITGVVAAASQPVYARLSDVLGRLELFIVAVLFYVVGTIIECQSPTINAYVAGAVLFQIGYSGIIIMLLFILSDFSSLRWRLFFTLCPSFPFIINTWISGNVTAAVGTRWKWGIGMWAFILPLSCIPLVCCMIHMRWLAGKTEEWRVFKQRKTKFQELGVAGFSKYLFWRLDVIGLLLLTVSLGCLLVPLTLAGGIKETWKKAHIIVPIVIGGVLIPVFLLWEGYGARDPIIPLHLMKDRGIWSVVSISLFFDFVFAVESNFLYTVLMVAVNESQSSATRIASLSSFVSVVTGFIFGLFVVYFRRLKGFVVFGCAMWMVAFGIMYHFRSQLHAHAGIIGGMCLMGFGTGFFSYPINVSAQSCVSHEHMAVISSALYTTYRIGYAVGSSVAGAIWSQMLYSRLVKYLGDSTLATSVYTDPYTFIAQYVWGTPEREAAVKAYGEVQRVLMSVCIAFVAPMIVSALFMRDHKLTNEQSLEDVEKQEEKDSLANFFGNFKKKRVAV

SEQ ID NO: 48555 - protein, 450 aa, Arthrobacter nicotinovorans
MLATLASATSEDAVAALEAACAAQTSWARTAPRVRAEILRRAFDLVTARSEDFALLMTLEMGKPLAEARGEVAYGAEFLRWFSEETVRDYGRYLTTPEGKNKILVQHKPVGPCLLITPWNFPLAMATRKVAPAVAAGCTMVLKPAKLTPLTSQLFAQTMMEAGLPAGVLNVVSSSSASGISGPLLKDSRLRKVSFTGSTPVGKRLMSDASRHVLRTSMELGGNAPFVVFEDADLDKAVEGAMAAKMRNMGEACTAANRFLVQESVAQEFTRKFAAAMGALSTGRGTDPASQVGPLINNGARDDIHALVTAAVDAGAVAVTGGAPVDGPGYFYQPTVLADVPNNAAILGQEIFGPVAPVTTFTTEQDAIKLANASEYGLAAYLYSRDFNRLLRVAEQIEFGMVGFNAGIISNAAAPFGGVKQSGLGREGGSEGIAEYTTTQYIGIADPYEN

SEQ ID NO: 48556 - protein, 112 aa, Aspergillus ibericus
QITTKELGTVMRSLGQNPSESELQDMINEVDADNNGTIDFPEFLTMMARKMKDTDSEEEIREAFKVFDRDNNGFISAAELRHVMTSIGEKLTDDEVDEMIREADQDGDGRID

SEQ ID NO: 48557 - protein, 607 aa, Solanum tuberosum
MASITASHHFVSRSQTSLDTKSTLSQIGLRNHTLTHNGLRAVNKLDGLQSRTNTKVTPKMASRTETKRPGCSATIVCGKGMNLIFVGTEVGPWSKTGGLGDVLGGLPPALAARGHRVMTISPRYDQYKDAWDTSVAVEVKVGDSIEIVRFFHCYKRGVDRVFVDHPMFLEKVWGKTGSKIYGPKAGLDYLDNELRFSLLCQAALEAPKVLNLNSSNYFSGPYGEDVLFIANDWHTALIPCYLKSMYQSRGIYLNAKVAFCIHNIAYQGRFSFSDFPLLNLPDEFRGSFDFIDGYEKPVKGRKINWMKAGILESHRVVTVSPYYAQELVSAVDKGVELDSVLRKTCITGIVNGMDTQEWNPATDKYTDVKYDITTVMDAKPLLKEALQAAVGLPVDKKIPLIGFIGRLEEQKGSDILVAAIHKFIGLDVQIVVLGTGKKEFEQEIEQLEVLYPNKAKGVAKFNVPLAHMITAGADFMLVPSRFEPCGLIQLHAMRYGTVPICASTGGLVDTVKEGYTGFHMGAFNVECDVVDPADVLKIVTTVARALAVYGTLAFAEMIKNCMSEELSWKEPAKKWETLLLGLGASGSEPGVEGEEIAPLAKENVATP

SEQ ID NO: 48558 - protein, 379 aa, Bacillus licheniformis ATCC 14580
MKEQCVAMLLAGGKGSRLNALTKNLAKPAVPFGGKYRIIDFALSNCANSGIHHVGVLTQYQPLLLNSYIGIGEPWDLDRNDGGVSILSPYAEASEVKWYKGTASAIYENRHFLKELQPEHVLILSGDHIYKMDYGKMLEYHAEKQADATIAVIEVSWAEAGRFGILHTNDKMEITSFEEKPKYPKSNLASMGVYVFKWSVLEDALERDEKNSASSHDFGKDVIPALLEENKRLNAYPFKGYWKDVGTVRSLWEANMDLLGDHPPLDLFERNWRIYSVSPNLPPQFVADLAEIKESLVSEGCTVYGSVTRSVIFQRVAIGRHSAIKRSVVMHDVSIGEYVEIENAIVSAGIRIPDGFCAKPEDGEVLLITEEYVKKHKVV

SEQ ID NO: 48559 - protein, 470 aa, Solanum tuberosum
NKIKPGVAYSVITTENDTQTVFVDMPRLERRRANPKDVAAVILGGGEGTKLFPLTSRTATPAVPVGGCYRLIDIPMSNCINSAINKIFVLTQYNSAPLNRHIARTYFGNGVSFGDGFVEVLAATQTPGEAGKKWFQGTADAVRKFIWVFEDAKNKNIENIVVLSGDHLYRMDYMELVQNHIDRNADITLSCAPAEDSRASDFGLVKIDSRGRVVQFAEKPKGFDLKAMQVDTTLVGLSPQDAKKSPYIASMGVYVFKTDVLLKLLKWSYPTSNDFGSEIIPAAIDDYNVQAYIFKDYWEDIGTIKSFYNASLALTQEFPEFQFYDPKTPFYTSPRFLPPTKIDNCKIKDAIISHGCFLRDCSVEHSIVGERSRLDCGVELKDTFMMGADYYQTESEIASLLAEGKVPIGIGENTKIRKCIIDKNAKIGKNVSIINKDGVQEADRPEEGFYIRSGIIIILEKATIRDGTVI

SEQ ID NO: 48560 - protein, 603 aa, Zea mays
MKYVLVTGGVVSGLGKGVTASSIGVVLKACGLRVTTIKIDPYLNTDAGTMSPFEHGEVFVLDDGGEVDLDLGNYERFLDIKLTRDNNITTGKIYQAVINKERRGDYLGKTVQVVPHITDEIQDWIERVAVIPVDGKEGPPDVCVIELGGTIGDIESMPFIEALGQFSYRVGPGNFCLVHVSLVPVINVVGEQKTKPTQHSVRGLRGLGLAPDVLACRSTEPLEEHVKIKLSQFCHVPISNIVNLHDVTNIWHIPLLLRDQKTHEAILKVLDLQYDGKVPREPELGMWTKRATKLDKLKTSVKIAMVGKYTGLSDSYLSVIKALLHASVAMERKLVVEWVPSCDLEDSSAKETPEAHKKAWKLLKGADGVLVPGGFGDRGVQGKILAAKYARENNVPYLGICLGMQIAVIEFARSVMKLRGANSTEFDPATTSPCVIFMPEGSKTQMGATMRLGSRRTYFHVSGCKSAKLYANASSVDERHRHRYEVNPDMVPDFERAGLQFVGKDESGKRMGIIELPSHKFFIGAQFHPEFKSRPGKPSPLFLGLIAAASGQLEPLLQRSNPTTKACPMSKVPKLKLYPTGPVNNPLNSLVNGYYPNGTGIHT

SEQ ID NO: 48561 - protein, 492 aa, Magnetospirillum magnetotacticum MS-1
MRVLFVSSEVFPLVKTGGLADVSGALPAALTESGEDVKILLPGYPEAIKASGAKKSVGSLGDPFGLGAEVQLLSGKLPDSGVPVWLVDCPALFERDGGPYQDLQGRDWPDNALRFALLSWTAAHLCTEHSPVKWRPQVLHANDWQAGLAAAYLQAWNVAQRPATVFTIHNIAYQGQFPPEMVARLGFPPEMYAMEGFEYYDTLSFLKAGLFYSDRITTVSPRYAKEIQTPAFGCGMDGLLSYRAADLTGILNGADYQVWNPATDPHLDHPFAPGDAAGKARNKAALQAELGLAQDPDAPLMVIVSRLNDHKGMDLVLAALPNILRLGAQVAVVGTGDRPLEDGFRAAAAAHPAQVAARIGYSEPLAHRMMAGGDMLLMPSRFEPCGLTQFYAFRYGTVPVAHATGGLADTLVDTGYDTLMTGKANGFVFEHCNAGAFQWAVERAVGLYAKKDQWTRIVKACNAQDFGWSRSAALYRELYKSLAGNGKGKKKA

SEQ ID NO: 48562 - protein, 521 aa, Solanum tuberosum
MAASIGALKSSPSSNNCINERRNDSTRAVSSRNLSFSSSHLAGDKLMPVSSLRSQGVRFNVRRSPMIVSPKAVSDSQNSQTCLDPDASRSVLGIILGGGAGTRLYPLTKKRAKPAVPLGANYRLIDIPVSNCLNSNISKIYVLTQFNSASLNRHLSRAYASNMGGYKNEGFVEVLAAQQSPENPDWFQGTADAVRQYLWLFEEHTVLEYLILAGDHLYRMDYEKFIQAHRETDADITVAALPMDEKRATAFGLMKIDEEGRIIEFAEKPQGEQLQAMKVDTTILGLDDKRAKEMPFIASMGIYVISKDVMLNLLRDKFPGANDFGSEVIPGATSLGMRVQAYLYDGYWEDIGTIEAFYNANLGITKKPVPDFSFYDRSAPIYTQPRYLPPSKMLDADVTDSVIGEGCVIKNCKIHHSVVGLRSCISEGAIIEDSLLMGADYYETDADRKLLAAKGSVPIGIGKNCHIKRAIIDKNARIGDNVKIINKDNVQEAARETDGYFIKSGIVTVIKDALIPSGIII

SEQ ID NO: 48563 - protein, 429 aa, Magnetospirillum magnetotacticum MS-1
MFDPTERGTAIDIEVNERLRRTLALILAGGRGARLMDLTDWHAKPAIPFAGKFRIVDFTLSNCINSGIRRIGVLTQYKAHSLLQHIQRGWGFLRGEFNEFIELLPAQQRTQGEDWYKGTADAVFQNLDIIRAHRPEHVLILAGDHVYKMHYGKMLAHHLAAGADVTVGCIEVPLETAKGFGVMAADEDDRVIRFDEKPANPQPMPGHPDQALASMGIYIFNYQLLHDLLIKDSTSAETSHDFGKDIIPALVKSHRVIAHHFQDSCVMHEGAREHYWRDVGTIDAYWEANIDLTTVTPALNLYDESWPIWTDQPQSPPAKFVFDSEHRRGMAVDSLVAGGCIVSGAVVRRSMLFSNVRVNSFCVVEDAVILPNVDIGRHARLKRCIVDQGAVVPPGLVVGEDAALDASRFHRTEKGITLVTAERLKLLGA

SEQ ID NO: 48564 - protein, 248 aa, Triticum aestivum
  misc_feature (80)..(80): Xaa can be any naturally occurring amino acid
  unsure (1)..(248): unsure at all Xaa locations
MQPGPSQAGIPKAGERAPGRMLKECCARSSGLPFPVPNGQLRVAFRRPSFNHVIWWARPRVIFSTKKHGTRLPVQPNIQXGKAQHASRIHTRWRALSSDPAQAPSVVDAGDSKTWEECKQILTSLNFSTEDAEKMLKKAFGWLHSPYWTDESKKEVPSAEVVNGVLDYVRGLGLSDDDLYKLLKKFPEVLGCDLESEVKLNVGKLDSDWGINGKTLRSVLLRNPKVPGYHVDCRGDCAAQCTRCWVRF

SEQ ID NO: 48565 - protein, 72 aa, Calopogonium caeruleum
WEYQVGPSVGIEGGDHIWASRYILERITEQAGVVLSLDPKPIEGDWNGAGCHTNYSTKSMREDGGYELIKKA

SEQ ID NO: 48566 - protein, 419 aa, Desulfovibrio desulfuricans G20
MDIQETINQMGKKAAAAARAMRAASPSAKTSALLSLAQLIRQENKAITEANARDLAAAADRGLDAPRMDRLRLTDAVIEEMARACEFVAGLPDPIGATEKQWQRPNGLLVGKMRIPLGVISMIYESRPNVTVDSGILCLKAGNAVILRGGSEAFHSNMMLASLIHRALILAGLPQDAVQVVPSTDRGAIKALCELEEYIDVIIPRGGETLIRTVVADARMPVLKHYKGVCHAYVDEGADLEQACEIIFNAKVQRPGVCNALEGLLVHRSEAHTLLPAVAQKLGDAGVSFRACPRALPLLAPHGVPMAETDPGTEFHDLVMVVKVVDSQDEAQDYIAQHGSNHTEIICTRNHQNAMRFVREVDASMVAVNASSRFNDGGQLGLGAEIGISTSKLHSYGPMGVEELTTTKFVVLGNGQIRQ

SEQ ID NO: 48567 - protein, 72 aa, Calopogonium mucunoides
WEYQVGPSVGIEGGDHIWASRYILERITEQAGVVLALDPKPIEGDWNGAGCHTNYSTKSMREDGGFEVIKKA

SEQ ID NO: 48568 - protein, 336 aa, Hypocrea ceramica
MVPKVGINGFGRIGRVVLRNALETGAVEVVALNDPFIEPHYAEYMFKYDSTHGRFKGDIKVDGKDLVIDGKRIKFYQERDPANIPWKDSGAEYIVESTGVFTTTEKASAHFKGGAKKVIISAPSADAPMYVMGVNEDTYAGANVISNASCTTNCLAPLAKTLNDKFTIVEGLMTAIHAYTASQKTVDGPSSKDWRGGRAAAQNLIPSSTGAAKAVGKVIPELAGKVTGMSVRVPTVNVSLVDFTVRFAKDVTYDEVKAAIKEASEGPLKGILAYTEDDIVSTDILTDPHSSTFDAKAGIALNKNFVKVMSWYDNEYGYSRRVVDLIVYVSKKDAGQ

SEQ ID NO: 48569 - protein, 338 aa, Hypocrea ceramica
MAPIKVGINGFGRIGRIVFRNAVEHPDIEVVAVNDPFIETTYAAYMLKYDSSHGLFKGEVEVDGKDLVVNGKKVRFYTERNPADIKWSETGAEYVVESTGVFTTTEKAKAHLVGGAKKVIISAPSADAPMYVMGVNESDYDGSADVISNASCTTNCLAPLAKVINDNYGIVEGLMTTVHSYTATQKTVDGPSAKDWRGGRGAAQNIIPSSTGAAKAVGKVIPALNGKLTGMSIRVPTANVSVVDLTVRIEKGASYEEITETIKKAADGPLKGVLAYTGDDVVSSDMLGNTNSSIFDIKAGISLNKNFVKLVSWYDNEWGYSRRVLDLLAHVAKVDASK

SEQ ID NO: 48570 - protein, 72 aa, Bituminaria bituminosa
WEYQVGPSVGIEAGDHIWASRYILERITEQAGVVLTLDPKPIEGDWNGAGCHTNYSTKSMREDGGFEVIKKA

SEQ ID NO: 48571 - protein, 349 aa, Oryza sativa
MTGGEEQGRRLFGVSLTDRPRWQQFLICSSGFFFGYLVNGICEEYVYNRLQFSFGWYFTFVQGFVYLGLIRLQGFTVKQMVNPWRTYVRLSAVLMGSHGLTKGSLAFLNYPAQIMFKSTKVLPVMIMGAFIPGLRRKYPFHEYISAVMLVIGLILFTLADAQSSPNFSMIGVAMVSGALVMDAFLGNLQEAIFKMNPDTTQMEMLFCSTVVGLPFLVVPMVLTGELMRAWTACSQHMYVYAVLVFEAMATFVGQVSVLSLIALFGAATTAMVTTARKAVTLLLSYLIFTKPLTEQHVTGLLLISMGIVLKLLLENKENVPRRQVRKTVQHWDDKQREIREVEEEKAPLV

SEQ ID NO: 48572 - protein, 212 aa, Triticum aestivum
  misc_feature (91)..(91): Xaa can be any naturally occurring amino acid
  misc_feature (102)..(102): Xaa can be any naturally occurring amino acid
  misc_feature (112)..(112): Xaa can be any naturally occurring amino acid
  misc_feature (142)..(142): Xaa can be any naturally occurring amino acid
  misc_feature (161)..(161): Xaa can be any naturally occurring amino acid
  unsure (1)..(212): unsure at all Xaa locations
GGIPFNKAYGMTAFEYHGTDSRFNRVFNEGMKNHSVIITKKLLDFYTGFEGVSTLVDVGGGVGATLHAITSRHPHISGVNFDLPHVISEAXPPFPGVRHVGXGDMFASVPAXGDAILMKWILHDWSDAHCATLLKNCYDALXPENGKVIVVECVLPVNTEXTPKAQGVFHVDMIMLRAQPGGKERYSASPRLAKGAGLRVKALHLPNPGIDS

SEQ ID NO: 48573 - protein, 338 aa, Dianthus caryophyllus
MAPIKIGINGFGRIGRLVARVILQREDCELVAVNDPFITTEYMTYMFKYDSVHGQWKHHDIKVKDEKTLLFGEKAVTVFGNRNPEEIPWGGTGADYVVESTGVFTDKDKAAAHLKGGAKKVIISAPSKDAPMFVVGVNEHEYKPELDIVSNASCTTNCLAPLAKVINDRFGIVEGLMTTVHSITATQKTVDGPSMKDWRGGRAASFNIIPSSTGAAKAVGKVLPSLNGKLTGMSFRVPTVDVSVVDLTVRIEKPATYEQVKAAIKEESEGKLKGILGYTEDDVVSTDFVGDNRSSIFDAKAGIALNDNFIKLVSWYDNEWGYSTRVVDLIAHIHKTCQ

SEQ ID NO: 48574 - protein, 250 aa, Sporobolus stapfianus
MPMRNIAVGNTQEVTHPGALKAALAEFISTLIFVFAGQGSGVAYSKLSGGITTPSSLISAAVAHAFALFVAVSVSANISGGHVNPAVTFGAFLGGNISLFRSILYWIAQLLGSIVACLLLRFVTGGLPTGTFGLTGISVWEALVLEIVMTFGLVYTVYATAVDPKKGSLGTIAPIAIGFIVGANILVGGAFDGASMNPAVSFGPSLVSWSWNNHWVYWVGPFIGAALAALIYDMLFISSHTHEQLPTTDY

SEQ ID NO: 48575 - protein, 322 aa, Nocardia farcinica IFM 10152
MTSPATTRVRASDSDLDAQSPAADLVRVYLNGIGRTALLTAADEVELAKRIEAGLYAQHLLETSKRLSAAKKKDLAMIVRDGQAARSHLLEANLRLVVSLAKRYTGRGMPLLDLIQEGNLGLIRAMEKFDYTKGFKFSTYATWWIRQAITRGMADQSRTIRLPVHLVEQVNKLARIKRELHQQLGREATDEELAAESGIPVEKIADLLDHSRDPVSLDMPVGNDEEAPLGDFIEDSEATSAESAVIAGLLHHDVRSVLATLDEREQQVIRLRFGLDDGQPRTLDQIGKLFGLSRERVRQIEREVMAKLRKGERADRLRAYAS

SEQ ID NO: 48576 - protein, 128 aa, Methanosarcina acetivorans C2A
MDYSAKVLDHFSNPRNMGSIANCDGVGEVGNAKCGDIMKIFLKVEGDRIVDVKFQTFGCGAAIASSSMATELIKGKILKEAWELSNKAVAEALDGLPPIKMHCSMLAEEAIHEAINDYLQKKGLEPWD

SEQ ID NO: 48577 - protein, 421 aa, Nocardia farcinica IFM 10152
MATAPSATPRDPAPPGRPGTVVWSERFLDYTWTPEHPMKPARLKFTMALAESLGVLDGVETLEPAACDRAELLRIHTADYIEAVEHAVQPPGQPAAPPYGLGSADNPVFPRMHQAASVIVGGTLAAAREIAEGRTRRAVSIGGGMHHAMPSSAAGFCIYNDAAVAISWLLDHGFDRIAYIDVDVHHGDGVQRAFYTDPRVLTISIHQHPATLWPNTGWPDETGLGAGEGTAINLGVLPGTRDAQWLRGFHAVVPGAVAAFRPQIVVSQCGADTHREDPLADLALTVDGQRASYLAMRELADRYAEGRWLAVGGGGYGLVRVVPRAWTHLLATALDRTVDPATPVPADWCDLVRAAAPAVDPPTTMGDGGDVAFRPWDGPGGTVETGDPRVDRAQRAVDTAVLATRRASFGLLGLDPEDPRD

SEQ ID NO: 48578 - protein, 613 aa, Saccharomyces cerevisiae
MKGEPKTYSMSDLSYYGEKAQQQNEKQQKQYVVRRNSTQSTSKQNVSVVLEDNASESNELPKGFILYASLIALALSLFLAALDIMIVSTIIEEVAKQFGSYSEIGWLFTGYSLPNALLALIWGRIATPIGFKETMLFAIVIFEIGSLISALANSMSMLIGGRVIAGVGGCGIQSLSFVIGSTLVEESQRGILIAVLSCSFAIASVVGPFLGGVFTSSVTWRWCFYVNLPIGGLAFFLFLFFYNPGLSTFQETMDNIRKFPSQFIEIVRNVAYHLLKIKGFSKLNGWRKPFMELIFMYDIIEFVFCSAGFTCILLAFTFGGNRYAWNSASIIILFIIGIVLVVLAGIYDFLVFPKFNIVKATPHYQPLMSWTNIKKPGIFTVNIALFLTCAGYISQFTYIVQYFQLIYNDSAWRAAVHLVACIISTVVTAILCGAITDKTRQIKPIIVISSIFGVVGAGILTLLNNNANNSAHIGLLILPGVAFGGLAQSSMLASQIQLDKKSPTFRSDFVSITTFNTFCKNLGQALGGVISNTVFSAAAIKKLTKANIQLPDGTTVDNLVIYRQTNFDGSHSKLGNIISESLTDVFYMALGFYALSLIFAVFASNKKVTASLR

SEQ ID NO: 48579 - protein, 369 aa, Zea mays
MASEWEMAMGVELGMGMGTYHYHHNASSITTAPMSSHHSGGASYSTPHHHHYYGMPPTGGAGDAMRVDDLLDLSTGAGAGAHEFFPTAPAPATTDKGHHHPGAMGEPSPTAANSSDHQTSLLSFADEFYIPSEEAAELEWLSKFVDDSYSDMPNYSSAAAHAAMAAANAAAAAAGNGGGGTSAGQDSCVTAAPAGRGARSKRSSRAPAAAAWHSLVSRPPSQPSPSSSSCSSSDFPSSSNRPARGRKSPGPGGDAVAGSDGGGGGVRRCTHCASEKTPQWRTGPLGPKTLCNACGVRFKSGRLVPEYRPAASPTFVLTQHSNSHRKVMELRRQKELILIRGSHRDAAAAAGAGSAGPRPELMFRDYGVC

SEQ ID NO: 48580 - protein, 357 aa, SYNECHOCOCCUS SP. WH 8102
MTLWVVKLGTSLLRGDTAATIAGFAAGIAAAFARGDRVVLVSSGAVGLGCQRLQLPQRPETVVALQAAAATGQGQLMALYERALANHGIAVAQILVTRSDLADRRRYQNASGTLQQLLQWGVLPVVNENDAISPAELRFGDNDTLSALVAAAVGADQLILLTDVDRLYSADPRLVVDARPISDVHHPRELDALEAVAGDGGRWGRGGMTTKLAAARIATASGITVHLADGRDPRRLDALLQGERGGTVFHPHPEPLGNRRSWLAHALQPQGELTLDAGACDALHQRGSSLLMVGITAVKGVFGANQPVRLQGPDGRELGRGLCQLSSAAVQRALDAAPAAGPSPVVVHRDALVLHSR

SEQ ID NO: 48581 - protein, 1403 aa, Nostoc punctiforme PCC 73102
MVKQRRYHWLKAVIFFRKRKLLALLLGIFFSISVVLLWQRLSIQTPGLLKPVVLITGLLVVTLTLSICFALAIKVNNQQIALINQDLTHRILEQKQVEITLRASENRLRQLLETVKVIPWELDLKTWRFIYVGPQAVDLLNYAIADWYEENFWINHLHPHDKEKSVRFRQEATARCENHELEYRMLAADGRVVWLRDVVSVVEEAGTLTTLRGFMFDITDLKQVEETLRLRERALAATSNGIIIADARLPYNPIIYVNCAFEKITGYTAADVIGQNCRFLQRTDSQQPALNELRSSLQAGTSCKVILRNYSKDGVLFWNELCISPIHDENGKLSHFIGIQTDISQRKQAEASLRRQALTFENMHDGVIITDLGGNIIDWNPAAQSMFGYTKAEILAKHISILHRPEVAATLSAKILEKINQQARWSGEIHFLCKDGSQAICETTVVSLQDEQGETVATVGINHDITENKRAKEALQRQLHRTLLLEQITQEIRQSLDTSKIFETAATQIGKAFKADRCLIHSYISDPTPRIPLVAEYNTLPGYCSMLKLEVPMTNNPHAEQMMAQESAIASPDVYADPLLQAAEPICRKIELKSMLSIRTSYQGEPNGAIGLHQCSYFRQWTPDEIELLEAVAAQLGIALAQAQLLEQETHRREELTLKNFALEQAKRQAEAANRAKSEFLAMMSHEIRTPMNAVIGMTDLLLDTDLTPQQQDFVETVRSSGDALLTIINDILDFSKIESGKLELEEQPFDLRACVEQAISLLAPKAAQKNIELVYLIQPQVPTQIVGDMTRLRQVLMNLLNNAIKFTERGEVVLSVELGAGDSVKQGENSSPLHPSLVRLRPSLREAAPTTTLRTSSRQARPSASSESPIQIQFAIKDTGIGITPEKIERLFHPFTQADVSMTRRYGGTGLGLVISKRLSKMMGGTLWVESQGIVGGNPSPRWKSRKSLSSPYSSQGSTFYFTITAQVPAVPEAEFSNSPMQLQGKRLLIVDDNLTNCQIISLQAESWEMETYAAKSAKEALAQLAQGIQFDIAILDMEMPAMDGITLARQIRRQSGCQNLPLVILTSLGREETFSDFGDVEFAASLSKPIKQSQLYDVITRVLGNQPSEASITDFPLVDRHLTHPLPLRILLAEDTIVNQKVALLMLQKIGYSADVVTNGVEVLKALQKQPYDLVLMDVHMPEMDGLETARRICQEWKVGFRPHIIAITANAMRGDREVCLAAGMDDYISKPIQLQKLAQALSKCPRQRSLEVTPIVKQDRVRYLELQPLQNIFQEGQNQTLKSDKIDAKILQSLRDIVRGDRVVFAELIKCYLTETLRLVQDISTAIATRDAQTIWKAAHQLKSSSGSIGAIALAQLCKVLEAQGRSSELENTIELLPQLYQEYEQVKTALEKELAKETP

SEQ ID NO: 48582 - protein, 454 aa, Exiguobacterium sp. 255-15
MESNLKRELTARQVQMIALGGTIGVGLFLGSSSTIAWTGPSVILAYMFAGAFIFLIMRALGEMVYTHPHTGSYAKFANDYIHPAAGFMTASSNIFNWVIVGMSEVIAVGAYMRFWWPDLPTWIPGVVVIVILTLANLASVKMFGELEFWFASVKVITIILMIIAGLGLILFGFGNDGTPIGFSNLWSHGGFFTNGFSGFFFALSIVFASYIGVELIGVTAGETKDPETNITRAINGVIWRILIFYVGAIFIIVTVYPWDQLADIGSPFVATFAKVGITAAAAIINVVVITAAMSGCNSGIFSSSRMIYTLAEKGQMPSLFLKVNKNGIPLYTVLAVSAGIFVGVILDIVLPLFLGKDTNIFVYVYSASVLPGMVPWFAILISHIQYRKIEADRIADHPFKMPGAPFTNYITIVMLLIVLVGMLFNDETRVSILIGIVFLILSGIYYIVRTPKSF

SEQ ID NO: 48583 - protein, 340 aa, ASPERGILLUS NIDULANS FGSC A4
MSFLSLLALLAWGCGEWTCELPRYLAHFSDDGKRTQYLNAQNTFAQLFDMGVIPIVNENDTLAVSEIKFGDNDTLSAITAAMVKADYLFLMTDVDCLYTANPRTNPDAQPIEVVSDISSLEADVSSAGSALGTGGMSTKITAAKLGTSAGVTTIITKSSKPGNIHEIVRYLQHSRQAALADAADVEITASKPQTPIPPLHTRFLPSETPIQSRTFWLLHGLKPHGTLYIDQGAYTALQKKASLLPAGVVDVDGHFGQQEAVRIVVVERISPESLNGDFLHPGQEPKEVGRALVNYGSLEIARIKGHRSTHIQSLLGYADSEYVALRENISFFDNDEQVRR

SEQ ID NO: 48584 - protein, 409 aa, Zea mays
  misc_feature (124)..(124): Xaa can be any naturally occurring amino acid
  unsure (1)..(409): unsure at all Xaa locations
MDSASSLVDDTSGSGGGACTDKLRALAAAAASASGPPPERMGSGASAVVDAAEPGAEADSGSAPASVAAVAAGVGGKLPSSRYKGVVPQPNGRWGAQIYERHLRVWLGTFAGEADAARAYDVAXAQRFRGRDAATNFRPLADAGPDAAAELRFLASRSKAEVVDMLRKHTYFDELAQNKRAFAAASASAATASSLANNPSSYASLSPATATAAAREHLFDKTVTPSDVGKLNRLVIPKQHAEKHFPLHLAAAAGGGESTGVLLNLEDAAGKVWRFRYSYWNSSQSYVLTKGWSRFVKEKGLQAGDVVGFYRSAAGADSKLFIDCKLRPNSVDTAASTTSPVGSSPPPAPVAKAVRLFGVDLLTAPADAMARCKRARDLASPPQAAIKKQLVELALASVDQCYGAGRSFS

SEQ ID NO: 48585 - protein, 434 aa, Zea mays
MASLWLARASSQLARRAAARRPPPRPARHGSGQPTSSWFLGSVPQAALGSPALDTSRRGFCSVRRFAGESSAAAAAAAVVDEEPESGFAAGDQQAVDFPGGKVSFVAEMNFLPESTRERINCYRVLDDDGRTISGSRFQEVSRELALKMYSEMVTLQIMDTIFYEAQRQGRISFYLTSNGEEAINIASAAALSMDDIVLPQEFANQCFGNKLDYGKGRQMPIHYGSNRLNYFTVSSPIATQLPHAVGAAYSLKMDKKDACAITYFGDGGTSDGVVIRGQAYGIRGIRVDGNDALAVYSAIHAAREMAVTEGRPILVEALTYRVGHHSTSDDSTKYRPVDEIEHWRTARDPISRYRKWVQGNDWWSDAEESELRSRVRKELLQAIQVAERMPKPPVTELFTDVYDKIPSNLHEQEQLLRDTIMRHPADYPTDVPV

SEQ ID NO: 48586 - protein, 245 aa, Oryza sativa (japonica cultivar-group)
MDFKVASFLLLLLIVTCGAAQGQGNDFVVLDLKTTEIGEDASPMYKEQIASTKIPVTLLRSKHSSLCSACENITSEAVNFLSEKQIQDKIRTILHDTCSQTFSFEQKCLETMDSYATLVFAKIAEIKPAAFCKQYGLCRDMALLSAVKSESTCLFCHHIIDEITSKLKDPDAEFEIIQLLLKECNKIEGHQQQCKRMVLQYVPLVLVNGEKFLEKNDVCAMIQACDAGKRKALNLFSARKLVRDA

SEQ ID NO: 48587 - protein, 322 aa, Triticum aestivum
MDDSALFMEWAMDTLEQEHPDPVVVVNGDSGDAAFPSLQALREQRLVLEELITGANPANSGSSGETTDGSGGSGNFSSPAAMEHAVWPPSLNSARCAPRLSRNGGGTNLPVTSWNFCAASALPASDGTLDSGSAGPVVSETDHIMAERKRREKINQRFIELSTVIPGLKKMDKATILSDTTRHVKELQEKIKALEAAAGRSSRSNETVVLVKKPCYAAVADENGSPSSASSGAPAAEKPLPEIEVRFSETGIMVRILCHDVKGVVVRVLSEVEEGLHLTVTHANVMPFTACTVIITITAKASFPSFIPQFGPILIFVIHSKK

SEQ ID NO: 48588 - protein, 417 aa, Frankia sp. EAN1pec
MTADMTHRTAAAGMPITAAWLAEHEDELIALRRDLHAHPELGRQEHRTARVLEERLLAAGLSPQRLPDVPGLWCDIGAGVDSGGPVVMMRADMDALPLADVKDVPYRSTVPGVAHACGHDVHTTVALGAGLALAEHARAHPLPGTVRLLFQPAEETMPGGSLDVIDAGVLKPVTSAITVHCDPALDVGTIGLRSGPITSAADAVEITLAGPGGHTSRPQNTVDLVYALARLAVDLPAALSRRVDPRSALSLVWGQIQSGTVTNAIPRTGKLRGTIRTLSRETWEAAPELVERLAEQLVAPYGAQIAVDYVRGVPPVVNHADVVDAFGAVVDAVFGHGAATSVAQSLGGEDFGWYLTHVPGGLARLGTRTPGGPTYDLHQGSFDVDERAVGVGVRFLSAAACELLDRSADPVGPDDLA

SEQ ID NO: 48589 - protein, 174 aa, Oryza sativa
MLPSRQRSIFHLGEEGGGAADAEHLGADHGDGHGDHGIISIHQQRLRVVGLQIVLAQTRHHHRQQHGHVVLKQMQMVSPPPAARHRRRRRPCGDFLSACSLCRLELGPDKDVYMYRGEQGFCSEECRWQQIMTDEARERDAMAKKERLGLHHRTPRPPPAAIRGGSPRRLLAVA

SEQ ID NO: 48590 - protein, 540 aa, Thermoplasma volcanium GSS1
MQYIVVTGGVISGLGKGTITSSIGHILKDSGFKVSSVKIDPYINYDAGTMNPYQHGEVFVLDDGSEVDLDLGNYERFMDINLSWKNNITTGKVYLEVIEKERHGDYLGKTVQIIPHITDEIKRRIRDVATSSKADFVLIEVGGTVGDIESMPFLEAVRQLKREENNVIFAHVTLVPEIGPTEEQKTKPTQHSVKALREIGIQPDIIFARSKNRLLEETKKRISLFTDVPEGGIISVYDVENVYLLPEVMVNEGFISYLSKLSGKEIKYRDSWKAYTENIKHPKDRVKIAIVGKYVDLHDAYISHKEAFSHVTGNTGIAVDIKWLDSEKVKDDQSMLSDVDAILIPGGFGYRGVEGKIAATRFALENHIPFLGICLGFQVAVIEIARDIIGLQNANSTEFDPATKYPVIDILPEQKGIKDLGGTMRLGSKKVLIKDGTLAKRIYGTDTIYERHRHRYEVNPNYISIIEKAGFVFSGTDEDGIRMEILEKKGDESFIATQYHSEFKSRPLNPSRVHLHLVQQALIYKKNKDIGEAVKLRSSV

SEQ ID NO: 48591 - protein, 412 aa, Triticum aestivum
  misc_feature (48)..(48): Xaa can be any naturally occurring amino acid
  misc_feature (118)..(118): Xaa can be any naturally occurring amino acid
  misc_feature (259)..(259): Xaa can be any naturally occurring amino acid
  misc_feature (303)..(303): Xaa can be any naturally occurring amino acid
  misc_feature (314)..(314): Xaa can be any naturally occurring amino acid
  misc_feature (335)..(335): Xaa can be any naturally occurring amino acid
  misc_feature (349)..(349): Xaa can be any naturally occurring amino acid
  misc_feature (365)..(365): Xaa can be any naturally occurring amino acid
  misc_feature (372)..(372): Xaa can be any naturally occurring amino acid
  misc_feature (377)..(377): Xaa can be any naturally occurring amino acid
  misc_feature (382)..(382): Xaa can be any naturally occurring amino acid
  misc_feature (387)..(387): Xaa can be any naturally occurring amino acid
  misc_feature (394)..(394): Xaa can be any naturally occurring amino acid
  unsure (1)..(412): unsure at all Xaa locations
MQIFVKTLTGKTITLEVESSDTIDNVKGRRIQDKEGIPPDQQRLIFAXGKQLEDGRTLADYNIQKESTLHLVLRLRGGMQIFVKTLTGKTITLEVESSDTIDNVKAKIQDKEGIPPEXKQRLIFAGKQLEDGRTLADYNIQKESTLHLVLRLRGGMQIFVKTLTGKTITLEVESSDTIDNVKAKIQDKEGIPPDQQRLIFAGKQLEDGRTLADYNIQKESTLHLVLRLRGGMQIFVKTLTGKTITLEVESSDTIDNVKXAKIQDKEGIPPDQQRLIFAGKQLEDGRTLADYNIQKESTLHLVXRLRGGMQIFVXTLTGKTITLEVESSDTIDNVXKAKIQDKEGIPPDXQRLIFCRKQLEDGRPXVDYNIQXESTLXHLGLXLKGGXAKSLGKXLTRKTLTAWPHPGNPGGG

SEQ ID NO: 48592 - protein, 72 aa, Amphicarpaea edgeworthii
WEYQVGPSVGIEAGDHIWASRYILERITEQAGVVLTLDPKPIEGDWNGAGCHTNYSTKTMREDGGFEVIKKA

SEQ ID NO: 48593 - protein, 170 aa, Zea mays
  misc_feature (48)..(48): Xaa can be any naturally occurring amino acid
  unsure (1)..(170): unsure at all Xaa locations
TRPASRKWPCFYGIFPYNNIGGSQLIWIAPSGGRDRPNPSTGEWYPGXAPFDSSTVDNMRRLLEHAGVPGHIYPLLLLCYEVMPPPQQVEKEIGEQRVISFHGVGLSATEETKYGDITCHTKNADEGRELFTNTLYNSVVNQYNVLKSAIFRDRGAAVSNNAISLSQPWR

SEQ ID NO: 48594 - protein, 221 aa, Saccharomyces cerevisiae
MARRPARCYRYQKNKPYPKSRYNRAVPDSKIRIYDLGKKKATVDEFPLCVHLVSNELEQLSSEALEAARICANKYMTTVSGRDAFHLRVRVHPFHVLRINKMLSCAGADRLQQGMRGAWGKPHGLAARVDIGQIIFSVRTKDSNKDVVVEGLRRARYKFPGQQKIILSKKWGFTNLDRPEYLKKREAGEVKDDGAFVKFLSKKGSLENNIREFPEYFAAQA

SEQ ID NO: 48595 - protein, 793 aa, Arabidopsis thaliana
MEAAVPRLVNCGPEPIRFSVSSRRSFVSGIPHRNKRSRQILAVATDPKPTQTSPPKSTTVNGSSSPSSASKVVNNNVSTRINDVSKEIKRVRAQMEEDEQLSVLMRGLRGQNLKDSVFADDNIQLRLVETGESSEFLPLVYDPETISAYWGKRPRAVASRVIQLLSVAGGFLSRIAGDVINKKVKENEVARAIELREIVTSLGPAYIKLGQALSIRPDILSPAAMTELQKLCDKVPSYPDDVAMALIEEELGKPWYDVYSELSPSPIAAASLGQVYKGRLKENGDLVAVKVQRPFVLETVTVDLFVIRNLGLFLRKFPQVSVDVVGLVDEWAARFFEELDYVNEGENGTYFAEMMKKDLPQVVVPKTYQKYTSRKVLTTSWIDGEKLSQSIESDVGELVNVGVICYLKQLLDTGFFHADPHPGNMIRTPDGKLAILDFGLVTKLTDDQKYGMIEAIAHLIHRDYDAIVKDFVKLGFIPDGVNLAPILPVLAKVFDQALEGGGAKNINFQELAADLAQITFDYPFRIPPYFALIIRAIGVLEGIALVGNPEFAIVDEAYPYIAQRLLTDESPRLREALRYTIYGKTGVFDAERFIDVMQAFETFITAAKSGGGEDMNGGMAEMALMQSKTSSLVPMFPASASQPDQPVQTRVALSFLLSEKGNFFREFLLDEIVKGIDAITREQLVQAMAVFGFRNATPIFGMLPPTLGPFKPAALLPSVTEEDKVILNNVQKVIEFLTARSSMSNNPDQVVDVSQVVRELLPVLPGISATVLPEILSRLGSRVMARIVRDAFL

SEQ ID NO: 48596 - protein, 468 aa, Candida albicans SC5314
MKFTHLFFIGLLTKVYTETVTVLSTRSYRLATTESTPTDGTVYLTLTRQQSSSTSLNASTITTPPSNSSASVQTTAVTDCHFHNSVQYCVDGYGNEGSILPVPTNTNNLPTSYDGCHSHDGDTFCMDGDKEVQFVKLEDEDDEESSSSSGKKCHFHAGVEHCVDDNNHDAVTCERVKRDYDIPLRIGLLFVILVTSGIGSFGPIVLKQFVNLSQENYIIVIIKQFGTGIIISTAFVHLMTHAQLMWSNSCLKIKYEGTGASITMAGIFIAFIIEYIALRIVNARDTEKVDKKEIEETSSNEQSLHGISVNDKISVMILEAGIIFHSILIGITLVVTDDVYFITLFIVIVFHQFFEGLALSSRIISITNASLSTKLVMALMFALITPIGMAIGIGVLNKFNGNDPSTLIALGTLDSFSAGVLLWTGLIEMWSHDWLHGHLRNSSFVKTTVALVSLILGMLLMSLLGNWA

SEQ ID NO: 48597 - protein, 432 aa, Oryza sativa
MLGDQRRKFLLESASSSSEEVVSRSRNLAVESSAVAVTAAGVRKGEEVEEEELLNRRSKKNKVASDSGNSGTGVWDSEMQDADQNGEANTSELIGAIGRELAITCLLHTPRSYYGMIACLNRSFCSLMRSGQLYRLRREARIVEHMVDPPGCRLEWDGFDPCRQRWFNIPSMPPIECFTLADKESLAVGTNILVFGKKVEAHVVLRYSLLSNSWTTGDMMNSPRCLFGSASFGEKAIVAGGIGDNGTLSSAELYDSEAKTWTTLPSMNRARKMCSGFFMDGKFYVIGGKADNHNEILNCGEEFDLEKGTWRLIPDMASGLNGGSGAPPLVAVVNNELYAADYAEKEVRRYDKVNNAWITLGSLPEKYTSVNGWGLAFRGCGDKLIVIGGMSAPGGGVIEICSWIPNNGQPDWKIIGSRRSGSFVYNCAVMGC

SEQ ID NO: 48598 - protein, 359 aa, Rubrobacter xylanophilus DSM 9941
MDSQFPKSFRAAAVQASPVHLKPDATVDKLESLVAEAARGGAQLVVFSESFIPAFPVWNLVLPPVDQHDLFRRLFLNSVLVPGPITRRLAEIAKRHDVYLSVGVTERTNISMGCLYNTNLLFAPTGELLNHRRKLVPTWAEKLTHAWGDASDLRPVQTELGNIGVLICGENTNPLARYTLLAQGEQIHIATYPPAWPFRRTGGRQTYNLRKAIEIRSAAHAFEGKVFNIVSSGLLDEGIIKDIIAIAPDLEPTLREAPAPASMILGPTGEPLVEPLVGDEGIIYADIDVTESIEVKQAHDIVGYYQRFDVFQLTVDQRPQLPINLIRGPETSYDSRMGAETVETAVEEDRASSESTTIR

SEQ ID NO: 48599 - protein, 156 aa, Zea mays
RPGFLVLIPRVPRDPRQAHFLVARAGVLAGVRLPVAPPREPAHLLLPLRRRGRAVRLPLDDTKTWPEDLLPLRPVGRLVLDRNVDNFFNENEQLAFGPGLVVPGIYYSDDKMLQCRVFAYADTQRYRLGPNYLMLPVNAPRCAHHNNHYDGAMNFM

SEQ ID NO: 48600 - protein, 340 aa, Pinus sylvestris
MGSTGKIKIGINGFGRIGRLVARVALTRDDIELVGVNDPFISTDYMSYMFKYDSVHGKWKHHEVNVKDSKTLLFGEKSVAVFGCRNPEEIPWGEVGAEYVVESTGVFTDKEKASAHLKAGAKKVVISAPSKDAPMFVVGVNEHQYKSDVNIVSNASCTTNCLAPLAKVINDKFGIVEGLMTTVHSITATQKTVDGPSNKDWRGGRGAGFNIIPSSTGAAKAVGKVLPALNGKLTGMAFRVPTPDVSVVDLTVRLEKSATYDEIKAAIKAESEGNLKGILGYTEDAVVSTDFIGDSRSSIFDAQAGIALSDNFVKLVSWYDNEWGYSSRVVDLIVHMAATQ

SEQ ID NO: 48601 - protein, 218 aa, Escherichia coli
MKEIIDGFLKFQREAFPKREALFKQLATQQSPRTLFISCSDSRLVPELVTQREPGDLFVIRNAGNIVPSYGPEPGGVSASVEYAVAALRVSDIVICGHSNCGAMTAIASCQCMDHMPAVSHWLRYADSARVVNEARPHSDLPSKAAAMVRENVIAQLANLQTHPSVRLALEEGGSLHGWVYDIESGSIAAFDGATRQFVPLAANPRVCAIRLRQPTAA

SEQ ID NO: 48602 - protein, 326 aa, Nocardia farcinica IFM 10152
MKLLVTGGAGYVGGVCALVLLEQGHEVVVVDDLTTGNADGVPAGARFVEGDVAEVAPALLRAETFDGVLHFAAQSLVGESVERPEKYWHGNVVKTLELLEAMRHTGTGRLVFSSTAAVYGEPEQVPITEDAPTRPTNPYGATKLAIDHAITSYAIAHGLAATSLRYFNVAGAYGGLGENRVVETHLIPLVLQVALGHRESISVYGTDWPTPDGTAIRDYIHIRDLADAHLLALTSAEPGSHRIYNLGSGTGFSVREVISACERVTGLPIAAQDAPRRAGDPAVLIASSERAVAELGWRPQHTALDEIVADAWEFLRSLGSRAHSAR

SEQ ID NO: 48603 - protein, 55 aa, Glycine max
AELMKLFPEIGKSLYDPHVLDEDTILHWFRKRTNSKGRRTFVNALEPYGKWLEDA

SEQ ID NO: 48604 - protein, 361 aa, Triticum aestivum
  misc_feature (161)..(161): Xaa can be any naturally occurring amino acid
  misc_feature (257)..(257): Xaa can be any naturally occurring amino acid
  unsure (1)..(361): unsure at all Xaa locations
TPQSYLPTLPFRVSIPSRRRRRRRKEHGEMSSGMGKVVCVTGASGYIASWLVKLLLHRGYTVRATVRDTADPKKTLHLQALDGAKDRLHLFKASLLEEGSFDAAIAGSDCVFHTASPFYHNVKDPKAELLDPAVNGTLNVLRSCKKASIKRVIITSSMAAXVAYNGKPRTPDVVVDETWFSSAEVCEKNEQWYVLSKTLAEEAAWKFANDNGFEIVTINPAMVIGPLLQPTLNTSAEAILKFINGSSSTYPNFSFGXGINVKDVALAHILAYEVPSANGRYCMVERVAHHSEIVKIIHEMYPKFPVPDKCADDAPFVPIYQVSKDKIRSLGMELIPLETSLKETIESLREKGFVTSESSHL

SEQ ID NO: 48605 - protein, 475 aa, Zea mays
MAGGFRVLHLVRPFLAFLPEVQSADRKIPFREKVIYTVISLFIFLVCSQLPLYGIHSTTGADPFYWMRVILASNRGTVMELGITPIVTSGMVMQLLVGSKIIEVDNSVREDRALLNGAQKLLGILIAIGEAVAYVLSGMYGSVSQLGTGNAILIILQLFFAGIIVICLDELLQKGYGLGSGISLFIATNICENIIWKAFSPTTINSGRGAEFEGAVIALFHLLITRTDKVRALREAFYRQNLPNVTNLLATVLVFLIVIYFQGFRVVLPVRSKNARGQQGSYPIKLFYTSNMPIILHSALITNLYFISQLLYRKYSGNFLVNLLGKWKESEYSGHSIPVGGLAYYVTAPSSLADVLANPFHALFYVVFMLSACALFSKTWIEVSGSSAKDVAKQLKEQQMVMPGHRESNLQKELNRYIPTAAAFGGVCIGALTVLADFMGAIGSGTGILLAVTIIYQYFETFEKERATELGFFGF

SEQ ID NO: 48606 - protein, 718 aa, Zea mays
  misc_feature (147)..(147): Xaa can be any naturally occurring amino acid
  misc_feature (340)..(351): Xaa can be any naturally occurring amino acid
  unsure (1)..(718): unsure at all Xaa locations
MATADRTRTFMKDVKRVIIKVGTAVVTRGDDGRLAVGRLGCLCEQVKELNVLGYEVILVTSGAVGVGKQRLKYRKLVNSSFADLQKPQMELDGKACAAVGQSGLMALYDMLFTQLDVSSSQLLVTDSDFENPNFRERLCETVESLLXDLKVVPIFNENDAISTRKAPYEDSSGIFWDNDSLAGLSARGLKADLLGLLSDVDGLYSGPPSEPGSKIIHTYIKDKHYSGITFGDKSRVGRGGMTAKVKAAFVASNSGTPVVITSGFASQSIVRVLQGEKIGTLFHKDASLWEPSKDVSAREMAVAARECSRRLQNLSSDERKKILLDIADALEQNEDLIRTXXXXXXXXXXXXGYQKSLVDRLTLKPEKIASLAKSIRTLANMEDPINQILKRTEVAEDLVLEKTSCPLGVLLIVFESRPDALVQIASLAVRSGNGLLLKGGKEAMRSNTVLHKVITGAIPDNVGQKLIGLVTSRDEIADLLKLDDVIDLVIPRGSNKLVSQIKASTKIPVLGHADGICHVYIDKSADMNMAKRIVMDAKTDYPAACNAMETLLVHKDLIKAPGLDDILLSLKTEGVAIYGGPVAHEVLCIPKADSFHHEYSSMACTIEFVDDVQSAINHIHRYGSAHTDCIITTDDKVAETFLRQVDSAAVFHNASTRFSDGARFGLGAEVGISTGRIHARGPVGVEGLLTTRWIMRGSGQVVNGDKNVAYTHKNLPLQ

SEQ ID NO: 48607 - protein, 133 aa, Zea mays
KRSEAMSMSKTGQAAEKDEQQQSRGIALMQGICAVVYRKADNTPCPIKQGLYLGSVGAAFNKDALKSLNITHILIVAKSLDPVFPAEFNYKKIEDEAISSGGNVLVHCFAGRSRSGAGMENATCAALIIILVL

SEQ ID NO: 48608 - protein, 392 aa, Caulobacter crescentus CB15
MGPGPINVHPRVLRAMSVQLLGQFDPEFTGYMNEVMALYRGVFQTQNRWTFTIDGTSRAGIEAALVSTLQPGDDVVVVNAGRFGLLLAEIAERCDAKVTFVEASWGAVVDPQAVEDAVKRVKPRLVACVHGDTSTTMAQPLGEIGAICRAHGALMYVDATATLSGMDVPVDAWGADIVTAGLQKCLGGPSGSAPITISDQAAEHIFSRRHVEKGLAGTGGAAGAGRRIASNYFDLAMIMDYWSEKRLNHHTECAPMLFAARECARLVLEEGLPARFDRHAQAGAAMTAGLEAMGLSIYGDKAHKMTNVTGIWVPKGVDYDRVKARMRTDFEIEIGSAFGPLTGKIWRIGTMGVNARKHAVLQTLAAFEAVLRWEGFSAPAGAGVDAAAKVYG

SEQ ID NO: 48609 - protein, 369 aa, Oryza sativa
  misc_feature (265)..(265): Xaa can be any naturally occurring amino acid
  misc_feature (327)..(327): Xaa can be any naturally occurring amino acid
  misc_feature (351)..(351): Xaa can be any naturally occurring amino acid
  unsure (1)..(369): unsure at all Xaa locations
MGSTAADMAAAADEEACMYALQLASSSILPMTLKNAIELGLLETLQSAAVAGGGGKAALLTPAEVADKLPSKANPAAADMVDRMLRLLASYNVVRCEMEEGADGKLSRRYAAAPVCKWLTPNEDGVSMAALALMNQDKVLMESWYYLKDAVLDGGIPFNKAYGMTAFEYHGTDARFNRVFNEGMKNHSVIITKKLLDLYTGFDAASTVVDVGGGVGATVAAVVSRHPHIRGINYDLPHVISEAPPFPGVEHVGGDMFASVPRGRXTAILMKWILHDWSDEHCARLLKNCYDALPEHGKVVVVECVLPESSDATAREQGVFHVDMIMXAHNPGGKERYEREFRELARAAGFXAFKATYIYANAWAIEFTK

SEQ ID NO: 48610 - protein, 360 aa, SYNECHOCOCCUS SP. WH 8102
MSLQPIGVAVAGLGFGEKVHLPALQANPDLCPVALWHPRQERLDAATAAHGLKGFSDWDALLADPAVEAVIIATPPEPRFALARQALEAGKHLLLEKPIALHADQARELQRLAIARGVSVAVDYEYRAVPLFMQAERLLRAGVIGTPWLVKLDWLMSSRADPSRGWNWYSQASKGGGVIGALGTHAFDMLAWLVGPVASVTALNGVSICKRPDPQGGMAPVDAEDVALIQTRLQWQGSAETSVPAQINLASVARNGRGCWLEIYGSDGSLVLGSANQKDYVHGFELCCSRAGEQPQLIEPDPDLAFATTWSDGRIAPVARLQSWWAESIRSGMPMIPGLAEGVASRLACDQAAQTASGLA

SEQ ID NO: 48611 - protein, 492 aa, Nicotiana glutinosa
MDPYKYRPSSAFNSPFCTTNSGAPEKNNNSYLTVGARGLVLLEDYHLVEKLANFDRERVPERVVHARGASAKGFFEVTHDITHLTCADFLRAPGVQTPVIVRFSTVIHERGSPETLRDPRGFAVKFYTREGNFDLVGNNFPVFFIRDGMKFPDMVHALKPNPKSHIQENWRVLDFFSHVPESLHMFTFLFDDIGIPQDYRHMDGSGVHTFTLINKAGKSTYAKFHWKPTCGVQSLLEDEAARVGGANHSHATQDLYDSIAAGNYPEWKLFIQTMDPSHEDRFDFDPLDVTKTWPEDILPLQPVGRLVLNKNIDNFFNENEQLAFCPSIVVPGVYYSDDKMLQTRIFSYSDTQRYRLGPNYLQLPANAPKCAHHNNHYDGSMNFMHRDEEIDYFPSRYDPVRHAEKYPIPSTMCTGKREKCVILKENNFKQPGERYRSFTPDRQERFIRRWVEALSDPRITHEIRSIWISYWSQADKSLGQKLASRLNVRPSI

SEQ ID NO: 48612 - protein, 450 aa, Silicibacter pomeroyi DSS-3
MIPPKPPARPDKVSLWRYLRLFRQDLLSAQPARLYRAWMAEFRTPFFRSYLVNQPDLVDTVLKGRPDDFPKSNRISEGLRPLLGNSVFLTNGETWKRQRRIIDPAFEGGRLRDTFPAMWAASEAAVNRLAAQAGQETEIEEVTSHAAADVIFRTLFSIPIEHEVAAQVFTRFRAYQRAQPLLNLAAFVPVPQWVPRFHSRETRRNAAVIRGLIRQLTDTRMGEIRAGTAPDDLATKIMTTTDPQTGDRFDTDEMVDQVAIFFLAGHETSASALAWTLYLMALYPDWQEKLAEEARTLDSGTDFSVMSKLRLSRDVFREALRLYPPVPMMVRETTCPERFRDRDVPKGAQIVLSPWHLHRHERLWERPDDFDPARWQTENGKTCQRNAYMPFSAGSRVCTGAGFAMVEGPLILSMLLLRFRFERIAGREPVPVAHLTVRAADGIWLRVVER

SEQ ID NO: 48613 - protein, 390 aa, Corynebacterium efficiens YS-314
MGSDCLHRRTPPMTDMFDLIDDWGPEKIVVVHDHRTRMRGVLVIDNTARGMGKGGTRMQPTVSVGEIARLARVMTWKWAGVDLFYGGAKAGIQADPASPDKEAVLRSFVRKLSNEVPEEYIFGLDMGLTEHDAAIITDELGRGTCMGTPYELGGVPYDQLGVTGYGIAEVADEVAQSQNLAGASVAIQGFGAVGHAVAERLHTLGYRVVAVSTARGAIADPNGLDIPELVRLREEVGDDLVSHYPVLRIDPGEELFMDAEILIPAALQDVINARGAERVTARIVVEGANLPTSPQAQQILHQRGITVVPDFIANAGGVVAAAFAMDNRFSPFRTDPEQIYTSVSSKLRLNATTVLGRAAERSQTSHDAARQLSQERVRAAMEVRGMLPSG

SEQ ID NO: 48614 - protein, 556 aa, Legionella pneumophila str. Paris
MATKVTKRGMDLLRDPILNKGTAFSLQERDEFALHGLIPTTVETLEQQVIRCLDAYSAKEEPLEKHIYLRALQDRNEVLFYRFIIDNLVDILPIIYTPVVGQACEMFSHIYRQPRGVFLSYPERDKLDSIIQNIASTRSIKVIVVTDGERILGLGDQGAGGLGIPIGKLSLYTSCGGIHPSNTLPIILDVGTNNKERLDDPEYIGWRHARISGKDYDDFVDQFVQSIKRHMPHVLLQFEDFAQQHAYPLLERYKDQLCTFNDDIQGTASVAVAAILAATRVTNTPLKEHRVALLGAGSAGCGISEQLVHAMMNQGLSEEEARSRFYLVDRYGLLHDEMTDLLPFQKGFVRSSTSLQNWKLEKQGEITLTDVINNAQPTILLGVSGQPNQFKEAMIKTMLSYCERPIIFPLSNPTSRAEAIPQDLLNWTAGKALIATGSPFEPVAINGHKIEIAQCNNSYIFPGVGLGVVAGQAKRVTDLMMMAAAVALSELAPAIRTGEGRLLPELNSIREVSQHIARAVILQGIKEGHIGPMNDNEIDDSIKRTMWTPQYEPYVL

SEQ ID NO: 48615 - protein, 936 aa, Rhodopseudomonas palustris CGA009
MSSLNLSAGPEPVSERPDDAAAIEAETRLRNDIRLLGRILGDTVREQEGQSVFDLVENIRQTSIRFHRDDDKTARAELAAILDGMSIQDTMRIVRAFSYFSHLANIAEDQNNIRQMRAGSTAGSAPRAGLLAKTLAHARQEGISAAELRKFFATALVSPVLTAHPTEVRRKSTMDREMQIAGLLDQRDRVQLTADEWTDNEERLRRAVETLWKTNLLRRTKLTVLDEVTNGLSFYDYTFLREVPRLHSALEDRLADAAKAEGANAEGELASFLRMGSWIGGDRDGNPFVTAEVLHGTLKLQSTRVLRYYLEELHELGSELSLASHLAGTTDTVKALAETSPDTSPHRKYEPYRLAVSGIYARLAATALKLEVENLRAPVGEAEPYASAQDFKADLDAIHLSLTTHHSGVIARGRLRQLRRAIDCFGFHLASLDMRQNSAVHERTIGELMDAARPGTSYAVLDEDARIALLISELRSTRPLTSMFVKYSDETVGELAVFREAAKAHATYGAAAIPQCIISMTKGVSDLLELAVLLKEVGLIDPSGRSAINVVPLFETIEDLQACAKIMDRLLSIPEYRRLVDSRGSVQEVMLGYSDSNKDGGFVTSGWELYKAEIGLIEIFEHHGVRLRLFHGRGGSVGRGGGPSYDAIVAQPGGAVNGQIRITEQGEIITSKYSNVEVGRNNLEILAAATLEASLLQPKRVAPHRDYLEAMEQLSALAFKAYRGLVYETDGFVDYFWASTVINEISTLNIGSRPASRKKTRAIEDLRAIPWVFSWAQCRLMLPGWYGFGSAVSAWVTEHPEKGIAFLQAMYQEWPFFRTLLSNMDMVLSKSSIGIASRYAELVEDTAIRDRIFSRIRAEWHSSIDYLLAIMQQDHLLQSNPLLERSIRHRFPYLDPLNHVQVQLLREHRTHDPDEQVLRGVQLTINGISAGLRNSG

SEQ ID NO: 48616 - protein, 190 aa, Legionella pneumophila subsp. pneumophila str. Philadelphia 1
MRYLFILIALLSQPLFAKPSEAIFAGGCFWCVEADFDKVPGVLETISGYDGGTEPRPGYALVSSGKTAYVEVVRVVFDSDKVTYQELLDFYWRHIDPTVQNQQFCDVGKQYRSVIFYLNDDQKKAALASIDEIKKRFPKVYTEVIPSTTFYPAEEYHQDYYQKNPIRYKYYRYNCGRDARIKELWDEKSS

SEQ ID NO: 48617 - protein, 383 aa, Methanosarcina barkeri str. fusaro
MDLEDTLLMMPGPVTVTPRVLRAMSKPMINHRSAEFAGIYTDCREILSSVFQTKNDIFVLSGSGTAGMEAAIGSSVGSGDKVIAIENGKFGERFKDIAAIYGDVVPVVFEWGHPVDLEVVKEKLEEGAKAVTLVHNETSAGILNPAAEIGKLAKKHDALFIMDGVTSLGGDDVKVDEWGVDIAVVGSQKCLAAPPGLSVVSVSEKAFEVMKDVTKRPYYNDLLAYKKSGDKPKAETPYTPAIPLFYALQEALHIVKEEGMEARIKRHRVLSEAIRAAVAELNIEMFPQLNEYSHYSNTVSAMKAPADVNGENIKSDMKARGVIIAGGQERLKNKIFRIGCMGNVTGRDVLSTIQQLEIVLNKRGYIDRLGAGVEAATRVLDRA

SEQ ID NO: 48618 - protein, 252 aa, Arabidopsis thaliana
MAQRKMIVFPTKNELSEAMAEYTANLSAKFIKEKGLFTVVLSGGDLIDWLCKLVQPPYIDSIEWSKWHVFWVDERVCAWEDPDSNYKLAMEGFLSKVPIPDKNIYAIDKHLAADGNAEHCATLYEECLKNLVKEKIIPISKKTGYPEFDLQLLGMGPDGHMASLFPNHPQINEKQKWVTYITDSPKPPPKRITFTLPVINSTLYNLMAICDKAPAKSVAEIMKHNNLSLPSAHLSAQVENVWYLDQAAASEL

SEQ ID NO: 48619 - protein, 173 aa, Legionella pneumophila subsp. pneumophila str. Philadelphia 1
MLVSRSYGMKSLVSFIVSVFMLNTALAYTPEFNKSEKLKQLTPLQYQVTQKAATEKPFDNPYWNNEQAGIYVDIVSGEPLFSSLDKYDSGTGWPSFTKPINTANVILKPARHYLFFVQTEVLSKNAQSHLGHVFNDGPKPTGERYCMNSAALRFIPKDQMSKEGYEEYLTLFK

SEQ ID NO: 48620 - protein, 181 aa, Helianthus annuus
MSLQQVPTTETTTRKNRNEGRKRFTDKQISFLEYMFETQSRPELRMKHQLAHKLGLHPRQVAIWFQNKRARSKSRQIEQEYNALKHNYETLASKSESLKKENQALLNQLEVLRNVAEKHQEKTSSSGSGEESDDRFTNSPDVMFGQEMNVPFCDGFAYFEEGNSLLEIEEQLPDPQKWWEF

SEQ ID NO: 48621 - protein, 289 aa, Streptococcus pneumoniae TIGR4
MDFTWALKYATEFLGTAILIILGNGAVANVELKGTKGHQSGWIVIAVGYGMGVMIPALMFGNVSGNHINPAFTLGLAVSGLFPWAQVVPYIIAQVLGAIFGQALVVATYRPFYLKTENPNNILGTFSTISSIDHGTKESRYAATVNGLINEFVGSFVLFFAALGLTKNFFGAEVLQFMKQKATEAGQTVDFSDLAIKAQVAPHTASGLSVAHLALGFLVMALVTSLGGPTGPALNPARDLGPRLLHAFLPKSVLGEHKGDSKWWYSWVPVVAPIAAAIAAVAVFKFLYL

SEQ ID NO: 48622 - protein, 139 aa, Arabidopsis thaliana
MESSNRSSNNQSQDDKQARFRGVRRRPWGKFAAEIRDPSRNGARLWLGTFETAEEAARAYDRAAFNLRGHLAILNFPNEYYPRMDDYSLRPPYASSSSSSSSGSTSTNVSRQNQREVFEFEYLDDKVLEELLDSEERKR

SEQ ID NO: 48623 - protein, 402 aa, Bacteroides fragilis
MEKNIFKLDNEQLKGIAHAFREKVEEGLNKNNAEIQCIPTFILPKATDIKGKALVLDLGGTNYRVAIVDFSTEKPIIYPNNGWKKDMSIMKSPGYTREELFKELADLIVEIKREEEMPIGYCFSYPTESIPGGDARLLRWTKGVDIREMVGQFVGKPLLDYLNEKNKIRFTGVKVLNDTIASLFAGLTDKSYDAYIGLIVGTGTNMATFIPSDKITKLDPECHVQGLIPVNLESGNFYPPFLTAVDDTVDATSDSLGKQRFEKAVSGMYLGDILKAAFPLEEFEEKFDARKLTAIMNYPDIHKDIYVQVAHWIYNRSAQLVAASLAGLIALLKSYNRDIHRVCLIAEGSLFWSESRKDKNYNILVMEKLQELLRELELEDVEVHINSMDNANLIGTGIAALS

SEQ ID NO: 48624 - protein, 47 aa, Pueraria phaseoloides
RITEQAGVVLSLDPKPIEGDWNGAGCHTNYSTKSMREDGGFEVIKKA

SEQ ID NO: 48625 - protein, 319 aa, Yersinia pseudotuberculosis IP 32953
MSKIVSLGIHVLDVLGRHVNRFPPGGELDIINEIRLTVAGTAAGMSVDLAKLGGDVYAMGAVGLDESGNFIIDTLRRYGVNTDHIVRKSEVQTSCSMLPIRPNGERPVLHVLGANAAYRLEDIHWDVIASADILHFGGTYLLPGLDGPPTATILKFAKEHGVTTTLDLLVNAQPDLLAKLEPALPYIDYFMPGLDEARAICGLDKRADVIAFFLNRGVGHTVFKMGAEGSSIASLDMAEVLIPAYKAQVVDSTGCGDSYCAAFIMGLTKGWDLATSGRFASAAASLVVSGLGSDAGIIDFEHTLKVMNTAETLPIAQET

SEQ ID NO: 48626 - protein, 313 aa, Brucella suis 1330
MSHGEAPLKIFVFGSVNVDVSARMAALPRPGQTVNASGYGIGLGGKGANQAVAVAKLGGAIRFVGAVGHDAFGELALKQMREFGLDTGSVRVIDDVDTGMAIIQVEETGQNTIAVCAGANARWSSADIDAYGADIAKARITLLQREVPHEANLAVAKAVRAAGGTVLLDPAPVGDASQMADLIALSDIISPNETEAAEITGIEPTDLASAEAAGRKLLERGPKIVILKLGSRGALLVTADEVKHFTPFKVKVVDTVAAGDSFNGGFAVAFSQARPLHDCVRYGSAAGAIAVTRVGAGAAAPTAREVEELIGRA

SEQ ID NO: 48627 - protein, 72 aa, Teramnus labialis
WEYQVGPSVGIEAGDHIWASRYILERITEQAGVVLSLDPKPIEGDWNGAGCHTNYSTKSMREDGGYEVIKKA

SEQ ID NO: 48628 - protein, 433 aa, Brassica napus
MAVAMDMEKEAKVDNKPPTEQRRVVVTGMGVETSLGHDPDTFYENLLQGNSGISQIENFDCSAFPTRIAGEIKSFSTEGWVAPKLSKRMDKFMLYLLTAGKKALVDGGVTEEVMAEFDKAKCGVLIGSAMGGMKVFQDAIEAMKISYKKMNPFCVPFATTNMGSAMLALDLGWMGPNYSISTACATSNFCILNSANHIIKGEADVMLCGGSDSVIIPIGLGGFVACRALSQRNNDPTKASRPWDSNRDGFVMGEGAGVLLLEELEHAKKRGATIYAEFLGGSFTCDAYHMTEPRPDGAGVILCIERALADAGISKEQINYINAHATSTPAGDLKEYQALAHCFGQNPEIKVNSTKSMIGHLLGAAGAVEAVATVQAIRTGWVHPNINLESPDNGVDTNLLVGPEKERLDIKAALSNSFGFGGHNSSIIFAPYK

SEQ ID NO: 48629 - protein, 72 aa, Teramnus repens
WEYQVGPSVGIEAGDHIWASRYILERITEQAGVALSLDPKPIEGDWNGAGCHTNYSTKSMREDGGYEVIKKA

SEQ ID NO: 48630 - protein, 266 aa, Nostoc sp. PCC 7120
MTAISDRFETLKQNQECALIPFITAGDPDLETTAAALKILDSNGADFIELGIPYSDPLADGPVIQAAATRALQNGTKLERVLEMLKATIPSLRAPIILFTYYNPILHRGIDKFLEQIAAVGVAGLVVPDLPLEEAAGLLKPATERGIDLILLIAPTSSSERIEAIAHSSQGFIYLVSVTGVTGVRSQVEVRVSDLLRQIRQVTDKPIAVGFGISQPEQATQVKEWGADGAIVGSAFVQRLSAGTPAEGLSAIAEFCQSLKAAIKTS

SEQ ID NO: 48631 - protein, 742 aa, Oryza sativa
MMGTAHHNQTAGSALGVGVGDANDAVPGAGGGGYSDPDGGPISGVQRPPQVCWERFIQKKTIKVLLVDSDDSTRQVVSALLRHCMYEVIPAENGQQAWTYLEDMQNSIDLVLTEVVMPGVSGISLLSRIMNHNICKNIPVIMMSSNDAMGTVFKCLSKGAVDFLVKPIRKNELKNLWQHVWRRCHSSSGSGSESGIQTQKCAKSKSGDESNNNNGSNDDDDDDGVIMGLNARDGSDNGSGTQAQSSWTKRAVEIDSPQAMSPDQLADPPDSTCAQVIHLKSDICSNRWLPCTSNKNSKKQKETNDDFKGKDLEIGSPRNLNTAYQSSPNERSIKPTDRRNEYPLQNNSKEAAMENLEESSVRAADLIGSMAKNMDAQQAARAANAPNCSSKVPEGKDKNRDNIMPSLELSLKRSRSTGDGANAIQEEQRNVLRRSDLSAFTRYHTPVASNQGGTGFMGSCSLHDNSSEAMKTDSAYNMKSNSDAAPIKQGSNGSSNNNDMGSTTKNVVTKPSTNKERVMSPSAVKANGHTSAFHPAQHWTSPANTTGKEKTDEVANNAAKRAQPGEVQSNLVQHPRPILHYVHFDVSRENGGSGAPQCGSSNVFDPPVEGHAANYGVNGSNSGSNNGSNGQNGSTTAVNAERPNMEIANGTINKSGPGGGNGSGSGSGNDMYLKRFTQREHRVAAVIKFRQKRKERNFGKKVRYQSRKRLAEQRPRVRGQFVRQAVQDQQQQGGGREAAADR

SEQ ID NO: 48632 - protein, 407 aa, Nocardia farcinica IFM 10152
MNALWHGFADMGAVARDGAFVVARGAGAYVYDEAGNRYLDATAGLWFTNVGHGRAEIADAVAAQLRRIAHYSNFGDIAEPPTRELAERLSAIAPIPGSKIFFTSGGSDSVDTAAKFARRYWHEVGRPGKTIVVGRQRAYHGMHVAGTALSGLPPNRDGYGELMPDARTVDWDDPKGLLALIEEVGAERIAAFFCEPIIGAGGVYLPPEGYLTEVRAICADHDILFVADEVVTGFGRIGGSWFASSRFDLRPDLMTTAKGLTSGYLPMGAVFIAPHLAEPFFAGGVWWRHGYTYGGHAASAAAALANLDILERENLLAEATRLEATLHAELAPLAQHPRVAEVRSGLGAVAAVQLADPAEAPAFVKALRAEGVSSRAAGQGALQISPAFVMTDEQVRELAAAFARALG

SEQ ID NO: 48633 - protein, 201 aa, Triticum aestivum
  misc_feature (172)..(172): Xaa can be any naturally occurring amino acid
  unsure (1)..(201): unsure at all Xaa locations
MVDPRFRTQPMGASSVAFHLLSSHTMAPTVMVSSATSVAPFQGLKSTAGLPISRRSSSAGLSSVSNGGRIRCMQVWPIEGIKKFETLSYLPPLSTEALLKQVDYLIRSKWVPCLEFSKVGFVFREHNSSPGYYDGRYWTMWKLPMFGCTDATQVLNEVEEVKKEYPDAYVRXVIGFDNLRQVQCVSFIAFRPPGPPAPGKA

SEQ ID NO: 48634 - protein, 476 aa, Pseudomonas fluorescens Pf-5
MSIPRLKSYFTILATVLVLGQAVSAQAAELPDFTQLVEQASPAVVNISTTQKLPDRRVSNSAQMPDLEGLPPMLREFFERGMPQPRSPRGDRQREAQSLGSGFIISADGYILTNNHVIADADEILVRLADRSELKAKLIGTDPRSDVALLKIDGKDLPVLKLGKSQDLKAGQWVVAIGSPFGFDHTVTQGIVSAIGRSLPNENYVPFIQTDVPINPGNSGGPLFNLAGEVVGINSQIYTRSGGFMGVSFAIPIDVAMDVSNQLKTGGKVSRGWLGVVIQEVNKDLAESFGLEKPAGALVAQIQDDGPAAKGGLQVGDVILSLNGQPIVMSADLPHLVGALKAGAKANLEVIRDGKRKNVELTVGAIPEEDKDLSMLPKSGVERSSNRLGVAVVELNDEQKKAFDLKGGVVIKEVQDGPAALIGLQPGDVITHLNNQAITSAKEFTEIAKALPKNRSVSMRVLRQGRASFITFKLAE

SEQ ID NO: 48635 - protein, 540 aa, Corynebacterium efficiens YS-314
MGVFPGGFCMPAGIPPISRWHPRTINPGAPVPVAWWGQSHLSRKDTPMTDPLDVSALLTKVPTGLLIGDTWRDSSDGSTYTVDNPATGQTIATLASATSDDALAALDAACEVQSSWARTPARERSEILRRAFDLINERAEEFATLMTLEMGKPIAEARGEVTYGNEFMRWFSEEAVRTYGRHGQTPEGTHRMLTVRKPVGPCLLITPWNFPLAMATRKVAPAIAAGCTMVLKPARLTPLTAQYFAQTMLDAGLPAGVLNVVSGASASAISNPIMEDDRLRKVSFTGSTPVGKQLLKKAADKVLRTSMELGGNAPFIIFEDADLDLAVEGAMGAKMRNIGEACTAANRFLVHDSIAQDFSRRLAERFNQLTLGNGLDDGVTVGPLVEAKARENVAKLVDDAVTEGATVLTGGTAGEGEGYFYQPTVLVDVAPGARILTEEIFGPVAPIITFTTEEEAIQLANDTEYGLASYLFTRDYARMFRISDQLEFGLLGFNSGVISNAAAPFGGVKQSGIGREGGTEGIDEYTQLQYIGIRDPYTDR

SEQ ID NO: 48636 - protein, 435 aa, Streptomyces clavuligerus
IYNRDELLSVLPAGPAPEGDAELVLRLLERYDLHAFRLVNGRFATVVRTGDRVLLATDHAGSVPLYTCVAPGEVRASTEAKALAAHRDPKGFPLADARRVAGLTGVYQVPAGAVMDIDLGSGTAVTHRTWTPGLSRRILPEGEAVAAVRAALEKAVAQRVTPGDTPLVVLSGGIDSSGVAACAHRAAGELDTVSMGTDTSNEFREARAVVDHLRTRHREITIPTTELLAQLPYAVWASESVDPDIIEYLLPLTALYRALDGPERRILTGYGADIPLGGMHREDRLPALDTVLAHDMATFDGLNEMSPVLSTLAGHWTTHPYWDREVLDLLVSLEAGLKRRHGRDKWVLRAAMADALPAETVNRPKLGVHEGSGTTSSFSRLLLDHGVAEDRVHEAKRQVVRELFDLTVGGGRHPSEVDTDDVVRSVADRTARGAA

SEQ ID NO: 48637 - protein, 401 aa, Glycine max
MDYFNAPGRNHLFVPGPVNIPDQIIRAMNRNNEDYRSPAIPAMTKTLLEDVKKIFKTTTGTPFLIPTTGTGAWESALTNTLSPGDRIVSFLIGQFSLLWIDQQQRLKFNVDVVESEWGHGAKLDVLESKIASDTSHTIKAICIVHNETATGVTNDLAKVRQILDSYQHPALLIVDGVSSICALDFRMDEWGVDVAITGSQKALSLPTGIGIVVAGPKAIEASKHAKSLRVFFDWKDYLKFYQLGTYWPYTPSIHLLYGLRAALDLIFEEGLENVIARHSRLGKATRLAVEAWGLKNCTQKEEWYSDTVTAVLVPAYIDSTEIVRRAWKRYNLSLGLGLNKVAGKVFRIGHLGHLNELQLLGCLAGVEMILKDVGYPVKLGSGVAAASAYLQNTIPMIPSRI

SEQ ID NO: 48638 - protein, 284 aa, Nicotiana tabacum
MSKDVIEEGQVHQQHGKDYVDPPPAPLLDFAELKLWSFHRALIAEFIATLLFLYVTVATVIGHKKLNGADKCDGVGILGISWAFGGMIFVLVYCTAGISGGHINPAVTFGLFLARKVSLLRAVGYIIAQSLGAICGVGLVKGFMKHYYNTLGGGANFVQPGYNKGTALGAEIIGTFVLVYTVFSATDPKRSARDSHVPVLAPLPIGFAVFMVHLATIPITGTGINPARTFGAAVIYNTEKIWDDQWIFWVGPFVGALVAAVYHQYILRGSAIKALGSFRSNPTN

SEQ ID NO: 48639 - protein, 481 aa, Silicibacter pomeroyi DSS-3
MSETRAIIYWLRRDLRLADHPGLAAAAASGRPVVPVFIHDESVAALGAAPAFRLGLGLERFGATLGDMGSRLILRRGSAPAVLQALIAETGAGAVWWTREYTPQAITRDSALKTALQQAGIEARSFGGALLFEPWTVETGAGGFYKVYTPFWRAVSQREVSAPDPAPARVRPPEAWPGSEALSDWGLGAPMRRGAAVVATHQAPGEAAALERLDRFIATGIGQYDACRDLPAGDGTSTLSDALSLGEIGPRTLWHRAGEAAHKGAQGAETFLKQLVWRDFAYHLMYHTPHLLSENWRPGWEVFPWATDPADPGFVAWTRGRTGVPLVDAAMREMYVTGRMHNRARMIAASYLTKHLMVHWKLGMDWFADCLTDWDPAANAMGWQWVAGCGPDAAPYFRIFNPETQAKKFDPKGRYRNHWIAEGQAEPPRAALSYFDAVPRSWNLRPDASYPPPIMALDQGRRRALSAYASAFSQGSDGKLA

SEQ ID NO: 48640 - protein, 173 aa, Legionella pneumophila subsp. pneumophila str. Philadelphia 1
MKSIIKGLLFFFMSVASLTAYAEQAYKRPSDAVIKQKLSTIQYNVTQQQGTESPFNNAYWNNEEQGIYVDVVTGEPLFISLDKYDSKTGWPSFTKPLEPGNIIYKDDSSMFTSRTEVISKHGKSHLGHVFGDGPPPTNKRFCMNSAALEFIPVKDLQKRGYGKYLPLFKNAGK

SEQ ID NO: 48641 - protein, 506 aa, Oryza sativa (japonica cultivar-group)
MAAMMASITSELLFFLPFILLALLTFYTTTVAKCHGGHWWRGGTTPAKRKRMNLPPGAAGWPLVGETFGYLRAHPATSVGRFMEQHIARYGKIYRSSLFGERTVVSADAGLNRYILQNEGRLFECSYPRSIGGILGKWSMLVLVGDPHREMRAISLNFLSSVRLRAVLLPEVERHTLLVLRAWPPSSTFSAQHQAKKFTFNLMAKNIMSMDPGEEETERLRREYITFMKGVVSAPLNLPGTPYWKALKSRAAILGVIERKMEERVEKLSKEDASVEQDDLLGWALKQSNLSKEQILDLLLSLLFAGHETSSMALALAIFFLEGCPKAVQELREEHLGIARRQRLRGECKLSWEDYKEMVFTQCVINETLRLGNVVRFLHRKVIKDVHYKGYDIPSGWKILPVLAAVHLDSSLYEDPQRFNPWRWKSSGSSGGLAQSSSFMPYGGGTRLCAGSELAKLEMAVFLHHLVLNFRWELAEPDQAFVFPFVDFPKGLPIRVHRIAQDDEQE

SEQ ID NO: 48642 - protein, 135 aa, Brassica napus
QRMPLIYVKLYTYQIFRALSYIHRCIGVCHRDIKPQNLLVNPHTHQVKLCDFGSAKVLVKGEPNISYICSRYYRAPELIFGATEYTTAIDVWSAGCVLAELLLGQPLFPGESGVDQLVEIIKVLGTPTREEIKCM

SEQ ID NO: 48643 - protein, 223 aa, Triticum aestivum
  misc_feature (22)..(22): Xaa can be any naturally occurring amino acid
  misc_feature (28)..(28): Xaa can be any naturally occurring amino acid
  misc_feature (33)..(33): Xaa can be any naturally occurring amino acid
  misc_feature (35)..(35): Xaa can be any naturally occurring amino acid
  misc_feature (37)..(38): Xaa can be any naturally occurring amino acid
  misc_feature (40)..(42): Xaa can be any naturally occurring amino acid
  misc_feature (44)..(44): Xaa can be any naturally occurring amino acid
  misc_feature (46)..(46): Xaa can be any naturally occurring amino acid
  misc_feature (48)..(49): Xaa can be any naturally occurring amino acid
  misc_feature (56)..(57): Xaa can be any naturally occurring amino acid
  misc_feature (63)..(63): Xaa can be any naturally occurring amino acid
  misc_feature (70)..(71): Xaa can be any naturally occurring amino acid
  misc_feature (89)..(89): Xaa can be any naturally occurring amino acid
  misc_feature (93)..(93): Xaa can be any naturally occurring amino acid
  misc_feature (99)..(99): Xaa can be any naturally occurring amino acid
  misc_feature (105)..(105): Xaa can be any naturally occurring amino acid
  misc_feature (109)..(109): Xaa can be any naturally occurring amino acid
  misc_feature (114)..(114): Xaa can be any naturally occurring amino acid
  misc_feature (131)..(131): Xaa can be any naturally occurring amino acid
  misc_feature (207)..(207): Xaa can be any naturally occurring amino acid
  misc_feature (213)..(213): Xaa can be any naturally occurring amino acid
  unsure (1)..(223): unsure at all Xaa locations
MEDERSTQSYQGGEAAEQVEVXDRGLLXNLLGXKXAXXDXXXMXEXLXXGMENVSXXEPDVKXEEHVVGXXKETLFSKLHRSSSSSSVXLVAXEEGGGXSVGHTXGGSXREKKXGGLKRGEAQRGSCPATXDPEGEHVTGLPAPAAPASVQTHHDTDVVVEKIDGDVKTEAAPAVPEEEKKGFLEKIKEKLPGGHKKPEDAAPVPVXHAAPAXVHAPRRRGVT

SEQ ID NO: 48644 - protein, 521 aa, Triticum aestivum
  misc_feature (157)..(157): Xaa can be any naturally occurring amino acid
  misc_feature (363)..(363): Xaa can be any naturally occurring amino acid
  unsure (1)..(521): unsure at all Xaa locations
MSAAVACAERATSDMLIGPDWAVNIELCDIINMDPGQAKDALKLLKKRLGNKNSKVQILALYVLETLSKNCGDIVYQQIIERDILSEMVKIVKKKPDLNVREKILSLIDTWQVAFGGPSGRYPQYHTAYQELRAAGVDFPPREENTVPLFTPPQTQXEAAHLYPPGQSYEDVAIQASLQSSTPAAPPLSLSEIQSARGIVDVLDEMLNALDHRHPEGVREEVIVDLVGQCRSYHARVMDLVSDTGDESLLFQALGLNDELQRVLQRHDDIAKGVPPNIPVPVAGNINQGTAPPRPAGASFAPLLNVHHEDDEPEDEFSVLSRRSARDGAAAQGNMSSVPRNERPYPSPLLPPPPSTKRPGLHXRQGSVDYLSGDSYKSEKVPDDFVNPTAPANMSAPSHSKTETDQVPNYDSSEDLPKAPWEAQAPVSLPPPPARYGQRQQFFEQQHGFPGENNEGGYDEMLTRTGSLSLNQRNTENGKSASVSTASRQPKPEDALFKDLVDFAKKNPSSPSKPANSRRTR

SEQ ID NO: 48645 - protein, 245 aa, Candida albicans SC5314
MLPQFHLPKKKRVYKGGNRSHTLVICLLCKDNLNKSMKLYTAPTGNGRKPLIFLHILDVPNEIHMFDWPTKEIKENWYLELNPHGLVPTLVDGDVTLCESNAILQYLADNYDTENKFSYPSTDPLYWQQLRWLFYQSTQFSDALSRLFFYKKFRSDDQWLVDKGFEQIGKVYQVLDSHLAQRKWFVGDKFTIADLAFAVGHFRRIEKTTGTKFEIENFEEKYPHVTQWYNDVLSIEGIKEGFELK

SEQ ID NO: 48646 - protein, 593 aa, Triticum aestivum
  misc_feature (340)..(340): Xaa can be any naturally occurring amino acid
  unsure (1)..(593): unsure at all Xaa locations
MGRPSHDTATSTSPSGSCRSSKRGPRLDRRNAYKSIGYEYDPAKLFCSYPPSPSRASSASASAAPSVASSVDLSSFRAAGSGDGGGDVQLLCRNLGLSGPEDFAISLTDWEAHKAFRSSASSSASSSPSARSQPDRPVRESPLRHEAVEEPTLPADADFELPAKETARDPPVEAPVRPAWLDPPEPARPDVRKPGCDGGIKGVRPPPVMLKPPPSMALPPAAQVGSTWDLLLSFAPEEQGQPQAIRSVPDFGDPDAEEDEDAAEVLTLEDLRLGESSEEFTGTSSISTTNDDETTESMFYISPNGRFKKKIRSWSRGVLLGSGSFGTVYEGISDEGVFFXAVKEVSLHDQGSNAQQCIFQLEQEIALLSQFEHENIVHYFGTDKEDSKLYIFLELVTQGSLVSLYQKYRLRDTHVSAYTRQILNGLNYLHERNIVHRDIKCANILVHANGSVKLADFGLAKQTSKLNVLKSCKGTVYWMAPEVVNPKKTYGPAADIWSLGCTVLEMLTRQLPYPDLEWTQALYRIGKGEPPAIPSGLSKEARDFISQCVKPNPEDRPSAAKLLDHPFVNRSMRSIRSMRTYTRPNSSTRGTSG

SEQ ID NO: 48647 - protein, 72 aa, Nogra grahamii
WEYQVGPSVGIEAGDHIWASRYILERITEQAGVVLSLDPKPIEGDWNGAGCHTNYSTKSMREDGGFEVIKKA

SEQ ID NO: 48648 - protein, 443 aa, GIBBERELLA ZEAE PH-1
MMLHPIISNFSLNNIKSQQPGLSPHQSCQTKVSPTHYATATRVKLLTYGQTDGKRKAEEEPSSPTPSKRIKQDDSAEPPEKKPDIKRIPFPEKPAVIEERNGEIEFRVVNNDNEREALIILTGLKCIFQKQLPKMPKDYIARLVYDRTHLSIAIVKKPLEVVGGITYRPFKGRRFAEIVFCAISSDQQVKGYGAHLMSHLKDYVKATSDVMHFLTYADNYAIGYFKKQGFTKEITLDKKVWMGYIKDYEGGTIMQCSMLPRIRYLEMGRMLLKQKECVQAKIRAYSKSHNIHAPPKEWKNGITEINPLDIPAIRASGWSPDMDELARQPRHGPNYNQLLHLLNDLQNHNSAWPFLVPVNRDDVADYYDVIKEPMDLSTMESKLEADQYLTPEDFIRDAKLVFDNCRKYNNESTPYAKSANKLEKFMWQQIKAIPEWSHLEPEK

SEQ ID NO: 48649 - protein, 102 aa, Taraxacum officinale
RSASDLRVTLADQTTYDAKVVGFDQDKDVAVLRIDAPKDKLRPIPVGVSADLLVGQKVFAIGNPFGLDHTLTTGVISGLRREISSAATGRPIQDVIQTDAAI

SEQ ID NO: 48650 - protein, 245 aa, Glycine max
  misc_feature (233)..(233): Xaa can be any naturally occurring amino acid
  unsure (1)..(245): unsure at all Xaa locations
MQTSKENAMFCSSLVLLPFPIFNFRVPLISLFLFTPKLRSLQQHSDLEMDGPAGRGGAGLDMFLPNYKLGKTLGIGSFGKVKIAEHVLTGHKVAIKILNRRKIKNMEMEEKVRREIKILRLFMHPHIIRLYEVIETPTDIYVVMEYVKSGELFDYIVEKGRLQEDEARNFFQQIISGVEYCHRNMVVHRDLKPENLLLDSKCNVKIADFGLSNIMRDGHFLKTSCGSPNYAAXPEVISGKMYAGP

SEQ ID NO: 48651 - protein, 348 aa, Oryza sativa (japonica cultivar-group)
MLSSSPSAAAPGIGGYQPQRGAAVFTAAQWAELEQQALIYKYLVAGVPVPGDLLLPIRPHSSAAATYSFANPAAAPFYHHHHHPSLSYYAYYGKKLDPEPWRCRRTDGKKWRCSKEAHPDSKYCERHMHRGRNRSRKPVESKTAAPAPQSQPQLSNVTTATHDTDAPLPSLTVGAKTHGLSLGGAGSSQFHVDAPSYGSKYSLGAKADVGELSFFSGASGNTRGFTIDSPTDSSWHSLPSSVPPYPMSKPRDSGLLPGAYSYSHLEPSQELGQVTIASLSQEQERRSFGGGAGGMLGNVKHENQPLRPFFDEWPGRRDSWSEMDEERSNQTSFSTTQLSISIPMPRCD

SEQ ID NO: 48652 - protein, 214 aa, Silicibacter sp. TM1040
MVKQSFSHVEHWVFDLDNTLYHPSARLFDQIEAKMITYVMETLQIDHGAADKLRGDYWRNHGTTLAGLMKEHDIDPDPFLVAVHDISLDHLEPDQTLAGHIKALPGRKIVYTNGSAPYAERVLAARGLTGLFDGIFGVEHADYRPKPERSAFERVFERAGVDTTRAAMFEDDPRNLNAPHAMGMRTVHVAPEAHPGDHIHHHTEDLTAFLGQLR

SEQ ID NO: 48653 - protein, 281 aa, Physcomitrella patens subsp. patens
MGRGKIEIKKIENTTSRQVTFSKRRGGLLKKAHELAVLCDAEVALVIFSSTGKHFEFASSGSMRDIIERYRKSSDGAVKRGTNTDLLGREVIKLKQQVERLESSQRHMLGEDLSALKVSDLLELEQQLDQGASRVRARKNQLILEEIEDLRRKEHELMIANEALRKKIADAEGAAEAAARANFPDARLESPKPFASDFSRDMSVSSQLAASVYPHPNLLQAQRSQTSLQLGWLSEQQIPSTEEGCAGESSLKWDHPHFHIQNRLHANISPSVRTYKLHVDR

SEQ ID NO: 48654 - protein, 340 aa, Silicibacter sp. TM1040
MRVYYDRDCDVNLIKEKKVAILGYGSQGHAHALNLRDSGAKNLVIALREGSPSAKKAEAEGLQVMGIAEAAAWCDVIMFTMPDELQAETYKKYVHDNIKPGAAIAFAHGLNVHFGLIEPKEGVDVIMMAPKGPGHTVRGEYTKGGGVPCLVAVHNDASGSALETALSYCSAIGGGRSGIIETNFREECETDLFGEQAVLCGGLVELIRCGFETLVEAGYAPEMAYFECLHEVKLIVDLIYEGGIANMDYSISNTAEYGQYVTGPRILKYDETKARMKEVLADIQQGKFVRDFMLENAVGQPTIKASRRANDEHAIEATGAKLREMMPWISAGKMVDKSKN

SEQ ID NO: 48655 - protein, 342 aa, Saccharomyces cerevisiae
MSVFVSGANGFIAQHIVDLLLKEDYKVIGSARSQEKAENLTEAFGNNPKFSMEVVPDISKLDAFDHVFQKHGKDIKIVLHTASPFCFDITDSERDLLIPAVNGVKGILHSIKKYAADSVERVVLTSSYAAVFDMAKENDKSLTFNEESWNPATWESCQSDPVNAYCGSKKFAEKAAWEFLEENRDSVKFELTAVNPVYVFGPQMFDKDVKKHLNTSCELVNSLMHLSPEDKIPELFGGYIDVRDVAKAHLVAFQKRETIGQRLIVSEARFTMQDVLDILNEDFPVLKGNIPVGKPGSGATHNTLGATLDNKKSKKLLGFKFRNLKETIDDTASQILKFEGRI

SEQ ID NO: 48656 - protein, 215 aa, Gossypium hirsutum
QKFELSPEALYLTINLIDRFLSVKVVPRRELQLLGMRAMLISTKYEEIWPPEVNDLVCIADRAYTHEQILIMEKTILGRLEWTLTVPTHYVFLARFIKASIPDPKMENMVYFLAELGIMHYETIRYCPSMVAASAVYAARCTLKKTPAWTDTLKFHTGYTEQQLMECAKLLACFHSKAVDSRLQVVYRKYSSSLRGAVALIPACQNLLSGVVSSA

SEQ ID NO: 48657 - protein, 1196 aa, Arabidopsis thaliana
MDLDFDDQPSDHAAPAVRAGARFKPKGRPQPKKKQVSLSTTQTTLSPDVAQEKLSTQSEDLVPLDGSSEIPSNALPSETNVPDSGSINKSTIGTLSEENEDAFPRGVHWSVKPSILRACNNVNLVGNRRDDGIEATTSFPDDPRTQDSAIFGDYVTPETGADEGRVDMETLDIVQEEGTTSSYVQHTGKLQPKPRLLETVVEEPEPHYSAGDTGYFPMGTNESEFMANVESRNGFSTYEDLQEEELNIPEAPRETVGEMEAQNASGGWEQEEQGVSPCINNTVTGEEENCMGNTVEEQSKRESKTGKSKRATSRKRKKTSEEPNKSSEKTEQKKFKHSSRRQKRTLEKELLETPDHEIRSLPLRDMLRLVEYKEWMQKKEAKGAGVQPSQESNNMNGSGSQYHSQGFDEEDEFGDFGIESSEYQENNVVKPDSPVNYQTYMNKTSRTRWSKEDTELFYEGIQEFGSNLSMIQQLFPERTREQMKLKFKLEERRNPLKLNDALSSRSKHFTHFKNVIKKLQQEAAAAKEGEEEEEAGAEAETTDVPENEEPEKSEETERASDGVAAGVKESDGGDVENGVRSDGGDECDDDEDFWNSYKSDIDEKKERKSDFENSEDERRTRIGSLKKKAINASTKFKHSLKKKRRKSDVRVSSVSIEDVRDVEELQAVDEFRQALVMEELLPHKHDDYHMMLRFLKARKFDIEKAKHMWADMIQWRKEFGTDTIIQDFQFEEIDEVLKYYPHGYHSVDKEGRPVYIERLGKVDPNKLMQVTTLDRYIRYHVKEFERSFMLKFPACTIAAKKYIDSSTTILDVQGVGLKNFTKSARELITRLQKIDGDNYPETLHQMFIINAGPGFRLLWSTVKSFLDPKTTSKIHVLGCKYQSKLLEIIDSSELPEFLGGACTCADQGGCMLSDKGPWKNPEIVKMVLHGGAHRAKQVVKVLNSDGKVIAYAKPSYPWIKGSDTSTAESGSEAEDIVVSPKAVKSYSHLRLTPVREEAKVGSGETSFAGSFAGYDEYVPMVDKAVDATWKVKPTAINRAPSKGAHMPPNVPKDHESFSARVLVTFMAFVMAILTFFRTVSNRVVTKQLPPPPSQPQIEGSAAAEEADLLNSVLKKLTELEEKIGALQSKPSEMPYEKEELLNAAVCRVDALEAELIATKKALYEALMRQEELLAYIDRQEAAQHQKKNKRKQMFCF

SEQ ID NO: 48658 - protein, 766 aa, Zea mays
MASHIVGYPRMGPKRELKFALESFWDGKSTAEDLEKVATDLRASIWKQMADAGIKYIPSNTFSYYDQVLDTTAMLGAVPERYSWTGGEIGFDTYFSMARGNATVPAMEMTKWFDTNYHFIVPELGPNTKFSYASHKAVNEYKEAKALGVDTVPVLVGPVSYLLLSKPAKGVEKGFPLLSLLSSILPVYKEVIAELKAAGASWIQFDEPTLVLDLDSDKLAAFSAAYAELESVLSGLNVLVETYFADVPAESYKTLTSLSSVTAYGFDLVRGTQTLGLVTSAGFPAGKYLFAGVVDGRNIWADDLATSLSTLQSLEAVVGKDKLVVSTSCSLMHTAVDLVNETKLDSEIKSWLAFAAQKVVEVDALAKALAGQKDEAYFAANAAAQASRKSSPRVTNEEVQKAAAALKGSDHRRGTNVSARLDAQQKKLNLPILPTTTIGSFPQTVELRRVRREYKAKKISEEEYVTAIKEEINKVVKLQEELDIDVLVHGEPERNDMVEYFGEQLSGFAFTANGWVQSYGSRCVKPPIIYGDVSRPNPMTVFWSKTAQSMTSRPMKGMLTGPVTILNWSFVRNDQPRFETCYQIALAIKKEVGDLKAGGIQVIQIDEAALREGLPLRKAEHAFYLDWAVHSFRITNCEIQDTTQIHTHMCYSNFNDIIHSIIDMDADVITIENSRSDEKLLSVFREGVKYGAGIGPGVYDIHSPRIPSAEEIADRIDKMLAVLDTNILWVNPDCGLKTRKYTEVKPALTNMVSAAKLIRTQFASAK

SEQ ID NO: 48659 - protein, 364 aa, Oryza sativa (japonica cultivar-group)
MGLNGKWRKAMPYMAMVFLQFGFAGLFLISVASLRQGMSHYVLVVYRNAVAAVVMAPFALWFERKTRPKMTLSVFFKIMALGLLEPVLDQNFFYMGAKNTSASFSSALTNILPAVTFVNAIILRMERISIKERRSQAKIAGTLITVGGAMLMILFKGPVINFPWTKNANHNISDSSDHNNGHWLMGIFMILLSCFCWSAFFILQSYTLRGYPAELSLTTLICAMGVAQSGAVALVMERDIKAWLIGFDMRLFTAVYSGIMCSGVAYYVQGMVIKERGPVFVTAFSPLCMIIVTILGSFILCEVVTLGRVIGAIIIVVGLYALIWGKNKDHGNQVDQDDNFEKQKTFELPLSTTNVNEARSPNHI

SEQ ID NO: 48660 - protein, 270 aa, Oryza sativa (japonica cultivar-group)
MGAKNTSASFSSALTNILPAVTFVNAIILRMERISIKERRSQAKIAGTLITVGGAMLMILFKGPVINFPWTKNANHNISDSSDHNNGHWLMGIFMILLSCFCWSAFFILQSYTLRGYPAELSLTTLICAMGVAQSGAVALVMERDIKAWLIGFDMRLFTAVYSGIMCSGVAYYVQGMVIKERGPVFVTAFSPLCMIIVTILGSFILCEVVTLGRVIGAIIIVVGLYALIWGKNKDHGNQVDQDDNFEKQKTFELPLSTTNVNEARSPNHI

SEQ ID NO: 48661 - protein, 477 aa, Borrelia garinii PBi
MISKLTKIVATISDLRCEPEHIKDLYDAGVNVIRLNTAHQSHEDTIKVIDNVRKISNKIALMIDTKGPEVRTANIENPIIVKTGDNVIISTSPINEPNNLQTNYDGFVKEVPQGSKVLIDDGELEMTVVTKLPDRLICEIKNDGQIKNKKSINTPGISLKLQSVTEKDKGFIELAAKYNVDFIAHSFVRNSKDIQDVQRILNAAGNPDVKIISKIENQEGIDNIEEIVKASYGIMVARGDMGVEIPAEDVPIAQLKITQTCIKYGIPVITATQMLHTMIENPRPTRAEVSDIANAILNGTDAIMLSGETAYGKYPIEAVKMMTSIAKKVEKHRKMTLYKDELFYDKSITRNYIIKCAIDATKLMDVKAIIVDSLKGKTARIMATYRASVPLFITTNSERLARELSLSYGVYSNLVDNNFKRTTEFVVTSLKMLKEQNIVNDKDTVIIISGNPNRDTDKGTEFMEINTVEDAIKGRNI

SEQ ID NO: 48662 - protein, 634 aa, Streptococcus pneumoniae
MSNLSVNAIRFLGIDAINKANSGHPGVVMGAAPMAYSLFTKQLHINPAQPNWINRDRFILSAGHGSMLLYALLHFSGFEDVSMDEIKSFRQWGSKTPGHPEFGHTAGIDATTGPLGQGISTATGFAQAERFLAAKYNREGYNIFDHYTYVICGDGDLMEGVSSEAASYAGLQKLDKLVVLYDSNDINLDGETKDSFTESVRDRYNAYGWHTALVENGTDLEAIHAAIETAKASGKPSLIEVKTVIGYGSPNKQGTNAVHGAPLGADETASTRQALGWDYEPFEIPEQVYADFKEHVADRGASAYQAWTKLVADYKEAHPELAAEVEAIIDGRDPVEVTPADFPALENGFSQATRNSSQDALNVVAAKLPTFLGGSADLAHSNMTYIKTDGLQDDANRLNRNIQFGVREFAMGTILNGMALHGGLRVYGGTFFVFSDYVKAAVRLSALQGLPVTYVFTHDSIAVGEDGPTHEPVEHLAGLRAMPNLNVFRPADARETQAAWYLAVTSEKTPTALVLTRQNLTVEDGTDFDKVAKGAYVVYENAADFDTILIATGSEVNLAVSAAKELASQGEKIRVVSMPSTDVFDKQDAAYKEEILPNAVRRRVAVEMGASQNWYKYVGLDGAVLGIDTFGASA

SEQ ID NO: 48663 - protein, 454 aa, Saccharomyces cerevisiae; identical to SEQ ID NO: 756

SEQ ID NO: 48664 - protein, 323 aa, Enterococcus faecium
MRKSVGITVFGCEQDEANAFRALSPDFHIIPTLISDAISADNAKLAAGNQCVSVGHKSEVSEATILALRKVGVKYISTRSIGCDHIDTTAAERMGISVGTVAYSPDSVADYALMLMLMAIRGAKPTMHAVAQQDFRLDRIRGKELGDMTVGVIGTGHIGQAVVKRLRGFGCHVLAYDNSRKMDADYVQLDELLKNSDIVTLHVPLCADTRHLIGQKQIGEMKQGAFLINTGRGALVDTGALVEALESGKLGGAALDVLEGEDQFVYTDCSQKVLDHPFLSQLLRMPNVIITPHTAYYTERVLQDTTEKTIRNCLNFERSLQHE

SEQ ID NO: 48665 - protein, 491 aa, Oryza sativa (japonica cultivar-group)
MSDHQFAGQPDVQCLVCTRPFTLDAQVTDTFEALAICRDCKATVLNDVERDEITSTSHHTRRRRQRSRTASIDSLEDAFSQEFSQLIDLARRQGRETDIDSSSVLPQHASYNATPSHSQRWHASDDESDGLNYVDSVFGEIESTISFGDYGADSDTSIEEHSVSARRRISIQLDNGSYMNTDTDIDPMNARLDQWDSDDQEDVEESGFDETINTMTQHQQQSHDIQLSGLSEDESEDGVWNWSVAVRQRANVTNLLEDMEGPEMRTTFVGNPDDYVDARQFEMLLEQFAEDNSSRRGAPPAATSFIENLPSVIISTSHQINDDVICPVCKDPIPTRARAKQLPCMHLYHSSCILPWFSSRNTCPVCRYELPTDDAEYERSKQATTNVRDIQVVEENSDEQEVQVTRQMAVGAIEETNTSEHNVRVDEQPSSARRRSGWLFIAAAPVVSLIGFALVLCFTNPARSGRRQLYCRSPSATEVHVGTKKSWWSMF

SEQ ID NO: 48666 - protein, 107 aa, Taraxacum officinale
RMTKQCDENGEKKKKKKKPLKEKVKENITKHEDETSVPIEKYDVAPLHHTPNPEPEEKKGFMEKIKEKLPGGHKEEEEEYVAPPPPPPTVVTHPDEGEQKKGIFEKI

SEQ ID NO: 48667 - protein, 667 aa, Bartonella henselae str. Houston-1
MATKVKQKDNTEVTTQASVDSPLLDFSDDAIKKMVKIAKKNGYVTMDELNAVLPPDEVTSEQIEDTLAMFSEMGINVVDDEGEAENYEEEVRVEGGDLVEATSNALVTTAKRELTDRTDDPVRMYLREMGAVELLSREGEIAIAKRIEAGRETMIAGLCESPLTFQALIIWREELKEQRILLREIIDLEMTYAGPEAKQAPVIERSEVQKVKEEKSSSAMRDMENIARDIGVEEDDEEDDDVNLSLAAMENELCPQVMGTLDFIAETYVKLRKLQDQHVESSLAERKEGALSPSQRKKCIQLKSELVQAVKSLSLNQNRIESLVEQLYDINKRLIHNEGKLKRIANNYGVGHEEFLKEYQGRELDADWINYIATLSGRGWKEFSKREAKEIKTLRSEIQNLAQETAISIGEFRRIVTQVQKGERESTIAKKEMVEANLRLVISIAKKYTNRGLQFLDLIQEGNIGLMKAVDKFEYRRGYKFSTYATWWIRQAITRSIADQARTIRIPVHMIETINKIVRTSRQILHEIGRDPTPEELSSKLSMPLEKVRKVLKIAKEPISLETPVGDEDDSHLGDFIEDRNALLPIDAAIQANLRDTTTRVLASLTPREERVLRMRFGIGMNTDHTLEEVGQQFSVTRERIRQIEAKALRKLKHPSRSRKLRSFLDS

SEQ ID NO: 48668 - protein, 316 aa, Saccharomyces cerevisiae
MAFLNIFKQKRGDEASQLSAKGREEISQSIKICKSDDAANEHSCSGDCKTEIEEGEQAFAKLKIEHETPLLNSSKTPKIHFVVPTSQIDWQHDACLEDPKSVQYKISQWCDKNSAKFSNVGTGKTLNCAVSSLPKDIMDIDVMRGTKNNVLILPYFIWLNDLRSDDVEATLDGLVPDLLDENISREKLLETRPNVAVARERAFVFICSHTTRDKRCGITAPYLKKVFDSKLQEHGLYRDNSDYRAEGVKIAFVNHVGGHKFAANVQIYLRNPNTLIWLGRVTPTIVPSIVEHLIVPEEPTLPFPEKVRCIKKYQSW

SEQ ID NO: 48669 - protein, 599 aa, Arabidopsis thaliana
MGGCTSKPSSSVKPNPYAPKDAVLQNDDSTPAHPGKSPVRSSPAVKASPFFPFYTPSPARHRRNKSRDGGGGESKSVTSTPLRQLARAFHPPSPARHIRDVLRRRKEKKEAALPAARQQKEEEEREEVGLDKRFGFSKELQSRIELGEEIGRGHFGYTCSAKFKKGELKDQEVAVKVIPKSKMTSAISIEDVRREVKILRALSGHQNLVQFYDAFEDNANVYIVMELCGGGELLDRILARGGKYSEDDAKAVLIQILNVVAFCHLQGVVHRDLKPENFLYTSKEENSMLKVIDFGLSDFVRPDERLNDIVGSAYYVAPEVLHRSYTTEADVWSIGVIAYILLCGSRPFWARTESGIFRAVLKADPSFDEPPWPSLSFEAKDFVKRLLYKDPRKRMTASQALMHPWIAGYKKIDIPFDILIFKQIKAYLRSSSLRKAALMALSKTLTTDELLYLKAQFAHLAPNKNGLITLDSIRLALATNATEAMKESRIPDFLALLNGLQYKGMDFEEFCAASISVHQHESLDCWEQSIRHAYELFEMNGNRVIVIEELASELGVGSSIPVHTILNDWIRHTDGKLSFLGFVKLLHGVSTRQSLAKTR

SEQ ID NO: 48670 - protein, 363 aa, Aster tripolium
MNLLSISSLLLLLLISAVTADSSDPLIRQVVQNDETEIESDPLLDPEHHFKLFKNKFGRTYDTEEEHEYRLTVFKSNLRRAKRHQVLDPTAKHGVTKFSDLTPSEFRKKYLGLKSKLKLPADANKAPILPTSNLPQDFDWRDKGAVTPVKNQGSCGSCWSFSTTGALEGSHFLQTGELVSLSEQQLVDCDHECDPAEYNSCDSGCNGGLMNNAFEYILKAGGLQKEADYPYTGRDGTCKFDKSKIAASVANFSVVSTDEDQIAANLVTNGPLAIGINAAWMQTYIGQVSCPYICSKTKMDHGVLLVGYGSAGYAPLRFKEKPYWIIKNSWGEDWGEDGYYKLCSGYNACGMDTMVSAVVSTNT

SEQ ID NO: 48671 - protein, 103 aa, Taraxacum officinale
MDVEGLKKLNKNKKLVKKLAKKHQAFLASESVIKQIPRLLGPGLNKAGKFPTLVSHQESLEAKVNETKATVKFQLKGVLCMGVAVGNCSMEEKQIFQNVQMSI

SEQ ID NO: 48672 - protein, 469 aa, Lycopersicon esculentum
MKLLSEKATCNSHGQDSSYFLGWQEYEKNPYDEIQNPKGIIQMGLAENQLSFDLLESWLAQNPDAAGFKRNGESIFRELALFQDYHGLPAFKNAMTKFMSEIRGNRVSFDSNNLVLTAGATSANETLMFCLANQGDAFLLPTPYYPGFDRDLKWRTGAEIVPIHCSSSNGFRITESALEEAYLDAKKRNLKVKGVLVTNPSNPLGTTLNRNELELLLTFIDEKGIHLISDEIYSGTVFNSPGLVSVMEVLIEKNYMKTRVWERVHIVYSLSKDLGLPGFRIGAIYSNDEMVVSAATKMSSFGLVSSQTQYLLSCMLSDKKFTKKYISENQKRLKRRHAMLVKGLKSAGINCLESNAGLFCWVDMRHLLSSNNFDAEMDLWKKIVYDVGLNISPGSSCHCTEPGWFRVCFANMSEDTLDLAMRRIKDFVESTAPNATNHQNQQQSNANSKKKSFSKWVFRLSFNDRQRER

SEQ ID NO: 48673 - protein, 320 aa, Physcomitrella patens subsp. patens
MGRVKLEIKKIENPTNRQVTFSKRRNGLIKKAYELSVLCDIDLALIMFSPSGKLTQYCNCSIEEVIARFANLPMHERNKSFEDMLARFSNNHMHHDRSKYNRKVENLEQLQRALKKLAEEHGLAASQDHLSGSKSTYEIELLQQELKKAQQEKELVQQRARLYLADEQLLQGVTSVPQLANMESELEQALERVRARKNYVSSAYQNVIQRQQHEFLGNSLQMMALRQQQSQQAQQQQAGMTPSQVPYMHWTMQQERPEPTPQDFMDSKRIQLLHSGMHRSTESQEVTVNQIQVWDISHLDHNHRTWKHCGKLGWGVSVED

SEQ ID NO: 48674 - protein, 707 aa, ASPERGILLUS NIDULANS FGSC A4
MIPMLAATLAEAFILQRSVFTDTPLRTVVFGSAAVNLLILAIYNVWIWPFFLDPLRHLPRAPGRFNMLRFIFDNPRGRLPLLWMKTVPNDGLIYFRDLLNRTQLLATNHQALLDVMSTNTYDFEKPWRAREFLARIIGFGLILSEGAAHKRQRRALTPFFTIKNVRALYTLMWDKTNQLLVEMDKQISRCPMEGTSPDSGWGKVEMSVWARYFTLSRLTLDVIGPAAMGRDFRSLQNAENKVADSFLAILEPTKEKIAFLAINFLLPQWFAKKLPWRLNQVIEEQVGYLRDLCKEIVHEKRAAITATKVTASELEADILGSMMLSGDFTDDELVDQMLTFLAAGHETTASALTWTCYLLTLHPEVQDRLRAEIRTAIPHSTHPVTHSDLESLPLLNGVCQEVLRLYPTVPSTIREAVRDTTVAGKHVPKGTKIMLCPYAINRAPEFWGADGDAFRPERWIDTDPVTGKTSVNNHGGAATNYAQITFLHGQRSCIGKDFARAELRCAVAGVVGRRLTTYMQMEDTYTGCWGMSNAHSGHHEECQKLHRIGTGIDINDSGIILYLKNHGALHIPALVSAEAAMKKGKRMKKTIIMKTALASLITAYVPAECTRPESMNERDPTRNLRREAGSGPKNIPPRTENGWVHPRICSQPRRNDVQTAYGEQCDSGPDAIDKSVAGYPARGRQQKSADKLFACLWGDVVLEAKVI

SEQ ID NO: 48675 - protein, 509 aa, Arabidopsis thaliana
MDYERIQKVQKSIISPTKLRMKLMGPLNNMKREGSKSNSNSSRTSPSRLQIPDDSEFSKNSLLASNSYSDDDVAATTTDIEVAKLPNEPVLYPTENDNQGSKDRCEGVVPRENDQPRLQQFRKGDLNMASPHIMRPQEDENLDYDSNASSSSFEFHRARGERSNQNHGSRGYPSRQMPSKWNDAEKWIMSRQNMVMRKNGQGNRIPVRIVPDNAGYEHNKSRMDLCQSSQVDGFEKFPNVVPSAPHPILTQEYGGDSLIDQSTQSNDLADSSHDHTTGGPAIRSVCMRDMGTEMTPIPSQEPSRSVTPVGATTPLRSPTSSLPSTPRGGQPEESSMSKNTRRELSEEEEKAKTRREIVALGVQLGKMNIAAWASKEEEENKKNNGDAEEAQKIEFEKRATAWEEAEKSKHNARYKREEIRIQAWESQEKAKLEAEMRRIEAKVEQMKAEAEAKIMKKIALAKQRSEEKRALAEARKTRDAEKAVAEAQYIRETGRIPASSYKICCGWFS

SEQ ID NO: 48676 - protein, 532 aa, Zea mays
  misc_feature (124)..(124): Xaa can be any naturally occurring amino acid
  unsure (1)..(532): unsure at all Xaa locations
MAAPAPAPKQEELQPHAVRDQLPSVSYCLTSPPPWPEAVLLGFQHYLVMLGTTVIIPTALVPQMGGGNEEKARVVQTLLFVAGINTLVQSFLGTRLPAVMGASYTFVAPTISIVLAGRYSGIAXDPHEKFVRIMRGTQGAFIVASTLQIIMGFSGLWRIVVRLLSPLSAAPLVALVGFGLYELGFPSVAKCVEIGLPQILLLVALSQYIPHAAPLLSTAFERFAVIMSIALIWLYAFFLTVGGAYKNAAPKTQFHCRTDRSGLVGGAPWISVPYPFQWGAPTFDTGEAFAMMAASFVALVESTGAFIAVSRYASATPCPPSVMSRGIGWQGVGILLGGIFGTANGTSVSVENAGLLGLTRVGSRRVVQISAGFMIFFSILGKFGAVFASIPGPIIAAIYCLLFAYVGTAGVGFLQFCNLNSFRTKFILGFSLFMGLSVPQYFNEYTSVAGFGPVHTRARWFNDMVNVVFSSKAFVGGAVAYFLDNTLQRRDGAVRKDRGHHFWDRFRSFKTDPRSEEFYSLPFNLNKFFPSF

SEQ ID NO: 48677 - protein, 201 aa, Escherichia coli
MALHDENVVWHSHPVTVQQRELHHGHRGVVLWFTGLSGSGKSTVAGALEEALHKLGVSTYLLDGDNVRHGLCSDLGFSDADRKENIRRVGEVANLMVEAGLVVLTAFISPHRAERQMVRERVGEGRFIEVFVDQPLAICEARDPKGLYKKARAGELRNFTGIDSVYEAPESAEIHLNGEQLVTNLVQQLLDLLRQNDIIRS

SEQ ID NO: 48678 - protein, 488 aa, Agrobacterium tumefaciens str. C58
MEKYMYLGLDLGTSGVKALLMDGDQKIIGSANGSLDVSRPHHGWSEQNPADWIAATKTAVAGLKQKFAKELAAVKGIGLSGQMHGATLVDAEGKVLRPCILWNDTRSHAEAAALDADPRFRKITGNIVFPGFTAPKLAWVAKNEPDIFAKVAKVLLPKDYLRLWLTGEYISEMSDSAGTSWLDTGARKWSPELLAATGLDEKHMPSLVEGTDEAGVLRTELASEWGISGRAVVAGGAGDNAASACGMGTVKEGHAFVSLGTSGVLFAANASYLPKPESAVHAFCHALPNTWHQMGVILSATDALNWYSRLTGQSAADLTGELGETLLAPTGVTFAPYLSGERTPHNDAAIRGSFIGLSHESDRKALTQAVLEGVTFAIRDNLEALKSAGTSISRVTAIGGGSRSAYWLASIATSLGVPVDIPAEGDFGAAFGAARLGLIAATGADPVAVCSQPETARTIEPVAALGDAYEEAYRRYHALYPAIRALSQ

SEQ ID NO: 48679 - protein, 459 aa, Arabidopsis thaliana
MTLTFSSSAATVAVAAATVTSSARVPVYPLASSTLRGLVSFRLTAKKLFLPPLRSRGGVSVRAMSELVQDKESSVAASIAFNEAAGETPSELNHSRTFLDARSEQDLLSGIKKEAEAGRLPANVAAGMEELYWNYKNAVLSSGASRADETVVSNMSVAFDRMLLGVEDPYTFNPYHKAVREPFDYYMFVHTYIRPLIDFKNSYVGNASIFSELEDKIRQGHNIVLISNHQSEADPAVISLLLEAQSPFIGENIKCVAGDRVITDPLCKPFSMGRNLICVYSKKHMNVDPELVDMKRKANTRSLKEMATMLRSGGQLIWIAPSGGRDRPNPSTGEWFPAPFDASSVDNMRRLVEHSGAPGHIYPMSLLCYDIMPPPPQVEKEIGEKRLVGFHGTGLSIAPEINFSDVTADCESPNEAKEAYSQALYKSVNEQYEILNSAIKHRRGVEASTSRVSLSQPWN

SEQ ID NO: 48680 - protein, 310 aa, Oryza sativa (japonica cultivar-group)
MGLNGKWRKAMPYMAMVFLQFGFAGLFLISVASLRQGMSHYVLVVYRNAVAAVVMAPFALWFERKTRPKMTLSVFFKIMALGLLEPVLDQNFFYMGAKNTSASFSSALTNILPAVTFVNAIILRMERISIKERRSQAKIAGTLITVGGAMLMILFKGPVINFPWTKNANHNISDSSDHNNGHWLMGIFMILLSCFCWSAFFILQSYTLRGYPAELSLTTLICAMGVAQSGAVALVMERDIKAWLIGFDMRLFTAVYSGIMCSGVAYYVQGMVIKERGPVFVTAFSPLCMIIVTILGSFILCEVVTLGRYV

SEQ ID NO: 48681 - protein, 462 aa, Nocardia farcinica IFM 10152
MEGWTMDDRVPRGRLARGSRLGRLAAGQAVRGVGTKVAMLGRTEQARRALAERSALQAAQQLVTVLGGMKGAAMKLGQMLSVLDVDLVPESHRELFRTKLAELRDRAPHVAFAAMRRVIEDDLGPMARIFADFDETPIAAASIGQVYRARLRDGRAVAVKVKYPGVDQAVEADLRNLRMIARLWKSVLPSAADTAVLDEVALNIGGELDYRREARDQHRVASRYRGHPYVLVPDSIIEHCGPNVLVTELVDGRPFDELRALPDADRDHLGELIYRFYINSLFVDYEFCGDPHPGNVLLAADGRAAFVDFGLYHRMNPVDADFERDCLRAAGEHRADDLYAAWVGRGIVDPDSGVTAQDCLEYVWAAAGWHLLDEPITITPEIATGAVVLAVDPRAVRFRGVHRQHLPREHVFSRRADLFTYAVLGQLVCTANWHLLAREWLLGDTPHTEVGRAIARWRAERG

SEQ ID NO: 48682 - protein, 103 aa, Dechloromonas aromatica RCB
MDVKEEGDSYLVHAELPGVKKEDIHVVVDGNQVSISAETKQEKEVKEGDRVLRSERYFGKVSRSFLLEQDLDDTKATAKFNDGVLELTLPKRTASPNKKLNIE

SEQ ID NO: 48683 - protein, 281 aa, Oryza sativa
  misc_feature (206)..(206): Xaa can be any naturally occurring amino acid
  unsure (1)..(281): unsure at all Xaa locations
MSGLYSPGFSPARNLSPQIRSNPTDVDSQYLAELLAEHQKLGPFMQVLPICSKLLSQEIMRVSSIVHNHGFGDFDRHRFRSPSPMSSPNPRSNRSGNGFSPWNGLHQERLGFPQGTSMDWQGAPPSPSSHVVKKILRLDVPVDSYPNFNFVGRILGPRGNSLKRVEASTGCRVFIRGKGSIKDPLKEDKLRGKPGYEHLSDPLHIXIEAEFPASIIDARLRHAQEVIEELLKPVDESQDFYKRQQLRELAMLNSTLREDSPHPGSVSPFSNGGMKRAKTGQ

SEQ ID NO: 48684 - protein, 482 aa, Bacteroides thetaiotaomicron VPI-5482
MNDMNIKTKLILGIGMLAGMIILLVTLSVVNLQLLTATEPDSPAAMPALERALLWISVTGGICILTGLTLLYWLPRTISKPIKELKQGILEIANHNYEERLDMRNNQEFREVAESFNRMAERLAEYRASTLADILSAKKFIEAIVNSIDDPIIGLNMDREILFINEEALNVLNLKRGNVIRKSAEELSLKNDLLRRLIRELVTPGDQKEPLKIYADDKESYFKASYIPIINTDAGKDEPSKLGDVILLKNITEFKELDSAKTTFISTISHELKTPIAAIMMSLQLLEDKRVGELNDEQEQLSKSIKENSERLLSITGELLNMTQVEAGKLQLMPKITKPIELIEYAIKANQVQADKFNIQIEVEYPEEKIGKLFVDSEKIAWVLTNLLSNAIRYSKENGRVVIGARQEGDMIDLYVQDFGKGIDPRYHKSIFDRYFRVPGTKVQGSGLGLSISRDFVEAHGGTLTVESELGKGSRFVMRLKA

SEQ ID NO: 48685 - protein, 402 aa, Silicibacter pomeroyi DSS-3
MKRVVITGAGTINALGHSVPETLTAMREGKCGIGELEFRDVDRLAIRIGGQVRGFEAEGRFNRQQMSLYDRFTQFTLTAAKEAIDQAGLAFHGELAAKSGVVLGTAGGGVSTWDENYRSVYEEGKNRVHPFVVPKLMNNAAASHVSMEHNLKGPSFTVSTACASSNHAMAQAFSMVRSGMAPVMITGGSESMLCFGGVKAWEGLRVMSKDACRPFSANRNGMVQGEGAGIFVFEEYEHAKARGAEILCEVAGFAMSSDAADIVMPSKQGAARAMAGALADARINPGEVGYINAHGTGTAANDKTECAAVADVFGRHADSLMISSTKSMHGHLIGGTGAVELLACIMALRDWVIAPTIGYEEPDPECALDVVPNEAREAKVDVALSNAFAFGGLNAVLALRKV

SEQ ID NO: 48686 - protein, 625 aa, Kineococcus radiotolerans SRS30216
MVGPLHRARRADRGRVRVGRARLRAPGPPRRTRSRLLRAVLTVDLPVPGLQERGGLRNDPQWYKTAVFYEALVRAFADSNGSGTGDFSGLTAKLDYLQWLGIDCLWLPPFYASPLRDGGYDISDYNAVLPEFGTLHDFQRLVTEAHQRGIRIVIDLVMNHTSDQHPWFQASRSDPEGPYGDFYVWSDTDEQYPDARIIFVDTETSNWTFDPVRRQFFWHRFFSHQPDLNFDNPAVEEAMFDTVRFWLDMGIDGFRLDAVPYLYVREGTNGENLPETHDYLHRLRRMVDEEYPGRVLLAEANQWPFDVVEYFGTEEAPECHMCFHFPVMPRLYYALREGRATPITEILSATPDIPTSSGQWGTFLRNHDELTLEMVTTEERAAMYGWYAPDPRMRANVGIRRRLAPLLDNSRPEIQLIHALVLSLPGSPCLYYGDEIGMGDNIWLDDRDAVRTPMQWTPDRNSGFSSADPGKLYLPTIQSLVYHYQSVNVEAQLATGSSLLHWVRNVLAVRRAHPAFGRGRYLPLPTRDDPRPDDGSCSNEAVLAFLRVLDPTPEEEGETVLCLNNLSDHPQAAVLRMPGQAGATARDVFGGAAFGEVDAEGTLTVMLGSRGFYWLALTGGRGVGA

SEQ ID NO: 48687 - protein, 471 aa, Arabidopsis thaliana
MEDIQEEENGTDEEVLGSSLTMEKVAAAKQYIENHYKAQNKNIQERKERRWILERKLASSGVPKEEQINMIKDLERKETEFMRLKRNKISVDDFELLTIIGRGAFGEVRLCRERKSGNIYAMKKLKKSEMVMRGQVEHVRAERNLLAEVESHYIVKLYYSFQDPEYLYLIMEYLPGGDMMTLLMREDTLREDVARFYIAQSVLAIESIHRYNYIHRDIKPDNLLLDKDGHMKLSDFGLCKPLDCRNLPSIQENRATDDETMSEPMDVDRCFPDTDNKRSWRSPQEQLQHWQMNRRKLAFSTVGTPDYIAPEVLLKKGYGMECDWWSLGAIMYEMLVGYPPFYADDPISTCRKIVHWRNHLKFPEDAKFSSEAKDLICRLLCNVDHRLGTGGGAQQIKDHPWFKDVVWEKLYEMEAAYKPEVNDELDTQNFMKFDEVNSPAPERTRSGLSRKVCDYYLCIHTLSSAFICKDM

SEQ ID NO: 48688 - protein, 186 aa, Emericella nidulans
MSSTSPSKEPEVEQEPHSGEEHEQMDKEQDNQTQGQGEFEVKEQDRWLPIANVARIMKLALPENAKIAKEAKECMQECVSEFISFITSEASEKCQQEKRKTVNGEDILFAMTSLGFENYAEALKIYLSKYRETQSARGEHQNRPPSSGYAGGDPSAELPAALQSCVPGVLQLEAPSPKPLIMQAAL

SEQ ID NO: 48689 - protein, 327 aa, Zea mays
  misc_feature (72)..(72): Xaa can be any naturally occurring amino acid
  misc_feature (313)..(313): Xaa can be any naturally occurring amino acid
  unsure (1)..(327): unsure at all Xaa locations
MAEQLDLPGFRFHPTEEELLEFYLKQVAHGRKLKFDIIPTVHLYRHDPWELPGLARIGEREWYFIGYLEAGXQQHHHQSSGARPSRTTERGFWKATGSDRAVRCAHDPKRLIGLKKTLVYYEGRAPRGTKTDWVMNEYRLPDACNNNNNNNNAVPGDSSAAAAASSTCTTNNSPKEDIVLCKVYRKAVSLKELEQRVAMEELARATPSASHNAGSPADSMSSSDQDQQTQLGQGGVEIMMTMPVGGISPQPPLPPPVMMSMKQEEEVAEPEAAPLPAVLMRPSTLSLPQLEVAKQQQEWMQDPFLTQLRSPWXMESWSPYYPSVLNF

SEQ ID NO: 48690 - protein, 563 aa, Saccharomyces cerevisiae
MRLRTAIATLCLTAFTSATSNNSYIATDQTQNAFNDTHFCKVDRNDHVSPSCNVTFNELNAINENIRDDLSALLKSDFFKYFRLDLYKQCSFWDANDGLCLNRACSVDVVEDWDTLPEYWQPEILGSFNNDTMKEADDSDDECKFLDQLCQTSKKPVDIEDTINYCDVNDFNGKNAVLIDLTANPERFTGYGGKQAGQIWSTIYQDNCFTIGETGESLAKDAFYRLVSGFHASIGTHLSKEYLNTKTGKWEPNLDLFMARIGNFPDRVTNMYFNYAVVAKALWKIQPYLPEFSFCDLVNKEIKNKMDNVISQLDTKIFNEDLVFANDLSLTLKDEFRSRFKNVTKIMDCVQCDRCRLWGKIQTTGYATALKILFEINDADEFTKQHIVGKLTKYELIALLQTFGRLSESIESVNMFEKMYGKRLNGSENRLSSFFQNNFFNILKEAGKSIRYTIENINSTKEGKKKTNNSQSHVFDDLKMPKAEIVPRPSNGTVNKWKKAWNTEVNNVLEAFRFIYRSYLDLPRNIWELSLMKVYKFWNKFIGVADYVSEETRELISYKLDIQ

SEQ ID NO: 48691 - protein, 265 aa, Petunia x hybrida
MAQLRADDLSFIFGLLGNIVSFMVFLAPVPTFYKIYKRKSSEGYQAIPYMVALFSAGLLLYYAYLRKNAYLIVSINGFGCAIELTYISLFLFYAPRKSKIFTGWLMLLELGALGMVMPITYLLAEGSHRVMIVGWICAAINVAVFAAPLSIMRQVIKTKSVEFMPFTLSLFLTLCATMWFFYGFFKKDFYIAFPNILGFLFGIVQMLLYFVYKDSKRIDDEKSDPVREATKSKEGVEIIINIEDDNSDNALQSMEKDFSRLRTSK

SEQ ID NO: 48692 - protein, 326 aa, Oryza sativa
MAFTTMKASPMSASSSSAPVLRRCVAQPARVAAARRLAAAAASVALEASPVPAAAAAAVERRMSVSQTMSKLKEKGKTAFIPYITAGDPDMGTTAEALRLLDACGADVIELGVPFSDPYADGPVIQASASRALAAGATPEAVLSMLKEVTPELSCPVVLLSYLGPILRRGAANFTAAAKEAGVQGLIVPDLPYVDTCTFRSEAIKSNLELVLLTTPATPGERMKIITEASGGFVYLVSVNGVTGPRPKVNTRVEHLLQDIKLVTDKAVCVGFGISTPDHVRQIAGWGADGVIIGSAMVRQLGEAASPKQGLKRLEEYARRMKDALP

SEQ ID NO: 48693 - protein, 230 aa, Brassica napus
  misc_feature (191)..(191): Xaa can be any naturally occurring amino acid
  unsure (1)..(230): unsure at all Xaa locations
MQIFVKTLTGKTITLEVESSDTIDNVKAKIQDKEGIPPDQQRLIFAGKQLEDGRTLADYNIQKESTLHLVLRLRGGMQIFVKTLTGKTITLEVESSDTIDNVKTKIQDKEGIPPDQQRLIFAGKQLEDGRTLADYNIQKESTLHLVLRLRGGMQIFVKTLTGKTITLEVESSDTIDNVKAKIQDKEGIPPXDQQRLIFAGKQLEDGRTLADYNIQKESTLHLVLRLRGGF

SEQ ID NO: 48694 - protein, 719 aa, GIBBERELLA ZEAE PH-1
MKSAKAPATESSSHRRSQPVRQARTNTARSTANMGRSGAGRDSIGGADQPIDIFPAITHFADAITALPKELVRHFTLLKEVDAKLFIPEDQLFRLVEAATNAPVTEARPNNETSSVAPGSAPMSAQNSSTGNVLNNSAQSVLSADESHRDLVFDPSNLPRRHLFRQTALKIQEMLVSLEEKNHVISTANEALEAQLTRIEDVWPHLENEFSDEAKWGSTTHWAYPENRFSKASQVDRTRRDGAAAISAAAQALADEAAARSDARKQAVQAKKASRNHHNNINTNNHNHESEGDDHEGKHKPEGPKKTAKSRKSAAAAAAAAETANVGLGITTATNNNGNPPQKRRKVEKPTNGATTTADRAMSAVFGNAAPKAKTTSPRATPAPEAAPKKRKALPSSSGQVKKSRNGVAGLSTSANSSPVITELPEPKLPPVRASPVPVPTPNPAPPTRSRQNSIQNANAENNKARPTSAPNKPNGIAVNPVNVVPPPNSSLRNGATAEPKTPKETIVSIKTENPKKETERTETIPAPPTTMVNTITNVTPVPPPISTKKDAKKPDENERKNDRKSESLPPVAPTPTVTTKSGRASKPSTPSLATFQEAVPPRSRSARNNDGVGTGRKNQKKAGPTIHATVAQLADEDTNSSMQGDEEEADIDADEPTYCYCNGVSYGEMVACDADECPREWFHLECVGLKVAPTSKAKWYCEDCKERLKMAGKKSNGR

SEQ ID NO: 48695 - protein, 626 aa, Candida albicans SC5314
MDFKSRYESSLTLTKFFGSLPLLVAFPLVFLSHSLSTTSFEFAYENTILLNIFLASACLSIVILAHRLNVLPISNATATTSGSNKMSTMYLLSTFYVIYTSASFLPANRVAVLYLGLFLNSWNLYTPLAFVLDCYTNFKEFYGLHIVFTYALVILGYYLLSSKLNSSSLSNLLSSLDKPTVFGTFIFSALALVFYNPSMFNFSMIGVNLATFIVFMISVQEFQMRDSRLSSVFVSLLLELLQYVVLLQQPSFSQIINIGLAAVVTPDKSYHFEQDEEKGTDQGHKITNNSAPILKELMGHSDTRAIFNFLLLNATFMFVQFLYSFRSKSLGLLSDSLHMALDCMSLVLGLIAGVISKHEIDSNGKYPFGLKNFEILAGFTNGTLLVGISGSILFEAIGRLFNPVHLQKTTELIIVSILGLLVNLVGIFAFNHGHSHGHSHGHSHGSSHSHEHSHGHSHEHSHAPNCDSEDEHDHMNDNMKGIFLHIMADALGSVGVVISTILTKYFSWDGFDPIASIIIATLIFVSAVPLIKSTASTLLLSISKTKEDQIRNILHEVQQVKGVRSLTTPRFWPGPRNNVCGYVHIQVYRGENTSYIKRQCEKMFESRNMDVMLQIENDYDDCWCRK

SEQ ID NO: 48696 - protein, 455 aa, Nostoc sp. PCC 7120
MKLPDSPKIPKFMQLVQWIYQPLQLMEASAKAHGDSFTLWLTNKRPIVFLSNPQAIQELFTTPLEQLDARGTAQVLQPLLGENSLLLLSGETHQRQRKLLTPPFHGDRMRAYGDIITNITKEVISNWQLGKPFSVRDSMQEITLRVILQAVFGLREGERYTQLQKRLCDILDLSGSALRSTLSFLPALQIDLGRWSPWGHFLRQREAIDQLLYAEIQDRRDHPDPSRTDILSLMMAARDENGEAMTDVELRDELMTLLVAGHETTASALTWALYWIHKLPQVREKLLAELDNFGDNGDVNEITRLPYLTAVCQETLRIYPIAMVTIPRITKTNLEIGGHQFAPGTMLVGCIYLMHRRPDLYPQPQEFKPERFLEKQYSLYEYLPFGGSNRRCVGMAFALYEMKLILATVLANVDLALVDNYPVKPTRRGVTLAPSGGKWLIATAQHQKIKNPVEV

SEQ ID NO: 48697 - protein, 1693 aa, GIBBERELLA ZEAE PH-1
MATKTLARPDEPGVHARDPRSLHPQDETSKIVGNSASIPSDNNEPPTNSNEFESAEHSSKKSLVQIATVMASLCACVFLAALEVTIVSTALPTIAAHFTSDSGYTWIGTSFVLAHTASTPSWGKISDIWGRKPILLIANVIFFAGSLLCALVDDLAIFIAGRAIQGLGAAVWAVASGVGPILGGAFTVRLSWRWCFWINLPITVAVFFLLVLTLRLPSPNTPVWAGLKAIDWPGSFLIVGGTLMLLLGLYLGGVYEPWNSATVVCLIVFGIITALLFVWNEWKLAEYPVIPVHLFKTWSSSAAYAVTFFHAFVFMGVAYYFPLYFQAVLLASPLRSGIYLLPFILSISISAAITGIYIQFSGKYLLVSRAGLALMTLGMGLMMNLGMDLNWAKMITFQLLTGIGVGMNFEGPLLSVQAVVPHEDVAAATTSMGFTRTIATAISVVIGSVLFQNEMKGKNKALLGALGPELARMFDGASASANIDLINTLPAESQLIVRAAFFHSLDKMWILLIVYCILERWAVAQFLYEGSAPEQRPQRRTSGHCQRFEQNDENHELRHIPTKARGSDESVTRYFERSTLAQQAITTAMNKSFPSSPLTVRNASTLDSLSDAPITNKTDDSPTIPLLQDHRGNSASSEVSMHQEFIDNEAAIKTLAKIDRTIIPLLFITYMFNFMDKVILSSAAVFGLREDTYSWVGSVFYLGYFLWTYPTTILIANLPAGKYLTVNTIFWGLVVVFTAACQNFGGLLTMRFLLGIAEATITPGFMFLTSTWYTRDEMPTRVGIWFSGNSVGGLVASLLAFGVGHIESTTIRPWRWMYMILGTMTFLWSIPLFFLLPDNISKAAFLSPEERKIAAKRVSTSGTGKTEGTRWRWDQLRECLVDPKSWFIVGIELFTQIPNGGSQSFANIVVASFGFTNLQSTLINIPYSLLSAGVIAGSGYLAGRFRTLNCLLIIAVIVPCVIGSAVIYKRSHVPQSLHLFAYFLLSTGSAAMPLTMTLVQSNYRGVTKKMTITAMLFVTYCLGNMAGPHFFLKSEDPLYETAFKAITVCYSLAILCALGLRVYLKRLNASRTKEEGVVGSAGSGGFARECAEEQSSDLATDSEDVTDWQSTSECEVAVAKCSQSFQHQFVKLADYHSKMSWRNQGITGSNNIPLGKRRFGDEEEEKFDGGDAAVDRDLKRGRDPEPRSEADGPRRRKKRNRWGDASENKAAGLMGLPTAILSNMTSEQLEAYTLHLRIEEISQKLRIDDVVPADGDRSPSPAPQYDNHGRRINTREYRYRKRLEDERHKLIEKAMKTIPNYHPPQDYRRPTKTQEKVYVPVNDYPEINFIGLLIGPRGNTLKKMEGDSGAKIAIRGKGSVKEGKGRSDAAHASNQEEDLHCLIMADTEDKVNKAKKLIHNVIETAASIPEGQNELKRNQLRELAALNGTLRDDENQACQNCGKIGHRKYDCPEKQNYTASIICRVCGNAGHMARDCPDRQRGASWRNTDAAARPAGRIGSGDAVDREYEQLMQELGGGSSGPPARIEAGPGAQDNGSAKPWERGPTGGPAPWRSRNQDSNEGGSAAPWARERGGRNQDNAAGNGGDSYYGQAYGGASGAAAPWQQQAPGTQAGYGAYPGYGAYGAAPGMAAPPGLGAAGGAPPPPPGAPPGLGDINAFIQQYAGAAPPPPPPSGDAPPPPPSDQPPPPPPPGA

SEQ ID NO: 48698 - protein, 322 aa, Hyphomicrobium methylovorum
MSKKKILITWPLPEAAMARARESYDVIAHGDDPKITIDEMIETAKSVDALLITLNEKCRKEVIDRIPENIKCISTYSIGFDHIDLDACKARGIKVGNAPHGVTVATAEIAMLLLLGSARRAGEGEKMIRTRSWPGWQPLQLVGQRLDNKTLGIYGFGKIGQALAQRARGFDMNVHYYDIYRAKPEVEAKYNATYHDSLDSLLKVSQFFSINAPSTPETRYFFNKETIEKLPQGAIVVNTARGDLVKDDDVIAALKSGRLAYAGFDVFAGEPNINEGYYDLPNTFLFPHLGSAAIEARNQMGFEALDNIDAFFAGKDMPFKLA

SEQ ID NO: 48699 - protein, 325 aa, Prosthecochloris aestuarii DSM 271
MPVPLGFNWTPYYFKKHLQHIIMAKDLKPYPSGRKGEIISLDTVDELKEMACQVRRDVVRMLTRAASGHTGGSLGMADVFTALYFRIMRHDPHGFWENPDQDMLFLSNGHIVPVWYSVLARSGYFPTEELDSLRQIDSYLQGHPTSDARLPGIRIASGSLGQGLSAAVGAALGVKMDNRDADVFCLMGDGECQEGQIWEAAMSATHYGLDNLIGIVDYNKLQIDGEVCDVMCVEPFGDKWKAFGWDVYHCDGNDIDALVSTVEEIRSREQAVGPAVILASTVMGKGVPFFEGVMPDKSNWHGKPPSADHCEKALAILGETSFGDY

SEQ ID NO: 48700 - protein, 245 aa, Zea mays
TRVRQEYRLKGSGRLPASPASASGSATNIAAAMMKASGSACKDEWVVCRVFNMTTGRKKTAAPAYHVGMAGAEMDQNHNNIPAIPIPMPLQLALPVPMQMQFPILPDFVMDPVAPYYPNPNAGAGMMPPTVAGIGGAGGLQINGALFGNPMPAPLPMNFYHHQMGMGAAAGQVDMGAAAGQMDMGAAGAGAGGFDVAAPESRPSSMVSQKDEQANAAEISSMMSVTGPGSATTTIEMDGIWKYKY

SEQ ID NO: 48701 - protein, 548 aa, Escherichia coli
MAAKDVKFGNDAGVKMLRGVNVLADAVKVTLGPKGRNVVLDKSFGAPTITKDGVSVAREIELEDKFENMGAQMVKEVASKANDAAGDGTTTATVLAQAIITEGLKAVAAGMNPMDLKRGIDKAVTVAVEELKALSVPCSDSKAIAQVGTISANSDETVGKLIAEAMDKVGKEGVITVEDGTGLQDELDVVEGMQFDRGYLSPYFINKPETGAVELESPFILLADKKISNIREMLPVLEAVAKAGKPLLIIAEDVEGEALATAVVNTMRGIVKVAAVKAPGFGDRRKAMLQDIATLTGGTVISEEIGMELEKATLEDLGQAKRVVINKDTTTIIDGVGEEAAIQGRVAQIRQQIEEATSDYDREKLQERVAKLAGGVAVIKVGAATEVEMKEKKARVEDALHATRAAVEEGVVAGGGVALIRVASKLADLRGQNEDQNVGIKVALRAMEAPLRQIVLNCGEEPSVVANTVKGGDGNYGYNAATEEYGNMIDMGILDPTKVTRSALQYAASVAGLMITTECMVTDLPKNDAADLGAAGGMGGMGGMGGMM

SEQ ID NO: 48702 - protein, 498 aa, Bradyrhizobium sp. BTAi1
MTATLALSRLRPIVTAAVFAVGWALAPAPASARGPEGIADVAEKVIDAVVNISTSQTVEAKGGGEGRGANPQVPPGSPFEEFFDDFFKNRRGGPGGRGGADNSPRRTNSLGSGFIVDDSGVVVTNNHVIADADEINVIMNDGTKIKAELVGVDKKTDLAVLKFKPPRPLTVVKFGDSDKLRLGDWVVAIGNPFSLGGTVTAGIVSAKNRDISSGPYDSYIQTDAAINRGNSGGPLFNLDGEVIGVNTLIISPSGGSIGIGFAVPSKTVAGVVDQLRQFGELRRGWLGVRIQGVTDEIAESLNIKPARGALVAGVDDKGPAKPAGIEPGDVVVKFDGHDIKEPKDLSRIVADTAVGKEVDVIVIRKGQEQTLKVKLGRLEDNEKVQQAAIKKDEPAEKPQTQKALGLDLAALSKDLRTRYKIKDSVKGVIVTGVDQGSDAAEKRLSAGDVIVEVAQEAVTSGADIKKRVDQLKKDGKKSVLLLVSNADGELRFVALSLQ

SEQ ID NO: 48703 - protein, 580 aa, Desulfitobacterium hafniense DCB-2
MRAYGRLLRYVAAIKGEVALKVLIGLAISATYIGQALAMAKAVSIVFARSDLQAIVAPVLIALAAVLLRGFLSRMMESYSKVVAAKVKNKIRLLVFDKILHLGPGYLSDKRSGKVQSLVLDGIESLEPFLVNYIPQIITISISGLAIGIYLTSLDVVTGLIIIVSMLLCVIVPYLTVPLVSRSIVTYWRSYATLNAQYIDAVQGMSTLMAFKASRAKGRELAENAQGFYVQAIRNTTFSLIDSGLMMLLTSVASAITVAIAAYRAESGIFPVMAISTFLFLAAECARPMSELNGHWHNSFLGLSVAEELFEIVDEELKITEKEHADTVSLDGPLPAVQFQDVTFAYNEEAKPALAGINLEIKGGQTIAVVGKSGSGKSTMVNLLFRFYEPTQGSILMNGINIKDYGISYLQSKIAVVFQDTYLFYGTVFENIRMSHTDAADDKVIAAAKAAGAHEFIMELPQGYATVVGERGVNLSGGERQRLAIARAILKDAPLLILDEATSSVDARNEALIQNTLDSLTKGRTTIIIAHRLSTVQNADKIVVLDHGELAEAGTHEELLLKGGIYADLVRAQRGDENNA

SEQ ID NO: 48704 - protein, 496 aa, Zea mays
ITMDPTKFRPSSSHDTTVTTTNAGAPVWNDNEALTVGPRGPILLEDYHLIEKVAHFARERIPERVVHARGASAKGFFECTHDVTSLTCADFLRAPGVRTPVIVRFSTVIHERGSPETIRDPRGFAVKFYTREGNWDLLGNNFPVFFIRDGIKFPDVIHAFKPNPRSHVQEYWRVFDFLSHLPESLHTFFFLFDDVGVPSDYRHMEGFGVNTYTFVSAAGKAQYVKFHWKPTCGVRCILTDEEAALVGGRNHSHATQDLYDSIAAGSFPEWTLYVQVMEPDTEEQYDFDPLDDTKTWPEDLLPLRPVGRLVLDRNVDNFFNENEQLAFGPGLVVPGIYYSDDKMLQCRVFAYADTQRYRLGPNYLMLPVNAPRCAHHNNHYDGAMNFMHRDEEVDYYPSRHAPLRQAAPPTPLPPRPVAGRREKATIRKPNDFKQPGERYRSWDADRQDRFVKRFADSLGHPKVSQELRSIWIDLLAKCDASLGMKIATRLNMKPNM

SEQ ID NO: 48705 - protein, 402 aa, Bacteroides thetaiotaomicron VPI-5482
MEKNIFKLDNEQLKAIVCSFRDKTEEGLKTENAEIQCIPTFIAPKTTHIKGKSLVLDLGGTNYRVAIVDFDKATPTVHPNNGWKKDMSIMKSVGYTREELFKELADMIIGIKREEEMPIGYCFSYPAESVPGGDAKLLRWTKGVDIKEMVGEFIGKPLLDYLNERNKIKFTGIKVVNDTIASLFAGLTDNSYDAYIGLIVGTGTNMATFIPADKIEKLDQSCNAHGLIPVNLESGNFHPPFLTAVDDTVDAISGNPGKQRFEKAVSGMYLGDILKTAFPLEEFEEKFDAQKLTSIMNYPDIYKDVYVQVAQWIYGRSAQLVAASLTGLIMLLKSYNKDIRKVCLVAEGSLFWSENRKDKNYNILVMEKLRELLQLFGLEDIEVDIKSMNNANLIGTGIAALS

SEQ ID NO: 48706 - protein, 605 aa, Desulfitobacterium hafniense DCB-2
MPISFVPREGMRTMPNGESKHETTRIKNTLRLIASMKPYSLEMIATIVTTFLKHIGTIGSAGIVAYMAALAMEGRLLPEFRVLFSWLCVCIVLRAVMYYGEMWFGHDVAYRVLRDFRIKLYDKMETISPAFVLKKRSGQIGATLMSDVEILEWFLAHTFGSFLVAVAITIVLLVLLAKIHILLSLLMMIFSILTIWTPFLLQKKADEQGRQVREKAAEANAVTIEGIQGLRELLTLNYLERYKGRNKESMQSLYDAQLTYGKRAGTESALMQIFVGVFTVVVMAVTAVFVSQNVLAFEVYPMVVMLSALLFSPIIEVCGVARNLGNVFAAANRIQTVFDTAPVVKDDGKDMDCSSLQHRVVFEHVSFRYDDDLDKVLDNVSFAIEPGQTVALVGPSGAGKSTCINLLLRYWDAEGGSIRIGGVDIRHMSLDNLRDLTAAVLQDVFLFNVSIRENIRLGRPEATDGEIEEAAKAAYAHDFIMELPNGYDTIAGERGFCLSGGQRQRIAIARAVLKNPPILVLDEAVSSLDSENEKFIQQALHDKLGDRTTVVVAHRLSTIMAADKLVVLDKGRVVQVGHHSELIAQEGFYKDLVANQVDKSGLLKS

SEQ ID NO: 48707 - protein, 351 aa, Novosphingobium aromaticivorans DSM 12444
MTNTRPNFVRNCWYVAGWDYEFTAGKPHPRTFLAEPVVFYRKGDGTLVAMADRCVHRLAPLSLGRLEGDDIRCMYHGMRFTADGKCVEIPGQDMIPSSACIQTYPVVEKGSWAWIWMGDPHLADAALLPDARGLDDPVWVLKSGQLDYAAPHELINDNLLDLSHLAYVHVASFGATPGWITQQPRTTQIERGVRVERWVESAPPLPPLPSLAAYESVDMWASYEFLIPGVFLMYTSLHPPGTAKGSNHAAPAGDVLFSNFTCQAVTPLTAGSSRYFFSWGPGSQFGGEEIAQQMIDVAMAAFLEDKLIIEAQARIIAMSPGEKIMPNAADRTVTIFQRMMERMKHPASTSS

SEQ ID NO: 48708 - protein, 356 aa, Novosphingobium aromaticivorans DSM 12444
MNAPTHTNTRYLENAWYVAALSSEVQGQALFHRKILDISVMIYRLSDGSPTALRDRCPHRFAPLHMGKREGDEISCFYHALRFNSVGTCTHNPHGNGNIPDGANVRAFPLLERHGFIWIWMGEQTADPDLLPDFSPLEDSGPNAVGYTYMHMDANFELIVDNVMDLSHIDHVHGEIISTRGKLSPKIPKIRSTSRSISSRWEWEQQPAMLILAPFLPAPDAEARQYFDITWTPPANIQLSVGAVQGELSFDEAVMQYDLHTATPETQFTTHYFFATRRNHDTDNAEYNAMKIKAMHDTFEAEDGPIITGVQREMGDTDFFDLNPVLMSNDVGPVRVRKLLRKLIEEERADDYHKSE

SEQ ID NO: 48709 - protein, 183 aa, Triticum aestivum
  misc_feature (53)..(53): Xaa can be any naturally occurring amino acid
  misc_feature (60)..(60): Xaa can be any naturally occurring amino acid
  misc_feature (97)..(97): Xaa can be any naturally occurring amino acid
  misc_feature (110)..(110): Xaa can be any naturally occurring amino acid
  misc_feature (115)..(115): Xaa can be any naturally occurring amino acid
  misc_feature (126)..(127): Xaa can be any naturally occurring amino acid
  misc_feature (130)..(130): Xaa can be any naturally occurring amino acid
  misc_feature (132)..(132): Xaa can be any naturally occurring amino acid
  misc_feature (137)..(139): Xaa can be any naturally occurring amino acid
  misc_feature (141)..(141): Xaa can be any naturally occurring amino acid
  misc_feature (146)..(147): Xaa can be any naturally occurring amino acid
  misc_feature (153)..(153): Xaa can be any naturally occurring amino acid
  misc_feature (157)..(158): Xaa can be any naturally occurring amino acid
  misc_feature (161)..(161): Xaa can be any naturally occurring amino acid
  unsure (1)..(183): unsure at all Xaa locations
LATLREMYDEWPFFRVTIDLLEMVFAKGDPGIAALYDKLLVPEDLWPFGEQLXANYAETXSLLLKVAGHEDLLESDPYLRQRLLLRDSYITALNVCXAYTLNRIRDGEFXPATRXPLSKEFIDETXXEPXWXLNPNXXXYXPGAGXXTLILNXKGIXXGKXKRASEFLLGWKSWVKLTSFFFF

SEQ ID NO: 48710 - protein, 286 aa, Arabidopsis thaliana
MTKEVVGDKRSFSGKDYQDPPPEPLFDATELGKWSFYRALIAEFIATLLFLYVTIMTVIGYKSQTDPALNPDQCTGVGVLGIAWAFGGMIFILVYCTAGISGGHINPAVTFGLLLARKVTLVRAVMYMVAQCLGAICGVALVKAFQSAYFTRYGGGANGLSDGYSIGTGVAAEIIGTFVLVYTVFSATDPKRSARDSHVPVLAPLPIGFAVFIVHLATIPITGTGINPARSLGAAIIYNKDKAWDHHWIFWVGPFAGAAIAAFYHQFVLRAGAIKALGSFRSQPHV

SEQ ID NO: 48711 - protein, 348 aa, Silicibacter pomeroyi DSS-3
MPEDLNHEFLAAMPLAALLVDQAERIIAANTEAQTLLGQQIVGRHYATILRQPQVIEAIERALRDKGSSRSRHLANDGAQDTTFEVTCRYVNGIGAVAGGAVLVSFIDVTPMEQAGQMRRDFVANVSHELRTPLTAIMGFIETLRGPARNDPAAQDRFLGIMEQEAGRMNRLVGDLLSLNRVESEERVRPRGAVDLSGQIASTLNSLRPLAAEAGVELYFTGPETPVIVPGDEDQIRQVLTNLIENAIKYGGSGGEVRVTLSEAERDPAVRGPAARIQVSDKGAGIDAVHLPRLTERFYRADNHRSRQKGGTGLGLAIVKHIVTRHRGRMRVESTLGSGTTFTVILPK

SEQ ID NO: 48712 - protein, 219 aa, Pseudomonas fluorescens Pf-5
MQNIIDGFLKFQREAFPQRSELFKQLASTQNPGTLFVTCSDSRVVPELLTQQEPGDLFVIRNAGNIVPSYGPEPGGVSATVEYAVAVLGVSDIVICGHSDCGAMTAISTCKCLDHLPAVANWLRHAESAKVINAARQHASPAEHLDALVRDNVIAQLANLKTHPSVALALEQGRLNLHGWVYDIESGAIVALDGNTQRFVSLAEYPHTCALASQASSAA

SEQ ID NO: 48713 - protein, 445 aa, Borrelia garinii PBi
MVRMEDIISLAKRKGFVFQSSEVYGGLSGAWDYGPLGVELKKNIKSEWWKSMVYLHENIVGLDSAIFMRPEIWRASGHIDGFSDSMVDCKDCKSRFRADFIDLSKNCPNCKVGNNFTSPRSFNLMFKTHIGVVEDSSSEIYLRPETAQGIFVNFRNVLDSSRLKIPFGIAQVGKAFRNEIVTKNFIFRTCEFEQMEMQFFVHPKQIDEWFCYWQQNRMNFFIETLKIRPDKLRFKAHDSTQLAHYAKSAFDIEYEFPFGFQEVEGIHNRGNYDLTQHSKFSNNPKIFEYHDLLTKERYVPHVIETSAGLTRSVLMTLCNAYSEEELSDGDKRIVLRLHPKLAPYKIAIFPLVKKVELVEIARRIYIELCDDFHIFYDDSGTIGKRYRRQDEIGTPYCVTVDYSTIEDETVTVRERNNMTQKRIFINDLYSYIKTEILNYKEDFNK

SEQ ID NO: 48714 - protein, 5359 aa, Saccharopolyspora erythraea
MANEEKLRDYLKRALAEAQNAQRRLREVEDAHREPIAIVGMACRYPGGVTSPEDLWRLLAAGTDAVSAFPADRGWDVRDLPVREGGFLHDAAEFDPSVFGISPREALAMDPQQRLLLEVSWEAFERAGVDPLSVRGSRTGVFAGVMYHDYATLMDAVPSELEGFIGNGNAASIATGRIAYTFGLEGPAVTVDTACSSSLVSLHLAVQALRAGECSMALAGGVTVMATPGTFVEFARQGGLASDGRCKAFSDGADGTGWSEGAGMLLVERLSDARRLGHPVLAVVRGSAVNQDGASNGLTAPNGPSQQRVILQALTNARLSTQDVDVVEAHGTGTALGDPIEAQALLSAYGRDRSVPLLLGSVKSNLGHTQAAAGVAGVMKMVLALRHGVVPKTLHVAEPSSHVDWSSGAVSLARDLVAWPEVDRPRRAAVSSFGISGTNAHVVLEQGDPSHEPRGPRNFGPTPFLLSARSEIALTAQAERLAEHVTGDPTADLVDVAYSLATSRAALDHRAVVVAEGRDELLSGLSGTGLVRGRTTPGKCGFVFGGQGGQRWGMGAGLCARFPVFAEAFGAVCDELEVPVGEALSGDDLGLIDQTLYAQCGIFALEVGLFRLLESWGVAPDFVLGHSVGELGAAHVAGVLSLGDACKLVAARARLMQALEPGVMLAVAASEDEVVSLLSDRVAVAAVNGPLSVVVSGDESEIALIEERFRGRRVRRLRTSHAFHSPLMDPMLEEFRETVASVSLCAPRIPFVSTVTGALVGDEVTTPDYWVRNVRDTVRFLDGMRSLGDEGVTTVLELGPDAVLGSAAQECVPGIAAASALRAGREESRSLLAATAQLHVGGVAVDWKSVFAEHETRRVDLPTYPFQRQRYWLQSRQAVGALRSAGISAAEHPLLDAAISMAGSDRLLLTGRLSVQSQPWLADHVVAGKVLFPGTGFVELAIRAGDRVGCTRIDELTLHAPLPLSETAAMCLQIEVSAPDESGSRGIEVHSRPDDAQDDDPWTLHASGALSPSTPEAPAAAREWPPSAAEALSVQALYDELEALGLEYGPAFRGLRAAWRRGAEIFAEIELPEPGIAAADSFGIHPALLDATLHALALRADAEQARLPFAWGGVRLHATGASYLRVRLAPADGDAVALELADADGAPVASVDSLVLRPLTAATPDASRPHDSLFHLEWEELSLTGEPAAGHWAVLAAPDSLPDLGDLRVDSFADIEEPAAEAVVPDVVVGVAPAGASVRETTRWGLELVQRFVAEERYAGTRLLVVTSGAVAPDVREPGHAALWGLLRSAQAEHLGRIVVADLDDSAASTRALPSVLVAGEAQFAVRAGQVLVPRLARRAVLPAPSGPWRLDVTAEGTLENLALVPAPEAQVPLEPGQVRIAVRAAGVNFRDVLIGLGMYPGEVQLGGEGAGVVTEVAPDVTGLAPGDRVTGLFGGSFGPVAIADHRTVARIPRDWSYEQAAAVPIAYLTAYLGLVELGALRAGESVLVHSAAGGVGTAAVQLARHLGAHVFGTASPGKWDAVRAQGVAEENLASSRTLDFERHFLAATGGRGVDVVLNSLAGEHVDASLRLLPRGGRFLEMGKTDIRGADEVAAAHPGVAYEAFDLMRVPPERVRVMLAEVLELFERGALSLPPITSWPVSRAPEAFRHLSQARHTGKVVLTVPAALDPGGTVLITGGTGTLGSLVARHLVTVHGVRHLVLTSRKGRDAEGARRLEAELAELGIDVTIAACDAADRDAVAALISAIPEAHPLTAVVHTAGVTDDALLESMTPESVDRVLRPKVDAAWNLHELTHDHDLVAFVLFSSLAGTLAGPGQANYAAANAALDALAHQRRSEGLPALSLAWGLWEQSSGITGGLTAADLARMERSGVAALSAEDGLRLFDSGLALDDAVLLPAKLSTRAGETTPDLLRGLVRAPSRRAAKARTADGETSLRDRLTGMTAAEQEQALLALVRAEAAAVLGYGDAEAVDAVREFRDLGFDSLSAVELRNRLAPRLGIRLPATLVFDYPTPRVLVEHLRREVLGTAPRTPVSAAVEVAEDEPIAIIGMACRFPPDVSTPEELWRFLVAGGDGITAFPTDRGWDLDSLFDPDPDRPGKSYVREGGFLRGAGDFDADFFGINPRESLATDPQQRLLLETSWEAFERAGIDPGQVRGSQTGVFVGVMRQDYGPMLHQTAEGVEGYRLTGSAASVASGRIAYSFGLEGPAMTVDTACSSSLVSLHLAAQALRRGECAMALAGGATVMATPGMFVEFSRQRGLAADGRCKAFSASADGTGWSEGVGMLLVERLSDAQRLGHRVLAVVRGSAVNQDGASNGLTAPNGPSQQRVIRQALAAAKLSTEDVDVVEAHGTGTALGDPIEAQALLATYGQDRPAERPLLLGSIKSNIGHTQAASGVAGIIKVVLALREGLLPRTLHVDEPSPHVDWSSGTVALLTGTTPWPESRRPRRAAVSSFGVSGTNAHVIVEQAPEPTARTVTAEPRALPWIVASRTESGLRDQANRLRAHAETHPEQDTASIGYSLVAGRAVHAHRAAVLGADRADLLRGLDALSAGAEAANLVIGAATGPRKSAFLFPGQGSQRLGMGLQLLAEFDGFASAFETVCDELDRHLRRPVREVLHAEAGSPAAELLDQTEYTQAALFAVEVALFRQLENWGLCPDFVAGHSIGELTAAHVAGALSLDAAAALVAARGRLMQQAPAGGAMVAVQAGEDEMSAMLAGLEDGVGIAAVNGPNSVVLSGDTDVVERIAGQWREQGRRIRRLRVSHAAHSPHMEGILEEFRSAVSKVRFHPPEIPIVSTATGEVLSAEEIAAPEHWVRHLRGAVRFLPAIRRLAEAGVTAFAEVGPGGVLSAMAQDCLPEAAENAVIVPLSPGDRAEGPSLLEAVARLHVHGVEPDWAAVVAGREPARVELPTYAFQRRRFWLPSTSADASSTGLDALGHPLLGAAVPMADEDGFLFTGRLSVASHPWLGDHVVSGRVLLPGTAFVDLALRAGAEVGCGRLAELTIDAPLMLPEHGKVALQLVVGPADESGRRALDCYSRPDSAFAVPWTRHASGTIAPVADVAGEADDWPVEDGEELDLDSLYDVFAERGFEYGPAFRGLRSAKRRGTTVFAEVAASESERTPAGGFALNPALLDAALHVLASGAEGDQPRLPFSWSGVTLHEPGATALRVRIDLIGDGNASLAVHDETGAPVASVESLVLRPVPESLLTSSGDADALFAVEWATQSAPGAVPGTVGVLGDGDGIAEELRAAGAEVVVYPDVESVAAAELPEVVLAPMQSDASDAASGAAQLAHRALALLQAWLAGDRFNATRLVLVTRGAVASRDSADVPEMAAASVWGLVRSAQSENPGRFGLLDVDDAPGTALLNAVSSGEPQVALRGDVVMTPRLVRAQRAEPDGLPRWDDDGTVLITGGLGALGAEVARHLVAERGVRHLVLAGRRGRATDGADALEEELIGLGATTVTIAACDVADREALAALLDAIPGERPLTGVVHAAGILDDGVVESLTTARVDRVLRSKADAAWNLHELTREAPLTAFVLFSSAAGMLGSPGQGNYAAANAFLDALALHRRAEGLPAQSLAWGLWAGGMSGELDEGARKRLGRLGMSALEPAEGMRLFDTAAATGRALLAPVRLDTAALREQARTGELPPLLRGLVKVAPRPDRATTSTLAARLAGLGEAEQTRLLVDTVRAAVAASLGHDRPEAIGAQRAFTDLGFDSLTSVELRNRLTRTAGVRLAATLAFDHPTVAAVAEHLRQRLTDAAPERARPVATTAAADTEPIAIVGIGCRYPGGVRSPEDLWRLVANGEDGISAFPGDRGWDVEGLFDPDPDRAGKSYVKEGGFLHDAAGFDAGFFGISPREALAMDPQQRLLLETSWEAFERAGIDPAGLRHSQTGVFVGVMYHDYATRLPATPASVEGYLGAGTAGSVASGRLSYTYGLEGPAVTVDTACSSSLVALHLAVRALRQGECSLALAGGVTVMATPGTFVEFSRQRGLAPDGRCKSFASAADGTAWSEGVGLLVVERLSDARRNGHPVLAVVRGSAVNQDGASNGLTAPNGPSQERVIRQALTDARLSTADVDAVEAHGTGTALGDPIEAQALLATYGQDRPAGRPLWLGSIKSNIGHTQAAAGVAGVVKMVMAMRAGVLPRTLHVDEPSTAVDWSAGDVSLLTEPVDWAGDDRPLRAAVSSFGISGTNAHVLLEQAPAEKTAEWPEKPNAAVPWPLSARSAPALREQAARLRTWLATTDADPADIGRALSERRATMEHRAVLVGVDREEFTAQLAELADGRGDAGTADAVDRTVFVFPGQGAQWRGMALDLLAESEVFAARLAECEAAMAEFVDWSVLGVLRGDVGAASLDRVDVVQPVSFAVMVSLAALWESYGVRPGAVVGHSQGEIAAACVAGVLSLRDAARVVCIRSRLIAEVLAGRGGMASIALSVDETDEMVRRYDGRVTVAATNGSSSTVVSGDVDALEELLTECSDRGVRSRRVPVDYASHSVHVEALAERLPAALGGIAPRSAEVPFFSTVSSEWLDGEELDAAYWYRNLREPVRFEQAVRCVAEDGHGLFVEVSPHPVLVPAIDETAEDARAVGSLRRDEGGLDRFLRSVGEAHVHGADVDWSPAFTGAERWVDLPTYAFQHERFWLEAAGGDDGARDSGDAGFWNAVEAGDPKALTDLLGLDGEQSLASALPALSSWRRAKRDRSVLDSWRYRVAWRPVPEPPAAGLRGTWFVVAPSDPAVKTWIDQCARSLEQRGAQVARIVVDAAEADATSLSAELAAEGERGGILSLLALTEGTHPLHPSAPLGLTANLALVKAVADAAAGTPLWLLTSGAVSTGDADPVRDLGQAAVWGLARTVALELPRQWGGVVDLPADAGEHATDRLCAVLAAAGAEDQVAIREPGVMGRRLVRAPLAETAVTREWRTSGTALVTDGTGPMGARVAAWLVEQGAEHLVLTVDDDTDADHAALEAELGVPVTVAACDVADRDALASVLDGIPADRPLTAVVHTAGVLGAGALLEAGPAEFAATARAKVRGALNLHELTLDTDLAAFVLFSSVAGVWGGSEQGAYGAANAVLDALADRRRALGRPVTSIAWGPWADAGMGAEDEAAEEARREQLRRRGVLPMPSERTLGALRDALLHGDTAVTVVDVDWERFAPAFNAARPSALLAELPEVRRVLDAANAEAAEGGQEFAALLAGLPQDERELRLVELVRREVAAVLGHPSAEALPAGRAFTELGFDSLAAVGLRNRLGAATGAKLTASAVFDHPTPERLAGHLLRQLAPAASAAGSLDEELDRLRGTVSALDDEGERRRVLARLQALVTELAPAPATGEVSAAERIGSASDEEIFRFIDTELS

SEQ ID NO: 48715 - protein, 565 aa, Saccharomyces cerevisiae
MKRTVISSSNAYASKRSRLDIEHDFEQYHSLNKKYYPRPITRTGANQFNNKSRAKPMEIVEKLQKKQKTSFENVSTVMHWFRNDLRLYDNVGLYKSVALFQQLRQKNAKAKLYAVYVINEDDWRAHMDSGWKLMFIMGALKNLQQSLAELHIPLLLWEFHTPKSTLSNSKEFVEFFKEKCMNVSSGTGTIITANIEYQTDELYRDIRLLENEDHRLQLKYYHDSCIVAPGLITTDRGTNYSVFTPWYKKWVLYVNNYKKSTSEICHLHIIEPLKYNETFELKPFQYSLPDEFLQYIPKSKWCLPDVSEEAALSRLKDFLGTKSSKYNNEKDMLYLGGTSGLSVYITTGRISTRLIVNQAFQSCNGQIMSKALKDNSSTQNFIKEVAWRDFYRHCMCNWPYTSMGMPYRLDTLDIKWENNPVAFEKWCTGNTGIPIVDAIMRKLLYTGYINNRSRMITASFLSKNLLIDWRWGERWFMKHLIDGDSSSNVGGWGFCSSTGIDAQPYFRVFNMDIQAKKYDPQMIFVKQWVPELISSENKRPENYPKPLVDLKHSRERALKVYKDAM

SEQ ID NO: 48716 - protein, 153 aa, Triticum aestivum
  misc_feature (94)..(94): Xaa can be any naturally occurring amino acid
  misc_feature (106)..(106): Xaa can be any naturally occurring amino acid
  misc_feature (112)..(112): Xaa can be any naturally occurring amino acid
  misc_feature (140)..(141): Xaa can be any naturally occurring amino acid
  unsure (1)..(153): unsure at all Xaa locations
TASTCICERPCRTSWPPVKQSASIQSILCIPVMGGVLELGTTDTVPEAPDLVSRATAAFWEPQCPTYSEEPSSSPSGANETGEVAADDGTFAFXELDHNNGMDDIXAMTAAXGGHGQGGRLRLKRTEPCQTTNLGHITRXXRILHLCDKWPAR

SEQ ID NO: 48717 - protein, 302 aa, Arabidopsis thaliana
MATVANFLAKPISTVVPRPSSAVASTSSFVFFNHKTNPLFRRKNLPKRLFSAVKIKAGAASPGKVGTPPANDEKVQKIHSGEEFDVALKNAKSKLVVAEFATSKSDQSNKIYPFMVELSRTCNDVVFLLVMGDESDKTRELCRREKIEKVPHFSFYKSMEKIHEEEGIEPDQLMGDVLYYGDNHSAVVQLHGRPDVEKLIDENRTGGKLIVLDVGLKHCGPCVKVYPTVLKLSRSMSETVVFARMNGDENDSCMEFLKDMNVIEVPTFLFIRDGEIRGRYVGSGKGELIGEILRYSGVRVTY

SEQ ID NO: 48718 - protein, 599 aa, Oryza sativa (japonica cultivar-group)
MGGCHAKPLTHEEADGACSPPRERPQPPATPPRGSGAATPAWKTKPWASPFFGFSTPSPSPAHHLFSASSPRRSPAPSAPTTPARRLLRLPFPPPSPAKHIRQALARRHGPPRPPIPEEGGDVEGEGGRGLDKGFGFNKGFAAKYDMGDEVGRGHFGYTCAAKIKKGARKGDAVAVKVIPKAKMTTSIAIEDVRREVKILKALAGHKNLVQFYDAYEDNDNVYIVMELCEGGELLDRILSRGGKYSEDDAKAVLVQILNVVSFCHIQGVVHRDLKPENFLFTSKDENSQLKAIDFGLSDFVKPDERLNDIVGSAYYVAPEVLHRCYSTEADVWSIGVIAYILLCGSRPFWARTESGIFRSVLKADPSYNEAPWPSLTLEAMDFVKRLLCKDPRRRMTAAQALSHPWIRNYNDIKLPLDILIFRLIKAYIRSSSLRKAALRALSKTLTVDELFYLKGQFSLLEPDRNGCITLDNIRMALTREATYAMKESRVQEILVSLSALQYRRMDFQEFCAAAVSVHQLEALDRWEQHARSAYDFFEKDGNRAIVIDELASELGLSPSVPLHVVLQDWIRHTDGKLSFLGFVKLLHGMSSRSLSKMR

SEQ ID NO: 48719 - protein, 66 aa, Taraxacum officinale
NDGQAKITPRAYDESYAEDEDEHGETLCGSCGGNYSGDEFWIGCDICERWYHGKCVKITPAKAESI

SEQ ID NO: 48720 - protein, 649 aa, Triticum aestivum
  misc_feature (637)..(637): Xaa can be any naturally occurring amino acid
  unsure (1)..(649): unsure at all Xaa locations
MNSSMDEINLLRQHQRHQQHHLSVRGIGEEIDLEIDQCEDPTFSGAALEGVTSHHPQDPVVPADDHKSFLIPCSQPGAVDGQPQPTPPQAEERAGMLRLSAHTKKKKKVVKKWRDEWADTYKWAYVAVHDNTSRIFCTVCNARGRKHRRNPYGNEGSRNMQMSALEEHNNSLLHREALRLQSASKEKVQTPEKERLVYVKALSKTAASILESLFKKDPYEAEFIQSIQEVVHSIEPVLVKNSQYVQILERLLEPERCFIFRVPWVDDRGEAHVNRGFRVQFSQALGPCRGGLRFHPSMNLSVAKFLAFEQTLKNALSLYKLGGAAGGSDFDPKGKSEIEVMRFCQSFMDELYRYLGPDQDFPAEDVGVGPREMGFLFGQYRRLSGHFQGNFTGPKIFWSGSSFRTEATGYGLVFFARVVLADMNKELKGLRCAISGSGKIAMHVLEKLLSCEAIPVTVSDSEGYLFDGDGFDYVKYTLIRNIKAQQRSLKEYLKTFPRAKYINDAKPWGEQCDIAFPCASQNEIDQGEALSIISSGCRVLIECSNMPCTGQAVDILRKAKVHVAPAKATAAGGVAVGELELNPEFSLMQWSVEDFENKIQEAVKQTYDRSMKAAQEYGILKENPESLVHGANISAFXNIAQAMTDQGCV

SEQ ID NO: 48721 - protein, 467 aa, Arabidopsis thaliana
MLEDRSPDSCLSTRVFSSSRLSESNWSNSYMYPEDDDKLLGNGKRALEVVGEVRQTKSLKLMGFSIIYDSDSSDYSLSGGEEQADAAIGDGSSSRQEQEQQSDFNDNGGDSSDSHSLINEIGRDNSIDCLIRCSRSDYGSIASLNRNFRSLVKSGEIYRLRRQNGFVEHWVYFSCQLLEWVAFDPVERRWMQLPTMPSSVTFMCADKESLAVGTDLLVLGKDDFSSHVIYRYSLLTNSWSSGMKMNSPRCLFGSASLGEIAIFAGGCDSQGKILDFAEMYNSELQTWITLPRMNKPRKMCSGVFMDGKFYVIGGIGGADSKGLTCGEEYDLETKKWTQIPDLSPPRSRADQADMSPAAEAPPLVAVVNNQLYAADHADMEVRKYDKENKKWLTIGRLPERAGSVNGWGLAFRACGERLIVIGGPKCSGGGFIELNSWIPSDGGPPQWTLLDRKHSPTFVYNCAVMGC

SEQ ID NO: 48722 - protein, 474 aa, Yersinia pseudotuberculosis IP 32953
MGKMVDQSKIVAEPLQEPEEHLQRSLSNRHIQLIAIGGAIGTGLFMGSGKTISLAGPSIIFVYMIIGFMLFFVMRAMGELLLSNLNYKSFSDFSADLLGPWAGFFTGWTYWFCWVITGIADVVAITAYAQFWFPDFSQWVASLLVVLLLLSLNLATVKMFGEMEFWFAMIKIVAIVALIFAGLTMVLVSYQSPSGTTASFTHLWSDGGMFPKGISGFFAGFQIAVFAFVGIELVGTTAAETKDPEVVLPRAINSIPIRIIMFYVFSLIMIMSVTPWSSVVADKSPFVELFVLVGLPAAASVINFVVLTSAASSANSGVFSTSRMLFGLAKEGDAPKQFGKLSRRSVPATGLTFSCICLLGGVVLIYLIPNVMTVFTLVTTVSAILFMFVWTIILCSYLVYRKRRPALHKKSIYKMPAGIFMSWVCMAFFAFVLVLLTLESDTRQALIVTPLWFVILTASYIFLKKRRARLYNSK

SEQ ID NO: 48723 - protein, 718 aa, Prosthecochloris aestuarii DSM 271
MVSANARSAEQFWLVRNSSNSNAKVHMDNQQIILYAVPLSGVLALLYALFKASWVSKQDAGTEQMVVIAGHIADGAVAFLKREYKILAIFVLSVAVLLGFVNSGRPDSSPLISLSFIIGAICSGLAGYFGMKVATKANVRTTNAARTGLSSALNVAFSGGLVMGLSVVGLGVLGLSSLFIIYSNQFSDIGQVINVISGFSLGASSIALFARVGGGIYTKAADVGADLAGKVYEGIPEDDPRNPATIADNVGDNVGDVAGMGADLFESYVGAIIGTMVLGAAFLPVFNEMGINPIAGVILPLLLAAVGIVVSIFGSFFVKVKEGGNPQTGLNTGEFGATFIMAVLSYFIISYTLPASWIVGDTTYTALNVFFAVLTGLATGVLIGLITEYYCSTHNKPVVNIAYQSVTGAATNIIAGLGTGMMSTGLPIIVLSAAIILSFNFAGLYGIAIAAFGMLSVTGIQLAVDAYGPISDNAGGIAEMAGLPKEVRERTDKLDAVGNTTAAIGKGFAIGSAALTALALFAAFRQQAGITSIDISEPVIMAGLLLGAMLPFVFSALAMDAVGRAARDMITEVGRQFNEIPGLREGTAPAEFAHCVDISTKAALREMILPGLLGILVPVVVGFTSKDMLGGLLAGVTSSGVLMAIFQSNAGGAWDNAKKRIEGGIEFDGVLYGKGTEAHKAAVVGDTVGDPFKDTSGPSLNILMKLIAVVALVIAPLI

SEQ ID NO: 48724 - protein, 106 aa, Oryza sativa
MAELVGPRVYSCCHCRNHVCLHDDIISKAFQGRNGRAFLFSHAMNISMGPKEDRQLMTGLHTVADIYCRDCREVLGWKYERAFEESQKYKEGKFIFEKAKIVKENW

SEQ ID NO: 48725 - protein, 344 aa, Bradyrhizobium japonicum USDA 110
MSVRKMCCRGLYWPLADSVFRRVEPMHSHSIEQWTHDHAFLGEKHDENERRTWLVVVLTLVMMVGEIVAGSLFGSMALLADGWHMGTHAAALGIAAFAYRFARRHLGNAHFTFGTGKFGDLAAFSSAIILGLIAVEIAYESVLRLFTPVPIVYGEAIAVAALGLCVNLASAWLLRGSHDHHHHGHDHGHAHDEHDDHDHHHHRHHDNNLRAAYVHVMADAATSLLAIGALAVAMYSGWVWADPAVGLIGSVVIASWAFGLIKSSGAVLLDVRADEKLERVIRARMEVGEDRVTDLHLWQVGPGHCAVLVSVVSDKPKQPAVYKKRLAGLKGLSHVTVEVETCPH

SEQ ID NO: 48726 - protein, 80 aa, Petunia x hybrida
MSCCGGNCGCGSGCKCGNGCGGCKMYPDFSYTESTTTETLILGVGPEKTSFGSMEMGESPAENGCKCGSDCKCDPCTCSK

SEQ ID NO: 48727 - protein, 400 aa, Polaromonas sp. JS666
MEALKQGSDALFILLGGIMVLAMHAGFAFLELGTVRKKNQVNALVKILVDFSVSTVVYFVVGYAVAYGTHFFVGAEQLAAKNGYELVKFFFLLTFAAAIPAIISGGIAERARFYPQLIATAVIVGLVYPFFEGIAWNQHFGVQAWIKSLTGAEFHDFAGSIVVHAVGGWLALPAVILLGARSNRYRKDGAVSAHPPSNIPFLALGAWILTVGWFGFNVMSAQTIDKISGLVAVNSLMAMVGGTLAALVFGKNDPGFVHNGPLAGLVAVCAGSDLMHPLGALVVGGVAGGVFVVMFTLTQNKWKIDDVLGVWPLHGLCGAWGGIAAGIFGSRALGGLGGVSLGAQLIGSAMGVAWALLAGFVVYGTLKATLGLRLSQEEEFEGADLSIHRIGATPDREVNW

SEQ ID NO: 48728 - protein, 596 aa, Xylella fastidiosa Ann-1
MSAYTITEHKYDMVVVGAGGAGLRATFGLAQKGLQTVCLTKVFPTRSHTVAAQGGISAALGNMGEDDWRYHFYDTIKGSDWLGDQDAIEYMCREAIPAVIELEHYGVPFSRTAQGKIYQRPFGGMTTRYGEGPRAERTCAAADRTGHAMLHTLYQQALAHDARFMIEYFALDLIFDNEGLCRGVLALDMAEGSLHLFRAHGVVLATGGYGRTYFSATSAHTCTGDGGGLVMRAGLPMQDMEFVQFHPTGIYGAGCLITEGVRGEGGILRNSNGERFMERYAPHYKDLASRDVVSRSMIIEIREGRGVGEHKDHILLDLTHLGPSMIQEKLPGIAESARIFAGVDVTKQPIPVLPTVHYNMGGIPTNYHGEVVRKVGNDPDAVVPGLYAVGEAACVSVHGANRLGSNSLLDLVVFGRAVANRCAETIKPNQPHKVLPSDSCDKALGLLDKLRHADGSTPTAVIRDRMQRTMQSDASVFRTSKTLQEGCEKMNEIFALFDDVKVSDRSLVWNSDLIETYELHNLLLNALATINSAEQRKESRGAHAHEDYPDRDDENWLKHTLVSVDEKGTCSFDYRPVHMYTLSKDVDVIPPKPRVY

SEQ ID NO: 48729 - protein, 148 aa, Pisum sativum
VVYKARDRVTNETIALKKIRLEQEDEGVPSTAIREISLLKEMQHRNIVRLQDVVHSEKRLYLVFEYLDLDLKKHMDSSPEFVKDPRQVKMFLYQMLCGIAYCHSHRVLHRDLKPQNLLIDRRTNCVKLADFGLARAFGIPVRTFTHEV

SEQ ID NO: 48730 - protein, 320 aa, Saccharopolyspora erythraea
MKAVAIRTFGPPEGLAVIDLPAPTPAAGQVLIETEAIGVGGVDALIRSGALASYGFEEGHILGSEVAGTVTAVGDGVAASWVGRRVWAFTGVGGGYVESAIAPVEEVVPLPANISPADAVTLGNSGVVAHFGLAHAHFVPGESVLVRGAAGSIGITTVQLAARGGADAVAVTTSSAERGDRLRELGATHVLDRSGDGGEDAPAGYDVVIDIIAGADMPAFFDKLNPNGRMVAVGIVGGPPPAGFGMRMFEAFRKSMSFATFSADTVPEPGRRAVRTEQFAAAGRGELHTVVHELLPLEQAVLAHQKMDTGEVFGRIVLTP

SEQ ID NO: 48731 - protein, 396 aa, Shewanella oneidensis MR-1
MFNSLIAMPADPILGLLTQYREDTHPQKVDLGVGVYKDPAGNTPILNCVKKAEKFRLETETTKVYIGPTGSPQFNTLMTELAFGSDHSAIIANRIRTVSTPGGTGALRVAGDFIKRCNPNAVLWVSDPTWANHTGLFEAAGITVKTYPYYDYDSKSLKFDEMLAALSQVSPDDVVLLHACCHNPSGMDLTTDQWDKVVTLTKEQGFTPLIDMAYQGFGDGVDIDAYGVRKMAAAVDNMILCSSCSKNFGLYRERIGSCSVVAKDANTANIAQSVLLYVVRCLYSMPPAHGAAIVETILGSKELTQEWLDELKVMRDRINGNRAILVEKLKANGVARDFSFIARQKGMFSFLGVNPEQVARLQKEFSIYMVGSSRISIAGISEDNVDYLAQSIAKVL

SEQ ID NO: 48732 - protein, 170 aa, Zea mays
  misc_feature (142)..(142): Xaa can be any naturally occurring amino acid
  misc_feature (154)..(154): Xaa can be any naturally occurring amino acid
  unsure (1)..(170): unsure at all Xaa locations
YDKNLGRIEKWVLRKAFDDEEHPYLPQHILYRQKEQFSDGVGYNWIDGLKSFTEQQVTDEMMNSAAQMFPYNTPVNKEAYYYRIIFERLFPQDSARETVPWGPSIACSTPAAIEWVEQWKASNDPSGRFISSHDSAATDRTXTSWRWSTATGTXANGTVNGNDVAVAIAV

SEQ ID NO: 48733 - protein, 405 aa, Saccharopolyspora erythraea
MTGMGVVSPLGVGTEQFHANQQLGRSAVRRVTAYDPGDDPVRIAAEVDLPEQFQFTRRDQLRTDRCTQLAIVAARLGVEEAKLDLAASDTSRIGVVIGSGMGGVGTWERNCLALHESGVRAMRTKTVPMSMINDPSASIAIRYGTTGPCTTVTTACASGADALVAAAQMIRLGEADVVLAGGAEAPLSRSVLAGFARLGALSEDNDAPESACRPFSADRTGFVMGEGAAVLVLESAEHATARGAQVRARMAGYGRSADAYHVTMPHPEAAGARAAIVAALRDAGAQPSDVDFVNAHGTGTALNDHAEALAMRAVFGTGVERIPVTATKSLTGHSLGAAGAVEAVATVQAVSSGVIPPTANLRVPDPELGIDVVHGGPREARINLALSNSFAFGGHNVVLAFAPPL

SEQ ID NO: 48734 - protein, 481 aa, Zea mays
MCVVIFIGTNGQTYFITASLVTSIQNFPKSRGPTVGILKGFMGLTSAILTQVYTVMHTPDHAALIFMVAVGPSLVAIGLMFVIRPVGGHRQIRPSDKNSFMFIYTVCLLLASYLVGAMLIQDFLQPSYDVVVFLTVILFVLLISPIAIPVIVSFMPEKAQHLMEDALLSEPLTGEASSSRQKEDQPEVILSEVEEEKSKETDSLPPSERRKRIAELQAKLVEAAARGGVRIKRRPHRGDNFTLMQALVKADFWLIWLSLLLGSGSGLTVIDNLGQMSQAIGYKNAHIFVSLVSIWNFLGRVGGGYFSEIIVRERTYPRHIALAVAQIVMAAGHFLFAMAWPGTMYIASLLVGLGYGAHWAIVPAAVSELFGVKHFGAMYNFLILANPAGSLIFSELIVSNLYEHEAEKQASQHQMSALLSPRLLRDTGFLADDALKCEGPACFFFSSLIMSVFCAVAAGLSLLVVQRTRQVYPRLYSSVRT

SEQ ID NO: 48735 - protein, 343 aa, Vibrio vulnificus
MSISNTVTKVKDFDVNQMDDDFNDDIEINEKEDLTEEKVKLREEFDASNKSLDATQLYLGEIGFSPLLTAEEEVLYARRALRGDEAARKRMIESNLRLVVKISRRYSNRGLALLDLIEEGNLGLIRAVEKFDPERGFRFSTYATWWIRQTIERALMNQTRTIRLPIHVVKELNIYLRTARELSQKLDHEPTAEEIAAQLDIPVDDVSKMLRLNERISSVDTPIGGDGEKALLDIIPDANNSDPEVSTQDEDMRVSLIHWLEELNPKQKEVLARRFGLLGYEPSTLEEVGQEIGLTRERVRQIQVEGLRRLREVLIKQGLNMENLFDIVWIEFAFSNRKKAMES

SEQ ID NO: 48736 - protein, 394 aa, Arabidopsis thaliana
MASLDSHVLMKLGSLFLSTLFVSIVSSESQCRNFESIISFGDSIADTGNLLGLSDHNNLPMSAFPPYGETFFHHPTGRFSDGRLIIDFIAEFLGLPYVPPYFGSTNGNFEKGVNFAVASATALESSFLEEKGYHCPHNFSLGVQLKIFKQSLPNLCGLPSDCRDMIGNALILMGEIGANDYNFPFFQLRPLDEVKELVPLVISTISSAITELIGMGGRTFLVPGGFPLGCSVAFLTLHQTSNMEEYDPLTGCLKWLNKFGEYHSEQLQEELNRLRKLNPHVNIIYADYYNASLRLGREPSKYGFINRHLSACCGVGGPYNFNLSRSCGSVGVEACSDPSKYVAWDGLHMTEAAHKSMADGLVKGPYAIPPFDWSCLSSMIKKKEVVGNTIFFDE

SEQ ID NO: 48737 - protein, 838 aa, Saccharopolyspora erythraea
MPRPTATSRRLEKLVKFGFLAHPVNTGQRNYVRAAALLSSMADERTGRAPSGAARHTVPMPMFGTVVSATGHRCEGDLRYLPHTAEDLLRRATDAVDHVVAQVEDLRRAGAQLVGLGGATSIVGNRGLTTQRRVDVPLTSGNSLTTYSAHELLRTVIARLGRRPSDVEVGIVGFPGAIGLAMARLLLDDGCRLHLVHRKGRMRPEQLLDELPAAAHDRVTIGDDVAECLRRTRLIVAASSAGGLIDCDDLRPGSVVVDVALPRDVRRPVRERRDVLVLDGGLVSASDAVVLDGMELATSEQINGCLAETVVLALEERAESFSLGRELDPGRVREIGELARRHGFLPSAPSSWGRLVRLDRIDELPGWSAERPDPAESTRRRFRDNVNPPLAGFYAVHGMDRVFTRGSGSTLTTADGVEYLDFIGGYGSLNVGHNHPAVTAAVGQFLTAGEPTFVQYASIPHRTAELAERLCEIAPGGMRRAFFGNSGAEAVEAALKLARAATGRTRFVHAENSYHGKTFGALSVTGRDHYRDPFRPMVPDCVGVPFGDENALREAIAGAAAFIVEPVQGEGGVVLPPPGYLTAAQRICREAGAVFIVDEIQTGLGRTGAMFACEHEGVEPDVLCLAKSLSGGLVPIAATLSTAEVWDAAYGSSSGSLLHTSTFGGGNLASVAALATLDLIESEKLAARAEVMGRRLRDALTEACAPFEFVGEVRGIGLMNAIAFDARYDGAVRTAVEDMASRLPGDFRAIAELLPDPVREVLRQAGSSVETALGDLLCLRFVAAMGRDHRILTFVTANRNQVVRLQPPLVVTEAEIDRFAESARAVCETATGIHNNWE

SEQ ID NO: 48738 - protein, 146 aa, Glycine max
MADQLTDDQIAEFKEAFSLFDKDGDGCITTKELGTVMRSLGQNPTEAELQDMINEVDADGNGTIDFPEFLNLMARKMKDTDSEEELKEAFRVFDKDQNGFISAAELRHVMTNLGEKLTDEEVDEMIREADVDGDGQINYEEFVKVM

SEQ ID NO: 48739 - protein, 407 aa, Triticum aestivum
MADPSFSSPTAASAGDALPAPAASDAPEVTLPAAAPDLDKEFGFQRAELGKEKLAGTVGFHERHVFLCYKGPEEWPSHVEASESDHLPRLLAAAIKARKPNLKKSTKLTICEGEDGTESSLGDVLIFPDMIRYRELTHLDVDNFVDEVLVKDTEWLPGSPEAIKGSYVFVCCHGSRDKRCGVCGPALITRFKEGIEGQGLHGQVAVSACSHVGGHKYAGNVIIFSPDAKGEVTGHWYGYVAPDDVPVLLRQHIGQGEIVGHLWRGQLGLSEEQQKKALELRRATNGLTEEESSAKESPEANGANGAACNPAPAGGCCQGNGGGLTCCQSDLPAGKQDKSVPAEQNHKSSTTESDKENGAASKKGRMKICRMPTWFETWDKSDTYTTLAVVASAATVFAAFRCYKAMN

SEQ ID NO: 48740 - protein, 504 aa, Cryptococcus neoformans var. neoformans B-3501A
MRTALQAVTSYSRLPLAANASRRSLITGPPPNIPPIHNTTSTSAPLPLPTPLPSFSPPSIQDAKPLYVPGSQAERQARAGRMSRPLRRGTHESWWSAEMGWFNAVAKTIPTFRVLDEEGHMVKDGHESQATKEQTLSIYRTMTLIPIVDNVLYQSQRQGRISFYMQCAGEEAAIVGSAAAMLANDEIFGQYRESAALLHRGFTLDALMAQCFGNVDDKGTKGRMMPVHYSSPEHGFHTITSPLATQMPQAAGAAYMLKLDEERQGDCVICYFGDGAASEGDFHAALGMNSVLGGPCIWFCRNNGFAISTPIIDQYAGDGIASRGPAYGLDTIRVDGNDALAVYAAVCEARKRAVEGKKGVLVEAMTYRVGHHSTSDDSSMYRPIEEVKEWSVVDNPIHRLRSYLVSKKWWSEEEEKALLKKNKADVLKAFSRAEKLPKPKLGEMFNDVWGVAPGEEVPAVIMEQRAELGRLLKKYGEVWPPWKKELKKFVEQGEDVMDCDGKGA

SEQ ID NO: 48741 - protein, 340 aa, Burkholderia vietnamiensis G4
MSDKRIVRAAAVQIAPDLERAGGTLDKVCAAIDEAAGKGVQLIVFPETFVPYYPYFSFVRTPVASGADHMRLYEQAVAVPGPVTHAVAERARLHGMVVVLGVNERDHGSLYNTQLIFDVDGRLAVKRRKITPTFHERMIWGQGDAAGLKVAQTGIGRVGALACWEHYNPLARYALMTQHEEIHCSQFPGSLVGPIFAEQIEVTIRHHALEAGCFVVNATGWLTDAQIESITGDPNLQKALRGGCNTAIVSPEGQHLAEPLRSGEGMVIADLDMSLITKRKRMMDSVGHYARPELLSLAINDRPATTVTPMGTSGSAAREFEGNCHERERETVGAEPAIDD

SEQ ID NO: 48742 - protein, 632 aa, Cryptococcus neoformans var. neoformans JEC21
MTRISALLATIPLLAQAVSAATIEHWWNISYAVANPDGLFERRVIGVNGSWPPPPLLATQGDTILIHAYNGLNDPNIGTALHTHGISFNGSNYYDGAVGITQCSIPMGETLDYVIDTNLQAGTFWMHGHYLGQYVDGLRSPLVIEPQNATGRSDDLTWDDDYTLVVSDWYHRQHLDLLTNDFLTWENPTGAEPVPDSAVIYLVKDGKYYPSAEDVANGAAVSDNLSIPFEAGKKYKIRVINMSALAMFYIALDQHDINIIEVDGVEVEPYSVDALPLSVAQRYSILVEAKNETDRNYAMTVMQDVEMYDYLPDELVLNNTIQISYSSSNPHADEVVYPEEFTDIDDTLLTPLLRSAMAPADIEYTLHVNFDTYDDGNNRGSFNNVTFQEPPTASIFTALTMGNASFLPSVYGAQTNAFTYPHMANIQLTVYNWDAGSHPFHFHGHEFQVVQKSFDVTDEEDEGNGEIVEGQENPMRRDTITIPATGKVVLRWRADNPGAWFFHCHIDWHLSSGLAAVFIEAPEKFQENTVVPQTIVDHCKYWGLPTSGNVVGLNSTTDFDGQPWGPFPLVIGWTPAALTSIFFCVTTAVIGIATVLWYNQDTLDSRDMEEHIRRKIEAKKRRSGLLRRLRGE

SEQ ID NO: 48743 - protein, 131 aa, Saccharomyces cerevisiae
MSSAAEKKPASKAPAEKKPAAKKTSTSVDGKKRSKVRKETYSSYIYKVLKQTHPDTGISQKSMSILNSFVNDIFERIATEASKLAAYNKKSTISAREIQTAVRLILPGELAKHAVSEGTRAVTKYSSSTQA

SEQ ID NO: 48744 - protein, 232 aa, Triticum aestivum
  misc_feature (10)..(10): Xaa can be any naturally occurring amino acid
  misc_feature (188)..(188): Xaa can be any naturally occurring amino acid
  misc_feature (190)..(190): Xaa can be any naturally occurring amino acid
  unsure (1)..(232): unsure at all Xaa locations
GIRHEDINDXEMERNNRVHISSNYGRSHEDCLDNSMKHMQLKPNTVETTYTGQHAASAPLYQMNKTGATGAPDPGTEGSHPDQTSDQAGGANGSMDCIHPTLPVDPKIGSSSTAQPFPHNYAGFAPTMQCHCNQDANRSSLNMSSTFSNMLVSTLLSNPTVHAAARLAASYWPAADSNIPVGPNQEVXLXENAQGRHIGSPPSMASVVAATVAAASAWWATQGLLPLFAPPM

SEQ ID NO: 48745 - protein, 467 aa, Pseudomonas fluorescens Pf-5
MTTTTERKGIHLTRSLKSRHIFMLSLGGVIGTGLFMGSGVTINQGGPWGAILSYLGAGFLMYLVMVCLGELSVQMPVSGSFQAHATKYIGPATGFMIGWVYWMSWATTVGLEFTAAGMLMQRWFPGVPIWYWSALFVALLFGINALATRAFGEAEYWFAGVKVLAILSFIVVGALVIFGVIDLPSGAPAPMFDNLKGDSLFPNGLPAVFAVMMTVVYAFQGCEIMGVAAGETDQPEKSIPRAVRNVVFRVLIFYVLAVMVLAAIIPWQQAGLVESPFVQVFDMVGIPYAADLMNFVILTAILSVGNSGLYASTRILWAMSKSGMAPKALSPLSKQGVPLRALFITLCFALISLMTSFIAADTLFMVLMAVSGMAGTVTWIVIALAQYRFRRQFLREGGQLEQLKYRAPWFPLVPLLCIVLCSSLFVFLALDETQRPSLYWGSGFIALCYGAYYLMQRKRQLQPAAAV

SEQ ID NO: 48746 - protein, 684 aa, Aspergillus oryzae
MAQPTGELTHPSQQQQLQLQQQFFQSIFGGASDTTEEIDTETDSNHRRPHSFGAAATTPAKLANKNVAPFLVKHIPEQYGPLGSRRTDKLEDLSSPNSKFCYRHRPDLKCRRQADEPSMDKLQRELETLPPSDQQGIAHVWSLFSAAPAKHRKLILQGIMAQCCFPQLSFVSATVRDLIRIDFLTALPPEISFKILCYLDTTSLCKAAQVSSRWRALADDDVVWHRMCEQHIHRKCKKCGWGLPLLERKRLRESKREIELRATTWDVSGPAQNAGGAECSAPHADDVITQKRKADSSDDETAIVKRHCSSLDARPEPDEDYYTTRYRPWKEVYKDRFKVGTNWKYGRCSTKVFKGHTNGVMCLQFEDNILATGSYDATIKIWDTETGEELRTLRGHQSGIRCLQFDDTKLISGSMDRSLKVWNWRTGECISTYTGHRGGVIGLHFDATILASASVDKTVKIWNFEDKSTFLLRGHTDWVNAVRVDTTSRTVFSASDDCTVRLWDLDTKACLRTFHGHVGQVQQVVPLPREFEFEDHDAECDNDNMSTTSGDTESNSLQATLGLESNATETSVFGPSFDNGRPAPPRYIVTSALDSTIRLWETTTGRCLRTFFGHLEGVWALGADTLRIVSGAEDRMVKIWDPRTGKCERTFTGHSGPVTCIGLGDSRFATGSEDCEVRMYSFRN

SEQ ID NO: 48747 - protein, 459 aa, Prochlorococcus marinus subsp. pastoris str. CCMP1986
MILKVLEFEFDLIVLGAGSGGLAAAKRAASYGAKVAIIEVNKIGGTCVIRGCVPKKLMVYAANNRRNMLSSEGYGLISKEITFESNILLKNVREEVSRLSVLHSNSLKKLNVKVFEGLGRFLNQNTVEVVCPKTKNILRKVSAKSILISVGGKPKKLNIPGTDFAWTSDDIFELKDFPKKLLIVGGGYIACEFASIFKNLGTEVTQLIRGENLLNGFDKDLSECLEKSMTSLGINLKFKNQLKSIKKINDGLESTLESGSKLLTDNILVATGREPSLKRLNLDTLNLKMDGIYLEVNELNKTSISNIFAIGDIVKRPNLTPVAIEQGRVFADNYFAALKRKVNYENIPKAVFTIPEISTVGLSEEKANEIYSEVNVQVFKCNFTPMSNTFKKNKSKCMLKLVVNKKNDKVLGCHMFGEAASEIIQMVAVSLNTGITKKDFDTTMALHPTISEEFVTMYG

SEQ ID NO: 48748 - protein, 764 aa, Burkholderia pseudomallei K96243
MTTAHILGFPRIGAQRELKFALERYWRDGASADAERALVDTGRALRAEHWRIERDAGLDCVTVGDFAWYDHVLTTLAHVGGLPRRFGFDARALTLADYFAAARGNAAQPAMEMTKWFDTNYHYLVPEYSPATTFGPGVEWLFDEVREARALGYRAKAALVGPLTLLWLGKARDGLVERLALLPRLVPAYRALLARLREAGVDWVQIEEPIFSLDLPDAWRDAARPTYEALAPGAPKLLVATYFDDASEHAALLKALPVAGLHIDLVRADAQLDAFVADYPADKVLSCGIVDGRNVWRNDLDRSLARLAPVRDALGERLWVATSCSLLHVPVDLAHEPRLDEELKTWLAFAAQKTREVAALRDALVKGRAAVAAEFDDAAAAAAARRTSARIHNPLVKRRVAALTDADARRASAYSVRAAAQRARFGLPLLPTTTIGSFPQTPEIRRARAAFKQGVLDHLGYLEAMREQVRIAIDKQLAYGLDVLVHGEAERNDMVEYFGELLWGFAITSNGWVQSYGSRCVKPPLVYGDVYLPEPMTVGWASYAQSLSAKPVKGMLTGPVTMLQWSFVRDDQPRATTALQIALALRQETLDLEKAGIGMIQIDEPALREGLPLKARERAAYLDWAVRAFGIAASGVADDTQIHTHMCYSEFGDILPSIAALDADVISIETTRSNMELLDAFETFDYPNEIGPGVYDIHSPRVPDADEIERLILLALERIPAQRLWVNPDCGLKTREWRQVDAALAAMVDAAKRVRQKVEEEAPA

SEQ ID NO: 48749 - protein, 415 aa, Novosphingobium aromaticivorans DSM 12444
MRGLPPPRSGGMEPPHFAPRNGRPRPMLENLAAQPADALLALIKLHNADPREDKIDLGVGVYRTSEGATPVFKAIKAAEAKLLESQDSKAYLGPEGDMGFVHALIPYVFGKDFDRSKVEGMQAPGGTGAVRLAIEVAKRSGVKRVWMGTPSWPNHAQIIAAAGMELKTFSHMTADGLADLEALKTALAGAEAGDAVLLHGCCHNPTGVDYTEAQWDEIAPLLVERQVLPILDLAYQGLGAGMEADAYGLRKVLSLAPEALVAYSCDKNFGLYRDRVGAFYAVTSDATALANAMGNGATIARASWSMPPDHGAAAVRLILDDAELTAMWLAELDEMRDRMRWVRDRLAAAQHVGPINMAPLGVQNGLFSMLPLRADQILAIREKHGVYMAGSGRINIAGLTTGNIDKFVEALRDVA

SEQ ID NO: 48750 - protein, 346 aa, Prosthecochloris aestuarii DSM 271
MRWRFHAEKKCVMKGFKTVLVMVMCSMFSFIIISCATAGDDNDSSMKQANNGLKESEMGYRVLTSEEERVIVGKGTEMPFSGKYVDFHEEGTYVCRRCDAPLFRSSDKFESGTGWPSFDDEIPGAVTRKTDADGRRTEILCANCGAHLGHVFLNEGLTGKNVRHCVNSISLDFKGADDRAIKPAQVSEKAIFAGGCFWGMEYHFGKVNGVLGTTVGYTGGSKEDPTYREVCSGKTGHAEAMEVEFDPAVVTYEELARLFFEIHDPTQVNRQGPDIGTQYRSAVYYVDDTQKAIAEKLIGQLKENGYAVVTELEKANAFYPAEEYHQDYYEKTGHQPYCHIYQKRFK

SEQ ID NO: 48751 - protein, 279 aa, Prochlorococcus marinus subsp. pastoris str. CCMP1986
MKENKKTQFPINKTLSKINKKFLELKKSDKLALMPFIMAGDPNIETTSEILLKLQEKGADLIELGIPYSDPLADGPIIQLSASRALKSGTTLKNVIQLLESLKDKLHIPIILFTYFNPVLNFGLENFCELASKVGVSGLIIPDLPLEEAYKFSEIISSYSIDLILLVAPTTPSERMKIISNNTKGFTYLVSVTGVTGERNKMENRVENLITKLQEISINPVAVGFGISSPEHVNKVRKWGADGVIIGSAFVKRISNSNEKEVVNQIGKFCEEMRKAADQ

SEQ ID NO: 48752 - protein, 982 aa, Nostoc sp. PCC 7120
MVDLLRQLRDLCSPEGQATKDQAVSAVKLIEQLNINEAIRAARAFALYFQLINIIEQEYEQRQQLTRYSDLEAETAPLNGSENITSSSNHNEDDVIFNRGLGTDFLGKNWTNRGQGKQKGTFAALFPLLSKLNVPPQQIQRLISQLDVRLVFTAHPTEIVRHTIRDKQRQVVDLLQQLDEVENRAKDGGGYPWEAGEIREKLLEEIRLWWRTDELHQFKPTVLDEVDYALHYFQEVLFDGIPQLYKRFKYALNQTFSWLEPPSKDFCSFGSWVGSDRDGNPSVTPEITWQTACYQRKMVLERYIKSVTQLIELLSISMHWSDVLPDLLESLELDQSQLSEVYDALALRYRQEPYRLKLAYVLKRLENTRDRNLALYKGETPTNEDSPMYRSGSEFLAELRLIQHNLTETGLSCRELDNLICQVEIFDFNLTKLDIRQESTRHSDALNEILDYLQLLPQPYNDLSEEQRVAWLTTELQTRRPLISSELPFSDKTNDVIKTFRVVRSLQQEFGINICQTYIISMCRQVSDVLEVLLLAKEARLFDPAIAVGTIQVVPLFETVEDLQRSRSVMRQLFELPLYRALLAGGYKNTEVKVPNTELTPQSPAPSPQSVLTPDLQEVMLGYSDSNKDSGFLSSNWEIHKAQKSLQQIAEEYGVNLRIFHGRGGSVGRGGGPAHEAILAQPGHSINGRIKITEQGEVLASKYSLLDLALYNLETITTAVIQASLLRTGFDDIEPWNEIMEELAARSRQHYRGLIYEQPDFIDFFHQVTPIEEISQLQISSRPARRPSGKKDLSSLRAIPWVFSWTQTRFLLPSWYGVGTALQEFFNEEPEEHLKLMRYFYVKWPFFKMVISKVEMTLAKVDMQMAGHYVQELSDPEDKPRFEKVFEQIANEYYLTRDLVLKITDHGRLLDGDPVLQRSVQLRNGTIVPLGFIQVSLLKRLRQSKNNTATSGVIHSRYSKGELLRGALLTINGIAAGMRNTG

SEQ ID NO: 48753 - protein, 472 aa, Arabidopsis thaliana
MAETDVGSVKGKEKGSGKRWILLIGAIAAVLLAVVVAVFLNTQNSSISEFTGKICNCRQAEQQKYIGIVEDCCCDYETVNRLNTEVLNPLLQDLVKTPFYRYFKVKLWCDCPFWPDDGMCRLRDCSVCECPESEFPEVFKKPLSQYNPVCQEGKPQATVDRTLDTRAFRGWTVTDNPWTSDDETDNDEMTYVNLRLNPERYTGYIGPSARRIWEAIYSENCPKHTSEGSCQEEKILYKLVSGLHSSISVHIASDYLLDEATNLWGQNLTLLYDRVLRYPDRVQNLYFTFLFVLRAVTKAEDYLGEAEYETGNVIEDLKTKSLVKQVVSDPKTKAACPVPFDEAKLWKGQRGPELKQQLEKQFRNISAIMDCVGCEKCRLWGKLQILGLGTALKILFTVNGEDNLRHNLELQRNEVIALMNLLHRLSESVKYVHDMSPAAERIAGGHASSGNSFWQRIVTSIAQSKAVSGKRS

SEQ ID NO: 48754 - protein, 476 aa, Novosphingobium aromaticivorans DSM 12444
MTAYPSLHMIIDGARVSGGGRRTHAVVNPATGETIGELPLAEVADLDRALEVAAKGFRIWRDSTPQQRAAVLQGAARLMLERQEDLARIATMEEGKTLPEARIEVLMNVGLFNFYAGEVFRLYGRTLVRPAGQRSTITHEPVGPVAAFAPWNFPLGNPGRKLGAPIAAGCSVILKAAEETPASALGVLQCLLDAGLPKEVAQAVFGVPDEVSRHLLGSSVIRKLSFTGSTVIGKHLMRLAADNMLRTTMELGGHGPVLVFGDADIDKALDTMAASKYRNAGQVCVSPTRFIVEESVFERFRDGFAERVGRIKVGNGLDQDAQMGPMANARRPEAMDRLIGDAVTRGARLHTGGERVGNAGYFYAPTVLSEVPLDAAIMNEEPFGPVALINPFGGEEAMIAEANRLPYGLAAYAWTDSAARAKRLAREIETGMLGLNSTMIGGADSPFGGVKWSGHGSEDGPEGVMACLVTKAVHEG

SEQ ID NO: 48755 - protein, 344 aa, Pseudomonas putida KT2440
MNKLLPTSTAGSLPKPAWLAQPETLWSPWKLQDEQLVEGKQDALRLALQEQQHAGIDIVSDGEQTRQHFVTTFIEHLSGVDFEQRKTVRIRDRYDASVPTVVGAVARQKPVFVEDAKFLRQHTTQPIKWALPGPMTMIDTLYDNHYKSREKLAWEFAKILNQEARELEAAGVDIIQFDEPAFNVFFDEVNDWGVATLERAIEGLKCETAVHICYGYGIKANTDWKKTLGSEWRQYEQAFPKLQQSSIDIISLECHNSHVPMDLLELIRGKKVMVGAIDVATHVIETPEQVAATLRKALQFVDADKLYPCTNCGMAPLPRQVASGKLKALSAGAAIVRQELANAR

SEQ ID NO: 48756 - protein, 219 aa, Wolbachia endosymbiont of Drosophila ananassae
KQQVMYVMTHDSIGVGEDGPTHQPIEHLASLRAIPNLYVFRPADAVETLECVSIALEKKESPALFALSRQNVSYMRKFYSDIDQSANLSKFGAYILCECSKELKVTIFATGSEVEIAVEAREKLQEKGIGTRIVSMPCWRLFDEQSDEYKAAILNNDSIKVAIEAGSEMGWHKYIGSNGIFIGMKSFGESAPYKTLYEHFNISADHVVKCVCEKLVYIQ

SEQ ID NO: 48757 - protein, 123 aa, Torulaspora delbrueckii
MPEVINHPETLPKWWKEASVYQIYPASFKDSNNDGWGDMKGIASKLEYLKDLGIDAIWISPFYDSPQDDMGYDIANYEKVWPTYGTNEDCFKLIEKTHEMGMKFITDLVINHCSSEHEWFKES

SEQ ID NO: 48758 - protein, 225 aa, Cucumis sativus
MGRGKIEIKRIENTTNRQVTFCKRRNGLLKKAYELSVLCDAEVALIVFSSRGRLYEYSNNSIKTTIERYKKACSDSSATSSVTELNTQYYQQESAKLRQQIQMLQNSNRHLMGDSLSALTVKELKQLENRLERGITRIRSKKHEMLLAEIEYLQKREIELENENVCIRTKIAEVERVQQANMVSGQELNAIQALANSRNFFSPNIMEPAGPVSYSHQDKKMLHLG

SEQ ID NO: 48759 - protein, 510 aa, Oryza sativa
  misc_feature (204)..(204): Xaa can be any naturally occurring amino acid
  unsure (1)..(510): unsure at all Xaa locations
MATCSWAATTAAAAPPRPPARCRSRVAALRRTAAASAAAASCVLAEAPKGLKVEQADAVEPAAAAAARRDVGPDTVASIILGGGAGTRLFPLTRTRAKPAVPVGGCYRLINIPMSNCINSKINKIYVLTQFNSQSLNRHIARTYNIGEGVGFGDGFVEVLAATQTTGESGKRWFQGTADAVRQFLWLFEDARLKRIENILILSXGDHLYRMDYMDFVQKHVDKGADISVACVPVDESRASDFGLMKTDKNGRITDFLEKPKDESLKSMQLDMGTFGLRPEVADTCKYMASMGIYVFRTDILLRLLRGHYPTANDFGSEVIPMAAKDYNVQAYLFDGYWEDIGTIKSFFEANLALTDQSPNFYFYDPVKPIFTSPRFLPPTKVENCKVLNSIVSHGCFLTECSVDRSVIGVRSRLEPGVQLKDTMMMGADYYQTEAERFSELSDGKVPVGVGENTIIRNCIIDKNARIGKNVMIMNSQNVQEAERPLEGFYIRSGITVVLKNAVIPDGTVI

SEQ ID NO: 48760 - protein, 254 aa, Cucumis sativus
  misc_feature (202)..(202): Xaa can be any naturally occurring amino acid
  unsure (1)..(254): unsure at all Xaa locations
MSCYEEEDEESGVVGLRRSSSSSRTGRGKIEIKRIENTTNRQVTFCKRRNGLLKKAYELSVLCDAEVALIVFSSRGRLYEYANNSVRATISRYKKAYSDPSTAMTVSEANTQFYQQESAKLRAQIGNLQNLNRHLLGESISSLSVKDLKSLEVKLEKGISRIRSRKNELLFSEIEYMQKREIELHTNNQLIRAKIAETERSXQNTNASNNNGIATRRGEEGSMGTNLEDNNHHQYDSTNYFDPHHNHPISLQLV

SEQ ID NO: 48761 - protein, 356 aa, Capsicum annuum
MSSNSSLSVVESKLPPGFRFHPRDEELICDYLMKKIDQSPDQQQQYPFLIEVDLNKSEPWEIPEVACVGGKEWYFYSQRDRKYATGLRTNRATVSGYWKATGKDRAVVRKGSLVGMRKTLVFYQGRAPKGRKSDWVMHEFRLEGPLNNNIRPQISSPREDWVLCRVFHKNKELLAAKQGTSSNNIYYDDGTISSSSVPQLMENPYITFDQTQPNNNNINMNELYYEQVPCFSIFTPNQTTFTSHSHHHHHPATSTTTGATPITTAYGGFPADIGNYLNATATSSTCDNKVIKAVLSHLSTKNIIMEGNNNNSNFNNSSAQNIMNIKGGNSPSFGEVSSETSFLSEVAYHPTMWNNY

SEQ ID NO: 48762 - protein, 99 aa, Brassica napus
TLSKPSSPKEHIDDTEDLINIKLGNAQNQLIQFQLLLTAATFVAAIFAAVTAVFGMNLQDSVFKDPTMFQWVLLVPGIGCGLLYFGFVLYFKHKKVFPL

SEQ ID NO: 48763 - protein, 351 aa, Zea mays
  misc_feature (169)..(169): Xaa can be any naturally occurring amino acid
  misc_feature (291)..(291): Xaa can be any naturally occurring amino acid
  misc_feature (338)..(338): Xaa can be any naturally occurring amino acid
  unsure (1)..(351): unsure at all Xaa locations
MSEVSVINQAEVEDAGAGQLMDLPPGFRFHPTDEEIISHYLTHKALDHRFVSGVIGEVDLNRIEPWDLPGRAKMGEKEWYFFCHKDRKYPTGTRTNRATETGYWKATGKDKEIFRGRGVLVGMKKTLVFYRGRAPRGEKTGWVMHEFRLEGRLPQPLPRSAKDEWAVCXVFNKELQAARSEPLLAAAGAAELERVGSLGFLNELLDSAELPALVGADVDEVIDFKGPAPASVPDASYLPVKMEEHALLQMQQCQYQPPPPMFYPSQYFSLPAMNSGHLPPAIRRYCKAEQXVVSAQTASVISPSRETGLSTDPNAAGGYAEISSAATPSSSHQFLPEXDDPALNLADLWKY

SEQ ID NO: 48764 - protein, 196 aa, Zea mays
LQTVPLCQNLYRNSFTYHCLQEDKTLQFDDANQFLEQCEREKARVLVHCMSGKSRSAAFVIAFLMKSRGWRLAQSFQWVKERRPQVQLSDAAQQQLIEYEKKLFGSNDGSIAAQPFAPVDSLPSLGFGFPKPPGDIQAPTFNQQAPASIFERVTPNSFPSNFIFGAERTSDAKLPDSNNFGVVNSSTGSDSMMDSS

SEQ ID NO: 48765 - protein, 2530 aa, Mycosphaerella zeae-maydis
MSSIHMSADGSTPIAIVGLSFRGPGDATSAENLLRMVAESRESRSPIPSQKWNASGHYHPDPSRQGSHIVEYGHWFQQDVYEFDAPFFNLSAVESAALDPQQRMLLECTYEAFENSGMPLNKLVGTDTSVFTAVFCTDYTDMLWRDPEMVPMYQCTNSGATRANMANRVSYSFDLKGPSITVDTACSGGLTALHLACQSLVTGESTQAVVSGSSLILGPETMVTMSMMRFLSPDGRCYAFDDRANGYARGEGVTVLLLKRLDDALANGDTIRAVIRGTGRNPDGKTTGIAMPSGLAQEALIRSVYAKTGLDLLDTAYIECHGTGTQAGDTTEARAISNVFGPGRQVPLAIGSVKTNIGHLEAASGLAGVLKCILMLENEIILPNRNFKHANLNIPLEEWKLRVPTTVEPWNSMTTRRASVNSFGYGGTNVHAILESADNFLRARGLDQTKFTRRPMHRIMAIRNALELEPEQNGNPFSSSGAKYMGQRADPQVFAVSAFDPTAGEACAKNLAYYVEERQDMADATFLSSLAFTLSDRRTVHPWKATVTASSSAELISGLRKVRFSSVKSTHNLAFVFTGQGAHWCGMGKELIKVYPAFRKSLEKCGAMLKRFGAPFDVIDELEAGFETSQLDKALYSQSLCTALQIALIDMLSDWDIQPKSVTGHSSGEIGAAYAAGALKLEDAMLVAYARGLAMSDLSTKGPKGAMVAVGMDRQELNLILVGLKSGKAVIACSNSPKSFTVSGDKCALDELQGALRQRGVYNRRLNVEVAYHSHHMELVADSYRNTINNIKVLADSPVRFFSSVMGELTDKSKLGPDYWVSNLVGEVKFAESLHALVTHSNTDSTEQIQTIIEIGPHSALAGPIRETLEAAEFSHKTSIDYLSVLVRRKDAVVTALTLASKLFVAGFAVRLAAVNQNACSTVPPLNDLPSYAWNHSKSYSAESRISRSYRERPHTRMSLIGVLDVQSSALEPRWRQILRISELPWLRDHNIQSNVVYPAAGYLTMAIEAAAQRNAVRAPGTKIEGFQFREVNISSALIIPETPGEVEVFITLKAFSESLRSPSNLWDEFSVSSVSESNRWTEHCRGLIAVKTVSRSPNLVSGEAQEASDVEVYKGHVDDFEAACQSSWDAKEMYNGLWQTGMHFGPTFANISDLRIAPDKCIGRVQIPDTAAVMPMKYQEAFVVHPATLDSIIQTFLPALAAQTRKFNDAIVPVSIDDLFVSHEITRSPGHAFDCYTSTYRKDHRFTFVDITVFATPFVPGSKPVITVGSMTVATLQRQDPSENNDQVPSRAYNLEWAPDIEYLTPEQLVNVTSSSTGAEHQVTKQKLDRASVELIREALARTHEQQSVEVGGSAHVLRKLLDSRAEHATSDSSTDRDSSLTSASATIAQAAERLPNLLVGGAEQDDPAQLYDLMDVATTPGLFAKNHSIATYLQLLSHKKPDLTVLTIGPQSGPASLNLLLLLSDLGCDAGPFKAFHHSDAELNIDHAAKTRFPSWANSITFVDLKIKDSVALESSSNVEQTYDVVVAFNMAGSSIQLAATLSAASALQTYRGKVLLADHAVQSPLATLVWSSLPSFVSSQKEGAELDLSDAHDVAQEKGYQAHAMLADRVHVMQKAREEHEVETAIDTLIVATDQDLESVDIALLQRLCEEQGSAVQLVSLEAAHPEPKQACIVLNELSQPVLVEPTDGEWEALKRITHCGAGVLWVTRGAGSDTCADPQAALIQGLARTVRAEVGDRPMATLDLDEEVRLNAVEAAKCIAGVFRHVMRAASAELELRERNGVVHVPRLIEDLDASRQLQAEDGIAAATETLTLQQAGSCRLFAGTPGLLDSLHFAPDERVSVELAAGDIEVEVQAAGINFKDVMMAMGQIPIEDLGLECSGMVTSVGSQVQCFAVGDRVVTMGPGSFCTRLRVDARLAYRIPDSMSWETAAALPITHVTAYHAVRHLGRIVRGDTVLVHAAAGGLGQALVELSIMAGARVLVTVGSADKKHFVMERFGIPEHHVLYSRDTSFASHVMRLTQGVGVDVVMNSLAGEALRQSWTCIAANGRFVELGQRDITVNSRLDMAPFARNASFIAFNLAKMLRQDPQMACEMLGEVLKLYDRGTLRGYQSLETYTYSHLGDAFRKMQTGRHMGKLVAVARPADIVRFQGTPALSPPLFDPDAAYLLVGGLGGLGSATALWMAERGARHLVLLSRSGASPSQDSILARLRATNCATTVLACDVAERDLLASALATVKDTLPPIRGVIQGAMVLRDGMLAQLSRSDYLAVLRPKLHGTWNLHALLPDLDFFIVESSISGIVGNAAQAAYAAANTFLDAFARYRRSLGLPATAIDIGAVEGIGYLARNPELKRAMERQGFSFTDEARLMRLLDFSISHPARQPRRSHIITGLGAWHPDCSLPVLGAPLFSRHRLLSSRGISAPAAINSLRNTLKHATTHDAEIALLAALVDHVVARTDIPVENVDTSKGLQDYGIDSLAAVELRNWLSRETDSVIPILELLGAESLTDLAAKIVARSRPITVANGAA

SEQ ID NO: 48766 - protein, 231 aa, Corynebacterium efficiens YS-314
MIKAIFWDMDGTMVDTEPQWGVATYELSELMGRRITPEIRESTIGGSMPRTIRICAAHAGIEVTGEDYERYRRFMLGRVAELFDEALVPNPGVIPLLAQLRGLGVPMLVTTNTERSLAQGCIEAVGAGYFVDSITGDEVDNPKPAPDMYLEAAHRVGLPPSECLVFEDSYNGMTAAVEAGCRVIGLHPETLTPPAGVVALRDLHGRNNFEGVTAELVGSWYAGIEPVGVRN

SEQ ID NO: 48767 - protein, 386 aa, Solibacter usitatus Ellin6076
MRDAVIVDCLRTPVGKAPRGALRNTRPDDLAAIAIRAVLDRYPAALDLVDDVILGCAMPEGEAGANMARQAALRAGLADSVPAMTINRFCSSGLQAIALAAERIRSGGADVIIAGGAESMSMIPSGGRKPAPNPWFVDHWPEVYMTMGLTAERVQRKYNVSREDADAFALRSHQNALRAQQDGKFDDELVPVETQNIMPGIVERAVFSRDEGPRADTSFEALAKLKPVFHANGSVTAGNSSQTSDGAAAALVMSAAKARQFGFAPKARFVSYATAGVPPEIMGIGPVVAIPKALAMAGLKLNDIGVIELNEAFAVQALAVIRKAGIDPDRVNVNGGAIALGHPLGCTGAKLTATILREMQRGQIRYGMVTMCVGGGQGAAGIFELM

SEQ ID NO: 48768 - protein, 237 aa, Cucumis sativus
MFQNQEEKMSDSPQRKMGRGKIEIKRIENTTNRQVTFCKRRNGLLKKAYELSVLCDAEVALIVFSSRGRLYEYANNSVKATIDRYKKASSDSSNTGSTSEANTQFYQQEAAKLRVQIGNLQNSNRNMLGESLSSLTAKDLKGLETKLEKGISRIRSKKNELLFAEIEYMRKREIDLHNNNQMLRAKIAESERNVNMMGGEFELMQSHPYDPRDFFQVNGLQHNHQYPRQDNMALQLV

SEQ ID NO: 48769 - protein, 430 aa, Yersinia pestis KIM
MASEYIEHLAVFHAEDTLLPAKGSFFMSPIEKSSKLDNVCYDIRGPVLKEAKRLEEEGNKVLKLNIGNPAPFGFDAPDEILVDVIRNLPTAQGYCDSKGLFSARKAIMQHYQARNIRDLTVEDIYIGNGVSELIVQSMQALLNLGDEMLVPAPDYPLWTAAVSLSSGKAIHYMCDEESGWFPDLDDIRSKITPRTRGIVIINPNNPTGAVYSKELLLEIVEIARQNDLIIFADEIYDKILYDDAQHHSIAALAPDLLTVTFNGLSKTYRVAGFRQGWMVLNGPKKHAKGYIEGLEMLASMRLCANVPMQHAIQTALGGYQSISEFIQPGGRLYEQRDRAWELINQIPGVSCVKPQGALYMFPRIDQKRFNLKDDQKLVLDLLLQEKVLLVQGSAFNWPYPDHVRIVTLPRVDELEMAVRKLGRFLETYHQ

SEQ ID NO: 48770 - protein, 438 aa, Zea mays
MEDSATNGHGVVTAVPASWNFEPNETLLGLPALSVRGVLTRVMAGMLPDGGRAVVRLGSGDPTAFPCFRTAPEAVDAVASAVQSGQYNSYSTSVGLEPARRSIAQYLSCDLPYKLSPDDVYLTSGCTQAIEILCSALARPGANILLPRPGFMFYEARAIFNGMEARYFNLLPGNGWEVDIDGVQALADKNTVAMVIVNPGNPCGNVYSYEHLAKASSDMLLLVAETARKLGIFVIADEVYAHLTFGERKFVPMGVFGAVAPVLTLGSISKRWMVPGWRLGWIVTNDPNGVFQRTKVVHSIKSYLDISSDPATFVQGAIPKLVENTKEEFFEKTIEILKRCVDICCEKLKGINAITCPSKPEGSMFVMVKLDLSCLEGIKDDMDFCCRLAKEELVVVLPGCAVGYKDWLRITFAIDPSSLEEGLDRLKSFCLRYRKPTK

SEQ ID NO: 48771 - protein, 219 aa, Burkholderia vietnamiensis G4
MQEIIDGFLKFQRDIMPARRELFRKLATSQTPRTLFISCSDSRMVPELVTQREPGDLFVIRNAGNIVPSFGPEPGGVSATVEYAVAALGVTDVVICGHSDCGAMTAVATCKCLDHMPAVANWLRYADSAKLVNQAREHAGERERVDSMVRENVIAQLDNLKTHPSVALGLAQGRLNLHGWVYEIESGSIDALDAATRQFVPLAAHPDVTATPAECVAAL

SEQ ID NO: 48772 - protein, 302 aa, Arabidopsis thaliana
MAATPTHFSVSHDPFSSTSLLNLQTQAIFGPNHSLKTTQLRIPASFRRKATNLQVMASGKTPGLTQEANGVAIDRQNNTDVFDDMKQRFLAFKKLKYIRDDFEHYKNLADAQAPKFLVIACADSRVCPSAVLGFQPGDAFTVRNIANLVPPYESGPTETKAALEFSVNTLNVENILVIGHSRCGGIQALMKMEDEGDSRSFIHNWVVVGKKAKESTKAVASNLHFDHQCQHCEKASINHSLERLLGYPWIEEKVRQGSLSLHGGYYNFVDCTFEKWTVDYAASRGKKKEGSGIAVKDRSVWS

SEQ ID NO: 48773 - protein, 467 aa, Brucella suis 1330
MNTISKPSVDLHREEEPHLARNLSNRHLQLIAIGGTIGTGLFMGSGKAVSLAGPSILLIYAITGFMLFFVMRALGEILLSNLQYRSFADFAGDYLGPCAQFFTGWTYWLCWIVTAVAEVVAVSGYVSFWFPHLAPWIPALGLITILLILNLPTVRNFGEIEFWFALIKIITIIGLIITGIYMLMTGFVLPNGTQASIAHLWNHGGFFPNGSLGFIAGFQISVFAFVGIELVGTAAAEAENPMRNLPKAINNIPIRIVLFYIGALFVIITVTPWNQVDPNSSPFVAMFSLAGIGIAAHFINFVVLTSASSSSNSGIYSTSRMVYGLATVGLAPKAFSKLSNRKVPVHALIFSCIFLLSSVVLLYAGQSMIQVFTLVTTISALLFIFIWSIILVSYLQYRRKHPERHEKSTFKMPGRRASVVMVFIFFAFVLWALTQEPDTLAAMKVTPLWFVLLGIAYRVMKLKQKQS

SEQ ID NO: 48774 - protein, 167 aa, Oryza sativa
ISDPTSIQGILKQVYADHSTNVDMVFSRIIETTQHPAAAASFASIMCAPKGQISFEEALSRCQRQGIPISLMYGREDPWVRPIWGIKVKQQVPESPYYEISPAGHCPHDEVPEVKHSLCLEIKLVIFSLYQIVDSSFCSRAFCFGWILWLVGCVCLRKVMFSEYHPC

SEQ ID NO: 48775 - protein, 534 aa, Cryptococcus neoformans var. neoformans JEC21
MPSGIPTRRVRLVDENAPPPPGAVVTRTRSRALASTTSTATNVKPTTTSIPMMKRQRSTISSENKIVDKSDVRRNALGEVRNGKGGEKEKESGKGKVVAIERKPLATTQAKAQRVTRSASAQPVMGVKDGDKKRKAVITSKIPSRSRSTGAEPAQVEVKPTIKTEEEPVRKRRKTSSPVVEVGEDGPTVDGKELLLSSGSKNATAFRSPKIKAKDDGWTDLDAEDEGDPTMVSEYVVEAFKYMMDIQGQTMPDPEYMDNQAELQWKMRQILMDWIIEVHSKFRLLPETLFIATNLVDRFLSKRVISLVKFQLVGLTALFIASKYEEVCCPGVEHFLHMSDGGYTVEELLKAERYMLSTLQFDMSYPNPLNFIRRISKADGYDIQSRTVAKYLVEISCVDHRLLGYTPSMLAAASMWLARLCLERGEWNANLVHYSTYSEDEIRPCAQVMLDHILDPDFDESTSFYKKYASKKHMKASVYVREWATQLWPASADGSAVERGTELELLKMFLEDEEEENNKGSKRRMKAVDEEEEY

SEQ ID NO: 48776 - protein, 258 aa, Pseudomonas sp. KS-E1806
MRLEDKVAILTGAASGIGEAVAQRYLDEGARCVLVDVKPAGGSLARLIEANPGRAVAVTADVTRRDDITRIVATAVERFGGVDILFNNAALFDMRPLLDESWDVFDRLFSVNVKGLFFLMQAVAQRMVEQGRGGKIVNMSSQAGRRGEALVSHYCATKAAVISYTQSAALALAPHRINVNGIAPGVVDTPMWEQVDALFARYENRPLGEKKRLVGEAVPLGRMGVPGDLTGAALFLASADADYITAQTLNVDGGNWMS

SEQ ID NO: 48777 - protein, 328 aa, Pseudomonas fluorescens Pf-5
MKKHLVLYKKLSPTLMARLQEQAQVTLIETLDAAGLNALRQALPSADGLLGASLRLDAELLDLAPRLRAVASVSVGVDNYDIDYLTQRRILLSNTPDVLTETTADTGFALILATARRVVELANLVRAGQWQRNIGPAHFGTDVHGKTLGIIGMGRIGEALAQRGHFGFGMPLIYHSTRPKPAVEQRFNAQYRSLEQLLEEADFICLTLPLTERTQGLIGAREFALMRPESIFINISRGKVVDEAALIEALQQRRIRGAGLDVFEREPLDHDSPLLQLPNVVATPHIGSATHETREAMARCAVDNLLAALAGQRPPNLVNPAAWTSPRP

SEQ ID NO: 48778 - protein, 518 aa, Bradyrhizobium japonicum USDA 110
MRHRKLQRPFQHQERDGRDPRAAVRLVSRHGQSEATELAKLQAADRPEKVGRINGDNSQGRASMSTSVNAGGRLDRLPVGPFHRRIMLLIGIGMFFDGFDIYIAGTVLSVTLKTGFSTLAQNAAFISATFVGMMLGSFGTGFLGDRYGRRFTYQFNLLLFGIASLAAAFSPNMAFLIACRFVMGVGLGAENVVGYSTMTEFVPARTRGKWLGFTAVCVVTGLPVALLVASVLVPQFGWRSMFVLGGVGALVVWYMRKSLPESPRWLEAVGRTAEAETLMQAIEKEAAQGQPLPPPAATAPAPVSPDLGTLFTAPLLSRMIVGAVCLITINTLLYGFVTWLPVFFVKQGLSIATSFGYSLLMAIGAPVGAAIGALTADRWGRKPTIIGASLIAVALGVLYPMISDPILLPAVGFALTVPIYVLVALLFGIYIPELFPTEVRLRASGIVNTLGRGATIVTPFLVVSLFETRGVAGVMALMIGLLVVQIITVWALGIEPRHRSLEELKAEESASPVLKEAS

SEQ ID NO: 48779 - protein, 320 aa, Pseudomonas fluorescens Pf-5
MPDIDILSFGETMAMFVAEHGGDLAQVQHFHKRIAGADSNVAIGLARLGFKVAWLSRVGNDSLGRFVLDTLRAEGLDCRFVRCDPIHPTGFQLKSREDGGDDPRVEYFRRGSAASHLAISDLDPALLRARHLHATGIPPALSDSARELSGHLMHTQRSAGHSVSFDPNLRPALWPSEALMIREINRLAALAHWVLPGLAEGRLLTGRDDPADIAAFYLDQGAEAVVIKLGAHGAYYRTQLDAGFVEGVPVAQVVDTVGAGDGFAVGLISALLESRGILEAVQRANWIGSRAVQSRGDMEGLPLRHELPEHTPSLKTASAL

SEQ ID NO: 48780 - protein, 118 aa, Taraxacum officinale
ECKERATPEQVADYTLKLLHRRIPPAVPGIMFLSGGQSEVEATLNLNAMNQSPNPWHVSFSYARALQNTCLKTWGGRPENVKAAQDALLQRASSNSLAQLGKYTGQGESEEAKKGMFV

SEQ ID NO: 48781 - protein, 142 aa, Wolbachia endosymbiont of Drosophila ananassae
MAIGNPFGLGGSVSTGIISARSRDISIGTMNEFIQTDAAINRGNSGGPLFDLNGKVIGINTAIYSPSESGGNVGIGFAIPSNLAMSIIDTLKSGKKIKHGWLGVQVQLITKEFAESLGLKDIKGALVASIVKDSLQKKVGLK

SEQ ID NO: 48782 - protein, 433 aa, Oryza sativa (indica cultivar-group)
KMLEEFVSHGLLEYSKHGMKVEGATTSLLSPYLHFGEVSVRKVYQLVRMQQIKWENEGTSEAEESIHFFMRSIGLREYSRYLCFNFPFTHEKSLLGNLKHYPWKVDEERFKSWRQGMTGYPLVDAGMRELWATGWTHNRIRVIISSFAVKFLLIPWTWGMKYFWDVLLDADLESDILGWQYISGSLPDGHELSRLDNPEVQGQKYDPDGVYVRTWIPELARMPTEWIHHPWDAPSCILEVAGVELGFNYPKPIVDLHIARECLDDSISTMWQLDTAEKLAELDGEVVEDNLSNIKTFDIPKVVLRETSPCALPIDQRVPHASSKDHNLKSKVLKASNRSSICVDMIRSSKMEATSSVANSPVSRKRSFCETAFHVPSYSSSAEVHSHIQDHGGSLVGPSRYLLQEAGRNCVDEVEDSSTADSGSSISRQRKAA

SEQ ID NO: 48783 - protein, 286 aa, Oryza sativa
MGKEVDVSTLEAGGARDYIDPPPAPLVDVDELGKWSLYRALIAEFVATLLFLYVTVATVIGYKHQTDAAVNGADAACGGVGVLGIAWAFGGMIFILVYCTAGVSGGHINPAVTLGLFLARKVSLVRALLYMAAQCLGAICGVALVKGFQSSLYDRYGGGANELAAGYSTGTGLAAEIIGTFVLVYTVFSATDPKRNARDSHVPVLAPLPIGFAVFMVHLATIPITGTGINPARSLGVAVVYNNNKAWSDQWIFWVGPFIGAAIAALYHQVILRASARGYGSFRSNA

SEQ ID NO: 48784 - protein, 738 aa, Zea mays
  misc_feature (376)..(376): Xaa can be any naturally occurring amino acid
  unsure (1)..(738): unsure at all Xaa locations
GERERGEKVRSVGRGLSDLAAASPFLRWDLARFAPMAAVATPPAPAPAAPAPAPAPAAAPAPVTVAPAADQTTDLLQKLSLDSQPKAAGATEPAAAAAAAKEGAVTNQPLSVAIPPERSITPVLQDFMDPNLFYLPAYYYGGYDSSMSEWDDYPRYLNSDGVEIAPAVYGDIYGYGYAPYGAYSPATSPVPTVDGQMFGAQHYQYPTTYFQPPTPIPSTTQSNLQSSNNPEKPAAKADPAKATANGVPNGTGHTHSYSGTVPSQQSSALTPDGTYRAPLLGGVPSAGYLDTTYYGYDSTGAQFAWYDGSAYANGQQRTTTTNRFPSSSFSGNGSSAIYQNKSSTTQQMGMQNRRPTTTSAAPTYPNRMYPSPRPYXQYGNSVKTGLPYGSNGYDSRIYGRCGLGNGMDNRYRPRACSGYYGYGNESQDGTIELNRGPRSGRFKNQKLYGHTVTIAVKGQSLPSSESKNDSAVPDRAKYNRDDFPVQYDAAKFFVIKSYSEDDIHKSVKYNVWASTTNGNKKLDAAYQEAQSKGSACPIFLFFSVNTSGQFVGVAEMTGAVDFEKTLEYWQQDKWNGSFSVKWHIVKDVPNNILKHIILENNENKPVTNSRDTQEIRLEQGLQMLKIFKDHVSKTSILDDFAFYESRQKLMQDKRSKQQQLQKQVWDTRTPVSVTGERPQEPANGKPNPSVPDGVTAEVKAVKAPAENGITAPVVSYAAKVAQTAPEKPVLSNGVAKTG

SEQ ID NO: 48785 - protein, 651 aa, Oryza sativa (indica cultivar-group)
MAGSERTVVWFRRDLRIDDNPALAAAARDGVVLPVFIWCPADEGQFYPGRCSRWWLKQSLPHLSQSLESLGCPLVLIRAESTLEALLRCIDSVGATRLVYNHLYDPVSLVRDDKIKKELSALGISIQSFNGDLLYEPWEIYDDSGLAFTTFNMYWEKCMELPIDISPSLAPWKLVPAPGLESVRSCSVDDLGLESSKDEESSNALLRRAWSPGWRNAEKMLEEFVSHGLLEYSKHGMKVEGATTSLLSPYLHFGEVSVRKVYQLVRMQQIKWENEGTSEAEESIHFFMRSIGLREYSRYLCFNFPFTHEKSLLGNLKHYPWKVDEERFKSWRQGMTGYPLVDAGMRELWATGWTHNRIRVIISSFAVKFLLIPWTWGMKYFWDVLLDADLESDILGWQYISGSLPDGHELSRLDNPEVQGQKYDPDGVYVRTWIPELARMPTEWIHHPWDAPSCILEVAGVELGFNYPKPIVDLHIARECLDDSISTMWQLDTAEKLAELDGEVVEDNLSNIKTFDIPKVVLRETSPCALPIDQRVPHASSKDHNLKSKVLKASNRSSICVDMIRSSKMEATSSVANSPVSRKRSFCETAFHVPSYSSSAEVHSHIQDHGGSLVGPSRYLLQEAGRNCVDEVEDSSTADSGSSISRQRKAA

SEQ ID NO: 48786 - protein, 225 aa, Triticum aestivum
  misc_feature (109)..(109): Xaa can be any naturally occurring amino acid
  unsure (1)..(225): unsure at all Xaa locations
EDPYWQTFTLEVESSDTIDNVKGQDPGQRRASPPDQQRLIFAGKQLEDGRTLADYNIQKESTLHLVLRLRGGMQIFVKTLTGKTITLEVESSDTIDNVKAKIQDKEGIXPDQQRLIFAGKQLEDGRTLAEYNIQKESTLHLVLRLRGGMQIFVKTLTGKTITLEVESSDTIDNVKAKIQDKEGIPPDQQRLIFAGKQLEDGRTLADYNIQKESTLHLVLRLRGGQ

SEQ ID NO: 48787 - protein, 180 aa, Yersinia pestis KIM
MTLKELVVGFGTQVRSLWMIGLHAFHKRETLMYPEEPVYLPPRYRGRIVLTRDPDGEERCVACNLCAVACPVGCISLQKAEQKDGRWYPEFFRINFSRCIFCGLCEEACPTTAIQLTPDFEMGEFKRQDLVYEKEDLLISGPGKYPEYNFYRMAGMAIDGKQKGEAENEAKPIDVKGLMP

SEQ ID NO: 48788 - protein, 332 aa, Serratia entomophila
MSQNTLKVNELHDDADFDENGTEAESFDEKALVEEEASENDLAEEELLSQGVTQRVLDATQLYLGEIGYSPLLTAEEEVYFARRALRGDVPSRRRMIESNLRLVVKIARRYSNRGLALLDLIEEGNLGLIRAVEKFDPERGFRFSTYATWWIRQTIERAIMNQTRTIRLPIHIVKELNVYLRTARELSHKLDHEPSAEEIAEQLDKPVHDVSRMLRLNERMPSVDTPLGGDSEKALLDILADEKDNGPEDTTQDDDMKQSIVKWLFELNAKQREVLARRFGLLGYEAATLEDVGREIVLTRERVRQIQVEGLRRLREILQMQGLSIEALFRE

SEQ ID NO: 48789 - protein, 342 aa, Glycine max
MKILKPDPRLGDLIQSECGKSSWQGIITRLWPNTKYVDVIVTGTMSQYIPTLDYYSNGLPLVCTMYASSECYFGVNLNPLCKPSEVSYTLIPTMCYYEFLPVNRSNGVSHDSRHAPPPPNEKEQQELVELVDVKLGQEYELVVTTYAGLYRYRVGDVLRVAGFKNKAPQFNFVCRKNVVLSIDSDKTDEVELQNAMKNAVTHLVPFDASVSEYTSYADTTTIPGHYVLYWELSLKGSTPIPPCVFEDCCLAIEESLNSVYRQGRVSDKSIGPLEIKIVEQGTFDKLMDYAISLGASINQYKTPRCVKFAPVVELLNSRVVEKYFSPKCPKWVPGHKQWINQN

SEQ ID NO: 48790 - protein, 365 aa, Arabidopsis thaliana
MAYSKACYKLTTITILLLSFTLPSLAGNAENADVSECKAESGDLSCHNNKEAQKLKIIAIPSILVASMIGVSLPLFSRSIPALGPDREMSVIVKTLASGVILATGFMHVLPDSFDDLTSKCLPEDPWQKFPFATFITMISALLVLMIESFAMCAYARRTSKREGEVVPLENGSNSVDTQNDIQTLENGSSYVEKQEKVNEDKTSELLRNKVIAQILELGIVVHSVVIGLAMGASDNKCTVQSLIAALCFHQLFEGMGLGGSILQAQFKSKTNWTMVFFFSVTTPFGIVLGMAIQKIYDETSPTALIVVGVLNACSAGLLIYMALVNLLAHEFFGPKIQGNIKLHVLGYVATFTGAAGMSLMAKWA

SEQ ID NO: 48791 - protein, 512 aa, Thermoanaerobacter tengcongensis MB4
MIVLTSQQMREVERIAIEKMGIPSICLMENAGKEVAWEVKRVMEENGLSSAVVIAGRGNNGGDGYVVARNLYNWGIDVKVFVIGSIGSISGDARVNLEAIRNLGIYVAEVTQKEHLKFLEKTLKDSDLVVDAIYGTGLRGEVTGLAKEVIELINQSEKFVVAVDIPSGLNADTGRVEGAAVKARITITMHFLKPGLLIYPGIEYAGEVKIADIGIPSRLAAEVRPSYHYVVSQDVALKSRNPDTHKGDYGKVLIVAGSRSMTGAAFMAAKSAVKTGSGLVRLAVPLSIQPVIQSALYEAIIYGLNEEGGVISYKSLSQIFELIEQSDAVAIGPGLTHEGEVSKLIEDVIRNTEKPLVLDADALNALVGRLEVVKGKRVILTPHYGEMARLTGLKVEDIKNNIFEVARSFVRRYEVTLVLKGARTVIATRDGSIYINSTGNAGMATGGSGDVLTGMIVSLLGQGFEEEKAAVYGVFYHGKAGDVAKKSKGEYGMTAVDILESIPEALSEGLKG

SEQ ID NO: 48792 - protein, 75 aa, Arabidopsis thaliana
MLDKLIIGVAGGITGGILGTVDGFAKGVGIWPNNYQSTGRFENNNMTSPGNYGNGNGGAVKASENSGGRRQKDRE

SEQ ID NO: 48793 - protein, 609 aa, Zea mays
MAATMGSISANGSYQTNRPSALKQAPHMQFQQCCNGGLRFLSKHSQSTRSKIQVAKRRATDNGIHPKTTGHRAPIVCSAGMTIVFVATEVHPWCKTGGLGDVVGGLPPALAAMGHRVMTIAPRYDQYKDAWDTSVLVEVNIGDTVETVRFFHCYKRGVDRVFVDHPMFLEKVWGKTGAKLYGPTTGTDYRDNQLRFCLLCLAALEAPRVLNFNNSEYFSGPYGEDVVFVANDWHTAILPCYLKSMYKPNGIYKNAKVAFCIHNIAYQGRFARADFDLLNLPDSFLPSFDFIDGHVKPVLGRKLNWMKAGIIESDLVLTVSPHYVKELTSGPDKGVELDGVLRTKPLEIGIVNGMDVYEWDPSTDKYISVKYDATTVTEARALNKERLQAEVGLPVDSSIPVIVFVGRLEEQKGSDILIAAIPEFVGENVQIIVLGTGKKKMEEELTQLEVKYPNNARGIAKFNVPLAHMMFAGADFIIVPSRFEPCGLIQLQGMRYGVIPICSSTGGLVDTVEEGVTGFHMGSFNVECETVDPADVTAVASTVTRALKQYDTPAFHEMVQNCMAQDLSWKGPAKKWEEVLLGLGVEGSRAGIDDAEEIAPLAKENVATP

SEQ ID NO: 48794 - protein, 499 aa, Zea mays
MEGAGKDGNPLRNYRIGKTLGIGSFGKVKIAEHISTGHKVAIKILNRRKIRGMEMEEKVKREIKILRLFMHPHIIRLYEVIDTPADIYVVMEYVKCGELFDYIVEKGRLQEEEARRFFQQIISGVEYCHRNMVVHRDLKPENLLLDSKCNVKIADFGLSNVMRDGHFLKTSCGSPNYAAPEVISGKLYAGPEVDVWSCGVILYALLCGTLPFDDENIPNLFKKIKGGIYTLPSHLSGAARDLIPRMLVVDPMKRITIREIREHDWFKILLPRYLTVPPPDSAQQVKKVDEETLREVLGMGYDKNLLVESIQKRLQNEATVAYYLLLDNRLRTTSGYLGAECQEAMDSSFSNIASYETPSSARGNRQQIFMESPVGLRPHLPAERKWALGLQSRAHPKEIMSEVLKALQELNVYWKKIGHYNMKCRWSPGFPAQIHNNHNFSAGSIETDSLSERLSLIKFEIQLYKTRDEKYLLDLQRVSGPQLLFLDLCAAFLTQLRVL

SEQ ID NO: 48795 - protein, 187 aa, Carica papaya
INPAVTFGLLLARKLSLTRAIFYMVMQCLGAICGAGVVKGFEGSATFELKGGGANVRQPWIHKGDGLGAEIVGTFVLVYTVLSATDAKRNARDSHVPILAPLPIGFAVFLVHLATIPITGTGINPARSLGAAIIFNRDKAWDDHWIFWVGPFIGAALAALYQQVVIRAIPFKSKCKFPKWVSIKYVI

SEQ ID NO: 48796 - protein, 329 aa, Bacteroides fragilis YCH46
MDKIIGLGNALVDVLATLKDDTLLDEMGLPKGSMQLIDDAKLQQINERFSQMKTHLATGGAAANTILGLACLGAGTGFIGKIGNDAYGNFFRANLQRNGIEDKLLVSDLPSGVASTFISPDGERTFGTYLGAASTLKAEDLTLDMFKGYAYLLIEGYLVQDHDMILHAIELAKEAGLQVCLDMASYNIVAGDLEFFTLLINKYVDIVFANEEEAKAFTGKEDPKEALELISKKCSIAIVKVGGNGSYIRKGTEEIKVEAIPVKKVIDTTGAGDYFASGFLYGLTCGYSLEKCAKIGSILSGNVIQIVGTTIPGERWDEIKLNINEVLSE

SEQ ID NO: 48797 - protein, 814 aa, Chlamydomonas reinhardtii
MLSTTTIGFPRIGNQRQLKFAMESYFKGDSGEAELLAVAHKVQSDAWALQKAAGIAVIGLDGTLYDQVLDTITWLGAIPPRFKHLSGLQRYYAMARGGAALDMSKFFDTNYHYLVPELGPDVLGPATAGPPLQPDFSGPLDKLARGQAVVGRDGAVPILIGPVTFVSLSRGCELPLDQAVARLLPTYCALLQQLAAAGAPEVQLHEPVLATSEGTGMPTEFETAYAQMAQAAGSVPLHLVTYYDDLGAAYPWAVQLPVAAVTLDFLGPPGAAVPSQTLALLQQHGFPADKRLGAGVVDGRSVWKDDGTAVALLRALLDTGAVSSDRLVVTSSAPLQHLPYDLGLELEAPKTPEATAPAARAGRPPGFAKQKVEEIVSVARLAASPQPPLLQLVMAPWCSCSGCSRARAWRTTPPTSRLSGSAAKPYDVRARDEQLQLAAFPTTTIGSFPQTAEVRRLRQQLKSGRLTQAEYEGLIAGHIAHAVGVQEALGIDVLVHGEAERTDMVEYFGMQLGGMLFTRAGWVQSYGSRCVRPPLVVDDITYRGPSTCWEYKVAIPTAAQPVKGLLTGPVTILNWSFPRKDISRAAQAMQLGLALRQEVAALEAAGCTIIQVDDPALREGLPLNGERWASYLSWAVDAFRLCTGVAAAGTQVVTHLCYSDFQDILPAIDRMDADVLTIENSRSDKPMMAALAAAGYGRDIGPGVYDVHSPVVPSVEFIKSRIRSFVDSGILSGRYDRIWVNPDCGLKTRGWPETIAALANMVEAAAQARAELQLAGGAAVAPVTGGVEAAGKGGAGQCRRNQPLRGLLPLSCLP

SEQ ID NO: 48798 - protein, 608 aa, Legionella pneumophila subsp. pneumophila str. Philadelphia 1
MFVRICAMFGFVSDLLTAAVSSLDELLQDTPAHQIILGTAALYFLYNQYHNPSISRWYRSRNNASMKQRIIDSAYALAKNLPGVNQIIEKELNKELSSTREKLRIQRSGMTLREEIPEEGLSPQDILSAFDVDVEKCHFDFLSVTNDSPEREFLVERGDGKDSGALYAIHPKELTELLKEVYGATALTNPLHDKWPRINAMQAEVIRWCQNLFHGSKECYGLLTHGGTTSIIEAMAAYVIRARAKGIDYPEIVVPETAHAAFKKAAELTGAILITVPVDKKTGAVNPKVMSSYITRNTAVIVGSAPSFMNGIHDPVSELGQLAKKKNVPFHVDACLGGFLTAFLDTSSEPMDFRVPGVTSISADLHKYGCCPKGTSVCLFSEDSPALSVYAALNWSGGLYATPGILDGSTSGARVAEVYATLSYYGKNKYQEIAKSIITLRNAIQKELTTLLEEGNGLTSEDIYVYGNPQWSILGFRSNTCNAHFIADELEKRGWKLNLLQNPDGFHLCLTHVHTLVKGFETQFIKDLREAVIDVKNYPPGKKPSGNVKVYGAVGMMPIELQREICKQYQKARLNYTSASPGSLRIFTNVPVEEDEGLRNRKTEKYKV

SEQ ID NO: 48799 - protein, 597 aa, Lactobacillus gasseri
MLLLLATIEVVGASFTRQLEQNSIQNFESSIQVPNIITNQISSQLSRANSKKANQQLSQIISNYNLGDISQLMVVDNKGVIRAVSNVNDQNRIGQRTSNVDIKSVLSNGKQVSKVINDNGNYMVQISPLTSANGTNTPVGAIYVRASLQGVFNNLRQVSIYFLIASLIAAVLGAIVALVISRAITRPIEEMRKQALRVANGDYSGHVRVYAQDELGQLAEAFNTLSVRIERTQEISDSERRRLDNVLTHMTDGVIATDRHGNITIINETALDFLGKTEKDVIGKPITNLLGLKDVTIQDLLSTQQELVVRVNDNTRDEMILHANFSLIQRVTGFVSGLVCVLHDITQQQKNEREQQQFVSNVSHELRTPLTSLRAYVEALNDGAWKDPNIAPQFLHVIQDETERMIRMINDLLSLSRMDRGVARMDLEWVNLNDFVNHVLNRFDMMLKSDSDKMHKKKYTIKREFPHQALWVEIDTDKMMQVIDNIMNNAIKYSPDGGVITVRLLQAQKHVILSISDQGLGIPRKDLNKIFDRFYRVDKARSRKQGGTGLGLAISKEIVEAHHGRIWADSAEGAGSTFYISLPYEAISEEGENWDEV

SEQ ID NO: 48800 - protein, 183 aa, Glycine max
NDGEFLGSEDGRDPYDDQANEGIASTSVLLNYQSFREKTPRGKWSKQETELFYEAVREMGTDFSMIQEIFFPNKSRHQIKLKYKNEERQQPLQLTDAVNNRAKDHPHSKLFIERLQLASAKAEDPCRDASDFVMAEEVVDLTAGTNVCTFGLFSLSFNISLLVVQIIDDFTGGLFIREIFLIA

SEQ ID NO: 48801 - protein, 377 aa, Glycine max
  misc_feature (128)..(128): Xaa can be any naturally occurring amino acid
  unsure (1)..(377): unsure at all Xaa locations
MALASSVVELQPSSVKKKTAVSRSWILLDHYGKGTVLDADKYAIMRLVQIHARDLRILDPLLSYPSTILGREKVIVLNLEHIKAIITADEVLLRDPMDDDVVPIVEELRRRLPQVSAAEQGQGKEEAXFPFEIRALEVLFEAICSFLDARTRELETSAYPALDELTSKISSRNLDRVRKLKCAMTRLTIRVQKIRDELENLLDDDDDMADLYLSRKLAASSSPTSSSDAPYWLYGSPNTGSKRHKSSRASGTTVQRENDVEELEMLLEAYFMQIDGTLNKLATLREYIDDTEDYINIQLDNHRNQLIQLELFISAGTVCMSLYSLVAAIFGMNIPYTWKAPGHEHVFKWVVIFGGMVCASLFLSIVSYARRKGLVGS

SEQ ID NO: 48802 - protein, 109 aa, Taraxacum officinale
EYTVRALQRTMPPAVPAVVFLSGGQSEEEATVNLNAMNQYKGKKPWTLTFSFGRALQQSTLKAWSGKVENVEKAQAAFLARCKANSEATLGIYKGGSGLSEGASESLHI

SEQ ID NO: 48803 - protein, 294 aa, Scutellaria baicalensis
MEQYEKVEKIGEGTYGVVYKARDRVTNETFALKKIRLEQEDEGVPSTAIREISLLKEMQHGNIVRLQDVIHSEKRLYLVFEFLDLDLKKHMDSCPEFSKDPRLVKTFLNQILRGIAYCHSHRVLHRDLKPQNLLIDRRTNALKLADFGLARAFGIPVRTFTHEVVTLWYRAPEILLGSRHYSTPVDVWSVGCIFAEMVNQRPLFPGDSEIDELFKIFRIMGTPNEDTWPGVTSLPDFKSAFPKWPSKELATVVPNLDAPGLDLLGKMLCLDPSKRITARHALEHDYFKDIGFVP

SEQ ID NO: 48804 - protein, 436 aa, Prochlorococcus marinus subsp. pastoris str. CCMP1986 [sequence omitted]

SEQ ID NO: 48805 - protein, 276 aa, Triticum aestivum
PLLSMNLDELLKSVFPDGVDPVGGVAGQSEPAPGLLRQGSITMPPDLSKKTVDEVWKGIQDSPKRSGEEGSRRRRERQPTFGEMTLEDFLVKAGVVAEGHLKDPIDLPANMGAVGSSVIEAAAPSLNPGAHWLQQYLEPQHPRMAGPFMASHLGPQPLSVATGAIMEPIYPDGQITSPMLDALSDPQTPRRKRGASDGVTDKVVERRQKRMIKNRESAARSRARKQAYTNELENKVSRLEEENERLKKQKELDMMITSAPPPEPKYQLRRTSSAPV

SEQ ID NO: 48806 - protein, 372 aa, Oryza sativa
MARGKNHPDGEEEEAPAAAGEEEAPVEMDEEGEMEEEEEEEQGEGEGEERDEGEEEEEWEDAEEVEGGEESEQAAAEEEDSPLVVVEAEAAAPVVDGSPPKLAEGYYEIEDIRRRRLRKGKLQYLVKWRGWPESANTWEPLENLSACSDIIDAFEMRLQSPRPGRKRKRKITTTPVAGSNPSHGLDASGSVVRNQLAQNIVQEGSSSVISRTPCQELPLSIRLTDQQNEHHLVNGSSNSENLVKVPPSQGGQVTGAKKRKSGNVRRFEQNKPTQGQGECGALVVAEDVGSTEGETGDKKKTEGCPNRVHITKIIKPVRFAAAVNNDVQQVSITFKALRSDGQEVMVDDKELKANNPLLLISYYEQCLRYNPT

SEQ ID NO: 48807 - protein, 539 aa, Kluyveromyces lactis NRRL Y-1140
MSKDKYDRSLKNLNMLRRPVLNNVTNTTESTFGKVLRQAKSRLQNSRTNNLPQGTANSYSNTKPAPLRDDIMVPEDKENYNPLAKIDEREELDSNLVHNHKSLGTQKHVTIDERQEIIGYSHLDTEKSAPSSSTYSSEHTENDGVHDVNPNVQRSDNEADFKMQTTNAFHENVNDGSDATDDASSGSKSSNECPAVNVGNSLAPMPIDENANNSASSVELRAKQLQVEDSKKRPISTVVEQTLPKKFKVCEKGKEYEWEDLDEEDINDPFMVSEYVTDIFEYLHRLEMMTLPNRHELFKHANIQQNRDILVNWMVKIHNKFGLLPETLYLALNIMDRFLCKELVQLEKLQLVGTACLFIASKYEEVYSPSVKHFAYETDGACDEEEIKEGEKFILKTLEFNLNYPNPMNFLRRISKADDYDIQSRTLAKYLLEISIVDFKFIGILPSLCAAASMFLSRKMLGKGQWDGNLIHYSGGYTKDELAPVCNMVMEYLVQPVVHDELFKKYASRRFMKASVISRQWAKKVMSHNYDIMTLHDSE

SEQ ID NO: 48808 - protein, 446 aa, Bradyrhizobium sp. BTAi1
MLSRRTLLGSAALAGASAVSGRVQAAAIPEAPTMDKAVMQPPLNPSAGPDYQPVVTLNGWSLPFRMNGDWKEFHLVAEPVTREFAPGMTTHLWGYNGQSPGPTIEAVEGDRVRIFVTNKLPEYTTVHWHGVILPCGMDGVGGLTQPHIKPGKTFVYEFEMKHAGTFMYHPHADEMVQMAMGMMGMIVVHPRGSAPPPVDRDFVFVMSTYRIEPGSYLPKVNEMTDFNMWTWNARVFPGIDPLPVRLGDKVRIRIGNLTMTNHPIHLHGHKFKVIGTDGGWLPETAQFPETTTDVPVGAVRVLDFTADNPGDWAFHCHKSHHTMNAMGHDMRNLIGVSRKELAAAVGKLAPEGMVMGHTGMAMGTMEMPAPDNTLPMMTGTGQFGPIEMGGMFTTLKVREGLARDDYRDPGPYQFPQGSVAYEVASAPEPVPRASSAAAATPKSTRP

SEQ ID NO: 48809 - protein, 271 aa, Triticum aestivum
  misc_feature (220)..(220): Xaa can be any naturally occurring amino acid
  misc_feature (225)..(225): Xaa can be any naturally occurring amino acid
  unsure (1)..(271): unsure at all Xaa locations
MADPAEETVAAPPPTPAVPAEGAPPLSAEPPASTDASPEKAAPPAPAPDTTVRSRGFRLLGEDTSVHKVLGGGKTADVLLWKDKKTTAVVIGGTTVIWVLFEVLDYHLLTLLSHVMIGVLAILFVWSKAMTFIKKSPPDIPVVEMPEDLALNVSRALRNDVNRSLHLLREIAMGHDLKKFLGVIAGLWVLSEVGSCCDFLTLIYIAVLMIHTVPILYDKXQDKVXHFAGKAIPRRTLQVLDKRSDKIPEDWETLKAGNEAGRFGSVSKRNK

SEQ ID NO: 48810 - protein, 408 aa, Kluyveromyces lactis NRRL Y-1140
MRPRTRSSWSVSDAEAMEKSSHQRKRVALSEQPLHDNKLKSSVGSLRNSQVDEGKNKIYGNSSQTTSSVSLKRQIYRDDDDEEQKSDVRSDDDILEPRKSHKRLKCESLERRREELDSQDKEDVTMCYDYSDDIFDHLYTRQFETTPKINYLKDKNYEFYLRPTMRSILVDWIIEVHCKFQLLPETLYLSINLMDRYLSFNKVTLPKLQLIAITSLLIAAKFEEVNLPKLSNYSYITDNAYSNDEIKQAEFVILNKLEYNIGWPNPLNFLRRISRCDEYDSITRTLGKCLIGYMISCPHFIDVVPSKIASVAMFTAQRIVHEDFQWDELWDYYSCFSFKDNEIELKELSQILINDIAKPTTQLNALIHKYKKIGTWNKIHDWCLKHCTYEELNPSDYASSSPASSTSL

SEQ ID NO: 48811 - protein, 238 aa, Arabidopsis thaliana
MRPLSSSLRPSSSVSFSTGKPIKRAYDGLLLDAGGTLLQLSKPVHETYASLGQKYGLKTTPAEIKEGFKRVFSAPWPEKLRYQGDGRPFWKLVVSEATGCSDNDYFEDVYQYYANGEAWHLPEGAYETMSLLKDAGVKMAVVSNFDTRLRKLLKDLNVIDMFDAVIVSAEVGYEKPDERIFKSALEQISVDVNRAVHVGDDEGADKGGANAIGIACWLWGEDVQTFSDIQKRILVSEL

SEQ ID NO: 48812 - protein, 337 aa, Glycine max
HFPHSIFHHDLLFLFYFFLLTEFPPQATAQPPNTLTPPPQQDRFTRLKFDKSMAIVLLILVVVFFILGFLSVYTRQCAERRMGGRFDLSILISRRQRGLGREVIETFPTFVYSTVKSLKIGRATLECAVCLNEFEEDETLRFIPNCSHVFHSDCIDAWLANHSTCPVCRANLTSKPDDRCSAPIQNPDPEQPVLTSSTRPETVGADLLSQNRTPPRPWSTGLSIASWFPRSHSTGHSLVQPGENCERFTLRLPEEVRNELMLSRTKSCGVSVTFTRENSGRRGYRARSLGSSLSPHVTRNSTSPHVRWWFSRPRSIKDDVGERSSDRLFSTTRDISE

SEQ ID NO: 48813 - protein, 460 aa, Arabidopsis thaliana
  misc_feature (187)..(187): Xaa can be any naturally occurring amino acid
  unsure (1)..(460): unsure at all Xaa locations
MDYSFLLIILLLTISTSCCAAPSSYVEEQLRDRISNLPGQPSNVDFRQYSGYVTVHEERGRALFYWLVESPLARDPKSRPLVLWLNGGPGCSSVAYGAAEEIGPFRVGSDGKTLHSKLYAWNKLANLLFLESPAGVGFSYSNTTSDLYTTGDQRTAEDSYIFLVNWFERFPQYKHREFYIVGESYAXGHFVPQLSKLVHERNKGFKNPAINLKGFMVGNAVTDDYHDYIGTFEYWWNHGLISDSTYHQLKTACYSVSSQHPSMQCMVALRNAELEQGNIDPYSIFTKPCNSTVALKRFLKGRYPWMSRAYDPCTERYSNVYFNRLDVQKALHANVTRLSYPWKACSDIVGSYWDDSPLSMLPIYKELITAGLKIWVFSGDTDAVVPITATRYSVDALKLATITNWYPWYDHGKVGGWSQVYKGLTLVTVAGAGHEVPLHRPRQAFILFRSFLESKPMPMT

SEQ ID NO: 48814 - protein, 470 aa, Leuconostoc mesenteroides subsp. mesenteroides ATCC 8293
MVSVMWFRRDLRLEDNIALFNALRHSNEILCVFHINPEQVTEKSTVNQSAFFASVLYFKNKLKKQGINLNIMYGDINDCFASLKQKLPDWHDIFFNFDERGFGRNRDQKSVAFFEDKLKVKAHPYIDYNLHGATEVKKDSGAGYKVFTPYFKRWIRQEKPAPVSYVIDKRIKSARLLFPENEQLLETFIDDRFSFIKKDLGSETAKKVLNRFINESLDQYDEERDFPANDSTSHLSRYLRTGEISIRTVWRAIDQSPDSDGKSTFMKELCWRDFYNMIYVMYPNQNVESVNKDFRHVDWINNEQQFEAWRTGQTGFPIVDAAMRQLNATGWMHNRLRMIVASFLTKDLLIDWRWGEAYFHNKLLDYDAASNIGGWQWAASTGTDSVPYFRIFNPTLQSKKFDSNGLFIKKYVPELKNVDNKMIHEPGKLSESEQTRFNVRIGQNYPFPIVDHSYARKRAISIYESSKDVN

SEQ ID NO: 48815 - protein, 427 aa, Pseudomonas aeruginosa
MSRSETLFNNAQKHIPGGVNSPVRAFKSVGGTPLFFKHAEGAYVLDEDDKRYVDYVGSWGPMILGHSHPDVLDAVRRQLDHGLSYGAPTALEVEMADLVCSMVPSMEMVRMVSSGTEATMSAIRLARGYTGRDSIIKFEGCYHGHSDSLLVKAGSGSLTFGVPNSPGVPAAFAKHTLTLPFNDIEAVRKTLGEVGKEVACIIVEPVAGNMNCVPPAPGFLEGLREACDEHGVVLIFDEVMTGFRVALGGAQAYYGVTPDLSTFGKIIGGGMPVGAFGGKREIMQQISPLGPVYQAGTLSGNPLAMAAGLTTLRLISRPGFHDELTAYTTRMLDGLQQRADAAGIPFVTTQAGGMFGLYFSGADAIVTFEDVMASDVERFKRFFHLMLDGGVYLAPSAFEAGFTSIAHGDKELEITLNAAEKAFAALK

SEQ ID NO: 48816 - protein, 183 aa, Xanthomonas axonopodis pv. citri str. 306
MSQTLYDIPVTRIDGQPTTLADYRGKVLLVVNVASKCGLTPQYEGLEALYRDKRAQGLEVLAFPANDFNGQEPGSEAEIAQFCQLTYDVTFPMFAKIAVAGDQAHPLYGALTSTHPHTTGEGPMREKLAGYGIAPNPAPGVVWNFEKFLIGRDGKIIDRFAPDIPADDARLRAAIDAALATRS

SEQ ID NO: 48817 - protein, 494 aa, Arabidopsis thaliana
  misc_feature (170)..(170): Xaa can be any naturally occurring amino acid
  misc_feature (291)..(291): Xaa can be any naturally occurring amino acid
  misc_feature (399)..(399): Xaa can be any naturally occurring amino acid
  misc_feature (416)..(416): Xaa can be any naturally occurring amino acid
  misc_feature (436)..(436): Xaa can be any naturally occurring amino acid
  unsure (1)..(494): unsure at all Xaa locations
LSSSPLSKTQRFITPSQGSRLRTLCTKVIIPNMQDSGSPPLSYLTQREAAEIDETLMGPLGFSIDQLMELAGLSVAASIAEVYEPEEYSRVLAICGPGNNGGDGLVAARHLHHFGYKPFICYPKRTAKPLYTGLVTQLDSLSVPFVSVEDLPDDLSKDLMLLLDAMFGFXSFHGAPRPPFDDLIRRLVSLQNYEQTLQKHPVIVSVDIPSGWHVVEGDHEDGGIKPDMLRFRGPHHFLGGRFVPPSVAEKYKLERPSYPGTSMFFRIGKPPKVDITAMRVNFVTQEILEVXVETDTTVQLRKWFDEAVTAGLRETNAMTLTTTNKDKKPTSRMVLLKGFDENGFVWYTNYESKKGTDLSEKPSAELHFYWENLNRKVRIEGPVERILESESENYFHSRXRGSQIGAIVSKQSSVVXGRHVLYDEYEELTKQYSDGXNSKTLSVIPKPKNWGGFRLKPNLFEFWQGQPSRLHDRLQYSLQDVNGNPAWKIHRLAP

SEQ ID NO: 48818 - protein, 417 aa, Silicibacter pomeroyi DSS-3
MKDIADISATMTELGKRARAAAAQLAFASAEAKRAALIGAADAVWARRGEIIAANARDLEFGRDKGLSPAMMDRLMLDEARIQGIVDGLRTVADQDDPVGEVLAEWDMPSGIHIQRVRTPLGVIGVIYESRPNVTADAGALCLKSGNAVILRGGSESFHSSGAIHACLVAGLRAAGLPEDAIQLVPTRDRAAVSELLTMTDYVDVIVPRGGKGLVGLVQREARVPVFAHLEGIVHIYIDKAADPEKALRVVMNAKTRRTGICGAAECLLIHKDIADNLGADLVRALIEAGVEVRAEGLPGSLAATEADWGKEYLDMIIAAKVVDDVDAAIAHIRQYGSNHTDCVITEDDAVAARFFERLDSAILMHNASTQFADGGEFGMGAEIGIATGKMHARGPVGAAQLTSFKYLVRGNGTTRA

SEQ ID NO: 48819 - protein, 338 aa, Triticum aestivum
MSVSNIGMMDGAYFVGRNEILAWINTTLQLGLAKVEEAASGAVACQLMDAAHPGAVPMHKVNFDAKNEYDMIQNYKVLQDVFNKLKITKHIEVNKLIKGRPLDNLEFMQWMKRYCDSVNGGFMTSYNASERRESSKGGKDTNRRTSGTSQAPAKSASATHKAQPPSHAAKRANGHASNAPQRCAKPPPAYDAQMTELKLLVDSAEKERDFYFSKLRDVEILCQSPEVEHLPIAKAIQKILYASEDDPSTVAEAQAEMVAQQNQMQQQPMLSPILEASEAPSITPKDSSEESLRQEAAAAHKRKSISDLEEFEMGSSSRMRLSDVSDVQLCGSPLMSFT

SEQ ID NO: 48820 - protein, 316 aa, Yersinia pestis KIM
MKHSKQAVLIIAPVMDYLTEKLEQTFTVHKLYQVTDHAEFLADQGKNIKGIVTRGDIGVTNEVLALLPEVQIISIFGVGTDAVDLDYTRERNIIVTTTPGVLTDDVADTALGLIIATSRRFYQASQFLRSGEWPNGSLPLSSKVTGKRLGIFGMGRIGRAIARRAVGFDMQIAYTDTVHDSSLPYQYVPDLISLAKQSDILVVAISGGKDSAGLVDKAIFAAMPNHGILINIARGSMVNQDDLISALQQQQIGGAGLDVFADEPHVPQALIEMDNVFLLPHIASATTDTRIQMSDIVFSNILAHFSGETAPTAITY

SEQ ID NO: 48821 - protein, 368 aa, Silicibacter pomeroyi DSS-3
MATLTTARRLVVKIGSALLVDRNTGDLRADWLHSLAADVAWLKGLGLDVILVSSGSIALGRGVLGLPRTALPLEQSQAAAAVGQIRLARAYEEALAPHRITTAQVLVTLEDSEDRRRYLNSRATLETLLGLGAVPIVNENDTVATDEIRYGDNDRLAAQIAVTVGADQLILLSDVDGFYTGNPSDDPGATRFDVIDRITPEIVAMAGDAGSGLSKGGMKTKLMAAQMATAGGCAMAITEGSPLNPLKTLENGANCTWFTATLDPQAARKRWIAAMKPRGDITVDAGAARALEGGKSLLPAGVASVTGDFGRGDPVAILGPDGRRLGQGLCRYTGDEARAIRGRQSSDIEATLGYPGRAALIHRDDMAL

SEQ ID NO: 48822 - protein, 669 aa, Burkholderia pseudomallei K96243
MVQKTTHPGGRAFTDVLAFTFRHWRAQPVRIAGIAALALATALGDVLTPLFAGRLVDALSHGVAAADKAAAWSRALHAFGVLIGIGLACTLLRQAVFRNIIVLTLKMMSEIAANAFHRVQRFSTDWHANSFAGSTVRKITRGMWAIDLLNDTLLVALLPSIVMLTGATLLLGLHWPVMGAVVGGGSVVFIAVTVAMSLRYVAPAARLGNLWDTRMGGALADAVSCNPVVKAFGAETREETRLDGVVSKWRARTRRAWRRGTLNGGVQGAMLAAMQAAILGAALWLWAHDRASIGDITFALTTFLVLQGYLRDIGMHIRNLQRSVNDMEELVSLERQPLGIDDKPGAKPISIARGEIRFEHVTFGYSGAHAKPLYENFSIRIAPGERVGLVGHSGSGKTSFIKLIQRLYDVDGGRITIDGQDIAEVTQASLRSQIAIVQQEPLLFHRTLAENIAYARPGATRDEIERAARLASAHAFIDALPQGYDTLVGERGIKLSGGERQRVAIARAFLADAPVLILDEATSSLDSESEVLIQQAMERLMVGRTTLVVAHRLSTVRALDRLIVLDKGRVIEEGSHDALIRLEGGVYRRLFERQALELAKGLIEQTGGTVADWLRDEQDEHGGRDERNERGERDKPGALDGHDARRTHGVLDESRDGGQADNSAMAMEK

SEQ ID NO: 48823 - protein, 337 aa, Glomerella lindemuthiana
MAPIKVGINGFGRIGRIVFRNAVEHPDVEIVAVNDPFIETKYAAYMLKYDSTHGIFNGEIAQDGNDLVINGKKVKFYTERDPAVIPWKETGADYVVESTGVFTTIDKAKAHLQGGAKKVIISAPSADAPMYVMGVNEKSYDGSAVISQASCTTNCLAPLAKVINDKYTIIEGLMTTVHSYTATQKTVDGPSAKDWRGGRTAAQNIIPSSTGAPKAVGKVIPELNGKLTGMSMRVPTANVSVVDLTVRIEKGATYDEIKQAIKEAAEGPLKGVLAYTEDDFVSTDMIGNPNSSIFDAKAGISLNNNFVKLVSWYDNEWGYSRRVLDLLAHVAKVDASK

SEQ ID NO: 48824 - protein, 3780 aa, Legionella pneumophila subsp. pneumophila str. Philadelphia 1
MVNVTMKNKTKNLLNEPIAIIGMNCQFPGIDSDIEDISAFYDMLMKGQTPIKDVPENRWNIEEYYSADRKKADKIISKKGGFLDNTHLFDAAYFKISSAEAKQIDPQQRLFLEVAIRALNDANIPLDSLKDSNSGVYCGISTHEYSQLNYKDHIKFNAYTPIGIANSAAAGRLCHFLNLKGPSMAVDTACSSSFTALYLAATALRNQQCDMAIVGGVHLSLCPESFIGLTKANMLSATGQCSSFDSKADGFVRSEGCGVVIVKRLTDAIRDNNKIYALIKSMVINQNGDGTGLAAPSTNAQIAMHQAALEHAHLTAGEIDYIETHGTGTTVGDPVEFNAIQSIHQGHHSPQKPLIVGALKSNIGHTISSSGIASLIKVLCSLQNEAIPPNLHYSNPNSLIDPESIPALLPVEAIPFLKLKNKKRYVQVSNFSFTGTNVSVILEEAPELESHESKQDDNEPKCFVASANSELSLKQLMSRYEHYLKNSSSTLGDICHTLINCRDHYKFRCAIIVNDKKELIKKIESKDYEIKKVVLQNNPRTVLNDAKAIYEAYLSGINISTDDKNTAYNKVDLPLYCFDRKPYWHEVRKQVKNDHWLDSLYQQPIEQQVAIIKTELASQIKDLLKKDNIDPHQDLETLGLTTSLLESLDQIFQDMFSPRYKVPSLQSLRYLTLDKLARHLQKMIMPPVVYRQPSINVLNVEPIAIIGMSCRFPKAANVDEFLSLLEKGESGMIDIPLERWDNEKFYDSDVDALGKLYIKQLGFIDHVNHFDAEFFNISPREAKLMSPQLRVFMETSYHALEDANLSLDAVKDTNTGVFVGVGTNEYPRVLAYQGVTLEDLNIYFATGNVLNALAGRVAYSFDFHGPIQAIDTACSSSMTAIHNACLSLQSGDCNMALAGGVNIILSPDSNITLSKARMLSPDSRCKTFSEDADGYGRSEGCGVVVLKRLSDAVKDNDNILAVIKGTSINSDGKSGGFTVPNGAAQEEVILSALAKANLSPGDIDFVEAHGTGTPLADPIEVNTLTKIFSEHHNKENPLYISSVKTNIGHSESASGVASVIKTVLSLKTKTIFKHLNFKKLNPAIQLINTVIPLDKTDWTKKQGLRCAGVSSFGFSGANAHAILQEAPEDKKEARTLPEESLLVLSAKSKTSLELLLASYQNYLSNTREEFADICYTAATCRSHFMYRVAIKAQNAAQAANIIKSNGYTICHITKEKEWTQQPDTLAELQTAYLDGFPINWSEFYRSLGHHFAKVKLPLYEFERIEHWFGDKNKLKDAPLPKDWCFQIQWQNEPCDKSNRKLRGNRWLLIGPRHLADGFKAQGLEIVYEDEEYSRDKLEGIIFAESLHLAPPDIEANIDFQKKTLKKLLNLIKELDNQSIDLQLLILTSNGIAELANDKHPVNISNSPLIGFCKTLALELPQFKTILIDMDKIEEDKYRTQVIEEINYNHGSRYEHIVAYRGGERLASRLKKTPLEDRRRLLHGVKGRYLIAGGCGGLGLVTAQSLLSSGARELILTSRNIDKPRIKEAIYKIKSHYPGANIRVVSLDITDRESLKNLLSELNADGQLKGIIHAAGAAIKAPLLEHQDEDVDYLFSAKVKGGWYLHELSLDCNLDFFVVYSSVSSVFGSNKESVYSGTNSFLDALIAERQRMGLPGTAVQWGPWGEVGMAQKRSRDEGLKQALISNAQGHVIIKCLINDEFKHATIISPEYLKFMLDFVPKPLPGFYGQLDEELEKIPQQHHQSPAKNLSPWLNQYLEISEEERFKACKAMVSDICTGILELTENEDLNEDEGFFELGFDSLMITELASELKKKLEPFLKVTVTIGFNYPSISKLAKYIESELDKNLVKIQSPKSTPKPIDDGIAIIGMSCLLPNAPDIAAFEKLLEEGLSGIKDIPNDRWDNNQYYDPDMEAPGKSYVTKLGLIENIKYFDAAFFGISPREAKLMEPQQRVFLECCYKALENANYPSESLRGSLTGVFAGVGPNEYYAQLEKSGFSNEELSAYSITGNVLNLIPGRVAYTFDFKGPSISVDTACSSSLVAIHYACQSLKNKEIDYALAGGVNILLMPESNVTLCKAKALSPDGQCKTFDERADGYVRGEGCGVVLLKRLSDALRDNDHILAVIKGSAVNNDGKTAGLTVPNGKSQEEVMKKALGQTELSRTDISYIEAHGTGTPLGDPIEVDAINKVYGHQRNKENPLYLGTVKTNIGHLESASGVAGVIKTVISLQRKTIYKNLNFNKLNPNIKLDGTQLALEKTNWKTNTKLNYAAVNAFGFSGTNAHVILAEFPKEEKPKTSKPSQKHLLVISAHSKTALDNLTQRYQQYLETTEHHFGDICFTAATCRDHYHYRLALTAENAIEASRMLGAGQFALSYHENITLDLQNDRALNSLLMDYLQGKPVDWKSYYQSLKGEFTKVLLPNYTFDRSEYWLDKKNNDSMATHKGEQHPLLGQMLAMPGNEYLFHQKLDLENLAYIKQHSVFEKVIFPATAYIESGLAAAKSIFQSSAFQIEKFNIERPLHPKQGQEFQLQVKPKMDGQYKINLFAKQENDWQTFCEMEIHAKPTAARESIHIDVLKSSFGDKVELSDIYEQFQKSSLFYGDEFRVLQEGYVRTNSVLAKVTLTKASQGQDYYYHPVLLDGAMQSILLLSVKNDENKNFNAENVTYIPYAFIRMTVFQEAPRSLWVHLTKQNTEDASDLCVNMNLYEQSGLLIAQIAGLKLRRVTRSHFVSYDAALNHLYYTEWSPVPLKTLPQQKIPDFLAITKNPGKAKEILDGLNYHLVERIDDCTNIENSNIVFLYEQGQFHDLFHCCQILFRLRPKRFILVTEHAYAIQDHDQVNPYHTMACSFWKSFRNEYEPNKNYTIDLDSNSRLATALMYLFNTDTHDTQIAVRESLYLPRLKKKQLVSNSASERLIDGNATYLITGGTGGLAKLLMEYLMRRGARHIAITSRAHYPDDIKALIDKAKQNQIDIKHYMVDAGNYQKMEQVIGEIQQSPNPLKGVFHLAGLIQDGLIVNLNDEAMQKVISAKMDGALILHQLTQNIPLEWFVMFSSSASLLGARGQANYAAANGFLDGLAHLRRQQGLPAISINWGPFHTTGMAANLTHTLQHYGFLPLDKDNIDILDVLLPSQLPQISPCPMNWDVYCKHTPKQTELSALVKAKPLPDQSFLNALRQHSKEESISILSQALREIAADVLALDDSEHISNHQDLFSTGLDSLMSMDIRNRIYDKLQCQTLSLPIEYFINTPTINKIARHISDELDHVFDSHSDYHPTENPSEREIALCDFQYVFWVLNKLDYHFNIGTQIQLHGRINKDYVQRAFEFVVNQNSVFWIHFNKDKPTQKLHKVGQFELIYQDISLNHETKALNHEFQNNILRAIPLTKQPLIRVYLYKINNELHELHIVIPHIIVDDASCEMVFCQFKNNYEKLTLGKELVSNPEKGSYFNYVKQNNNHYQKNLKNKIDFWQNYNKGFKMLSFGNRYHLSDTSKQTKHLFHYPIDPQHAEQFINWHKTQNINVSTGLIAACQIVFYKLSRQNKIPIILIHSGREGGEYKSTLGLFSEYKRINLTLNENSQFIDCIHSIEEQLLKTAPYQKCSHLIKDSGLKGSSLSFGQYLTLALNKMFMLKHFKESKLHSIIIDYYLKYLSRLLSFKKNISMKQRLNQLFKLDMSLQKPERLRVLVSVTPSFFTKERPDMSFANLDYSYPNHFGCMDRPIGNRTLWIYFSKNQDGEYQISINAPLTIECKNKIGSGLGQFITTFVENNNCNIAELIQAMEDSSIAS

SEQ ID NO: 48825 - protein, 390 aa, Anabaena variabilis ATCC 29413
MNQANNVLDSIYQPDLEIMNQPEIELDDLLIEEDEDLLLADDGDIDEFLEPQTDEDDAKSGKAAKSRRRTQSKKKHYTEDSIRLYLQEIGRIRLLRADEEIELARKIADLLELERVRERLSEKLERDPRDSEWAEAVQLPLPAFRYRLHIGRRAKDKMVQSNLRLVVSIAKKYMNRGLSFQDLIQEGSLGLIRAAEKFDHEKGYKFSTYATWWIRQAITRAIADQSRTIRLPVHLYETISRIKKTTKLLSQEMGRKPTEEEIATRMEMTIEKLRFIAKSAQLPISLETPIGKEEDSRLGDFIESDGETPEDQVSKNLLREDLEKVLDSLSPRERDVLRLRYGLDDGRMKTLEEIGQIFNVTRERIRQIEAKALRKLRHPNRNSVLKEYIR

SEQ ID NO: 48826 - protein, 100 aa, Brassica napus
AELRWGAFHFLVLSSDWRSAHSGIAPRPPNTHRHRTCSYARTHVGYGPYFGKKVDPEPGRCRRTDGKKWRCSKEAAPDSKYCERHMHRGRNRSRKPVEAQ

SEQ ID NO: 48827 - protein, 548 aa, Zea mays
  misc_feature (68)..(68): Xaa can be any naturally occurring amino acid
  misc_feature (131)..(131): Xaa can be any naturally occurring amino acid
  unsure (1)..(548): unsure at all Xaa locations
MYTLPVRATTSSIVASLATPAPSSSSGSGSGRPRPRLIRNAPVFAAPATVVKRDGGQLRSQTREIERXRKGGHPPAAGDKRGGERGQRRGGEEEENEQLPLPSEKKGGASEGEAVHRYPHLVTPSEPEALXQPPPPPSKASSKGMDPTVERLKSGFQKFKTEVYDKKPELFEPLKSGQSPRYMVFACSDSRVCPSVTLGLQPGEAFTVRNIASMVPPYDKIKYAGTGSAIEYAVCALKVQVIVVIGHSCCGGIRALLSLKDGAPDNFHFVEDWVRIGSPAKNKVKKEHASVPFDDQCSILEKEAVNVSLQNLKSYPFVKEGLAGGTLKLVGAHYDFVKGQFVTWEPPQDAIERLTSGFQQFKVNVYDKKPELFGPLKSGQAPKYMVFACSDSRVCPSVTLGLQPGEAFTVRNIAAMVPGYDKTKYTGIGSAIEYAVCALKVEVLVVIGHSCCGGIRALLSLQDGAPDTFHFVEDWVKIGFIAKMKVKKEHASVPFDDQCSILEKEAVNVSLENLKTYPFVKEGLANGTLKLIGGHYDFVSGEFLTWKK

SEQ ID NO: 48828 - protein, 358 aa, Oryza sativa
MSMAEVCCDSAVVVGAEAEARARARAGRRRRAGVEGAGRWNATATAAGVAAEEAATRKRRASGGEAGLVVVAKRHGAASVAGRRREMEDAVSLREAFAAPANGEVAAARCDFYGVFDGHGCSHVADACRERMHELVAEEMGAGSPAAAAREPASWTETMERSFARMDAEVIAGCRAESGSCRCEGQKCDHVGSTAVVAVVEESRVVVANCGDSRAVLCRGGAPVQLSSDHKPDRPDELERIEAAGGRVIFWEGARVLGVLAMSRSIGDAYLKPYVTAVPEVTVTGRSDFDECLILASDGLWDVVSNEAACEVAQSCLRRGRQRWCAEAAAVLTKLALARRSSDNISVVVVDLRRGNAL

SEQ ID NO: 48829 - protein, 477 aa, Escherichia coli CFT073
MMTMSRLVVVSNRIAPPDEHAASAGGLAVGILGALKAAGGLWFGWSGETGNEDQPLKKVKKGNITWASFNLSEQDLDEYYNKFSNAVLWPAFHYRLDLVQFQRPAWDGYLRVNALLADKLLPLLQDDDIIWIHDYHLLPFAHELRKRGVNNRIGFFLHIPFPTPEIFNALPTYDTLLEQLCDYDLLGFQTENDRLAFLDCLSNLTRVTTRSAKSHTACGKAFRTEVYPIGIEPKEIAKQAAGPLPPKLAQLKAELKNVQNIFSVERLDYSKGLPERFLAYEALLEKYPQHHGKIRYTQIAPTSRGDVQAYQDIRHQLENEAGRINGKYGQLGWTPLYYLNQHFDRKLLMKIFRYSDVGLVTPLRDGMNLVAKEYVAAQDPANPGVLVLSQFAGAANELTSALIVNPYDRDEVAAALDRALTMSLAERISRHAEMLDVIVKNDINHWQECFISDLKQIVPRSAESQQRDKVATFPKLA

SEQ ID NO: 48830 - protein, 294 aa, Scutellaria baicalensis
MDQYEKVEKIGEGTYGVVYKARDRVTNETIALKKIRLEQEDEGVPSTAIREISLLKEMQHGNIVRLQDVVHSEKRLYLVFEYLDLDLKKHMDSCPEFSQDPRTVKMFLYQILRGIAYCHSHRVLHRDLKPQNLLIDRRTNALKLADFGLARAFGIPVRTFTHEVVTLWYRAPEILLGSRHYSTPVDVWSVGCIFAEMVTQRALFPGDSEIDELFRIFRVMGTPTEETWPGVTSLPDFKSSFPKWPTKELATVVPSLDSAGLDLLGKMLILDPSKRITARSALEHEYFKDIGFVP

SEQ ID NO: 48831 - protein, 377 aa, Triticum aestivum
MDHRLVAPFLVLLGLLLSPPPAAAAAGDEEPLIRQVVGGPDPLDNDLELDSQFLGFVQRFGKTYRDAEEHAHRLSVFKANLRRARRHQMLDPSAEHGVTKFSDLTPAEFRRTFLGLKTTRRSFLREMAGSAHDAPVLPTDGLPEDFDWRDHGAVGPVKNQGSCGSCWSFSASGALEGANYLATGKMEVLSEQQLVDCDHECDPAEPDSCDAGCNGGLMTSAFSYLLKSGGLEREKDYPYTGKDGTCKFEKSKIAASVQNFSVVAVDEEQIAANLVKYGPLAIGINAAYMQTYIGGVSCPYICGRHLDHGVLLVGYGASGFAPSRFKEKPYWIIKNSWGENWGDKGYYKICRGSNVRNKCGVDSMVSTVSATHASKEE

SEQ ID NO: 48832 - protein, 890 aa, Candida glabrata CBS138
MTVPATKKQRIINCVSQLPYKIQLGETNDDWKITHVTGNSALYSSLDYLNYDLQGEVEHHVVGWTGEVTREASVPNFTKEDKDKHDASEEDPMYLTKEQISGLTSTLQDQMKVEDSNSTVHPVWLLRRDQSRWRSYAEKVIWPTFHYILNPSSANIQQENNWWYDYVKFNEAYANKIAEIYQKGDIIWIHDYYLLLLPQLLRMRYDQDVAIGYFHHAPWPSHEYFRCLPRRKQILDGLLGANKICFQNESFSRHFVSSCKRLLDSSAKKTKNADGFEQYQISAYGGDLIVDSLPIGVNTKQLLKDAFTKDIDSKVLAIKQAYQNKKIIIGRDRLDPVRGVLQKMRAFETFLEMYPYWRDQVVLIQVSSPTANRNSPQTIKLEQQVNELVNSINSKYGSLNFSPVQHYYMRIPKDVYLSLLRVADLCLITSVRDGMNTTALEYVTLKSNKSSANALSYGNPLVLSEFSGSSTLLKDAILVNPWDSVAVAKSINMALNMTKDEKSALEDKLWSEVPTIQDWTDKYLKSLKEIIHDSSLGTPSADKRITPALNRPILLENYKQAKRRLFLFDYDGTLTPIVQDPAAAIPTARLYSILQKLAADPKNQIWIISGRDQKFLNKWLGSKLPQLGLSAEHGCFMKDIGNEDWVNLTEKVDMSWQARVNDVMEDFTRRTPGSFIERKKVALTWHYRRAVPELGEFHASELQKELLKFTDDSDLEVMEGKANIEVRPRFVNKGEIVKRLVWHEHGKSQDMLKGINDTLPITEMPDFILCLGDDFTDEDMFRQLNTIESVWDKKFPDDRNNFGHFGFYPVTVGSASKKTVAKAHLTDPQQVLETLGLLVGDVSLFQSAGTVELDARGHVKNSESSLKSEQATAQYVLKRTASSQNVKKDK

SEQ ID NO: 48833 - protein, 246 aa, Candida glabrata CBS138
MSALKVVSSKLAAEIDQELMGPQVGFTLQQLMELAGFSVAQAVSREFPLSSKLNDNKHVFVIAGPGNNGGDGLVCARHLKLFGYNPIVFYPKRSERTEFYKQLVHQLNFFKVPVLGQDDDETRWLSYLEPEKTLCIVDAIFGFSFKPPMREPFQSIMSQLKKIENDIPIISVDVPTGWDVDEGPISEQCIVPKVLVSLTVPKLCSNYLKEKTTKHYVGGRFVPRDFANKYGFEPFAYEGTDQVLKL

SEQ ID NO: 48834 - protein, 441 aa, Bacteroides fragilis NCTC 9343
MRLIYKNHYKALFLLGLPIVIGQVGVIVLGFADTLMIGHHSTNELGAASFVNNMFTLAIIFSTGFSYGLTPIVGGFYGTRRFASAGQALRCSLLANLLVGILLTVIMGILYLNVERLGQPEELLPLIKPYYLILLASLVFVLLFNGFKQFTDGITDTKTAMWILLGGNVLNIVGNYILINGKLGFPELGLLGAGISTLFSRIVMVLVFAFVFFSSRRFLRYKLGFIRLGWSRTLFRQLNALGWPVAFQMGMETASFSLSTVMVGWLGTIALASHQVMLTISQFTFMMFYGMGAAVAVRVSNFKGQNDIVNVRRTAYAGAHIILAMGVVLLSIVFLFRYQVGGWFTDNTEVSAMVVVLMVPFLAYQFGDGMQINFANALRGISDVKPMMLIAFIAYFIISLPAGYFFGFVMGWGLLGVWMAFPFGLSSAAIMLWLRFRYKTR

SEQ ID NO: 48835 - protein, 358 aa, Rubrivivax gelatinosus PM1
MSPPRTVRAAAVQIAPDLERPEGTLERVLAAIDEAAGRGAGIVVFPETFVPYYPYFSFVLPPVLQGAPHLRLMEHAVVVPGPVTQAVGERARARGIVVVLGVNERDHGSLYNTQLVFDADGALILKRRKITPTYHERMVWGQGDGAGLKVVDSAVGRVGALACWEHYNPLARYALMTQHEEIHCAQFPGSMVGQIFADQMAVTIRHHALESGCFVVNATGWLTDAQIAAITPDAGLQKALRGGCHTAIVSPEGKDLCTPLTEGEGIVYADLDMALIAKRKRMMDSVGHYARPELLSLLIDDRPATTSTSMTAAALAPAVPATFRSSSHEHAAPQPRHAPVAGEPPADDRAAVLRVAAG

SEQ ID NO: 48836 - protein, 303 aa, Brassica napus
  misc_feature (2)..(2): Xaa can be any naturally occurring amino acid
  misc_feature (11)..(11): Xaa can be any naturally occurring amino acid
  misc_feature (103)..(103): Xaa can be any naturally occurring amino acid
  misc_feature (231)..(231): Xaa can be any naturally occurring amino acid
  unsure (1)..(303): unsure at all Xaa locations
AXLLIRSIARXIKRPPATASAAYSTGGGRGCTCTSKKLERKVALITGGASGLGKATAGEFIRHGARVVIVDSDEESGFKAAKELGVAAEFMVCDVTVEADIAXAVETTVERHGKLDVMYNNAGIVGPTIPASISELDMKEFENVMRINVIGVVSGIKHAAKVMIPAGSGCILCTSSVAGVIGGLAPHSYTISKFTIPGIVKSAASELCEHGVRINCISPGTVATPLALRYXRKVFPTATEEKLRETVKGMGELKGAECEEADVAKAALYLASDDGKYVTGHNLVVDGGMTAFKIAGFPFPSDS

SEQ ID NO: 48837 - protein, 496 aa, Scutellaria baicalensis
MASSAGVRRPTTSSLAKRHASSASDNVGKVASSASASKKRPALANVTNQRHGTGSANAGRAPLPESSKIAPCTTKIVSIKKGPSASTNSGFPGAILPTSSSVKQNIVAVGRSTFIPKSDVVLPKTLAAPVSCSMDVSPDKSDSLSVSMDESMSTCDSLKSPDVEHVDYIDVAAVDSIERKASNMLCISDHMEIAGNLCKRDALASLESGDKIVDVDENLDDPQLCATIACDIYKHLRASEAKKRPATNFMERVQKDINASMRAILIDWLVEVAEEYRLVPDTLYLTVNYIDRYLSGNVMDRQRLQLLGIACMMIASKYEEICAPQVEEFCYITDNTYFKDEVLEMESAVLNYLKFEMTAPTAKCFLRRFVRAAQGVNETPLLQFECLANYITELSLLEYSMLCFAPSLIAAASIFLARFILLPSKRPWNHTLRHYTLYQPYDLRDCVLALHGFCCNSHNSSLPAIREKYSQHKYKFVAKKYCPLSIPPEYFHNVSS

SEQ ID NO: 48838 - protein, 206 aa, Xanthomonas axonopodis pv. citri str. 306
MLEIYGKPSSINVRKVLWLCDELGLDYTLHAYGSGFASVQTPQFRALNPNALVPVIREGELVLWESNTICRYLAARSQRHDLLPAAPAARALVEQWMDWQATELNTAWRYAFMASVRGSAAHTDAQAIAASVEQWNRHMAILDAQLQRGGPFVLGACFTLADIVLGLSTQRWVASPIAHVPLPAVAAYYAHLKTRAGFRRYGCTAP

SEQ ID NO: 48839 - protein, 663 aa, Escherichia coli K12
MSSRKELANAIRALSMDAVQKAKSGHPGAPMGMADIAEVLWRDFLKHNPQNPSWADRDRFVLSNGHGSMLIYSLLHLTGYDLPMEELKNFRQLHSKTPGHPEVGYTAGVETTTGPLGQGIANAVGMAIAEKTLAAQFNRPGHDIVDHYTYAFMGDGCMMEGISHEVCSLAGTLKLGKLIAFYDDNGISIDGHVEGWFTDDTAMRFEAYGWHVIRDIDGHDAASIKRAVEEARAVTDKPSLLMCKTIIGFGSPNKAGTHDSHGAPLGDAEIALTREQLGWKYAPFEIPSEIYAQWDAKEAGQAKESAWNEKFAAYAKAYPQEAAEFTRRMKGEMPSDFDAKAKEFIAKLQANPAKIASRKASQNAIEAFGPLLPEFLGGSADLAPSNLTLWSGSKAINEDAAGNYIHYGVREFGMTAIANGISLHGGFLPYTSTFLMFVEYARNAVRMAALMKQRQVMVYTHDSIGLGEDGPTHQPVEQVASLRVTPNMSTWRPCDQVESAVAWKYGVERQDGPTALILSRQNLAQQERTEEQLANIARGGYVLKDCAGQPELIFIATGSEVELAVAAYEKLTAEGVKARVVSMPSTDAFDKQDAAYRESVLPKAVTARVAVEAGIADYWYKYVGLNGAIVGMTTFGESAPAELLFEEFGFTVDNVVAKAKELL

SEQ ID NO: 48840 - protein, 452 aa, Bacillus subtilis subsp. subtilis str. 168
MKETQNAREKIKQLLHILIPIFITQAGLSLITFLDTVMSGKVSPADLAGVAIGSSLWTPVYTGLAGILMAVTPIVAQLLGAEKKQKIPFTVLQAVYVAALLSIAVLVIGYAAVDLILGRLNLDIHVHQIAKHFLGFLSLGIFPLFVYTVLRSFIDSLGKTRVTMMITLSSLPINFVLNYVFIFGKFGMPALGGVGAGLASALTYWCICIISFFIIHKNAPFSEYGIFLTMYKFSWKACKNLLKIGLPIGFAVFFETSIFAAVTLLMSHFHTVTIASHQAAMNFASLLYMLPLSVSMALTIVVGFEAGAARFKDARSYSLIGIMMAIGFSLFTAACILLFREQIAGMYTSDPDVLRLTQHFLIYALFFQLSDAVAAPIQGALRGYKDVNYTLAAAFVSYWVIGLPVGYMVGTFTSLGAFGYWIGLIAGLAAGAVGLFFRLAKLQKRYSQKQHI

SEQ ID NO: 48841 - protein, 524 aa, Agrobacterium tumefaciens str. C58
MSTLGAYFRLARVGWVLVREGVVLALPSDDLPAPAQLLKAALKPFARSKAKRAQRSDRLAVAVERLGPSYVKMGQFLATRPDVVGADFADDLASLQDRMAFFPAAAAKANIEGSLGRSISELYREFGDPIAAASIAQVHPAMVDTPKGPRKVAVKVIRPGVRQRFQNDLEAMYLIADLQQRFVRSARRLRPVEVTRTLEQTTKIEMDLRLEAAALSELAENTRQDPGFRVPEVDWERTGRDVVTMEWIDGVKMSDIEGLKAAGHDLNKLADTLIQSFLRHTLRDGFFHADMHPGNLFVDAKGEIVAVDMGIAGRLGKKERRFLAEILYGFITRDYMRVAEVHFEAGYVPGHHDKASFAQAIRAIGEPIHGQPAETISMGKLLTLLFEVTELFDMETRPELVMLQKTMVVVEGVSRMLNPRFNMWKAADPVVGGWIRDNLGPKRIATDLKDGVKAALKLAEAVPEIAAKTEKLHSELMYMSENGLRFDAQTAEAIGKAEARHTKWGRIALWVIALTLLYIAIRIS

SEQ ID NO: 48842 - protein, 557 aa, Cryptococcus neoformans var. neoformans B-3501A
MPVPTDEDKRLPVTLLSGFLGSGKTTLLSYILKSKEHGLRCAVVVNDMGSLNIDAALINNHKLTQKEEKVVQMQNGCICCTLRADLLEEIATLAEAGQYDSGISEPIQVAETFTTEFAETMGEGTVEEIIDSLPEDASTTPESRRRLAELIHAGGLSKVARLDCCVSMVDCTTFLDDFDTTDFLTDRHGKEVAPEDERNITDLLTDQIEFANVILLNKTDMVSREHVAKVEGLVKTLNPTAKIILTSYSKVDLKDILNTRLFDFGKAAMGAGWLQSLRENTLTEFTDARGNKKMVPKPETLEYGIGSFVYTARRPFHPRRLWDLVSKPFCVLQTTFEDDEDQDSDEEDEDDEMIQELTEEEGKQAMFEQMQKEKAELDLPGRAKYKRESPIWKGLLRSKGFVWLATRPHVHGEWSQAGIMFTLNGGGPWMCRIPESEWPGGDDQEVIDAIKLDFMGPWGDRRQELVFIGQNLDKELITKTLNNTLLNDKEWAQWEKIMNSRRSEEKKLERLCNVFDDGWEAWMDPEASVEEEEVNEGHRHAHAHDVPLVTKKAKLSA

SEQ ID NO: 48843 - protein, 878 aa, Pseudomonas syringae pv. phaseolicola 1448A
MADIDARLREDVHLLGELLGNTIREQRGAEFLDKIERIRKGAKAGRRGSAEGAEQLSASVDGLGDDELLPVARAFNQFLNLANIAEQYQLMHRRDDTQPLPFESRVLPELLDRLKTEGHTPDALARQLSKLEIELVLTAHPTEVARRTLIQKYDAIAAQLAALDHRDLNSTERAQITSRLQRLIAEAWHTEEIRRIRPTPVDEAKWGFAVIEHSLWHAIPNYLRKADHALHAATGLNLPLEAAPIRFASWMGGDRDGNPNVTAIVTREVLLLARWMAADLYLRDVDNLAAELSMQQASDALRARVGDSAEPYRAELKRLRERLRATRNWANASLSETLPAPEAVLRDNRELLDPLLLCFQSLHECGMGVIADGPLLDCLRRAVTFGLFLVRLDVRQDSSRHCAAMTEITDYLGLGRYEEWDEQTRIDFLLRELNNRRPLLPGYFKPAADTAEVLATCRVVAAAPTASLGSYVISMAGSASDVLAVQLLLKEAGLQRPMRVVPLFETLADLDNAGPVIEKLLGLPGYRSRLHGPQEVMIGYSDSAKDAGTTAAAWAQYRAQEKLVEICREQQVELLLFHGRGGTVGRGGGPAHAAILSQPPGSVAGRFRTTEQGEMIRFKFGLPDIAEQNLNLYLAAVLEATLLPPPPPQPSWRTMMDQMAADGVGAYRAVVRENPEFVEYFRQATPEQELGRLPLGSRPAKRREGGVESLRAIPWIFAWTQTRLMLPAWLGWEAALSKALERGEGTVLAQMREQWPFFRTRIDMLEMVLAKADSDIARLYDERLVSAELQHLGAHLRDLLSQACNVVLGLTGQKQLLAHSPETLEFISLRNTYLDPLHLLQAELLSRSRSREASLDSPLELALLVSVAGIAAGLRNTG

SEQ ID NO: 48844 - protein, 501 aa, Arabidopsis thaliana
MFYYVIVLPLALFLLAYKLFFTSKTKRFNLPPSPPYSLPILGHHNLLKPPVHRLFHRLSKTHGPIFSLQFGSRRAVVISSSSLATQCFTGQNDIILSNRPCFLTAKYVAYNYTTVGTAPYGDHWRNLRRICSLEILSSNRLTNFLHIRKDEIHRMLTRLSRDVNKEIELEPLLSDLTFNNIVRMVTGKRYYGDEVHNEEEANVFKKLVADINDCSGARHPGDYLPFMKMFGGSFEKKVKALAEAMDEILQRLLEECKRDKDGNTMVNHLLSLQQNEPEYYTDVTIKGLMLGMMIAGTDTSAVTLEWAMSSLLNHPEALEKAKLEIDEKIGQERLIDEPDIANLPYLQNIVSETFRLYPAAPLLVPRSPTEDIKVGGYDVPRGTMVMVNAWAIHRDPELWNEPEKFKPERFNGGEGGGRGEDVHKLMPFGNGRRSCPGAGLGQKIVTLALGSLIQCFDWQKVNGEAIDMTETPGMAMRKKIPLSALCQSRPIMSKLQAHLKG

SEQ ID NO: 48845 - protein, 258 aa, Mesorhizobium loti MAFF303099
MTGRLQGKIAIVTGAGQGIGAATARAFAMQGAKTVIAELNAATGKAAADELRANGADALFVETDVTDTAAVADMVAKTIAAYGGVNVLVNNAGANVFYEPLSMPDAEWDRCLRLDLQAAWSCAKAVLPTMLANGSGSIVNIASCHAFKIIPHTFPYPVAKHALVGLTRSLGIEYAARGIRVNAIAPGYIETPIAEAYWNTFPDPAEEKRRAYDLHPPKRIGRPDEVAMTAVFLASDEAPFINAETITIDGGRSVLYHD

SEQ ID NO: 48846 - protein, 523 aa, Neurospora crassa
MPGVIEPTGSGRLLLISNRLPITIKRADDGQYTFSMSSGGLVTGLSGLAKSTKFQWYGWPGLEVPEAETAGMKQRLKEEYDAIPVFVDDELADRHYNGFANSILWPLFHYHPGEITFDESAWAAYREVNRLFAKEVAKDVQDGDMVWVHDYHMMLLPQMLREEIGDTKKNVKIGFFLHTPFPSSEIYRILPVREALLLGILDCDLIGFHTYDYARHFLSSCSRILQTPTTPNGVDYNGKFVTVGAFPIGIDPEKFVEGLKKQNVQQRIAALTRKFEGVKLIVGVDRLDYIKGVPQKLHALEVFLTEHPEWIGKIVLVQVAVPSRQDVEEYQNLRAVVNELVGRINGKFGTVEFMPIHFLHQSVSFDELTALYAVSDVCLVSSTRDGMNLVSYEYIATQRERHGVMILSEFTGAAQSLNGSLIVNPWNTEELANAIHDAVTMSPEQREANYRKLERYVFKYTSAWWGQSFVAELTRISAEAEKNANAQKEQHPIREGIANAANKAIEGVTDALKSTNLTGNQES

SEQ ID NO: 48847 - protein, 495 aa, Anabaena variabilis ATCC 29413
MTKNTVRTYIKQTWKTLTRSHQHLLESAQDTKLEHQPNTPWIIYISPQEDCNTVKSVLERSLSTKEMQQIEIRTLPSEVEAIQEHGLLYLPGPYVVPGGRFNEMYGWDSYFILLGLLQDEEWELAQSQVDQLLYQVQHYGTILNANRTYMLTRSQPPVLSMMVLALFQHTQDQAWLKSTLPLLEQFYYYWVVPPHLNSATGLSRYYALGEGAAPEVLFSELDEAGRSHYERVKEYYKTFEIDDYDVSLFYDSEKDELTDLFYKGDRSMRESGFDITNRFGPFSVDIVHYAPVCLNSLLYQMEQDLTQIHKILDNPELAEQWSDRANIRRERINQYLWDEEKGIYLDYHFYSGKRRHYEFATTFYPLWTGLSSPEQAQRIVENLSLFTAPGGIFTSTRVTGNQWDAPFGWAPLTLIAVQGLYRYGYRKEGDDIAHKFLTMAIQEFTKYGFFVEKYDVERCSAQVSDEICFGYSSNEIGFGWTNGVILELLANLDDS

SEQ ID NO: 48848 - protein, 1078 aa, Ustilago maydis 521
MQEPLTWTARKVLAFMLPVNTSARPRSTLDEIKPSQPTDSRTWRNRDDARRTLRGHDTHIEFEARYLPLLHRPSSDAEAQQLYNHIRTVAWYLDSIPLLSSRLPFNIGVESIVGVIPGVGDYIGLVLGLYQVMLCSLYGLPLSVLLWMLFNVLVDCAIGIVPIIGDALDVLFKANLRNLRLLEDYLHRSGGKCGSGIFYVEFAPSDTFLPLHQASRRRPSSTQQPPAAFVESSRIPQRPRPTDNARAHFLSLPSSVAELQSSPVAGSSRRDAPNSYKAQAIQPETDENTRHETSAIQTDRPIEVEPFAIPDELSSSDLAVPQSKASGRDADSKSLRALDRQLSADDMTQQHHCFAAASSASSEARPFETDTEVSATGTERAARLEEERPRVSWQDSTRTSTSLLTKPASKRPPYYNGDAEEDFDDDFENQRLLKGTSTERGREMEDPRALWRRRRGLYLLVYSAIFCVAYVSSLDSNTGYLYLNFACSEYGALASFSTVAIVQQMVFAIAKPPIAKLSDVVGRPQAYVLSLVFYVCGYIVVATTASLRSLIGGICLQSAGTTGIQVLQSIIIADTTTAKWRGLVIGIVNLPFLINFAVAGPMVDLVMRHGGWRFGFAIWTVVMPLAATPLLLTLLVGQRRARRAGLATRSTLTDKPWRQALWQLARELDLVGLLLFTGGWLLILLPLTLAGHGERQAQVPMATFVLGGAGLLVVFGWWETRASVPILPYQFLTNSAVVCTCVVGVLDFASFYISWTFLSSFVQILKGWDQTKTGYFATTQNVTSTITGIIVGSLMAMTRRYKALLVIGLVTRLLGVSLMVRYRTADDPTFMLVLCQLLQGIGGGSIAITMQVAVQVTVRHADVAIVTALELLTTEIGAAMGSATAGWMFQTYLPTKLQANLPHMDAEELKLVYGSLQKALSYPIGSAERNGIIRSWVEVMRMLSIVALITLVPALFFGLAIPDTALPDVHGAPGHSSHHHHHHGSRRGDRRNLRRRPSFLSASRPASPLEIRAGYPDTTLGEALDVAANEDNTNAGFLVATGSKRSRSASRNRGSERESRDVSSAGRKKRITRKAVLR

SEQ ID NO: 48849 - protein, 614 aa, uncultured archaeon GZfos18F2
MAHARLSIIDLAGGDQPIHNEDRSIWIVFNGEIFNYPELRKELKSRGHRFYTRSDTEVLVHLYEDHGPEFIHELNGQFAIALWDVRKKQLLLARDRMGIRPLFYFEKAGRLVFASEIKGLLADDRVPRTLDLKALSDIFTCWSPFGALTPFESVRQLLPGHYAMFSSNGMQIRSYWQPVFSAPPSKERSLDDWTEELNGLLYDAARIRLRADVPVGAYLSGGLDSTYISSLVKRSFNNRLCTFSVGFTDERFDETSFQEKAVQSLETDHRIVRCSERDIGKVFPQVIWHTETPILRTAPAPLFMLSGLVRENNFKVVLTGEGADEVFAGYNIFKEDRVRRFWARQPDSKLRPLLLERLYPYIFSRKNSRTRVFLENFFRKSLIQVDSPCYSHLIRWNNTALLKAFFSDELQAMAGKPPDFEERFISTLPSDFMSWDPLSRSQYTEMTIFLANYLLSSQGDRMAMGHSVEGRFPFLDHRVVEFACSMPPEYRLNGLKEKYILKHASRDLIPPELRRRPKQPYRAPISRCFFGKGSPDYVGELLSENAIRRAGYFHPKKVGRLVDKCQKQEGHLASERENMAVAGILSTQLLDHLFLRNFPPHPIQEPENVRVFGL

SEQ ID NO: 48850 - protein, 354 aa, Candida glabrata CBS138
MSDWKVDPDNRRRLLQLQKIGANKKCVDCGAPNPQWASPKFGIFICLECAGTHRSLGVHISFVRSITMDQFKQEELVRMEEGGNEPFTEYMTAHGIDMTLPHKFKYENPIAEDYKEKLTCKVEGREFVEPQHPDFDPKSLGKSEPVSEPSIASEQSSRQNTPIESRRIGSPTRKEKNEEYFAQLGKKNDSKPDHLPPSQGGKYQGFGNTPVNNRNATDPSTNTMSLENLQTDPLGTLTKGWGLFSSAVAKSFDDVNETYIKPNVQQWNTGELSEETKRAAAQFGQKFQETSTYGMQAFSSFTKNIQKQYINGDESYSQLPASQKNQSASTSRDDLLGDTKKSVPKAGEDEWEEF

SEQ ID NO: 48851 - protein, 325 aa, Glycine max
MSSNSGKVVCVTGASGFIASWIIKLLLQRGYTVRATVRDPSKPEKVDHLLKLDGAKERLHLFKADLLEEGSFDSAFEGCDGVFHTASPVHFIVTDPQNQLIDPAIKGTLNVVKSCAKSPSVKQVILTSSVAAVLYNGRPRTPEVVVDETWFSDPDFLRENERWYAFAKTSAEDAARKFLSEYDIKLVVINPSMSIGPLLQPELNASSSSILNLINGSPTFSNNSFGWINVKDVANAHIQAYEIDSASGRYCLVERVIHFSELAKILRDMYPTLQIPDKCEDDEPFMPTFQVSKEKAKSLGVEFIPLEVSLRETVESLKEKKFVDF

SEQ ID NO: 48852 - protein, 334 aa, Oryza sativa (japonica cultivar-group)
MEERYEALKELGAGNFGVARLVRDKRSKELVAVKYIERGKKIDENVQREIINHRSLRHPNIIRFKEVCLTPTHLAIVMEYAAGGELFEQICTAGRFSEDEARYFFQQLISGVSYCHSLEICHRDLKLENTLLDGSPTPRVKICDFGYSKSALLHSKPKSTVGTPAYIAPEVLSREEYDGKVADVWSCGVTLYVMLVGSYPFEDPGDPRNFRKTISRILGVQYSIPDYVRVSSDCRRLLSQIFVADPSKRITIPEIKKHTWFLKNLPKEISEREKADYKDTDAAPPTQAVEEIMRIIQEAKVPGDMAAADPALLAELAELKSDDEEEAADEYDTY

SEQ ID NO: 48853 - protein, 372 aa, Scutellaria baicalensis
MVSEFQEHESLLQNPIFDALYCDEERFDECVGGAGSGFKEPEINDFNEIHNNPFAFLFEHDLFWESEELDALLTKEKTQTHLTFDEINSDASLKAMRNEAINWMLKVIAHYGFNALTAVLAVNYYDRFITSVCFQKDKPWMSQLAAVACLSVAAKVEETQVPLLLDLQVEESKYLFEAKTIQRMELLVLSTLQWRMNPVTPISFFDHIARRFEFVKNLHSVFLRRCESLILSIITDCRLVKYFPSVIASAAMIYAIREFETPDALEYEDQLLSVLRTSKDKVDDCRKLIVDAMYGGFSHKPCYKRKYESIPSSPSGVIDAYLSSDSSVDSWAVTLSVSSSPEPSFKRSKAQDQHMRLAPLSSVSLGLAHRIN

SEQ ID NO: 48854 - protein, 368 aa, Lactobacillus plantarum WCFS1
MAKAKATTEYDKAVKALIKEYKKTGSIQYDELSDKLAAPYKLDASGIDKLLQKVEDAGISVVDEKGDPDARAVKSVKKVSKKELSDAGSASGIKINDPVRMYLKEIGRVDLLTADEEVALALRIEQGDESAKQELAEANLRLVVSIAKRYVGRGMQFLDLIQEGNMGLMKAVEKFDYRKGFKFSTYATWWIRQAITRAIADQARTIRIPVHMVETINKLIRIQRQLLQDLGREPTPEEIGAEMDMPTEKVREILKIAQEPVSLETPIGEEDDSHLGDFIEDQDATSPADAAAYELLKEQLEGVLDTLTDREENVLRLRFGLDDGRTRTLEEVGKVFGVTRERIRQIEAKALRKLRHPSRSKQLKDFLE

SEQ ID NO: 48855 - protein, 389 aa, Escherichia coli K12
MSDTTILQNSTHVIKPKKSVALSGVPAGNTALCTVGKSGNDLHYRGYDILDLAKHCEFEEVAHLLIHGKLPTRDELAAYKTKLKALRGLPANVRTVLEALPAASHPMDVMRTGVSALGCTLPEKEGHTVSGARDIADKLLASLSSILLYWYHYSHNGERIQPETDDDSIGGHFLHLLHGEKPSQSWEKAMHISLVLYAEHEFNASTFTSRVIAGTGSDMYSAIIGAIGALRGPKHGGANEVSLEIQQRYETPDEAEADIRKRVENKEVVIGFGHPVYTIADPRHQVIKRVAKQLSQEGGSLKMYNIADRLETVMWESKKMFPNLDWFSAVSYNMMGVPTEMFTPLFVIARVTGWAAHIIEQRQDNKIIRPSANYVGPEDRPFVALDKRQ

SEQ ID NO: 48856 - protein, 168 aa, Brassica rapa
FRCVQQGDDENGKTGVSLSKDITDVAGRTVKKHIATLGPLILPLSEKLLFFVTFMGKKLFKDKIKHYYVPDFKLAIDHFCIHAGGRAVIDVLEKNLALAPIDVEASRSTLHRFGNTSSSSIWYELAYIEAKGRMKKGNKVWQIALGSGFKCNSAVWVALNNVKASTNS

SEQ ID NO: 48857 - protein, 121 aa, Triticum aestivum
HEPPQGRMAFDKLFSRGKLPQSFSPPQAEGLKVVPRGEQDEATTVTVDLNKSAAVIDHELDTLVGPRAATFPIELSHLNMKSRRTGFKPYKRCSVEAKENRVPAADEVGTKRIRLDSEPST

SEQ ID NO: 48858 - protein, 168 aa, Brassica oleracea
FRCVQQGDDENGKTGVSLSKDITDVAGRTVKKHIATLGPLILPLSEKLLFSVTFMGKKLFKDKIKHYYVPDFKLAIDHFCIHAGGKAVIDVLEKNLGLAPIDVEASRSTLHRFGNTSSSSIWYELAYIEAKGRMKKGNKVWQIALGSGFKCNSAVWVALNNVKASTNS

SEQ ID NO: 48859 - protein, 151 aa, Pseudomonas putida KT2440
MSPMINAKLLQLMVEHSNDGIVVAEQEGNESILIYVNPAFERLTGYCADDILYQDCRFLQGEDHDQPGIAIIREAIREGRPCCQVLRNYRKDGSLFWNELSITPVHNEADQLTYYIGIQRDVTAQVFAEERVRELEAEVAELRRQQGQAKH

SEQ ID NO: 48860 - protein, 78 aa, Hordeum vulgare subsp. vulgare
MSCCGGNCGCGSACKCGNGCGGCNMYPEVEAAGATLLVAAAATHKASSGGMEMAAENGGCGCTQCKCGTSCGCSCCSC

SEQ ID NO: 48861 - protein, 206 aa, Triticum aestivum
MAGDGELLPRIAVVGAGIFARTQYIPRLREISHLVVLKAIWSRTQESAEAAAELARDFAPGIECKWGDAGLEEIMGDPSILGVAVVLAGQVQVELSLKMLKAGKHVIQEKPASGSSTEAETALSVYNSFPNKLPCKPIWAVGENYRFEPAFVESSKLMDDIGDMMNIQVIVEGSMNSSNPYFNSSWRRNFVGGSKWDMGVHFFWRD

SEQ ID NO: 48862 - protein, 355 aa, Thermoanaerobacter tengcongensis MB4
MEIFKIMEKYDYENVVLCYDKTSGLKAIIAIHDTTLGPALGGCRMWTYDSEEDAINDALRLARGMTYKNAAAGLNLGGGKAVIIGNPRTDKSEALFRSFGRYVESLKGRYITAEDVGTNVKDMEYIRYETKYVAGLPETSGDPSPFTAYGVYRGMQAAAEEIFGTSDLRGRVVAIQGIGNVGYHLAKYLYEAGAKLIVTDIFEENAKRAVEEFGAEYVKPDEIYGVECDIFAPCALGAIINDETIPQLKCKIVAGSANNQLKEERHGDILQQKGILYVPDYIINAGGVINVADELNPSGYNRERAMRKVSMIYDTVKKVIEKAKKENVPTYVAADRVAEERIKTIAAVKDNYIVR

SEQ ID NO: 48863 - protein, 142 aa, Staphylococcus epidermidis ATCC 12228
MIKKNKEELNDMEYLVTQENGTEPPFQNEYWNHFEKGIYVDKLSGKPLFTSEDKFESNCGWPSFSKALNDDEIVELVDKSFGMIRTEVRSEKANSHLGHVFNDGPKEKGGLRYCINSAAIQFIPYDKLEELGYGDLIKHFKK

SEQ ID NO: 48864 - protein, 355 aa, Thermoanaerobacter tengcongensis MB4
MKIFERMEVKDYENVIFCHDKASGLKAIIVIHDTTLGPALGGTRMWMYNTEEEALEDALRLARGMTYKNAAAGLNYGGGKAVIIGDPRKDKSEALFRSFGRYIEALKGRFITGEDVGITVQDVEYMRYETKHVVGLAETSGDPSPVTAYGVYRGMQAAAEEVFGTSDLKGKKVAIQGVGKVGYTLAKYLNEAGAKIIVTDIFEDNVKRVVEDFGAEYVKPEEIYGVDCDIFAPCALGGVINDETIPQLKCKIIAGSANNQLKEERHGDILQEKGILYVPDYIINAGGVINVADELEPSGYNRERALRKASMIYDTIKSVIKKSKEENIPTYKAADRVAEDRIKAIAAIKTNYILK

SEQ ID NO: 48865 - protein, 174 aa, Staphylococcus epidermidis ATCC 12228
MAYATLAGGCFWCMVKPFTSYPGIKSVVSGYSGGHVENPTYEQVCTNQTGHVEAVQIEYDPNITTFENILDVYFKTFDPTDDGGQFFDRGESYQPVIFYHDENQLKAAELKKQQIDEEGIFKKPVITPIKPYKNFYPAEEYHQDYYKKNPTHYEQYQRGSGRKAFIESHWGGSK

SEQ ID NO: 48866 - protein, 317 aa, Solibacter usitatus Ellin6076
MPDYDVVGVGLNATDTVLIVPHFPAYAGKVPFEDEHMSPGGQVASALVACSRLGLRAKYIGSVGDDLRGRIQLESLQGTGINLDHVLLRPGCANQSAYIIIDRSTGERTVLWQRDDCLKILPEEITDEMISCARLLHIDGHDTPAVARAAEIARRHGIPVTVDVDTIYHGFDRVLPNVDYLVASSEFPTAWTGETDPFKALATIQDEYGMKVAAMTLGAHGALARENGRFHYAPAFVVNCVDTTGAGDVFHGAFCYAVLQGMPMSQALEFSNAMAALNCTALGARGGIRGLDEVHALMARAERRSHSDFAARAARPS

SEQ ID NO: 48867 - protein, 348 aa, Carica papaya
MAIICSFSKLLFVAICLFGHMSLSYCDFSIVGYSQDDLTSTERLIQLFNSWMLKHNKNYKNVDEKLYRFEIFKDNLKYIDERNKMINGYWLGLNEFSDLSNDEFKEKYVGSLPEDYTNQPYDEEFVNEDIVDLPESVDWRAKGAVTPVKHQGYCESCWAFSTVATVEGINKIKTGNLVELSEQELVDCDKQSYGCNRGYQSTSLQYVAQNGIHLRAKYPYIAKQQTCRANQVGGPKVKTNGVGRVQSNNEGSLLNAIAHQPVSVVVESAGRDFQNYKGGIFEGSCGTKVDHAVTAVGYGKSGGKGYILIKNSWGPGWGENGYIRIRRASGNSPGVCGVYRSSYYPIKN

SEQ ID NO: 48868 - protein, 481 aa, Pseudomonas syringae pv. phaseolicola 1448A
MSQKTLTTASGAPVADNQNSRSAGPRGPLLLDDFHLIEKLAHFNRENIPERRVHAKGSGAHGTFTVTRDISQYSSAKLFDTVGKQTPIFLRFSTVGGERGSADTERDPRGFAIKFYTEEGNWYIVGNNTPVFFIRDPLKFPDFIHTQKRLPQTNLKSPQMMWDFWSHSPEALHQVTILFSDRGIPDGYRHMHGFGSHTYSLISAAGERHWVKWHYKTRQGIKNLTPAEAARIAGTDPDYAQRDLFTAIERGDFPKWQVCIQLMSEAQAANHHENPFDVTKTWSQKEYPLIEVGELELNRNPLNYFAEVEQAAFGPSNMVPGVGLSPDRMLQGRVFAYADAHRYRVGTNHQQLPINAPRNPVHSYQRDGSMAFGTNGGAAPNYEPNSYSDAPKEDPRYAEPALALSGAAGRHDHRVDGDYYSQAGKLFNLMSDDQKALLISNIAGAMGGVSSDIVQRQLQHFYRADPAYGEGIANALGIKLG

SEQ ID NO: 48869 - protein, 1097 aa, Candida albicans SC5314
MSTSQPSQQQNPEQVVNDIRQKIEKERKIIQGFNDVKRNTNNPEVIQKCKSKIIESQSMIDYYQETMNKLTRQMSRLNTNSSSRTASRSSVISEYKPSYSNFDLIKYECPSLGNKIQFMLQYLEFKLQVENKYSEANKKLSHLYLMDGDKSSSNAAEGGRAESDQRIQLLEKALKKYQKFSINDHEFDRDYEIMDSTKHSRKLLTGRLTVSITCIRDVDHIATALAKKRETVVVIKVDDLEKARTKPSKNDNWNEEMVIDVDKSHEIELAVMDKQNGIYVPVAVNWFSLFDLAEEIRKKKVAKDQGSSGWLPAANLPQTGGSGAGTGSSMTGGASYGATSPLPAHNDLRPSVSPSSDAKENKVSVSTWLSLEPGGQMLINLNFEKSITNGKQFRGPLGRHGAIRQKKEEVFEKHGHQFVQKQFYNIMSCALCGEFLRYTGYQCQDCKFLCHKKCYQKVVTKCISKSGSDYDAAQLNHRIPHRFEPITNHGTKWCCHCGYILPWGKKNVRKCTECGVMCHAQCTHLVPDFCGMSLQMANEILATIESTKVSPKKAQHQQSHAKPLPPKPPIESKPSMDSEETLHNEPSYKSLRPASVVHQDTNFVSKLPTTVQNKYQEPVELPPQQQNQVVPSTRRRGHGSTDLSFETGYGQQQHQHHRDVPQIVVEDHQHYNSNDNRDVEMEESKDEFDNFDYNNKYTENEILTDVQQDQVRSPFADQIQGVPETSHAKQQNQQVQQVQQQEELGHQRTHSSGKFGKSKRRKRKVGLDDFQFLAVLGKGNFGKVMLAESRHTSKLCAIKVLKKDFIVENDEAESVKSEKRVFLTANKEMHPFLLNLHCCFQTENRIYFVMEYISGGDLMWHIQKNRFTAKRAKFYACEVLLGLKYFHDNGIVYRDLKLDNILLTTKGHIKIGDYGLCKEDMWHKSTTSTFCGTPEFMAPEIVAGKAYDRSVDWWAFGVLLFQMLLCQSPFKGDDEDDIFNAIENDEVKYPINLSRQTVLVLQALLTKDPSQRLGSGPKDAEEIMEHPYFHDVNFDDVLNCRIPAPYIPEVQSEHDYSNFDKEFTSETPRLTPVETVLTSEMQEQFRGFSHISDNATI

SEQ ID NO: 48870 - protein, 161 aa, Arabidopsis thaliana
MGSSMGFLGKGVPPTQMMNMVMGSLYKQFTQKAINNFDDFHVAVLDIFNNFNSALPGRHFDFPTPDQIKVCFARWKEAKDEEEKKKLFIEFMSKSVKPSKLDDVTMITGIVSPPAAMAAKRAGENVPQLKLIKLIPDVIFVPTVTILAIVSAKLSRRMYLK

SEQ ID NO: 48871 - protein, 642 aa, Anabaena variabilis ATCC 29413
MVQTPPSQFSEEQYKVENANAEVQALIESPTPDTEIDLEFLYTRDIEFRQETIYFLVVDRFYDGDAENSEGYNPELYDPNGKDWGKYWGGDLQGVIDKLDYLKDMGVTALWLTPLFEQVEELFVGNAAMHGYWTKDFKRLNPRYIGNGEDPSLNNTQETRNTTFDRLIAELHKRKMKLILDIVCNHSSPDTSGSKGELYDDGVKIADFNDDVNHWYHHYGEVQNWEDDWQVQNCELAGLATFNENNTEYRNYIKSAIKQWLDRGVDALRVDTVKHMPIWFWQEFTGDMYNHKPDVFIFGEWIYNYPSDDRSVEFANNSGMTLLDFGLCVAIRGALAQGAEGGFHLIQEIFDQDDRYNGATELITFVDNHDMPRFQSLNPDPAMLKVAIALIMTSRGIPCIYYGTEQYLHDDTNGGNDPYNRPMMENWDTDTEVYRYLRLLSGIRRLNPAVSMGSQWQKYLTPDVYCYVRRYRSSVCFVALNRGGEVTLPEVQTDLPDGEHTCAVTRNKFEVKDGKIYNLQLEERGVIVLSHVGERVKAQTIIRVQLNGVHTQPGETIVVVGDCPELGNWDISKAYPLEYINSNTWFAEIPFDESAGKLISYKYAMWREGRSPLRENTLNRRWVVAKEGTVKWRDTWASGRES

SEQ ID NO: 48872 - protein, 261 aa, Escherichia coli
MKNSSANARTHATAAMVKAVCAVVNGESMNPIAVTLLTGFLGAGKTTLLRHILNEQHGYKIAVIENEFGEVSVDDQLIGDRATQIKTLTNGCICCSRSNELEDALLDLLDNLDKGNIQFDRLVIECTGMADPGPIIQTFFSHEILCQRYLLDGVIALVDAVHADEQMNRFTIAQSQVATPDRILLTKTDVAGEAEKLRQRLARINARAPVYTVTHGDIDLGLLFNTNGFMLQENVVSTKPRFHFIADKQNDISSIVVELDY

SEQ ID NO: 48873 - protein, 733 aa, Cryptococcus neoformans var. neoformans JEC21
MPRSVHNPFLFEAAWEVANKVGGIYTVIKTKVPVTVREYGDRLCLIGPLSYKSAPVEVEAEEPGPGPFGDALRSMQERGVKLLYGRWLIEGAPRVLLFDTGSCYDRMDEWKGDLWNLAGIPSPPNDHETNETIVFGYMVAWFLGEFAARETDNAIVAHFHEWQAGLAIPLCRKRHIDVTTIFTTHATLLGRYLCAGSVDFYNNLQYFDVDHEAGKRGIYHRYCIERSSAHCADVFTTVSHITAFESEHLLKRKPDGVLPNGLNVVKFAAMHEFQNLHVQSKEKINEFIRGHFYGHYDFDLDNTIYMFTAGRYEFRNKGVDMFIESLARLNHRLKKMGSKTTVVAFIIMPAATNSYTIEALKGQAVTSQLKDCVEQVTNRISKRIFEHACRYSGEHGTEVPNPEDLLSNEDRVLLKRRVFALKRNSLPPIVTHNMADDANDPILNQLRRVQLFNRPEDRVKVIFHPEFLNSNNPILGLDYEEFVRGCHLGVFPSYYEPFGYTPAECTVMGIPNITTNLSGFGCFMEDLLESPEDYGCYIVDRRGQGIEESVDQLTGQLLSFTTKSRRQRINQRNRTERLSELLDWKSLGLEYAKARQLALRRAYPDSFNDDEPDFTGVQKVGAPLSAPASPRMRTGMMTPGDYATLTEEMEHLSTQDYMGAKSWKGINDDDDENHYPFPLVMKPRKRSDSLASAISGNATPSGGRKLSENDLARADAALSNVEGVHADGINGHH

SEQ ID NO: 48874 - protein, 136 aa, Ehrlichia canis str. Jake
MFKPKVTLNYPLEKGPLSTRFRGEHALRKYKNGEERCIACKLCEAICPAQAITIEAQERDDGSRRTVRYDIDMTKCIYCGFCQEACPVDAIVEGPNFEYATETREELMYNKSKLLHNGQVWEEAIDFRIKKNSQFY

SEQ ID NO: 48875 - protein, 292 aa, Triticum aestivum
MMAEAWVDVLPPPAPYFAGQPCWAVQQERRGGGAWTLEENKVFEEALAAIDLDAPDRWEMVALMLPRKTVADVVNHYRALENDVGFIEAGLVPFPHYDSSSPSSGFTLDWDGGAAGAGGFRRGYCLKRGRADQERKKGVPWTEEEHRLFLKGLKKYGRGDWRNISRNYVTSRTPTQVASHAQKYFIRLTSGGKDNKRRSSIHDITTVNVPDDDDRGSPSGSPPSALTTVDTKPSPSYGGQRHAFMPPTLPAGTLGGGHPYGNVKLEHQSSFMDGAGLDLDDSLLLQIQCGQL

SEQ ID NO: 48876 - protein, 621 aa, Listeria monocytogenes str. 1/2a F6854
MCGFVGCVHDRITEITGADKETFRQMNSMITHRGPDDEGYFTDDHVQFGFRRLSIIDVENGHQPLTYENERYWIIFNGEVYNYVELREQLVAEGMTFETESDTEVIIATYAKYKEKTAERLRGMFGFVIWDKQEELVYGARDPFGIKPFFYAEEDDKLFMGSEKKSILHALKEKELDEVSLQNYMTYQFVPEPDSLTKNVKRLEPGHQFTKKIGQPMEITTYWKASFAPVTKSEDAWIKEVRDVMYDSVKMHMRSDVPVGSFLSGGIDSSIIAAIAKEYHPAIKTFSVGFERDGFSEIDVAKETADKLGVENISYVISPEEYMKELPKIVWHMDDPLADPAAIPLYFLSREARKQVTVALSGEGADELFGGYNIYNEPNSLAMFNKMPGVFKSLLNNVARIMPEGMRGKSFLERGTTPMEERYIGNAKMFTEKEKQILLPKYQAGHDYTNITDPFYAETTNYHPVERMQYIDIHTWLRGDILLKADRMTMANSLEVRVPFLDKEVYNVARNIPDTMKTTNGTTKYILRKAAATFVPEHVLNRRKLGFPVPIRHWLKDEMNAWVKNIIKESPTDHLINKQYVLDLLDDHCAGKFDYSRKIWTVVIFMIWYDVYVADKYDFGK

SEQ ID NO: 48877 - protein, 275 aa, Prochlorococcus marinus subsp. pastoris str. CCMP1986
MTDFLVAALQITSTSNVEANFAEAEEQIELASRRGSELIGLPENFAFLGEDNEKLRMASELSIKCTNFLKTMSQRYQVFLLGGGYPVPAGDNRHTFNRSALFGKDGQVLAKYDKIHLFDVDLPDGNLYKESSTILSGEEHPPVIDVPGLCKIGLSICYDVRFPELYRHLSSKGAELIMIPAAFTAFTGKDHWQILLQARAIENTAYVVAPAQTGIHYGRRQSHGHAMVIDPWGTVLSDAGKTQGAAIAPADKERVQKIREQMPSLKHRKTKMFAK

SEQ ID NO: 48878 - protein, 219 aa, Escherichia coli K12
MKEIIDGFLKFQREAFPKREALFKQLATQQSPRTLFISCSDSRLVPELVTQREPGDLFVIRNAGNIVPSYGPEPGGVSASVEYAVAALRVSDIVICGHSNCGAMTAIASCQCMDHMPAVSHWLRYADSARVVNEARPHSDLPSKAAAMVRENVIAQLANLQTHPSVRLALEEGRIALHGWVYDIESGSIAAFDGATRQFVPLAANPRVCAIPLRQPTAA

SEQ ID NO: 48879 - protein, 719 aa, ASPERGILLUS NIDULANS FGSC A4
MAPGLELLPKTTALPTKAANAINNAVYGRDSDVKFESAEKHQRVLNVFRAFIADLVQQYGDGHPGAPMGMAAIGIALWKYVMKYSPTNCNYFNRDRFVLSNGHACLWQYLFMHLVGVKSMTLEQLKSYHSTDSSSLCPGHPEIENEGVEVTTGPLGQGVANAVGLAMATKNLAATYNKPGYEVVNNMTWCMVGDACLQEGVGLEALSLAGHWRLNNLCVIFDNNNVTCDGTADVANTEDINTKMRATGFKVIDVYDGDSDVVAITNALLAARSSTKPTFINIRTTIGVGSKQAGTADAHGAALGVDEVAKIKRAFGLNPEEHFHIPQDVYDFFSDLPSRGKTHEAEWHAAVAAYREAEPVLASEFDLRVAGKMPADWTKYKLGQNVKNFLVGTADLTPSVNVAYKNKVDFQSPDLKTACGMSGNYAGRYIHYGIREHAMCAISNGLAAFNKGTFIPITSTYLVFHLYAAAAVRMAALQGLHQIHIATHDSIGVGENGPTHQPIAVPALYRAMPNILFIRPCDAEETVGAYIAAIQHDTTPSVLALSRQNLTQYPAHSSREGVQKGAYVFVEEENFDVTLLSVGSEMAYTMAAREILAAEHGIKARVVSFPCARLFELQSREYKHSVLKPRAGKPAVAIEAYPSVGWERYADAAIAQNQFGKSLPCKEVYEHFGFSGKIIADKVKGLVDEVRRDGVEVLRGDFRDLNGGPSVGVEHPNVP

SEQ ID NO: 48880 - protein, 440 aa, Caulobacter crescentus CB15
MATTGSGGLAVFIWQYGRQTCGAPSVSQRGSDMSLSVCGLGAPCLSPGSILGKENDMRSLDAFAGQKLAALDAQSLRRRLSPTRRHDGAVVERDGKRMISFSCNDYLNLSQHHLVRAAAAEAALNYGAGAAASRLVTGDHPLLSDLEKRLAHLKGTEAACVFGSGYLANTGVIPTLVGPGDVILIDALAHACIWAGAQLSGAKVVKFAHNDPADLERLLLAERGAARHALVATDGVFSMDGDIAPLDALSELCQRHDAWLLSDDAHGVGVLAEGRGSGALFPTAKIPLQMGTLSKALGSYGGYLCGSQAVVDLLKTRARTLVYATGLPPASAAAALASLDLIAANPTMTEVPLAKARLFTRRLGLPEACSPIVPVVLGSAESALAASTELQNQGFLVVAIRPPTVPDGTARLRIAFSAAHEDADIIRLADAIAKLRETAS

SEQ ID NO: 48881 - protein, 1372 aa, Cercospora zeae-maydis
MPTSNGGRTSPASLRSHHVRYASDSNIALRSTIMEQPEGPPELETYDSSGTNSSGNDGDEYAGTQESHSDSDGISSRHFVPGSGQAYAQDEVTPLTNVSTYGWSQPGSSNVSRTTTRGSVGSALPGTPAYEGTGTAMTNGTRRPANTRKESSNIYAPNRGPGSSMRYALNTGTRPRNGFTHMRRRNPNDEYRAQEKAYVQRIRQDGPDNDFQTEPRTPSLDYSFGSEDDEESPTNANYADHDPAEVDTLLYYGQEDLEPSVEELNIPANRERLEWHAMLANVLTGDVVKQEKKRLIGGPEQQGENTLKTEVWIGVRAKTCGRSIAAQKRLVEDGRSKVKQTIESIVAFEIKGEAEVGQSPMQQVQDVVKKIEKIEGLYPPRQAFRAAHPPAASSAYEHTCDAVIAWNNTTELIGTELGILQSWVGNMELDFTTARVRPEGEQHNELFDDSSFIDRILKEDGLKSLQGDKNLLNGVNTVIHKAKATLIANAEAFSDRHLPPYIEELLTLINFPSRLIQEIIRMRLSYAKKMKDAAQQGVMTAEQMILQFQILLQLAVKIKEQYLLIGQPEPGWDLPPCIDDNFDSVVLDALKFYFKMLNWKLMANKNTFKEAEILEQEWDFSNELGRHLDGGDVEVAEQFSSLTSKSMGRLAAPFEKELQRPADEVAGTAEMDKRYKSILDSVRVRQRKIFRFSRILSQRFENATEYNINIDNELYEDFLLALRLSGHFLVETNAESSVPTPGENEKAGGKVYILASPVLKERPKDIQSMLGTCYHAEDSPEDPSNPYVLILRPELPLVWEGDRMDASHSGKETLKVPQTLDLKTGRLRLVADGSLQRLQNANMAFTTATGNFDLTILVEQRANLCRESTKNWQRFAKLHTSSPTHSWTRSPLFALRSKPREGKAKAKNSTHPELLCFCYGIWSAFCHSHGRTTAGGQSHKLTKLALDWVSFICDDCVASDRKTFRWAVVALEFAMVMTRGQNILSISDEEYALLRSKVAGCRSLLISHFDIMGARGTVAAQAEKQRMDAMVGKLRLDIGKLKDDDESSRIVRAQWLDELEKLDQARKDREAERQALGRVLEDSNDADRALTHLSASAGNVHLRWQQGQFVGGGTFGSVYAAINLDSGHLMAVKEIRLQDPKMIPTVVSQIRDEMGVLQVLDHPNVVQYYGIEPHRDKVYIFMEYCSGGSLAGLLEHGRIEDETVVQVYALQLLEGLGYLHEASVVHRDIKPDNILLDHNGVIKFVDFGAAKVIAKQGKTMVADGPTGNGRQRSVQGTPMYMSPEVIKGGKHTGRLGAADIWSLGCVISEMATGSRPWANMDNDFAIMYNIANGNSPQMPTRDQMSDVGLDFLQAMLRTRPCEACVRCGASAT

SEQ ID NO: 48882 - protein, 121 aa, Triticum aestivum
  misc_feature (71)..(71): Xaa can be any naturally occurring amino acid
  misc_feature (86)..(86): Xaa can be any naturally occurring amino acid
  unsure (1)..(121): unsure at all Xaa locations
MAKTSSFKLEHPLEKRQSEANRIREKYPDRIPVIVEKAERSDIPDIDKKKYLVPADLTVGQFVYVLGERIXLSAEKAIFIFVKNTXLPPTAALMSSIYEENKDEDGFLYMTYSGENTFGLL

SEQ ID NO: 48883 - protein, 434 aa, Saccharum spontaneum
MGLSTAYSPAGSGLVPGPLGAGAGAARRRSAQVRRPRLATVRCSVDAAKQVQDGVATAVAAEAPASRKECFGVFCNIYDLKAEDKTKSWKKLVNIAVSGAAGMISNHLLFKLASGEVFGLDQPIALKLLGSERSFQALEGVAMELEDSLYPLLREVSIGIDPYEVFQDVDWALLIGAKPRGPGMERAALLDINGQIFADQGKALNAVASRNVKVLVVGNPCNTNALICLKNAPNIPAKNFHALTRLDENRAKCQLALKAGVFYDKVSNVTIWGNHSTTQVPDFLNAKIDGRPVKEVIQDTKWLEEFTMTVQKRGGALIQKWGRSSAASTAVSIVDAIKSLVTPTPEGDWFSTGVYTTGNPYGIAEDIVFSMPCRSKGDGDYELATDVSMDDFLWERIKKSEAELLAEKKCVAHLTGEGDAFCDLPEDTMLPGEK

SEQ ID NO: 48884 - protein, 685 aa, Polaromonas sp. JS666
MTALADTSPSLMANSIRALAMDAVQQANSGHPGAPMGMADIAVALWGRHLKHSPHNPQWFDRDRFVLSNGHGSMLLYALLHLTGYKLPMSELKNFRQLHSKTPGHPEHGYTPGVETTTGPLGQGLTNAVGMALAEKLLAKEFNRDGHSVVDHHTYVFMGDGCLMEGISHEAAALAGAWKLGKLIALYDDNGISIDGPVTPWFIDNTPLRFAAYGWNVIGPLDGHDAQAVSAAIAEAKESTDKPTLIVCKTHIGKGSPNRANTAKAHGEPLGAEEIKLTRDELNWPHTPFEVPKESYDAWDAKAAGLAAEAAWDVKFTAYKAAHPELAAEFTRRMKGELPKRFSQLAVDTVIGAHTRAETVASRKASQIALESFTAGLPEMLGGSADLTGSNLTNTKSTPNLRFDPNGEVVQTEAANGSLVGGRHINYGVREFGMAAIMNGVALHGGFIPYGGTFLTFSDYSRNAIRMAALMKLRVVHVFTHDSIGLGEDGPTHQSIEHAASLRLIPNLDVWRPGDTAETAVAWAVALQNKNKPTALLLSRQNLPYAPKNDLGEISKGAYVLAEPAEVGLNKKAQAVIIATGSEVQLALKAQELLAGKKIAVRVVSMPSTTTFDKQSTAYKTSVLPAGIPRIAVEMGVTDGWWKYGCAAVVGIDTYGESAPAAALFKHFGFTPENVADTVRKVLKK

SEQ ID NO: 48885 - protein, 495 aa, Kineococcus radiotolerans SRS30216
MSVEKDTGPGVGVQRDFSHEDGGLHKGLKNRQLQMIAIGGAIGTGLFLGAGGRLVTAGPGLFIVYGVCGFFVFLILRALGELVLHRPSSGSFVSYAREFYGEKAAFVAGWMYWFNWAMTAIVDITAIATYMHFWDTFSAAPQWLLALIALVVVLGLNLVSVKIFGEMEFWFALIKVIALTAFLLIGIVFLAGRFPVEGQPTGLSVISGNGGWFPTGAVPLVVVVSGVVFAYAAVELVGTAAGETENPEKIMPRAINTVILRIVVFYCGSLVLLALLLPHTAYSADESPFVTFFSKIGVPGAGDVMNFVVLTSALSSLNAGLYSTGRIVRSMAQNGSAPKFTAKLNKGGVPFGGIAITGVVAVLGVGLNYVAPGRAFEIVLNASALGIIASWGTIVLCQLRLHAWSKKGIVTRPDYRLFGAPYTGYLVLAFLVAVLGIMAYDEDSRPTVYALGVIVPLLVLGWFAVRKRVLAAAEERMGYTGEFPVKANRPADGGK

SEQ ID NO: 48886 - protein, 332 aa, Polaromonas sp. JS666
MTIKVGINGFGRIGRNVFRSAVQSFSDIEIVGINDLLEPEYLAYMLQYDSVHGRFKGEVSVDGNTLIVNGKKIRLTQERDPANLKWNDVGAQVVIESTGLFLDKTSAEKHLAAGAKKVIISAPSKDDTPMFVFGVNDKTYKGEAVISNASCTTNCLAPVAKVLNDKWGIKRGLMTTVHAATATQKTVDGPSNKDWRGGRGILENIIPSSTGAAKAVGVVIPELNKKLTGMSFRVPTSDVSVVDLTCELSKEATLKEICAEMKAQSEGALKGVLGYTEDKVVATDFRGDARTSIFDADASIALDSTFIKVVAWYDNEWGYSNKCLEMVRVVAG

SEQ ID NO: 48887 - protein, 415 aa, Heliobacillus mobilis
MKKRVVITGVGVVSPVGTGKEKFWDSLTSGVSGIGPVTRFDATDLPTRVAAEVKDFDPTKFLDRKEARRMDRFAQYAVAASKMAMEDSGLDMEKADRERAGVILGCGIGGMETFEDQAKVMINKGNGRISPFFVPMMISNMAAGHISMQLNLKGPSETVVTACASATNACGSALRLLQHGDCDVVLTGGTEASIIQLSFAGFCAMKAMSTLNDDPAKASRPFDRDRSGFVMGEGAGILVFEELEHALARGAHIYAEVVGYGSSCDAYHITDPAPNGEGAARAMQGALKDAGLKPEDIDYINAHGTATEKNDYYETLAIKSVFGDHAQKVAISSTKSMTGHLLGAAGGIELIATALAIHDGIIPPTINLDNPGEGCDLDYVPHEARKIPVEAAISNTFGFGGHNATVALCKYRPGE

SEQ ID NO: 48888 - protein, 493 aa, Candida albicans
MTETSISGLRGPKSMYFMEIVDVSSQESSVLSSIVESFTSAVSASNLGVYSEEVLCDIKSSLKENSPITMLPNYNVSPTGNEHGQYLVIDLGGSTLRIAVVDISKPHPNLSRSERITIVVEKSWIIGNDFKRIDGEFFKYIGSKINEILVGQNVIDVKSVINTGITWSFPLETTDYNRGKIKHVSKGYTVGEDIYDKDLKMVLEDTLRQEYGLTLDVQSILNDSLAVYSAGCFIDSKMKLAMVLGTGINMCCSLKRSSDIHPSKMLADATLFNCELSLFGQNLCKDFATKYDIIIDKRFAGFSHHFKTFMEPDPITKTLFQPHELMTSGRYLPELTRLVVVDLIEAGEIFQNVDHQQMYQEYGGFSGELMCFVHENDDYDDIHDKLCKAYGWTTVGLSDIVSLKEVVSCIIKRAAFIVANAIIAFFKLLGSDELGGDVTIGYVGSVLNYFHKYRRLIVEYVNNAEEAKGIKVDLKLIENSSIIGAAIGAAYHK

SEQ ID NO: 48889 - protein, 463 aa, Chlamydomonas reinhardtii
MQMQLNAKTVQGAFKAQRPRSVRGNVAVRAVAAPPKLVTKRSEEIFKEAQELLPGGVNSPVRAFRSVGGGPIVFDRVKGAYCWDVDGNKYIDYVGSWGPAICGHGNDEVNNALKAQIDKGTSFGAPCELENVLAKMVIDRVPSVEMVRFVSSGTEACLSVLRLMRAYTGREKVLKFTGCYHGHADSFLVKAGSGVITLGLPDSPGVPKSTAAATLTATYNNLDSVRELFAANKGEIAGVILEPVVGNSGFIVPTKEFLQGLREICTAEGAVLCFDEVMTGFRIAKGCAQEHFGITPDLTTMGKVIGGGMPVGAYGGKKEIMKMVAPAGPMYQAGTLSGNPMAMTAGIKTLEILGRPGAYEHLEKVTKRLIDGIMAAAKEHSHEITGGNISGMFGFFFCKGPVTCFEDALAADTAKFARFHRGMLEEGVYLAPSQFEAGFTSLAHSEADVDATIAAARRVFARI

SEQ ID NO: 48890 - protein, 511 aa, Oryza sativa
MARMGISKGGSGKEAKKPPLLLGRFEVGKLLGQGNFAKVYHARNVATGEEVAIKVMEKEKIFKSGLTAHIKREIAVLRRVRHPHIVQLYEVMATKLRIYFVMEYVRGGELFARVARGRLPEADARRYFQQLVSAVAFCHARGVFHRDIKPENLLVDDAGDLKVSDFGLSAVADGMRRDGLFHTFCGTPAYVAPEVLSRRGYDAGGADLWSCGVVLFVLMAGYLPFQDRNLAGMYRKIHKGDFRCPKWFSPELIRLLRGVLVTNPQRRATAEGIMENEWFKIGFRRFSFRVEDDRTFTCFELDDDAAVDAPTSPPDTPRTVDSGDVGSAPTRPRKAGSLTSCDSAPSLLEGRFGLGGSSRRRSSLNAFDIISFSPGFDLSGLFDQDDGGGAGAGSIPEQQKHTARFVSAAPVEVIVATLEAAAAAAGMAVREREDGSISMEGTREGEHGALAVAAEIYELTPELVVVEVRRKAGGAAEYEEFFRARLKPSLRELVCDDRPCPEDSGELSRSL

SEQ ID NO: 48891 - protein, 156 aa, Leuconostoc mesenteroides subsp. mesenteroides ATCC 8293
MVQPFDSLDGIEKVRSGYTGGHVENPTYEQVLTHTTGHTEAVKIWFDSEKISYRELVEIYWEQTDPTDAMGQFQDRGDNYRPVIFVNSPEQREIAEESRAALAASNRFDEPIVTKIEDAKPFYEAEEYHQDFYKKDPEREALEMAQRLQFKADKWN

SEQ ID NO: 48892 - protein, 115 aa, Candida albicans SC5314
MGYGKRKGTKDARMPSQVLWMRRLRVLRKLLAKYRDAGKIDKHLYHNLYKAAKGNTFKHKRSLVEHIIAAKAEALREKALKEEAEARRVRNRAARERRQQRLAEKKEALFAEAAN

SEQ ID NO: 48893 - protein, 563 aa, Oryza sativa
MACLAPHFKWAPCPHAHHHHSTSLPSSSSSSTSAPSSSSRCSFSRGGPFRVHCAVTATTSAAAPVVVEAPGGGMRLAYAAAPDSSAPALQKKIQSALASEVFLNEEAVVTAAAAEAVALARAAAEAAQEVVRMVQNNKNERNTRPKKAVVNYLANEILRTEMKPNILDKYSDGILSEEIESYGILSDEAELDGDTQDIPSIAVKSARQTERRARRTRAAIKAATIVRTSPKPATSSKKKRSKGASSGTNPLGSLWKMTGRRLLTAKEEVEFSEGIQDLLKLEAIQAELAEYNGGQPTFAQWATAAGVDERTLRKRLDHGIYCKNRMVTSNVRLVISIAREFEGPGMELYDLIQEGMQGLIRGAEKFDASKGFRFSTYSHWWIKQAMRKSVSEQSQIFRLPAHMVEASYRVKECIKRLRRKLKRRPTNEEIAADTGMPIKRVEAAVNLPKYSVSLDSKIGSTDMTYQEVTADPTAETAEEMLNRLSMKRDVHKALDTLTTRERQVVTLRFGLEDGRIRTLQEIGNTMGVSRERIRQIESAAFRKLRSKKRVNALKDYLVPVGNW

SEQ ID NO: 48894 - protein, 341 aa, Mesorhizobium loti MAFF303099
MKAARLYGPGDLRVEDVAPPGIPDPGWVKLRVDAAGICGSDLHNFRTGQWISRSPSTAGHELTGTVTALGEGVDTVAVGDRVVADSRFWCEECVQCRAGRRHLCASLGFVGEVCDGGFAEQVVLPARLLHVVDAALDERVAAMAEPLAVALHAVRRLPKTAGSVLVVGCGPIGGLAALLLSRSFAGTVLVADRNQARCARVARVTGATIVDLDRDAIAAATGYAPLLAAVEATGSIAAFNQLLGVLDSGSAVAMVGIFHGRLDIDPNLLVEREIALLGCHAFADELPDAVRMLGELSEPLLALIDREIGLDDIPAAYERLLAGQSDGLKTIIRMRQPVEPA

SEQ ID NO: 48895 - protein, 401 aa, Bacillus cereus ATCC 10987
MGATGVTSQRKTIEESIERNKEKYIETSHDIHANPEIGNQEFYASRTLSLLLGSAGFQLQHNIAGHETGFIARKSSGKQGPAIAFLAEYDALPGLGHACGHNLIGTISVAAAIALSETLEEIGGEVVVFGTPAEEGGPNGSAKSSYVKAGLFKNIDAALMIHPSGKTATTSPSLAVDPLDFHFYGKTAHAAASPEEGINALDAVIQLYNSINALRQQLPSDVKIHGVITEGGKAPNIIPDYAAARFFIRAATRKRCAEVTEKVKNIAQGAALATGAKVKIHQFQNEIDELLVTKTYNDIVAEELELLGEDVNRKERLGIGSTDAGNVSQVVPTIHPYIKIGPDDLIAHTNEFREAARSELGDKALITSAKALANTAYRLITEEGLLEKVKEEFREAQRNQG

SEQ ID NO: 48896 - protein, 223 aa, Pseudomonas aeruginosa UCBPP-PA14
MRLKAVLFDMDGTLLDTAPDFIAITQAMRAAHGLPPVDEQRVRDVVSGGARAMVAAAFGLSLDSPELEPLRQEFLDRYQEHCAVLSRPYDGIPELLAAIEKAGLIWGVVTNKPVRFAEPIMQRLGYAERSRVLVCPDHVTRSKPDPEPLLLACSQLGIDPSRVLFIGDDLRDIESGRDAGTKTAAVRYGYIHPEDNPAHWGADVIVDHPRELIDVLDRALCDC

SEQ ID NO: 48897 - protein, 176 aa, Lactobacillus plantarum WCFS1
METAIFAGGCFWCMVQPFDSQPGIDSVVSGYTGGHTKNPTYEDVKAHTTGHTEAVKITFDPDIISYTELVNIYWHQTDPTDAMGQFQDRGDNYRPVIFVNGPEQRRIAEASKRALQVSERFSKPIVTAIEDAKPFYPAEARHQRFYKNNPVVFAEQEAGGRADFIAEQWADAPKVD

SEQ ID NO: 48898 - protein, 417 aa, Arabidopsis thaliana
MALKFNPLVASQPYKFPSSTRPPTPSFRSPKFLCLASSSPALSSGPKEVESLKKPFTPPREVHVQVLHSMPPQKIEIFKSMENWAEENLLIHLKDVEKSWQPQDFLPDPASDGFEDQVRELRERARELPDDYFVVLVGDMITEEALPTYQTMLNTLDGVRDETGASPTSWAIWTRAWTAEENRHGDLLNKYLYLSGRVDMRQIEKTIQYLIGSGMDPRTENNPYLGFIYTSFQERATFISHGNTARQAKEHGDIKLAQICGTIAADEKRHKTAYTKIVEKLFEIDPDGTVMAFADMMRKKISMPAHLMYDGRNDNLFDNFSSVAQRLGVYTAKDYADILEFLVGRWKIQDLTGLSGEGNKAQDYLCGLAPRIKRLDERAQARAKKGPKIPFTLKGQRQKQKPILPVPHFICLLLKLV

SEQ ID NO: 48899 - protein, 1065 aa, Bacillus cereus ATCC 10987
MDKKVSAIPQPKTYGPLGNLPLIDKDKPTLSFIKIAEEYGPIFQIQTLSDTIIVISGHELVAEVCDETRFDKSIEGALAKVRAFAGDGLFTSETQEPNWKKAHNILMPTFSQRAMKDYHAMMVDIAVQLVQKWARLNPNENVDVPEDMTRLTLDTIGLCGFNYRFNSFYRETPHPFITSMTRALDEAMHQLQRLDIEDKLMWRTKRQFQHDIQSMFSLVDNIIAERKSSGNQEENDLLSRMLHVQDPETGEKLDDENIRFQIITFLIAGHETTSGLLSFAIYFLLKNPDKLKKAYEEVDRVLTDPTPTYQQVMKLKYIRMILNESLRLWPTAPAFSLYAKEDTVIGGKYPIKKGEDRISVLIPQLHRDKDAWGDNVEEFQPERFEDLDKVPHHAYKPFGNGQRACIGMQFALHEATLVMGMLLQHFEFIDYEDYQLDVKQTLTLKPGDFKIRIVPRNQNISHTTVLAPTEEKLKNHEIKQQVQKTPSIIGADNLSLLVLYGSDTGVAEGIARELADTASLEGVQTEVAALNDRIGSLPKEGAVLIVTSSYNGKPPSNAGQFVQWLEELKPDELKGVQYAVFGCGDHNWASTYQRIPRYIDEQMAQKGATRFSTRGEADASGDFEEQLEQWKESMWSDAMKAFGLELNKNMEKERSTLSLQFVSRLGGSPLARTYEAVYASILENRELQSSSSERSTRHIEISLPEGATYKEGDHLGVLPINSEKNVNRILKRFGLNGKDQVILSASGRSVNHIPLDSPVRLYDLLSYSVEVQEAATRAQIREMVTFTACPPHKKELESLLEDGVYHEQILKKRISMLDLLEKYEACEIRFERFLELLPALKPRYYSISSSPLIAQDRLSITVGVVNAPAWSGEGTYEGVASNYLAQRHNKDEIICFIRTPQSNFQLPENPETPIIMVGPGTGIAPFRGFLQARRVQKQKGMNLGEAHLYFGCRHPEKDYLYRTELENDERDGLISLHTAFSRLEGHPKTYVQHVIKEDRMNLISLLDNGAHLYICGDGSKMAPDVEDTLCQAYQEIHEVSEQEARNWLDRLQDEGRYGKDVWAGI

SEQ ID NO: 48900 - protein, 226 aa, Asparagus virgatus
MGRGKIEIKRIENTTNRQVTFCKRRNGLLKKAYELSVLCDAEVALIVFSSRGRLYEYANNSVKATIERYKKACTDTTNTGTVSEANSQYYQQEASKLRQQITNLQNSNRNLMGESLSSMGLRDLKQLESRLEKGISKIRSKKNELLYAEIEYMQKREMELQNDNMYLRNKIAENERAQQQMNMLPAATSNEYEGMPQFDSRNFLQVNLLDPNHHYSQQQQTALQLG

SEQ ID NO: 48901 - protein, 588 aa, Neurospora crassa
MKSALGCVFSALAASVSSSSLHALRQTPPQLDYNLLPRAACDNTNKSRSCWGNYSIDTNYYDETPDTGVTREYWLSVEEGDCAPDGYARQCQTINGTVPGPTIFADWGDSLIIHVTNNLKSNGTGIHWHGLRQSGSNIYDGVPGITQCAIAIGQSMTYRFKVSQYGSTWYHSHFSLQYANGVFGGMIFNGPATANYDEDLGHLFLSDWSHVDVFTRWFAARNGQPPALESGLINGTNKFDCSTSSTDPNCTGRGVKLTTVVEKGKKYRLRLVNAAVDGVFQFSIDKHKLKVIAADLVPIKPYSTSSLKLTEGQRYDIIFHANQAVDNYWVRAGWLNACQPNVNPDSITSVLRYNASSTLDPTSTSDVTVSSDCLDEPLASLVPHLKMDVTNIQKSFDTYLNISTTNYVHWTINTSSLLIDWNNPTLKQVFNGESLFPTDYNVLAINKTTTDDEWIVLVIQDQSNLGLEHPIHLHGHDFWILDQSTGTFDAATSPQSFKTKNPPRRDVAALPGNGYLAIAFMPDNPGAWLCHCHIAWHASEGLSLEFLEREADIQADVSDSDRTQFNDICQTWSDNVGTQAFPQEDSGI

SEQ ID NO: 48902 - protein, 444 aa, Bacillus subtilis subsp. subtilis str. 168
MSSYLIKPELSSAYPVVSYAKGSYVYDQTGKKYLDGSSGAVTCNIGHGVRDVTEKLKEQLDQVSFAYRSQFTSEPAEQLAALLAQELPGDVNWSFFVNSGSEAIETAMKIAIQYWQEKKQTQKSIFLSRWSSYHGITLGALSLSGFYERRYRFTHLIERYPAISAPHIYRLNHETEEDFVQTAADELDTMIKRIGSQFIAGFVAEPIIGAAGAAITPPPGYYERLSEVCRTHDVLFIADEVMTGLGRTGRMLATEHWDTVPDIAVLGKGLGAGYAPIAAAVVSDSIIETIKQGSGVIMSGHTYSAHPYSAKAALEVLRYVLKHGLIKQSEKKGAVLKKKLDEAASQSGIIGEVRGKGLLLGIEFVADQKTKKVFPPEQAITQLIVSEAKKRGLIVYPSKAGIDSGEGDAVIIAPPFTISDGEMEELISIFSETVAAVEKNLKKD

SEQ ID NO: 48903 - protein, 408 aa, Yersinia pestis KIM
MILNVYVVISIFIMNAMSLLSVEVSNFTFVGLFKNDNVNIVSIHRVLLLLEELMSQLPEKMSAVVCHGPQDYRLEHVPTPVPKAKELVIKVKGCGICAGDCKCKNGAKMFWGETPWVKPPVVPGHEFYGHIVALGEGTESKYKLGERVIAEQIVPCWDCRYCNSGSYWMCETHNIYGFQKDVAEGGMAEYMRFSENAIVHKIPESLSHEDAVLIEPMACAIHTVARGDIQLDDVVVLAGAGPLGLCMVPVARLKTPKKLIVIDTIEERLALAKAFGADVVINPLKEDADKIVKSLTGGYGCDVYIEATGAPIGVTQGLQMIRKLGRFVEFSVFGQETTVDWSIIGDRKELDIRGAHLAPYSYEIATDLFERGLVTSKGIVTHSYSLDDWEKAFELADSTNSIKVILVP

SEQ ID NO: 48904 - protein, 249 aa, Cryptococcus neoformans var. neoformans B-3501A
MPIRYISQKLAQQIDVELMSASGAFSLDQLMELAGLSCAQALAKSFPPTKHKHVMVACGPGNQGGDGLVAARHLHHFSYTPTVYLPKPSSKEFLQRLVKQCENLNIPILKDVDAFQTELAKSDVILDAIFGFSFQPPLRKPFDQVLKAIKGVSKKIPIVSVDIPSGWSVTDGPQPLWTEEDDKGGKEMIETFEPEVLVSLTAPKEGVKAFKGQHWLGGRFVPDELGKKHELNIPPYEGIDQVVELPRNH

SEQ ID NO: 48905 - protein, 1767 aa, Shewanella sp. MR-4
MDKSKLRTFRSKILSHIALPLILIMAAVYGINAWFNYLSAESKLYDSLAQASNHSAYRLQLLLEHAQINTQGMADFIGFITNKEDISNSEKIKRILTNRLERNPDFYGSAVAFKPYTFANKKLFSPYVFRDGDDFHYLDIGAEGYDYTDGSWDWWSKAINQAGGYWSKVYFDEGAGNTLMVTYSVPFGPENAYFGVATVDLALNQLPEQLGVSPSQLVVLDDQGRLIFHSDKEKVLAMTSAEWLDRNTRQNKDFWALLDKGVNGQARFVDDKNLVYLASVASVAKHKWRVIVMVPEQQLLSTLLDDMASVVLNLSLLTLLLILTCYIAAKRLTRPLEMLESGILAFGQGKTQQLAIPNGAVSEIVTLSSTFNQMAELLAEREQAILDSRGNRFARLIDGMSDKSFYCSLDASGQLAQVSEGVTKVLGMSPELLKRKYQRLFTANPLNEKNWEYTDLALKGQNVPSHQVELLDAGGHPRRLDLFMQPLVSDTGELMSVEMLFTDVTEQFSAAAWSNAVLEAAPEAMLIVDQMGLIVFSNTRCQILFGYEASAMLGLQVESLLPEALRSNHARDRLQFLREGRDRPMANAKHVRALKADGGEFVAEIALSILPADNEGRRQVAASIRDMTQKLAVEQKIRDSELRFRGLVTNIPGAVYRTRIGDVWVMEYVSENIADITGYAASQFIENRQRTFESLILEEDRALCHQHIDRALAQQETFEVEYRIRHRDGSVRWVHEKGKASYTDEGFPLWFDGSIDDITESKLALVELESSRQQLTNITESIPCTVYQLRWISPVDRTFTFLSGAAYHMLGLHRDDLLKDFNIIAERIFDEERSEVVRALAGKSEDKLQWVREFRYRHPNGSTRWMEAGASGHICDDGAIIWNGYVMDITERKAMEEELAVSEAHFKALFDGSTIGIVNIDAKGVILDCNDQYCEDMGQSRESLCGMSIFEVLSLQDKETAKAQFKELAEGRVDHYRGERSFIRPNGEPLWMTVNVSALFDSQKRFESAVVSMVDMTELKLLSDELLVAKEEADAASKAKGDFLANMSHEIRTPMNAIIGMSQLCLQTELDKKQKNYVEKIERASKSLLSIINDILDFSKIEAGKLDIESVPFQLDTMLEDLSDMFSEKAAHKQLELLFAVAPNVPRHLFGDSLRLGQVLINLMNNAIKFTERGEVLLSLNLVEQQNDDVVLRFSVRDSGIGLTAEQQAKLFKSFSQADTSTTRKYGGTGLGLAICKQLVELMGGTIGVESQFGHGSTFYFTVKLQISSGQKLTVAQELEGMSILVADDNATARDIMRTTLESMGFRVDTVRSGEEAVTRCSQQEYAVALIDWKMPNLDGIETAKQIKQLAKNAPRILMVSAHATQEFLSQIEALGLAGYISKPISASRLLDGIMNSLGRAGVLPVRRNSESIDPKLLLPLKGKRILLVEDNEMNLEVATEFLEQVGIILSIATNGQIALDKLAQQSFDLVLMDCQMPVMDGYQATQAIRKRPELAELPVIAMTANAMAGDKEMCLKAGMNDHIAKPIEVNLLYQTLLKYLGAGVLPTEAASPNQLVEIPVKPINLDSKSVVKWPEHPELDIDRGLQLVQNSTRLYQRIFDRFVTSQRNVVELINKALANDKRDDAVRMAHTLKGLAGNLSSSKLVELARQLELHLSEKTEYQTELDQIQVLVASICEAIERVNPQFEEPTQSATEHLSQEALVSALNQLRQSLEDADSDAVTQIDALKPQVSSKLWQQLSPALTMINQYQFDEAVDLIDEVLAELA

SEQ ID NO: 48906 - protein, 596 aa, Xylella fastidiosa Ann-1
MSAYTITEHKYDMVVVGAGGAGLRATFGLAQKGLQTVCLTKVFPTRSHTVAAQGGISAALGNMGEDDWRYHFYDTIKGSDWLGDQDAIEYMCREAIPAVIELEHYGVPFSRTAQGKIYQRPFGGMTTRYGEGPRAERTCAAADRTGHAMLHTLYQQALAHDARFMIEYFALDLIFDNEGVCRGVLALDMAEGSLHLFRAHGVVLATGGYGRTYFSATSAHTCTGDGGGLVMRAGLPMQDMEFVQFHPTGIYGAGCLITEGVRGEGGILRNSNGERFMERYAPHYKDLASRDVVSRSMIIEIREGRGVGEHKDHILLDLTHLGPSMIQEKLPGIAESARIFAGVDVAKQPIPVLPTVHYNMGGIPTNYHGEVVRKVGNDPDAVVPGLYAVGEAACVSVHGANRLGSNSLLDLVVFGRAVANRCAETIKQSQPHKVLPSDSCDKALGLLDKLRHADGSTPTAVIRDRMQRTMQSDASVFRTSKTLQEGCEKMNEIFALFDDIKVSDRSLVWNSDLIETYELHNLLLNALATINSAEQRKESRGAHAHEDYPDRDDENWLKHTLVSVDEKGTCSFDYRPVHMYTLSKDVDVIPPKPRVY

SEQ ID NO: 48907 - protein, 284 aa, Zea mays
  misc_feature (93)..(93): Xaa can be any naturally occurring amino acid
  unsure (1)..(284): unsure at all Xaa locations
MKTLVLVAVLLLLLQQQHGGAASAGGNFYQDVDITWGDGRGKILDNGQLLTLSMDRSSGSGFQSKAQYLYGRFDMQLKLVPGDSAGTVATFYXSSQGSQHDEIDFEFLGNASGEPYTVHTNVYSQGKGGREQQFRMWFDPTAAFHAYSVLWNPAHVVFYVDGVPIREFRRRGDGTVPFPTSQPMRVYASVWDAEEWATQGGRVRTDWSKAPFVASYRGYAAAGCTAPDAAACARSNGAWMSQELDSAGQEQLRRAQASYMIYNYCTDKYRFPQGPPPECSSPAK

SEQ ID NO: 48908 - protein, 362 aa, Triticum aestivum
  misc_feature (209)..(209): Xaa can be any naturally occurring amino acid
  misc_feature (215)..(215): Xaa can be any naturally occurring amino acid
  misc_feature (240)..(240): Xaa can be any naturally occurring amino acid
  misc_feature (273)..(273): Xaa can be any naturally occurring amino acid
  misc_feature (324)..(324): Xaa can be any naturally occurring amino acid
  misc_feature (337)..(337): Xaa can be any naturally occurring amino acid
  unsure (1)..(362): unsure at all Xaa locations
MAMAMRRAAALGARHILAASASASSRAASRRHMGSLDAGAAMEKIRAAGLLRTRGLIGGQWVDAYDGKTIEVQNPATGEVLANVACMGNRETADAITSANTTFYTWSKLTASERSKALRKWHDLLMSHKEELALLMTLEQGKPMKEALGEVNYGASFIEFFAEEAKRVYGDIIPPTLADRRLLVLKQPIGVVGAITPWNFPLAMITRKXGPPMAXGCTVVVKPSEFTPLTALAAADLALXAGIPAGALNVVMGNAPEIGDELMQSTQVRKIAXTGSTAVGKKLMAGSANTVKKVSLELGGNAPCIVFDDADIDVARKGSLAAQXRTGEQTFVCSTRXLVQKGILQKIRKVFWQSVVQNLKFG

SEQ ID NO: 48909 - protein, 364 aa, Zea mays
  misc_feature (325)..(325): Xaa can be any naturally occurring amino acid
  misc_feature (358)..(358): Xaa can be any naturally occurring amino acid
  unsure (1)..(364): unsure at all Xaa locations
MDRAALTVGPGMDMPIMHDGDRYELVRDIGSGNFGVARLMRNRADGQLVAVKYIERGEKIDENVQREIINHRSLRHPNIIRFKEVILTPTHLAIVMEYASGGELFERICNAGRFSEDEARFFFQQLISGVSYCHSMQVCHRDLKLENTLLDGSTAPRLKICDFGYSKSSVLHSQPKSTVGTPAYIAPEVLLKKEYDGKVADVWSCGVTLYVMLVGAYPFEDPDEPKNFRKTIQRILGVQYSVPDYVHISPECQDLISRIFVANPSTRITMPEIRSHPWFLKNLPADLVDDSATTTSKQYEEPEQPMQGMDEIMQILGEATIPAAXSRGLNQFLNDGLDLDDDMEDLDSDADLDLESSXEIVYAM

SEQ ID NO: 48910 - protein, 335 aa, Gracilaria gracilis
MTVPQVGINGFGRIGRLVLRAAIEKDTMSVVAINDPFIDLEYMAYMFKFDSTHGRYAGSVETKDGKLIVNGKSITIYGHRDPAEIPWAEAGADYVVESTGVFTLKEKAEKHFTGGAKKVIISAPSKDAPMFVCGVNEDKYTPDLNVISNASCTTNCLAPLVKVIHEKYGIEEGLMTTVHATTATQKTVDGPSQKDWRGGRGAGANIIPSSTGAAKAVGKVLPELNGKLTGMAFRVPTSDVSVVDLTVRLATETSYDDIKATMKAAAEDSMKGILKYTEEAVVSTDFIHEEASCVFDAGAGIMLNSRFCKLVAWYDNEWGYSNRVVDLIAHVAKLQ

SEQ ID NO: 48911 - protein, 233 aa, Pseudomonas aeruginosa UCBPP-PA14
MKLPAGVGLQVWGSAAEQARGLAAEVAGRLRSALAEQGQALLVVSGGRSPVAFLEALSEDQVDWSRITLSLADERWVPESHADSNAGLVRRHLLRGEAAKARFIGLYQPAASLEEAAELADHHLHELPLPIDVLVLGMGDDGHTASLFPNSPGLDLAMDPQGTRRCLPMWAPSVPHQRLTLPRAVLAAAKVQLLAIQGQSKLATLNTALAVEDERRMPVRAFLRAPLTIHWYP

SEQ ID NO: 48912 - protein, 168 aa, Avena clauda
VMASSATSVAPFQGLKSTAGLPVSRRSASSLGSVSNGGRIRCMQVWPTEGIKKFETLSYLPPLSEEALLKQIDFLIRSKWVPCLEFSKVGFIFREHGSTPGYYDGRYWTMWKLPMFGCTDASQVIKEVEEVKKEYPDAYVRIIGFDNIRQVQCVSFIAFKPPGCEESG

SEQ ID NO: 48913 - protein, 642 aa, Arabidopsis thaliana
  misc_feature (59)..(59): Xaa can be any naturally occurring amino acid
  misc_feature (381)..(381): Xaa can be any naturally occurring amino acid
  misc_feature (389)..(389): Xaa can be any naturally occurring amino acid
  unsure (1)..(642): unsure at all Xaa locations
AFCLCLSYVSGTDLIWNLSFIVLIAEFWKSIPTTEPYRVIVGDVRDKLYDTRERAHELXSNGHSDVPVEATFIKVEQFLEPLERCYRSLCSCGDRPIADGSLRDFVRQVATFGRSLVRVDIRQESDRHTDVLDAMTTHLDIGSDREWSEERRQEWLLSERSGKRPRFGSDLPKTEEIADVLDTFHVIAERPADSFGAYVMAMATAPSDVLAVERLQRECRVREPLRVVPRFEKRADGEAAPAAVARLFSVDWYKNRINGKQEVMIGYSYSGKDAGRLSAAWQLYKAQEELVKVAKEYGVKLTMFHGRGGTVGRGGGPTHLAILSQPPDTINGSLRVTVQGDVIEQSFGDANLCFRTLQRFTAATLEHGMRPPLSPKPEWRXLLDEMAVXATEAYRSVVFHEPRFVEYFRLATPELEYGRMNIGRRPSTRKPRGGTESLRAIPWIFAWTQTTFHLPVWLGFGSAIPHVIENDVRNLHMLHHMYQHWPLFRVTIDLIEMVFAKGDPGIAALYDTLLLSEELWPLGAKLSANFDETKKLILQVLSEWLCSSPTAGHNDLLERDPHLTQPLRLRDSHITTLNLSHAYTLKRIRDPRYHVTLRPHTPKAIAESRKPAKELIAPNPTREYAPGLEDTLILTMKGIAAG

SEQ ID NO: 48914 - protein, 459 aa, Mesorhizobium loti MAFF303099
MLNQSNELNAWDRDHFFHPSTHMGTHARGESPTRIMAGGEGVTVWDNNGRKSIDAFAGLYCVNVGYGRQKIADAIATQAKNLAYYHAYVGHGTEASITLAKMIIDRAPKGMSRVYFGLSGSDANETNIKLIWYYNNVLGRPEKKKIISRWRGYHGSGVMTGSLTGLDLFHNAFDLPRAPVLHTEAPYYFRRTDRSMSEEQFSQHCADKLEEMILAEGPETIAAFIGEPILGTGGIVPPPAGYWEKIQAVLKKYDVLLVADEVVTGFGRLGTMFGSDHYGIKPDLITIAKGLTSAYAPLSGVIVADRVWQVLVQGSDKLGSLGHGWTYSAHPICVAAGVANLELIDEMDLVTNAGETGAYFRAELAKAVGGHKNVGEVRGDGMLAAVEFVADKDDRVFFDASQKIGPQVATALAASGVIGRAMPQGDILGFAPPLCLTREQADIVVSKTADAVKSVFANL

SEQ ID NO: 48915 - protein, 460 aa, Lactobacillus gasseri
MENKKNHPPKLKRSMTAGQMEMISLGGAIGVGLFMGSTSTIKWTGPSVLLAYMFVELILYIVMRALGEMLYVSPGTGSFADYATEYISPLAGYLAEWANVFQYIVVGISEVVAATEYLKFWWPQVNVFWSGIIIIALLLLANLASAKAYGALEFWFAMIKVVTIILMIILGLFVILLGVGNHGKPLGFSNLWSHSGFFTGGVKGFFFSMAIIAGSYEGIELIGISAGEVANPQEAIVKSVKSVLWRILIFYVGAIFVIVTIYPWNQLSNIGSPFVETFTKVGITAAAGIINFVVLTAALSGANSGIYSSSRMLFKLSHEGEAPKIFGKLSKHIVPDRAIIGITVGILVGFVLNLIVSTMNKSMGELFVIVYSSSVLPGMVAWFVILIAELKFRKSNTHLMDKHPFKLPLYPYSNYFAFMMLLIIVIFMFINPETRVSVTVGAGVLVLAAIVYAIKHRKKK

SEQ ID NO: 48916 - protein, 497 aa, Mesorhizobium loti MAFF303099
MSAHFARSHRHEALDRLADRRLLRELAYVDGHWTASEAAESFEVTDPATGSTVAFVAALDARQTTQAIDAAALAFPAWRSLLPQERSRILRKWFELIITAKDDLALLMTLEQGKPLQESLGEIDYAASFVEWYAEEAKRLNAESVTSHLANAEMMVRREPLGVVGIVTPWNFPSAMLTRKAAAALAAGCTIVAHPSSETPLSALALAELGERAGLPAGVFNIVTGKAATIVGRMCEDTRVRAMSFTGSTEIGRLIAAQSAPTMKRLVMELGGHAPLIVFADADLDKAVSIAIDAKFATSGQDCLAANRIYVQRPIHDRFCAAFAKRIEALRTGNGLDDMTDIGPLLHERAVQKVEEQVADALAHGARCLAGGKRHQAGPLFYQPTLLADVSDAALIMREETFGPVAAVTPFDSEDEVIARANATEYGLVAYVVTDNGARQQRMGRALDYGMVAINRVKITGAPIPFGGVKQSGIGREGSRHGLEAFTDLKYLCLDVA

SEQ ID NO: 48917 - protein, 168 aa, Avena clauda
VMASSATSVAPFQGLKSTAGLPVSRRSASSLGSVSNGGRIRCMQVWPIEGIKKFETLSYLPPLSEEALLKQIDFLIRSKWVPCLEFSKVGFIFREHGSTPGYYDGRYWTMWKLPMFGCTDASQVIKEVEEVKKEYPDAYVRIIGFDNIRQVQCVSFIAFKPPGCEESG

SEQ ID NO: 48918 - protein, 561 aa, Delftia acidovorans
MTTLKITGMTCDSCAVHVKEALEKVPGVQSANVSYTKGSAKLAVETGTSPDALTAAVAGLGYRATLADALVPPVGGGLLVKMREWLGSGDKAGDDGGGLHIAVIGSGGAAMAAALKAVEQGAHVTLIERGTIGGTCVNIGCVPSKIMIRAAHIAHLRRESPFDGGMPPTPPTILRERLLAQQQARVDELRHAKYEGILDDNPAISVLHGEARFKDGHSLTVQLNGGGERVVTFDRCLIATGASPAVPPIPGLKDTPYWTSTEALVSDTIPERLAVIGSSVVALELAQAFARLGSQVTILARSTLFFREDPAIGEAITAAFRAEGIEVLEHTQASQVAHEGGEFVLTTAHGELRADKLLVATGRSPNTRSLALDAAGVALNLQGAIVIDVGMRTSTPDIYAAGDCTDQPQFVYVAAAAGTRAAINMTGGDAALNLAAMPAVVFTDPQVATVGYSEAEAQHDGIETDSRTLTLDNVPRALANFDTRGFIKLVIEEGSGRLIGVQAVAPEAGELIQTAVLAIRNRMTVQELADQLFPYLTMVEGLKLAAQTFNKDVKQLSCCAG

SEQ ID NO: 48919 - protein, 168 aa, Avena maroccana
VMASSATSVAPFQGLKSTAGLPVSRRSNAGLGSVSNGGRIRCMQVWPIEGIKKFETLSYLPPLSEEALLKQIDFLIRSKWVPCLEFSKVGFIFREHGSTPGYYDGRYWTMWKLPMFGCTDASQVIKEVEEVKKEYPDAYVRIIGFDNIRQVQCVSFIAFKPPGCEESG

SEQ ID NO: 48920 - protein, 207 aa, Daucus carota
MERADQQARGFQGYRKIHQQQQLPASGTASTGTDNNPAAGDQDCLVREQDRFMPIANVIRLMRKSIPSHAKISDDAKELVQESVSEFISFVTSEANYRCQKEQRKTITAEDVLWAMSSLGFDDYVEPLTFYLDRFREADGGERSALRGEPLVRRSGEHGAPGIPPTFAPGYYMGPHNALLGAVTMGSFVNDVHNAGPSGAGVNTLDP

SEQ ID NO: 48921 - protein, 413 aa, Nocardioides sp. JS614
MTGTETTEASILPLSDTQAHVELTESYAAHNYHPLRVVLSSGEGAWVTDVEGRRYLDCLAGYSALNFGHSHPRLVARATEQLTRLTLTSRAFYNDQLGPFARDLAALTGKELILPMNSGAEAVETAIKVARKWAYLVKGVPESQATIVAMEGNFHGRTTTIVSFSNDAAATAHYAPYTPGFRLVPYGDLEALAAAVDETTAAVLLEPVQGEAGVIVPPEGYLQGVRALCNSSGVLMLADEIQSGLARTGRTFACDHEDVVPDVYILGKALGGGLYPVSAIAADGDVLSVITPGTHGSTFGGNPLAAAIGREVIAMLDTGEFQERAATLGARLAAGLGGLVGQGIDTVRTRGLWAGVDISPDLATGRHVCEQLLDLGILAKEAHGQTVRLAPPLVASEDDVDLLVGAFAQICSD

SEQ ID NO: 48922 - protein, 179 aa, Aeromonas punctata
MHQRAVLAGGCFWGMQDLIRKRPGIISTRVGYTGGDIPNATYRNHGTHAEGIEIVFDPTVTSYRHILEFFFQIHDPTTLNRQGNDRGLSYRSGIYYVDEEQKRVAEDTIADVDASGLWDGKVVTEVQPVGEFWEAEPDHQDYLEKRPGGYTCHFVRPDWVLPKRHEAGDVSPAAGAAAE

SEQ ID NO: 48923 - protein, 151 aa, Aeromonas punctata
METIMKFEKSQAAVDRLTPEQRRITQDSGTERPFTGEHNDNKEPGIYVDIVSGEPLFASTDKFDSGTGWPSFTKPIVPANVNEVRDSAHGMVRTEVRSVHADSHLGHVFPDGPSDRGGLRYCINSASLRFIPRDEMESEGYGEYLDQVEEA

SEQ ID NO: 48924 - protein, 222 aa, Zea mays
MAPKNALPAASGMTLEPRYRGVRKRPWGRYAAEIRDPARKARVWLGTFDTAEAAARAYDAAALHFRGPKAKTNFPVAFATATATDTRALPLPLRLPLPPPPPPKKLAVSPSGSTVESSSRDSPAAPAPAPSLDLSLGMPPMVAAQPFLFLDPRLAVTVAVAAPVPRRPTAAAAGAGASKQAAYSCCREDEQSDTGSSSSVVDASPAVGVGFDLNMPPPGEVA

SEQ ID NO: 48925 - protein, 469 aa, Glycine max
MGIWRNEISEEAKKQLWLSGPMVFVSVFQYSLQMISLMFVGHLDELLLAGVSLATSFVNVTGFSVLLGMSSALDTFCGQSYGAQQYHMVGIHMQRAIVIIMLATIPMSFIWAYLRPILVVLHQDKTIAAQAQLYATYLIPSLSANALLRCITKFLQTQNIVLPMMLASGFTTLAHALLCWLLVLKFGLGIKGAAIAFCISNWLNTVLLALYIRFSSSCKSTWTGFSRESLQNIPQFLSLAFPSALMVCLEQWTFQIMVLLSGALPNPKLQTSVLSICFNTTGLFWMIPFGVSVAASTRISNELGAGCPKAAYLAVKVTLLMSFVVGALGFILLMVTRNIWGHIFTNIPEVIRYVASMTPILASSVFVDSIQTALSGIVRGCGWQKLGAFVNLGSYYLVGLPFAIVLAFVLHIKGEGLLLGIVIALTMQVVGFLVITLRTNWEKEANKAAKRIRSNGVPTDANALPSDQN

SEQ ID NO: 48926 - protein, 399 aa, Oryza sativa (japonica cultivar-group)
MNAGVAGFAGPLSMPRLIERARDWYKSLAVLTPVLSDVTADSAWDPRVPHACTAGRRRGEEPRASFSGAVFNLSTTIIGAGIMALPATMKVLSLVPGLILVMLAAVLTDASIELLVWFSRAVGATSYGEAMGDAFDPLKYTPAVSVALAVVFVVITVGIATIKLMKGQIPMPKLFPDVHDWSSTWRLPTAAPVLVSLHTIHNELKDHSLIRPIVRASLLLGLVVYTTTSFFGFLLFGEATLDDMLVFPIVFRALRFNMDGLLFPSARPFSCDNRRFGAITAELLTVIFLAANFVPNIWDAFQFTGSSCTGDDVDCGGGGDSCLTAVILVAAAVSPMRPRSSSASSTPVAGKKEKTATRWCSQSTAPRCEKAAAGHGMPPPAPPARHHQRPTLSGPSLAT

SEQ ID NO: 48927 - protein, 286 aa, Leuconostoc mesenteroides subsp. mesenteroides ATCC 8293
MSLVDTYKLTNGIEIPIIGFGTWQSANGTEAYQSVRWALEAGYRHIDTAAVYGNEDSVGRAIKDSGIPRDELFVTTKLWNDAHTYERAIQALDTSLSKLGLDYVDLYLIHWPNPAALQKQGKDAWIDANADTWRALEDEYKIGKTTAIGVSNFQIEHLEALAKTQTIAPMVNQNFLNPSDNQQELVDYDKDHGMLNEAYSPLGTGKLVDLPQVVSLSEKYNKSVPQILIRWSLDKGFLPLPKSTHETYIKANADVFDFALTSAEIESLDSLTGVGGFHTDASSADF

SEQ ID NO: 48928 - protein, 632 aa, Cryptococcus neoformans var. neoformans B-3501A
MALSEHSAMVSPTTTISVDGDREKRFSVEEDPLPTASAAIPSSAVANTPDDQSSVQGTGGQTPPKGHSGFTAPLEIPKWRFMAIFGSLMISVFLFALDQLIVATAIPKITAEFNSLTQLSWLTSGFFLTLLSFNLLYSQLMNIFPSKHVIVFAVFIFEMGSLACGVAPNMNVLIFGRALAGAGAAGIFSGGMVIIAELTPLHSRAQYFALFGVCFAIASVIGPLIGGAFSDHVSWRWCFYINLPLGGVAIGCLLFFQPSKPPLGRESSYKGYSKAMLKQLLMCDWVGVVLSMAWAVCFILATQWGGVTRSWDSASVIVTLVFAGVLPIAFCVYEYFIKESISYFRIRLFKRRTVAGAAIVSFCVFGIFMILVYYLSLTFQAVHGTSATSAGVKLLPLILVQVFILILTSRIIPRIGRFKPVICVGPVFLAIASGLFYSTDYSTPIANLYGYQVILAVGIGCCLQNVMVAVQHDLKKEPWLISLGTGLVVFTGFAGRIVALSMSGSVFENMIQRHLKSMVPGISEEIISAVVNDATAVWTSVPEDLREPVLRAYTKTLSQVFIIGLPLSIIALVGALVMKNDKMATKEEEEKDIADARAAQQAKKDEEAGVNGVNERSEEGARGSAEDEEGRA

SEQ ID NO: 48929 - protein, 286 aa, Oryza sativa
  misc_feature (178)..(178): Xaa can be any naturally occurring amino acid
  misc_feature (227)..(227): Xaa can be any naturally occurring amino acid
  misc_feature (275)..(275): Xaa can be any naturally occurring amino acid
  unsure (1)..(286): unsure at all Xaa locations
MAMEKSRVLIVGGSGYIGRRIVAASLAEGHPTFVLLRPEIGLNIDKLQILLAFKAQGARLLEASLDDHDGLVAAVRQVDVVVSAMSGVHHRSHNILLQLKLVKAIKEAGNVKTYWMDADVVTAFELSRAIDDGFDEKMETRRAIENANIPHTYVSANCFAAKFSPNLCQMKTHLPPKXRVGVYGDGNVKVFFVYEDDVGTYTIKSIDDPRTLNKTIYIRPQDNCLTXNELIAMWEKLSGKSLTKFHILGDGFLASMKDTNFAHQVGVTHFYHIFXESCLTNFDIGD

SEQ ID NO: 48930 - protein, 281 aa, Pseudomonas syringae pv. phaseolicola 1448A
MSFAVIQMVSQSDVQANLVSARRLLEQAAEGGARLAVLPENFVAMGRRDVADIGRAEAHGHGPILPWLKLAARDLKLWIVAGTLPLPPDERPDGKVTACSLLIDEHGEQVARYDKLHLFDVDVADNRGRYRESDDYAHGNNVVVADTPVGRVGLTVCYDLRFPELYTALREAGAELITAPSAFTAVTGAAHWDILIRARAIETQCYVLAAAQGGVHPGPRETYGHAAIVDPWGRVLAEQAQGEAVLLAKRDSEEQASIRARMPVSSHRRFFSQDAMRPASE

SEQ ID NO: 48931 - protein, 461 aa, Delftia acidovorans
MQQTGKQVDIHALAGHSRFNRFHGLVLWWCVLILVIDGYDLAVVGAALPSIMKNMGVDATSAGVMAGSALFGTMLGAIFLGTLADRIGRPRMIAVCVALFSVFTALTGLATEPIGFSVARFIAGLGIGGVLPIVTAQMGEFAPAKLRTRLVTMVFAGYSVGGILVALTAKQLIESHGWQWVFYVAGLPVLLIPLILKTMPESLSFLLKKGDQRQLGELAARLAPEQPNAAGTVYVGASTDRLHDAPVRTLFDAGRAFSTVMIWVACMTGLFMAYALNSWLTKLMAMAGYSLGSALNFVIVFNVGAIVGAIGGGLLSDKFNIKHVLVAFYVVGAASLAALAYTKSTELLFVAVFVVGASTLGTQLLAYAYAGDFYPPAVRSTGVGFASGVGRIGGIAAPILIGWLVSLSLPIEQNFMAIALAGVIGAAAVSFVNQSRAASTQAKAARAATGEAGRVDGAESR

SEQ ID NO: 48932 - protein, 221 aa, Sulfolobus solfataricus
MKKVLADKESLIEALKLALSTEYNVKRNFTQSVEIILTFKGIDMKKGDLKLREIVPLPKQPSKAKRVLVVPSSEQLEYAKKASPKVVITREELQKLQGQKRPVKKLAIQNEWFLINQESMALAGRILGPALGPRGKFPTPLPNTADISEYINRFKRSVIVKTKDQPQVQVFIGTEDMKPEDLAENAIAVLNAIENKAKVETNLRNIYVKTTMGKAVKVKRA

SEQ ID NO: 48933 - protein, 221 aa, Yarrowia lipolytica CLIB122
MARRPAKCYRYQKNKPFPKSRYNRAVPDPKIRIYDLGRKRAHVDDFPLCIHLVSNEREQLSSEALEAARICANKYITKVSGREAFHMRIRAHPFHVLRINKVLSCAGADRLAQGMRGAWGKPAGLAARVDIGQVLISIRTKDNNKATVIEGLRRCRYKFPGQQKIIISKKWGFTNLDREEYMTRRQNGEIKEDGAYVKFLTKKGPLAESLAEFPDYNGVSV

SEQ ID NO: 48934 - protein, 476 aa, Zea mays
  misc_feature (86)..(86): Xaa can be any naturally occurring amino acid
  unsure (1)..(476): unsure at all Xaa locations
MAGGFRVLHLVRPFLAFLPEVQSADRKIPFREKVIYTVISLFIFLVCSQLPLYGIHSTTGADPFYWMRVILASNRGTVMELGITPXIVTSGMVMQLLVGSKIIEVDNSVREDRALLNGAQKLLGILIAIGEAVAYVLSGMYGSVSQLGTGNAILIILQLFFAGIIVICLDELLQKGYGLGSGISLFIATNICENIIWKAFSPTTINSGRGAEFEGAVIALFHLLITRSDKVRALREAFYRQNLPNGDHLLATVLVFLIVIYFQGFRVVLPVRSKNARGQQGSYPIKLFYTSNMPIILHSALITNLYFISQLLYRKYSGNFLVNLLGIWKESEYSGHSIPVGGLAYYVTAPSSMADILANPFHALFYVVFMLSACALFSKTWIEVSGSSAKDVAKQLKEQQMVMPGHRESNLQKELNRYIPTAAAFGGVCIGALTVLADFMGAIGSGTGILLAVTIIYQYFETFEKERATELGFFGF

SEQ ID NO: 48935 - protein, 175 aa, Oryza sativa
MAPSVMASSATTVAPFQGLKSTAGMPVARRSGNSSFGNVSNGGRIRCMQVWPIEGIKKFETLSYLPPLTVEDLLKQIEYLLRSKWVPCLEFSKVGFVYRENHRSPGYYDGRYWTMWKLPMFGCTDATQVLKELEEAKKAYPDAFVRIIGFDNVRQVQLISFIAYKPPGCEESGGN

SEQ ID NO: 48936 - protein, 134 aa, Brassica napus
  misc_feature (18)..(18): Xaa can be any naturally occurring amino acid
  unsure (1)..(134): unsure at all Xaa locations
MSSRSDLTIMRVCFIIFXLGVLVELCDGGITSEYVRGSDLPDDMPLDSDVFKVSPGPNTPQQVHITQGNHEGNGVIISWVTPSAPGSNTVRYWSENGKSKKLAEATMNTYRFFNYTSGYIHHCLIDDLEFDMKY

SEQ ID NO: 48937 - protein, 187 aa, Aeromonas punctata
MSQSPTGNRAAATERAILAGGCFWGMEDLLRRARGVISTRVGYTGGEMPDPTYARHYGHAEAVEVTFDPSVLAYRSLLELFFQIHDPTTYEQQGSDVGPSYRSAIFYTTEVQKEVALTTIAEIEASGSWPGPVVSEINPEEPFWEAEPEHQEYLVRYPGGYSCHFVRPTWRLDRSDERPAVILDRKS

SEQ ID NO: 48938 - protein, 448 aa, Zinnia elegans
MREILHIQGGQCGNQIGAKFWEVVCAEHGIDATGRYTGDQDLQLERVNVYYNEASCGRFVPRAILMDLEPGTMDSVRSGPCGQIFRPDNFVFGQSGAGNNWAKGHYTEGAELIDSVLDVVRKEAENCDCLQGFQVCHSLGGGTGSGMGTLLISKVREEYPDRMMLTFSVFPSPKVSDTVVEPYNATLSVHQLVENADECMVLDNEALYDICFRTLKLTTPSFGDLNHLISATMSGVTCCLRFPGQLNSDLRKLAVNLIPFPRLHFFMVGFAPLTSRGSQQYRALTVPELTQQMWDAKNMMCAADPRHGRYLTASAMFRGKMSTKEVDEQMINVQNKNSSYFVEWIPNNVKSTVCDIPPTGLKMASTFIGNSTSIQEMFRRVSEQFTAMFRRKAFLHWYTGEGMDEMEFTEAESNMNDLVSEYQQYQDATADDEGEYEEDEEGVYEEEA

SEQ ID NO: 48939 - protein, 300 aa, Rickettsia sibirica
KSDFLEVAYLLIYGELPSGEQYNNFTKQVAHHSLVNERLHYLFQTFCSSSHPMAIMLAAVGSLSAFYPDLLNFKEADYELTAIRMIAKIPTIAAMSYKYSIGQPFIYPDNSLDFTENFLHMMFATPCTKYTVNPIIKNALNKIFILHADHEQNASTSTVRIAGSSGANPFACISTGIASLWGPAHGGANEAVINMLKEIGSSEYIPKYIAKAKDKNDPFRLMGFGHRVYKNYDPRAAVLKETCKEVLKELGQLDNNPLLQIAIELEAIALKDEYFIERKLYPNVDFYSGIIYKAMGIPSQ

SEQ ID NO: 48940 - protein, 448 aa, Zinnia elegans
MREILHIQGGQCGNQIGAKFWEVICTEHGIDHTGRYSGSTADLQLERINVYFNEASGGRYVPRAVLMDLEPGTMDSIRSGPNGQIFRPDNFVFGQSGAGNNWAKGHYTEGAELIDAVLDVVRKEAENCDSLQGFQVCHSLGGGTGSGMGTLLISKIREEYPDRMMLTFSVFPSPKVSDTVVEPYNATLSVHQLVENADECMVLDNEALYDICFRTLKLSNPSFGDLNHLISATMSGVTCSLRFPGQLNSDLRKLAVNLIPFPRLHFFMVGFAPLTSRGSQHYTSLTVPELTQQMWDAKNMMCAADPRHGRYLTASAMFRGKMSTKEVDEQMINVQNKNSSYFVEWIPNNVKSSVCDIPPTGLSMASTFVGNSTSIQEMFKRVSEQFTAMFRRKAFLHWYTGEGMDEMEFTEAESNMNDLVAEYQQYQDATAEEEYDEEDGEEEEVYEG

SEQ ID NO: 48941 - protein, 421 aa, Arabidopsis thaliana
MDALTSSLVRSPIVPSRTSDNGSGSMFLTASGPGFTRSGSSRLQLRLKQNASARSSRSLQSLTTTAKTRRSFVVRASSASNDASSGSSPKPIAPLQLQSPAGQFLSQILVSHPHLVPAAVEQQLEQLQTDRDSQGQNKDSASVPGTDIVLYRRIAELKENERRRTLEEILYALVVQKFMEANVSLVPSVSPSSDPSGRVDTWPTKVEKLERLHSPEMYEMIHNHLALILGSRMGDLNSVAQISKLRVGQVYAASVMYGYFLKRVDQRFQLEKTMKILPGGSDESKTSVEQAEGTATYQAAVSSHPEVGAFAGGVSAKGFGSEIKPSRLRSYVMSFDAETLQRYATIRSREAVGIIEKHTEALFGKPEIVITPEGTVDSSKDEQIKISFGGMKRLVLEAVTFGSFLWDVESHVDARYHFVLN

SEQ ID NO: 48942 - protein, 240 aa, Glycine max
MARYGEGDKRWIVEDRPDGTNVHNWHWSETNCLDWSKTFFSNLLSNLPILHGEANLFLKTTSLRSLDGEAYVNVRKGKIIPGYEISLTLNWQGEAKDSQGTSLLKVDGTVEIPYISDENADEDPEVRVTVNDEGPVGMRIKDAMLSKGKPLILEKVRVWVQSMAKGGPVKEELEPKKVRRFLWPPSPDRHNHNDNNNNNDNDCYEEVQHEDLSTVWSNVRGQVAMRCYPRIGWSSNVSFL

SEQ ID NO: 48943 - protein, 136 aa, Photorhabdus luminescens subsp. laumondii TTO1
MAKHPEVSLYKELTDIQRHVTQNAGTEPPFSGKLLHNKKSGVYHCLCCEQPLFMSGTKFDSGCGWPSFYQPATHDAVQYLDDDSHNMHRIEVRCGHCNAHLGHVFPDGPQPTGERFCINSAALSFTDENTGEKTVG

SEQ ID NO: 48944 - protein, 75 aa, Brassica napus
MPSKCEILCEILIAILLPPLGVCLTRGCCTVEFLACLILTILGYVPGIIYALYVIVFQNQEEYFDEARRPLYYSA

SEQ ID NO: 48945 - protein, 159 aa, Staphylococcus epidermidis ATCC 12228
MKHMHRGTHEVERTFLMIKPDAVQRNLIGEIISRIEKKGLKLVGGKFMQVPMELAEKHYSEHEGKPFYDKLISFITSAPVFAMVVEGENAVAVSRKIIGSTNPSEAAPGTIRGDYGLNLGRNIIHGSDSTESAQREVKLWFTSSEIADYKEPREDWLYE

SEQ ID NO: 48946 - protein, 322 aa, Magnetospirillum magnetotacticum MS-1
MMLKTYLGPVEDESGLHYLRPETAQGIFVNFANVMGASRKKPPFGIGQIGKSFRNEITPGNFIFRTREFEQMEMEFFVEPGTDAEWHQYWIDTRTDWYVDLGIQRDNLRLYEHPQEKLSHYSTRTVDIEYRFGFSGSEWGELEGIANRTDFDLKTHAEHSGKDLSYFDQTKNERWVPYVIEPAAGLTRSLMAFLVEAYTEDEAPNAKGGVDTRTVLRLDHRLAPVKAAVLPLSRNEQLSPKAKDLATELRKYWNVDFDDAGAIGRRYRRQDEIGTPFCITVDFDTLDDQAVTIRHRDSMSQERVALDKVTEYLAGHCSAPDA

SEQ ID NO: 48947 - protein, 611 aa, Campylobacter jejuni subsp. jejuni NCTC 11168
MGEFSRRDFIKTACISVGALAASSSGVYALDDSSKMDKDINLPSCDVLVIGSGGAGLCAAAAVRKENPKLSVVVATKMMPSRNATCMAEGGINGVTDFSNGDSYKLHAYDTIKGGAYLVDQDAALKFCELAGKAIFNMDFIGTLFSRNEQGGVAQRLMGGASKKRCNYSADKTGHILMHSCLDDAISSGVKFLMNHELLDIGVVDGKCEGVVLRDIQSGGIYPVLCKALVIATGGYTRIFYNRTSTPFIATGDGVAAALRAGLGFEDPEMIQFHPTGVANGGTLITEAARGEGGYLLNNRGERFMKNYHEKMELAPRDVVARAIETEIREGRGYGEGLGAYVLCDVRHLGKEKILKDLPKIRHTAMLFENIDLVDTPVPIRPTAHYSMGGIEVAKFEDMGTKIAGIYVGGEASCISIHGANRLGGNSLADAVVTGHLAGIGATNYAKDASFGKGAKTHELAQKWQVRFKEITNNGGNGQEMYELREELGSQNWDNMGIFRTQEKLDLLAKKLEDIQARYEKIRIPNPNEVMNTAFTDYVELGNLILLSRCACLAARNRLESRGAHTREDYPKRDDKNFLKHSIVNLENDELKLSYKDVVVTEFSLDGRRVQ

SEQ ID NO: 48948 - protein, 369 aa, Cryptococcus neoformans var. neoformans B-3501A
MSDDAADVDPCAMDNSESHFGLRIGSIFIILVTSVIGTVLPIILRQSSFVPRPVFDFAKYFGSGVIIATAFIHLLAPAWEELTSECLKGAWEDYDWAPAIVMAAVYFIFFAEVAAYRAGTRRLERLGINYSSHAHDETDAHAHSHSHEPPLGVDVTAPAPDHHIHPDHSNIASHPHGHHRTPSGEKDKDVESASDVSTVNQLPSQAEAAAQLIAVAVLEFGVVLHSVIIGLTLAVDESFVTLFIVIIFHQMFEGLGLGSRLSILTLPENLWWTRYAAAIFYSLCTPVGVAIGLGVRSTYNGNGAKANIISGVLDATSAGILLYTGLVELLAHEVLLNPRMMKSSNSKLAYVFCCMLLGSALMALLGRWA

SEQ ID NO: 48949 - protein, 404 aa, Campylobacter jejuni subsp. jejuni NCTC 11168
MKRVVVTGIGMINALGLDKESSFKAICNGESGVNKITLFDATDFPVQIAAEVKNFDPLEVVDGKEVKKIDRFIQLGIKAAREAMQDAGFSEELDKEEFGIVSASGIGGLPNIEKNSIICSERGPRKISPFFIPSALVNMLGGLISIEHGLKGPNISCVTACAAGTHAIGEAYKSIALGNAKKMLVIGAEAAICPVGIGGFASMKALSTRNEDPQHASRPFDKERDGFVMGEGAGALVFEEYEEAKKRGATIYAELIGFGESADAHHITSPTLDGPLRAMKKALNMAGNPKVDYINAHGTSTPVNDKNETAAIKELFGNNIPLISSTKGQTGHCLGAAGAIEAVVSVMVLRDGVVPPTINQLVKDDECDLDYIPNISRKVDLKVVMSNSFGFGGTNGCVVFKKVD

SEQ ID NO: 48950 - protein, 446 aa, Synechococcus elongatus PCC 6301
MSFDYDLLVIGAGSGGLAASKRAASYGAKVAIAETDLVGGTCVIRGCVPKKLMVYASSFASQYHYAEAYGWSAIQPQFSWPKLIAAIDAEVNRLSRLHISLLEKAGVDLILGHAQFVDEHRLQVGDRQVTAAKILIAAGGRPIKLPIPGGELAITSREMFHLPEQPQRFAVIGGGYIGCEFAGILRSLGSEVTQIIRRDRILQGFDQELREAVQTGMSQLGVQFRTGVTVERIDQTETGLQLSYSDGSQQIVDQVLMATGREPWLEGLDLDAAGVAIEGRRIAVDAWSRTNQPHIFAVGDCTDRVNLTPVAIAEGRAFADTEFGQKPRQISYENIASAVFSQPEACSVGLSEEAAKAEYGEERIRVYRSRFRPMFYTLPQAEERVLMKLVVETESDRVLGAHMVGKDAAEIIQSVAIAVTMGATKADFDATMALHPTSAEEFVTMP

SEQ ID NO: 48951 - protein, 376 aa, Streptococcus pneumoniae R6
MLDLIQTRRDLHQIPEIGLEEFKTQAYLLDVIEKLTTGKDFVQIRTWRTGILVYLQGSQPERTIGWRTDIDGLPIVEQTGLPFASQHQGRMHACGHDFHMTIALGCLERALEEQPKNNLLFLFQPAEENEAGGMLMYEDDAFGDWLPDQFYGLHVRPDLKVGQIATNTHTLFAGTCEVKIRFKGKGGHAAFPHEANDALVAASYFVTQVQSVVSRNVNPIEGAVVTFGVFQAGTTNNVITDTAFLHGTIRALTQDMSLLVQKRVKTVAEGVAAAFDMEVEVELKQGGYLPVENNPALARELMDFFDEKDGIELIDIEPAMTGEDFGYLLSKVDGVMFWLGIDSPYALHHPQMSPKEEVLAIGVAAVSSFLKKKAAE

SEQ ID NO: 48952 - protein, 233 aa, Triticum aestivum
  misc_feature (206)..(206): Xaa can be any naturally occurring amino acid
  unsure (1)..(233): unsure at all Xaa locations
GPRVCAFLVEPIQGEAGIIVPEAGYLMKAFNLCKKHNVLFIADEIQTGLCRTGKLLAVDYDGVKPDILILGKALSGGMYPVSAVLANKPVMECIQPGTHGSTYGGNPLGCAVAIAALKVLKEEKLAENAYNLGVKFRQALIDIKSPLITTVRGRGLLNAIVIDDTKMDKTAWHVCLMMKKYGLLAKPTHQNIIRLAPPLCITEEQXMDGVKIIDKVLKEIVSMNVKDIPGHEL

SEQ ID NO: 48953 - protein, 612 aa, Oryza sativa
MTGGEEQGRRLFGVSLTDRPRWQQFLICSSGFFFGYLVNGICEEYVYNRLQFSFGWYFTFVQGFVYLGLIRLQGFTVKQMVNPWRTYVRLSAVLMGSHGLTKGSLAFLNYPAQIMFKSTKVLPVMIMGAFIPGLRRKYPFHEYISAVMLVIGLILFTLADAQSSPNFSMIGVAMVSGALVMDAFLGNLQEAIFKMNPDTTQHMYVYAVLVFEAMATFVGQVSVLSLIALFGAATTAMVTTARKAVTLLLSYLIFTKPLTEQHVTGLLLISMGIVLKLLLENKENVPRRQVRKTVQHWDDKQREIREVEEEKAPLYEKEEKIGEGTYGVVYRARDKVTNETIALKKIRLEQEDEGVPSTAIREISLLKEMHHGNIVSEKRIYLVFEYLDLDLKKFMDSCPEFAKNPTLIKVVTLWYRAPEILLGSRQYSTPVDMWSVGCIFAEMVNQKPLFPGDSEIDELFKIFRVLGTPNEQSWPGVSSLPDYKSAFPKWQAQDLATIVPTLDPAGLDLLSKMLRYEPNKRITARQALEHEYFKDLEMHGKESSSPPSDGSRFTSVKVVHSERAGVASRLLGWVSGVSQQQPRGHRKGLVMDRETPLGPSLGPLLHCAIVGA

SEQ ID NO: 48954 - protein, 284 aa, Thiobacillus denitrificans ATCC 25259
MASGPSVPANLAEAERLIELAVQAGARLVVLPEFFCIMAMKDSYVVKAREAEGDGPIQTFLARMAKKHKVWLIGGSVPLEASVPNKVRNSCLVYDERGKQIARYDKIHLFGLDLGNERYQEAKLIEPGDKVVVVNSPFGRIGLSVCYDLRFPELYRAMPDVDIIVVPSAFTATTGRAHFETLVRARAIENLAYVIAPAQGGYHLSGRETHGDSMIVDPWGVVLDRLPRGSGVVIANINPAYQASLRKSLPALQHRFIPCQQIAVDVVERRAVAKREPTSKQDKP

SEQ ID NO: 48955 - protein, 131 aa, Rickettsia sibirica 246
MAYSKKVIDHYENPRNVGSLDKENKNVGTGLVGAPACGDVMKLQIAVDDDGIITDAKFKTFGCGSAIASSSLVTEWVKGRSVDDAETIKNTEIAKELSLPPVKLHCSLLAEDAIKAAIADYKQKKESKKDS

SEQ ID NO: 48956 - protein, 561 aa, Bacillus anthracis str. A2012
MIHLKTQYTVSTYLLDRLSELGIEHIFGIPGDYNLAFLDYVLAHKNLEWIGNCNELNAAYAADGYARIKGIAALITTFGVGELSAINGIAGSYAENVPVIKITGTPPTTVMENGELVHHTLGDGKFNHFSKMYREITIAQTNLTPEHAVEEIDRVLRACWNEKRPVHINLPIDVYNKPINRPAEPILHKPILSNKETLDKMLLHAISKINSAKKPIILADFEVDRFHAKEYLYQFVEKTGFPIATLSMGKGIFPEKHPQFIGVYVGDVSPPYLRKRIDESDCIISIGVKLTDTITGGFTQGFTKEQVIEIHPYTVKITDKKYGPVVMKDVLQQLSDVIEHRNEETLDIKPFISESLSMTEEFNPKAHMVTQKRFWQQIYHFLQENDVLLAEQGIPFFGSAAIPLPNNTTYVAQPLWGSIGYTLPALLGTQLANLSRRNILIIGDGSFQLIVQELSTILRQNLNPIIFLINNNGYTVERAIHGQNEPYNDIQMWEYTKLAKVFGTEEKSQTFKVQNETELQEVLTKISIDKNQLTFVEIVMSQGDQPELLAKLGKRFGQQNS

SEQ ID NO: 48957 - protein, 347 aa, Xanthomonas oryzae pv. oryzae KACC10331
MPGMTDRLRFPAEWEPQSAVLLAWPHAGTDWAERLADVEETYIALVTAIARFEPVVICVADDDLQIYAEARLRSARVDMTRVRFVIAAYNDTWLRDSGPITLRQGTGFRLMDFRFTGWGGKFDASLDDQLVSSLDAAQVFVPAQVGTIDFALEGGAIETDGAGTLLTTWKCLHERHPQRTRESLSSDLATWLAQERVLWLDHGYLEGDDTDAHIDTLARFAGPDAIVYQGCDAADDSHYTELQAMGAELAALRTADGQPYRLFVLPWADPILDEGRRLVASYANFLIVNGAVLMPAYGDPADATAQAVLAQAFPQHEIVPVPCRALIWQNGSLHCLTMQLPAGLLAG

SEQ ID NO: 48958 - protein, 441 aa, Zinnia elegans
QGGQCGNQIGAKFWEVVCAEHGIDVTGKYTGDSELQLERINVYYNEASGGRYVPRAVLMDLEPGTMDSIRSGAYGQIFRPDNFVFGQSGAGNNWAKGHYTEGAELIDSVLDVVRKEAENCDCLQGFQVCHSLGGGTGSGMGTLLISKIREEYPDRMMMTFSVFPSPKVSDTVVEPYNATLSVHQLVENADECMVLDNEALYDICFRTLKLTTPSFGDLNHLISATMSGVTCCLRFPGQLNSDLRKLAVNLIPFPRLHFFMVGFAPLTSRGSQQYRALTVPELTQQMWDAKNMMCAADPRHGRYLTASAIYRGKMSTKEVDEQMLNVQNKNSSYFVEWIPNNVKSTVCDIPPTGLKMASTFIGNSTSIQEMFRRVSEQFTAMFRRKAFLHWYTGEGMDEMEFTEAESNMNDLVSEYQQYQDATADDDGEYEEEEEEEGDYQG

SEQ ID NO: 48959 - protein, 245 aa, Bacillus anthracis str. A2012
MIKLVLIRHGQSLWNLENRFTGWTDVDLSENGLSEAREAGAILKKNGYTFDVAYTSVLKRAIRTLWIVLHEMDLAWVPVHKCWKLNERHYGALQGLNKDETAKKYGEEQVHIWRRSIDVRPPALTEDDPRYEMNDLRYKALKKGEFPLTECLVDTEKRVLDYWHSEIAPKLKNGNKVIISSHGNTIRSLVKYLDNLSSDGVVSLNIPTSIPLVYELDENLRPIRHYYLSMDGEVPEGEIPKHITF

SEQ ID NO: 48960 - protein, 364 aa, Ustilago maydis 521
MPAIQPKSHVLVTGGSGFIAIWTIYQLLERGHNVRATVRSDDKGNYLKHVFEKYGDKLSYTIAEDLEKEGAFDDAVQGVDAVLHTASPFHYNIEGDPKRTLINPAVNGTRNVLSSIQKHGSNVKRVVITSSYAAILDSTRRGTIVYTEEDWNISSVENVEKKGKDQDASDAYRASKTMAERAAWQFVEENKPSWDLVTINPPLVFGPIIHQVNSPEKLNTSVGFVWGLLHGSKTEDDLLTPSGSCVDVRDVAYAHVESLVRDDAGGNRFAVSLNSFVWQDVVDIIHNDSSVPVEWKKQVPTGKQGTGSSVKQNRLDGSKATRQLGLNYIQLKDLVQDMVASLADAEKRRWSGVPSANILSRTKH

SEQ ID NO: 48961 - protein, 470 aa, Pseudomonas aeruginosa PAO1
MADGKERLQLTRALASRHIFMLSLGGVIGTGLFMGSGVTINQGGPAGAVLAYLVAGVLMYLVMVCLGELSVQMPVSGSFQAHATRFIGPATGFMIGWVYWMSWASTVGLEFTAAGMLMTRWFPEVPVWLWSGFFVVVLFSLNALATRAFGEAEYWFAGIKVAAILVFIVVGGLVIFGGIELKSGAPAPMFSNLVGERLFPNGLSAVFAVMMTVVYAFQGCEIMGVAAGETERPEKSIPRAVRNVVFRVLIFYVLAIVVLSAIIPWQQAGLMESPFVQVFDMVGIPYAADLMNFVILTAILSVGNSGLYASTRILWAMSRSGMAPRGLSKLSARGVPLYALLITLCFALLSLLTSVVAADTLFMVLMAVSGMSGTVTWIVIAYAQYRFRREHMASGGTVAELKYAAPLFPLVPLACIAVCCSLFVFLALDPTQRPSLYWGFGFIAACYLAYYVVRRRQPQGLGDPALGRAG

SEQ ID NO: 48962 - protein, 231 aa, Staphylococcus aureus subsp. aureus MRSA252
MQSKILIIEDDHAITHLLDVALTLDYYNVTTAENATQAHFKIQIDKPDVILLDLGLPDKDGLCLISEIRQHTDIPIIVISARQEEQTIIQALDNGANDYMTKPFNVDELRARIRVIERIAKSHQETNIVFTNGLLSIDFGSKSVVINNQEVHLTPNEFSLLELLSNHKGKVLTYEMILKRIYGYVNKTEMPSLRVHMTSLRQKLSQCHEDAKDIIKTHPRIGYQMLQWKEK

SEQ ID NO: 48963 - protein, 337 aa, Craterostigma plantagineum
MAKVKIGINGFGRIGRLVARVALVRDDVELVAVNDPFITVDYMAYMFKYDTVHGQYKHHELKVKDEKTLLFGDKPVAVFGLRNPEEIPWAETGAEYVVESTGVFTEKEKAAAHLKGGAKKVIISAPSKDAPMFVVGVNEKTYTPDIDVVSNASCTTNCLAPLAKVIHDRFGIVEGLMTTVHSITATQKTVDGPSSKDWRGGRAASFNIIPSSTGAAKAVGKVLPDLNGKLTGMAFRVPTVDVSVVDLTVTLAKEASYDEIKAAIKEESEGKLKGILGYTEEDVVSSDFVGDSRSSIFDAKAGIALSKKFVKIVAWYDNEWGYSSRVVDLIRHMAAAK

SEQ ID NO: 48964 - protein, 537 aa, Candida glabrata CBS138
MASCIACDDTYIVFIYIFLHSSFVPIRILQAMTTMIDLEEKFGQFLSWRMQNRKLVAFWDDEVLGDDVIELTAGMPNEQFFPIKAMDMTIVNKPFESADDTSKHLHCKMSTYEPKSLPIARSFQYNEVPGLPQIRNFAKYLVNKINKPAYSADQWDVLLSSGSCDSMFKFFECFCDEKSTVLMEEFTFTPVISHVKATGAECIPLKMNLTKDPSTQGIDVDYLTQLLDNWSSGPYKHLNKPRILYTICTGQNPTGVTIPMENRRKIYELAHKHNFLILEDDPYGYLSFPSYKPEDPLKNDYLEDGFTVEKYTNEFLVDSFLTIDTDARVIRMETFSKVFAPGLRLGFIVANKYIISNLLEYAEITTRAPSGVSQAVLYNTLETMALYQDGDDKEDPEKKQEALFQGWMHWIMKVAAEYTHRRNITLKALYETDAYKNGLFTVIEPSAGMFVGVKIKWDKAPGEIGNIPEQMKKLDRFLVQNGIKTVLGYRMGVSSELSHDNSDFLRVTIAYAKDDQQLVEASHRIGSGIEQFFKELK

SEQ ID NO: 48965 - protein, 740 aa, Rubrivivax gelatinosus PM1
MLATLEVDLDARLHFGAGLLALTDRRLLVREPGAAAWQVWPLDSDLTLRHTDHAGVGSLELHDPATRRAGWRFTLRHNVQALRLLKLFELQQTRQRTGESPGDDGTLCPSCQAPLPPDSDDCPLCARELNTPPSTWVLLRLWRFARPYRKELAIGFGLTLASTAATLVPPYLTIPLMDEVLIPFQNGQQIDPKLVLMLLGGLLAAALAAWGLSWARTYLLALVSERIGADLRTTTFEHLLRLSLDYFGGKRTGDLMARIGSETDRICVFLSLHALDFATDVLMIGMTAVILASINPWLALVTLLPLPFIAWMIHLVRDRLRTGFEKIDRVWSEVTNVLADTIPGIRVVKAFAQEQREADRFRDANQHNLAVNDRLNKTWSLFSPTVSLLTEVGLLVVWAFGIWQVSKNEITVGVLTAFIAYIGRFYGRLDSMSRIVSVTQKAAAGAKRIFDILDHVSNVPEPAHPQPIGRLQGRIELADIGFRYGSRTVIRGLQLDIRPGEMIGLVGHSGSGKSTLVNLICRFYDVTDGAIKVDGTDIRRFGVADYRRHIGLVLQEPFLFFGTIAENIAYGKPGATRAEIVAAARAAHAHEFILRLPQGYDSLVGERGQGLSGGERQRISIARALLIDPRILILDEATSSVDTETEKEIQKALDNLVQGRTTIAIAHRLSTLRKADRLVVMDRGRIVEVGPHDALMAQRGAYWRLYEAQLRRVEGDDGEAALDQPSPSTLSPSAHPTELA

SEQ ID NO: 48966 - protein, 464 aa, Nocardioides sp. JS614
MATLDDVSELTTERMQRMSPGNQGKLPAVDRSGLPPGPRWPVLVQTAGLLRFRHRFHPYLHRKYGDAFTVRLAPGGRPLVFFTRPEHAKEIFAGDPEVFHAGKANGILGPIMGEHSLLLQDSREHKRARKLLMPAFNGHALREYQALVTEVARAEVGGWRSGQEFRALDRMNALTLEVILRVVFGVTDEARLARLRPRVNKTVNISPAILLGWGYPWLQRFGPWKATVDNQRELDRLMYAEIRDRRTATDLAERTDVLSRLILQGDSGESGDRLSDTELRDQLVTLLLAGHETTASALSWALYETGRDPGLLARCQRAAAGGDDDFLEAVLKEAMRLHPIIPMVVRTLMEPATIAGWDLPRGTTVGPSIIIAHQREDNHPDPDVFRPERFLGQNPPANTWIPFGGGVRRCLGAGFSLMEGVAVLREVFAAYDVEALGRDEPKVRNITSVPRRGTRIRVTARQVF

SEQ ID NO: 48967 - protein, 331 aa, Photorhabdus luminescens subsp. laumondii TTO1
MTIKVGINGFGRIGRIVFRAAQERSDIEIVAINDLLDAKYMAYMLKYDSTHGRFNGTVEVKDGHLIVNGKAIRVTAERDPANLKWNEVGVDVVAEATGIFLTDETARKHIAAGAKKVVLTGPSKDDTPMFVMGVNHKAYAGQEIVSNASCTTNCLAPLAKVINDKFGIVEGLMTTVHATTATQKTVDGPSAKDWRGGRGAAQNIIPSSTGAAKAVGKVIPELNGKLTGMAFRVPTPNVSVVDLTVRLEKPATYQQICDAIKDAAEGELKGVLGYTEDDVVSNDFNGEKLTSVFDAKAGIALNDNFVKLVSWYDNETGYSNKVLDLIAHISK

SEQ ID NO: 48968 - protein, 439 aa, Arabidopsis thaliana
MEWVNQRRTLIGSLMRSTAKLASAAKQKQHGHKQLNTVLQKDGCDGASEFLDTSCGFTIINPEEEEEFPDFADHGDLLDIIDFDDIFGVAGDVLPDLEIDPEILSGDFSNHMNASSTITTTSDKTDSQGETTKGSSGKGEEVVSKRDDVAAETVTYDGDSDRKRKYSSSASSKNNRISNNEGKRKVKVDWTPELHRRFVEAVEQLGVDKAVPSRILELMGVHCLTRHNVASHLQAEAANWTRKRHIYGVDTGANLNGRTKNGWLAPAPTLGFPPPPPVAVAPPPVHHHHFRPLHVWGHPTVDQSIMPHVWPKHLPPPSTAMPNPPFWVSDSPYWHPMHNGTTPYLPTVATRFRAPPVAGIPHALPPHHTMYKPNLGFGGARPPVDLHPSKESVDAAIGDVLTRPWLPLPLGLNPPAVDGVMTELHRHGVSEVPPTASCA

SEQ ID NO: 48969 - protein, 280 aa, Ustilago maydis 521
MSATTDLPKRPADAAKAALDSAVHHTVNGDAVATSSEDASGASAPSNTDANANEYRTVFQDANNFNVKHPLYNSWTLWFDNPSQKGMASARGSKESWGDDMNKVVDFDSVEEFWGLYNNVVPPSELPQKANYYLFKQGVKPAWEDPANTNGGKWSIQLPRDKTRAQIDRLWLYTMLAAIGETLEAPFPNGAAPPSSSAEDELVTGVIMSARANFYRIAIWTRKAEDTDELAAKLLDIGKQFKVNVLGYEIDAKIGAGLTSDVEFQSHKESEKKKGKKTIV

SEQ ID NO: 48970 - protein, 215 aa, Heliobacillus mobilis
MRFFLDSANIDEIREANALGVISGVTTNPSLIAKEGRNFRQVVEEIVAIVDGPISAEVISTDAEGMVAEARELAQIHKNIVIKIPMCAEGLKATSRLSREKIRTNVTLIFSANQGLLAANAGATFVSPFVGRLDDVGHDGLDVIREMVEIFDIHGLATEIIAASVRHPLHVTAAARAGAPIATIPYKVLMQMVKHPLTDKGIEQFLKDWETVKNK

SEQ ID NO: 48971 - protein, 157 aa, Magnetospirillum magnetotacticum MS-1
  misc_feature (156)..(156): Xaa can be any naturally occurring amino acid
  unsure (1)..(157): unsure at all Xaa locations
MADQSPRLTTAFGNPVSDNQNSLTAGPRGPVLMQDYHLIEKMAHFNRERIPERVVHAKGYGAYGTFRLTKSLGEYTRAKVLTEVGKEVPMVARFSTVGGESGSADTARDPRGFALKFYTEEGNWDLVGNNTPIFFVRDAIKFSDFIRTQKRDPRTXI

SEQ ID NO: 48972 - protein, 237 aa, Agrobacterium tumefaciens str. C58
MDTKPKNLPDAADFAHVSEWVFDLDNTLYPHHVNLFSQIDRNMTAYVAELLKLDPEEARVLQKRYYHDHGTTLQGLMINYGISPDEFLERAHAIDYSALKPHPELGEAIKALPGRKFILTNGSVKHAQAAAGALGILDHFEDIFDIVAANYLPKPASATYEKFAALAKLDTKKAAMFEDLPRNLAAPKALGMKTVLLVPSNLEGVIMERWEIPDVTDEHIDYITDDLTGFLAKTIAR

SEQ ID NO: 48973 - protein, 322 aa, Heliobacillus mobilis
MRFLVTGGAGYIGSHTVLALQAAGHDVVILDNLTTGHAYLVPDGVPFYQGDVGDSSLLEKIFHDYPIDGVLHFAAKSLVGESMQDPGKYFLANTSQSAVLLSAMAKHKIPYFVLSSTAAVYGEPQDVPIPESHPIRPTNPYGLSKHLIEQMLPWFEKVHRMKWMALRYFNVAGADPQGRSGESHDPETHLIPNILKVAQGHRDFVSVFGNDYPTEDGTCIRDYIHVSDLADAHVLAIEALFSGKPSGVCNLGNGQGFSVLSVIESARRVTGHPIPVRIEPRRPGDPAVLVASNAKAVAELGWKPKFTDLSTIVETAWLWQHR

SEQ ID NO: 48974 - protein, 334 aa, Synechococcus elongatus PCC 6301
MADKIIVAAAQIRPVLFSLEGSVARVLAAMAEAAAAGVQLIVFPETFLPYYPYFSFVEPPVLMGRSHLKLYEQAFTMTGPELQQIARAARQHRLFVLLGVNERDGGSLYNTQLLISDQGDLLLKRRKITPTYHERMVWGQGGGAGLTVVETVLGKVGALACWEHYNPLARFSLMTQGEEIHCAQFPGSLVGPIFSEQTAVTLRHHALEAGCFVLSSTAWLDPADYDTITPDRSLHKAFQGGCHTAIISPEGRYLAGPLPEGEGLAIAELDKSLITKRKRMMDSVGHYSRPDLLSLRINRSPATQVQAIGSAAALPELPNLEAAPAETAEDYLHA

SEQ ID NO: 48975 - protein, 382 aa, Brassica napus
MKGGGSNCGSLEKIKPILAIISLQFGYAGMYIITMVSFKHGMDHWVLATYRHIVATLVMAPFALVFERKIRPKMTLPIFYRLLALGILEPLMDQNFYYIGLKSTSASYTSAFTNALPAVTFILALIFRLETVNFRKIHSVAKVVGTVITLAGAMVMTLYKGPAIEIVKAAHSSFHGGSNTATGQHWVTGTLAIMGSISTWAAFFILQSFTLKIYPAELSLVALICGIGSILNLGVSMIFVRDLSAWKIGMDSGTLAAVYSGVVCSGIAYYIQSIVIKQRGPVFTTSFSPMCMVITAFLGALVLAEKIHLGSIIGAIFIVIGLYSVVWGKSKDVVNPLDEKIIVGQELPITNSVKQTNGDVLGSPMNGRDGWGAQVNGVATSI

SEQ ID NO: 48976 - protein, 222 aa, Oenococcus oeni PSU-1
MSKLVLIRHGESTANHDNIFTGWTDVPLTEKGISQAHVAGKQLSHSGIDFDIVYTSMLQRAIVTSYIILNEINQAWLPIVKSWRLNERHYGALRGLNKAETAQKYGDTQVREWRRSYTTVPPLLGHEESSERYLKLGIKEPLGESAEMSWKRVQPFWEDQIAKQLRSEKNVLLVAHGSSIRVLLKFLDRISDDNFMKVEVGNGEPIIYNFDQQLKVISKSNL

SEQ ID NO: 48977 - protein, 171 aa, Oryza sativa
MTITREEAESKEMESLRVHASALLSLSSPAASASQPTSSSSTTEGVFECKTCSKRFPSFQALGGHRTSHTRLQAKLLSDPAAAAAAAAERDRARVHECAVCGVEFSMGQALGGHMRRHRGETGTTTVVLADADDSGGATVPQPPEPMPDLNYPPLEDAGDGSEPELLNLLV

SEQ ID NO: 48978 - protein, 118 aa, Nicotiana benthamiana
DDTPPTKSHSEPRHIVQTMSEVNIVNDGHRWRKYGQKFVQGNPNPRSYYRCSIAGCPVKKHVERASHDPKMVITTYEGQHDHNMSWFRTLSQITAAPDLSLTGVSGESRLESGENKHV

SEQ ID NO: 48979 - protein, 445 aa, Arabidopsis thaliana
MVVRKVGKYELGRTIGEGTFAKVKFAQNTETGESVAMKIVDRSTIIKRKMVDQIKREISIMKLVRHPCVVRLYEVLASRTKIYIILEYITGGELFDKIVRNGRLSESEARKYFHQLIDGVDYCHSKGVYHRDLKPENLLLDSQGNLKISDFGLSALPEQGVTILKTTCGTPNYVAPEVLSHKGYNGAVADIWSCGVILYVLMAGYLPFDEMDLPTLYSKIDKAEFSCPSYFALGAKSLINRILDPNPETRITIAEIRKDEWFLKDYTPVQLIDYEHVNLDDVYAAFDDPEEQTYAQDGTRDTGPLTLNAFDLIILSQGLNLATLFDRGKDSMKHQTRFISHKPANVVLSSMEVVSQSMGFKTHIRNYKMRVEGLSANKTSHFSVILEVFKVAPSILMVDIQNAAGDAEEYLKFYKTFCSKLDDIIWKPPDASMRNRVTKAKSKRR

SEQ ID NO: 48980 - protein, 329 aa, Mesorhizobium loti MAFF303099
MARIVRFHQHGGPEVLGIEDIDLPPPAPGEVQIRVKALGLNRAEALLRAGSYIETPPLPSGLGLEAAGVVETVGEGVKDFVPGDAVSVIPPQSMVCWPAYGEVVAYPAGLIVKHPSSLDWQTAAAVWMQYLTAYGALIDIARLSSGDAVVITAASSSVGLAAIQIANKIGATAIAVTRTSVKKQALLDAGAAHVVVLAEEDLAARLSEIAGPQAVRVVLDAIGGPIFEPLTAAMSKGGILIEYGGLSVEPTPFPLAAVLGKTLTLRGYLVHEITGNPEKLEAAKAFILEGLETGTLRPIIDRTFALDQIVEAHRYLESNEQFGKIVVTV

SEQ ID NO: 48981 - protein, 495 aa, Arabidopsis thaliana
MCFNNIETGDEVETERQVFGSSEEDEFRVEDTARNTNNVQISQQQQQPLAHVVKWERYLPVRSLKVLLVENDDSTRHIVTALLKNCSYEVTAVPDVLEAWRILEDEKSCIDLVLTEVDMPVHSGTGLLSKIMSHKTLKNIPVIMMSSHDSMVLVFKCLSNGAVDFLVKPIRKNELKNLWQHVWRRCHSSSGSGSESGIHDKKSVKPESTQGSENDASISDEHRNESGSSGGLSNQDGGSDNGSGTQSSWTKRASDTKSTSPSNQFPDAPNKKGTYENGCAHVNRLKEAEDQKEQIGTGSQTGMSMSKKAEEPGDLEKNAKYSVQALERNNDDTLNRSSGNSQVESKAPSSNREDLQSLEQTLKKTREDRDYKVGDRSVLRHSNLSAFSKYNNGATSAKKAPEENVESCSPHDSPIAKLLGSSSSSDNPLKQQSSGSDRWAQREAALMKFRLKRKERCFEKKVRYHSRKKLAEQRPHVKGQFIRKRDDHKSGSEDN

SEQ ID NO: 48982 - protein, 322 aa, Arabidopsis thaliana
MSMQIHAKTLTEKTITIDVVSSDTINNVKAKIQDIEGIPLDQQRLIFSGKLLDDGRTLADYSIQKDSILHLALRLRGGMQIFVKTLTGKTITLEVESSDTIDNVKAKIQDKEGVPPDQQRLIFAGKQLDDGRTLADYNIQKESTLHLVLRLRGGMQIFVRTLTRKTIALEVESSDTTDNVKAKIQDKEGIPPDQQRLIFAGKQLEDGRTLADYNIQKESTLHLVLRLCGGMQIFVNTLTGKTITLEVESSDTIDNVKAKIQDKERIQPDQQRLIFAGEQLEDGYYTLADYNIQKESTLHLVLRLRGGECFGFIFLFLLCFNS

SEQ ID NO: 48983 - protein, 77 aa, Brassica napus
MKLSLRLISAVLLMFMIFVASGMGPVTVEARTCESKSHKFRGLCVSRHNCANVCHNEGFHGGKCRGFRRRCYCTRHC

SEQ ID NO: 48984 - protein, 417 aa, Synechococcus elongatus PCC 7942
MSRFCGMQLMVYSAADRSTAALSPANLLSQLAESRASGCLTILSQDVSWIFYLHNGNLFYGITSIDPFDCLERNLKAFSAEIPNIDRPIRQQIRSLFEKQEGSNSTAVYQALSWLRSEGFINQFQTDLLIKNLIKETLESFLSLQTASHRFLALDPSLPILTEFTVFPLLDETFQRLREWSGLSEKVYSPFQRPYLFSQSTSNNKFSPEKLQKLGNLLKGYSLRHLAALIHQDEIKLMRSLDPYIQEGVVFFREPQPPFDKLPPLLRSDLISGNTAIAGPVDTSNNLTSSPSATARPVKIVCIDDSPIILSELRRFLDEDRFEVITIIDSVKALMEVMRIEPDLILLDVGMPNVDGYKFCKVVRNHPNFKTTPIIMVTGNTGLIDRAKAKMSGATDYLTKPFTQEGLLNIVNQHLHK

SEQ ID NO: 48985 - protein, 419 aa, Thermococcus profundus
MVEIDPFEMAVKQLERAAQYMDISEEALEWLKKPMRIVEVSVPIEMDDGSVKVFTGFRVQHNWARGPTKGGIRWHPAETLSTVKALATWMTWKVAVVDLPYGGGKGGIIVNPKELSEREQERLARAYIRAVYDVIGPWTDIPAPDVYTNPKIMGWMMDEYETIMRRKGPAFGVITGKPLSIGGSLGRGTATAQGAIFTIREAAKALGIDLKGKKIAVQGYGNAGYYTAKLAKEQLGMTVVAVSDSRGGIYNPDGLDPDEVLKWKREHGSVKDFPGATNITNEELLELEVDVLAPAAIEEVITEKNADNIKAKIVAEVANGPVTPEADDILREKGILQIPDFLCNAGGVTVSYFEWVQNINGYYWTEEEVREKLDKKMTKAFWEVYNTHKDKNIHMRDAAYVVAVSRVYQAMKDRGWVKK

SEQ ID NO: 48986 - protein, 295 aa, Oryza sativa (japonica cultivar-group)
MAIIHDTSDQQEDNMRSYMDGGGAAAYEEEEEEVEDDDGGGGGGGGGGGGGLGEKKRRLAAEQVRALERSFEADNKLDPERKARIARDLRLHPRQVAVWFQNRRARWKTKQIERDFAALRSRHDALRLECDALRRDKDALAAEIADLRDRVDGQMSVKLEAVAADEHQPPPPPPPPPLAYNSKVVDGSTDSDSSAVFNEEASPYSGAAIDHHHHQTPASYDTAGFTSFFAPSTTLTSSLSFPSMFHASSHFDGHQELLVGGGGAGAVADADLGGAGFFAGDEHAGGLSWYGAEGW

SEQ ID NO: 48987 - protein, 517 aa, Sorghum bicolor
MQFSLASDANSGPHPIRRSCEGGGIDRLERLSIGGSKQEKALRNRCFGGRVAATTQCILTSDACPETLHFQTQSSRKSYADANHVSAIILGGGTGSQLFPLTSTRATPAVPVGGCYRLIDIPMSNCFNSGINKIFVMTQFNSTSLNRHIHRTYLGGEINFADGSVQVLADTQMPEEPDGWFQGTADSVRKFIWVLEDYYNHKSIEHIVILSGDQLYQMNYMELVQKHVEDNADITVSCAPVDESRASNNGLVKCDHTGRVLQFFEKPKGADLNSMRVDTNFLSYAIGDAQKYQYIASMGIYVFKKDALLDLLKSKYTQLHDFGSEILPRAVLEHNVQTCIFMGYWEDVGTIKSFFDANLALTEQPSKFDFYDPKTPFFTAPRYLPPTQLDKCKIKDASISDGCLLRECSIEHSVIGVCSRVSYGCELKDCVMMGADIYETEEEASKLLLAGEVPVGIGGNTKIRNCIIDINARIGKNVVITNSKGIQEADHPEEGYYIKSGIVVILKNATIKDGSVI

SEQ ID NO: 48988 - protein, 895 aa, Sorghum bicolor
MSGGLKVKNNGENYSCLFCSSKKKNNYSKSSLVQHASGVSAAPNRKAKEKAAHRALFKYLKNDLAKSSEPQPLVIPVEPQPLQNRDEKFVWPWMGILVNVPTEWKDGRQIGESGNRLKEQLSHFCPLKVIPLWTFRGHTGNAIVEFGKDWNGFRNARTFESHFAAGGFGKKDWTGKKNQGSELYGWLARAEDYNSPGIIADYLRKNGDLKSVNDLAKEGARKTDRLVANLANQIEVKNRYLQELESKYSETTASLEKMMGQREQLLQSYNEEISKMQQLARRHSQKVIDENQKLRSELEAKMNDLDVRSKQLDELAAKSDYDRRNLEQEKQKNAIKSSHLKLATLEQQKADENVLKLREKHAALKKILMLEQQLDAKQKLELEIQQLKGKLKVMEHMPGDEDSASKNKINELSEALQEKIDELDGMESLNQTLVIKESKSNIELQEARKELENVCGQAHIGIKRMGELDLKAFSKACQKERTEDAEVTAAFLCSKWEAEIKNPDWHPFRVEIIEDDAKLRALKEEHGEEIYALVTKALLEINEYKSKGSYPVGELWNFKENRKVTLKEAVQFYWSEALKSFLDHIPVSSVKLDGSVLGALDAMYSSNAAGAVIVDVVQSSFGKYVDRDIGFVEFSSLVLWALEIAWLAKLFLWEPFFPVRTQDTLFHTMLLFSKHHRLNVAPVVESINSSVIGFVTQNAVMELLLQSSGLEWLDKIADKQLSEFRFANVRKPVLVYSDQTLADGLHILSKEKMGVAVIDRKTSCLIGSIQCSDLYLFLDDSSLFSKRTTAEDSSPPGQNILALRNRQPSMVGLPATNLKSDTLKQAMEKLTTSRSSCSFIVDEQGHVEGVVTTRDIISVFSPPCMDSRIDGGTFFSAALEQAGCRVENGQMIQNS

SEQ ID NO: 48989 - protein, 465 aa, Canavalia lineata
MASSVLSGANQSSPSSTVLNTHLKGKPRLGDNALRFSGNKGGSNAFSSRSRGRISMAVADNVSRFEGIPMAPPDPILGVSEAFRADNSDVKLNLGVGAYRTEELQPYVLNVVKKAENLMLERGQNKEYVPIEGLAAFNKATAELLLGADNPAIKQQRVATVQGLSGTGSLRLGAAVIERYFPGAKVLISSPTWGNHKNIFNDARVPWSEYRYYDPKTVGLDFEGMIEDIKSAPEGTFVLLHGCAHNPTGIDPTPEQWEKIADVIEEKNHRPFFDVAYQGFASGSLDEDAASVRLLVARGIELFIADSYPKDVGLYAQRIGAINVISSSPESAARDTSQLKRIARPMYSNPPVHGARIVADLVSKPQLFDEWKAEMEMMAGRIKNVRQLLYDPISSKDKSGKDWSFILKQIGMFSFTGLNKEQSDNMTNKWHVLMTKDGRISPAGLSLAKCEYLADAIIDSYHNVS

SEQ ID NO: 48990 - protein, 350 aa, Sorghum bicolor
MGEVVATWEATEGGAGVKGPVVVTGASGFLGSWLVMKLLQAGYTVRATVRDPANVVKTKPLLDLPGATERLSLWKADLADEGSFDDAIRGCTGVFHVATPMDFESKDPENEVIKPTVEGMMSIMRACKEAGTVRRIVFTSSAGTVNIEERQRPVYDQDNWSDVDFCQRVKMTGWMYFVSKSLAEKAAMAYAAEHGLDFISIIPTLVVGPFLSAGMPPSLITALALVTGNEAHYSILKQVQFVHLDDLCDAHLFLFEHPAAAGRYVCSSHDATIHGLAAMLRDRYPEYDIPERFPGIEDDLQPVHFSSKKLLDHGFTFKYTVEDMFDAAIRMCREKGLIPLATAGGGRALP

SEQ ID NO: 48991 - protein, 379 aa, Sorghum bicolor
MNGGASVKGPVVVTGASGFVGSWLVMKLLQAGYTVRATVRDPANVVKTKPLLDLPGATERLSLWKADLAVEGSFDDAIRGCTGVFHVATPMDFESKDPENEVIKPTVEGMISIMRACKEAGTVRRIVFTSSAGTCNIEEWRKPVYDEDNWTDVDFCRRVKMTGWMYFVSKTLAEKAALAYAAEHGMELVTIITTLVVGPFLSTGMPPSMITRLALVTGNEAHYSILKQVQFVHLDDLCDAHIFLFEHPAAAGRYVCSSCDTTIHDLAAMLRDRYPEYDIPERFPAGTGIEDDLQMVHMSAKKLQDLGFTFRYTRMEDMYDDAIRTCREKGLIPLAAAGRDDGSASVRAPGERDVTATAGGDVSAPVRAPGGETDVTIGA

SEQ ID NO: 48992 - protein, 175 aa, Triticum aestivum
MAPTVMASSATSVAPFQGLKSTAGLPVSRRSNGASLGSVSNGGRIRCMQLWPIEGIKKCDTLSYLPPLSTEALLKQVDYLIRSKWVPCLEFSKVGFIFREHNASPGYYDGRYWTMWKLPMFGCTDATQVINDVDEVKKEYPDAYVRIIGFDNMRHVQCVRFIAFKPPGCDESGKA

SEQ ID NO: 48993 - protein, 481 aa, Arabidopsis thaliana
MEDETQTLILITILILTLITLTFLIKKLKPKPNLPPSPPFSLPIIGHLRLLKPPLHRLFLTISKSLNDSPIFSLRLGNKLVFVVSSHSIVEECFTKNDVVLANRPKNLRRIGAVEIFSNHRLNSFYTIRRDEIRRLIARLSRSPNASLEFAKVEMNSMLSNLAFNNIIRMVTGKCYYGDGAEDDPEAKRVRQLIAEAMSCFGAGHAADHLPMLRWITDFERRVKKIAARLDEFFQRLVDEKRVAKEKKENTMIDHLLSLQVSQPEYYTDHTIKGTMLSLILAGTDTSAVTLEWALSSLLNNPEVLKKVRDEIDNQIGLDRLLEESDIPNLPYLQNIVSETLRLYPAGPLLVPHISSEDCKVGGYDMPCGTMLLVNVWAIHRDPRLWDDPASFKPERFEKEGETHKLLTFGLGRRACPGSGLARRLVSLSLGSLIQCFEWERIGEEEVDMTEGGGLTMPRAIPLVAMCRARAFVGKIPHESG

SEQ ID NO: 48994 - protein, 362 aa, Triticum aestivum
  misc_feature (280)..(280): Xaa can be any naturally occurring amino acid
  misc_feature (299)..(299): Xaa can be any naturally occurring amino acid
  misc_feature (335)..(335): Xaa can be any naturally occurring amino acid
  misc_feature (345)..(345): Xaa can be any naturally occurring amino acid
  unsure (1)..(362): unsure at all Xaa locations
RVYGDPRVRDWSTRTLTWTEGGRKHIRSNPVPHPISPGNLRSKRSQGFLVLLLKMQIFVKTLTGKTITLEVESSDTIDNVKAKIQDKEGIPPDQQRLIFAGKQLEDGRTLADYNIQKESTLHLVLRLRGGMQIFVKTLTGKTITLEVESSDTIDNVKAKIQDKEGIPPDQQRLIFAGKQLEDGRTLADYNIQKESTLHLVLRLRGGMQIFVKTLTGKTITLEVESSDTIDNVKGKIQDKEGIPPDQQRLIFAGKQLEDGRTLADYNIQKESTLHLVLRLXRGGMQIFVKTLTGKNITLXEVESSDTIDNVKAKIQDKEGIPPGQKGLIFCCKQVXDGRTLADSTXPEESTLHLVPRFREACN

SEQ ID NO: 48995 - protein, 484 aa, Oenococcus oeni PSU-1
MALKQYQMYINGEWVDSDNGEKITVYNPSNEEAISQVPSASLKQVKEAIDDAYAAQKDWKRVPAATRGSYLVRIAALIRKNADYLARTLSEEEGKILSLAMTEVTFSADYIDYMAAQGRTYEGEVIQSDNANENIALLKQPIGVAAGILPWNFPFFLITRKFAPALVTGNTIVIKPSSDTPNIALEFAKLANQVGLPKGVLNFVTGPGSVVGSELSKNEKIGIISLTGSVDSRKRVMADASNHVAKVSLELGGKAPAIVCKDADIDLAVDSIINSRIDNNGELCNNCERVYVQEDIAEEFTKKLVAKMAATTIGDPIEHENIGMGPLINKAAVEKVDAMVQRAVKAGAKVECGGKRPEGKGYFYPATVVTNVKQSDELVQEEIFGPVLPILTFKKLDQAIDMANDSKLGLTSSIFTENMDAAATAANELEDGETYINRFNFEAMQGFHAGWKESGLGGADGKHGLEEYVNTHVVYLQRHPEKAD

SEQ ID NO: 48996 - protein, 326 aa, Phaseolus vulgaris
MRPILMKGHERPLTFLKYNRDGDLLFSCAKDHNPTVWFADNGERLGTYRGHNGAVWCCDVSRDSGRLITGSADQTAKLWNVQTGQQLFTFNFDSPARSVDFSVGDKLAVITTDPFMELPSAIHVKRIANDPTEQTGDSVVLIKGPQGRINRAIWGPLNRTIISAGEDAVIRIWDSETGKLIKESDKESGHKKTVTSLAKSADGSHFLTGSLDKSARLWDTRTLTLIKTYVTERPVNAVAMSPLLDHVVLGGGQDASAVTTTDHRAGKFEAKFYDKILQEEIGGVKGHFGPINALAFNPDGKSFSSGGEDGYVRLHHFDPDYFNIKI

SEQ ID NO: 48997 - protein, 389 aa, Oryza sativa
LAMASEWEMAMGVDLGMGMSTYHNASGGIAAAPMMGHHGGGGGGGGYSAAHHHHHHYYGMPHQAAMGDAMRVDDLLDLSNTPGAHDFFPASAAAAAAGDHGHHHHHHIGGMGEPSGATPSATSSDHQTSMLSFADDFYIPTEDAAELEWLSKFVDDSYSDMPNYQSSAHAAMAAAAASAANNGGGSSAGQDSCLTAAPGRGARSKRSRATAAAAAAWHSLVPRPPSQSSPSSSCSSSDFPSSNKPSGTARPNGSGGGSRGKKSPGPAGAEVGMEAGVRRCTHCASEKTPQWRTGPLGPKTLCNACGVRFKSGRLMPEYRPAASPTFVLTQHSNSHRKVMELRRQKELLIIRGSHRDAAAAAAAAAAAAAAGSAAATGRPELMFRDYGVC

SEQ ID NO: 48998 - protein, 327 aa, Bacillus clausii KSM-K16
MKIGTIGTGSIVDLFLSALKDIDGAECVAMYSRKEETAKPLAEKHKITMIYTDLVNMFADPAIDFIYVASPNSFHFSHTYQALQNGKHVICEKPFTSTVRETERIMEFAREKRLMVFEAITTIHLPNYHLIKEQIGELGPLKLIQCNYSQYSSRYDLLKAGETPNVFNPQFSGGALADINIYNLHFVLHLFGAPQSVDYTANKHPNGIDTSGVVVLKYRDLVAECVGAKDTRSKNFVLIQGEKGYIHVENGANGCRNVSVHLQDQAIDLNEQTSSNLMYYELRAFKDIYDNQRYDRCEELLKHSHSVMQVFEKARQSANIVFAADQQ

SEQ ID NO: 48999 - protein, 378 aa, Oenococcus oeni PSU-1
MSNISKTNDQILDFDYQLKAQDDAFPTLKVLDNDGKIVDEKALERADLSDDDLINIFHNMLLNRQLDIRSTKLARQGRFGFFAPTAGQEASQMASAYAFHDEDWLFPGYRDIPEIVAKGWPIWKAILWSRGHVVGNEYTTDDGKEVNSWFPQIIIGAQYVEAAGVALGLKKRNKKAVSYAYTGDGGTSQGDFYEGMNFAAAYHANEVFFVQNNGFAISTPRKLQTAAPHLAAKGWAVGVPSLVVDGQDAIAVYLAAKEARAWAVSGKGPVLIETLTDRFEAHSTAGDDPLRYRTKEDIADWWKKDPLIRMRKYITDKGLWDEDKENDYIAQIDARIDEDIKKADNIDKQKISDYLKNTLEVPGYAMKEQIEKFESEGK

SEQ ID NO: 49000 - protein, 123 aa, Narcissus pseudonarcissus
QPMSVFWLVPQFFLVGAGEAFCYIGQLDFFLRECPKGMKTMSTGMFLSTLSLGFFLSSALVTIVHKVTGESGQGAWLPDDLNRGKLYDFYWLLAVLSAVNLVAFLVSARWYVYKENRMATDDG

SEQ ID NO: 49001 - protein, 266 aa, Leptospira biflexa serovar Patoc
MSKIKELFESGKFKSAFIPYFTLGDPNYNDSIEFGKTILDGGADILELGIPFSDPVADGPVIQRAVARSLKNKFSFDEIFRVTKQIHLHKQETPLVYLTYFNPIYHCGITKFLDNAKDSGVVGLVIPDLPFDTIESETLFQELRLRDMDLIHLVTPASTKKRIEALRKTSTGFIYYVTSFGVTGERREFSVDLKERIRFLKDTIQLPICAGFGISTPEQASQIAGYADGIIIGSAIQRVIEENGQDASKAKNVLADYITKIRASIS

SEQ ID NO: 49002 - protein, 458 aa, Candida albicans SC5314
MGKEKTHVNVVVIGHVDSGKSTTTGHLIYKCGGIDKRTIEKFEKEAAELGKGSFKYAWVLDKLKAERERGITIDIALWKFETPKYHVTVIDAPGHRDFIKNMITGTSQADCAILIIAGGTGEFEAGISKDGQTREHALLAYTLGVKQLIVAVNKMDSVKWDKNRFEEIIKETSNFVKKVGYNPKTVPFVPISGWNGDNMIEASTNCPWYKGWEKETKSGKVTGKTLLEAIDAIEPPTRPTDKPLRLPLQDVYKIGGIGTVPVGRVETGIIKAGMVVTFAPAGVTTEVKSVEMHHEQLAEGVPGDNVGFNVKNVSVKEIRRGNVCGDSKNDPPKGCDSFNAQVIVLNHPGQISAGYSPVLDCHTAHIACKFDTLVEKIDRRTGKKLEENPKFVKSGDAAIVKMVPTKPMCVEAFTDYPPLGRFAVRDMRQTVAVGVIKSVEKSDKAGKVTKAAQKAAKK

SEQ ID NO: 49003 - protein, 362 aa, Rubrivivax gelatinosus PM1
MPNKVLIAGASGVVGAAAVDAFLAGGWEVVALSRRRPELTHERPYTHLAVDLRDAAASRAALGALTGITHVVYAALFEKPGLIAGWSERDQMETNLAMLQNCLTPLTGAGSGLRHVSLLQGTKAYGIHLHPMPIPARERAPRDPHANFYWLQEDYLKELAAARHFDFTILRPQLIIGAAYGVAMNLAPVIGAYAAVCRELGEPFGFPGGVSYVWEAVDARLLANVFVWATSSPKAVGQHFNVTNGDVFEWRNVWPAMAATLGVEPGPDRPRALGQFLPGHAAVWDRIVAKHGLRPVALPALLGESHHYADFCFAHGATEPPPPAFVSAIKLRQAGFHEVCDSEDMFCHWLRSFMARGILPPA

SEQ ID NO: 49004 - protein, 451 aa, Vibrio vulnificus CMCP6
MATHFDYICIGGGSGGIASANRAAMYGAKVALIEAKDLGGTCVNVGCVPKKVMWHGAQIAEAMSLYAPDYGFDVEVKGFDWSKLVESRQAYIGRIHQSYDRVLGNNKVNVIKGFAKFVDEKTVEVNGEHYTADHILIAVGGRPTIPNIPGAEYGIDSNGFFDLAEQPKRVAVVGAGYIAVEIAGVLNALGTETHLFCRKESPLRSFDPMIIDTLVEVMAAEGPTLHTHSVPKEVVKEADGSLTLHLENGESQNVDQLIWAIGRHPATDAINLSATGVATNERGYIKVDEFQATNVAGIYCVGDIMEGGIELTPVAVKAGRQLSERLFNNKPNAKMDYDLVPTVVFSHPPIGTIGLSEPEAIAQYGEENVKVYTSGFTAMYTAVTQHRQPCKMKLVCAGEDEKVVGLHGIGFAVDEMIQGFGVAMKMGATKADFDSVVAIHPTGSEEFVTMR

SEQ ID NO: 49005 - protein, 78 aa, Narcissus pseudonarcissus
MSCCGGNCGCGSACKCGSGCGGCKMYADLAEDRSTATMTLVLGVAPQKGGIEGFEMAEGAENGCKCGSNCTCDPCNCK

SEQ ID NO: 49006 - protein, 603 aa, Pseudomonas aeruginosa PAO1
MSDSPQNPGPSSLKIYFRLLGYVKPYIGMFLLSIVGFLIFASTQPMLAGILKYFVDGLSNPDAALFPNVQWPWLRDLHLVYAVPLLIILIAAWQGLGSFLGNFFLAKVSLGLVHDLRVALFNKLLVLPNRYFDTHSSGHLISRITFNVTMVTGAATDAIKVVIREGLTVVFLFLYLLWMNWKLTLVMLAILPVIAVMVTTASRKFRKQSKKIQVAMGDVTHVASETIQGYRVVRSFGGEAYEEKRFLDASQSNTDKQLRMTKTGAVYTPMLQLVIYVAMAILMFLVLWLRGDASAGDLVAYITAAGLLPKPIRQLSEVSSTVQRGVAGAESIFEQLDEAAEEDQGTVEKERVSGRLEVRNLSFRYPGTDKQVLDDISFIAEPGQMIALVGRSGSGKSTLANLVPRFYQHNDGKILLDGVEVEDYRLRNLRRHIALVTQQVTLFNDSVANNIAYGDLAGAPREEIERAAKAANAKEFIDNLPQGFDTEVGENGVLLSGGQRQRLAIARALLKDAPLLILDEATSALDTESERHIQAALDEVMKGRTTLVIAHRLSTIEKADLILVMDQGQIVERGSHAELLAQNGHYARLHAMGLDEQAPAPVG

SEQ ID NO: 49007 - protein, 332 aa, Bacillus anthracis str. A2012
  misc_feature (328)..(328): Xaa can be any naturally occurring amino acid
  unsure (1)..(332): unsure at all Xaa locations
MNPLIFKENRPFDLIAVGRLCVDLNANETQRPMEETRTFTKYVGGSPANIAIGAARLGLQTGFIGKVSDDQMGRFITGYLKDNKINTDQIPIDCTGAVTGLAFTEIKSPEDCSILMYRDNVADLNLDPTEVSEDYIKQSKALLISGTALAKSPSREAVFLALEYARKHDVVVFFDVDYRPYTWQSEAETAVYYNLAAEKSDVIIGTREEFDMMEKLLNYEKSNDQVTAERWFSHHAKIVVIKHGGDGSIAYTRDGQSHRGGIFKTKVLKTFGAGDSYASAFIYGLMQGLEIPQAMRLGGASASIVISKHSCSDAMPTRAEISAFMETXEELV

SEQ ID NO: 49008 - protein, 602 aa, Arabidopsis thaliana
MAASSSSAASFFGVRQDDQSHLLPPNSSAVVPPPPPPHHQAPLPPLEAPPQKKKRNQPRTPNSDAEVIALSPKTLMATNRFICEVCNKGFQREQNLQLHRRGHNLPWKLKQKSTKEVKRKVYLCPEPSCVHHDPSRALGDLTGIKKHYYRKHGEKKWKCDKCSKRYAVQSDWKAHSKTCGTKEYRCDCGTLFSRRDSFITHRAFCDALAQESARHPTSLTSLPSHHFPYGQNTNNSNNNASSMILGLSHMGAPQNLDHQPGDVLRLGSGGGGGGAASRSSSDLIAANASGYFMQEQNPSFHDQQDHHHHHQQGFLAGNNNIKQSPMSFQQNLMQFSHDNHNSAPSNVFNLSFLSGNNGVTSATSNPNAAAAAAVSSGNLMISNHYDGENAVGGGGEGSTGLFPNNLMSSADRISSGSVPSLFSSSMQSPNSAPHMSATALLQKAAQMGSTSSNNNNGSNTNNNNNASSILRSFGSGIYGENESNLQDLMNSFSNPGATGNVNGVDSPFGSYGGVNKGLSADKQSMTRDFLGVGQIVKSMSGSGGFQQQQQQQQQQQQQQQHGNSRERVGSSSDSADRSSMNVNTGGGPASTSPPYGIHHASF

SEQ ID NO: 49009 - protein, 558 aa, Candida albicans SC5314
MDWYNNRSRRSSITTGQPTQSNPAFHGIINSNNSTTASSSLSSSSNSYSSSSMINPNKYPTQQQQQQQHGNIPSPLNLSSQQTMGRNLSPVSQTNSPIVTIPPTPLERNSYYFSEFPLYACDWTCLNNGQMDCIAVGSYKETFANKLEIVHGSNYENEFNMENSLSPGTDNSFNYNNKNNTNAYYEDEEIASRDEGFCFQKVCDVTLDYPITHLQWDPSMLSYGSSGVERLATSSEVLRLYKVANNGNDSYSLQQTHVLANNTASCSSTSSNSNNSSGSSSARTIEDVNTFPPVTSFDWNKTDPNVLITSSVDTTCIVWDLHRSPGRTAINEEMLDTATVKTQLIAHDSEVFDVKFLHKSTNVFASVGNDGSMRVFDLRSLEHSTIIYEPSPSASSSATASASASTSAANHSLSATFNSKALLTLSTSNVDQHHLAAVGVNSNQIIIIDMRMPGLPVVIIDASLGGMNNSSINSIKWHPTSNYLLSGGDDCQALVWDINNLSNATNGSTNGSNHSGRIIDTPVLAYSEDLEINNVCWRQNQGDWMGVVSGKGFQAVSI

SEQ ID NO: 49010 - protein, 353 aa, Rubrivivax gelatinosus PM1
MEQKIELKQSYLTNAWYVAALSTEVGAQALFHRKILDTSILIYRKQDGTAVALHDRCPHRFAPLHLGKRIGDEVACLYHALQFDCTGQCTKNPHGNGQIPKAAKVRSFPLEERYGFLWIWMGEDAPDLARLPDFGELDKGPDTGVAFTYMHMKANYELIIDNVMDLSHVDHVHGEIITTRGQLSPQIPKLREGTESVAARWEWQQTPPLLILADFLPEPKTQARHFIEVSWSPPANIQLSVGATQNDGALDLVNCIGQYDLHTCTPETANTTHYFFATRRNHVVDDAGYNAAKIQAMHTAFETEDGPIIQAIHNEMDTTDFFGLNPVLMTNDVAPVKVRRLLQRLIEQEAGAR

SEQ ID NO: 49011 - protein, 744 aa, Capsicum annuum
MASSSLPLSQAILSRSIPRHGSSSSTNSQFSPSSLSLPTFSGLKSTTSTTFRRRTLPSPVAVRSPEIRASAAVETLEKTDNALVEKSVNTIRFLAIDAVEKANSGHPGLPMGCAPIGHILYDEIMRYNPKNPYWFNRDRFVLSAGHGCMLQYALLHLAGYDAVREEDLKSFRQWGSKTPGHPENFETPGVEVTTGPLGQGIANAVGLALSEKHLAARFNKPGAEIVDHYTYCILGDGCQMEGISQEAASLAGHWGLGKLIAFYDDNHISIDGDTEIAFTEDVGARFEALGWHVIWVKNGNTGYDEIRAAIKEAKAVTDKPTMIKVTTTIGFGSPNKANSYSVHGSALGAKEVEATRQNLGWPYEPFHVPEDVKSHWSRHVPEGAALEAGWNTKFAEYEKKYPEEAADLKSIITGELPAGWEKALPTYTPESPADATRNLSQQNLNALAKVLPGFLGGSADLASSNMTLMKMFGDFQKNTPEERNLRFGVREHGMGAICNGIALHSPGLIPYCATFFVFTDYMRAAIRISALSESRVIYVMTHDSIGLGEDGPTHQPIEHLASFRAMPNVLMLRPADGNETAGAYKVAILKSKTPSILALSRQKLPQLAGTSIEGTAKGGYVTSDNSSGNNPDVILIGTGSELEIAVKAADELRKEGKAVRVVSLVSWELFDEQSAEYKESVLPAAVTARVSIEAGSTFGWEKIVGSKGKAIGIDRFGASAPAGKIYKEYGITAEAVIAAAKQVS

SEQ ID NO: 49012 - protein, 366 aa, Euphorbia characias
LEVESSDTIDNVKAKIQDKEGIPPDQQRLIFAGKQLEDGRTLADYNIQKESTLHLVLRLRGGMQIFVKTLTGKTITLEVESSDTIDNVKAKIQDKEGIPPDQQRLIFAGKQLEDGRTLADYNIQKESTLHLVLRLRGGMQIFVKTLTGKTITLEVESSDTIDNVKAKIQDKEGIPPDQQRLIFAGKQLEDGRTLADYNIQKESTLHLVLRLRGGMQIFVKTLTGKTITLEVESSDTIDNVKAKIQDKEGIPPDQQRLIFAGKQLEDGRTLADYNIQKESTLHLVLRLRGGMQIFVKTLTGKTITLEVESSDTIDNVKAKIQDKEGIPPDQQRLIFAGKQLEDGRTLADYNIQKESTLHLVLRLRGG

SEQ ID NO: 49013 - protein, 457 aa, Escherichia coli K12
MESKNKLKRGLSTRHIRFMALGSAIGTGLFYGSADAIKMAGPSVLLAYIIGGIAAYIIMRALGEMSVHNPAASSFSRYAQENLGPLAGYITGWTYCFEILIVAIADVTAFGIYMGVWFPTVPHWIWVLSVVLIICAVNLMSVKVFGELEFWFSFFKVATIIIMIVAGFGIIIWGIGNGGQPTGIHNLWSNGGFFSNGWLGMVMSLQMVMFAYGGIEIIGITAGEAKDPEKSIPRAINSVPMRILVFYVGTLFVIMSIYPWNQVGTAGSPFVLTFQHMGITFAASILNFVVLTASLSAINSDVFGVGRMLHGMAEQGSAPKIFSKTSRRGIPWVTVLVMTTALLFAVYLNYIMPENVFLVIASLATFATVWVWIMILLSQIAFRRRLPPEEVKALKFKVPGGVATTIGGLIFLLFIIGLIGYHPDTRISLYVGFAWIVVLLIGWMFKRRHDRQLAENQ

SEQ ID NO: 49014 - protein, 99 aa, Arabidopsis thaliana
MENPASVLVLPAQFTKLTFGNLYIRRAGPGSREITEEGRCDLDKRYVSDFPVYDGRGPDASLVARVQGITSEIGNAHQLFVVVFDTDRLKGSTLRHQMA

SEQ ID NO: 49015 - protein, 605 aa, Escherichia coli K12
MMLNAWHLPVPPFVKQSKDQLLITLWLTGEDPPQRIMLRTEHDNEEMSVPMHKQRSQPQPGVTAWRAAIDLSSGQPRRRYSFKLLWHDRQRWFTPQGFSRMPPARLEQFAVDVPDIGPQWAADQIFYQIFPDRFARSLPREAEQDHVYYHHAAGQEIILRDWDEPVTAQAGGSTFYGGDLDGISEKLPYLKKLGVTALYLNPVFKAPSVHKYDTEDYRHVDPQFGGDGALLRLRHNTQQLGMRLVLDGVFNHSGDSHAWFDRHNRGTGGACHNPESPWRDWYSFSDDGTALDWLGYASLPKLDYQSESLVNEIYRGEDSIVRHWLKAPWNMDGWRLDVVHMLGEAGGARNNMQHVAGITEAAKETQPEAYIVGEHFGDARQWLQADVEDAAMNYRGFTFPLWGFLANTDISYDPQQIDAQTCMAWMDNYRAGLSHQQQLRMFNQLDSHDTARFKTLLGRDIARLPLAVVWLFTWPGVPCIYYGDEVGLDGKNDPFCRKPFPWQVEKQDTALFALYQRMIALRKKSQALRHGGCQVLYAEDNVVVFVRVLNQQRVLVAINRGEACEVVLPASPFLNAVQWQCKEGHGQLTDGILALPAISATVWMN

SEQ ID NO: 49016 - protein, 349 aa, Rubrivivax gelatinosus PM1
METQIPYLTNAWYVAALSTEVGAQALFHRKILDTSILIYRKQDGTAVALHDRCPHRFAPLHLGKRIGDEVACLYHALQFDCTGQCTKNPHGNGQIPKAAKVRSFPLEERYGFLWIWMGEDAPDLARLPDFGELDKGPDTGVAFTYMHMKANYELIIDNVMDLSHIDHVHGEIITTRGQLSPLVPQMREGEQAISARWEWQQTPAMLIFANFLPEPAAGARHFFDITWTPPANIQLSVGATQDGGALDLAGCIGQYDLHTCTPETANTTHYWFATRRNHVVEDADYNAMKIQAMHAAFENEDGPIIEAVHDEMGTTDFFSLNPVLMTNDVAPVKVRRRLRQLIQDDRRGA

SEQ ID NO: 49017 - protein, 60 aa, Triticum aestivum
TCVLLQYYGLTEANYYTVLFGVSRAIGVLPQLIIDRALGAPIERPKSFSTDKWAELVKKL

SEQ ID NO: 49018 - protein, 459 aa, Bacillus anthracis str. 'Ames Ancestor'
MGENHDKQRQSLLGKDFNENGERNEQAILHSQTVGSRGPVLEQDSVLHEALQEFIHEKILERPVHVKGFGAFGYFQTIYPMSEHTKLSFLQHSNEKVPVMVRFSLAVSTKGTPDTARNVRGFSTKFYTKEGIFDLLCNHIPVFSVRDPMRFPETIQALSPSPKNNLLDPNRFWSFVARAPESIHFVVHLYSDNGTAKSFRRIPGHSVNTYVWRNAEGNRKYVKYHWYPFEGVQSITNEEANKLAAENPDYSGKDLYDAIANGKPVEYGLYVQLMDPKDEAHLSYDPLDDTKAWDEKAYPLIPVGKMVLNKNPENYMEQVEKVAFSPSNLLNGAELSDDKMLQGRANIYSDSQRRRIGPEFRKLAINQQQDWTPANQITSGDGRYVEGKLERTSIPKQDDFTQAGEFYAKLQPIEKEHLAENLASDLKVISDDIRKVVLGYFHNVSADLVKRIESAMQQL

SEQ ID NO: 49019 - protein, 473 aa, Oryza sativa (japonica cultivar-group)
MASLAVSASASASGEEVTHLAQREAAEIDEQLMGPLGFSVDQLMELAGLSVAAAVAEVYKLGEHTRVLVICGPGNNGGDGLVAARHLHHFGYKPSVCYPKRTPKPLYSGLCTQLESLTIPFVPVEDLPANLSEEFDIIIDAMFGFSFHGTPRPPFDDLINRLVSLSAIDNSAKRPAIVSVDIPSGWHVEEGDINGGGFKPDMLVSLTAPKLCAKKFTGPHHFLGGRFVPPPIVSKYKLHLPPYPGTSMCVRIGKAPSVDISSLRENYISPELLENQVMPDPFDQFVRWFDEAVTAGLREPNAMALTTADKEGKPSSRMVLLKGVDKQGFVWYTNYGSQKAHDLSENPNAALLFYWNEMNRQVRVEGSVQKVPEEESEKYFHSRPRGSQLGAIVSKQSTIIPGREVLQQAYKELEQKYSDGSVIPKPDYWGGYRLTPKLFEFWQGQQSRLHDRLQYSLREVDRSTVWHIERLSP

SEQ ID NO: 49020 - protein, 407 aa, Oryza sativa (japonica cultivar-group); identical to SEQ ID NO: 1187

SEQ ID NO: 49021 - protein, 221 aa, Gloeobacter violaceus PCC 7421
MGLFNKQVQMPTTAQALPGRAQRMPVSVPHHVNGRPLQPPFPQGTEQAMFGMGCFWGAERVFWQAEGVYTTAVGYAAGLTPNPTYREVCSGMTGHNEVVLVVFDPRVISYERLLQIFWENHDPTQGMRQGNDAGTQYRSGIYCSTPEQKQIAEASRAAYQQRLTAAGLGRITTEVLDAPEFYYAEDYHQQYLSKNPGGYCGLGGTGVACPVGALESRPTAP

SEQ ID NO: 49022 - protein, 367 aa, Gloeobacter violaceus PCC 7421
MLALERSVVITGLGIVSCLGGEARTTWKRLLAGERGYEPGEPVGRAGTVQAETGRVVALVQQAAREALADAGSREAFDFGVAIGSSRGLQADWENGRTGPLIGLDAPAHAVAALAGTQGPLAALSCACASGAWAIGTGYRWIRWGLCDRVLVGAADAAITPLNLAGFRRAGALARDACLPFDRCHSGFVLAEGASVLVLEAEEVAHGRPYTRIRGFSATCDAFHPTAPHPEGEGLARAVERCRKQAPGLSVGAVHAHGTGTAAGDPVEAAVIARLYAPGTPVIACKGSLGHSLGASSAMEAALACLALQTGQLPPIAGLTDPLAPLAFVREAFRTSVTTLMLHSLGFGGQNTALLLEACPSPRRTLG

SEQ ID NO: 49023 - protein, 338 aa, Ralstonia solanacearum
MYSAHDVRVENVPDATIVEPTDAIVRVTQACICGSDLWPYRAMEPSETGQSMGHEAIGVVEAIGSGVNKIKVGDVVIMPFAYSDGRCEFCHEGLQTACVHGGFFGYGGFNGAQAEALRIPQADGTLYALPGGVDSALMASLLTLSDVMGTGHHAARVARVRPGTSAAVIGDGAVGLCGVIAAKRLGAERIILMGRHPDRIALAQAFGATDIVSERGEEAIERVRALTGGHGVHSVLECVGTDQSMQTAANIARPGGAVGRVGVPHYNAIPADTTFFKNVIVGGGPAPVRAYIDDLLPDVLDGKIQPGRVFDRVIGLDEVPDGYRAMDERQAIKVMINL

SEQ ID NO: 49024 - protein, 726 aa, Magnaporthe grisea
MRLADIVLDLAAIASASRSVASKHVALRARQINRFGKSSSLTTRPTTAAPSTSASASEPAKAQTVTTAPATTDNAARAPIPKAAETAARVQPSSDAGQDAGGAAAVLGRDRPVAPWATRDGLFATAPRTPRRSLFESAPAKLGEVDATTAEGMPEGININIFQTSRGSKILESLKSDADVDNGATKDATRITDTKEGAKASESTRFESLAAEEPKRESELANKPLQSPEASEMRSTTKAYAADPVTFTPPPVSTPKSSPAAENVVQDSAPAASGYQLRESKVPATRLSRIWNYGGLAAGMLGGALTESISRGFGGGTSGTSAMLSPANMERLVSKLSRMRGAALKMGQMLSFQDAKMLPGPIREVLQRVQDRADYMPAWQRDRVLATNLGSEWRDLFETFEEKPIAAASIGQVHRATLKPQEEGSMPVEVAVKIQFPGVADSINSDLDNLAMLLAATKLLPKGLYLDKTIANARMELAWECDYEREAECAQRYRTLLAGDEEAVFAVPRVFPAASGKQVLTMEFMHGIGVTRGIHSFTQEQRDRIGTHILRLCLREITEFRFMRTDPNWTNFLYNAETGRLELLDFGASREYPERFVSLYVRLLYAASKGDRECVRVLSEELGYPTGHESGVMLDAHTQSVLTLAEPFLKSAPELYDFRDQTITERVKSFIPVMIKERLAPPPEETYSLHRKLSGAFLLCARLGSKVRCREMFTKSVKKSGLVPEV

SEQ ID NO: 49025 - protein, 473 aa, Oenococcus oeni PSU-1
MATGGVVGAQATDIDTVVIGSGPGGYVAAIRAAELGQKVTIIESTFIGGVCLNVGCIPSKALINVGHHYHDAVSEQPFGLKSSGTELDWKTTQEWKQKKVVNQLTGGVEMLLKKHRVDIIHGVASFVDNKQINVVKGDDHELFQFNNCILATGSRPIEIPGFAFGKRIVDSTAALSLPEIPKHLIVIGGGVIGFELGSVYQNLGSKVTVIEGLDHVLSGFDKEMIQPVLDDFKAQGGEIFTSAKAKSASQTEKDVTVTFEADGKEQTVDGDYLLVSVGRRPNTDNIGLNNTNVKLTDRGLVEIDDTMKTNVSHIYAIGDITVGPALAHKASFQGKIAAAAISGDQNAHDLHYSLPAVAYTNYELATTGETPESVKEKKLDAKAYKFPFAANGRALSINEGKGFIRLISDNQTKALIGSQIVGPGASDLISELSLAIENGLTTEDISLTIHPHPTLGEAIMDASELADGLPIHI

SEQ ID NO: 49026 - protein, 436 aa, Bacillus cereus ATCC 14579
MNIMQPSAPPHLESTETIFPSSITKLVVFICWLAILADGYDLGIYGAVLPKLLEDKSWALSPAHAGTIASYALLGMFIGAILVGTITDLIGRKWTLICCLALFSITMGLAAIAPSPELFGLSRFIGGIGLGGVIPTASALTVEYSPKKRQSFIYALMFTGYPLGIVLGAILSMLMLEDFGWRIMFGIGMIPLLLIPFIIRYLPESIQFLLSRNRQEEVNQILNRFQIEFHVKDKTHQDPSTIRKKNGFFTLFSKEYIKATLLFWITYIMGMFLIYGLNTWLPQMMRQAGYPLGSSLSFLLMLNITAAIGALFAGAIADRIGAKIVISISYLMAAICIGLLTIKPSVTIIYLLIGLAGIGSVGITQILNAYVTQYFPSHIRATSLGWGLGLGRVGAIAGPILVGIIMTMQYDLAWNFYLFSFAGLIAAISVFFIPTK

SEQ ID NO: 49027 - protein, 102 aa, Brassica napus
IRDCLAQLYAKSITPDDKQVLDESLQREIQAAFRTDEIRRTPPTPQDEMRAGMSYFHETIWNGVPKFLLRVDTALKNIGIDERVPYNAPLIQFSSWMGGDRD

SEQ ID NO: 49028 - protein, 709 aa, Synechococcus elongatus PCC 6301
MAAQNLYILHIQTHGLLRGQNLELGRDADTGGQTKYVLELAQAQAKSPQVQQVDIITRQITDPRVSVGYSQAIEPFAPKGRIVRLPFGPKRYLRKELLWPHLYTFADAILQYLAQQKRTPTWIQAHYADAGQVGSLLSRWLNVPLIFTGHSLGRIKLKKLLEQDWPLEEIEAQFNIQQRIDAEEMTLTHADWIVASTQQEVEEQYRVYDRYNPERKLVIPPGVDTDRFRFQPLGDRGVVLQQELSRFLRDPEKPQILCLCRPAPRKNVPALVRAFGEHPWLRKKANLVLVLGSRQDINQMDRGSRQVFQEIFHLVDRYDLYGSVAYPKQHQADDVPEFYRLAAHSGGVFVNPALTEPFGLTILEAGSCGVPVVATHDGGPQEILKHCDFGTLVDVSRPANIATALATLLSDRDLWQCYHRNGIEKVPAHYSWDQHVNTLFERMETVALPRRRAVSFVRSRKRLIDAKRLVVSDIDNTLLADRQGLENLMTYLDQYRDHFAFGIATGRRLDSAQEVLKEWGVPSPNFWVTSVGSEIHYGTDAEPDISWEKHINRNWNPQRIRAVMAQLPFLELQPEEDQTPFKVSFFVRDRHETVLREVRQHLRRHRLRLKSIYSHQEFLDILPLAASKGDAIRHLSLRWRIPLENILVAGDSGNDEEMLKGHNLGVVVGNYSPESEPLRSYERVYFAEGHYANGILEALKHYRFFEAIA

SEQ ID NO: 49029 - protein, 360 aa, Oenococcus oeni PSU-1
MTMVKAAVIYGPKDIRFEKRNIPDPAPDEVQIEVAFNGICGSDIHEYLEGMDLATMPHPLTHMQAPLIPGHEFSGTISKIGKQVSKLRIGDKVAVEPMIACGKCPECLSGHYNWCEHAIGSDQSAGFLGFSANGGLAEKCNVKSTFAHLLPTDFPLDLGALVEPVSVAAQAVMASRVSPGDDVLIQGAGPIGLFTALIAQISGAHHVIINDMSEERLDLANELGVQYPIRADSQKSLAHAISTITENQGVDVAFDCAGVQPTLTGAIQALKNGGKVTVIALFQHPPVVDVRALLKKGGSLLTSYGYANIFDRVIKIIDTYRSLFKRVITKKIELNELVSEGIESLEKDKKQAKILVRLHS

SEQ ID NO: 49030 - protein, 806 aa, Gossypium hirsutum
  misc_feature (414)..(414): Xaa can be any naturally occurring amino acid
  unsure (1)..(806): unsure at all Xaa locations
MAERALTRVHSLRERLDETLLAHRNEILALLSRIEGKGKGILQHHQIILEFEAIPEENRKKLANGAFFEVLKASQEAIVLPPWVALAVRPRPGVWEYIRVNVHALVVEELTVAEYLHFKEELVDGSSNGNFVLELDFEPFNSSFPRPTLSKSIGNGVEFLNRHLSAKLFHDKESMHPLLEFLRVHCHKGKNMMLNDRIQNLNALQHVLRKAEEYLGTLPPETPCAEFEHRFQEIGLERGWGDTAERVLEMIQLLLDLLEATDPCTLEKFLGRIPMVFNVVILTPHGYFAQDNVLGYPDTGGQVVYILDQVRALENEMLLRIKQQGLNITPRILIITRLLPDAVGTTCGQRLEKVYGTEHSDILRVPFRTEKGIVRKWISRFEKVWPYLETYTEDVAHEISKELHGTPDLIIGNXSDGNIVASLLAHKLGVTQCTIAHALEKTKYPDSDIYWKKLEDKYHFSCQFTADLFAMNHTDFIITSTFQEIAGSKDTVGQYESHTAFTLPGLYRVVHGIDVFDPKFNIVSPGADMEIYFPYTEEKRRLKHFHPEIEDLLYTKVENEEHLCVLNDRNKPILFTMPRLDRVKNLTGLVEWCGKNPKLRELANLVVVGGDRRKESKDLEEKAEMKKMFELIDKYNLNGQFRWISSQMNRIRNVELYRYICDTKGAFVQPALYEAFGLTVVEAMTCGLPTFATCNGGPAEIIVHGKSGFNIDPYHGDQAADILVDFFEKCKKDPSHWDKISQGGLKRIEEKYTWKIYSERLLTLTGVYGFWKHVSNLERRESRRYLEMFYALKYRKLAESVPLAEE

SEQ ID NO: 49031 - protein, 711 aa, Arabidopsis thaliana
MAFSHDNRVRFKDEGKPLSSEYGYGRKARPSLDRVFKNVKWGFKKPLSFPSHKDPDHKETSSVTRKNIINPQDSFLQNWNKIFLFACVVALAIDPLFFYIPIVDSARHCLTLDSKLEIAASLLRTLIDAFYIIHIVFQFRTAYIAPSSRVFGRGELVDDAKAIALKYLSSYFIIDLLSILPLPQIVVLAVIPSVNQPVSLLTKDYLKFSIIAQYVPRILRMYPLYTEVTRTSGIVTETAWAGAAWNLSLYMLASHVFGALWYLISVEREDRCWQEACEKTKGCNMKFLYCENDRNVSNNFLTTSCPFLDPGDITNSTIFNFGIFTDALKSGVVESHDFWKKFFYCFWWGLRNLSALGQNLQTSKFVGEIIFAISICISGLVLFALLIGNMQKYLESTTVREEEMRVRKRDAEQWMSHRMLPEDLRKRIRRYEQYRWQETRGVEEETLLRNLPKDLRRDIKRHLCLDLLKKVPLFEIMDEQLLDAVCDRLRPVLYTENSYVIREGDPVGEMLFVMRGRLVSATTNGGRSGFFNAVNLKASDFCGEDLLPWALDPQSSSHFPISTRTVQALTEVEAFALTAEDLKSVASQFRRLHSKQLQHTFRFYSVQWRTWSVSFIQAAWRRYCRRKLAKSLRDEEDRLREALASQDKEHNAATVSSSLSLGGALYASRFASNALHNLRHNISNLPPRYTLPLLPQKPTEPDFTANHTTDP

SEQ ID NO: 49032 - protein, 191 aa, Candida albicans SC5314
MQTIKCVVVGDGAVGKTCLLISYTTSKFPADYVPTVFDNYAVTVMIGDEPFTLGLFDTAGQEDYDRLRPLSYPSTDVFLVCFSVISPASFENVKEKWFPEVHHHCPGVPIIIVGTQTDLRNDDVILQRLHRQKLSPITQEQGEKLAKELRAVKYVECSALTQRGLKTVFDEAIVAALEPPVIKKSKKCTIL

SEQ ID NO: 49033 - protein, 357 aa, Rubrivivax gelatinosus PM1
MPVSHPKFRAAAVQAAPVFLDLDASIDKAVGLIAEAATQGAQLVAFPETWLPGYPWFIWLDSPAWALQFIQRYHDHSLVDGSPQADRIAQAARDHAIMVVMGHSEKAGGSLYMGQWIIDAEGRTVARRRKLKPTHVERTVFGEGDGSDLGVHDTALGRIGALCCWEHLQPLSKYAMYAQDEQVHIAAWPSFSLYRGGAHALGAEVNTAASRIYAVEGQCFVVAPCATVSKEMVAMLCGDDPTKRQLLLEGGGYAGIYAPDGRLLTEPLPEHTEGLVHAELDLGLITLAKAAADPAGHYSRPDVTRLLLDKTPRDRVVLAPQRPPGASAGAAEAAPPPSGTSPGDPAAAGPSTARRTA

SEQ ID NO: 49034 - protein, 480 aa, Zea mays
RKMARKPLDYEELNENVKRVQYAVRGELYLRASELQKEGKKIIFTNVGNPHALGQKPLTFPRQVVALCQAPFLLDDPHVGLMFPADAIARAKHYLAMAPGGLGAYSDSRGIPGIRKEVADFIHKRDGYPSDPELIYLTDGASKGVMQILNTIIRNEMDGILVPVPQYPLYSATISLYGGSLVPYYLEEEANWSLDFVNIRQTVAEARSKGISVRAMVMINPGNPTGQCLSEANIKELLQFCYHENLVLLADEVYQQNIYQDERPFISARKVMFDMGPPISSELQVVSFHTVSKGYWGECGQRGGYFEMTNLPPKTVDEIYKVASIALSPNVPGQIFMGVMVNPPKPGDISYLKFAAESKSIHESLRRRARMMTDGFNSCRNVVCNFTEGAMYSFPQIRLPPRAIEAARRAGKSADVFYCLKLLEATGISTVPGSGFGQKEGVFHLRTTILPAEEDFPAIMSSFKKFNDSFMEQYEGYSRL

SEQ ID NO: 49035 - protein, 396 aa, Thermoplasma volcanium GSS1
MENENVYLVDFKRTAFSRSRPNDPERDVFNSLRMDEAMAKLINIVIDETGIRPEEINDVITGCALQQDENWTYGGRHPILLANLPDNVPGMALDRACSSSLNAITIGAMEIMTGNADIVMAGGYEHMTHVPMSNSPFLKPNVKLLVRPEYMHYDMNTGYSMGLTAEKLASLHHIGREEMDQYALRSHQLASKALDDGYFKGEIVPMEVEIGGETKIIDSDQSIRKNTSLEEMQKLRPAFKDDGVITAGNSSPLNAGASLTLLMSEKKVKEYGLKPLSRIVSFGWAGVDPSIMGEGPVPATQKALAKAGMKVEDIDYWEINEAFAVVVLNAMKELGIEENKVNIHGGGISIGHPLGATGARIAGTLSRILNEKQAEYGVATLCVGGGQGYSVIFERY

SEQ ID NO: 49036 - protein, 381 aa, Zea mays
  misc_feature (46)..(46): Xaa can be any naturally occurring amino acid
  misc_feature (57)..(57): Xaa can be any naturally occurring amino acid
  misc_feature (65)..(66): Xaa can be any naturally occurring amino acid
  misc_feature (81)..(81): Xaa can be any naturally occurring amino acid
  misc_feature (85)..(85): Xaa can be any naturally occurring amino acid
  misc_feature (115)..(115): Xaa can be any naturally occurring amino acid
  misc_feature (124)..(124): Xaa can be any naturally occurring amino acid
  misc_feature (135)..(135): Xaa can be any naturally occurring amino acid
  misc_feature (144)..(144): Xaa can be any naturally occurring amino acid
  unsure (1)..(381): unsure at all Xaa locations
SRRRSFLWHEHDRTRQAQRGLLDVYQLHNNLTQKKKMDAFTHVPPXFRFHPTDEELXDYYLRKKXXLKKIDLDVIKDVDLXKIEXWDLQEKCRIGSEEQNEWYFFSHKDKKYPTXTRTNRATTXGFWKATGRDKXIYVKNCLVXGMRKTLVFYKGRAPNGQKSDWIMHEYRLETNNNGIPHEEGWVVCRVFRKRLATVQRMVGDSPYWFNDHAGFMAPELGSPRQAAHHQQNVMMYHRQQSSYSYPCKVELEYHHLLPQEHFLQQLPQLESPKLPDLIGQVDTTLQPACGLTQEHGAPRYTLQELQAEPLYLATGGDTDWRALDKFMASQLSHGDITPNKDSANNYSNPALQVIQQSEEKEEALDYVSTSASCGGDNDLWK

SEQ ID NO: 49037 - protein, 110 aa, Lolium perenne
MGRSPCCEKMGLKRGPWTAEEDKILVAHITSFGHGNWRALPKQAGLLRCGKSCRLRWINYLRPDIKRGNFSDEEEQSIIQLHQLLGNRWSAIAARLPGRTDNEIKNYWNT

SEQ ID NO: 49038 - protein, 346 aa, Arabidopsis thaliana
MSSTKDMSTVQNATPFNGVAPSTTVRVTIVQSSTVYNDTPATIDKAEKYIVEAASKGAELVLFPEGFIGGYPRGFRFGLAVGVHNEEGRDEFRKYHASAIHVPGPEVARLADVARKNHVYLVMGAIEKEGYTLYCTVLFFSPQGQFLGKHRKLMPTSLERCIWGQGDGSTIPVYDTPIGKLGAAICWENRMPLYRTALYAKGIELYCAPTADGSKEWQSSMLHIAIEGGCFVLSACQFCQRKHFPDHPDYLFTDWYDDKEHDSIVSQGGSVIISPLGQVLAGPNFESEGLVTADIDLGDIARAKLYFDSVGHYSRPDVLHLTVNEHPRKSVTFVTKVEKAEDDSNK

SEQ ID NO: 49039 - protein, 936 aa, Rhodopseudomonas palustris
MSSLNLSAGPEPVSERPDDAAAIEAETRLRNDIRLLGRILGDTVREQEGQTVFDLVENIRQTSIRFHRDDDKTARAELEAILDGMSIPDTMRIVRAFSYFSHLANIAEDQNNIRQMRAGSTAGSAPRAGLLAKTLAHARQEGISAAELRKFFATALVSPVLTAHPTEVRRKSTMDREMQIASLLDQRDRVQLTADEWADNEERLRRAVETLWKTNLLRRTKLTVLDEVTNGLSFYDYTFLREVPRLHSALEDRLADAAKAEGVNSDGELASFLRMGSWIGGDRDGNPFVTAEVLHGTLKLQSTRVLRYYLDELHELGSELSLASHLAGTTDTVKALAETSPDTSPHRKYEPYRLAVSGIYARLAATALKLEVENLRAPVGEAEPYASAQDFKADLDAIHLSLTQHNSGVIARGRLRQLRRAIDCFGFHLASLDMRQNSAVHERTITELMDAARPGTSYAMLDEEARIALLISELRSTRPLTSMFVKYSDETVGELAVFREAAKAHATYGAAAIPQCIISMTKGVSDLLEVAVLLKEVGLIDPSGRSAINVVPLFETIEDLQACAKIMDRLLSIPEYRRLVDSRGSVQEVMLGYSDSNKDGGFVTSGWELYKAEIGLIEIFEHHGVRLRLFHGRGGSVGRGGGPSYDAIVAQPGGAVNGQIRITEQGEIITRKYSNVEVGRNNLEILAAATLEASLLQPKRVAPHRDYLEAMEQLSALAFKAYRGLVYETDGFVDYFWASTVINEISTLNIGSRPASRKKTRAIEDLRAIPWVFSWAQCRLMLPGWYGFGSAVSAWVTAHPETGIAFLQKMYQEWPFFRTLLSNMDMVLSKSSIGIASRYAELVEDVDVRERIFGRIRAEWHSSIEYLFAIMQQDRLLQSNPLLERSIRHRFPYLDPLNHVQVQLLREHRTHDPDEQVLRGVQLTINGISAGLRNSG

SEQ ID NO: 49040 - protein, 316 aa, Escherichia coli
TDKLTSLRQYTTVVADTGDIAAMKLYQPQDATTNPSLILNAAQIPEYRKLIDDAVAWAKQQSNDRAQQIVDATDKLAVNIGLEILKLVPGRISTEVDARLSYDTEASIAKAKRLIKLYNDAGISNDRILIKLASTWQGIRAAEQLEKEGINCNLTLLFSFAQARACAEAGVFLISPFVGRILDWYKANTDKKEYAPAEDPGVVSVSEIYQYYKEHGYETVVMGASFRNIGEILELAGCDRLTIAPALLKELAESEGAIERKLSYTGEVKARPARITESEFLWQHNQDPMAVDKLAEGIRKFAIDQEKLEKMIGDLL

SEQ ID NO: 49041 - protein, 582 aa, Escherichia coli CFT073
MHNDKDLSTWQTFRRLWPTIAPFKAGLIVAGVALILNAASDTFMLSLLKPLLDDGFGKTDRSVLMWMPLVVIGLMILRGITSYISSYCISWVSGKVVMTMRRRLFGHMMGMPVSFFDKQSTGTLLSRITYDSEQVASSSSGALITVVREGASIIGLFIMMFYYSWQLSIILIVLAPIVSIAIRVVSKRFRNISKNMQNTMGQVTTSAEQMLKGHKEVLIFGGQEVETKRFDKVSNRMRLQGMKMVSASSISDPIIQLIASLALAFVLYAASFPSVMDSLTAGTITVVFSSMIALMRPLKSLTNVNAQFQRGMAACQTLFTILDSEQEKDEGKRVIERATGDVEFRNVTFTYPGRDVPALRNINLKIPAGKTVALVGRSGSGKSTIASLITRFYDIDEGEILMDGHDLREYTLASLRNQVALVSQNVHLFNDTVANNIAYARTEQYSREQIEEAARMAYAMDFINKMDNGLDTVIGENGVLLSGGQRQRIAIARALLRDSPILILDEATSALDTESERAIQAALDELQKNRTSLVIAHRLSTIEKADEIVVVEDGVIVERGTHNDLLEHRGVYAQLHKMQFGQ

SEQ ID NO: 49042 - protein, 399 aa, Lilium longiflorum
MESALASAAAITDQRQKIEQYKSILASILASPTADVPQAKRFIDHMVSDDVPLVVPRQILQMFAQEMGRLEADAQREIALYALAQIQSRVVSFEEQVLIIREKLAELYESEEQWSKAAQMLSGIDLDSGNRTIDEAYKLSKCVQIARLYLEDDDAINAEAFINKASFLVSNSQQEVLNLQYKVCYARILDLKRKFLEAALRYYDISQIEKRQIGDEEIDEDALEQALSAAVTCTILAAAGPQRSRVLATLYKDERCSKLKVYPILQKVYLERILRKPEIDAFAEELKAHQKALLPDNSTVLDRAMIEHNLLSASKLYTNISFEELGTLLGIAPQKPEKIAPRMFLEDRMKGSIDQVEAFIHFEDDPEELQQWDHQIMGLCQSLNEILDSMTRKGISIPV

SEQ ID NO: 49043 - protein, 197 aa, Methanosarcina mazei Go1
MVLGSKLLDNVKMHLCTCSAGLRPTPDMEAFLKMPMRELYVSLPIHMDDGSIKVFKGFRVQYNEALGPAKGGIRFHPDETMETIRALAALMTWKCALHRLPLGGAKGGIVCSPKELSHRELERLSRAYIRAVYQIIGPDRDIPAPDMYTNPQIMAWMMDEYSKLAGKMSSAQLQANPQVWEVLLAGLMQRLKVACMR

SEQ ID NO: 49044 - protein, 579 aa, Zea mays
MRLPLPLLALVCCALMARQHCAAAGKARHLRWEISNMFWSPDCEEKVVIGINGQFPGPTIRARAGDTVHVQLRNALHTEGVVIHWHGIRQIGTPWADGTAAISQCAINPEETFTYRFVVDKPGTYFYHGHYGMQRAAGLYGSLVVDVAEGEEEPFQYDGELNLLLSDWYHESIHTQMVALSSRPFRWIGEPQSLLINGRGQFNCSLAAAHMLGATNQCAATAANTQCAPVVLPVQPNKTYRLRVASTTSLASLNLAIGNHKLTVVEADGNYVDPFVVDDIDLYSGDSYSVLLTTDQDTSSNYWLSVGVRGRLPKTAPALAVLNYRPNRASDLPALAPPVTPAWDDYGHSKAFTYRIRARAGTPPPPPTAARRIELLNTQNRMDGRIRWSINNVSMVLPATPYLGSLKMGLKSTLAAARPAETFSREYDVTLPPPNPNTTVGDNVYVLAHNTTVDVLLQNANALSRNVSEVHPWHLHGHDFWVLGYGDGAYRGDAADEARLNLRDPPLRNTAVIFPYGWTMLRFVADNPGVWAFHCHIEPHLHMGMGVIFAEAVDLVAKVPNEAVSCGATATALMAGGHL

SEQ ID NO: 49045 - protein, 448 aa, Yarrowia lipolytica CLIB122
MSVFQTDVHATLPRTIGGKGTELTIEEDGQTRTVLDACGGAAVAALGHGNERMIAKIQQAAGLPYILSHGLGSKHADDLAKYLVEQSPEGSFSSAVFLNSGSEANEAALKLSKQYFVEKNEPKRVNYISRHFSYHGSTLGVLSLGGFQSRRKPYADVLNTSNFHKVSTCFYYRGAKPGQTEEEYTQQLLDELDAKFQHLGPETVISFTCETVIGATLGCVPPTKGYIKGCRDICHKYGALFVLDEVMSGMGRCGTYHAWQHEMDEGPDLQPVAKVLGGGYVPLAAVLISPKVYNVFKSGSGHVVGHQTYQDHIFATSVGLELQKIIKEDQLVERSRFLGLKLEKMLKKALANNPNVGDIRGRGLFWDVEFVQDKETKKAFPRAVGFSTKVYKAGMKRGVHFLKGVGTVDSFEGDHIILSPPYTVSEEELTKIVDVLKASVEEAQGESL

SEQ ID NO: 49046 - protein, 454 aa, Zea mays
MKRRGGRLWYAAAGALLVALLAVAVSYRSFPGVPSSPSSPGSCGCPAARKYTGMVEDCCCDYETVDAINEEVLHPILQELVKLPFFRYFKVKLWCDCPFWPDDGMCKLRDCSVCECSENEFPEPFRKPYSGLSPDSMMCQEGKPQAAVDKTLDSKVFKRWVETDNPWTSDDETDNNEMTYVNLQLNPERYTGYTGDSARRIWDAIYKENCPKYPSEELCHEKKALYKLISGLHSSISVHIAYDYLLDESTNSWGQNLSLLYDRVLKYPERVQNLYFTYLFVLRAVTKAADYLEQAEYNTGNPEDDLKTESLVKQLLYNSKLRSACPLPFDEAKLWQGENGPELKQEIQKQFRNISAIMDCVGCEKCRLWGKLQVLGLGTALKILFSVDGDSHLNQPLQLQRNEVIALLNLLNRLSESVKFVHEKGSSVEEVINEQSPSTVQKGASKTNLKLDFL

SEQ ID NO: 49047 - protein, 473 aa, Schizosaccharomyces pombe
MTNTRLASTRRLASSLLSQASLRSRQLNPLFTSSYSTRSSSLKDRLAELIPEKQAEIKKFRAEHGQDVIGEVTINQMYGGARGVRSLIWEGSVLDPNEGIRFRGYTIPECQKLLPSSPNGKQPLPESLFWLLVTGEIPTLSQVQALSADWAARSQLPKFVEELIDRCPPTLHPMAQFSLAVTALEHDSAFAKAYERGMNKHDYWKYEYEDCMDLIAKTVPIAGRIYRNLYRDGVVAPIQMDKDHSYNFANVLGFANNEEFVELMRLYLTIHADHEGGNVSAHTGHLVGSALSSPFLSMAASLNGLAGPLHGLANQEVLNFLITMKKEIGDDLSEETIKSYLWKLLNSGRVVPGYGHAVLRKTDPRYTAQREFALEHLPKDPMFQLVSRLYEIVPGVLTEHGKTKNPYPNVDSHSGVLLQYYGLKEQSFYTVLFGVSRTLGVASQLIWDRALGLPIERPKSFSTEALKKMVETK

SEQ ID NO: 49048 - protein, 140 aa, Rhodopseudomonas palustris CGA009
MAIERTFSILKPDATERNITGAINALIEKAGLRIVAQKRIRMTRDQAETFYAVHKERPFFGELVDFMISGPVVVQVLEGEGAIAKYRDVMGATDPSKAADGTIRKLHAKSIGENSVHGSDAAETAKIEIAQFFSGNEIVG

SEQ ID NO: 49049 - protein, 303 aa, Physcomitrella patens
MDQYEKVEKIGEGTYGVVYKARDRLTNETIALKKIRLEQEDEGVPSTAIREISLLKEMHHGNIVRLQDVVHSEKRLYLVFEYLDLDLKKHMDTCPDLAKDPRLIKTFLYQILRGIAYCHAHRVLHRDLKPQNLLIDRRTNALKLADFGLARAFGIPVRTFTHEVVTLWYRAPEILLGSRHYSTPVDVWSVGCIFAEMVNQRPLFPGDSEIDELFKIFRTLGTPNEEVWPGVTSLPDFKTAFPKWPPKPLSSVVPSLEPAGIDLLEVCDLSTPASEFCVVLFFFIISTFSLIVRLKQCMQSYAS

SEQ ID NO: 49050 - protein, 686 aa, GIBBERELLA ZEAE PH-1
MSDWTSGIMPLHQVHKAPFTVEAPGYEKIPGETIPRRHPKAKDGLINYPAPDARTVFQIAERSARLYPNHHAVGARKLIKMHNEKKKIKKNVDGEVQEVEKEWSYFELTGFEYLTYKQYLERVLQIGSGLRKVGLTSEDKLHVFGTTSIGWISTSHAAASQSISIVTAYDTLGPSGVEHSLVETNCAAMYVDSQLLKTASEPIKKSSVKVVIVNDRTIFSKGGELEKFKADHPDLKVITLEELRKLGEENPVEPNPAKPEDLYCIMYTSGSTGLPKGACITHEALVAGKCVSDKECILAYLPLAHIFEMALENLVMYIGGTLGYGNPRTLSDASMKNCAGDMREFKPTVMVGVPQIWETVRKGITAKLEAASPLLKNLFWGAYNWKAFASKNKLPFAGLFDSLVFGKVRELTGGRMRFTMNGASGISDGTKNFISLVVAPMLAGYGLTETCANGSLGCPLEFSPDAIGPTPCACDVKLVALPDLGYSTEAKVPQGEIWIRGLPVMTKYWNNPEETEKALTPDGWFKTGDIGEFNEQGHLRVFDRVKNLVKMQGGEYIALEKLESVYRGVQSVGNVMVHADPEHSRPIAVIMPNEKVMQDKAKELGIDEHNLHTLHTNPKMVSFVLKDLQTAAKRAGLSGMETVTGVLITDEEWTSDNGLLTATQKLNRRKITEHFKKDIAATLERS

SEQ ID NO: 49051 - protein, 449 aa, Physcomitrella patens
MREIISIHIGQAGIQVGNACWELYCLEHGIQPDGRMPSDTTVGGGDDAFNTFFSETGAGKHVPRAVFVDLEPTVIDEVRTGTYRQLFHPEQLISGKEDAANNFARGHYTVGKEIVDLCLDRVRKLADNCTGLQGFLVFNAVGGGTGSGLGSLLLERLSVDYGKKSKLGFTIYPSPQVSTAVVEPYNSVLSTHSLLEHTDVAVLLDNEAIYDICRRSLDIERPTYTNLNRLISQIISSLTTSLRFDGALNVDITEFQTNLVPYPRIHFMLSSYAPVISAEKAYHEQLSVPEITNAVFEPSSMMAKCDPRHGKYMACCLMYRGDVVPKDVNAAVATIKTKRTVQFVDWCPTGFKCGINYQPPTVVPGGDLAKVQRAVCMISNNTAVAEVFSRIDHKFDLMYAKRAFVHWYVGEGMEEGEFSEAREDLAALEKDYEEVGAESTDGGPEDDDY

SEQ ID NO: 49052 - protein, 717 aa, GIBBERELLA ZEAE PH-1
MMSWWSSSANTALDEQIEKATSSSLEDIALNLEISDVIRSKTVAPKEAMRSLKKRIGNKNPNTQLSALNLTDTCVKNGGSHFLAEVASREFMDNLVSLLQAVGGAAVNADVKSKILELIQSWAGATEGRYELSYIGEVYRTLQRDGYQFPPKTSVASSMIDSSAPPEWTDSDVCMRCRTPFTFTNRKHHCRNCGNCFDQQCSAKVVALPHLGIMAPVRVDDGCYAKLTNKGHKLPNPSLDRSPTYPHKTRSTSAMQPRNARVDDGFDEDLKKALAMSLEEVKTHSHGFTGPVQASHVTDGNASVAKQAEEEDDDLKAAIAASLADMEEQKKRHATALKEQTSSSVNASSSANFVLPKNDYELTPVEAENINLFATLVDRLQTQPPGTILREPQIQELYDSIGTLRPKLARTYGETMSKHDTLLDLHAKLSTVVRYYDRMLEDRLSKAYSQQSLGGYNLPPTHQPSGPYPSISSQMPSNPGAAENFYTGQQQASYQASPQHQHYQQPPHATPQPQYPPYGSAPEPQPGQYPPQHVQGSDSWQNRAPSAPQDQYQQQQPQNPQPPQAPVPSDPNASYYFTPQQPQQAPLGPSAPGAAPDAAQSPYPSLQSPSQYPGGSVPVPSQPTPGQTPSQPAQAPQQPVQSPQLQHSQPQQPQMGQQAPPPQQQAYWQPSMPQQHQQPSAAPQNWAYGGYTQDSFPSVPQQEPAKQPAKEEALIEF

SEQ ID NO: 49053 - protein, 367 aa, Arabidopsis thaliana
MGHLIPQTGDEETELGLAAVRLANCAAFPMVFKAAIELGVIDTLYLAARDDVTGSSSFLTPSEIAIRLPTKPSNPEAPALLDRILRLLASYSMVKCQIIDGNRVYKAEPICRYFLKDNVDEELGTLASQLIVTLDTVFLNTWGELKNVVLEGGVAFGRANGGLKLFDYISKDERLSKLFNRTGFSVAVLKKILQVYSGFEGVNVLVDVGGGVGDTLGFVTSKYPNIKGINFDLTCALTQAPSYPNVEHVAGDMFVDVPKGDAILLKRILHDWTDEDCEKILKNCWKALPENGKVIVMEVVTPDEADNRDVISNIAFDMDLLMLTQLSGGKERSRAEYVAMAANSGFPRCNFVCSAYHLWVIELTKQA

SEQ ID NO: 49054 - protein, 253 aa, Zea mays
  misc_feature (44)..(44): Xaa can be any naturally occurring amino acid
  unsure (1)..(253): unsure at all Xaa locations
MAAGFEALLDSTALSLALPVPVPTMTLLGLKKLNSEDYLAICLXAALAGTRGRSGLSKAAAAAAGFGRQEGGGSRKQWSCPPPAPAREEEELRFRCAVCGKAFASYQALGGHKSSHRRPPTGEQYAAALAAAQQAAGSAAGHSEETTTTSGGPHRCTICWRGFATGQALGGHKRCHYWDGSSVSVSLSATASATGTGTGSSGVTVRNFDLNLMPVPESDGMRRWVEEEEEVQSPLPIKKRRISNPSLTLATCD

SEQ ID NO: 49055 - protein, 462 aa, Xanthomonas campestris pv. vesicatoria str. 85-10
MPLPTDSVAETAAPAAPALRHALKPRQLMMMGLGTAIGAGLFLGSGVGIHAAGPAVLISYLIAGALVIIVMNALGEMAAAKPASGAFSVYAADAMGPTAGATVGWLWWFQVVVVIAAEAVGAAGLLATVWPALPVPLLALLFMATFTAINLLGVRNFGEFEFWFAILKVLAIVVFLLIGVALLAGWLPGVASPGLSNFTQNGGFAPKGLAGIGSALLVVVFAFGGTEIVAVAAAETADPGRSLARTIRTVAWRILVFYIGSISVIVAVVPWTSAALSSPFAAVLDVARIPGAATAITLVAVVALLSALNANLYGASRMIFSLAQRGEAPRLLARTSGEQVPLVAVIASVLFGFAAAALELLYPNKVLPMLLNIVGATCLLVWTISLVSQLILRARADRAGLALPFRMRGYPFLTVLALVILGVIFVLLASSADTRAQFLSMVALTAVIAAVSEVARRLRARM

SEQ ID NO: 49056 - protein, 338 aa, Sclerotinia sclerotiorum
MAPTKVGINGFGRIGRIVFRNAIEHDDIDIVAVNDPFIETEYAAYMLKYDSTHGQFKGDIKVLSDGLEVNGKKVKFYTERDPANIPWAESEAYYVVESTGVFTTTEKAKAHLKGGAKKVVISAPSADAPMYVMGVNNETYNGEADVISNASCTTNCLAPLAKVINDEFTIIESLMTTIHSYTATQKTVDGPSAKDWRGGRTAAQNIIPSSTGAAKAVGKVIPELNGKLTGMSMRVPTATVSVVDLTVRIEKAASYDEIKEVIKKAANGPLKGILAYTEDDVVSTDMNGDNHSSIFDAKAGISLNKNFVKLVSWYDNEWGYSRRVLDLLHYISKVDNKQ

SEQ ID NO: 49057 - protein, 441 aa, Salmonella typhimurium
MIRGKIDILVVDDDVSHCTILQALLRGWGYNVALAYSGHDALAQVREKVFDLVLCDVRMAEMDGIATLKEIKALNPAIPILIMTAFSSVETAVEALKAGALDYLIKPLDFDRLQETLEKALAHTRETGAELPSASAAQFGMIGSSPAMQHLLNEIAMVRPSDATVLIHGDSGTGKELVARALHACSARSDRPLVTLNCAALNESLLESELFGHEKGAFTGADKRREGRFVEADGGTLFLDEIGDISPLMQVRLLRAIQEREVQRVGSNQTISVDVRLIAATHRDLAEEVSAGRFRQDLYYRLNVVAIEMPSLRQRREDIPLLADHFLRRFAERNRKVVKGFTPQAMDLLIHYDWPGNIRELENAIERAVVLLTGEYISERELPLAIAATPIKTEYSGEIQPLVDVEKEVILAALEKTGGNKTEAARQLGITRKTLLAKLSR

SEQ ID NO: 49058 - protein, 468 aa, Heliobacillus mobilis
MSSRGLKVCIQKFDPYINIDPGTMSPYQHGEVFVTDDGAETDLDLGHYERFVDVNLSKASNVTTGKIYWSVISKERKGEYLGGTVQVIPHITNEIKERVLRVARESSPDVVITEIGGTVGDIESLPFLEAIRQMKSDVGRDRVIYIHVTLMPFISAAGELKTKPTQHSVKELRSIGIQPDIIVCRTEKAFPQELEEKIALFCDIDPAAVIQMVDAETIYEVPLLLKKEELDDIVIEKLKLTCGEPDLKDWEALVHKIKNPKQQVTIGLVGKYVALPDAYMSVAESLRHAGIHHNASVKIKWIYSADLEGAPPEDFLSDVDGILVPGGFGDRGIEGKISALRYARENKIPLLGICLGMQLAVVEYGRNVLGWEDANSSEFSETTTHPVIDLLPEQKDVEEKGGTMRLGIWACRVNKGTKTWDAYQDEVIYERHRHRYEFNNNYREAIEKAGMIISGTSPDGRLVEVVEL

SEQ ID NO: 49059 - protein, 165 aa, Aloe vera
SGYSLLRDPHHNKGLAFTDKERDAHYLRGLLPPVCISQELQEKKLMRSLRQYQVPLQRYMAMMDLQERNERLFYKLLIDNVEELLPVVYTPTVGEACQKYGCIFKRPQGLYISLKEKGKILEVLKNWPERSIQAIVVTDGERILGLGDLGSQGMGIPVGKLSLYT

SEQ ID NO: 49060 - protein, 536 aa, Petunia integrifolia subsp. inflata
MGTCMSVQNASFLKRTRNRPVPIDQETCSKNTSRTSVPKSQKFSRPLNVVKDPSGDDINKRYEFGKELGRGEFGITYHCVDKVSGENVACKTIAKSKLRTEIDVEDVRREVVIMRHLPKHPNIVSYKEVYEDKEAVYLVMELCEGGELFDRIVARGHYTERAAARVTKTILEVVKVCHEHGVIHRDLKPENFLYANATENAQLKAIDFGLSIFFEPGQRFSEIVGSPYYMAPEVLRRNYGPEVDVWSAGVILYILLCGVPPFWAETEEGIAHAIVKGTIDFNRDPWPRVSEEAKDLVKGMLDPNPYNRLTVEEVLDHYWIQNAEKVSNICLGEGVRAKIKQFTLMNKFKKKVLRVVADNLPQDQVHGIKQMFYMMDTDKNGNLSFQELKDGLHLMGQAVADPEVQLLMDAADVDGNGMLNCEEFVTMAVHLKRLSNDDHLRKAFLHFDKNKSGYIEFEDLKDSLFDDHLGPKNDQVIHDIIFDADLDKDGRISYQDFKVMMSTGTDWKMGSRQYSKAMLNALSMRLFKDKSIQVKN

SEQ ID NO: 49061 - protein, 446 aa, Pseudomonas syringae pv. tomato str. DC3000
MANVSMEAKGLLILGFPIAATMIAQTLMSLTDLMLVSRLGEKQVAGVSLGIAVYSFGMLFGLGVITAVTPMIAKAYGRKDFNAVSNYTRQGLWVAALVAMPGVIALILTRSILLFLNVEAETANIASDYCVGALMGLPAFLIYVNLRCFLSAIGRPKTTTWIMFLAVPVNYIIGHVLIFGVMDAEGLGITGAGLASSVTRLAILSTVIATLKYGADFKCFSLFENVMNVKPVVVKKIVLLGLPVGVRILLAEGMLPIIALLISTLGTIDLVAHMVAVRLSGVSAVIALGFSSAASTRVAWQVAANNQNGVRVTGYVASALAFGVSALLAMLLIFFPTELVMLLFDIDDAEVLALTSHLLKVVAAYQILNAIQTAVVGSLLGVSDTKIPTCLVLIGNWLVGLASAYGLVVLFEATVTAVWGGLVLGQVFVVVTCLCRFHMKTKALHE

SEQ ID NO: 49062 - protein, 483 aa, Zea mays
MDGPKRSQLRVRLRVTARRRGADGDGAGGAAGPGGRKRRMEAPVRNSVAKLQRREIGGRQLAARGGGPAAAVPERFRNMQLQEEFDTYDENAHLFVKLQFLKRRSKIIEIVAAKDIIFALANSGLCAAFDRVTNKRIAFLNLSPDEVIRSLFYNKNNDSLITVSVYAADNFSTLKCRTTPIEYIRRNQLDAGFPLFESESLKWPGFVEFDDVNGKVLTYSAQDGIYKVFELKNYSFLYSIPDENVQEIKISPGIMLLIYDRTPSYVPLKILSIEDGKQLKSFKHLLHRNKKIDFIEQFNEKLLVKQENENFQIFDVRSSELIEVSVSKFMTPSAFIFLYENNLFLTFRNRTVAVWDFRGELVTSFEDHLLWHNDCSTNNIYITSDQDLIISYCKSEAVAEDGTVVPVGSINISEIMTGRCIAKITANDPSLSVPGRRNGYSKRSSDWSTVPEALEDVTALFYDEDRNEIYTGNSHGLVHVWSN

SEQ ID NO: 49063 - protein, 556 aa, Bacillus cereus ATCC 14579
MTMNKTWWKEAVAYQIYPRSFMDSNGDGIGDLQGIIAKLDYLKDLGIDVIWICPMYKSPNDDNGYDISDYQDIMDEFGTMADFDALLDEVHKRDMKLIIDLVINHTSDEHPWFIESRSSKDNPKRDWYIWHDGKDGAEPNNWESIFNGSAWEYDEETEQYYLHLFSRKQPDLNWENKEVREVLYDTVNWWLDKGIDGFRVDAISHIKKEEGLKDMPNPKGLKYVPSFDKHMNVKGIQPLLEELKENTFSKYDIMTVGEANGVKIEDAELWVGEEQGKFNMVFQFEHLSLWDAEKKKDLDVVGLKKVLTKWQKGLENKGWNALYIENHDKPRIVSTWGDDKQYWRESATALGAMYFFMHGTPFIYQGQEIGMTNVQLPNIEDYDDVAIKNLYREKIAEGVPHQDMMEIIWASCRDNSRTPMQWNDEMNAGFTTSTPWFSMNPNYKEINVEKQKNEEKSIFNFYKKMIALKKEHDVLNYGTYDLLLEDDPQIYAYTRTLQDEKVIVISNISKEEAVYNEGSFALERKRLLLNNYEVAEHEEVTTIALKPYETRVYRIS

SEQ ID NO: 49064 - protein, 184 aa, Arabidopsis thaliana
MKRKGVDEFPFCVHLVSWEKENVSSEALEAARIACNKYMVKSAGKDAFHLRIRVHPFHVLRINKMLSCAGADRLQTGMRGAFGKALGTCARVAIGQVLLSVRCKDNHGVHAQEALRRAKFKFPGRQKIIVSRKWGFTKFNRAEYTKLRAMKRIVPDGVNAKFLSNHGPLANRQPGSAFISATSE

SEQ ID NO: 49065 - protein, 532 aa, Petunia integrifolia subsp. inflata
MGNCCSRGQPNESNDHTESISTAKNGDGKVMQGGSVTPPKTPPPASPDPSSKPSKTSPIGPVLGRPMEDVRKTYSIGKELGRGQFGVTHLCTHKQSGEQFACKTIAKRKLVNKEDIEDVKREVQIMHHLTGQQNIVELKGAYEDKHSVHLVMELCAGGELFDRIIAKGHYTERAAATLLRTIVQIGHTCHSMGVIHRDLKPENFLLLNKDEDSPLKATDFGLSVFYKQGDVFKDIVGSAYYIAPEVLKRRYGPEVDIWSVGVMLYILLSGVPPFWAETEHGIFNAILRGHIDFSCDPWPAISHGAKDLVRKMLTIDPKQRLTAIQVLNHPWIKEDGDAPDTPLDNAVLSRLKQFRAMNNFKKVALRVIAGCLSEEEIMGLKQMFKSMDTDNSGAITLEELKTGLAKQGTKLSDYEIQQLMEAADADGNGTIDYEEFITATMHMNRMDKEEHLYTAFQYFDKDNSGYITVEELEQALREFGITDGKDIKDIVAEVDSNNDGRINYDEFVAMMKKGTPDTAANLKKRRESFDAK

SEQ ID NO: 49066 - protein, 547 aa, Ralstonia solanacearum
MAAKDVVFGDAARAKMVEGVNILANAVKVTLGPKGRNVVLERSFGGPTVTKDGVSVAKEIELKDKLQNMGAQMVKEVASKTSDNAGDGTTTATVLAQSIVREGMKYVAAGMNPMDLKRGIDKAVAAAVEELKKISKPTTTSKEIAQVGAISANSDESIGARIAEAMDKVGKEGVITVEDGKSLEDELDVVEGMQFDRGYLSPYFINNPEKQVVQLDNPFVLLFDKKISNIRDLLPVLEQVAKAGRPLLIVAEDVEGEALATLVVNNIRGILKTAAVKAPGFGDRRKAMLEDIAILTGGQVIAEEVGLTLEKATLNDLGQAKRVEIGKENTTIIDGAGDARNIEARVKQVRAQIEEATSDYDREKLQERVAKLAGGVAVIKVGAATEVEMKEKKARVEDALHATRAAVEEGIVAGGGVALLRARALISGLKGANADQDAGIKIVLRAMEEPLRQIVTNAGDEASVVVANVIAGKGNYGYNASTGEYGDLVEMGVLDPTKVTRTALQNAASVASLMLTTDCAVAELPKDDAAPAMPGGMGGMGGMDGMM

SEQ ID NO: 49067 - protein, 323 aa, Haloarcula marismortui ATCC 43049
MSYKVVVSDTKVMHGETRAAVLDAVDATVETIAAKEPEAVARAVDGADALIVDAGTQVTAEVIEAADSLKVVGRAGIGMDNIAVRAAVAAGVTVVNVPDYSVEEVSTHTFALMLACLRRIPTFDRSVKRGEWKWAVGQPIRRLAGSTVGLVAFGKLASRFAAKLRGFDIDVIAYDPYAPEYRMGDLGVESVTLETLLGDSDIVSLHAPLTDETRGMIDADALDRMHDDALLVNTARGGLVDETALYDALISGDLGGAGLDVRKPEPPGDSPLHDLDSVVCSPHVAWYSEESRVELTQTVAEDVIRVLRGEQPENPIDPETGWF

SEQ ID NO: 49068 - protein, 545 aa, Prunus dulcis
NYAAKDIKFGVEARALMLKGVEELADAVKVTMGPKGRNVVLEQSFGAPKVTKDGVTVAKSIEFRDKVKNIGASLVKQVANATNDAAGDGTTCATVLTRAIFTEGCKSVAAGMNAMDLRRGISMAVDSVVTNLKSRARMISTSEEIAQVGTISANGEREIGELIAKAMEKVGKEGVITIADGKTLYNELEVVEGMKLDRGYISPYFITNPKNQKCELEDPLVLIHEKKISNLNSIVKILELALKKQRPLLIVAEDVESEALATLIINKLRAGIKVCAIKAPGFGENRKANLQDLAILTGGEVITEELGLNLDKVGVETLGTCKRVTISKDDTVILDGAGDKKAIEERCEQLRSSIELSTSDYDKEKLQERLAKISGGVAVLKIGGASEAEVSEKKDRVTDALNATKAAVEEGIVPGGGAALLYASKELDKLATANFDQKIGVQIIQNALKMPVSTIASNAGVEGAVVVGKLLEQDNPDLGYDAAKGEYVDMIKAGIIDPLKVIRTALVDAASVSSLMTTTEAVVVELPKDEKETPGMGGGMGGMDY

SEQ ID NO: 49069 - protein, 420 aa, Arabidopsis thaliana
MGDNLMDKVTAFGMGDNLMDKVTAFSERLKIGGSEVSNKISAGVSSMSFKVKELFQGPNPTDKIVEDATTENLEEPDWDMNLEICDMINQETINSVELIRGIKKRIMMKQPRIQYLALVLLETCVKNCEKAFSEVAAERVLDEMVKLIDDPQTVVNNRNKALMLIEAWGESTSELRYLPVFEETYKSLKARGIRFPGRDNESLAPIFTPARSTPAPELNADLPQHVHEPAHIQYDVPVRSFTAEQTKEAFDIARNSIELLSTVLSSSPQHDALQDDLTTTLVQQCRQSQTTVQRIIETAGENEALLFEALNVNDELVKTLSKYEEMNKPSAPLTSHEPAMIPVAEEPDDSPIHGREESLVRKSSGVRGGFHGGGGSGDDMMDDLDEMIFGKKNGCDSSTNPDHDPKKEQSSSKNDDLIRF

SEQ ID NO: 49070 - protein, 477 aa, Streptococcus pneumoniae TIGR4
MKILFVAAEGAPFSKTGGLGDVIGALPKSLVKAGHEVAVILPYYDMVEAKFGNQIEDVLHFEVSVGWRRQYCGIKKTVLNGVTFYFIDNQYYFFRGHVYGDFDDGERFAFFQLAAIEAMERIDFIPDLLHVHDYHTAMIPFLLKEKYRWIQAYEDIETVLTIHNLEFQGQFSEGMLGDLFGVGFERYADGTLRWNNCLNWMKAGILYANRVSTVSPSYAHEIMTSQFGCNLDQILKMESGKVSGIVNGIDADLYNPQTDALLDYHFNQEDLSGKAKNKAKLQERVGLPVRADVPLVGIVSRLTRQKGFDVVVESLHHILQEDVQIVLLGTGDPAFEGAFSWFAQIYPDKLSTNITFDVKLAQEIYAACDLFLMPSRFEPCGLSQMMAMRYGTLPLVHEVGGLRDTVRAFNPIEGSGTGFSFDNLSPYWLNWTFQTALDLYRNHPDIWRNLQKQAMESDFSWDTACKSYLDLYHSLVN

SEQ ID NO: 49071 - protein, 396 aa, Escherichia coli CFT073
MFENITAAPADPILGLADLFRADERPGKINLGIGVYKDETGKTPVLTSVKKAEQYLLENETTKNYLGIDGLPEFGRCTQELLFGKGSALINDKRARTAQTPGGTGALRVAADFLAKNTSVKRVWVSNPSWPNHKSVFNSAGLEVREYAYYDAENHTLDFDALINSLNEAQAGDVVLFHGCCHNPTGIDPTLEQWQTLAQLSVEKGWLPLFDFAYQGFARGLEEDAEGLRAFAALHKELIVASSYSKNFGLYNERVGACTLVAADSETVERAFSQMKAAIRANYSNPPAHGASVVATILSNDALRAIWEQELTDMRQRIQRMRQLFVNTLQEKGANRDFSFIIKQNGMFSFSGLTKEQVLRLRQEFGVYAVASGRVNVAGMTPDNMAPLCEAIVAVL

SEQ ID NO: 49072 - protein, 248 aa, Borrelia burgdorferi
MYKLVLVRHGESEWNKENLFTGWTDVKLSDKGIDEAVEAGLLLKQEGYSFDIAFSSLLSRANDTLNIILRELGQSYISVKKTWRLNERHYGALQGLNKSETAAKYGEDKVLIWRRSYDVPPMSLDESDDRHPIKDPRYKHIPKRELPSTECLKDTVARVIPYWTDEIAKEVLEGKKVIVAAHGNSLRALVKYFDNLSEEDVLKLNIPTGIPLVYELDKDLNPIKHYYLGDESKIKKAMESVASQGKLK

SEQ ID NO: 49073 - protein, 394 aa, Arabidopsis thaliana
MNSFSQVPPGFRFHPTDEELVDYYLRKKVASKRIEIDIIKDVDLYKIEPCDLQELCKIGNEEQSEWYFFSHKDKKYPTGTRTNRATKAGFWKATGRDKAIYIRHSLIGMRKTLVFYKGRAPNGQKSDWIMHEYRLETSENGTPQEEGWVVCRVFKKKLAATVRKMGDYHSSPSQHWYDDQLSFMASEIISSSPRQFLPNHHYNRHHHQQTLPCGLNAFNNNNPNLQCKQELELHYNQMVQHQQQNHHLRESMFLQLPQLESPTSNCNSDNNNNTRNISNLQKSSNISHEEQLQQGNQSFSSLYYDQGVEQMTTDWRVLDKFVASQLSNDEEAAAVVSSSSHQNNVKIDTRNTGYHVIDEGINLPENDSERVVEMGEEYSNAHAASTSSSCQIDL

SEQ ID NO: 49074 - protein, 380 aa, Streptococcus pneumoniae TIGR4
MKNEMLALILAGGQGTRLGKLTQSIAKPAVQFGGRYRIIDFALSNCANSGIHNVGVVTQYQPLALNNHIGNGSSWGLDGINSGVSILQPYSASEGNRWFEGTSHAIYQNIDYIDSVNPEYVLILSGDHIYKMDYDDMLQSHKDNNASLTVAVLDVPLKEASRFGIMNTDANNRIVEFEEKPAQPKSTKASMGIYIFDWQRLRNMLVAAEKSKVGMSDFGKNVIPNYLESGESVYAYEFSGYWKDVGTIESLWEANMEYISPENALDSRNRQWKIYSRNLISPPNFLGANAHVEDSLVVDGCFVDGTVKHSILSTGAQVREGAEVLDSVIMSGAIIGQGAKIKRAIIGEGAIISDGVEIDGTDEVQVVGYNEVVGVATDED

SEQ ID NO: 49075 - protein, 375 aa, Geobacillus kaustophilus HTA426
MAEKPAQSKQAEAAGESLEQVKEQLAELGKKRGILTYEEIAERLSGFDLDSDQMDEYYEYLAEQGIEVISESDLEADPDIDDLAKEEEFDLNDLSVPPGVKINDPVRMYLKEIGRVPLLSAEEEIELAKRIEQGDEEAKRRLTEANLRLVVSIAKRYVGRGMLFLDLIQEGNMGLIKAVEKFDYRKGYKFSTYATWWIRQAITRAIADQARTIRIPVHMVETINKLIRVQRQLLQDLGREPTPEEIAEEMDLTPEKVREILKIAQEPVSLETPIGEEDDSHLGDFIEDQDATSPSEHAAYELLKEQLEDVLDTLTDREENVLRLRFGLDDGRTRTLEEVGKVFGVTRERIRQIEAKALRKLRHPSRSKRLKDFLE

SEQ ID NO: 49076 - protein, 500 aa, Oryza sativa
MDRARLAVLSAHLASPAAACGEADAAGPLERSAASAGARGGALAVVDGRTGKRYEVKVSDEGTVRATDFKKITTGKDDKGLKIYDPGYLNTAPVRSSICYIDGDEGILRYRGYPIEELAESSSFVEVAYLLMYGSLPTQSQLAGWEFAISQHSAVPQGLLDIIQAMPHDAHPMGALASAMSTLSVFHPDANPALRGQDLYKSKQVRDKQIVRVLGKAPTIAAAAYLRLAGRPPILPTNSLSYSENFLYMLDSLGDKEYKPNPRLARVLDILFILHAEHEMNCSTAAARHLASSGVDVFTALSGAVGALYGPLHGGANEAVLKMLNEIGSVENIPDFIEGVKNRKRKMSGFGHRVYKNYDPRAKVIRKLAEEVFSIVGRDPLIEVAVALEKAALSDDYFVKRKLYPNVDFYSGLIYRAMGFPTEFFPVLFAIPRMAGWLAHWKESLDDPDTKIMRPQQVYTGVWLRHYTPVRERVPASQGEQLGQIATSNATRRRRAGSAL

SEQ ID NO: 49077 - protein, 536 aa, Staphylococcus aureus subsp. aureus MRSA252
MTKFIFVTGGVVSSLGKGITASSLGRLLKDRGLNVTIQKFDPYLNVDPGTMSPYQHGEVFVTDDGAETDLDLGHYERFIDINLNKFSNVTAGKVYSHVLKKERRGDYLGGTVQVIPHITNEIKERLLLAGESTNADVVITEIGGTTGDIESLPFIEAIRQIRSDLGRENVMYVHCTLLPYIKAAGEMKTKPTQHSVKELRGLGIQPDLIVVRTEYEMTQDLKDKIALFCDINKESVIECRDADSLYEIPLQLSQQNMDDIVIKRLQLNAKYETQLDEWKQLLDIVNNLDGKITIGLVGKYVSLQDAYLSVVESLKHAGYPFAKDIDIRWIDSSEVTDENAAEYLADVDGILVPGGFGFRASEGKISAIKYARENNVPFFGICLGMQLATVEFSRNVLGLEGAHSAELDPATPYPIIDLLPEQKDIEDLGGTLRLGLYPCSIKEGTLAQDVYGKAEIEERHRHRYEFNNDYREQLEANGMVISGTSPDGRLVEMVEIPTNDFFIACQFHPEFLSRPNRPHPIFKSFIEASLKYQQNK

SEQ ID NO: 49078 - protein, 712 aa, Candida albicans SC5314
MFKFKNKLKFGTSSSEKQQTPTTTTDTSTPSPAPASPSTSTSTQHSSTSVKDSPTPRQSTDSRNTISVNNLADDVSKLTVAADRSPEKSLGSNNKAGGEPPLSTTATDTTSNSSYRASPSSSQATSLLGQASTGSDQSTQAASPGLLTVKIYGSQNIQLPIKINNTKQILHALAINANNESVGQKLLKNLSALEKENTEIGDYLPGSIATNFLPSIITIPNAENMVKSLLYLTIEFDNNVLVIEPQRGTVNQSTWNQVVSFDVSKKSQQENGHSTMGSNFLNLNLFIRLPNMLIPENEKTSKKHLFTNFQQGQGTGSDGGNNIGDLLIGTIKLPLNLKCHTQQIRLMNHEYLKFSNFNAGLQDLVSNDMGEIMLTIEFKPLTKKRLSIEDFDLLKLLGRGSFGKVMQVVKKDTKQIYALKIIRKQHIVSRSEVTHTLAERTVLARINNPFIVPLKFSFQSPEKLYLVLSFINGGELFWHLQREGKFSMDRSRFYIAELLTALESLHELNVIYRDVKPENILLDYQGHIALCDFGLCKLNMSNDDKTNTFCGTPEYLAPELLLNQGYTRSVDWWTLGTLLYEMLTGLPPFYDDDVPSMYKKILQNPLRFPAFLEGTDAQDLLIKLLQKDPSLRLDEASEIKSHPFFKDIDWNKLLNKSYLPPFKPNVENLLDTSNFDPDFTNEKPQDSVVDDFLTESVQKQFGGWTYNGDNVL

SEQ ID NO: 49079 - protein, 466 aa, Vibrio parahaemolyticus RIMD 2210633
MAHVNHYDVIVIGSGPGGEGAAMGLTKAGLNVAIVEKESSVGGGCTHWGTIPSKALRHAVSRIIEFNSNPLFCRNNTSLHATFSDILGHAKTVIDKQTRLRQGFYDRNDCTLLFGTARFIDTHSIAVMQNDGTEETYSADKFVIATGSRPYRPSDVDFLHERIYDSDSILSLKHDPRHIIIYGAGVIGCEYASIFRGLGVKTDLINTRDRLLEFLDNEVSDALSYHFWNSGVVIRNDETYEKIEGTEDGVIIHLQSGKKMRADCLLYANGRTGNTDKLSLDVVGLESDSRGQLKVNRNYQTAVEHIYAVGDVIGYPSLASAAYDQGRFVAQAITKGQAENYLIEDIPTGIYTIPEISSVGKTEQELTAAKVPYEVGRSSFKHLARAQIAGKDVGSLKILFHRETKEILGIHCFGERAAEIIHIGQAIMEQKGQANTIEYFVNTTFNYPTMAEAYRVAALNGLNRLF

SEQ ID NO: 49080 - protein, 320 aa, Rubrivivax gelatinosus PM1
MSTKPRVLQIGRLLPWLEERLAAAHDLHRLADEADPQAFLAARGAEFVGLVTSAGGSGADAALIDALPSLRVISSFGVGLDKIDLAAAARRGIAVGYTPDVLNDCVADLAMALLLDVARRTPEADRYVRAGRWGVAGAPAFPLGRRVSGARLGIVGLGRIGRTIARRALGFDMAIRYHSRRPVADAPWPHEPSLVALAEWADFLVVIAAGGAGTRHLVDGAVLGALGPEGFLVNVSRGSVVDEAALVHALVERRIAGAALDVFEHEPQVPAALRALDNVVLLPHIASATRETRQAMGQRVLDNLALFFAEGRLVTAAPLD

SEQ ID NO: 49081 - protein, 394 aa, Staphylococcus aureus subsp. aureus MRSA252
MSEKQQILDYIETNKYSYIEISHRIHERPELGNEEIFASRTLIDRLKEHDFEIETEIAGHATGFIATYDSDLDGPAIGFLAEYDALPGLGHACGHNIIGTASVLGAIGLKQVIDQIGGKVVVLGCPAEEGGENGSAKASYVKAGVIDQIDIALMIHPGNETYKTIDTLAVDVLDVKFYGKSAHASENADEALNALDAMISYFNGVAQLRQHIKKDQRVHGVILDGGKAANIIPDYTHARFYTRAMTRKELDILTEKVNQIARGAAIQTGCDYEFGPIQNGVNEFIKTPKLDDLFAKYAEEVGEAVIDDDFGYGSTDTGNVSHVVPTIHPHIKIGSRNLVGHTHRFREAAASVHGDEALIKGAKIMALMGLELITNQDVYQDIIEEHAHLKGNGK

SEQ ID NO: 49082 - protein, 114 aa, Zea mays
TPPDHGAAVVATILCDAGLKKQWAEEVEAMRARIAQLRSGLVEALAPHGLSERFAHIAAQRGMFSYTGLSAEQVKQLREQHSVYMVSSGRANVAGIDATRLTLLAEAIADVSHI

SEQ ID NO: 49083 - protein, 465 aa, Triticum aestivum
WIPRAAGIRHEPTTTTGSATPTYPNRMYSSTQSYNQYGNSVKTGLMYGNTGYGSTGYGSTGYGSSGYGSNGYGSSGYGSSGYGSSGYDSRLYGRWGVSMDTRYNRPRGRGNGYYGFGNESQDGTIELNRGPRSGRFKNQKAFGHTVTIAVKGQTLPSSENKDASDIPDKAQFNLEDFPVQYDDAKFFVIKSYSEDDIHKSIKYNVWASTTNGNKKLDAAYQEAQAKGSSCPIFLFFSVNTSGQFVGVAEMTGPVDFEKTLEYWQQDKWNGSFSVKWHIVKDVPNNILKHIVLENNEGKPVTNSRDTQDINLEQGIQMLKIFKEHVSKTSILEDFAFYENRQKLMQEKRIKQQQIQKQVWDSRAPNPVAGEKQQEVANGKPKVSVPNGVNGEKQQDAVNGKPKSPVANGVNGDAKVPAEKAAATAAPPAVTYAAKVAQTAAAEKKPVATEKKPVVANGAVKTGVAA

SEQ ID NO: 49084 - protein, 886 aa, ASPERGILLUS NIDULANS FGSC A4
MLTSKAYAGPLGLPSSQTPTASYHTTTQKSSTFSESQTGTVYTSPTKSEFSEADDGLDAVRSWDENQVISWLHSINCQQYEPLFRANNFNGNNLIECDQKILQEMGIKKIGDRVRIFVAIKQLRNKSVVNKKQKNLRQLAALEAAHQQASPDSARSYSARQQTSSAGHASRTGDYSYGRPTSRPGSPLRPHRYVANSPMDSGRKDYLSAGSGAGRNPGTPVERIGTHSRQNPSLDGMTMGSLLSNAPVIRVIYSGGQTKVLDIKHCKTPDEIILCVLKKLQLPEHQYRNYCFYVLDGLDPDPSNCRRLSDHELMEICEGFHRSERGRLILRKIHAGEPDAEEVHRAAQLALDESQQAHMNALSSSNARNQMKIQQLTGESWHNIRQPMSPVSSRHNTTPSDHEIRPPQVSERVSKLRSFFGARPPSEMIIHEISSYFPGHQREDIEKTMRMSVRRSQRLSRAASRLSVVSNTSYASSLRDAPPIPSIADTWLNNGTPPTRAARPLSVLSTRPGLPSTSYRDSIASSSLHPLQEESPVEPNRKSYVSFDSGSDDPNNSRHSLLDENASVAATDGGSFNERLSVLVAEDGEEEDDGLAEFLAGNNFVNWMKGSLIGEGSFGSVFLALHSITGELMAVKQVEIPSATKGTEFDKRKNSMVEALKHEIDLLQGLHHPNIVQYLGTTADDQYLNIFLEYVPGGSIATMLKQYNTFQEPLIKNFVRQILAGLSYLHSKDIIHRDIKGANVLVDNKGGIKISDFGISKRVEASTVLGSRASNGGGHIHRPSLQGSVYWMAPEVVRQTAHTKKADIWSLGCLVIEMFIGSHPFPDCSQLQAIFAIGSNKARPPAPEHASKDAVAFLDMTFQLDHEKRPDADELLKSPFLATTLT

SEQ ID NO: 49085 - protein, 489 aa, Salmonella typhimurium LT2
MGSKTKTTEAPALRRELKARHLTMIAIGGSIGTGLFVASGATISQAGPGGALFSYILIGLMVYFLMTSLGELAAYMPVSGSFATYGQNYVEEGFGFALGWNYWYNWAVTIAVDLVAAQLVMGWWFPDTPGWIWSALFLCVIFLLNYISVRGFGEAEYWFSLIKVATVIIFIIVGVAMIIGIFKGVEPVGWSNWTTGDAPFAGGFAAMIGVAMIVGFSFQGTELIGIAAGESENPEKNIPRAVRQVFWRILLFYVFAILIISLIIPYTDPNLLRNDVKDISVSPFTLVFQHAGLLSAAAIMNAVILTAVLSAGNSGMYASTRMLYTLACDGKAPRIFAKLSRGGVPRNALYATTVIAGLCFLTSMFGNQTVYLWLLNTSGMTGFIAWLGIAISHYRFRRGYVLQGYDVNDLPYRSGFFPLGPIFAFVLCLIITLGQNYEAFLKDTIDWGGVAATYIGIPLFLLIWFGYKLIKGTHFVRYSEMHFPERVKK

SEQ ID NO: 49086 - protein, 358 aa, Zea mays
KTHQNTPSFGTDWLDTSHAANSAILTSNLVFVRSAHTHNQISPKSTRRHLRFKMQIFVKTLTGKTITLEVESSDTIDNVKAKIQDKEGIPPDQQRLIFAGKQLEDGRTLADYNIQKESTLHLVLRLRGGMQIFVKTLTGKTITLEVESSDTIDNVKAKIQDKEGIPTDQQRLIFAGKQLEDGRTLADYNIQKESTLHLVLRLRGGMQIFVKTLTGKTITLEVESSDTIDNVKAKIQDKEGIPPDQQRLIFAGKQLEDGRTLADYNIQKESTLHLVLRLRGGMQIFVKTLTGKTIPLEVESSDTIDNVKAKIQDKEGIPPDQQRLIFAGKQLEDGRPLADYNIQKESTLPLVLRLRGGQ

SEQ ID NO: 49087 - protein, 421 aa, Rhodopseudomonas palustris CGA009
MRRVVVTGLGMVSPLGCGVEPTWSRVLAGESGARKIDTFDVSDLASQIACVIPRGDGTNGTFNPDQWMEPKDQRKVDDFIVYAMAAARQALDDAGWHPSTEEERCASGVLIGSGIGGLQGIAETALLLEQRGPRRISPFFIPGRLINLASGYVSIEFGLKGPNHSVVTACSTGAHAIGDASRLIALGDADVMVAGGTESPISRLAMAGFAAARALSTGFNDAPTKASRPYDKDRDGFVMGEGAGVVVLEEYEHAKARGARIYAEVIGYGLSGDAYHITAPSSDGDGAFRCMSAAIKRGGIAVSDIDYINAHGTSTPLGDEIELGAAQRLLGNAASRVSMSSTKSSIGHLLGAAGAVEAIFCVLAIRDNVAPPTINLDSPSVETAIDLVPWKPRAREINVALSNSFGFGGTNASLVLQRVPN

SEQ ID NO: 49088 - protein, 966 aa, Flaveria pringlei
MANRNLEKLASIDAQLRLLVPGKVSEDDKLIEYDALLLDKFLDILQDLHGEDLKEAVQECYELSAEYEGKHDPKKLEELGSVLTSLDPGDSIVIAKAFSHMLNLANLAEEVQIAYRRRIKLKRGDFADEANATTESDIEETFKKLVLKLNKSPEEVFDALKNQTVDLVLTAHPTQSVRRSLLQKHGRIRNCLAQLYAKDITPDDKQELDEALHREIQAAFRTDEIRRTPPTPQDEMRAGMSYFHETIWKGVPKFLRRVDTALKNIGINERVPYNAPLIQFSSWMGGDRDGNPRVTPEVTRDVCLLARMMASNMYFSQIEDLMFEMSMWRCNSELRVRAEELYRTARRDVKHYIEFWKQVPPTEPYRVILGDVRDKLYNTRERSRHLLAHGISDIPEEAVYTNVEQFLEPLELCYRSLCDCGDRVIADGSLLDFLRQVSTFGLSLVKLDIRQESDRHTDVLDAITQHLEIGSYREWSEEKRQEWLLAELSGKRPLFGSDLPKTEEVKDVLDTFNVLAELPSDCFGAYIISMATSPSDVLAVELLQRECHVKHPLRVVPLFEKLADLEAAPAAMARLFSIDWYRNRIDGKQEVMIGYSDSGKDAGRFSAAWQLYKAQEEIIKVAKEFGVKLVIFHGRGGTVGRGGGPTHLAILSQPPDTIHGSLRVTVQGEVIEQSFGEEHLCFRTLQRFCAATLEHGMNPPISPRPEWRELMDQMAVVATEEYRSIVFKEPRFVEYFRLATPELEYGRMNIGSRPSKRKPSGGIESLRAIPWIFAWTQTRFHLPVWLGFGAAFKHAIKKDSKNLQMLQEMYKTWPFFRVTIDLVEMVFAKGDPGIAALNDKLLVSEDLWPFGESLRANYEETKDYLLKIAGHRDLLEGDPYLKQRIRLRDSYITTLNVCQAYTLKRIRDPNYHVTLRPHISKEYAAEPSKPADELIHLNPTSEYAPGLEDTLILTMKGIAAGMQNTG

SEQ ID NO: 49089 - protein, 1676 aa, Streptomyces coelicolor A3(2)
MEALSFDSGARTAFAERLALLYREAGNPPLKRVSEAVVRLQRVDERGRPVRVSAQRISDWRRAKNVPAQFPALAAVLHVLIPQARRARPVPVSAGLYDLVQWQRLWERALADPSGERPGAAAVEEQTPAEAPAALGGVCPYRGLAAYRRQDADWFFGRERSTRALLAQLDATRDTGGLVMLVGASGAGKSSLLNAGLVPALRAGSRDAGCGPPRRVLQLVPGADPLGELTRLVPQLAPVVVAIRETAGRDPGSPGTWNPGDPETEDAVRAAFAAWAASTEAPSGQEGQEEQEEREGRESRSGRKGFAGQNGPESQDGPGRRHGLDRQSEPDRHRPGPADPADPGRRTNQAAGADRARQDDQTERADEAGKTGRTDRDGSTSPSGPDISACRNGETGRTARVSQAVGPDPGDRTDPVAPAGQADGGDRADADDQPGNTGQVDQTEQTGREGQGQENRGGQGGQGGQTDQSGRSGQTGREIRHAPIAPARRPDGDGRADPYGEAGQDGQTGQDAQVGQDAQDRQDAQDRQAGLSDRARQADLGAQDGPASPARQLGRTPSDGETRPDGPPGQANPTARAIRTRPPGTAPPDGREDHAGGPDDPAAARPVVIVDQFEELFTLCADEADRRVFIQLLQAACLPGAHGDPPPVLVTLGVRADFYDRCLRYPELADALQHRHMVLGPLTTAELREAVTAPARAVGMELEPGLAELIIREVSTDGPRGGCDSHAFRAVGEHDAGVLPLLSHALLATWQRRKAGRLTLAGYRAAGGIQGAVAATAERAWSGLDPAARTAARLLLLRLIRLSEDTQATRRRSTRRRLAEEARDPDKTEESLEALVRARLVTLDADTVEITHEALLHAWPRLRDWIDEDRAGNLLRQRLEEDGLAWEESDRDSALLYRGSRLAQADGWAKSADDTFLTRSAVEFLAAAVRLRRRTVMISRAAVSALVVLALLAVGSAVLAWQQRNDAVFEQVVAEADRVQDTDPSLSAQLDLAAHRLRPDDEDVRNRLISIVNAPLATPLLGHTGAVYLTSFSPDGRILATASYDRTVRLWDVSDPGRPQQLGKPLTGHTSWVSTAVFSPDGRTLASASDDGTIRLWDVTDPGRPRPLGAPLDGHGGTVYLLAFSPDGRTLASAHDDHAVRLWNVADRRAPEALDTLTGSTGAVRSVAFSPDGDTLASGGDDDKVRLWDVSDPRRPEPAGAPLAGHSGLVHSVAFSPDGHTLASGSADDTVQLWDVTDPAGAKPVGAPLTGHSGPVWAVAFSPDGAMLAVSSADSTASLWNVSDPAYPSQVGVPLAGGSGEMYALGFSPDGHTLATGSGDSKVRLWSLPTSEMIGRIGAFRPDGHVLATAARDGRVRLWDVTDPGRPVSLSAPFEPGDGDIRSLVFSPDGGTLAVLVGGRALQLWDVTDPAGPTAHGPPVALSTRYAGPDTLAFSPDGRTLATAHDDRTIQLWNADDPSRPRRLGKPLAGHSGYVNTLAFSPDGRTLASGGADDAVRLWDVTDPAHATRLGAARTGHLGPVNVLAYSPDGHTLASGSDDGTVRLWDVTEPGEGSGGGTTLAGHTDSVVSLTFSQDGDTLASGANDNTVRLWSVTDPAEAAPIGRAMSPNAKTGNFLSFSPVSHMLGVSSGTDTVRLWSLGVDDAIDRICSATRGVLTEEKWHEYLPRLDYEPPCHQ

SEQ ID NO: 49090 - protein, 325 aa, Arabidopsis thaliana
MSSEEEKTVCVTGASGYIASWIVKLLLLRGYTVKASVRDPNDPRKTEHLLALEGAEERLKLFKANLLEEGSFDSAIDGCEGVFHTASPFYHDVKDPQAELLDPAVKGTINVLSSCLKTSSVKRVVLTSSIAAVAFNGMPRTPETIVDETWFADPDYCRASKLWYVLSKTLAENAAWKFAKENNLQLVSINPAMVIGPLLQPTLNTSAAAVLSLIKGAQTFPNATFGWVNVKDVANAHIQAFENPDADGRYCLVERVAHYSEVVNILHDLYPDFQLPEKCADEKIYIPTYKVSKEKAESLGVEFVPLEVSIKETVESLRDKGFIRF

SEQ ID NO: 49091 - protein, 349 aa, Bacillus cereus
MKALLWHNQRDVRVEEVPEPTVKPGAVKIKVKWCGICGTDLHEYLAGPIFIPTEEHPLTHVKAPVILGHEFSGEVVEIGEGVTSHKVGDRVVVEPIYSCGKCEACKHGHYNVCEQLVFHGLGGEGGGFSEYTVVPEDMVHHIPDEMTYEQGALVEPAAVAVHAVRQSKLKEGEAVAVFGCGPIGLLVIQAAKAAGATPVIAVELSKERQELAKLAGADYVLNPATQDVLAEIRNLTNGLGVNVSFEVTGVEVVLRQAIESTSFEGQTVIVSVWEKDATITPNNLVLKEKEVVGILGYRHIFPAVIKLISSGQIQAEKLITKKITVDQVVEEGFEALVKDKTQVKISCFT

SEQ ID NO: 49092 - protein, 332 aa, Mantoniella squamata
MAAPVHVMITGAAGQIGYALAPMVCRGAMLGPDVPVVLHLLDIPPAETALKGVAMELVDAAYPLLKGIVATTDVAEACKGVDVAVMVGGFPRGPGMERKEVMGKNVAIYKGQASALEEHANPGCKVLVVANPANTNALILSNYAPKIPKENVTCLTRLDHNRALGQVSEKTGVPVSDVKNCIIWGNHSSTQYPDVNHGTAGGKPIREAIGDDAYLDGEFIATVQQRGAAIIAARKLSSALSAASSVCDHIRDWVNGTPPGTWVSMGVVSPGGEAAYGVEEGLMYSFPVTCVDGKWSIVQGLTIDERSRALMDATAAELKEEKAMAEELIAAM

SEQ ID NO: 49093 - protein, 579 aa, Physcomitrella patens
MAAVSSACVVLPETRGVVGQRGQDGNASCSSGWRDGGAEHASRLSKASRRRVAAVRSMLPSRSLVFAPLSLHPLGRTVHCRALKVDDALVTESGLISEEGVSRAAAEEAMTLALAAAKAAMEAASYADAMAVEQEEFPTEFDLLRLERARLSDVEHSFRVELDTEAAMMEAEQSYVQKLESLLGGVSTLVREEEETASVSEDEDDSNSLPQIQVAVKSKRKGERRKRRERALERAEKVATDLASAPPLPKPKKPQLAADPSDPVRAYLRDIGRTKLLTAREEVDLSHQIQDLLKLENIKSNLEREIGRNATIGEWSRAVGMEQNAFEARLKKGRFAKDKMVNSNLRLVVSIAKNYQGRGMTLQDLIQEGSMGLVRGAEKFDPTKGFKFSTYAHWWIRQAVTRSIADQSRTIRLPIHLYEVISRINKAKRMLVQEHGREARNEEVAELVGLTVEKLKSVVKSAKAPGSMERPIGKDGDTTLGELVADTDVDSPEDAIVKQLMRQDIEGVLRTLNPREREVLRLRFGLDDGRSKTLEEIGQIFKVTRERIRQIEAKAMRKLRQPSRNSILREYLDVKSDAI

SEQ ID NO: 49094 - protein, 333 aa, Galdieria sulphuraria
MAETPLFSDRPINVCVTGAAGQIAYSLLPLIAGGKVFGPQQQVSLRLLEIEAALPSLQGVVMELEDCAFPLLHSVFTTSDAREAFRSCDVAVLLGAFPRKQGMERKDLLEKNAGIFKEQGEALNTEAGANVRVIVVGNPANTNAYILKHFAPNIPDKNITALTRLDQNRAVSLVARKLGVPLSKVSDVYVWGNHSSTQYPDVLHGSVEGKGKLSYLLDKSYLEETFIPTIQKRGAAVIAARKMSSAMSAANAVGDHLHDWLLGSDRIVSMSVASDGSYGIEKGTIFSFPLRCSRGGTYEIVKGLQLDDFSQRYIKITADELYAEKAEALALLS

SEQ ID NO: 49095 - protein, 416 aa, Candida albicans SC5314
MSDLPLLGGSRNQGNFMHRAKKSVYNGTLSTLKSSPVNYLLIFVPLGIIAGELEWSATARFLLNFFAIVPLASVLAFATEEISEHVGQTVGGLLNATFGNAVELIVSIIALKDNQVRIVQASMLGSILSNLLLVLGCCFVAGGITRVQQTFNQTVAQTMSSLMALATASLLIPAAFHASLPTPKKGGGFPEPGSSDELILSFSRGVSVVLLIVYLFYLLFSLKTHKELFEEDQSADAILNERSQNSTLDVVTGPKTEEDGHLSMTAGLVVLLLTTILVSFCADYLVGSIDEIVESSGLSKTFIGLIVIPIVGNAAEHVTAIVVAMKDKMDLAIGVAIGSSLQIAIFVTPFMVLVGWAIDVPMSLYFSTFETAILFVSVFITNLVILDGESNWLEGAMLLSTYLIIALAFFYYPDVN

SEQ ID NO: 49096 - protein, 350 aa, Rubrivivax gelatinosus PM1
MFVKNAWYCAGWDKDLSLGRDGLLARRIAGESLVLYRRPDAAVVAMEDRCCHRHAPLSLGRKEGDSIRCMYHGMKFGPDGRCTEIPGMSRIPEKACVRTYPVVERDNWIWVWMGEPAKADPALICEAIGPGDPAWNLRLGYVRVDTNYRQEIANLADLSHVAWVHSQTLGGSDAWSNIKPRHELTERGIDTRYCVRRTPPPSFARHLFPEGALFDIQVHVRMSVPCNFILHFSVHEVGSATEGPTNGRLVLDTFSSQAVTPRDAHSCDYYYSWGCSRATDMPGLTDLMHEANNDAFLEDKAMLEGQYQRMRERPDAPSVDIVHDAGPGKLLWVLDRLLKAEARAIEIVPA

SEQ ID NO: 49097 - protein, 713 aa, Gloeobacter violaceus PCC 7421
MDELLVDNGTDGGHRRALEQSELRYRQLVELSPDAIFVQCEGKVVFINGAGGRLLGAETSAQIVGKPVLELIHPCDREAVRRRMELLQAGTAVPLLEERFLRLDGTVVEVEVLASAMTYQGKPAAHVLARDIGERKRAQHEREQLLERRRQALATAEQSEERYRLLIEAIPQLVWTTTADGRCDYLSQQWVHYTGIPEAEQLGMGWLAAVHPEDRPRASACWLAAVADRAIYDLEYRLRAADGSYRWFKTRGRPVRDAGGRIVRWFGTCTDMQDQKTAQEERERLIAHQQQYAARLKKLSEASLAINLALSVEEVVEVITFQASAIIGTHQAVTSMTIDADWGRAINAVYLSEKYAAWRDFRGRPNGAAIYARVCDTNRPMRLNQAQLDAHPHWRTFGNADTEHPPLRGWLAAPLVARDGRNIGLIQLSDKCEEEFTAEDEAIVVQLAQMASVAIENARLFEAEQTARALAEQARREAEAANRAKDEFLAVLSHELRTPLNPIIGFAQLLRRKSGLSAADYRALETIERNGRLQAQLIDDVLDVSRIISGKMRVELRAVDLLPVVAAAIEAVRSPAELKGICLSGRLDDGATAVADPTRMQQVVWNLLTNAIKFTPEGGRVVIDLCRGDRTLLIRVSDSGIGISPDFLPYVFERFRQADGTSTRKHSGLGLGLAIVRHIVELHGGAVSAQSDGVGQGTTFCVELPLYTCEPTA

SEQ ID NO: 49098 - protein, 277 aa, Pisum sativum
LQAFSIHTKMAESSSTKTGLRLAGKVAIVTGGASGIGKETAHLFANQAARMVVIADIQDELGIQVAESIGTDRCTFIHCDIRIEDDVKNLVQSTVDTYGQIDIIHCNAGIISPSDQTLLELDVSQANGVFATNAIGTALCVKHAARAMVDGKVRGSIVCTASISASYGVTTGTDYSMSKHAVLGLMRSASVQLAKYGIRVNSVSPNGLATPLTEKLLDADAKTVEEIFSKFSMLKGVVLRTNHVADAVLFLASNDSDFVTGLDLRVDGNYITSDAVI

SEQ ID NO: 49099 - protein, 496 aa, Candida albicans SC5314
MSSVKYDAIIIGAGVIGPTIATAFARQGRKVLIVERDWSKPDRIVGELMQPAGIKALRELGMIKAINNIRAVDCTGYYIKYYDETITIPYPLKKDACITNPVKPVPDAVDGVNDKLDSDSTLNVDDWDFDERVRGAAFHHGDFLMNLRQICRDEPNVTAVEATVTKILRDPSDPNTVIGVQTKQPSGTVDYHAKLTISCDGIYSKFRKELSPTNVPTIGSYFIGLYLKNAELPAKGKGHVLLGGHAPALIYSVSPTETRVLCVYVSSKPPSAANDAVYKYLRDNILPAIPKETVPAFKEALEERKFRIMPNQYLSAMKQGSENHKGFILLGDSLNMRHPLTGGGMTVGLNDSVLLAKLLHPKFVEDFDDHQLIAKRLKTFHRKRKNLDAVINTLSISLYSLFAADKKPLRILRNGCFKYFQRGGECVNGPIGLLSGMLPFPMLLFNHFFSVAFYSVYLNFIERGLLGFPLALFEAFEVLFTAIVIFTPYLWNEIVR

SEQ ID NO: 49100 - protein, 801 aa, Magnetococcus sp. MC-1
MTTISQPLRHTLIVAIIAIVALALLLDRLYEYQVVMAREIENQQLAEMHDSCYVLANDYSRYLLANKQSELRFSVASQGTRISLERLAVSNSEGIVIASSRSSDIDRKIAEIAPLFRLQDAQEARTHNQIVTRLSDDHNSVLGYVPVEMPSPTHSIRAQTRGLLFIHNTLHTLKAASWQNLTSPQSLLRWLVTFFLVTVLLLILLNRVLFRPLEHLEQMATRLAEGDWQATSTLSGKSELAHLGQVLNTMQRHILQERRSLQQSESRFRTLVETSPIPMLVTRAAPNQRVALMNRSFTDLFGYTVADVPDIHHWWPLAYPDPTYRQEIQQLWQARVEEMSLKKTQIMHPVTANVTCNNGNIRFIEVHMSVIDDHALVIFQDLTHRKQESEELRQAKEAAEAANQAKGDFLAVMSHEIRTPMNVMLGMVEVLQESTLDQEQQEQLHSVQKAGKNLLALINQILDLSKLDAGHLQLQPEALNLHELIKEVVGLVAVLASEKNLLLSHQIDTSVPQWILADELRLRQILFNLLGNAIKFTEKGSVNITLSMRDPQQLALVIRDTGIGVDPAHHHAIFEPFTQQDGTITRRFGGTGLGLTLSRRLVELMHGQIRMDSQLGCGTQFEILLPVERTQPPRSDQPQALSLGIIEAHPALAPTDTLCPRLDPALNLLLAEDSPDNQSLIKAYLKRTPHILTIVANGEEAVTAVGNGSYDLLLMDIQMPIMDGYTATRTIRQWEKAEARTPMLIVALTAHALVGDRERSLAEGCDLHLTKPIRKKDLLALLESIAQRLVRQDHQPPAETL

SEQ ID NO: 49101 - protein, 541 aa, Frankia sp. CcI3
MPKIIAYEEEARRGLERGMNQLAGAVKVTLGPKGRNVVLEKKWGVPAITNDGVSIAREIELEDPYEKIGAEMVKEVAKKTDEVAGDGTTTATVLAEALVHEGLRNVAAGANPIALKRGIELAVERVCGELANLSRELETKDQIASTASISAGGDTAIGQIIAEAMDKVGRDGVITVEESNTFGLELELTEGMRFDKGYISPYFITDQERMECVLEDPYILVANIKISLVKDLLPLLEKVMQAGRPLLVIAENVEGEALATLVVNKIRGTFRSVAVKAPGFGERRKAMLGDIAVLTGSQVISEEVGLRLENADLDLLGRARKVVVTKDDTTIIEGAGDPGRIAGRVSQIRSEIEKSDSDYDREKLQERLARLAGGVAVIKAGAATEVELKERKHRIEDAVRNAKAAVEEGIVPGGGVALLLASGAVFDGLEVAEDERTGAEMVRRALTEPLRQIAVNAGLEGGVVVEKVRNLQPGWGLDAATGEHVNMLEAGIIDPTKVTRSALQNAASIAGLFLTTEAVVAEKPEEKETAAAPAGGGGLEY

SEQ ID NO: 49102 - protein, 429 aa, GIBBERELLA ZEAE PH-1
MSISNLSQLVNQHRPDLQPLEELYKHLHRNPELSNQEIETAATIAERLREIGPEDLVIKPHIGGHGLAAVLRNGEGPTVLLRADIDALPVEETTGLEYASTKRMIHAASGTEKPVMHACGHDMHIVTLLGAAATLFSSREHWTGTLVLAFQPAEERGTGAQAMVDNGLYTKHGVPVPDYVLGAHVRPLRTGTIGTRRGLVATSADNFKVTIHGKGSHASMPHTAVDPIAISANAILKLQTLVSREVDPAESSVVTVTSVHAGDAENVIADSAVLGIDTRSTTTATRERLLKRIRTVIEAECSCANVIKSPEFEQTRAFPLTINDSIVTERVEQSFAAHFGEGPGQYDRDMPKLAFSEDFSILATAVNKPYCFFTYGCVDKSAWDEAERGETVAQSIAANHSSKFAPVIHPTLKTGLDGYALGALTFLAK

SEQ ID NO: 49103 - protein, 169 aa, Frankia sp. CcI3
MTLPVRRGEGLGTLARWDPFREIEDAWTRMGNLLGDVIGGVEGRPARLLGGMVQPVDIEETEDAFVIDLDLPGVRREDISVDLRDNELFVTGEIKERERTGVLRRRSRPVGRFEHRIAVPGDIDPESVHATLADGVLTIRLAKAKRSQPKHIEISTGPEGQGTGPEGQS

SEQ ID NO: 49104 - protein, 549 aa, ASPERGILLUS NIDULANS FGSC A4
MKYVLVSGGVISGVGKGIIASSTGLLLKTAGLSVSSIKIDPYLNPDAGLMNPLEHGECFVLDDGGEADLDLGNYERYLGVTLGRDNNITTGKIYQHVIEKERRGDYLGKTVELGGTVGDIESAPFVEAMSQLQRRVGKANFLQIHVSYVPLIGSEQKTKPTQRAISDVRSGGLRPDLIACRCETPLEEMTIRKIAGTCQVERDQVVGVHNVPSTYQVPILLENQGFLNTIKDLLEIRNLHIEPKYVELGKSMWHKWHGLAMSQDHVFDTVSIVLVGKYTSLHDSYLSVTKALEHASMHCQKKLNLIWVESSHLEEDHQSINPAEYYKAWHAVSTADGILVPGGFGQRGTEGMVKCAEWARTKNVPFLGICLGLQVAVIEYARNVCGMTKADSAEFNEECEQPAIVYMPEIDKTKMGGTMRLGKRPTIFQEGTEWSKFRKLYGNKKEIWERHRHRYEVNPDLVEKLEAAGLSFIGKDETGKRMEVIELKDHRWYVGVQFHPEYLSRVITPSKSFLGFFAAAAGCLDEITETFQGAHDLSHLQVRPKIESI

SEQ ID NO: 49105 - protein, 235 aa, Pseudomonas fluorescens PfO-1
MESRALRIALIGDFDPQVTAHQAIPVALGMAAEHLRCPVDFEWLATDRILPETPLEPFDGFWCVPASPYISEVGALRAIRFARERQRPFLGTCGGFQHAVLEFSRHVLGWTDAEHGETSPDASRAVLTPLTCSLVEAVDSIHLVHGSLIASAYETSEIREGYRCRYGVNPQFERELLTHDLHAVGHDSSGDLRAIELKNHVFFVATLFQPERAALKGQLPPLVRAFVEACVEARA

SEQ ID NO: 49106 - protein, 248 aa, Ralstonia solanacearum
MHKLVLIRHGESTWNLENRFTGWVDVDLTDTGIAQARQGGRLLREAGFTFDLAYTSVLKRAIRTLWHVQDEMDLMWIPTRTEWRLNERHYGGLSGLNKAETAAQYGDQQVLVWRRSYDTPPPALEAGDERDAYGNPRYAGLPREQVPLTECLKDTVARVLPLWETSIAPDIKSGKRVVIAAHGNSIRALVKYLDNISDDDIVGLNIPNGTPLVYELDANLKPIRHYYLGDQEAIAASLAAVAGQGKAK

SEQ ID NO: 49107 - protein, 433 aa, Ralstonia solanacearum
MSSPSRSVSLFERAQKTIPGGVNSPVRAFRSVGGTPRFIAKAAGPYLWDADGTRLIDYVGSWGPMIVGHAHPEVVRAVQQVAADSFSFGAPTEAEVVMAETLCELVPSIEQVRLVSSGTEATMSALRLARGFTGRDLIVKFEGCYHGHADSLLVKAGSGLLTFADTTQNAPSSAGVPEDVVKHTMVLPYNDADALREAFARHGKEIAAVIVEPVAGNMNLVRATAAFLQAMRALCTEHGAVLIFDEVMTGFRVALGCAQALYGITPDLTCLGKVIGGGMPAAAFGGRRDIMGFLAPLGSVYQAGTLSGNPLAVAAGVTTLRLIAADGFHDRLAAQTRKLVDGLAGIARDAGVPFAADSVGGMFGLYFREGVPTSFAEVTQSDVGRFNAFFHAMLAEGVYLAPSAFEAGFVSSMHDDAVLEATFEAARRAFKAV

SEQ ID NO: 49108 - protein, 442 aa, Zea mays
MASRNHNAAAPQLHHHNRAGVPALGKTKAVPARADALNRRPPLGDIGNLVSVRPATGNPQEQVNRPITRSFGAQLVKKAQAKAAIKNAAILPARHAPRQERKAPVKQQPPPEDIIVLSSDSEQSRAQSESSASSVRSRRKAINTLSSVLSARSKAACGIAGKPRQVVDDIDKLDVNNELAVVEYIEYIYTFYKIAQHERRPCDYIDAQLEINSKMRAILADWIIEVHHKFELMPETLYLTMYIIDQYLSLQPVLRKELQLVGVSSMLIACKYEEIWAPEVNDFILISDSAYSREQILSMEKGILNRLEWNLTVPTVYMFLVRFLKAATLGGKVEKEMENMVFFFAELALMQYDLVTRLPSLVAASAVYAARLTLKRAPLWTDTLKHHTGFRESEAELIECTKMLVIAHSTAPESKLRVVYKKYSSEQFGGVALRPPAEEICK

SEQ ID NO: 49109 - protein, 328 aa, Campylobacter jejuni
MKILISGGAGYIGSHTLRQFLKTDHEICVLDNLSKGSKIAIEDLQKIRAFKFFEQDLSDFQGVKALFEREKFDAIVHFAASIEVFESMQNPLKYYMNNTVNTTNLIETCLQTGVNKFIFSSTAATYGEPQTPVVSETSPLAPINPYGRSKLMSEEVLRDASMANPEFKHCILRYFNVAGACMDYTLGQRYPKATLLIKVAAECAAGKRDKLFIFGDDYDTKDGTCIRDFIHVDDISSAHLAALDYLKENESNVFNVGYGHGFSVKEVIEAMKKVSGVDFKVELAPRRAGDPSVLISDASKIRNLTSWQPKYDDLELICKSAFDWEKQC

SEQ ID NO: 49110 - protein, 124 aa, Desulfitobacterium hafniense DCB-2
MYTEKVMDHFMNPRNVGEIEDANGVGEVGNAKCGDIMRIYLDVEGDIIKDVKFKTFGCGAAVATSSMVTEMVKGKTIEEALKITNAAVAEALDGLPPAKMHCSNLAADALHEAIKNYHEKTLKV

SEQ ID NO: 49111 - protein, 206 aa, Brucella melitensis
MSRTLVLVRHGQSEWNLKNLFTGWRDPGLTEQGHAEAKAAGQRLKAAGLKFDIAYTSALSRAQVTCQHILDELGQPGLETIRDQALNERDYGDLSGLNKDDARAKWGEEQVHIWRRSYDVPPPGGESLKDTGARVWPYYLHTIQPHVLREETVLVAAHGNSLRALIMALEGLTPEQILKQELNTGVPIIYRLNADSTVASKEILSA

SEQ ID NO: 49112 - protein, 137 aa, Salmonella typhimurium
MANQPSAEELKKKLSEMQFYVTQDRGTEPPFTGRLLHNKRDGVYHCLVCDTPLFHSHTKYDSGCGWPSFYQPVSEEAIRYIDDFSHGMQRVEIRCGNCDAHLGHVFPDGPQPTGERYCVNSASLAFSDEKNGDQLKG

SEQ ID NO: 49113 - protein, 179 aa, Ralstonia solanacearum
MAVGPTLRGDLPRSIRSECRGDPSVVAQRENMMQSARVEQLTNSQPLASSLAGRKVLVIDDSSTIRRTAQIFLSKVDCQVVLAEDGFDALAKLGDFKPDIVFCDILMPKLDGYLTCSLIKKSPKFHATPVVMLSSRDGVFDRARGKLVGAVDHLAKPFSREALLEAVQAHLPAAAGAAQ

SEQ ID NO: 49114 - protein, 137 aa, Nostoc punctiforme PCC 73102
MSTNGGQQFTAQDVATEGTYNLFLGKTEQYNSDTETFESSFQVFHTAFPNGFLWELTEVLSGPPNVTFKWRHWGTFNGSYKDYAPTGETIEIVGVSIARVTDDLKIESLEHYFDNNVFLQKLTAGGCPFHSQNQNNH

SEQ ID NO: 49115 - protein, 785 aa, Arabidopsis thaliana
MSINLRSSGCSSPISATLERGLDSEVQTRANNVSFEQTKEKIRKMLEKVELSVSAYDTSWVAMVPSPSSQNAPLFPQCVKWLLDNQHEDGSWGLDNHDHQSLKKDVLSSTLASILALKKWGIGERQINKGLQFIELNSALVTDETIQKPTGFDIIFPGMIKYARDLNLTIPLGSEVVDDMIRKRDLDLKCDSEKFSKGREAYLAYVLEGTRNLKDWDLIVKYQRKNGSLFDSPATTAAAFTQFGNDGCLRYLCSLLQKFEAAVPSVYPFDQYARLSIIVTLESLGIDRDFKTEIKSILDETYRYWLRGDEEICLDLATCALAFRLLLAHGYDVSYDPLKPFAEESGFSDTLEGYVKNTFSVLELFKAAQSYPHESALKKQCCWTKQYLEMELSSWVKTSVRDKYLKKEVEDALAFPSYASLERSDHRRKILNGSAVENTRVTKTSYRLHNICTSDILKLAVDDFNFCQSIHREEMERLDRWIVENRLQELKFARQKLAYCYFSGAATLFSPELSDARISWAKGGVLTTVVDDFFDVGGSKEELENLIHLVEKWDLNGVPEYSSEHVEIIFSVLRDTILETGDKAFTYQGRNVTHHIVKIWLDLLKSMLREAEWSSDKSTPSLEDYMENAYISFALGPIVLPATYLIGPPLPEKTVDSHQYNQLYKLVSTMGRLLNDIQGFKRESAEGKLNAVSLHMKHERDNRSKEVIIESMKGLAERKREELHKLVLEEKGSVVPRECKEAFLKMSKVLNLFYRKDDGFTSNDLMSLVKSVIYEPVSLQKESLT

SEQ ID NO: 49116 - protein, 298 aa, Zea mays
MATSSRRVPLLLLCLGVLVSCSFAAGSLDQELDITWGDGRGKVLDNGRLLTLSLDRTSGSGFQSRHEYLFGKIDMQLRLVPGNSAGTVTAYYLSSQGGAHDEIDFEFLGNVSGEPYTLHTNVFTRGQGQREQQFRLWFDPTADFHTYSILWNPKHVIFMVDDMPIRDFRNLESKGVAFPKSQPMRLYSSLWNADDWATQGGRVKTDWSHAPFSASYRGFKADACVAVAGGRTRCGATVGTEGTGAPASAAGAGDWYNQELDLTLQQRMRWVQRKYMIYNYCTDPKRYQQGLPAECSMQ

SEQ ID NO: 49117 - protein, 384 aa, Yarrowia lipolytica CLIB122
MFFSTTLVASFLALVSAAPGNPKVLTFPVTKHHENSKFAQHHLLHNSRPDPLVITNQFTYYSINVGLGTPIQNFQLLLDTGSSDLWVYNVTDTADCAYQACQQTGQFDKSKSSTYHSLDEDYFIQYVLGNATGYWGTDTLSAGSVTLPNFQFACADNAEGQTGILGVSVAGSESLHKGQKPYANFPLALQNAGYIDRRVYSLYLDQNDATNGTFLLGGVDYAKFNGSLTVLPLATPNAFFVDYKSIAFDGEQVAEAGAAVLDSGTSFTYIPDAAYQKIAKKLNIGDNTFFGMTTVDCNKDFELEFNFDGVTIKALKEQMLIPSGLGDCFFGLQSNTLSQNITLFGDTFLRNAYVAYDLEDSQIGLAQAVYTDKTDIRPITGPLK

SEQ ID NO: 49118 - protein, 161 aa, Arabidopsis thaliana
MSLIPSIFGGRRSNVFDPFSQDVWDPFEGFFTPSSALANASTARDVAAFTNARVDWKETPEAHVFKADLPGLKKEEVKVEVEDKNVLQISGERSKENEEKNDKWHRVERASGKFMRRFRLPENAKMEEVKATMENGVLTVVVPKAPEKKPQVKSIDISGAN

SEQ ID NO: 49119 - protein, 219 aa, Zea mays
MALDAALDVCSKTPSPSPPTVDSSARGGRRSKRRAGSPASDGGGGVDGNDQPEQEEYLAQCLLMLSHGLPGDGAAPPSAAAKAKAIQQQHQHGRYECSVCGKVYTSYQALGGHKTSHRKPPVVAPAPAPAPGGEADASLSGGTAHAAAEKEKTHRCSVCKRTFQSGQALGGHKRLHYEAKAKDADAVAATAVLQNLDLNLPAEGAPPEPKRARTMLLLA

SEQ ID NO: 49120 - protein, 258 aa, Bacillus thuringiensis serovar konkukian str. 97-27
MGVERIKAAFENGKKAFIPYVMGGDGGLEILKERIRFLDEAGASIVEIGIPFSDPVADGPTIQRAGKRALDSGVTVKGIFQALIEVREEVQIPFVLMTYLNPVLAFGKERFIENCMEAGVDGIIVPDLPYEEQDIIAPLLREANIALIPLVTVTSPIERIKKITSESEGFVYAVTVAGVTGVRQNFKDEIHSYLEKVKSHTHLPVVAGFGISTKEHVEEMVTICDGVVVGSKVIELLENEKREEICEFIQATKQKEEA

SEQ ID NO: 49121 - protein, 334 aa, Schizosaccharomyces pombe
SSTITCDGKSLNTLPTPKQEDVEFGVPLQPEDTQDLQRKLKPRHMQMIAIGGCVGTGLFVGSGNALADGGPASILIAFAVIGTYVLFTTSALAELSAIYPVSGSFYTYFSKFIDPAWGFAVGIQYWLSFAVTVPLELTVAPLIINFWNASGPVSIWISVFYVIIIAINIWGTEGYGEVEFFLSIMKVISVIGFVILSIIIAAGGVPTDDRGVIGVSYWKQPLVFNNGFKGLCAVSVIAIFSLSGTELVGLAASEAKNPQKTVPAAVKQIFWRIFLFYIVALFMLTLVVPSDLPGLRTSDNSNVLISPFVIAIQLANIRALPSIMNVVILLSTLS

SEQ ID NO: 49122 - protein, 322 aa, Thermoplasma volcanium GSS1
MDVVVVGCKGFGKEHLRVYSKNGIDVAIVERDSKTAQECVEKFNIKKVYSNFNDSLSSNANVFDLVVPDGLHHDMAFTLMKLKKHVLLEKPITPDIDSGIDLIKTSNEQSVKFMVAEQFYFDPTVKFIINEIKKGTIGKAHTVIVRHQSHRKLEGWRKESRMIGRGILINEGTHYIDTLLNIGGRYSSLRSYVHRTWESAGEDTAEAVFNFENGMHGVFFYSWNYPHAPELPEFEIIGDSGSIYEDVKTKPTGEWSDRKRRTAYGDPVVNGNHVNIEIYDVIEKEIMDFLNSVEKNEPVPMDPELALRDLITIDRIYKASSD

SEQ ID NO: 49123 - protein, 121 aa, Desulfovibrio vulgaris subsp. vulgaris str. Hildenborough
MNILIVDDETEFLELVGKRLARRGMDVTTASSGEEALTLAEGRVFDVVVLDVKMPGIDGLETLRRLRVMHPTMPVLLLTGHASLGSAVSGMELGAFDYMLKPVAINELIIKLNEAARLGGA

SEQ ID NO: 49124 - protein, 296 aa, Pisum sativum
MDSSSEQQHQQMSNQSLESMLTCSKGEQDKKAKPQPEALKCPRCDSSNTKFCYYNNYSLSQPRYFCKSCRRYWTKGGTLRNVPVGGGCRKNKRSSSSVSRRIQDQAFVNNPNPVTCFPSLSYDSNDLTLALARLQKGQLGFDHEHDFSILGNHANSNININTNTSCAVLNNHGMNHSSNNHGFFEALMGSQNNVQNLYYGYGNRDMGEVDNGNVSGEMMLPYDHEMSIATTQAVTVTTMKQEMCNVREQNESRVLLGFPWQFNNGDSNMDEIDHSGRAGWNGLTSPWHGLLNSPLM

SEQ ID NO: 49125 - protein, 441 aa, Chlamydia trachomatis D/UW-3/CX
MAGRRTKEEQINRKRSHFYRDNVGVIVLCGGEGKRLSPLTCWRCKPTVSFGGRYKLIDVPISHAFASGFSKIFVIGQYLTYTLQQHLFKTYFYHGVMQDQIHLLVPERRDGSQVWYQGTADAIRQNLLYLQDSRVEYFLILSGDQLYNMDFRSIVDYAIDAQADMVIASQPVSDKDVSRFGVLKVDDESKLIDFYEKPQSEEILKHFRLSNTAMKKFGLDPQHGNFLGSMGIYLFRKDCLFQLLLEETGDDFGKELIHRQMHRGKTVAYLYDGYWTDIGTIESYYEANMALTQRPSHNIRGFNCYDDGGIIYSKNNHLPGAIISDSRISSSLLCEGAMIESGQVSNSVVGVRGVIGQGSVFDRSIMMGSDSYGSESFPLGIGKNCEIHKTIIDENCCIGNGVRLQNLQGHKDYDSPDGKLVVRDGIIIVPRGTQIPDNYVF

SEQ ID NO: 49126 - protein, 597 aa, Pisum sativum
MGMNRTIVWFRRDLRIEDNPALAAAARDGSVFPVFIWCPKEEGQFYPGRVSRWWMKQSLVHLDQSLKSLGAGLVIIKTDSTLKALLECVNAVQATKVVFNHLYDPVSLVRDHNIKEKLVEQGVSVQSYNGDLLYEPWEIFDESGHAFTTFDPFWNTCLHMQMKTYSPIPPCQLILAQGKVEKHSIEQLGLEDELEKSSNSSLGRSWSPGWSKSDKALAEFIENYLLHYSGNRLNLGGDSTSLLSPYIHFGELSVRKVFQLARTKQILWTHEGNIIGEESATLFLRAIGFREYSRYLCFSFPFTLERPLLGNLKFFPWNNDPSNFKAWRQGRTGYPLVDAGMRELWATGWIHNKMRVIVSSFAVKMLLIPWKWGMKYFWDTLLDADLESDILGWQYISGSLPDGHKLERLDDPEVLGRKYDPAGEYIRQWLPELARMPAEWIHHPWDAPLTVLTASGVELGQNYPKPIIDIDLAREQLTQAIFKMWETEAATKASSSQDRQVVDENEKLLIPKVFLKDKVPRGATSANDQTVPILQNLKSDDPPNKRQKCTAEEDRKPDKSRNRSDHTEVSCIDQEDCSTAESSSKRQCSSTSSFSVP

SEQ ID NO: 49127 - protein, 108 aa, Glycine max
  misc_feature (32)..(32): Xaa can be any naturally occurring amino acid
  misc_feature (53)..(53): Xaa can be any naturally occurring amino acid
  misc_feature (84)..(84): Xaa can be any naturally occurring amino acid
  unsure (1)..(108): unsure at all Xaa locations
MCGTERPLVAGNAILITMQLCSAGVLGLCLQXLFQDRYGLAPGVSLFIAAHIXENPIWKALRATTINIGRGPEYEGAGPALFHXVITRTHTGRALWVASYRHNLSNVT

SEQ ID NO: 49128 - protein, 350 aa, Haloarcula marismortui ATCC 43049
MLQRAEPQDFERVLSSMCTVPHPSAREAAERFLATNPGDPGTYETIAGLEREAVEYLGDITGLSDPAGYVASGGTEANLQAIRIARNRADTDDPNVVAPVHAHFSFTKAADVLGVELRTAPAADYRVNMAAMAELVDEDTVCVVGVAGSTEYGYVDPIPAIADLAETVDALCHVDAAWGGFYLPFTDHDWHFGHADIDTMTIDPHKVGQAAVPAGGLLARDRTLLDELAVETPYLESTDQLTLTGTRSGAGVASAVAAMESLWPAGYRQQYETSMANADWLADQLSARGHDVVGPELPLVAADLSMPMTDELRDRGWRVSKTGAGEMRVVCMPHVTRSMLRSFVADLDWY

SEQ ID NO: 49129 - protein, 320 aa, Arabidopsis thaliana
  misc_feature (76)..(76): Xaa can be any naturally occurring amino acid
  unsure (1)..(320): unsure at all Xaa locations
LRSFPEDLDCGNFFDNMDDLMDFPGGDIDVGFGIGDSDSFPTIWTTHHDTWPAASDPLFSSNTNSDFDPELYVPFXDIVKVERPPSFVEETLFESKTTNTTSLVLPGKHGRQFRSSSPVSVLESSSSSSQTTNTTSLVLPGKHGRPRTKRPRPPVQDKDRVKDNVCGGDSRLIIRIPKQFLSDHNKMINKKKKKKAKITSSSSSSGIDLEVNGNNVDSYSSEQYPLRKCMHCEVTKTPQWRLGPMGPKTLCNACGVRYKSGRLFPEYRPAASPTFTPALHSNSHKKVAEMRNKRCSDGSYITEENDLQGLIPNNAYIGVD

SEQ ID NO: 49130 - protein, 560 aa, Listeria monocytogenes str. 4b F2365
MQTELVNQIEVKLRKIYQAAYQPAYLEKMLACAENYSNNARGSIDTISEKNVYLIAYGDSIFEKNKHPLQTLNEFLQEYAQDVITDVHLLPIFPSTSDDGFSVTDYKQIDEQLGDWDDVQKMSENFRVMLDFVANHMSKSSDWFKRFSDNEAPYNQFFIEKDSQFDYKNVTRPRTSPLFHKYENGKELWTTFSEDQLDLNVRNIDCLVALTDVLLFYASKQATSIRLDAIGFLWKTSGTTCMHLPETHEIITLWRLLIDELYPNLQIITETNVPHEENISYFGDGENEANMVYQFPLPPLVLHTFTCHDTTKLSKWAKSISQVSSTATYFNFLASHDGIGMRPATGILSDEEINSLVQKAVQNGGQVSYKDNADGTQSVYELNINYGEALQNPGEDTTEELVTKKIIAAHSILLTLQGVPAIYYHSLLGSKNDLVGYEESGINRRINREKLEKNQLVHELETDTYRQTIFTSLKKLVQIRRNHTVFSPFATQEILDLGPDVFAIKRESEEECIYGIINVTSHNIRKTLAFSGTNLLTNQPVTSELELTAYEVVWIKKAVQ

SEQ ID NO: 49131 - protein, 242 aa, Nostoc punctiforme PCC 73102
MSLKAVLFDFNGVIINDEPIHLQLIDEILIEENLQPQKVSERQASLGRSDRACFQQLLANRGRVANENYLTQLLYRKAQAYTVELEKIEKLPLYPGVEDLIYQVRSRNLKLGLVSGALRQEIELVLHRAKLDQHFKIIVAGDDITTSKPEPDGYLLAVKCLNKEYPELNLQPQECLAIEDTPAGIAAAKRSQMQVVGVANTYPFHMLQRCCNWTVDYLSDLELERVQKIYSQKEPQPSATEC

SEQ ID NO: 49132 - protein, 314 aa, Thuja plicata
MDKKSRVLIVGGTGFIGKRIVKASLALGHPTYVLFRPEALSYIDKVQMLISFKQLGAKLLEASLDDHQGLVDVVKQVDVVISAVSGGLVRHHILDQLKLVEAIKEAGNIKRFLPSEFGMDPDVVEDPLEPGNITFIDKRKVRRAIEAATIPYTYVSSNMFAGFFAGSLAQLQDAPRMMPARDKVLIYGDGNVKGVYVDEDDAGIYIVKSIDDPRTLNKTVYIRPPMNILSQKEVVEIWERLSGLSLEKIYVSEDQLLNMKDKSYVEKMARCHLYHFFIKGDLYNFEIGPNATEGTKLYPEVKYTTMDSYMERYL

SEQ ID NO: 49133 - protein, 265 aa, Tsuga heterophylla
MLLSFKQAGARLLEGSFEDFQSLVAALKQVDVVISAVAGNHFRNLILQQLKLVEAIKEAGNIKRFLPSEFGMEPDLMEHALEPGNAVFIDKRKVRRAIEAAGIPYTYVSSNIFAGYLAGGLAQIGRLMPPRDEVVIYGDGNVKAVWVDEDDVGIYTLKTIDDPRTLNKTVYIRPLKNILSQKELVAKWEKLSGKCLKKTYISAEDFLAGIEDQPYEHQVGISHFYQMFYSGDLYNFEIGPDGREATVLYPEVQYTTMDSYLKRYL

SEQ ID NO: 49134 - protein, 572 aa, Arabidopsis thaliana
MSSCLLPQFKCPPDSFSLHFRTSFCAPKHNKGSVFFQPQCAVSTSPALLTSMLDVAKLRLPSFDTDSDSLISDRQWTYTRPDGPSTEAKYLEAFASETLLTSDEAVVVAAAAEAVALARAAVKVAKDATLFKNSNNTNLLTSSTADKRSKWDQFNEKERAGILGHLAVSDNGIVSDKITAPASNKESSGDLESEKQEEVVLLEEQPSVSLAVRSTRQTERKARRAKGLEKTASGIPSVKTGSSPKKKRLVAQEVDHNDPLRYLRMTTSSSKLLTVREEHELSARIQDLLKLERLQTELTERSGRQPTFAQWASAAGVDQKSLRQRIHHGTLCKDKMIKSNIRLVISIAKNYQGAGMNLQDLVQEGCRGLVRGAEKFDATKGFKFSTYAHWWIKQAVRKSLSDQSRMIRLPFHMVEATYRVKEARKQLYSETGKYPKNEEIAEATGLSMKRLMAVLLSPKPPRSLDQKIGMNQNLKPSEVIADPEAVTSEDILIKEFMRQDLDKVLDSLGTREKQVIRWRFGMEDGRMKTLQEIGEMMGVSRERVRQIESSAFRKLKNKKRNNHLQQYLVAQS

SEQ ID NO: 49135 - protein, 214 aa, Listeria monocytogenes str. 4b F2365
MRFFIDTANVEEIKKANRMGFIAGVTTNPSLVAKEGRDFNEVIQEITSIVDGPISGEVVSLEADEMIAEGRVIAKIHPNMVVKIPMTGEGLAAVKVLTEEGIKTNVTLVFSATQALLAARAGATYVSPFLGRLDDIGDDGLVLIRDIADIFEIYGIPTEIISASVRHPIHVIECAKAGADIATVPFKVFEQMLKHPLTDSGIDKFLADWEAAKK

SEQ ID NO: 49136 - protein, 309 aa, Tsuga heterophylla
MSRVLIVGGTGYIGRKFVKASLALGHPTFVLSRPEVGFDIEKVHMLLSFKQAGARLLEGSFEDFQSLVAALKQVDVVISAVAGNHFRNLILQQLKLVEAIKEARNIKRFLPSEFGMDPDLMEHALEPGNAVFIDKRKVRRAIEAAGIPYTYVSSNIFAGYLAGGLAQIGRLMPPRDEVVIYGDGNVKAVWVDEDDVGIYTLKTIDDPRTLNKTVYIRPLKNILSQKELVAKWEKLSGKFLKKTYISAEDFLAGIEDQPYEHQVGISHFYQMFYSGDLYNFEIGPDGREATMLYPEVQYTTMDSYLKRYL

SEQ ID NO: 49137 - protein, 203 aa, Methylococcus capsulatus str. Bath
MNTHIVWHQSTVTRGQRERQNGHKSFILWFTGLSGAGKSTLAHRVEQLLFEQGCRTYVFDGDNVRHGLCSDLGFSAEDRCENIRRIGEMSKLFVDAGVIALTAFISPFRRDRDLVRALVEPGDFVEIFCDAPLEVCEQRDVKGLYRKARAGEIPEFTGISSPYEKPLAPEITVRTGEDGLDECAGQILGYLEKNGKINLKTTR

SEQ ID NO: 49138 - protein, 341 aa, Arabidopsis thaliana
MASSSPTQLAHVPIPPEPGGRSPTQEANEPPVPIYIVTDPFQLPADFLNPSPEKKLVIGFDCEGVDLCRHGKLCIMQIAFSNAIYLVDVIEGGEVIMKACKPALESNYITKVIHDCKRDSEALYFQFGIRLHNVVDTQIAYSLIEEQEGRRRPLDDYISFVSLLADPRYCGISYEEKEEVRVLMRQDPKFWTYRPMTELMIRAAADDVRFLLYLYHKMMGKLNQRSLWHLAVRGALYCRCLCCMNDADFADWPTVPPIPDNLKSEDQCLEEEILSVLDVPPGKMGRVIGRKGASILAIKEACNAEILIGGAKGPPDKIFVIGPVREVRKAEAILRGRMIDY

SEQ ID NO: 49139 - protein, 390 aa, Oryza sativa
MPSYAHHHSSLDGKMDALKSSCRSEEAADEGAAAAPSAWGMVERDGFSVEDLLDLEEFCEAEKDAAEENEQALALVAAPEEEKSKDDSQPSSVVTYELVAPPPPPPEIVDLPAHDVEELEWVSRIMDDSLSELPPPPQPPASVVASLAARPPQPRQLQRRPQDGAYRALPPASYPVRTPTICALSTEALVPVKAKRSKRSRATAWSLSGAPPFSDSTSSSSTTTTSSCSSSASFSSFSPLLKFEWHPLGGTSDLPDDHLLPPGKKSKHGKNGKNKPKKRGRKPKQLPPHPSGAAASAPAPGDRRCSHCGVQKTPQWRAGPEGAKTLCNACGVRYKSGRLLPEYRPACSPTFVSAIHSNSHRKVLEMRRKKEVGSGLLTAAAAAAPAVASF

SEQ ID NO: 49140 - protein, 368 aa, Gerbera hybrid cv. 'Terra Regina'
MGRAPCCEKVGLKRGRWTAEEDDILTNYIKTHGEGSWRSLPKNAGLLRCGKSCRLRWINYLRSDIKRGNISKEDEDVITKLHASLGNRWSLIAAHLPGRTDNEIKNYWNSHLSRKIIPSRRLLNTPATPVPAKLSSHPLNKRKGRTSRSAMKINKTHKSSSRDIGANNREVDGAIDTTPLAPSIEKESNVYMEPCAASHEYSDDGQKRERHDNEAEVVDDVGMFCFNEIMDGGALTDPHGVLSLAEKETEKDLALMNVVTSEEERQNVSEPISIIGGEEVNKTGSCATSTSTDSCNVGDHDNILSGPWDWKWNFDVEEGMLGLGVEDEDNILSWPWESTTTTDSGNGDTDFVGEDLEKQNAMVAWLLS

SEQ ID NO: 49141 - protein, 506 aa, Bartonella henselae str. Houston-1
MVIDKSFGAPRITKDGVSVAKEIELEDKFENMGAQMLREVASKTNDIAGDGTTTATVLGQAIVQEGVKAVAAGMNPMDLKRGIDAAVDEVVANLFKKAKKIQTSAEIAQVGTISANGAAEIGKMIADAMEKVGNEGVITVEEAKTAETELEVVEGMQFDRGYLSPYFVTNAEKMVADLDDPYILIHEKKLSNLQSLLPVLEAVVQSGKPLLIIAEDVEGEALATLVVNKLRGGLKIAAVKAPGFGDRRKAMLEDIAILTSGQVISEDVGIKLENVTLDMLGRAKKVNISKENTTIIDGAGQKSEINARVNQIKVQIEETTSDYDREKLQERLAKLAGGVAVIRVGGATEVEVKEKKDRVDDALNATRAAVEEGIVAGGGTALLRAANALTVKGSNPDQEAGINIVRRALQAPARQIATNAGEEAAIIVGKVLENNADTFGYNTATGEFGDLIALGIVDPVKVVRSALQNAASIASLLITTEAMVAEVPKKDTPVPPMPGGGMGGMG

SEQ ID NO: 49142 - protein, 190 aa, Gerbera hybrid cv. 'Terra Regina'
MEKRPNNSSQDVEVRKGPWTMEEDLILINYIANHGEGVWNSLARSAGLKRTGKSCRLRWLNYLRPDVRRGNITPEEQLLIMELHAKWGNRWSKIAKHLPGRTDNEIKNYWRTRIQKHIKQVENFSGQTSSGQNDQATMSSTQTCNVVNPMETYSPPYDNFQNFSGPFPTETNENMWSMEDLWSMQLLNSE

SEQ ID NO: 49143 - protein, 449 aa, Helianthus annuus
MERAIERQRVLLEHLRPSSTSSSLENLSVSVCAAGDSAAYQRNSVFGDDVVIVAAYRSPLCKAKRGGLKDTYPDDILAPVLKALIEKTNINPAEVGDIVVGSVLGAGSQRASECRMAAFYAGFPETVPVRTVNRQCSSGLQAVADVAAAIKAGFYDIGIGAGLESMTANPMAWEGSVNPKVKTMAQAQDCLLPMGITSENVAQKFSITRQEQDQAAVGSHRKAAAATAAGRFKDEIIPIKTKIVDPKTGDEKPVTISVDDGIRPGTSLADLAKLKPVFRKDGSTTAGTSSQVSDGAGAVLLMKRSIALQKGLPILGVFRTFAAVGVPPSIMGIGPAVAIPAAVKAAGLQIDDIDLFEINEAFASQFVYCQKKLEIDPQKINVNGGAMAIGHPLGATGARCVATLLHEMKRRGRDCRFGVVSMCIGTGMGAAAVFERGDACDELCNAKAK

SEQ ID NO: 49144 - protein, 266 aa, Gerbera hybrid cv. 'Terra Regina'
MGRTPCCSKVGLHRGAWAIEEDKLLTDYIQTHGEGQWRALPSNAGLLRCGKSCRLRWMNYLRPGIKRGTFTSDENDVIIRLQSLHGNRWSLIAAELPGRTDNEIKNHWNSHLRRKSAENADTHHGKVSKNNKKAKKKRKSDDRRAETTTPEKSKKVKLPDSSVSSSSSCVSLSKNDSSDNGIMSSTGASSSCTIDLEDADFDFSWSDWTPLLEVEGTTSINGEQDKGFLMDGCDLLMSKEDESLRLEKLYYEYLDLLDHEDGDGNN

SEQ ID NO: 49145 - protein, 208 aa, Magnetospirillum magnetotacticum MS-1
MKLYSLSLSGHAHRARLFLSLLGVPYEVVEVDLAGGQHKSQDFLALNPFGQVPVLDDDGTIVPDSNAILVYLAKKFGRGDWLPEDPEGAARVQRWLSVAAGPIAFGPAAARLVTLFGASFDTGEVIARAHAILTLVDAELSARDWLAAGHPTIADVALYSYIAVAPEGNVDLAPYAHLGAWLARIEALPGFEPLPRSAVGLSAEEGRA

SEQ ID NO: 49146 - protein, 50 aa, Brassica napus
STHAVRSIKNRTHAHYGWHRNQDGYAVEADTMWFYNRFWHPVDDSPSFDS

SEQ ID NO: 49147 - protein, 330 aa, Zea mays
MGRAPCCEKVGLKRGRWTAEEDQLLANYIAEHGEGSWRSLPKNAGLLRCGKSCRLRWINYLRADVKRGNISKEEEDIIIKLHATLGNRWSLIASHLPGRTDNEIKNYWNSHLSRQIHTYRRKYTAGPEDTAIAIDMSKLQSTDRRRGGRTPGRPPKTSASRTKQPDADQPGGEAKGAAASSPRHSDAVNPGPNQPNSSSGSTGTAEEEGPSSEDASGPWVLEPIELGDLVWGEADSEMDALMPIGPGGHDSAALEGLGAVGCEAQVDDLFDMDWDGFAAHLWGGPEQDDHSAQLRQAAEPLEASAAATAACTPDDRELEAFENWLLSDSF

SEQ ID NO: 49148 - protein, 513 aa, Streptomyces avermitilis MA-4680
MRTDSSPGNLPAREHLPAGNAGTPVLDVVIPVYNEEKDLQPCVLRLHEHLARTFPYAFRITIADNASTDTTPQVAARLEAEIPEVKSFRLEQKGRGRALRTVWSASDAPILAYMDVDLSTDLNALLPLVAPLISGHSDLAIGSRLSRSSRVVRGAKREFISRTYNLILRGSLQARFSDAQCGFKAIRRDVAQVLLPLVEDSGWFFDTEMLVLAERAGLRIHEVPVDWVDDPDSTVHIVKTATDDLKGVWRVGRALATGSLSLDRLARPFGDDPRDRELADVPKGLARQLVGFCVVGGLSTLFYLLLYSGFRSFTGSQIANALALLVSAVANTAANRRLTFGVRGRGGAVRHQAQGLVVFGIGLALTSGSLAALNAATSSPAHATELAVLIAANLAATVLRFLLFRAWVFPDRRDADAESTVVASHAPSSPTYSTALPHHQGHHQGHHPGQYQGQYEGQYQGQHSPQPQRPPAPAAPYDTAQFRAGEAADRTWGDSTMQMQAVRPHDHDPRNAR

SEQ ID NO: 49149 - protein, 230 aa, Pisum sativum
MQEFHSIEGVNHHQHLNHALKCPRCDSFNTKFCYYNNYNLSQPRHFCKNCRRYWTKGGVLRNVPVGGGSRKSKHSKNSKAVSSSSSTASSPPGADEHKSNSESSTFTAAATEAISNTPISNAAVTPSSKNDAFLFGNNIIDASSFGFGFNHQHQRQHGNDQVHVAQQQNSHQRLSLLHQQQLSNGFGSLDWEASAGNCLFDVPNTVGQPYWTHSHWSDHHVNQSSLFHLP

SEQ ID NO: 49150 - protein, 120 aa, Zea mays
MADYVYGPGRNHLFVPGPVNIPDQVIRAMSRQNEDYRSPAVPALTKTLLEDVKQIFKTTTGTPLLLPTTGTGAWESALTNTLSPGDKIVSFLIGQISLLWIDQQQRLNFNVDVVESDWGY

SEQ ID NO: 49151 - protein, 214 aa, Zea mays
MPHLAATPPTSSAAAVPAAGRIAFRRHWSTPLPEPPRLRLRLRTRARGVRREDGGGVRTEEQEQSQTQTAPRTFYELLGISSRGSPDDVRAAYRRMALMYHPDVSPPGAAAENTRRFIEVQEAYETLSDPSRRASYDRALARGVCRIGFSGRRSQSHRAYCHHQEQEDKSCWRRSWEDQVAELQRRSMAEDSEENLSWGARMRRRRAEASSAAE

SEQ ID NO: 49152 - protein, 447 aa, Glycine max
MGKEKTHINIVVIGHVDSGKSTTTGHLIYKLGGIDKRVIERFEKEAAEMNKRSFKYAWVLDKLKAERERGITIDIALWKFETTKYYCTVIDAPGHRDFIKNMITGTSQADCAVLIIDSTTGGFEAGISKDGQTREHALLAFTLGVKQMICCCNKMDATTPKYSKARYDEIVKEVSSYLKKVGYNPDKIPFVPISGFEGDNMIERSTNLDWYKGPTLLEALDQINEPKRPSDKPLRLPLQDVYKIGGIGTVPVGRVETGVVKPGMVVTFGPTGLTTEVKSVEMHHEALTEALPGDNVGFNVKNVAVKDLKRGFVASNSKDDPAKEAANFTSQVIIMNHPGQIGNGYAPVLDCHTSHIAVKFSEILTKIDRRSGKELEKEPKFLKNGDAGMVKMIPTKPMVVETFSEYPPLGRFAVRDMRQTVAVGVIKSVEKKDPTGAKVTKAAAKKK

SEQ ID NO: 49153 - protein, 141 aa, Chlamydia trachomatis D/UW-3/CX
MEQTLSIIKPDSVGKAHIGEIIAIFEKSGLRIAAMKMVHLSVKEAEGFYVVHKERPFFQELVDFMISGPVVVMVLQGENAVDRNRELMGATNPKEAAEGSIRALFGESIGVNAVHGSDSLENAAIEVSYFFAKTEIVNSVA

SEQ ID NO: 49154 - protein, 648 aa, ASPERGILLUS NIDULANS FGSC A4
MEALLQQSRAMCPFLKRSSPNTLRSLATATRPSTSPGGGTMTNLQRIARRCPVMSKALAVQSARMTGTKRFTSSAAGVPGAGAGTPKPTRGSPGKRALHSTGGNGANMSTEFHKGAQQIHPGLSNATRSHVGASATVSGPTPRAPVAAPFDYDAFYNAELQKKHQDKSYRYFNNINRLAQEFPRAHTASKDEKVTVWCSNDYLGMGRNPEVLATMHKTLDTYGAGAGGTRNISGHNQHAVSLENTLAKLHGKEAALVFSSCFVANDATLATLGSKMPDCVILSDSLNHASMIQGIRHSGAKKMVFKHNDLVDLETKLASLPLHVPKIIAFESVYSMCGSIAPIEAICDLADKYGAITFLDEVHAVGMYGPHGAGVAEHLDYEIYASQDTANPLSTKGTVMDRINIITGTLGKAYGCVGGYIAGSAALVDTIRSLAPGFIFTTSLPPATMAGADTAIRYQARHQQDRILQQLHTRAVKQSFKDLDIPVIPNPSHIVPLLVGDAELAKQASDKLLEEHGIYVQAINYPTVPRGEERLRITPTPGHTQELRDHLVEAVNTVWNDLGIKRASDWKAMGGFVGVGVEAAELENQPIWTDAQLNMRPDETLEAAVEREFQAAVPGMKAGGAKAKPVGSIAANPIGASIPVAAAA

SEQ ID NO: 49155 - protein, 537 aa, Arabidopsis thaliana
MSMVDEPLYPIAVLIDELKNDDIQRRLNSIKRLSIIARALGEERTRKELIPFLSENNDDDDEVLLAMAEELGGFILYVGGVEYAYVLLPPLETLSTVEETCVREKAVDSLCRIGAQMRESDLVEHFTPLAKRLSAGEWFTARVSACGIFHIAYPSAPDVLKTELRSIYGQLCQDDMPMVRRAAATNLGKFAATIESAHLKTDIMSMFEDLTQDDQDSVRLLAVEGCAALGKLLEPQDCVAHILPVIVNFSQDKSWRVRYMVANQLYELCEAVGPEPTRTDLVPAYARLLCDNEAEVRIAAAGKVTKFCRILNPELAIQHILPCVKELSSDSSQHVRSALASVIMGMAPVLGKDATIEHLLPIFLSLLKDEFPDVRLNIISKLDQVNQVIGIDLLSQSLLPAIVELAEDRHWRVRLAIIEYIPLLASQLGVGFFDEKLGALCMQWLQDKVHSIREAAANNLKRLAEEFGPEWAMQHIVPQVLEMINNPHYLYRMTILRAVSLLAPVMGSEITCSKLLPAVITASKDRQFQTSNLTWPK

SEQ ID NO: 49156 - protein, 382 aa, Geobacillus kaustophilus HTA426
MREAVIVEAVRTPVGKRNGVFRDVHPVHLAAVVLDEVVRRAGMDKGAVEDIVMGCVTPVAEQGYNIGRLAALEAGFPIEVPAVQINRMCGSGQQAIHFAAQEIRSGDMDVTIAAGVESMTKVPILSDGNERTIPPSLHEKYEFIHQGVSAERIAKKYGLTREELDAYAYESHQRALAALREGKFRAEIVPVKGLDRDGREILVTDDEGPRADTSPEALAALKPVFQEDGLITAGNASQMSDGAAAVLLMEREAARRFGLKPKARIVAQTVVGSDPTYMLDGVIPATRQVLKKAGLSIDDIDLIEINEAFAPVVLAWQKEIGAPLEKVNVNGGAIALGHPLGATGAKLMTSLVHELERRGGRYGLLTICIGHGMATATIIERE

SEQ ID NO: 49157 - protein, 203 aa, Triticum aestivum
MDPTKSSTPPPPPVLGAPVGYPPGAYPPPPGAPAAAYPPQLYAPPGAAAAQQAAAQQQQQLQVFWAEQYREIEATTDFKNHNLPLARIKKIMKADEDVRMIAAEAPVVFARACEMFILELTHRGWAHAEENKRRTLQKSDIAAAIARTEVFDFLVDIVPRDDAKDAEAAAAAAMATAAAGIPRPAAGVPATDPSMAYYYVPQQ

SEQ ID NO: 49158 - protein, 283 aa, Oenococcus oeni PSU-1
MSILDETFQLNNGNQIPKVAFGTWRLKDGDEAYQAVAAALKIGYRHIDTAFHYFNEPSVGQAIKDSGIKREDIFLTTKLPAEIKNHDDILKNFQESLDRLQTDYVDLYLIHAPWPWADINLDYRYDGANREAWQAMEEIYKSGRAKAIGVSNFDVHDLKNIQQIWSVKPAVNQIEFYVGWTQPKIAAYTKSLDIQLEAYSPLATGGLATQPDIQKIAEKYQVSVPRVALKYVLQKNVLPLPRATKAEHVKSNAELDFEISAADMEVLDKLPDTGQARHNVTMG

SEQ ID NO: 49159 - protein, 481 aa, ASPERGILLUS NIDULANS FGSC A4
MPRVASRPSSFQEGNESLLMTDLNRPAAHASNGNGSTLPIHDGPERHKFRRELFRVHTAGQSGRSGVHPLLFFKVCFRSTCTLSMIVNVLWPFVPAAVAIHFARPDLHVWIFALNYIAMVPSANLLGFAGGELAKKLPKVFGVLLETTLSSVVEIVLFMVLIHNDQGGNLIPVIQAAILGSILANLLLCLGLCFFFGGLGREDQVFHEAVSEVGSGLLLVAGFGLLIPSAFYATLVSGSTNTTAQRADIVRSTLEISRATAIILLAAFLMFLFYNLHSHHTIFDEILEHDENRDEDRDKEEKRAKLTLTECLIAIAIALTFVCMSAVFLVNEIEHIVLEQGVPDNFMGLILVPVVEKAAEHLTAIDEAWDNQINFALFHCLGPSIQTALLNAPLAVIVGWGLNKDVSLNYEIFMIVLVVLAILVVGNFLRDGRSNYLEGGLCVLVYIIIAVTTWYYPPVEPLGSEGGTEAAAEAVAHRLML

SEQ ID NO: 49160 - protein, 205 aa, Shewanella oneidensis MR-1
MSNIVWHQHSVDQAARARLKGQNPVLLWFTGLSGAGKSTLAGALERALFEAGFHTYLLDGDNVRHGLCKDLGFSVADRDENLRRVGEVAKLMVDAGLVVLSAFISPTREERDSIRARFPEGQFIEVHVSTPLSVCELRDPKGLYVKARKGEIAHFTGISSPYEAPLSAELTIDTSKGDLASQVHALIDYLTAIDVISSNRLASLA

SEQ ID NO: 49161 - protein, 341 aa, Securigera parviflora
RNKEYLPIVGLADFNKLSAKLIFGADSPAIQENRVVTVQCLSGTGSLRVGGEFLGKHYHQRIIYLPQPTWGNHPKIFNLAGLSVKTYRYYAPATRGLDFQGLLEDLGSAPSGSIVLLHACAHNPTGVDPTLEQWEQIRKLIRSKPLLPFFDSAYQGFASGSLDADAQSVRSFVADGGELLMAQSYAKNMGLYGERVGALSIVCKSADVASLAESQLKLVIRPMYSNPPLHGASIVATILKDRNLYNEWTIELKAMADRIISMRQQLFDALRAKGTPGDWSHIIKQIGMFTFTGLNPEQVSFMTKEYHIYLTSDGRISMAGLSSKTVSHLADAIHAAVTRGH

SEQ ID NO: 49162 - protein, 234 aa, Streptococcus pneumoniae R6
MMNELFGEFLGTLILILLGNGVVAGVVLPKTKSNSSGWIVITMGWGIAVAVAVFVSGKLSPAHLNPAVTIGVALKGGLPWASVLPYILAQFAGAMLGQILVWLQFKPHYEAEENAGNILATFSTGPAIKDTVSNLISEILGTFVLVLTIFALGLYDFQAGIGTFAVGTLIVGIGLSLGGTTGYALNPARDLGPRIMHSILPIPNKGDGDWSYAWIPVVGPVIGAALAVLVFSLF

SEQ ID NO: 49163 - protein, 571 aa, Wolbachia pipientis
VLESSEDEEDIPSNSDDSKLDDDDTSPNVTATLVQNDDPVRIYLQDMSSVKLLSRADEIEIAKKIESEKHNMLRAIIETSVTLKVIKVWRDDLSNGALLLREIIDLDAIYNSDFNVVPKEESEESEESAEDVEDSEDVSEDAEYCSDDEKDSKKSDDEKDGNNEDISSVNLNVSILEMESDLLPKVIVALDEIITLTNEALILRKNSKNFSNELENLYNQIWSIALQIKLSDAAVARITQELYKINRSITLEEANLIAEARKYDIDRESFYKVYDDVLLKHELKKISLLKINENQSSFTGELKNKFLRFIDDNSEHIASTLNGIKQHIQEDNVQEFKELIKRIQKHEREVSEAKQEMIKANLRLVVSIAKKYSKRGLDLLDLIQEGNIGLMKAVDKFDYKRGYKFSTYGTWWVRQSITRAIPEQSKVVRIPVHMVEIISKINRALRKMTHEMGREPTLEELSVELTMPLERIRKVMKIARDPVSLEAPTGKDDSSTFGDCIEDKRVSRPEDAAILADLRGITTNVLATLTPKEERILRMRFGLGKDGKEHTLEEVGKIFNVTRERIRQIEA

SEQ ID NO: 49164 - protein, 464 aa, Bartonella quintana
MAGDGTTTATVLGKGIVQEGVKAVAAGMNPMDFKRGIDAAVEEVVGNLFKKAKKIQNSGEIGQVGKISANGGGEIGKMIADAMEKVGNEGVIIVEEAKTAETELEVVEGMQFDRGYLSPYFVTNADKMVADLDDPYILIHEKKLSNLQSLLPVLEAVVQSGKLLLIIAEDVEGEALATLVVNKLRGGLKIAAVKAPGFGDRRKAMLEDIAILTSGQVISEDVGIKLENVTLDMLGRAKKVNISKENTTIIDGAGKKAEINARVNQIKVQIEETTSDYDREKLQERLAKLAGGVAVIRVGGATEVEVKEKKDRVDDALNATRAAVEEGIVAGGGTALLRAANALAIKGSNPDQEAGINIVRRALQAPARQIATNAGEEAAIIVGKVLENNADTFGYNTATGQFGDLIALGIVDPVKVVRSALQNAASIASLLITTEAMVAEVPKKDTPMPPMPGGGMGGMEYAEF

SEQ ID NO: 49165 - protein, 322 aa, Neurospora crassa
MVFNLYTTSSPAASADSGPIKPIYLLPSFSLPFRRRRPSTTLTQTYDHRLDDTESDGLPSLSSSPDSFTTAFSSDYTPIQPTSTRLSPIQPDILRCAHCASDIAFTSQIISKGFHGRHGRAYLVSPTPSQAPGPHPSFGFFSSLIHLPSSAATRTTELPNIFTEAPEIRRLVTGQHTVADITCAVCGTKLGWKYVDAKESSQKYKVGKFILECARVVTFRSWEDSPKDEQEGVVGDMGKNGRRGLVKGASGKRKQKEAAAEEAAVRGEEQEPVSPTAVIFDSDNDSECDDIFAGVWDAETVAKRRKGKLTNMKPPRGGLFWS

SEQ ID NO: 49166 - protein, 288 aa, Zea mays
MSFLLKEKEMIIAAGIVASMGRGRIEIKRIENNTSRQVTFCKRRNGLLKKAYELSVLCDAEVALIVFSSRGRLYEYANNSVKATIERYKKAHTVGSSSGPPLLEHNAQQFYQQESAKLRNQIQMLQNTNRHLVGDSVGNLSLKELKQLESRLEKGISKIRARKSELLAAEISYMAKRETELQNDHMTLRTKIEEGEQQLQQVTVARSVAAAAAATTNLELNPFLEMDTKCFFTGGPFATLDMKCFLPGSLQQMLEAQQRQMLATELNLGYQLAPPGSDAADNNPHHQF

SEQ ID NO: 49167 - protein, 474 aa, Bartonella clarridgeiae
MRLREVASKTNDIAGDGTTTATVLGQAIVQEGVKAVAAGMNPISSRWELNAAVEEVVENLFKKAKKIQTSAEIAQVGTISANGASEIGKMIADAMEKVGNEGVITVEEAKTAETELEVVEGMQFDRGYLSPYLVTNAEKMVTDLDDPYILIHEKKLSNLQSLLPVLEAVVQSGKPLLIIAEDVEGEALATLVVNKLRGGLKIAAVKAPGFGDRRKAMLEDIAILTAGQVISEDVGIKLENVTLDMLGRAKKVNISKENTTIIDGAGHKAEITARVSQIKAQIEETTSDYDREKLQERLAKLAGGVAVIRVGGATEVEVKEKKDRVDDALNATRAAVEEGIVAGGGTALLRAANALTIKGKNPDQEAGIHIVRRALQAPARQIATNAGEEAAIIVGKVLENSSDTFGYNTATGQFGDLIALGIVDPVKVVRSALQNAASIASLLITTEAMVAELPKKETPMPPMGGGGMGGMGGM

SEQ ID NO: 49168 - protein, 441 aa, Corynebacterium glutamicum ATCC 13032
MTNQFPTNNGENPDRASETPSETNSFEHVRSSYPQWGNTASNQNPYPGAGFGSEQNTQQGNEQQAPAWTSWDNQPLSTDVKPAKEKRKVGIGTALALMLVGSIATGSVVGVAATQLGSDSSTPVNALEQPSVQRTTNAEPGSAEQVAAAVLPSVVSIQAITRTSASEGSGSIISSDGYVMTNNHVVAGIEQSGVLEVSFSDGTTAQADFIAGDPSTDIAVIKIRDVSNLPVMSFGDSDALGVGQSVMAVGSPLGLSSTVTTGIVSAVNRPVRASGDGGESSLIDAIQTDAAINPGNSGGPLVDMDGNLIGMNSVIASISSTSDSAGSIGLGFSIPSNFAKRVADQLISTGQVTQPMIGVQVGTDNSVTGAVIASVQDGGPAADAGLQPGDIVTKLNDRVIDSPDSLIAAVRSHDFGETVTLTITQPDTSQSREVEVTLTSE

SEQ ID NO: 49169 - protein, 483 aa, Bartonella doshiae
MVIDKSFGAPRITKDGVSVAKEIELEDKFENMGAQMLREVASKTNDIAGDGTTTATVLGQAIVQEGVKAVAAGMNPMDLKRGIDAAVEEVVANLFKKAKKIQTSAEIAQVGTISANGAAEIGKMIADAMEKVGNEGVITVEEAKTAETELEVVEGMQFDRGYLSPYFVTNAEKMVADLDDPYILIHEKKLSNLQSLLPVLEAVVQSGKPLLIIAEDVEGEALATLVVNKLRGGLKIAAVKAPGFGDRRKAMLEDIAILTSGQVISEDVGIKLENVTLDMLGRAKKVNISKENTTIIDGAGQKAEINARVNQIKAQIEEQHSDYDREKLQERLAKLAGGVAVIRVGGATAVEVQVKKDRVDDACHATRAAVEEGIVAGGGTALLRAANALTVKGSNPDQEAGINIVRRALQAPARQIASNAGEEAAIIVGKVLENNADTFGYNTATGQFGDLISLGIVDPVKVVRSAKPNCADIHHTGGRSSMH

SEQ ID NO: 49170 - protein, 381 aa, Thermoplasma volcanium GSS1
MAMTTEFANEITDVAKAIYEYAELGSSEYKSSSYLVEAFKRHGFQVDFPYLGMKTAFKARYFNGKPMVGLLAEYDALPNGHSCGHDLIAAWAFGTAIRLKDEFGISVTVFGTPSEEGIGEYAGSKAKFAQSGAFSDVDYVIGMHPDDRWAVGSTSLADLTIEAQFIGKSSHLLSPDYGINALDPLVESYVALSNFRRSVPNSKYPVIGMIVKEGGRASNVIPDKASMEIDIRAKKKADLAGFVDQIERILKMEGEMHYCKLNINEVTPIYDEYKSNRVIDSLLEEECQKHAVNPFNVDRSGEEPMGSTDEANVSQVIPTGHLDVKIVDPGIPAHTDEFRIAADPSRSGKTLLKAIDITVETIKTIWQDKKFMNKIKEEFKK

SEQ ID NO: 49171 - protein, 503 aa, Bartonella grahamii
MVIDKSFGAPRITKDGVSVAKEIELEDKFENMGAQMLREVASKTNDIAGDGTTTATVLGQAIVQEGVKAVVADMNPMDLKRGIDAAVDEVVANLFKKAKKIQTSAEIAQVGTISANGAAEIGKMIADAMEKVGNEGVITVEEAKTAETELEVVEGMQFDRGYLSPYFVTNAEKMVADLDDPYILIHEKKLSNLQSLLPVLEAVVQSGKPLLIIAEDVEGEALATLVVNKLRGGLKIAAVKAPGFGDRRKAMLEDIAILTSGQVISEDVGIKLENVTLDMLGRAKKVNISKENTTIIDGAGQKSEITARVNQIKAQIEETTSDYDREKLQERLAKLAGGVAVIRVGGATEVEVKEKKDRVDDALNATRAAVEEGIVAGGGTALLRAANALTVKGSNPDQEAGIHIVRRALQAPARQIATNAGEEAAIIVGKVLENNADTYGYNTATGEFGDLIALGIVDPVKVVRSALQNAASIASLLITTEAMVAEVPKKDTPMPPMPVAEWC

SEQ ID NO: 49172 - protein, 497 aa, symbiont bacterium of Paederus fuscipes
MTTPTRADWEIRAKDLNIEGRAFVNGEYRNAASGETFDCLSPVDGRFLAKVASCDQADAEQAVKAARAAFDSGVWSRLAPAKRKRTMIRFADLLLKNAEELALLETLDMGKPISDSLHIDVSSAANSIYWNAEAIDKIYDEVAATPHEELGLVTREPVGVVTAIVPWNFPLLMACWKLGPALATGNSVILKPSEKSPLTAIRIACLATDAGIPTGVFNVLPGYGHTVGKALALHMDVDTLVFTGSTRIAKQLMIYAGESNMKRIWLEAGGKSPNIVFADAPDLKAAAEAAASAIAFNQGEVCTAGSRLLVERSIKDRFLPLVVEALKGWKPSNPLDPDTNVGALVDTQQLHTVLSYIEAGHKDGARLMVGGKRILEETGGVYVEPTLFDGVDNAMKIAREEIFGPVLSVITFENAEEAVRIANNTQYGLAAAVWTSDLSKAHLTAKALRAGSVWINQYDGGDMTAPFGGFKQSGNGRDKSLHAFDKYTELKATWIKL

SEQ ID NO: 49173 - protein, 483 aa, Bartonella elizabethae
MKLEDNFENMGAQMLREVASKTNDIAGDGTTTATVLGQAIVQEGVKAVAAGMNPMDLKRGIDAAVDEVVANLFKKAKKIQTSAEIAQVGTISANGAEEIGKMIANAMEKVGNEGVITVEEAKTAETELEVVEGMQFDRGYLSPYFVTNAEKMVADLDDPYILIHEKKLSNLQSLLPVLEAVVQSGKPLLIIAEDVEGEALATLVVNKLRGGLKIAAVKAPGFGDRRKAMLEDIAILTSGQVISEDVGIKLENVTLDMLGRAKKVNISKENTTIIDGAGQKAEITARVNQIKAQIEETTSDYDREKLQERLAKLAGGVAVIRVGGATEVEVKEKKDRVDDALNATRAAVEEGIVAGGGTALLRAASALSVKGSNPDQEAGINIVRRALQAPARQIATNAGEEAAIIVGKVLENNTDTFGYNTATGEFGDLIALGIVDPVKVVRSALQNAASIASLLITTEAMVAEMPKKEAAAPPMPAGGMGGM

SEQ ID NO: 49174 - protein, 334 aa, Chlamydia trachomatis D/UW-3/CX
MRIVINGFGRIGRLVLRQILKRNSPIEVVAINDLVAGDLLTYLFKYDSTHGSFAPQATFSDGCLVMGERKVHFLAEKDVQKLPWKDLDVDVVVESTGLFVNRDDVAKHLDSGAKRVLITAPAKGDVPTFVMGVNHQQFDPADVIISNASCTTNCLAPLAKVLLDNFGIEEGLMTTVHAATATQSVVDGPSRKDWRGGRGAFQNIIPASTGAAKAVGLCLPELKGKLTGMAFRVPVADVSVVDLTVKLSSATTYEAICEAVKHAANTSMKNIMYYTEEAVVSSDFIGCEYSSVFDAQAGVALNDRFFKLVAWYDNEIGYATRIVDLLEYVQENSK

SEQ ID NO: 49175 - protein, 316 aa, Helicobacter pylori J99
MQEFSLWCDFIERDFLENDFLKLINKGAICGATSNPSLFCEAITKSAFYQDEIAKLKGKKAKEIYETLALKDILQASSALMPLYEKDPNNGYISLEIDPFLEDDAIKSIDEAKRLFKTLNRPNVMIKVPASESAFEVISALAQASIPINVTLVFSPKIAGEIAQILAKEARKRAVISVFVSRFDKEIDPLVPQNLQAQSGIMNATECYYQINQHANKLISTLFASTGVKSNSLAKDYYIKALCFKNSINTAPLDALNAYLLDPNTECQTPLKITEIEAFKKELKTHNIDLENTAQKLLKEGLIAFKQSFEKLLSSF

SEQ ID NO: 49176 - protein, 150 aa, Nostoc sp. PCC 7120
MTLIRWNPWQDLNTLQRQLNHLFEEDMLPSTLLERTLTRVPAAELHETAEVIYLKLELPGIDAKDVDLQVTDKAVYISGERKSETKTEDKGVFKSEFQYGKFQRVIPLPARIQNTNVTAEYKDGILNLTLPKAEVEKNKVVKINIESAAG

SEQ ID NO: 49177 - protein, 463 aa, Glycine max
MASSFLSAASHAVSPSCSLSTTHKGKPMLGGNTLRFHKGPNSFSSSRSRGRISMAVAVNVSRFEGIPMAPPDPILGVSEAFKADNSDVKLNLGVGAYRTEELQPYVLNVVKKAENLMLERGDNKEYLPIEGLAAFNKATAELLLGADNPAIKQQRVATVQGLSGTGSLRLGAALIERYFPGAKVLISAPTWGNHKNIFNDASVPWSEYRYYDPKTVGLDFEGMIEDIKSAPEGSFILLHGCAHNPTGIDPTPEQWEKIADLIEEKNHIPFFDVAYQGFASGSLDEDAASVRLFVARGIEVLVAQSYSKNLGLYAQRIGAINVISSSPESAARETSQLKRIARPMYSNPPVHGARIVADVVGNPVLFNEWKAEMEMMAGRIKNVRQQLYDSITSKDKSGKDWSFILKQIGMFSFTGLNKNQSDNMTNKWHVYMTKDGRISSAGLSLAKCEYLADAIIDSYHNVS

SEQ ID NO: 49178 - protein, 635 aa, ASPERGILLUS NIDULANS FGSC A4
MAATDRAVNETSPLVGARTTDDADVDSMTFVNGSGNEAPHDMPETKTSWYLFILTLSIGGLQVVWSVELSSGSPYLLSLGMSKALLAFVWIAGPITGTLVQPYIGIRSDNCRISWGKRKPFMIVGGAVTIATLLGLAWVKEFVGGFLVLFGGDPKSEGANIVIGIVATMMMWCLDFAINTVQAGIRCFIVDNAPAHQQESANAWASRMTGVGNIIGYIFGYINLPKLFPYLGNTRFQILCALASISLAVTLLISCSYIQERDPRLDGPPPSGSMGVVGFFKQVFKSIKHLPPQAAKVCEVQIAAWIAWFPFLFYATTYIGQLYVNPIFEKNPGLSDSDIDKAWEDATRVGTLALLIYALVSFVANITLPIFVVPTYKPVLSSDSSEVDIRQEAEPCLRVERQSSSDIEVGLVAELHPEVLRDKARGSAESKSWSSKLQIPGLTLRRTWLLSQILFALCMFSTFFITSVTAATVVVGLIGIPWALSLWAPFALISAEVATLEEQRRSRRQRSELTTFDEQMSPQIDRDAADDNDDDDDDDDNDDNDAETGSSRSPKTPGDENSAQAGIVLGLHNVAVSAPQVLSSLICSAIFRASQKPRGEPYDESVGWVLRFGGCAALLAAWLTSRLSEGTPRKR

SEQ ID NO: 49179 - protein, 548 aa, Rickettsia conorii str. Malish 7
MATKLIKHGSKAREQMLEGIDILADAVKVTLGPKGRNVLIEQSFGSPKITKDGVTVAKSIELKDKIRNAGAQLLKSAATKAAEVAGDGTTTATVLARALAREGNKLVAAGYNPMDLKRGMDLAVNAVVEEIKKSSKKINSQEEIAQVGTISSNGDKEIGEKIAKAMEEVGKEGVITVEEAKNFSFDVEVVKGMMFDRGYLSPYFVTNSEKMVAELENPFILLFEKKLSNLQPMLPILEAVVQSQRPLLIIAEDVEGEALATLVVNRLRGGLKVAAVKAPGFGDRRKAMMEDIAILTKGELITEDLGMKLENVSIKSLGTAKRVTISKENTVIVDGNGDKKNIEDRVLQIKSQIAETTSDYDKEKLQERLAKLSGGVAVLKVGGATEVEVKERKDRVEDALAATRAAVEEGVVAGGGVTLLHASQPLTKLKVENKDQQAGIEIVIEALKDPLKQIVENAGENGGVVVGKLLEHKDKNYGFNAQDMQYVDMIKAGIIDPAKVVRTALQDAASVASLIITTETLIVDEPSSDKAEPMPMRGGMGGMGGMDF

SEQ ID NO: 49180 - protein, 99 aa, Rickettsia conorii str. Malish 7
MEVKMSFKPLHDRIAIKPIEQEEKTKGGIIIPDTVKEKPMQGEIVAVGNGIRNEKGEIHPLELKVGDKVLYGKWAGTEIEIKGTKLIVMKESDVFGIIN

SEQ ID NO: 49181 - protein, 363 aa, Bacillus cereus ATCC 14579
MRRNTYDGRMKNMFNKIFLIVALIGVPLSVLGKTLHWPETIMFAVYCVTIIALAGFMGRATESLAIVSGPRIGGLLNATFGNAVELIISIFALQAGLIEVVLASLTGSVLGNLLLVGGSSFFVGGLKYKRQSFNVYDARHNSALLIFAVVVAFVIPEIFSMKMDAGKTYQLSIGVSIIMIIMYLAALLFKLVTHRGVYQHKSDEVAHEEEPEWSKGKALLILAIATLAVAYVSEALVHTFETVAKSFGWSELFIGVIIVAIVGNAAEHASAIIMAYKNKVNIAVEIAIGSTLQIAMFVAPVLVLLSMFFAQRMPLVFTIPELVSMITAVFLTIAISNDGDTNWFEGGTLLAAYVIMGIGFYLL

SEQ ID NO: 49182 - protein, 283 aa, Oenococcus oeni PSU-1
MVMMTKNNCEEILNDIYNLILNPATSAWERSLLSSAKNAIGEDMNFERQLSKLEFELRPLAVRNNLTADVTDFYMKITGNSPDHLQFDFSKHYAKDLSYQDRAIFAGGCFWCMVEPFENERGIVSVLSGYTGGHVDHPTYEQVVSGYTGHVEAVEIIFDTRIIQYTELLDLYWQITDPTDEFGQINDHGDNYRPVIFVRNEEQRKIAESSKLKLAESGMYNRPIVTAIEPATKFWPAENFHQQFYKKNPKKYKIIEKSRQRYLAFQHLQGRIRLGLKGLTKKH

SEQ ID NO: 49183 - protein, 668 aa, Geobacillus kaustophilus HTA426
MAHSIEELAITTIRTLSIDAIEKAKSGHPGMPMGAAPMAYTLWTKFMNHNPANPNWFNRDRFVLSAGHGSMLLYSLLHLSGYDVSMDDLKQFRQWGSKTPGHPEYGHTPGVEATTGPLGQGIAMAVGMAMAERHLAAAYNRDGFEIINHYTYAICGDGDLMEGVASEAASLAGHLKLGRLIVLYDSNDISLDGELNLSFSENVAQRFQAYGWQYLRVEDGNNIEEIAKALEEARADLSRPTLIEVKTTIGYGAPNKAGTSGVHGAPLGAQEAKLTKEAYRWTFAEDFYVPEEVYAHFRETVQEAGAKKEAEWNEQFAAYERAHPELAAELKRAIEGKLPDGWEAALPVYEAGKSLATRSSSGEVINAIAKAVPQLFGGSADLASSNKTLIKGGGNFLPDSYEGRNIWFGVREFAMGAALNGMALHGGLKVFGGTFFVFSDYLRPAIRLAALMGLPVIYVLTHDSIAVGEDGPTHEPIEHLASLRAMPNLSVIRPADANETAAAWRLALESTDKPTALVLTRQDVPTLAATAELAYEGVKKGAYVVSPAKNGAPEALLLATGSEVGLAVKAQEALAAEGIHVSVISMPSWDRFEAQPKSYRDEVLPPAVTKRLAIEMGASLGWERYVGAEGDILAIDRFGASAPGEKIMAEYGFTVDNVVRRTKALLGK

SEQ ID NO: 49184 - protein, 347 aa, Magnaporthe grisea 70-15
MSDLPKTMKALQYSKPKEFAVVDVPLPELRDDDVLVKVKACGVCGTDLHIHEGEFIAKFPLIPGHETVGVVAAVGKDVKDFKVGDRVSADNAELCGHCFYCRRGESLLCENWAGHGTTLSGGFAEYCAYPQGKVFKFNNMTDVEATLIEPASCACHGLDKIKPRLGSSVLMFGAGPTGLMLAQLLRQNGCSQVTIAAPAGLKMDLARSLDAADTYVDLSREDSGPQLEQLKKDNPYGFDIVIEATGSVKILEDSINYCRRGGTLVVYGVYGDQDKVSWKPTKIFGDEIRIIGSFSEVFMFPQTIDYLDNGKVKTKGIVNKTFKLEQFGEALESIKNKSAIKAAIVFD

SEQ ID NO: 49185 - protein, 493 aa, Glycine max
MVFPKPSSESDLFLCSNFASHYARDSLPRFSMPENSMPKEAAYQNIHDELQLDAIPKLNLASFVTTSMEEECNKLIMESINKNYVDMDEYPATTDLHNRCVNMIARMFHAEIGENENATGAGTVGSSEAIMLAGLAFKKKWQNKRKAEGKPYDKPNLVTGSNVQVCWEKFARYFEVELREVEVREGYYVMDPAKAVELVDENTICVAAILGSTYNGEFEDVKLLNDLLLEKNKQTGWDTPIHVDAASGGFIAPFLYPELEWDFRLPLVKSINVSGHKYGLVYAGIGWVIWRTKDDLPEDLVFHINYLGADQPTFTLNFSKGSSQIIAQYYQLIRLGHEGYRSIMENCRDNAMVLKESLEKSGHFNILSKDNGVPVVAFSLKDRSQYDEYKISEMLRRHGWIVPAYPMPPAAQHINVLRVVIRAEFSRTLAERLVFDIYNVLHELEKLHPPKVTNFIKEENKALVETGVKKTALDAHREIIAQESNKRQKIMAA

SEQ ID NO: 49186 - protein, 245 aa, Glycine max
MRASNSSSSISIAKRYFFFFFLFIFFALRSSSGDCSEYHHHHSPMATIGGLHDSQGSQNSVETEALARFAVDEHNKKQNSLLEFARVVRAQEQVVAGTLHHLTLEAIEAGEKKLYEAKVWVKPWLNFKELQEFKPAGDVPSFTSADLGVKKDGHQPGWQSVPTHDPQVQDAANHAIKTIQQRSNSLVPYELHEVADAKAEVIDDFAKFNLLLKVKRGQKEEKFKVEVHKNNQGGFHLNQMEQDHS

SEQ ID NO: 49187 - protein, 104 aa, Bradyrhizobium japonicum
MKFRPLHDRVVVKRIDAEEKTAGGIIIPDTAKEKPSQGEVIAVGPGGHDDSGKLIPIDIEVGDRVLFGKWSGTEVKIDGQDLLIMKESDVMGVLTDVFSKKKAA

SEQ ID NO: 49188 - protein, 168 aa, Zea mays; identical to SEQ ID NO: 1047

SEQ ID NO: 49189 - protein, 546 aa, Bradyrhizobium japonicum
MSAKEVKFGVNARDRMLRGVDILANAVQVTLGPKGRNVVLDKSFGAPRITKDGVAVAKEIELDDKFENMGAQMVREVASKAADAAGDGTTTATVLAAAIVREGAKSVAAGMNPMDLKRGIDLAVEAVVADLQKNSKKVTSNDEIAQVGAISANGDQEIGKFLADAVKKVGNEGVITVEEAKSLETELDVVEGMQFDRGYISPYFVTNADKMRVEMDDAYILINEKKLSSLNELLPLLEAVVQTGKPLVIVAEDVEGEALATLVVNRLRGGLKVAAVKAPGFGDRRKAMLQDIAILTGGQAISEDLGIKLENVTLNMLGRAKKVMIDKENTTIVNGAGKKADIEARVAQIKAQIEETTSDYDREKLQERLAKLAGGVAVIRVGGATEVEVKERKDRVDDAMHATRAAVEEGIVPGGGVALLRASEQLKGLRTENDDQKTGVEIVRKALSWPARQIAINAGEDGSIVVGKVLDNEQYSFGFDAQTGEYSNLVSKGIIDPAKVVRIAVQNASSVAGLLITTEAMVAELPKKATAGPAMPAAPGMGGMDF

SEQ ID NO: 49190 - protein, 104 aa, Bradyrhizobium japonicum
MKFRPLHDRVVVKRIDAEEKTAGGIIIPDTVKEKPSQGEVIAVGPGGRDESGKLIPIDVRVGDRVLFGKWSGTEVKIDTQELLIMKESDIMGVLADVSSKKKAA

SEQ ID NO: 49191 - protein, 167 aa, Capsicum chinense
MASSSGTSSGSSFLQNSGSEEDLQLLMDQRKRKRMISNRESARRSRMRKQKHLDDLMAQVSTLRKENDQILTSMNVTTQHYLNVEAENSILRAQLSELSHRLESLNEIIAYMDANNSCSNGLAMDHNEPYSFNFAQSDTVVDGFNMTNSWNYFCSNQPIMTAHVLQY

SEQ ID NO: 49192 - protein, 550 aa, Bradyrhizobium japonicum
MSAKEVKFGVDARDRMLRGVDILHNAVKVTLGPKGRNVVLDKSFGAPRITKDGVTVAKEIELEDKFENMGAQMVREVASKSADAAGDGTTTATVLAAAIVREGAKSVAAGMNPMDLKRGIDMAVEAVVADLVKNSKKVTSNEEIAQVGTISANGDAEIGKFISDAMKKVGNEGVITVEEAKSLETELEVVEGMQFDRGYISPYFVTNADKMRVEMDDAYVLINEKKLSQLNELLPLLEAVVQSGKPLVIIAEDVEGEALATLVVNRLRGGLKVAAVKAPGFGDRRKAMLQDIAILTGGQAISEDLGIKLENVTLNMLGRAKKVMIDKENTTIVSGAGKKADIEARVAQIKAQIEETTSDYDREKLQERLAKLAGGVAVIRVGGATEVEVKERKDRVDDAMHATRAAVEEGILPGGGVALLRASEHLKGIRTKNDDQKTGVEIVRKALSYPARQIAINAGEDGSVIVGKILEKDQYSYGYDSQTGEYGNLVSKGIIDPTKVVRVAIQNAASVAALLITTEAMVAEVPKKNTGAGGMPPGGGGMGGMGGMDF

SEQ ID NO: 49193 - protein, 261 aa, Arabidopsis thaliana
MTGALFRNAASDAARIFRLQRATMTNPFGKLDPLPIGGNIQRLQSRPFYRTPQFLGKAKETGVSGFCSSSSSSSSTVSTAGFIGWYLGMVKSRPVLTKSVTSSLIYIAADLSSQTIPQASVDSYDLVRTARMGGYGLLILGPTLHYWFNLMSSLFPKRDLITTFKKMAMGQTVYGPAMNVVFFSLNAALQGENGSEIVARLKRDLLPTMLNGVMYWPLCDFITFKFCPVYLQPLVSNSFSYLWTIYITYMASRATPTAIEI

SEQ ID NO: 49194 - protein, 207 aa, Zea mays
MVSLKVQKRLAASCLKCGKGKVWLDPNEVSEISMANSRQNIRKLVKDGFIIKKPHKIHSRSRARRAHDAKQKGRHSGYGKRRGTREARLPTKVLWMRRMRVLRRLLRKYREAKKIDKHMYHDMYMKVKGNMFKNKRVLMESIHKSKAEKAREKTLSDQFEAKRAKSKASRERKIARREERLAQGPREPTAPVAAPAPSTGVPKKAKK

SEQ ID NO: 49195 - protein, 463 aa, Bartonella vinsonii subsp. berkhoffii
MAGDGTTTATVLGQAIVQEGVKAVAAGMNPMDLKRGIDAAVDEVVANLFKKAKKIQTSAEIAQVGTISANGAAEIGKMIADAMEKVGNEGVITVEEAKTAETELEVVEGMQFDRGYLSPYFVTNAEKMVADLDDPYILIHEKKLSNLQSLLPVLEAVVQSGKPLLIIAEDVEGEALATLVVNKLRGGLKIAAVKAPGFGDRRKAMLEDIAILTSGQVISEDVGIKLENVTLDMLGRAKKVNISKENTTIIDGAGKKAEINARVNQIKVQIEETTSDYDREKLQERLAKLAGGVAVIRVGGATEVEVKEKKDRVDDALNATRAAVEEGIVAGGGTALLRAANALTVKGKNPDQEAGINIVRRALQAPARQIATNAGEEAAIIVGQGVENNADTYGYNTATGEFGDLIALGIVDPVKVVRSALQNAASIASLLITTEAMVAEMPKKDTPMPPMPGGGMGGMGGMD

SEQ ID NO: 49196 - protein, 343 aa, Neurospora crassa
MSNDFKPTNVLIIGGTGTIGAYITSSLLSAATPKPYTTLSLFTRPGWDSDPSSQKTQLIKHWQSQGLNVVTGDVESLDEAGFTNVFEDGKFDTVISCLGRATLKYQPKIIDAAEHSKSVQWFLPSEFGTDVAHNEKSAQEPTHVGKLALRKHIREKIRRLKVTYVVTGPYFDMWLYPTPGYEQAGGFVPAEKKAYIVGDGEGKVGFCTMWDVGKFVTATLRHPAQSFGKALKVQSFIVTPNEVLSEFQKQTGSDFEVTKTPLPEIESLEDILWDKKSDNPQPNPLATFVTLRRIWARGGTLYEKNDNEVLEVNQENLDTLEEGVRRYLAGGYKGETFGVKARA

SEQ ID NO: 49197 - protein, 543 aa, Rhodopseudomonas palustris CGA009
MPTLATALLDALKDHGAREIFGIPGDFVLPFFKVIEESGTLPYFTMSHEPAVGFAADAASRYRGSIGVAVVTYGAGAFNLVNSIAGAYAERSPVVVIAGAPGARERTSGYLLHHQVRTVDSQLAVFKEVTCDQAVLSDPATAPAEIARVLRSALELSLPVYIEFPRDMVDAKVDPVPKLPRREADIGARDECAEEILDRIARAKSPVMVVDVEIRRYGVEQQVAALARKLGLPVVTTFMGRGLLEGDDDVVAGTYLGAAGDPDLSALVEGADLVLMFGVILSDTNFALSSNMTDPRRTVLATGREVQIGHHVYRDLPLADLIAGLDAHASQHPPRPRNVGKGMAYPRGLTLDASPIAPSDIATAINDLFDRHGKMPMTADIGDCLFTAMEIDNTALAAPGYYAGMGFGVPAGVGVAATGLRPLVLVGDGAFQMTGWELGNCKRYGLDPIVVLFNNCSWEMLRVFQPESKFNDLDDWHFADIAHSIGGFGERVTTRAELAAALQRAVERRGVFSLIEVMLPRGVTSHTLARFVTGFKAARERMK

SEQ ID NO: 49198 - protein, 357 aa, Geobacter metallireducens GS-15
MAKKLFIPGPVEVHPDILQAMATPMVGHRMAEYATLHGRVTTGLKKLLATEAKVFLSTSSAFGAMEGAVRNLVAGRCVNFCNGAFSDKWHDVTRRCGKEADAVKVEWGKPITAELVDEALATGKYDSLTLIHNETSTGVMSPLPEIAAVLRKYPDVVSIIDTVSSMSALPIPVDELGIDCCIFGVQKAFALPPGLAVFTASEKALARARTVEGRGYYFDFLEFEASDAKNNTPSTPCISLIYAMDKQLERMFAEGFEQRWARHRALADFVRGWVSDRGYGFFAEEAYRSMTLTCAVNSRGTDLASLKKMLGERGFAFDDGYGKIKGKTFRIPHMGDMQRSDLEEFLAVIDECLAVLG

SEQ ID NO: 49199 - protein, 447 aa, Musa acuminata
MGKEKVHINIVVIGHVDSGKSTTTGHLIYKLGGIDKRVIERFEKEAAEMNKRSFKYAWVLDKLKAERERGITIDIALWKFETTKYYCTVIDAPGHRDFIKNMITGTSQADCAVLIIDSTAGGFEAGISKDGQTREHALLAFTLGVRQMICCCNKMDATTPKYSKARYDEIIKEVSSYLKKVGYNPEKIPFVPISGFEGDNMIERSTNLDWYKGPTLLEALDLIQEPKRPLDKPLRLPLQNVYKIGGIGTVPVGRVETGILKPGMVVTFGPTGLTTEVKSVEMHHEALQEAFPGDNVGFNVKNVAVKDLKRGFVASNSKDDPAKEAANFTSQVIIMNHPGQIGNGYAPVLDCHTSHIAVKFAELLTKIDRRSGKELEKEPKFLKNGDAGLVKMIPTKPMVVETFAEYSPLGRFAVRDMRQTVAVGVIKSVEKKDPTGAKVTKAAQKKK

SEQ ID NO: 49200 - protein, 152 aa, Brassica napus
EAKINKQLSEAKNKELSGSNIFGPPPETPARPLAARNMELQGNVDFALPQRRSVHTSVKVSNPAGGPSNITFSEDPVAKTAKKIHNQKFQELTGNNIFNEDAPPGSADKSLSSAKLKEMSGNDIFSDGKASSRDYLGGVRKPPGGESSIALI

SEQ ID NO: 49201 - protein, 836 aa, Geobacter metallireducens GS-15
MKAVIMAGGFGTRIQPLTSSIPKPMIPLLNRPIMLHIVELLKKYEITDLVMLLYHQPAVIKNFFRDGTDFGVKITYVTPLQDMGTAGAVKCAEKFLDERFLVISGDLLTDFNLQKIIDSHEDNKALATITLTSVKDPLQFGVVITDKEKRITQFLEKPGWGEVISDTINTGIYVFEPEIFAHIPEEENYDFSQDLFPKLLEQQKPLFGYTAKGYWRDIGNTDSYREAHHDIFKGKVNVKIDEAKQDLVGKDLRLGSDVNLDEHVTLEGTVVVGDNSQVFESAHIKDTVIGRNCTIEPGVRLNRCVIWDNVYVKKGAKLNDGVLCSNVRVGHGVVMEEGVIVADDTSIGEEAYIKRDVKIWPRKVIEAGATVTGNLIWGEKWKKSLFEGAMVKGLTNMELTPEFVAKLGCAYGTMLPKGSHIISGRDSYRSCRMLKRSFIGGLLSAGINVRDLTMVPMPVLRYKLRTFGEVGGIYFRQAIDDPASTEIVFLDGDGLDFSSSMGKNVERIFFKENFRRAHHTEPGALSEIPQQVTDFYREGFLHTIGKSPLQKKQFKVVIDFNHSSASQLLPGILTQMGCEVISLNAYVDEERGIQAVAERQQSLAQLSKIVATLEASAGFWLDPGTEGVIVVDETGKVYEGAELLPLMVGLALRSGEKGLFAVPVSAPSAIERMVQERGSAVTRTKSADRAMIEATLSSEVVLAGTMDGRFAFPKFQSAFDGMFAIAKTIELVAKGGLSISRVAAEIPQRVFLQTRVPCVWDMKGGIMRKMSEDSLDKEASFIDGIKVHFGEDWALVLPDQYLPYVHIVAEARDAKTAQKLLDEYKKKVEGWKRELQ

SEQ ID NO: 49202 - protein, 182 aa, Triticum aestivum
  misc_feature (14)..(14): Xaa can be any naturally occurring amino acid
  misc_feature (33)..(33): Xaa can be any naturally occurring amino acid
  unsure (1)..(182): unsure at all Xaa locations
TYIRPSLAPPLMAXGATSVGPFQGLKSTGGLPXVTAGPRADGLGRVSTGGRIRCMQVWPIEGIKKFETLSYLPPVSTEALLKQVDYLIRSKWVPCLEFSKVGFIFREHNASPGYYDGRYWTMWKLPMFGCTDATQVINEVEEVKKEYPDAYVRIIGFDNMRQVQCVRFIAFKPPGCEESGKA

SEQ ID NO: 49203 - protein, 301 aa, Gloeobacter violaceus PCC 7421
MRPRCPNHPHNRRDKMTMYRYATVDGLRVFYREAGPKDAPAVLLLHGFPTSSHMYRDLIPLLADRYRVVAPDLPGFGFTDAPERGQFTYSFDRLAHVIDRFSEAVDLGRYALYIFDYGAPVGLRLASAHPERITALITQNGNAYEEGLSAGWNPIQCYWQEPTPENRSALRDFLTPEATQSQYAHGVADLSLIAPEAYTLDSALLSRPGNEEIQLDLFLDYRSNVALYPAFQAYFRAHRPPTLAVWGNNDPFFLPAGAEAFKRDNSEAEVHLFDTGHFALETHARVIAERIRDFLDRQLRG

SEQ ID NO: 49204 - protein, 553 aa, Listeria monocytogenes EGD-e
MKEKDWWKKSVVYQIYPKSFNDSNGDGVGDIQGIIEKLDYLKELGVDVIWLSPVYDSPQDDNGYDIRDYQKIYEEYGDMATFDQLLQGLHDRDMKLVMDLVVNHTSDEHKWFEESRKSKDNPYRDYYFWREENEINNWGSIFSGPAWELDEKTGEYYLHLFSKKQPDLNWENPKLRQDVYNMMKFWLDKGIDGFRMDVINFISKNTDFPDGPVPDGQIYGDAGNDFCNGPRIHEFLQEMNQEVTSKYDVMTVGEMPGASTTDAQIYTNPANNEVDMIFTFEHMNLDSDSDNKWDLKPIYLPDLKENMSEWQVALQENGWNSLYWNNHDQPRIVSRFGNDNRFRVRSAKMLATCLHMMKGTPYIYQGEEIGMTNVHFETLDDYRDIETLNMYKERKEQGHSHESIMQSIYTKGRDNARTPYQWDNSENAGFTTGTPWLKVNPRYTEINNEEALKNPDSIFYYYQNLIKLRKTTEIITTGNYRLLLPKDEAIFAYERYTENEKLVVLCNFTEEEQVISDETILNEIQKGSVLVNNVPNIIEGTLRPYEAIVYQIK

SEQ ID NO: 49205 - protein, 259 aa, Magnetococcus sp. MC-1
MSRKSALEGHIKDKLQQQDILLMSHIVLGYPSLQANREVIRAMVAGGVDLMELQIPFSEPIADGPTIARANQAALDGGFKVREGLAFIREVVAAFNIPFLIMTYTNILMAYGVERFIDEVADIGVKGLIIPDLPLEQAQAAIEQCRAKGMDWIGLMTPTSVDERLGKIGAAADGFVYCVARRGVTGSKTSFDEHVGAFMHRCRQATPVPLAVGFGVRSAEDVDYLKGKAEIAVVGSAALDLFDQAGAAALEPFFRGLRG

SEQ ID NO: 49206 - protein, 234 aa, Zea mays
  misc_feature (34)..(34): Xaa can be any naturally occurring amino acid
  unsure (1)..(234): unsure at all Xaa locations
QFEGLRVAASSESDGSGKGEVSLHTELKLSPAQXADATPTTGAGTNDAFRNKKKQDRSSCGSNTPSSSDVDAGNVPEEDNANEKAKQASCSNSSAGDTNHRRFRSNGSTSDSWKEVSEEGRLAFDALFSREKLPQSFSPPQAVDSKEVAKEEENEVTTVAVDLNKNATSIDHDLDTIGEPRASFPNELSPLKLKSRRTGFKPYKRCSVEAKENRVPASDEVGTSRRRRESEAST

SEQ ID NO: 49207 - protein, 561 aa, Bacillus subtilis subsp. subtilis str. 168
MKTEQTPWWKKAVVYQIYPKSFNDTTGNGVGDLNGIIEKLDYLKTLQVDVLWLTPIYDSPQHDNGYDIRDYYSIYPEYGTMEDFERLVSEAHKRDLKVVMDLVVNHTSTEHKWFREAISSIDSPYRDFYIWKKPQENGSVPTNWESKFGGSAWELDEASGQYYLHLFDVTQADLNWENEEVRKHVYDMMHFWFEKGIDGFRLDVINLISKDQRFPNAEEGDGRSFYTDGPRVHEFLHEMNEKVFSHYDSMTVGEMSSTTVDHCIRYTNPDNKELDMTFSFHHLKVDYPNGEKWALAPFDFLKLKEILSDWQTGMHAGGGWNALFWCNHDQPRVVSRYGDDGAYRVKSAKMLATAIHMMQGTPYIYQGEELGMTNPKFTDISSYRDVESLNMYHAFKEKGMADQDITAILQAKSRDNSRTPVQWDATENGGFTTGTPWIPVAGNYREINAEAALRDQNSVFYHYQKLIQIRKMYDIVTEGTYEIIAKDDPNIFAYLRHGSNEKLLVINNFYGTEAAFTLPDSLAPDEWKAEVLLTNDEAREGLQNMTLRPYESIVYRLTKPC

SEQ ID NO: 49208 - protein, 448 aa, Triticum aestivum
  misc_feature (334)..(334): Xaa can be any naturally occurring amino acid
  unsure (1)..(448): unsure at all Xaa locations
FNLHFSVDPWYQVGFVLTTGVNSAYVLGYSGSIMVPLGWIGGTCGLILAAAISMYANALLGRLHEVGGKRHIRYRDLAGHIYGRKMYALTWALQYINLFMINTGFIILAGQALKAIYVLFRDDGLLKLPYCIALSGFVCALFAFGIPYLSALRIWLGFSTVFSLIYIVIAFVLSLRDGITAPAKDYSIPGSESTRVFTTIGAVANLVFAYNTGMLPEIQATIRPPVVKNMEKALWFQFTVGSLPLYAVTFMGYWAYGSSTSSYLLNSVHGPAWIKVVANLSAFLQTVIALHIFASPMYEYLDTRFGSGHTQGHASNASGGLPYGRPAGGRTSDXRGRGRGGGPFAIHNVVFRVGVRGGYLAVNTLVAAMLPFLGDFMSLTGALSTFPLTFVLANHMYLMVKGPKLSAFQKGWHWLNVVGFSLLSVTAAAAALRLIILDSSTYHLFADM

SEQ ID NO: 49209 - protein, 107 aa, Brassica napus
MSVTKFIKCVTVGDGAVGKTCMLICYTSNKFPTDYIPTVFDNFSANVSVDGSIVNLGLWDTAGQEDYSRLRPLSYRGADVFVLAFSLISRASYENVLKKWVPELRRF

SEQ ID NO: 49210 - protein, 334 aa, ASPERGILLUS NIDULANS FGSC A4
MAENETYKHADKDGHFRRKDSVFRSWVSASPDADFPAEKDRYVLYLNYGCPWAHRTNIVRSLKGLEDIIQLVVCDFELGSQGWFFSESGRNGSAKKDPLYGFTTISQLYFKADPEYKGRYTIPVLWDKKKETIVNNESSEIIRMFYTEFDHLLPEERREVNQPGGGLYPPHLRGEIEAMNEWVYDRINNGVYKTGFAATQEAYEASLHPLFEALDRIEGHLAQPGHQPYLFGEHITEADVRLYTTIARFDVAYYLIFKCNLKMIRHDYPLIDAWYRRLYYDESEKTRGGAFGKTTFLGLYKFGYLAALGKKQSVDSSQLIVPAGPKPDILPRDA

SEQ ID NO: 49211 - protein, 328 aa, Bacillus licheniformis ATCC 14580
MMRFGVVGTNWITDRFLGAARLIEDFQLTAVYSRTGERGREFAQKYGAEAVFTDIGEMAESDVIDAVYIASPNSLHKDQAVTFMKSGKHVLCEKPLASHVKEAEEMVKTAQEHRVTFMEAMKTTFLPNFKNISRNLHKIGKVRRFTASYCQYSSRYDAYRNGTVLNAFNPALSNGSLMDIGVYCVHPAIVLFGKPLEVKANGLILESGADGEGTVLLKYKEHEAVLMHSKISNSFIPAEIQGEEGSIVIDKIHRPEQVDIRYRDGRVEHLTLPDDKPAMFYETEEFINLIKQGRIESSLNTFERSIDTLAVIDEARKQIGLVFPADHM

SEQ ID NO: 49212 - protein, 295 aa, Nicotiana tabacum
MGVKGLLFSIVLINLSLLGLCGYPRKPVDVPFWKNYEPSWASHHIKYLSGGSTVDLVLDRSSGAGFQSKKSYLFGHFSMKLKLVGGDSAGVVTAFYLSSNNAEHDEIDFEFLGNRTGQPYILQTNVFTGGKGDREQRIYLWFDPTKGYHSYSVLWNTFQIVIFVDDVPIRAFKNSKDLGVKFPFNQPMKIYSSLWDADDWATRGGLEKTDWSNAPFTASYTSFHVDGCEAATPQEVQVCNTKGMRWWDQKAFQDLDALQYRRLRWVRQKYTIYNYCTDRKRYPTLPPECTKDRDI

SEQ ID NO: 49213 - protein, 542 aa, Physcomitrella patens
MEAGGRPMGPATAEYYLPNYKLGKTLGIGSFGKVKVAEHSPTGHKVAIKILNRRKVKMMDMEEKVRREIKILRLFMHPHIIRLYEVIETPADIFVVMEYVKSGELFDYIVEKGRLGEHEARRFFQQIVSGVEYCHRNMVVHRDLKPENLLLDSKSNVKIADFGLSNVMRDGHFLKTSCGSPNYAAPEVISGKLYAGPEVDVWSCGVILYALLCGSLPFDDENIPNLFKKIKGGIYTLPSHLSPGARDLIPRMLLVDPMKRVTIPEIRQHPWFLNHLPRYLAVPPPDTTQQAKRIDEEILERVVALNFDRDLLIDSLLNRVQNKATVAYYLMLDNRRRLSNGYLCSEFNEGKEHLMSPMDAFNGTPRSGYPRTLTHMSSMDRRSASPSGLQHRVVAERKWVLGLQLRSHPKEIMNDVLKTLRDLGINWKKTGAYNLKCRWVAPGQNSNDTTAENHSLPDSPMAGSMPRASSCRWSSEQHGVSGSVAAGNRDNESGVESNVLKFELQLFKLREEKYLLDLQRVVGPTYLFLDLCAAFLAELRVL

SEQ ID NO: 49214 - protein, 235 aa, Brassica napus
ACTRTSTQLLHARQAYHARFKKSIEEDVAHHTTGDFRKVIKSRFFYENAKVFEKTNYLVVCFFLQLLVSLVSSYRYEGDEVNMTLAKQEAKLIHERIKDKHYSDEEVIRILSTRSKAQINATFNRYQDNHGEEILKSLEEGDEDDKFLGLLRSTIQCLTRPELYFVDVLRSAINKTGTDEGALTRIVTTRAEIDLKVIGQEYQRRNSIPLEKAITKDTRGDYEKMLIALLGEDDA

SEQ ID NO: 49215 - protein, 293 aa, Pseudomonas syringae pv. tomato str. DC3000
MAFDDAFRVTFHTRQVGDVEVFYREVGRKDAPVLLLLHGFPTSSHMFRTLMPLLATQYRLIAPDLPGFGNTKAPPRGQFEYSFENLYKVIEGFTEALQLSQYALYIFDYGAPTGLRLAAANPEKVTAIITQNGNAYLEGFSDQWDPWQAYWRYPSAANREACRPSLSPETIRDWQYGTGADPEKLAPDGYNLDILYMARPGAEEIQLDLILDYRSNVAAYPAFQAYLRKHQPPLLAVWGRHDPAFIPPGAQAYLRDVPNAEVHLLDAGHFTLETHAPEVADYIREFLSRKLSV

SEQ ID NO: 49216 - protein, 672 aa, Neurospora crassa
MMSWWSSGANTALDEQIEKATSSSLEDIALNLEISDVIRSKTVQPKEAMRSLKKRINHKNPNTQLSALNLTDTCVKNGGAHFLAEIASREFMENLVGLLKAVGPAAPNPDVRNKILDLIQSWAMAAEGRYELSYIGEVYKTLQREGYSFPPKPTVASSMIDSSAPPEWVDSDVCMRCRTAFTFTNRKHHCRNCGNCFDQQCSSKSLPLPHLGIMQAVRVDDGCYAKLTDKGGKSGGSDRKHHSSSRHHHHHHKHKSSSSMQPRDARVDDSFDEDLKRALAMSLEEVKSYSRGHSEPANSTQYKPDKQSTSVSKIAEEEDEDLKAAIAASLADMEEQKKRHAAALKEQTSNVGSSSSAAPFTLPKNDYELTPVEAENINLFATLVDRLQTQPPGTILREPQIQELYDSIGALRPKLARTYGETMSKHDPSAPSAPGAAENFYTGEQQADYSHAPYGQYPPQPPQSQYMPYDRRSSMVGPPNPQYPQQQMPQRTGSWGNAPPAQAPQYNYSGNEVAPSQPGHAQQAQPGAPESAPGAPNNDPNASYYYNPGQPQQQQQQSAQQAPAAAPDHSYPTLPQQGHSYQPSVPQTPASVPVQPSQTPQQAHQRVPPPQQAPQQPYWQHSAAQQTPLPPVWQAPQQTTTYPGYDQEAFPSAPQHAPAPKQPVVEEALIEL

SEQ ID NO: 49217 - protein, 462 aa, Poncirus trifoliata
MDSNYTVIPKNSFLELQVYDNDQNPPSRINSHVKIQTFDEEHDADSKNFVDHVDNNQDDEHDDYPLISAKSNEGSGVAGAVFNLTTTVIGAGIMALPAAMKVLGLAVGFVLIIFMGILSEVSVELLVRFSVLCKATSYGEVVQYALGRPAKILSEICIILNNAGVLVVYLIIVGDVMSGSLHHTGVFDQWLGKGMWDHRKLLILIVLVVFLAPLCALDRIESLSMSSAASVALAVVFVVVCFFIAFIKLVEGKLDPPRMSPDFGSKKAILDLLVVIPIMTNAYVCHFNVQPIYNELEGRTPQKMNHVGRLTTILCIVVYSSTAISGYLLFGKDTESDVLTNFDKDLGIGYSTALNYIVRGSAPLLESRKRSLALTGVLLVLIYFGSTMIPSIWTAFKFTGATTAVSLGFIFPPLVALRLRKEGPGLSLWEKFLSGLMLVLAIVVSFVGVMGNIYSLESKSDD

SEQ ID NO: 49218 - protein, 538 aa, Coccidioides immitis
MSLSVEQEEQKYWEEVEAVKQWWKDSRWRYTKRPFTAEQIVAKRGNLKIEYPSNVQSKKLWKLVEEKFKTKTASFTYGCLDPTMVTQMVKYLDTVYVSGWQSSSTASSTDEPSPDLADYPMNTVPNKVNQLWMAQLFHDRKQREERLRNPKEKRASLANIDYLAPIIADADTGHGGLTAVMKLTKLFIERGAAGIHIEDQAPGTKKCGHMAGKVLVPISEHINRLVAIRAQADIMGTDLLAIARTDSEAATLITSTIDPRDHAFVVGSTNPTLEPLNDLMIAAERAGKNGAELQAIEDSWTAKAGLKRFEDAVIDQIKASSAANKQATTDAFLREIKGKSNKEARAIARQILGTDIFWDWDAPRTREGYYRYQGGCQCAINRAVAFAPFADLIWMESKLPDYAQAKEFAEGVHAVWPQQKLAYNLSPSFNWKAAMPRDEQETYIRRLGELGYCWQFITLAGLHTTALISDQFAKAYAKQGMRAYGELVQEPEMENKVDVVTHQKWSGANYVDELLKMVTGGISSTSAMGKGVTEDQFK

SEQ ID NO: 49219 - protein, 152 aa, Oryza sativa
  misc_feature (73)..(73): Xaa can be any naturally occurring amino acid
  misc_feature (77)..(77): Xaa can be any naturally occurring amino acid
  misc_feature (99)..(99): Xaa can be any naturally occurring amino acid
  misc_feature (142)..(142): Xaa can be any naturally occurring amino acid
  unsure (1)..(152): unsure at all Xaa locations
GTSVARVQGLKFTADLRESRRSTNWGFGGVSNGGRIKCMQVWSIEGMKKFETVSYLPALTVEDLLKQIACLFXSRWXPCVAFSTVGYAYRESHRSTGYXYDGRYWTMWKLPMFGCTDATQVLKELEEAKKAYPDALCPIIGXDNARQVQLIS

SEQ ID NO: 49220 - protein, 229 aa, Zea mays
  misc_feature (12)..(12): Xaa can be any naturally occurring amino acid
  misc_feature (202)..(202): Xaa can be any naturally occurring amino acid
  unsure (1)..(229): unsure at all Xaa locations
MMLAILARRRAXEAVLRRPQAAAGAAVSAWRAYAAAGEESDVVVVGGGPGGYVAAIKAAQLGLKTTCIEKRGTLGGTCLNVGCIPSKALLHSSHMYHEAKSSFAHHGVKFSNLEVDLPAMMAQKDKAVAGLTKGIEGLFKKNKVTYVKGFGKLSSPSEVSVDLIDGGSTIVKGKNIIIATGSDVKSLPGITIDEKKVVSSTXGYIGLEMGSVWNRLGSEVTVVEFAPDI

SEQ ID NO: 49221 - protein, 560 aa, Bacillus licheniformis ATCC 14580
MARAWWKEAVVYQVYPRSFMDSNGDGVGDINGIREKLPYIRELGADAIWICPVFDSPNADNGYDIRDYQSIMPEFGTMDDFDELLTEAHQLGMKLIIDLVINHTSDEHPWFIESRAERNSGKRDWYIWHDGKDGSEPNNWESIFGGSAWTYDEKTEQYYLHLFHEKQPDLNWENSDMRSALYDMINWWLQKGIDGFRVDAISHIKKKEGLPDLPNPEGRPFVPSFAYHMNVEGIMALLQDVKENTFAGYPHIMTVGEANGVSAEEAEDWVGEPNGIFSMIFQFEHLGLWDIEGGEPDIPELKRILSNWQSALEGKGWNALFIENHDQPRAVSVWGDDGKYRTVSAKALAAMYFLMKGTPFIYQGQEIGMTNAIFLDIDDYDDVSIKNYYRIQKEKGRSHEDIMKAVWKKSRDHARTPMQWTDRPNAGFTKGEPWLRMNENYKLINVVHQQHDPRSVYHFYKRLIAIRKRYDVFIDGSYKLLLAEDRQIFAYLRKLEEETAIVIVNLSARQAFYHHPAYPLCSNGLLLSNLDINAHKHLTSFMMRPYEARVYLIRQEIGDL

SEQ ID NO: 49222 - protein, 294 aa, Saccharomyces cerevisiae
TTPLVHVASVEKGRSYEDFQKVYNAIALKLREDDEYDNYIGYGPVLVRLAWHTSGTWDKHDNTGGSYGGTYRFKKEFNDPSNAGLQNGFKFLEPIHKEFPWISSGDLFSLGGVTAVQEMQGPKIPWRCGRVDTPEDTTPDNGRLPDADKDADYVRTFFQRLNMNDREVVALMGAHTLGKTHLKNSGYEGPWTANPNVFDNSFYLNLLNEDWKLEKNDANNEQWDSKSGYMMLPTDYSLIQDPKYLSIVKEYANDQDKFFKDFSKAFEKLLENGITFPKDAPSPFIFKTLEEQGL

SEQ ID NO: 49223 - protein, 408 aa, Bartonella henselae str. Houston-1
MAAKEVKFGREARERLLRGVDILANAVKVTLGPKGRNVVIDKSFGAPRITKDGVSVAKEIELEDKFENMGAQMLREVASKTNDIAGDGTTTATVLGQAIVQEGVKAVAAGMNPMDLKRGIDAAVDEVVANLFKKAKKIQTSAEIAQVGTISANGAAEIGKMIADAMEKVGNEGVITVEEAKTAETELEVVEGMQFDRGYLSPYFVTNAEKMVADLDDPYILIHEKKLSNLQSLLPVLEAVVQSGKPLLIIAEDVEGEALATLVVNKLRGGLKIAAVKAPGFGDRRKAMLEDIAILTSGQVISEDVGIKLENVTLDMLGRAKKVNISKENTTIIDGAGQKSEINARVNQIKVQIEETTSDYDREKLQERLAKLAGGVAVIRVGGATEVEVKEKKDRVDDALNATRAAVE

SEQ ID NO: 49224 - protein, 301 aa, Triticum aestivum
  misc_feature (199)..(199): Xaa can be any naturally occurring amino acid
  misc_feature (233)..(233): Xaa can be any naturally occurring amino acid
  unsure (1)..(301): unsure at all Xaa locations
MSFSSVSAASQTRVGVVQMTSVGDLDANYATCSRLTKEAAAAGVKFLCFPEVFSFIGSKDGESVKLAEPLDGPIMQRYCSLANESSIWLSLGGFQERGPDDSHQYNTHVLIDESGKVRSSYRKIHLFDVDVPGNMVYKESRFTTAGEYRRSGGIALFGRLGLTVCYDLRFPELYQCLRFKHPAQGLLVPSAFPKVTGEXHTGKILLRAPAIETQWFCFLRPLQAGKPYEKREXSYGDSIIIDPWGTVIARLPDRLSTGFAVADIDLSKVEAVRTKMPISVVMMSHVPSVCSGPSTPEAAFL

SEQ ID NO: 49225 - protein, 399 aa, GIBBERELLA ZEAE PH-1
MSFSTENLYDSISQSVAHHEHDLADICKKVDHDNHPRKSGIQLQGVQGPRQHLQSHGTTWLQFEFGKGGKLIVFNAEYDALPGLGHACGHNLIATSSIAAFLATAEVLRDSNISGRVRLLGTPAEEGGGGKVHLIKAGAYEGVDACLMAHPTGRLSPPGSDNVDGVSAAKTSARRQLKVSFTGQSAHAGNTPWHGKNALDAVVSSYVNISLLRQQIQPTERIHGVIRSGGSEPNIIPDSTDLEYYLRAADVNQVKDISKKVEACFEAGAMATGCDVKCTCDSDQDYMELRPNMCMSTEFTKHMKAFGRDFIDDANQPPMGASTDMGIHPMFSIGTEDPEVQPHTPKFADAAGTKEAFIRALDCGMGLAATACELLLQPELMEKARDEFKQDVEPIGYRL

SEQ ID NO: 49226 - protein, 272 aa, Burkholderia mallei ATCC 23344
MNLDNQVLENRKRVLKMLHGADGGHFGGAMSVLDTLVVLYHRVLRRDPARRADGLADRLILSKGHASVALYAVLASIGELPEAELATYGKGGGRLPCHPDMTLLDAVDFSTGSLGQGLSVGLGMAFALRGTGARVWVVLGDGECQEGQVWEAAQFASRYGVDNLHAVVDLNGFQEMGWRGIDGVAPEPLPDAARKWAAFGWHVREVAGHDAARLEAAMRAMTAQRGRPSVLLASTVKGRGIPAFEFDPGLSHCTSLTDDQFRHAVAVAEGVA

SEQ ID NO: 49227 - protein, 472 aa, Streptomyces avermitilis MA-4680
MSTENEGTAVPPAPSAPPVPVETPAPVQSAAPVGAAPSASAPGQGFGEPPAHQGFAQHAPGAAEAGWPPPPPATPAYADGGGAGAEWGSSYQQPAPKPKAGRGGLLAAILVAALVAGGVGGGIGYTLAKDNDGSSGSTTVSASDSGGSVKRDAGTVAGVAAKALPSTVTIEAQSSSGEGGTGTGFVFDKQGHIVTNNHVVAEAVDGGKLTATFPDGKKYNAEVVGHAQGYDVAVVKLKNAPSDLQPLTLGDSDKVAVGDSTIAIGAPFGLSNTVTTGIISAKNRPVASSDGSSSSKASYMSALQTDASINPGNSGGPLLDAQGSVIGINSAIQSSSSGGLGSSGQSGSIGLGFAIPINQAKYVAQELIKTGKPVYPVIGASVSLEEGTGGAKITEQGASGSDAITPNGPAAKAGLKPGDVITKLDDMVIDSGPTLIGEIWTHRPGATVKLTYTRDGKARTTDVTLGERVGDS

SEQ ID NO: 49228 - protein, 218 aa, Glycine max; identical to SEQ ID NO: 955

SEQ ID NO: 49229 - protein, 768 aa, Pichia pastoris
MVQSSVLGFPRIGAFRELKKTTEAYWSGKVGKDELFKVGKEIRENNWKLQKAAGVDVIASNDFSYYDQVLDLSLLFNAIPERYTKYELDPIDTLFAMGRGLQRKATDSEKAVDVTALEMVKWFDSNYHYVRPTFSHSTEFKLNGQKPVDEYLEAKKLGIETRPVVVGPVSYLFLGKADKDSLDLEPISLLEKILPVYAELLAKLSAAGATSVQIDEPILVLDLPEKVQAAFKTAYEYLANAKNIPKLVVASYFGDVRPNLASIKGLPVHGFHFDFVRAPEQFDEVVAALTAEQVLSVGIIDGRNIWKADFSEAVAFVEKAIAALGKDRVIVATSSSLLHTPVDLTNEKKLDSEIKNWFSFATQKLDEVVVVAKAVSGEDVKEALSVNAAAIKSRKDSAITNDADVQKKVDSINEKLSSRAAAFPERLAAQKGKFNLPLFPTTTIGSFPQTKDIRINRNKFTKGEITAEQYDTFIKSEIEKVVRFQEEIGLDVLVHGEPERNDMVQYFGEQLKGFAFTTNGWVQSYGSRYVRPPVVVGDVSRPHAMSVKESVYAQSISKKPMKGMLTGPITVLRWSFPRNDVSQKVQAPQLGLDMRDEVNELEPPSVEVIQVDEPAIREGLPLRSGQERSDYLKYATESFRIGTSGVKNTNQIHSHFCYSDLDPNHIKALDADVVSIEFSKKDDPNYIQEFSNYPNHIGLGLFDIHSPRIPSKEEFIARIGEILKVYPADKFWVNPDCGLKTRGWEEVRASLTNMVEAAKTYREKYAQN

SEQ ID NO: 49230 - protein, 279 aa, Arabidopsis thaliana
MVKKSKGRQKIEMVKMKNESNLQVTFSKRRSGLFKKASELCTLCGAEVAIVVFSPGRKVFSFGHPNVDSVIDRFINNNPLPPHQHNNQVLSQLETEKKKYDELKKIREKTKALGNWWEDPVEELALSQLEGFKGNLENLKKVVTVEASRFFQANVPNFYVGSSSNNAAFGIDDGSHINPDMDLFSQRRMMDINAFNYNQNQIHPNHALPPFGNNAYGINEGFVPEYNVNFRPEYNPNQNQIQNQNQVQIQIQNQSFKRENISEYEHHHGYPPQSRSDYY

SEQ ID NO: 49231 - protein, 351 aa, Bacillus subtilis subsp. subtilis str. 168
MNRIFFILVAAGVPLSVIGSLMHWPSAVLFAVYCVTIIALASYMGRATESLSIIAGPRIGGLLNATFGNAVELIISLFALKEGLTGIVLASLTGSVLGNLLLVAGLSFFVGGLKYKRQEFNIHDARHNSGLLIFAIIVAFVIPEVFSVGMGNASKLNLSIGISIIMILLYVAALYFKLVTHRGVYQPNNAAQTEEEEEPEWSGKVATIVLFAATIVVAYISENLVHTFHSVAEQFGWSELFIGVIIVAIVGNAAEHASAIIMAFKNKMDIAVEIAVGSTLQIAMFVAPVLVICSIFFPTSMPLVFTLPELVAMVSAVLLMIAISNDGDSNWFEGATLLAAYVIMAIGFFLL

SEQ ID NO: 49232 - protein, 73 aa, Cynodon dactylon
MSCSCGSSCNCGSSCNCGKMYPDLEEKSTGAQATVVLGVAPEQKVQLEAATESGETAHACGCGANCKCNPCNC

SEQ ID NO: 49233 - protein, 545 aa, Physcomitrella patens
MDSGGRPVAPVAVEYYLPNYKMGKTLGIGSFGKVKVAEHTPTGHKVAIKILNRRKVKSMDMEEKVRREIKILRLFMHPHIIRLYEVIETPTDIFVVMEYVKSGELFDYIVEKQRLGEDEARRFFQQIVSGVEYCHRNMVVHRDLKPENLLLDSKWNVKIADFGLSNIMRDGHFLKTSCGSPNYAAPEVISGKLYAGPEVDVWSCGVILYALLCGSLPFDDENIPNLFRKIKGGIYTLPSHLSPGARDLIPRMLLVDPMKRVTIPEIRQHPWFLNHLPRYLAVPPPDTLQQAKRIDEEILERVVALNFDRVHLIESLLNRVQNKATVAYYLMLDNRRRLSNGYLGSEFDEGKEQSLSPMSPYGAHGGTPRSTYPRSLIRTPSMDRRGSSSSVLQHRVVAERKWALGVQLRSHPKEIMSDVLDTLRKCDINWKKTGAYNLKCRWVAPNQHLNDRASEHRGIPDSPMAGTTPRVSSGRWSSEQQGISGSVASGNKDDESGVESNVLKFELQLFKMREEKYLLDLQRVEGPTYLFLDLFSAFLIELRVA

SEQ ID NO: 49234 - protein, 74 aa, Brassica rapa subsp. pekinensis
MASNMEVFCEILIAILLPPLGVCLKRGCCTVEFLICLVLTILGYIPGIIYALYVIVFQNREGETQDYSAPLNSA

SEQ ID NO: 49235 - protein, 1343 aa, ASPERGILLUS NIDULANS FGSC A4
MSPLETNPLSPETAMREPAETSTTEEQASTPHAADEKKILSDLSAPSSTTATPADKEHRPKSSSSNNAVSVNEVDALIAHLPEDERQVLKTQLEEIKVNISFFGLWRYATKMDILIMVISTICAIAAGAALPLFTAPSTFQRIMLYQISYDEFYDELTKNVLYFVYLGIGEFVTVYVSTVGFIYTGEHATQKIREYYLESILRQNIGYFDKLGAGEVTTRITADTNLIQDGISEKVGLTLTALATFVTAFIIAYVKYWKLALICSSTIVALVLTMGGGSQFIIKYSKKSLDSYGAGGTVAEEVISSIRNATAFGTQDKLAKQYEVHLDEAEKWGTKNQIVMGFMIGAMFGLMYSNYGLGFWMGSRFLVDGAVDVGDILTVLMAILIGSFSLGNVSPNAQAFTNAVAAAAKIFGTIDRQSPLDPYSNEGKTLDHFEGHIELRNVKHIYPSRPEVTVMEDVSLSMPAGKTTALVGPSGSGKSTVVGLVERFYMPVRGTVLLDGHDIKDLNLRWLRQQISLVSQEPVLFGTTIYKNIRHGLIGTKYENESEDKVRELIENAAKMANAHDFITALPEGYETNVGQRGFLLSGGQKQRIAIARAVVSDPKILLLDEATSALDTKSEGVVQAALERAAEGRTTIVIAHRLSTIKTAHNIVVLVNGKIAEQGTHDELVDRGGAYRKLVEAQRINEQKEADALEDADAEDLTNADIAKIKTASSASSDLDGKPTTIDRTGTHKSVSSAILSKRPPETTPKYSLWTLLKFVASFNRPEIPYMLIGLVFSVLAGGGQPTQAVLYAKAISTLSLPESQYSKLRHDADFWSLMFFVVGIIQFITQSTNGAAFAVCSERLIRRARSTAFRTILRQDIAFFDKEENSTGALTSFLSTETKHLSGVSGVTLGTILMTSTTLGAAIIIALAIGWKLALVCISVVPVLLACGFYRFYMLAQFQSRSKLAYEGSANFACEATSSIRTVASLTRERDVWEIYHAQLDAQGRTSLISVLRSSLLYASSQALVFFCVALGFWYGGTLLGHHEYDIFRFFVCFSEILFGAQSAGTVFSFAPDMGKAKNAAAEFRRLFDRKPQIDNWSEEGEKLETVEGEIEFRNVHFRYPTRPEQPVLRGLDLTVKPGQYVALVGPSGCGKSTTIALLERFYDAIAGSILVDGKDISKLNINSYRSFLSLVSQEPTLYQGTIKENILLGIVEDDVPEEFLIKACKDANIYDFIMSLPEGFNTVVGSKGGMLSGGQKQRVAIARALLRDPKILLLDEATSALDSESEKVVQAALDAAARGRTTIAVAHRLSTIQKADVIYVFDQGKIVESGTHSELVQKKGRYYELVNLQSLGKGH

SEQ ID NO: 49236 - protein, 232 aa, Pseudomonas fluorescens PfO-1
MKLPEGVNAHEFKSPVLLAEGLALNVAKQLSEALAARGNAVLVVSGGRSPVAFFQHLAKQELDWSKVVVTLADERWVPVEHADSNAGLLKQYLLKGPAAKAQFLSLYSAAANVEQAAEQADRLLAELPPIDVLVLGMGDDGHTASLFPDSPNLVEALQADGTRRCWPMLAPSVPRQRLTMSRALLASARHKILSISGQSKLTTLNAALASNDVAAMPVRAFLQPTLEIYWCP

SEQ ID NO: 49237 - protein, 500 aa, Arabidopsis thaliana
MFKQFLSKLPRKSSKSDSGELNRSSSGPVSSPVQRSGTSGGGSGPVRSNSGKRMSSAVFPASVVAGIEPLVPFKDVPSSEKLNLFVSKVSLCCVTFDFSDPGKNSIEKDVKRQTLLELLDFVASGSVKFTEPAILAMCRMCAVNLFRVFPPNYRSSSGGENDDDEPMFDPAWPHLQIVYDLLLKFITSPCLDAKVAKKYLDHAFIVRLLDLFDSEDPRERECLKTILHRVYGKFMVHRPFVRKSMSNIFYRFVFETEKHSGIAELLEIFGSIVSGFALPLKEEHKIFLWRVLIPLHKPKSVGNYFQQLSYCITQFIDKEPKLGSVVIKGLLKFWPITNSQKEVMFLGEVEEIVEAMSVMEFQKIMVPLFLRIACCVTSSHFQVSERALFLWNNDQIVNLIGHNRQAILPIMFTALEKNAQNHWNQSVLNLTLNVRKMFCEMDEALFMSCHARFKEDEAKQCSAAEKRKEVWARLENAASMKPITGKTAVLVTPRATSIAC

SEQ ID NO: 49238 - protein, 483 aa, Pseudomonas syringae pv. tomato str. DC3000
MPITPKNGTVFETDLPARLDRLPWGRFHTLLVIALGITWLLDGLEVTLAGSVAGALKASPALNLTNSDIGLAGAAYIAGAVLGALLFGWLADRLGRRKLFFITLLLYVGATAATAFSFSVWSFMLFRFLTGMGIGGEYTAINSTIQEFTPARYRGWVDLTINGTFWLGAALGAVGSIVLLDPLWVGAELGWRLCFGIGAVLGLLVLLMRLWLPESPRWLLIHGQSAQATKIVEQIEADLQRRGHVLPAVTSKPLRLHVRDHTPLGEVARTLLVTFRQRSLVGLTLLTAQAFFYNAIFFTYALVLTDFYDVPAERVGWYVLPLALGNFCGPLLLGRLFDVVGRRTMISLTYGLSGVLLAISGYLFQQGLLDVTQQAIAWMVIFFFASAAASSAYLTVAETFPLEIRALAIAVFYAFGTGLGGMIGPTLFGELIDTGERSNVFIGYLIGAGLMLLAALVQSIWGAAAERKSLEEVARPLSQAGDV

SEQ ID NO: 49239 - protein, 224 aa, Glycine max
  misc_feature (188)..(188): Xaa can be any naturally occurring amino acid
  unsure (1)..(224): unsure at all Xaa locations
RAASISIQASLNYCSILESQGLKLSKLLLVLLRPSVEEVLESNFRRARRVVLDMAECCPLSPQFASSLSAIASSSSSMLVESGMRFMHIVEEILEQLTPTVSLHFGGNVLNRILQLFDKYMDALTRALPGPSDDDNLPELKEVALFRAETDSEQLAILGIAFTILDELLPNAVLSRWMLQSESKAQGXNSGATENVTFNTNASVELKEWRKHLQHSFDKLRDHF

SEQ ID NO: 49240 - protein, 178 aa, Triticum aestivum
HEGTVEYMAPEIVQGRGHDKAADWWSVGILLFEMLTGKPPFIGGNRDKIQQKIVKEKIKLPTYLSSEVHSLLKGLLHKEAGRRLGSGPGGSDEIKNHKWFKSVNWKRLEARQIQPSFRPNVAGKTCIANFDECWTNMPVLDSPVASPVAANSNFVGFSYVRPAPFLQKPSPLAEERLP

SEQ ID NO: 49241 - protein, 402 aa, Rhizobium sp. N33
MDRRVVITGIGGLCGLGTDAPSIWKEMREGRSAIGPIVTSELHGLTGTIGAEIKTLPEHDIDRKQLVTMDRFSLLAVLAAREAMRQAGLSCDERNAYRFGAIVGVGGSGWEAIEASYRALLLNGARRAGVMDVPKAMPSAAAGQVSMSLGLRGPVFGVTSACASANHAIASAVDQIRCGRADVMLAGGSDAPFVFCVVKAWEAMRVIAPDTCRPFSSDRRGLVLGEGAGMAVLESYEHATARGATIIAEIAGIGLSADAFNLVSPAVEGPEAAMRACLADAGLNVQDVDYINAHGTGTKANDRMETEAIKRVFGGHANSMSISSTKSMHAHCLGAASALEMIACVMAIQEGVVPPTANYREPDPDCDLDVTPNVARERKVRVALSNAFAMAGMNAVLAFRQV

SEQ ID NO: 49242 - protein, 135 aa, Brassica napus
  misc_feature (128)..(128): Xaa can be any naturally occurring amino acid
  unsure (1)..(135): unsure at all Xaa locations
APTEIQPPRSLAAAQQEARRGNRDMGEPAPRNLRTSVKVSNPAGGQSNILFSEEPEVKTSKKIHDQKFQELTGNGIFKGDESPGTGDKQLSSAKLREMSGNNIFADGKSESRDYFGGVRKPPGGESSXSLVKTWP

SEQ ID NO: 49243 - protein, 514 aa, Oryza sativa
MAAMVGAPLAVAAAAAAPGARVFLARPLLRRSPRGVACALRRRPSKYKNKIQNEEVVVEDDIGGGGEDDDDALEALFKQLEEDLKNDDLSVEDDDDGISEEDMARFEQELAEAIGDIADADESGEGSSLGSEAYGNDEKTDEIKRPELKNWQLKRLARALKIGRRKTSIKNLAGELGLDRTLVIELLRNPPPKLLFMSDSLPDEDPSKPEIKEIEPSPVVDNADVTETKPQTELPVHVMCAEWSSQKRLKKVQLETLERVYSRTKRPTNTMISSIVQVTSLPRKTIVKWFEDRREQDGVTFSTLLDQTHALPYFNRNRVAIFNMEKFRSSSEGNYVETGEGGSIWGPARLQHRDSERGVVVLVVQMMAGLQRSATTFRRSGSSGLVWDERFLTEDAEAAKAGDGDGGGGTEEPQPELRHSKSVGSIGMMRRVAADDGDDSEKTTKQQRKKKKKKKKDGQKEDDNRSQQVFRTKDIAPDVDPPSPRVSGCILCSIFSGSGSSSSATSRRAKPRKK

SEQ ID NO: 49244 - protein, 721 aa, Emericella nidulans
MRALGLVGLVGVANAVCPYMTGELGRRDTNPDATEATEEFLSEYYLDDTDSYLTTDVGGPIEDQQSLKAGARGSTLLEDFIFRQKIQRFDHERVPERAVHARGAGAHGVFTSYGDFSNITAASFLSAEGKETPVFVRFSTVAGSRGSSDLARDVHGFATRFYTDEGNFDIVGNNIPVFFIQDAIQFPDLIHAVKPKGDREIPQAATAHDAAWDFFSQQPSTLHTLLWAMAGHGIPRSFRHVDGFGVHTFRLVTEDGSTKLVKFHWKTLQGLASMVWEEAQQISGKNPDYMRQDLFESIEAGRYPEWELNVQIMDEEDQLRFGFDLFDPTKIVPEEYVPLTPLGKMTLNRNPRNYFAETEQVMFQPGHVVRGVDFTEDPLLQGRLFSYLDTQLNRNGGPNFEQLPINQPRVAIHNNNRDGAGQMFIPLNPDAYSPNTLKGSTLKQANQTAGRGFFTAPDRTANGNLVRAKSSTFDDAWSQPRLFWNSLLPAEKQFVVNAIRFENANVKSDVVKNNVIVQLNRISNDLATRVAKAIGVDAPEPDNTYYHDNTTSNIGAFGHRLQSLAGLKIAVLASVDAEESFSAATALKAELSNDNLDVIVVAERFSNGVNQTYSASDAIQFDAVVVAPGAEKLFGAKSAANSSSTLYPAGRPLEILVDAFRFGKPVAALGSGSTAFDNAGINTAVEGVYVADAVDESFANNLEEGLTVFKFLDRFALDSDE

SEQ ID NO: 49245 - protein, 531 aa, Arabidopsis thaliana
MDTLFRLVSLQQQQQSDSIITNQSSLSRTSTTTTGSPQTAYHYNFPQNDVVEECFNFFMDEEDLSSSSSHHNHHNHNNPNTYYSPFTTPTQYHPATSSTPSSTAAAAALASPYSSSGHHNDPSAFSIPQTPPSFDFSANAKWADSVLLEAARAFSDKDTARAQQILWTLNELSSPYGDTEQKLASYFLQALFNRMTGSGERCYRTMVTAAATEKTCSFESTRKTVLKFQEVSPWATFGHVAANGAILEAVDGEAKIHIVDISSTFCTQWPTLLEALATRSDDTPHLRLTTVVVANKFVNDQTASHRMMKEIGNRMEKFARLMGVPFKFNIIHHVGDLSEFDLNELDVKPDEVLAINCVGAMHGIASRGSPRDAVISSFRRLRPRIVTVVEEEADLVGEEEGGFDDEFLRGFGECLRWFRVCFESWEESFPRTSNERLMLERAAGRAIVDLVACEPSDSTERRETARKWSRRMRNSGFGAVGYSDEVADDVRALLRRYKEGVWSMVQCPDAAGIFLCWRDQPVVWASAWRPT

SEQ ID NO: 49246 - protein, 257 aa, Triticum aestivum
MSQGKTFTLNTGAKIPLLGYGTWQASPGEVGQGVYEALKVGYRHLDLAKVYGNQPEIGEALKKSFAEIPGLKREDVFITSKLWNSQHDPKVVAAALDDCLQELGLEYLDLYLVHFPVSFKGSQKHVGQDLFPLTGGNEPDGDVEIDDSISIVDTWKAMTELPKSKARAVGVSNHTKEHLEALIKGTGVTPAANQIERHPLLIQPELIAYCKEKNIHVTAYSAFGNNMVDAPLLFTYPEVKGVAERLTKEKGHRGHTH

SEQ ID NO: 49247 - protein, 362 aa, Neurospora crassa
MASESTILSNAENLKKFLRLPQNGQLIAEYIWIDSEGGTRSKSRTLPEKESQYLPEELPIWNFDGSSTGQAPGENSDVYLKPVAVFPDPFRGSPNILVLSECWNADGTPNKFNHRHEAAKLMEAHADQVPWFGLEQEYTLLDINDRPYGWPRNGFPAPQGPYYCGVGTGKVVQRDIVEAHYKCCLYAGVKISGTNAEVMPAQWEFQVGPCDGIEMGDHLWLARFLLHRVSEEFGAKVSFDPKPIPGDWNGAGLHTNFSTENMRKEGGMKYIEDAIKKLEARHKEHIAVYGEGNDKRLTGRHETGSIDSFTYGVANRGASIRIPRECGAKGYGYFEDRRPASNADPYQITGIIMETCFGAVSE

SEQ ID NO: 49248 - protein, 217 aa, Geobacillus kaustophilus HTA426
MLSNDIVSYLQKLRPAPDEDIEEMEQYAYRHRIPIMDPVSVEVLLFILKLIRPRRILEIGTAIGYSAIRMAKALPDARIVTIEKDRERYERARFYIEKTNTKRQIEAVLGDALAVEAGVAAAAPFDVLFIDAAKGQYERFFTLYEPFVAADGLIISDNVLFKGLVAAEAPADNRRLWNIARKIRRYNEWLMSRSGYDTVIIPVGDGLAISKKRGEEQ

SEQ ID NO: 49249 - protein, 414 aa, Triticum aestivum
  misc_feature (111)..(111): Xaa can be any naturally occurring amino acid
  misc_feature (156)..(156): Xaa can be any naturally occurring amino acid
  misc_feature (171)..(171): Xaa can be any naturally occurring amino acid
  misc_feature (227)..(227): Xaa can be any naturally occurring amino acid
  unsure (1)..(414): unsure at all Xaa locations
MEAAAAAAVALRSPAAAGAAPSRRVAAAASSLPFERSRSFALGSIKGLGRRQRTSRRLRSVVRASSSSPSESLPSSSPIAPLQMESPIGQFLSQILVTHPHLLPAAAEQQXLEQLQTVQDSADKKDAQAPPAAGDIVLYRRIAEVKEKERKTTMEXEILYALVVQKFVGSXGFSWAPALSHSIDASSGRVDQWAEHVEGKLERLHSHEAYEMIENHLNLILGQRQAXDGTVAAISKLRVGQVYAASVMYGYFLKRVDKRFQLEKSMKSLPWGSEDDALNQVMTTDSRLSDQTYSSHPEVESWTSPDLSAGGLGQSVKPSRLRSYVMSFDSDTLQTYATIRSKVAFGIIEKHTEALFGKPEIVITPEGTVDSSKDEYVKISFSGLRRLILEAVTFGSFLWDVESYVDSRYHFVTN

SEQ ID NO: 49250 - protein, 405 aa, Agrobacterium tumefaciens
MDFEAFFTTELQSLHSEGRYRVFADIERQQGNFPRATRYNANGQRKDVTVWCSNDYLGMGQNPKVIEAMKAAIDHCGAGAGGTRNISGTNHYHVLLEQELADLHGKESALIFTSGYVSNWATLGTLGQKIPGLIIFSDALNHASMIEGIRYGRCERVIWKHNDLEDLEAKLKAADPNAPKLIAFESVYSMDGDIAPIKEICDLADRYGAMTYLDEVHAVGMYGPRGGGIAEREGLMDRLTIIEGTLGKAFGVMGGYITGSTAVCDFIRSFASGFIFTTALPPSLAAGAIASIQHLKASPFERARHQDRVRKLRGLLDARGIPHMDNPSHIVPVMVGDAAKCKWISDILLDSHGVYVQPINYPTVPRKTERLRITPTPLHSDADIEHLVGALHQLWSHCALARAVA

SEQ ID NO: 49251 - protein, 93 aa, Pseudotsuga menziesii var. menziesii
SGAHTLGRCHKERSGFEGAWTSNPLIFDNSYFKELLSGEKEGLLQLPSDKALLEDPVFRSYVEKYAADEDAFFADYAEAHLKLSELGFAEGYQ

SEQ ID NO: 49252 - protein, 226 aa, Sporosarcina psychrophila
ILDFTKVMEAKWFEFPQMLIPGVDYDFVITPTLLFLMVPIAIVTISEHIGHQLVLGRIVGRDYIKNPGLNRSLLGDGLGTLISGLVGGPPKTTYGENIGVLALTRVYSVYVILGAAVFAIAFSFLGKVMALIATIPTAVLGGVSILLFGIIASSGLRMLVDHKIDFGSQRNLVIASVILVIGIGGASIEFSDTFQIEGMALAAIIGVILNLVLPGRTNESLVDEKE

SEQ ID NO: 49253 - protein, 289 aa, Arabidopsis thaliana
MAISQAVLATVFGILGNIISFFVCLAPIPTFVRIYKRKSSEGYQSIPYVISLFSAMLWMYYAMIKKDAMMLITINSFAFVVQIVYISLFFFYAPKKEKTLTVKFVLFVDVLGFGAIFVLTYFIIHANKRVQVLGYICMVFALSVFVAPLGIIRKVIKTKSAEFMPFGLSFFLTLSAVMWFFYGLLLKDMNIALPNVLGFIFGVLQMILFLIYKKPGTKVLEPPGIKLQDISEHVVDVVRLSTMVCNSQMRTLVPQDSADMEATIDIDEKIKGDIEKNKDEKEVFLISKN

SEQ ID NO: 49254 - protein, 487 aa, Streptomyces coelicolor A3(2)
MPENNQKPLTTVAGAPVPDNQNSLTSGPRGPMLLQDVWFLEKLAHFDREVIPERRMHAKGSGAFGTFTVTHDITRYTSAKIFSEIGKKTPLFTRFSTVAGERGAADAERDIRGFAVKFYTDEGNWDLVGNNTPVFFFRDPLKFPDLNHAVKRDPRTNLRNAENNWDFWTNLPEALHQVTIVMSDRGIPASYRHMHGFGSHTYSLINAEGERFWVKFHHRTQQGIKNLTDAEAEALVGKDRESHQRDLFDAIEDGDFPKWKLFIQVMPEADAENYRFHPFDLTKVWSKKDYPLIEVGEWELNRNPDNYFADVEQAAFSPANVVPGISFSPDRMLQGRLFSYGDAQRYRLGVNHHQIPVNAPKNPVNSYHRDGAMRVDGNQGATPGVEPNSYGRWQEQPAYRDPAQAVGAVADRFNYREDDDNYFEQPGNLFRQMSPEQQQVLFENTARAIDGASAQTIERHIGNCTQADPAYGAGVRKAIEALAAGNL

SEQ ID NO: 49255 - protein, 261 aa, Thermoplasma volcanium GSS1
MEEFTDKVAIVTGGSSGIGLAVVDALVRYGAKVVSVSLDEKSDVNVSDHFKIDVTNEEEVKEAVEKTTKKYGRIDILVNNAGIEQYSPLHLTPTEIWRRIIDVNVNGSYLMAKYTIPVMLAIGHGSIINIASVQSYAATKNAAAYVTSKHALLGLTRSVAIDYAPKIRCNAVCPGTIMTPMVIKAAKMEVGEDENAVERKIEEWGRQHPMGRIGRPEEVAEVVAFLASDRSSFITGACLTVDGGLLSKLPISTPNADNSHH

SEQ ID NO: 49256 - protein, 202 aa, Brassica napus
  misc_feature (6)..(6): Xaa can be any naturally occurring amino acid
  misc_feature (14)..(14): Xaa can be any naturally occurring amino acid
  misc_feature (17)..(17): Xaa can be any naturally occurring amino acid
  misc_feature (36)..(37): Xaa can be any naturally occurring amino acid
  misc_feature (93)..(93): Xaa can be any naturally occurring amino acid
  misc_feature (95)..(95): Xaa can be any naturally occurring amino acid
  misc_feature (97)..(97): Xaa can be any naturally occurring amino acid
  misc_feature (155)..(155): Xaa can be any naturally occurring amino acid
  unsure (1)..(202): unsure at all Xaa locations
LNKNRXPHMSKEQXEEXLKRYLGVQTIIWLPRGLYXXDDTNGHIDNMCCFAKPGVVLLSWTDDETDPQYERSVEALSVFSNSVDARGRKIQVXKXHXPGPLYMTEEESSGIIQEGEAKPRLAGTRLAASYVNFYLANGGVIVPQFGDAKRDEEAXRALSETYPHHSVVGIENAREIVLAGGNIHCITQQQPAEPISVAVNGD

SEQ ID NO: 49257 - protein, 282 aa, Arabidopsis thaliana
MAYEEHFQQTSEAKYDCLLFDIDDTLYPLSSGLAMEVKKNIQEYMVQKLGIEEDKVQELCLSLYKIYGTTMAGLKAVGYDFDYDDFHRFVHGRLPYSTLKPDPILRNIILSLPIWKVVFTNADKAHAAKIIARLGLEGCFEKIISFETLNPITKTESPVDTKTREIFDIISYMANPDSSIELPKTSVVCKPSEGAFEQVFKMANINPKKTLFFDDSIRNIQTGKRVGLHTVWVGTSHREEGVDIALEHIHNIREALLQLWDAVDDKAEEIRTRQKVAIETIA

SEQ ID NO: 49258 - protein, 500 aa, Burkholderia mallei ATCC 23344
MTTSMRERRRGIAFMRSCDDFLRTSELSIAAVNSLRRTIAPSHRVLDACGSGAACLLASRYGAKQVVALAAAEATLVGARAGANGPGERISFVDAEQAAALVARQGRFDVVLGLAGGGRDGLDPHYGARLDAFARRFGTANVAVVPNGVRYDAQLVEWREAERLEADVAARQRALEARYDLTLGPVLDQMAAGAAPRGRVRADALRALCARLPFLSCRPGDGGDAGTSGTTAPEHVELTAAHGGRADGVLWTQELIHDGIVIERIQGCSWLDERVDLEAGDAIAVPVADMARAAPLDGGEVPPQLAPAPRASGAPAPLVFWLTGISGAGKTTIATRFKQRADADAWPTVVLDGDTLRGGLNADLGFCDADRAENVRRIAEVAALMADTGLVVVVSCISPRRSFRETAREIVGAERFVEVFVDTPPAVAQARDPKGLYRRARAGLIASFTGIDSDYEPPPDPQLRIDTTTHDVEDATQMLRRYYVDARLSGTRAGTAECAA

SEQ ID NO: 49259 - protein, 644 aa, Streptomyces coelicolor A3(2)
MCGIAGTYHWPDGKAVTDRLTDVLAHRGPDGAGRYSHPAGEGEVHLGHRRLAVVDLSTTGAQPMVSEGLALSYNGELYNAPELRTELESAGVRFRGTSDTEVVLEAWRRWGTDCLPQLRGMFAFAVFDERTGELVLARDQLGIKPLFLLRRGAGLVFASELKALATATGGKLEVDHAALVASLLYYWVPDSRCALREAEKLPPGSWLRCRPDGRVERGRFWNLRDVAAEGRERARSGERPDLAAVVEESTRRHLLSDVPVATFLSGGLDSSYLTALAARDRPGISAYTIGFRAEDARFEAMPDDLRYARQVAERFGVDLHEIEIAPNVLDLLPRMTYHLDEPIGDPAAINTFLICSAAREAGVKVMLSGMGADELFAGYRKHLANVLALRYQRVPRPLRRGVSAAVGRLPVASSRRGYRSVRFAKRFLSFADLPQETAFRRSYTMYDRQELLDLIDPDLAGTVEDVLTEHADVYEDNDLDDFVNRMCLADARMFLPGLNLAYTDRSSMAASTEVRVPYVDVEVVKAAFAVPGDRKIVGRQGKAVLKEAATSVLPREIVYRPKGLFSAPLRAWMSRDLAPLVREVVNDGELVRSGFLRRDALRRLVAEDAAGQRDFSKHLWHVLTLEYWYRGATSGSGDHSSSTA

SEQ ID NO: 49260 - protein, 453 aa, Zea mays
MASTAARRLRELQAQTGNKTCVDCAQRNPQWASVSYGVFMCLECSGKHRGLGVHISFVRSVTMDSWTEAQLRKMEAGGNDRLNAFLTARGVPKETSHVAKYNSNAAAAYRDRIAALAEGKPWTDPPVVKETPGSGAPAPARKPPLHASGGGGGWDDWDDDFRSDMRRNQSVGSFAAAGAQSGRQPPRSKSTQDIYTRQQLEASAANKDDFFARRMAENESKPEGIPPSQGGKYVGFGSSPAPSANRNGGAAQGDVLQVVSQGFGRLSLVAASAAQSAASVVQVGTKEIQSKMRDGGYDQKVNETVSVVANKTAEIGSKTWGIMRGVMAMASQKVEEYAKEGGMSGWGEDWQRSEQNGEPYQRFEHATNSNSWNSSQNSSSKNNNSSSWDDWDDQGKKGEPAKPHQSSDSWAGWDDGKDDGFDSPGYNNHNSSNKGSNHNGTSGGSFWREGGFR

SEQ ID NO: 49261 - protein, 441 aa, Lactococcus lactis subsp. lactis Il1403
MNLLSKEEKMIKNSQIPSEFYKKYNVKKGLRDINGKGVLAGLTNISAIHSFDKEGNQIPGILEYRAYNIKDIINDLRKENRFGFEEMTYLLLFGELPTANELQEFQNLLASRRTLPEFFIRETILTNPSSDVMNSMSRCILALASYDEKVSDISIENVLEQSFGLIADFPLLAIYSYQSYVHYFKKESLYIHYPDPKMTTAENILRMLRPDCHYTEVEAKVLDIALILHMEHGGGNNSTFTTHVVTSSGTDTYATIAAALSSLKGPKHGGANIKAAKMLENIKENISNYEDDAEIEKYLHKILNKEVFDKQGLIYGIGHAIYSLSDPRFEVFKSYVETLVKEKGLEEEFKLYEKVARLAPKVISENRKIYKTICPNVDFYSGFVYRILEIPQELFTPLFAIARIVGWLAHRIEELINMNKIIRPAYESVLESKNYIKLGER

SEQ ID NO: 49262 - protein, 373 aa, Geobacter metallireducens GS-15
MRTAILKKVKRIVIKIGSRVLTGDENGLNHAFIARLAAETASLRQQGRQVIVVSSGAVAAGRRELGIEGRPKSIPQKQAAAAIGQSRLMRAYEEDFGRFGHKVAQILLTRDDLANRRRFLNARATLDTLLDFGVIPVINENDTVVVDEIKFGDNDNLSALVTNLAEAHLLVILTDIDGFYDSDPRANPDARLIHLVKSITRETERAAGDSGSSVGTGGMVTKLAAAKKAGQFGVPTLMLNGTVPGILTKAFAGREVGTLFLPARESLNRRKHWIAHTLRPSGRVIVDDGARTVLSRQGKSLLPSGVIRVEGEFDRGACVRVCGADGAEIARGVVDYSHAEIERILGHRSGEIEAILGYKYGDEIIHRDNLVVL

SEQ ID NO: 49263 - protein, 78 aa, Silene paradoxa
MSCCNGNCGCGSACKCGSGCGGCKMFPDFAEASSGSASLILGVAPKTSYFDAEMEMGVATENGCKCGDNCQCQPLTCK

SEQ ID NO: 49264 - protein, 78 aa, Silene paradoxa
MSCCNGNCGCGSACKCGSGCGGCKMFPDFAEASSGSASLILGVAPKTSYFDAEMEMGVATENGCKCGDNCQSNPLTCK

SEQ ID NO: 49265 - protein, 266 aa, Triticum aestivum
  misc_feature (214)..(214): Xaa can be any naturally occurring amino acid
  misc_feature (240)..(240): Xaa can be any naturally occurring amino acid
  unsure (1)..(266): unsure at all Xaa locations
VTLSNKFVQKSRLVPVRNSRDIVDPRVRKKKAAVPLVCHGHSRPVVDLFYSPVTPDGYFLISASKDSNPMLRNGETGDWIGTFEGHKGAVWSCCLDTNALRAASGSADFSAKVWDALTGDELHSFEHKHIVRACAFSKDTHLLLTGGMEKILRVYDLNKPDVAPKELDKSPGSVRTVAWLHNDQTILSSCTDTGGVRLWDVRSEKIVQTLETKXPVTSAEVSQDGRFITTADGSSVKFWXDANHFGLVKGYDMSFTGESAFLETKV

SEQ ID NO: 49266 - protein, 321 aa, Papaver somniferum
MESNGVPMITLSSGIRMPALGMGTAETMVKGTEREKLAFLKAIEVGYRHFDTAAAYQTEECLGEAIAEALQLGLIKSRDELFITSKLWCADAHADLVLPALQNSLRNLKLDYLDLYLIHHPVSLKPGKFVNEIPKDHILPMDYKSVWAAMEECQTLGFTRAIGVCNFSCKRLQELMETANSPPVVNQVEMSPTLHQKNLREYCKANNIMITAHSVLGAVGAAWGTNAVMHSKVLHQIAVARGKSVAQVSMRWVYQQGASLVVKSFNEARMKENLKIFDWELTAEDMEKISEIPQSRTSSAAFLLSPTGPFKTEEEFWDEKD

SEQ ID NO: 49267 - protein, 272 aa, Geobacillus kaustophilus HTA426
MSPFLGELIGTALLIIFGAGVCAGVNLKKSYAANSGWIVITMGWGLAVAVAVYAVGQYSGAHLNPALTVALALAGDFPWKDVPGYIAAQVLGAVMGAVIVYLHYWPHWKETDDPGVKLGVFATGPAVPNAAANLLSEIIGTFVLVLAILAIGANQFADGLNPFVVGFLIVAIGLSLGGTTGYAINPARDFGPRLAHFLLPIPGKGSSNWSYAWVPIVGPLLGGALGSLVYKAVFLGKPSGALWGVLAATAAVLAAAKMAKGKTTSAASRRSL

SEQ ID NO: 49268 - protein, 364 aa, Malus x domestica
QMGLAENQPCFDLIQEWMVNNPKASICTYEGVQDFQDIAIFQDYHGLPEFRKAVARFMEKVRGDRVTFDPERIVMSGGATGAHESLAFCLADPGDAFLVPTPYYPGFDRDLRWRTGVQLFPVVCESSNNFKVTKEALEEAYKKAQESNIKVKGLLINNPSNPLGTILDKETLKDILRFINDKNIHLVCDEIYAATALCQPSFISISEVMNEVVGCNDDLVHIVYSLSKDLGFPGFRVGIIYSYNDVVVNIARKMSSFGLVSTQTQRLIASMLSDTIFVENFIAKSAMKLSQRHDLFTKGLGQVEITTLKSNAGLFIWMDLRRFLENSTFDDELKLWHIIINKVKLNVSPGCSFHCSEPGWFRVC

SEQ ID NO: 49269 - protein, 321 aa, Papaver somniferum
MESNGVPMITLSSGIRMPALGMGTVETMEKGTEREKLAFLNAIEVGYRHFDTAAAYQSEECLGEAIAEALQLGLIKSRDELFITSKLWCADAHADLVLPALQNSLRNLKLEYLDLYLIHHPVSLKPGKLVNEIPKDHILPMDYKSVWAAMEECQTLGFTRAIGVSNFSCKKLQELMATAKIPPVVNQVEMSPTLHQKNLREYCKANNIMITAHSVLGAIGAPWGSNAVMDSKVLHQIAVARGKSVAQVSMRWVYQQGASLVVKSFNEARMKENLKIFDSELTAEDMEKISEIPQSRTSSADFLLSPTGPFKTEEEFWDEKD

SEQ ID NO: 49270 - protein, 2788 aa, ASPERGILLUS NIDULANS FGSC A4
MPPLSTQSPHSNRGSEILGTLKSDTETPLSVVLDIIALDARALETCLVAHPKPAVEKSAYRVTRRALRAVFSDAWGDDAIKQSVQRLASNATTGQKNAPFLGVISGVSARLPNKKEVLAGEKKTLVAYYIKELVGTKAAPPAHIANGMSDFFESFITEADLTSDILPPLEKAILRSPEVVFCGLLPSLFSYLPTEIDLSEILYSRLLKHLLSSMKSNNPLIRQGALQSFESLLVKSKTESLLLKIAGEVIGPLKGNKITSPEQRAIYAQALSAVSPTTDISKDIIQGFVPVFTRESNEAALEQEIKAFAKHLTRLIQSKAKIPDDVVNTIVKGSAEKKIPFRRLWQLYIGQAIWQAEPETLASNEIEPFVTKFVAKLEGIFKEVSSNPLPSAQNGALFTAYVYLALCGRLSALEKFDKAAWEENVGHSMALQPKPSFLLNPKAYSKLASQAEVQWAVRTLAAVPSAAKFDDADAQTKTAWAEAFIYAITAPGLHNSFRDESARNLSIVYKTNIGAIGRVITDALWSWILAFRTGEKESAPVSAGPDHLKFLHLVVKAICPAPSSSESSEQTPAGLKSQLISLLLLARPEMIPNAHWIDLCLRTGTDPGNLVREFSSDCMNQLVRVQEDPIQSKVPQVDAAIWAAAGDLAFVAPDVMVSQLVEQIKEDLDVSRVAHFTPTDAAIARTPEGTMFVDVLNTKSRQTFDKNTKDYDILKWEEEMRAHLAQKQGEKPKKLTADEQAKVKAQLAKEAKIREDVLREVKRIERGCGLIQGLAAGPAIDADDWINPALASLLELSKAGAGLFAGDVISNAYIKCSEKVSSRLGPLRQFVGVATLRAMGKGTVPAEMELEPLGKLVTRILYRLRFASEQRPLDNSSLAYALPLLFTVLAQNGIEEEKGDEEGEQVLLALEILSYHSGSFTDNRLPRVEILGQLISSMQRYTQHYKLIKDTLFDASRCIAPNINENEVNVLLKGTIVSDPSVRSAVLQAIDAEIDLTDMDFSEHIWLECHDHVEENAEIAESIWEENGLEIDETAYGKLIPYLDSRDSNLRGAAARAIAHAIESNHSVFGDIISQLQSKYEFEIRPKEPEKDKYGMPKKVDTTDHWESRSGIALAFGAMQNLFEGDQIVSFLRFLIERGPLIDRSSVVRDQMADSGKGVIAARGQEKVEELMKLLETTLETSDKGSETSDLLNEAVVVLYGSLAQHLKSDDPRLQTVIKRLLATLPTPSESVQSAVSDCLPPLIRLAGRQSGKYAQEMLDQILQSKDYATQRGAAYGLAGIVKGRGIVTLREFRVMPHLQDAAENKKEPHKRLGALMAYELFATILGRTYEPYVIQVVPQLLTSFGDPNADVREACLYTAKACFSNLSSYGVKKILPTLLEGLDDTQWRSQKGACDLLGAMAYLDPQQLAVSLPEIIPPLTVVLNDTHKEVRNAANRSLQRFGEVISNPEIKSLVNVLLKALSDPTKFTDEALDALIKVSFVHYLDAPSLALVVRILERGLGDRSATKRKSAQIIGSLAHLTERKDLITHLPIIVSGLNLAIVDPVPTTRATASKALGSLIEKLGEDALPDLIPNLMSTLKSDTGAGDRLGSAQALSEVLAGLGTTRLEETLPTILQNVSSSKATIREGFMTLFIYLPACFGNSFAPYLGRIIPPILAGLADDVDTIRETSLRAGRLLVKNFSSKAIDLLLPELERGLADDSYRIRLSSVELVGDLLFSITGITAKTEAEEEDEEAAQAGQSLLEVLGEERRDKVLSALFICRCDTSGLVKTAAMGVWKSLVASPRTLKEMVPTLSQLIIRRLGSSNMEQKVIASNALGDLIKKAGESVLATLLPTLEDGLQTSPDVDVKQGICIALKEIIASSSPDALEDYEKILISIVRVALVDNDDDVREAAAEAFDALQQILGKKAVDQVLPHLLLLLRNDEDAEQALSALLTLLTEQTRANIILPNLIPTLLTSPISTFNAKALASLAEVAGSAMARRLPTILNTLMDNIITCKDDEQRKELDDAFSTILVSVDEFDGLNVMMSVMLALIKHDDERRRTRAADHLRRFFSDAEIDFSRYHQDLIRVLLISFDDPDKDVVKAAWGALSGLTSRLRKEEMEVLSVPTRQILKGVGVPGADLPGFSLPKGITAILPIFLQGLLNGSVEQRTQAALAIGDLIDRTAADSLKLFVTQITGPLIRVVSERSVDLKCAIFFTLNKLLQKIPLAVKPFLPQLQRTFARGLADQTSETLRNRAAKGLGILITLTPRVDPLIAELITGTKTADVGVRNAMMKALQEVVGKAGANMSEASKNSLLALIDDDASDQTDAVAITNAKLLGALVKVLPPATAGPLIKSRVLTSNFSHASILGLNALLVDSPSSLTEHFAAETVNLICQGVTHKDPFISDNSVLAAGKYLLLEEQHSFESNKAIFEALSPCLQPGTPSDTRRLALVVIRTVGRLHSELTRPHLGLLAPPIFAGVRDMVIPVKLAAEAAFLSIFSVVDSDSAVFDKYMAGPGAELPPGPKRSMSDYFKRVAMRLATQARERREAEGGQGGLGLSNDEVEDEKEVWSIGKVELEEANHPPRSQTPHFGNSIRCRVQRTSSANDRRYADIKMVNLRTQKRLAASVVGCGKRKIWLDPNEMSEISNANSRQTIRKLVKDGLIIRKPVTMHSRSRARELNAARRIGRHRGLGKRKGTKEARMPSSLLWMRRMRVLRRLLVRYRAAGKIDKHLYHELYHLSKGNTFKHKRALIEHIQKAKAERHRERILKEEMDAKRAKNKALRERRQERLEAKRNALVGEEQE

SEQ ID NO: 49271 - protein, 446 aa, Malus x domestica
MAIDIEQRQQPSPGLSKIAVSDTHGEDSPYFAGWKAYDENPYHESSNPSGVIQMGLAENQVSFDLLEKHLEENSEASNWGSKGSKGASGFRENALFQDYHGLLSFRKAMANFMEQIRGGRAKFDPVRVVLTAGATAANELLTFIIADPGDALLVPTPYYPGFDRDLRWRTGVNIVPIHCESSNNFQITPQALEAAYKEAEAKNMRVRGVLITNPSNPLGATIQRAVLEEILDFVTQKNIHLVSDEIYSGSAFSSSEFISVAEIIEDRQYKDAERVHIVYSLSKDLGLPGFRVGTVYSYNDKVVTTARRMSSFTLISSQTQHLLASMLSDKEFTGNYIKTNRKRLRTRYDMIIEGLKKSGIECLKGNAGLFCWMNLSPFLDEPTRECELTLWDSMLHEVKLNISPGSSCHCSEPGWFRVCFANMSEQTLGIALTRIHNFMEKRERAC

SEQ ID NO: 49272 - protein, 321 aa, Papaver somniferum
MESNGVPMITLSSGIRMPALGMGTAETMVKGTEREKLAFLKAIEVGYRHFDTAAAYQSEECLGEAIAEALQLGLIKSRDELFITSKLWCADAHADLVLPALQNSLRNLKLDYLDLYLIHHPVSLKPGKFVNEIPKDHILPMDYKSVWAAMEECQTLGFTRAIGVCNFSCKKLQELMAAAKIPPVVNQVEMSPTLHQKNLREYCKANNIMITAHSVLGAICAPWGSNAVMDSKVLHQIAVARGKSVAQVSMRWVYQQGASLVVKSFNEGRMKENLKIFDWELTAENMEKISEIPQSRTSSADFLLSPTGPFKTEEEFWDEKD

SEQ ID NO: 49273 - protein, 646 aa, Rhizobium sp. N33
MRHIMAKSLAPTDGVRDYLAAQEKKSLLRFLTCGSVDDGKSTLIGRLLSDTKQIFEDQLAALERDSRKHGTTGDDIDFALLVDGLEAEREQGITIDVAYRFFATPKRKFIVADTPGHEQYTRNMATGASTADLAIVLIDARQGVLRQTRRHSIIASLLGIRHIVLAVNKIDLVGFDQAVFERITESYRQFSRDLGFQTIVPIPMSARYGDNVTSRSESMEWYSGPTLIEHLETVSVEEAVVELPFRFPVQYVNRPNLDFRGFAGTVASGSVAPGDEVVVAKSGKSSRVKRIVSYGGDLAQAAAGQAVTLVLDDEVEISRGNMLVSPAARPQVADQFAANIVWFDEHALLPGRSYILRTETDQTSATVTDLKYRINVNDFAHEAAKSLEMNEVGICNISTRSPIAFDTFAENRTTGAFILIDRITNATVGAGMILHSLRRAENIHWQSLDVGKRVRADMKHQRPAVFWFTGLSGSGKSTIANLFEKKLFATGRHTYILDGDNVRHGLNRDLGFTEADRVENIRRVAEVARLMADAGLIVIVSFISPFSAERRMARELMADGEFVEVFVDTPFEECARRDPKGLYARALNGEIKNFTGVDSPYEAPEKPEIHLKTLGRSAEEMVDALEHWLNERDIAQPPPADNGGSI

SEQ ID NO: 49274 - protein, 413 aa, Oryza sativa (japonica cultivar-group)
MGNCGTREENAVVAAHAQVQQLHLLQHPVKNAVAERKHTRISSDMSDPSTPRKIEDAKNISIYNDVIDFTLFELETITRSFRADYVLGEGGFGTVYKGYIDENVRVGLKSLPVAVKVLNKDGHQGHREWLTEVRFLGQLRHPNLVKLIGYCCEDDHRLLVYEFMFRGSLENHLFRRTATPLSWATRMSIALGAAKGLACLHNAERPIIYRDFKTSNILLDSDYTAKLSDFGLAKAGPEGDQTHVSTRVMGTYGYAAPEYVMTGHLTARSDVYSFGVVLLELLTGRKSIDKSRPSREHSLVDWALPKLNDKRRLLQIIDPKLEGQYSVRAAHKACSLAYYCLSQNPKARPLMSDVVETLEPLQGSGGSDGAVQSVLGSGLPSYRVNRRLMTNRVHCRALPNPKCSPAVPACRVR

SEQ ID NO: 49275 - protein, 234 aa, Brassica napus
MLGIFSGAIVSLPEELVAAGSRTPSPKTTGATLVNKFVQKNPSAVSVQVGDYVQLAYTHHKESPLRPRSFGAKDEIFCLFQGSLDNLGSLKQQYGLAKNANEVLLVIEAYKTLRDRAPYPANHVVSHLSGDFAFVVFDKSTSTLFVASDQVGKVPLYWGITADGYVAFADDLDLLKGACGKSLASFPQGCFYSTALGGLRSFETPKNKITAIPAKEEEIWGAPFKVEGAPVLAD

SEQ ID NO: 49276 - protein, 91 aa, Pseudotsuga menziesii var. menziesii
SGAHTLGRCHKERSGFEGAWTSNPLIFDNSYFKELLSGEKEGLLQLPSDKALLEDPVFRSYVEKYAADEDAFFADYAEAHLKLSELGFAEE

SEQ ID NO: 49277 - protein, 188 aa, Zea mays
  misc_feature (125)..(125): Xaa can be any naturally occurring amino acid
  unsure (1)..(188): unsure at all Xaa locations
MDYMNGPGRHHLFVPGPVNIPEQVIRAMNRNNEDYRSPAIPALTKTLLEDVKKIFKTTSGTPFMFPTTGTGAWESALTNTLSPGDRIVSFLIGQFSLLWIDQQKKLNFNVDVVENEWGQGANLQXLASKLSQDQNHTIKPICIVHNETATGVTNDISAVRTILDHYKHPALLLVGRVSSICALDFRWT

SEQ ID NO: 49278 - protein, 488 aa, Listeria monocytogenes str. 4b F2365
MTDRKNLTTNQGVPVGDNQNSMTAGRKGPTLIEDYVLIEKLAHFDRERVPERVVHARGAGAHGKFVTKKSMKKYTMAKFLQEEGTETEVFARFSTVIHGQHSPETLRDPRGFSVKFYTEEGNYDFVGNNLPVFFIRDAIKFPDVIHSLKPDPRTNIQDGNRYWDFFSLTPEATTMIMYLFSDEGTPASYREIRGSSVHAFKWINEEGKTVYVKLRWIPKAGIVNLSTEQASQIQAKEFNHASRDLYEAIENGDYPEWDLYVQVLDPKDLDNFDFNPLDATKDWFEDVFPYEHVGTMTLDRNPDNIFAETESVGFNPGVLVRGMLPSEDRLLQGRLFSYSDTQRHRVGQNYLQLPINSPKAPVANNQRDGHMPFKQQTSSINYEPNSYDTEPKENPAFIEPEQEIRGDISGRLIAEKPNNFGHAKEVWDRYSDAERAALVKNIVDDWSQVRDDIKIRNLRNFYQVDPEFASRVAAGTGVNLEAHVADLK

SEQ ID NO: 49279 - protein, 359 aa, Thermoplasma volcanium GSS1
MTVKGVLMAGGKGTRLRPITYSIPKPLVPVAGKPVISYILDSFYNAGVKDIIITTGYKFEALIKGVLENKFSDQNILFSVEKDPAGTAGGVKLAENFIDDTFVVGSGDILIDFDVSKMIEEHKKRGANITIALTRVDDPSQFGIAEVDDEGYVKRFLEKPKKSETFSNTINAGVYVIEPSVLEYIPKGVQFDFAKDLFPKAMANGIKIYTYEINGVWLDAGRPGDLIKANQIMVDKYGDRNINGSRMILKARIPDGVNVSGPTYIGEGVAIGKGSSIDSSTIYEGVQIGNDVEIKNSVIMSSCRILDGSKISDSVIMQNTVIGEACEIRNSVLSQKLNLQKGSRVFDVALSSEIIQDEN

SEQ ID NO: 49280 - protein, 1059 aa, Shewanella oneidensis MR-1
MFKASEVLAGRYDSANLDELFKAVTDNYIVDEEQYLSELIKLVPSSDEAIERVTRRAHELVNKVRQFEKKGLMVGIDAFLQQYSLETQEGIILMCLAEALLRIPDAATADALIEDKLSGAKWDEHLSKSDSVLVNASTWGLMLTGKIVSLDKKIDGSSSNLLGRLVNRLGEPVIRQAMMAAMKIMGKQFVLGRTMKEALKNSEDKRKLGYTHSYDMLGEAALTRKDAEKYFTDYANAITELGAQSYNESESPRPTISIKLSALHPRYEVANEDRVLTELYDTVIRLIKLARGLNIGISIDAEEVDRLELSLKLFQKLFNSEATKGWGLLGIVVQAYSKRALPVLVWLTRLAKEQGDEIPVRLVKGAYWDSELKWAQQAGEAAYPLYTRKAGTDVSYLACARYLLSDATRGAIYPQFASHNAQTVAAISDMAGDRNHEFQRLHGMGQELYDTILSEAGAKAVRIYAPIGAHKDLLPYLVRRLLENGANTSFVHKLVDPKTPIESLVVHPLKTLTSYKTLANNKIVLPIDIFGSDRKNSKGLNMNIISEAEPFFAALDKFKSTQWQAGPLVNGQPLTGEHKTIVSPFDTTQTVGQVAFADKAAIEQAVSSAHAAFGSWTRTPVEVRASALQKLADLLEENREELIALCTREAGKSIQDGIDEVREAVDFCRYYAVQAKKLMSKPELLPGPTGELNELFLQGRGVFVCISPWNFPLAIFLGQVSAALAAGNTVVAKPAEQTSIIGYRAVQLAHQAGIPTDVLQYLPGTGATVGNALTADERIGGVCFTGSTGTAKLINRTLANREGAIIPLIAETGGQNAMVVDSTSQPEQVVNDVVSSSFTSAGQRCSALRVLFLQEDIADRVIDVLQGAMDELVIGNPSSIKTDVGPVIDATAKANLDAHIDHIKQVGKLIKQMSLPAGTENGHFVAPTAVEIDSIKVLEKEHFGPILHVIRYKASELAHVIDEINSTGFGLTLGIHSRNEGHALEVADKVNVGNVYINRNQIGAVVGVQPFGGQGLSGTGPKAGGPHYLTRFVTEKTRTNNITAIGGNATLLSLGDSDA

SEQ ID NO: 49281 - protein, 692 aa, Neurospora crassa
MSSFTETDQLAINTIRVLAADATAHANSGHPGAPMGMAPVAHVLFNRFMNFNPKNPKWLNRDRFVLSNGHACMLQYALLHLYGYALTIDDLKAFRRIDSITPGHPEAHDTPGVEVTTGPLGQGISNAVGLAIAQAHTAAVFNKPGYDLVNNYTYCFLGDGCLMEGVSSEACSLAGHLQLGNLIAIWDDNRITIDGDTNQAFTEDVLKRYESYGWHIVTVLDGDNNLDLIADAIKKAKEVTDKPTLIQLKTTIGFGSKKQGTHDVHGSPLKADDIKQLKEKFGFNPEESFAVPQEVYDLCHKASAKGAAKEEEWNQLFAKYAEEFKAEHDDLIRRQKGELPEGWEKHLPVYTPADPAVASRKLSENVLNKIFEAVPELVGGSADLTGSNLTRWKGAIDFQPPATGLGTYAGRYFRFGVREHGMGAIMNGMAAYGTLIPYGGTFLNFVSYAAGAVRLSALSQVRAIWVATHDSIGLGEDGPTHQPIETLAHFRALPNCMVWRPADGNETSAAYYVALTSKHTPSILALSRQNLPQLEGSTIEKAIKGGYVLHEVEGADVTLISTGSEVCIAIDAVKELKEKHNIKARVVSMPCMEVFDAQPKDYRLSVLPDGIPSLSIEVMSTMGWEKYSHEQFGLNRFGASGAYLDVYKASIPLPKFEFTPEGIAKRAIATIDFWKDVPNIRSPINRAFQQLI

SEQ ID NO: 49282 - protein, 418 aa, Geobacter metallireducens GS-15
MTIAEQIRTIAADARQAAIAMAKLPTTAKNDLLMAMAMALISNTPHLIDENRKDLEAGEKKGLSSAMLDRLMLDEARIKAMADGLREVAGLPDPVGEVTRMWKRPNNLMVGKMRIPLGVIGIIYEARPNVTADAAALCLKAGNSVILRGGSEAIHSNLAIARILGEEMERAGIPKAALSVIPFPEREGVLEMLKQEEFIDLIIPRGGESLIRFVVEHSKIPVIKHYKGVCHVFVDASADFDMAERIVVNAKVQRPGVCNALETLLIHKDVAEAFIPRIAATLTDLKVELRGDDCVRQFAPQAKKATEEDWQAEYLELILAVRVVDGLNEAIDHINAYGSLHTEAIVTRDYHNSQRFIREVNSSTVLVNASTRFADGNQLGLGAEIGISTTKLHSFGPMGLEDLTTTKFIVYGDGQVRQ

SEQ ID NO: 49283 - protein, 460 aa, Desulfovibrio desulfuricans G20
MTHEQYDLVIIGAGPGGSRAALDAAAAGMRTALVEKADAGGTCLNWGCIPTKFLLGGTAAVPLLQIQKKYKAAGGDVHLSLAALHQRKDRFIKGTRQNLVKQLTQAGVNFITGAASFAGPRTVVVEKEDGSSLLEFENLILAAGSEPASFPGLIPDGNCVLHSSHILQLETPPQSLIIVGGGAIGLEMGDLFARFGTQITIVEALPHLVPAEDGDIADALTKALKREGWTVHTGRRVRSLVTDEEGALLTFEDGTAIRADKALMAAGRSPATAALHPEKAGIMTDGRGWISTDNFLQAAENIYAVGDVNGRTLLAHAAEHQARYVVSRLRGLTAAEYPAPVMPSCVYGHMEVMRTGATAKELTAQGISVSVSRAPLASNAIAQSCGATQGFVKAVWAAGNGTPELRGIAATGHGVSHLVGLATVMVQQRWRRENIHDIIYAHPTLDEALEAALSAPLENA

SEQ ID NO: 49284 - protein, 551 aa, Pinus sylvestris
RVEGWGAPYFVVNENGNVAVRPHGSQTLPSEEIDVMKVVKKVVGSKSLGGLGMSAPLIIRFPDVLKHRLESLQSAFDSAMRMQSYESYFQGVYPVKCNQDRYVVENIVEFGKPYAFGLEAGSKPELLLAMASMCKASPKALLVCNGYKDEEYISLALTARRLNFNCVIVLEQEEELDLVLNVSRKLSVRPVIGVRAKLRTKHGGHFGATSGEKGKFGLTSLEIVGIVRKLQKLGMLDCLQLLHFHIGSQIPCVEVLNDGVSEAAYIYSELAKLGANMKIIDIGGGLGIDYEGTKSSCSDMSVSYSLDEYAAAVVKAVRVACNQKGVKHPIICSESGRALVSHHSLLIFDVVSVHEKKDSVSAAVAGMNLNPLVDGLPEELMGEYQSVMAYTAMGDCRSSQICAEHMKARCLDLFKEGRLGLEQLATVDGMCDLVSSPAADTPAVCHVNLSIFKSIPDFWAIGQLFPVMPIHRLNERPTVRAILSDLTCDSHGKVDTFISGDDGGGSRGLPLHPFEGRSEPYYLGMFLGGAYQEALGGLHNLFIVPNVIHVV

SEQ ID NO: 49285 - protein, 389 aa, Pseudomonas aeruginosa UCBPP-PA14
MPKALRFLGWPVLVGVLLALLIIQRNPELVGLPRQEVHVEQAPLLSRLQEGPVSYANAVSRAAPAVANLYTTKMVSKPSHPLFDDPMFRRFFGDNLPQQKRMESSLGSAVIMSAEGYLLTNNHVTAGADQIIVALRDGRETIAQLVGSDPETDLAVLKIDLKNLPAMTLGRSDGIRTGDVCLAIGNPFGVGQTVTMGIISATGRNQLGLNTYEDFIQTDAAINPGNSGGALVDAAGNLIGINTAIFSKSGGSQGIGFAIPTKLALEVMQSIIEHGQVIRGWLGVEVKALTPELAESLGLGETAGIVVAGVYRDGPAARGGLLPGDVILTIDKQEASDGRRSMNQVARTRPGQKISIVVLRNGQKVNLTAEVGLRPPPAPAPQQKQNGGE

SEQ ID NO: 49286 - protein, 78 aa, Silene paradoxa
MSCCNGNCGCGSACKCGSGCGGCKMFPDFAEASSGSASLILGVAPKTSYFDAEMEMGVATENGCKCGDNCQCNPLTCK

SEQ ID NO: 49287 - protein, 333 aa, Bacillus subtilis subsp. subtilis str. 168
MKLLKREGLSLTEEKALWMYQKMLEIRGFEDKVHELFAQGVLPGFVHLYAGEEAVAVGVCAHLHDGDSITSTHRGHGHCIAKGCDLDGMMAEIFGKATGLCKGKGGSMHIADLDKGMLGANGIVGGGFTLACGSALTAKYKQTKNVSVCFFGDGANNQGTFHEGLNLAAVWNLPVVFVAENNGYGEATPFEYASACDSIADRAAAYNMPGVTVDGKDILAVYQAAEEAIERARNGGGPSLIECMTYRNYGHFEGDAQTYKTKDERVEHLEEKDAIQGFKNYLLKETDANKLSDIEQRVSESIEKAVSFSEDSPYPKDSELLTDVYVSYEKGGM

SEQ ID NO: 49288 - protein, 78 aa, Silene paradoxa
MSCCNGNCGCGSACKCGSGCGGCKMFPDFAEASSGSASLILGVAPKTSYFDAEMEMGVATENGCKCGDNCQCQTLTCK

SEQ ID NO: 49289 - protein, 458 aa, Bacillus subtilis subsp. subtilis str. 168
MTLAIIGGGPAGYAAAVSAAQQGRNVLLIDKGKLGGTCLNEGCIPTKSLLESANVLDKIKHADSFGIELPAGAISVDWSKMQSRKQQVVSQLVQGVQYLMKKNQIQVVKGTASFLSERKLLIEGENGKEIREADQVLIASGSEPIELPFAPFDGEWILDSKDALSLSEIPSSLVIVGGGVIGCEYAGLFARLGSQVTIIETADRLIPAEDEDIARLFQEKLEEDGVEVHTSSRLGRVDQTAKTAIWKSGQREFKTKADYVLVAIGRKPRLDGLQLEQAGVDFSPKGIPVNGHMQTNVPHIYACGDAIGGIQLAHAAFHEGIIAASHASGRDVKINEKHVPRCIYTSPEIACIGMTERQARSIYGDVKIGEFSFSANGKALIKQQAEGKVKIMAEPEFGEIVGVSMIGPDVTELIGQAAAIMNGEMTADMAEHFIAAHPTLSETLHEALLSTIGLAVHA

SEQ ID NO: 49290 - protein, 321 aa, Papaver somniferum
MESNGVPMITLSSGIRMPALGMGTAETMVKGTEREKLAFLKAIEVGYRHFDTAAAYQSEECLGEAIAEALQLGLIKSRDELFITSKLWCADAHADLVLPALQNSLRNLKLEYLDLYLIHHPVSLKPGKFVNEIPKDHILPMDYKSVWAAMEECQTLGFTRAIGVSNFSCKKLQELMAAAKIPPVVNQVEMSPTLHQKNLREYCKANNIMITAHSVLGAIGAPWGSNAVMDSKVLHQIAVARGKSVAQVSMRWVYQQGASLVVKSFNEGRMKENLKIFDWELTAEDMEKISEIPQSRTSSAAFLLSPTGPFKTEEEFWDEKD

SEQ ID NO: 49291 - protein, 265 aa, Rosa hybrid cultivar
LVQFGAFIVLCGATHLINLWTFSVHSRTVAIVMATAKVFTAAVSCATALMLVHIIPDLLSVKTRELFLKNKAAELDREMGLIRTQEETGRHVRMLTHEIRSTLDRHTILKTTLVELGRILTLEECALWMPTRTGLELQLSYTLHQQNPVGYTVPIHLPVINQVFNNNGTVKISPNSPVARLRPIAGKHIPGEVVAVRVPLLHLSNFQINDWPELSTKRYALMVLMLPSDSARQWHVHELELVEVVADQVAVALSHAAILEESMRA

SEQ ID NO: 49292 - protein, 183 aa, Arabidopsis thaliana
MAEEYKNTVPEHETPKVATEESSAPEIKERGMFDFLKKKEEVKPQETTTLASEFEHKTQISEPESFVAKHEEEEHKPTLLEQLHQKHEEEEENKPSLLDKLHRSNSSSSSSSDEEGEDGEKKKKEKKKKIVEGDHVKTVEEENQGVMDRIKEKFPLGEKPGGDDVPVVTTMPAPHSVEDHKPE

SEQ ID NO: 49293 - protein, 177 aa, Triticum aestivum
  misc_feature (9)..(9): Xaa can be any naturally occurring amino acid
  misc_feature (42)..(42): Xaa can be any naturally occurring amino acid
  unsure (1)..(177): unsure at all Xaa locations
MAPTVMASXSSPPCAPFQGLNSTVGLPVCRRSKGAGLGSVSXNGGRIRCMQVWPIEGIKKFETLSYLPPLSTEALLKQVDYLIRSKWVPCLEFSKVGFIFREHNASPGYYDGRYWTMWKLPMFGCTDATQVINEVEEVKKEYPDAYVRIIGFDNMRQVQCVSFIAFKPPGCEESGQA

SEQ ID NO: 49294 - protein, 339 aa, Bradyrhizobium sp. BTAi1
MRVYYDRDADLNLIKGKKVVIVGYGSQGHAHALNLKDSGVKDVAIALRKGSASAKKAEGAGFKVMEVAEAAKWADLVMMLTPDELQGDIYREHLHDNMKQGAALVFAHGLNVHFNLLDPRPDLDVLMIAPKGPGHTVRSEYQRGGGVPCLIAIAKDSSGNAHDLGLSYASAIGGGRAGIIETTFKEECETDLFGEQAVLCGGLVELIKAGYETLTEAGYAPEMAYFECLHEVKLIVDLIYEGGIANMNYSISNTAEYGEYVTGPRIITPETKAEMKRVLDDIQSGRFARDWMLENKVNQSSFKATRARLAQHPIEEVGARLRDMMPWIKKGALVDKSKN

SEQ ID NO: 49295 - protein, 321 aa, Papaver somniferum
MEIGGVPVVTLSSGRGMPILGMGTAENNLQGSERVKLAILKAIEVGYRHFDTAFVYQTEGSLGEAVAEALQNGLIKSRDELFITSKLWCADAYPDHVLPALQNSLRNLKLEYLDLYLIHWPVSLKPGKFVHPIPKDEIFPIDYKSVWAAMEKCQMLGLTKSIGVSNFSCKKLHYLMATANIPPAVNQVEMNPIWQQQKLRDYCKTNNIMVTAYSPLGAKGTMWGSSGVMDSEVLNQISQVRGKSVAQVSLRWVYEQGASLLVKSFNEERMKENLKIFDWELSPEDLKNISELPQRRVSTGDPFVSINGPFKSVEELWDDEV

SEQ ID NO: 49296 - protein, 491 aa, Clostridium acetobutylicum ATCC 824
MTSKKEQKNELKRTLTARHMNMIAIGGSVGTGLFFASGSAISTAGPGGALLAYIITGILVYVLMMSLGEMSTLLPISGSFETYATRFVDPALGFTLGWNYWFSWSICVASELVAGSLIVKFWFPHTNTTIWSIGFLLVIFILNILSAKAYGESEYWFSSIKVVTIIIFIIVGVLMIFGIMGNDSPGFKNWVISGNGSRAPFVGGIAAIINVFLVAGFSFSGTEIVGLAAGETENPEENVPKAIKSVFWRILLFYICAIIIIGFLVPFNDKNLLKSGVNNIAYSPFTMVFAKCGIAFAASAMNAVILTSVLSCGNSGLYVSSRMLYSLAKEGKAPKFLAKVNKQGVPMNALYATTLVASSAFLSSLIGEGKIYYVLYNASGITALFAWLGIGICHYRFRKAYVAQGRDLKDLKFKAKFYPYGPIMAIVLCVVIIFGANIWIFQAPKFSWFDFISNYICIPIFIALYIAYKYIKKTKLVPLEECDFEYNGKDK

SEQ ID NO: 49297 - protein, 545 aa, Azospirillum brasilense
MKLAEALLRALKDRGAQAMFGIPGDFALPFFKVAEETQILPLHTLSHEPAVGFAADAAARYSSTLGVAAVTYGAGAFNMVNAVAGAYAEKSPVVVISGAPGTTEGNAGLLLDHQGRTLDTQFQVFKEITVAQARLDDPAKAPAEIARVLGAARSLSRPVYLEIPRNMVNAEVEPVGDDPAWPVDRDALAACADEVLAAMRSATSPVLMVCVRSAATGLEAKVADVAHGLGVPVVTTFMGRGLLADAPTPPLGTYIGVAGDAEITRLVEESDGLFLLGAILSDTNFAVSQRKIDLRKTIHAFDRAVTLGYHTYADIPLDGLVDALLERLPPSDRTTRGKEPHAYPTGLQADDGPIAPMDIARAVNDRVRAGQEPLLIAADMGDCLFTAMDMIDRGLMAPGYYAGMGFGVPAGIGAQCVSGGKRILTVVGDGAFQMTGWELGNCRRLGIDPIVILFNNASWEIVRTFQPESAFNDLDDWRFAEMAAGMGGDGVRVRTRAELKAALDKAFATRGRFQLIEAMIPRGVLSDTLARFVQGQKRLHAAPRE

SEQ ID NO: 49298 - protein, 204 aa, Hypocrea jecorina
MSDSPQSPPKDVDQGAQSPDEEGQMNDNQEPHSAGGTGYEFEGVKEQDRWLPIANVARIMKNALPDNAKIAKEAKECMQECVSEFISFITSEASEKCQQEKRKTVNGEDILFAMTSLGFENYAEALKVYLSKYREQQNQSNRDRVLENNTWGNAMIPGEKTEPGTTNPEYAPPEGANPPESGAEPNYMYTSHAGHNGAGAGENY

SEQ ID NO: 49299 - protein, 93 aa, Pseudotsuga menziesii var. menziesii
SGAHTLGRCHKERSGFEGAWTSNPLIFDNSYFKELLSGEREGLLQLPSDKALLEDPVFRSYVEKYAADEDAFFADYAEAHLKLSELGFAEEYQ

SEQ ID NO: 49300 - protein, 481 aa, Streptococcus pneumoniae TIGR4
MMPIQNKTMLITYSDSLGNNLKDLYDNLEEHFGDAIGGVHLLPFFPSTVDRGFAPVDYDEVDSAFGDWEDVKRLGEKYYLMFDFMINHISRQSKYYKDYQEKHEASEFKALFLNWDKFWPENRPTQSDVDLIYKRKDRAPKQEIVFEDGSVEHLWNTFGEEQIDLDVTKEVTMEFIRKTIQHLASNGCDLIRLDAFAYAVKKLDTNDFFVEPDIWDLLDKVRDIAAEYGTELLPEIHEHYSIQFKIADHDYYVYDFALPMVTLYTLYSSRTERLAKWLKMSPMKQFTTLDTHDGIGVVDVKDILTDEEIDYASNELYKVGANVKRKYSSAEYNNLDIYQINSTYYSALGDDDVKYFLARLIQAFAPGIPQIYYVGLLAGKNDLKLLEETKEGRNINRHYYSNEEIAKEVQRPVVKALLNLFSFRNRSEAFDLEGTTEIETPTAHSIVIKRQNKDKSVTAVVEIDLQNQTYRVIENGVEVSF

SEQ ID NO: 49301 - protein, 398 aa, Candida albicans
MFLKNIFIALAIALLVDATPTTTKRSAGFVALDFSVVKTPKAFPVTNGQEGKTSKRQAVPVTLHNEQVTYAADITVGSNNQKLNVIVDTGSSDLWVPDVNVDCQVTYSDQTADFCKQKGTYDPSGSSASQDLNTPFKIGYGDGSSSQGTLYKDTVGFGGVSIKNQVLADVDSTSIDQGILGVGYKTNEAGGSYDNVPVTLKKQGVIAKNAYSLYLNSPDAATGQIIFGGVDNAKYSGSLIALPVTSDRELRISLGSVEVSGKTINTDNVDVLLDSGTTITYLQQDLADQIIKAFNGKLTQDSNGNSFYEVDCNLSGDVVFNFSKNAKISVPASEFAASLQGDDGQPYDKCQLLFDVNDANILGDNFLRSAYIVYDLDDNEISLAQVKYTSASSISALT

SEQ ID NO: 49302 - protein, 690 aa, Sorghum bicolor
MSASSSSLCGGDPAMRSVVWFRRDLRVEDNPALAAAARAGGEVVPAYVWSPEEEGPYYPGRVSRWWISQSLKRLDASLRRLGAGKLVTRRSADAVVALLQLVRDTGATHVYFNHLYDPISLVRDHRLKEMLAAEGIVVQSFNADLLYEPWEVVDDEGQPFTMFTAFWNRCLSMQYDPPAPLLPPKKINSGDLSMCPSEDLIFEDDSERGSNALLARAWTPGWQNADKALTAFLNGPLADYSVNRKKADSASTSLLSPHLHFGELSVRKVFHLVRMKQLVWSNEGNHAAEESCTLFLRSIGLREYSRYLSFNHPSSHERPLLAHLRFFPWVVNESYFKIWRQGRTGYPLVDAGMRELWATGWLHDRIRVVVSSFFVKVLQLPWRWGMKYFWDTLLDADLESDALGWQYITGSLPDSRELDRIDNPQFEGYKFDPHGEYVRRWIPELVRLPTEWIHHPWDAPVSVLQAAGIELGSNYPLPIVELDAAKARLQEALSEMWQLEAASRATMNNGMEEGLGDSSEVPFPEELQMEVDRATANVVMTVRRREDQMVPTMTSSLNRAETEVSADLGNSEDTRAQVPFHAHFHPRVEREDMIQNTEGPALRINGTHQHNIFQQPQNHRREALAPSVSEASSSWTGREGAVVPVWSPPAASGHSETFAADEADVSSRSYLDRHPRSYRLMNWSQLSQSL

SEQ ID NO: 49303 - protein, 93 aa, Pseudotsuga menziesii var. menziesii
SGAHTLGRCHKERSGFEGAWTSNPLIFDNSYFKELLSGEKEGLLQLPSDKALLEDPVFRSYVEKYAADEDAFFADYAEAHLKLSELGFAEEYQ

SEQ ID NO: 49304 - protein, 518 aa, Desulfovibrio vulgaris subsp. vulgaris str. Hildenborough
MPSPHMSSHDPASCSRPAGDSPPSCACPGASGPLPRTDWGVPAEGGVVSLPLRSVARRTGRVASRRRAVLRVLCICLSCLCVLGGPDSQPVAFAAVDPASPRVTPVVQAVQRVAPAVVNITSARVEERRVNPMPGLLDDEMLDQLAPGLPKQRVTSRSLGSGVIIDGERRLVLTNAHVIAGATSIAVRLLDGRTFTADLVGADPDFDLAVLRLAGAGRLPEAPMAHSADLMPGETVLAIGNPFGFSHTVTTGVVSALNRTIRSKDGLFTDLIQTDAAINPGNSGGPLLNILGELIGINTAVYARGEGIGFAIPIDKARGVVEELLGQGRVSPVWLGLSGQNVDPRTASVLGLGKVAGLLVTEVFAGGPAATVGLEPGDVILSINGHDVGGKDEYLLLVGNYTHKDVLRVIIMRGGQERELRVVPAIFGRADAERLAAQRWGVILQQGRGGLVIAEVRPGSPAAQLGLARGDVLRAVGPRQVESLDDFAVAYRRYQLNAQVLIQVQRGARLYHVRLVLQ

SEQ ID NO: 49305 - protein, 442 aa, Saccharomyces cerevisiae
MSRRVVITGLGCVTPLGRSLSESWGNLLSSKNGLTPITSLPNYNEDYKLREKSIPSTITVGKIPENFQNENSAINKLLFTSQDERRTSSFIKLALRTTYEALHNAGLLNPNDITINTSLCNLDHFGCLIGSGIGSIQDIYQTSLQFHNDNKRINPYFVPKILTNMAAGNVSIKFNLRGLSHSVSTACATGNNSIGDAFNFIRLGMQDICVAGASETSLHPLSLAGFIRAKSITTNGISRPFDTQRSGFVLGEGCGMIVMESLEHAQKRNANIISELVGYGLSSDACHITSPPADGNGAKRAIEMALKMARLEPTDVDYVNAHATSTLLGDKAECLAVASALLPGRSKSKPLYISSNKGAIGHLLGAAGAVESIFTICSLKDDKMPHTLNLDNVLTLENNEADKLHFIRDKPIVGANPKYALCNSFGFGGVNTSLLFKKWEGS

SEQ ID NO: 49306 - protein, 312 aa, Pseudomonas syringae pv. phaseolicola 1448A
MFLVCGEALFDIFTRADDSGSLNRLGFDAIAGGSPFNVAIGLRRLGVEAGFFAGLSTDYLGRRLRAVLEKETVNTDHLIEFDAPTTLAMVAVGSDGSPTYSFRGDGCADRQLRLEHLPELDAQVRGIHVGSFSLVVQPIADTLLALVARESATRLISLDPNVRLNPAPDIQRWRSQVAAFAEHAHLIKVSDEDLHLLYPDSDPQKIAEGWLGKRTQLVIVTRGTQGASVFTRQHGTWSVPAKTVVTADTVGAGDTFQAALLTFLSERQLDTPQGLSTLSRETLDEMLNFAVGAAALTCTKVGPDLPYRHQLG

SEQ ID NO: 49307 - protein, 405 aa, Sparassis crispa
VVVIGHVDSGKSTTTGHLIYKCGGIDKRTIEKFEKEAAELGKGSFKYAWVLDKLKAERERGITIDIALWKFETPKFMVTVIDAPGHRDFIKNMITGTSQADCAILVIAAGVGEFEAGISKDGQTREHALLAFTLGVRQLIVAINKMDTAKWSEDRYNEIVKETSNFIKKVGYNPKAVAFVPISGWHGDNMLEESVNMTWFKGWTKETKAGVVKGKTLLDAIDAIEPPVRPSDKPLRLPLQDVYKIGGIGTVPVGRVETGIIKAGMIVTFAPTNVTTEVKSVEMHHEQLEQGVPGDNVGFNVKNVSVKDIRRGNVASDSKNDPAKEAASFNAQVIILNHPGQIGAGYAPVLDCHTAHIACKFAELIEKIDRRTGKSIEASPKFVKSGDACIAKLVPSKPMCVESYN

SEQ ID NO: 49308 - protein, 817 aa, Zea mays
  misc_feature (86)..(86): Xaa can be any naturally occurring amino acid
  misc_feature (354)..(354): Xaa can be any naturally occurring amino acid
  unsure (1)..(817): unsure at all Xaa locations
MGEGAGDRVLSRLHSVRERIGDSLSAHPNELVAVFTRLKNLGKGMLQPHQIIAEYNNAIPEAEREKLKDGAFEDVLRAAQEAIVIXPWVALAIRPRPGVWEYVRVNVSELAVEELRVPEYLQFKEQLVEEGPNNNFVLELDFEPFNASFPRPSLSKSIGNGVQFLNRHLSSKLFHDKESMYPLLNFLRAHNYKGMTMMLNDRIRSLSALQGALRKAEEHLSTLQADTPYSEFHHRFQELGLEKGWGDCAKRAQETIHLLLDLLEAPDPSTLEKFLGTIPMVFNVVILSPHGYFAQANVLGYPDTGGQVVYILDQVRAMENEMLLRIKQCGLDITPKILIVTRLLPDATGTTCGXQRLEKVLGTEHCHILRVPFRTENGIVRKWISRFEVWPYLETYTDDVAHEIAGELQANPDLIIGNYSDGNLVACLLAHKMGVTHCTIAHALEKTKYPNSDLYWKKFEDHYHFSCQFTTDLIAMNHADFIITSTFQEIAGNKDTVGQYESHMAFTMPGLYRVVHGIDVFDPKFNIVSPGADLSIYFPYTESHKRLTSLHPEIEELLYSQTENTEHKFVLNDRNKPIIFSMARLDRVKNLTGLVELYGRNKRLQELVNLVVVCGDHGNPSKDKEEQAEFKKMFDLIEQYNLNGHIRWISAQMNRVRNGELYRYICDTKGAFVQPAFYEAFGLTVVEAMTCGLPTFATAYGGPAEIIVHGVSGYHIDPYQGDKASALLVDFFDKCQAEPSHWSKISQGGLQRIEEKYTWKLYSERLMTLTGVYGFWKYVSNLERRETRRYLEMLYALKYRTMASTVPLAVEGEPSSK

SEQ ID NO: 49309 - protein, 163 aa, Lilium longiflorum
KLSKCVQIARLYLEDDDAINAEAFINKASFLVSNSQQEVLNLQYKVCYARILDLKRKFLEAALRYYDISQIEKRQIGDEEIDEDALEQALSAAVTCTILAAAGPQRSRVLATLYKDERCSKLKVYPILQKVYLERILRKPEIDAFAEELKAHQKALLPDNSTV

SEQ ID NO: 49310 - protein, 465 aa, Chlamydia trachomatis D/UW-3/CX
MNEAFDCVVIGAGPGGYVAAITAAQAGLKTALIEKREAGGTCLNRGCIPSKALLAGAEVVTQIRHADQFGIHVEGFSINYPAMVQRKDSVVRSIRDGLNGLIRSNKITVFSGRGSLISSTEVKILGENPSVIKAHSIILATGSEPRAFPGIPFSAESPRILCSTGVLNLKEIPQKMAIIGGGVIGCEFASLFHTLGSEVSVIEASSQILALNNPDISKTMFDKFTRQGLRFVLEASVSNIEDIGDRVRLTINGNVEEYDYVLVSIGRRLNTENIGLDKAGVICDERGVIPTDATMRTNVPNIYAIGDITGKWQLAHVASHQGIIAARNIAGHKEEIDYSAVPSVIFTFPEVASVGLSPTAAQQQKIPVKVTKFPFRAIGKAVAMGEADGFAAIISHETTQQILGAYVIGPHASSLISEITLAVRNELTLPCIYETIHAHPTLAEVWAESALLAVDTPLHMPPAKK

SEQ ID NO: 49311 - protein, 380 aa, Lactococcus lactis subsp. lactis Il1403
MAIEMLGLILAGGQGTRLGKLTKDVAKPAVPFGGRYRIIDFALSNCANSNVKNVGVITQYQPLTLNAHIGNGAPWGLNGINSGVTILQPYSSQEGSKWFEGTSHAVYQNISYIDQQNPEYVLILSGDHIYKMDYEAMLESHKEREASLTVSVMEVPLEEASRFGIMNTDDNDRIIEFEEKPKEPKSNLASMGIYIFNWKRLREVLVNGYSKGNPMEDFGGDVIPAYIEAGENVFAYRFKGYWKDVGTIDSLHQSSMEFLDLNNELNITDKSWRIYSHNDISAPQFITEKSNVKNALVGDGCYVDGTVLHSILSQNVHVQEGTVIEDSFIMSGTFIGENVTIKNAIIGENAKIGDNVEIIGENEVAVIGHGEIKGENKNEQ

SEQ ID NO: 49312 - protein, 236 aa, Zymomonas mobilis
MVDSDEISTPVQHYVIRQMGWLRASVLGANDGILSTSSLMIGVASAHGSSGNILLAGMSGLIAGALSMAAGEYVSVSSQHDMEQADVAREHAELKANPHAEKHELAEIYVERGLDRELALQVAEQLMAHNALEAHLRDELGLTDSLIARPVQAALASAISFSGGAIVPFLTALFSPPEIINITISLISILCLAVLGMVGAHLGGANVPKAALRVTFCGALAMIGTAAIGSFFGTQV

SEQ ID NO: 49313 - protein, 283 aa, Hypocrea jecorina
MESQNQSAPTHPSHNRPTPVYDPTQGGHYGACAALASQGFAPAELYTGPWANVHQGLTGPYKDILTTYWQQTISHLESDTHDYKIHQLPLARIKKVMKADPEVKMISAEAPILFAKGCDIFITELTMRAWIHAEENKRRTLQRSDIASALAKSDMFDFLIDIVPREEATAHAKRTNTQPSAAQSVPGAGQAPMPGQHAGMAPAAGHPSSHSMATADYIGGHALPSEQDYRQPPSMYPGQVPQAPPAAYGQPQPQAAMYGEMDNMYQYSAMQPQQPPMPSEDFE

SEQ ID NO: 49314 - protein, 291 aa, Zea mays
MEDERNTQQHQGGEAQQDAADQVDVKDRGLLDSLLGRKKHDDDQEKKKQTDELATGMEKVTVSEPEKHGHKEEEHEVVGEKKEGLLAKLHRTSSSSSSSSDEEEEAIDENGEIIKRKKKKMGLKEKLKEKLPGHKDGHHTAAPSPAPAPVETHAHHQEEAHHRPHVVPTPAPPPPPHVHQHDHGVVVQDDVKTGTPPHAPEEEKKGLLDKIKEKLPGGHNKKPEAAAAAAPAPPVHAPAPAPQAENVSSPDGKEKKGLLGKIMDKIPGYHKSSAEEADHKADAAGEHRTSS

SEQ ID NO: 49315 - protein, 93 aa, Streptococcus anginosus
MLKPLGDRVVLKVEEKEQKVGGFVIAGAGQDATKTAKVVAAGDGIRTLNGELVAPSVKAGDTVLVESHAGIEVKDGEEKYLVVNEANILAIVE

SEQ ID NO: 49316 - protein, 545 aa, Arabidopsis thaliana
MDLDFDDQPSDHAAPADALPSETNVPDSGSINKSTIGTLSEENEDAFPRGVHWSVKPSILRACNNVNLVGNRRDDGIEATTSFPDDPRTQDSAIFGDYVTPETGADEGRVDMETLDIVQEEGTTSSYVQHTGKLQPKPRLLETVVEEPEPHYSAGDTGYFPMGTNESEFMANVESRNGFSTYEDLQEEELNIPEAPRETVGEMEAQNASGGWEQEEQGVSPCINNTVTGEEENCMGNTVEEQSKRESKTGKSKRATSRKRKKTSEEPNKSSEKTEQKKFKHSSRRQKRTLEKELLETPDHEIRSLPLRDMLRLVEYKEWMQKKEAKGAGVQPSQESNNMNGSGSQYHSQGFDEEDEFGDFGIESSEYQENNVVKPDSPVNYQTYMNKTSRTRWSKEDTELFYEGIQEFGSNLSMIQQLFPERTREQMKLKFKLEERRNPLKLNDALSSRSKHFTHFKNVIKKLQQEAAAAKEGEEEEEAGAEAETTDVPENEEPEKSEETERASDGVAAGVKESDGGDVENGVRSDGGDECDDDEDFWNSYKSDM

SEQ ID NO: 49317 - protein, 540 aa, Streptococcus anginosus
MAKDIKFSADARSAMVRGVDILADTVKVTLGPKGRNVVLEKSFGSPLITNDGVTIAKEIELEDHFENMGAKLVSEVASKTNDIAGDGTTTATVLTQAIVREGIKNVTAGANPIGIRRGIETAVATAVEALKANSVPVSNKEAIAQVAAVSSRSEKVGEYISEAMEKVGNDGVITIEESKGMETELDVVEGMQFDRGYLSQYMVTDNEKMVADLDNPYILITDKKISNIQEILPLLENILKTSRPLLIIADDVDGEALPTLVLNKIRGTFNVVAVKAPGFGDRRKAMLEDIAILTGGTVITEDLGLELKDATIEALGQASKVTVDKDSTVIVEGSGDAEAIANRVAVIKSQIESSTSDFDREKLQERLAKLSGGVAVIKVGAATETELKEMKLRIEDALNATRAAVEEGIVSGGGTAFVNVLSAVEALDLSGDEATGRNIVLRALEEPVRQIALNAGFEGSIVIDRLKNSEAGTGFNAATGEWVNMIDAGIIDPVKVTRSALQNAASVASLILTTEAVVANQPEPASPTPAMDPSMMGGMM

SEQ ID NO: 49318 - protein, 604 aa, Exiguobacterium sp. 255-15
MNRSKLTIFSIKQTIDRKGCAEVKPATFKSFLSLLKKSEPPIGLLSAAVTVSIIQALAALMIPWFLKSLIDNFSVDRLTPGLITLFIVIFIVQMISNAFSIYWLHIAGQRIVANLRTMLWKHLLALPIPFYDETKSGELVSRLNNDATTLQQLLSEQLVRLLTSIVSIVGAITILFFLDWQMTLVMVIAVPITLLIIIPLVRKLHQISRETQKELAGLSGFFAEMLGEVRLIKSQATEEYEMDRGQTRIENLYGFGVKEGKVQAILLPVFNVALTSMLIIIISFGAYRVATNQITAGELVAFSLYLFQIMTPLVTMTEFVSKLQKARGATERISELLEEQPETDGTRQVERPFAAVHFNQLSFGYDDTTLLHDVTFSLPRGQTTAIVGPSGSGKSTLFALLERFYQPTAGQIELGPHAINEFELASWRNSIGYVAQDSPVLSGTIRDNLLYGLTGEVTEQQIREAAEMANADEFIRSFAQGYETEIGERGVKLSGGQRQRIAIARALLRDPELLLLDEATSSLDSESERVVQEALERLMEGRTTFVIAHRLATVRHADQIVVLEQGRVSGIGTHDALVASNVLYNKLVTQQFIGQTETTRGSNR

SEQ ID NO: 49319 - protein, 369 aa, Arabidopsis thaliana
  misc_feature (142)..(142): Xaa can be any naturally occurring amino acid
  misc_feature (164)..(164): Xaa can be any naturally occurring amino acid
  misc_feature (205)..(205): Xaa can be any naturally occurring amino acid
  misc_feature (235)..(235): Xaa can be any naturally occurring amino acid
  misc_feature (241)..(241): Xaa can be any naturally occurring amino acid
  misc_feature (251)..(251): Xaa can be any naturally occurring amino acid
  unsure (1)..(369): unsure at all Xaa locations
MLALSPATRDGCDGASEFLDTSCGFTIINPEEEEEFPDFADHGDLLDIIDFDDIFGVAGDVLPDLEIDPEILSGDFSNHMNASSTITTTSDKTDSQGETTKGSSGKGEEVVSKRDDVAAETVTYDGDSDRKRKYSSSASSRXNRISNNEGKRKVKVDWKKEIHXRRLVEAVDKLRSGQRSSLKDSGAFGSQLSTHQALLVTQRVXSHRGHLLAHEADAADWARKRHFSGVDTGAXINGQAXNGWHAQAPTXGFPPPPPVAVAPPPVNTIILGPLHVWGPPTVAQSIMPHVWPKHLPPPSTAMPNPPFWVSDSPYWHPMHNGTTPYLPTVATRFRAPPVAGIPHALPPHHTMYKSEDEEHKKKVDAKNAL

SEQ ID NO: 49320 - protein, 179 aa, Zea mays
MVLSHASSGRDDDDAVASTFASRYVRERLPRYRMPERSIPREAAQQIISDELMLDGNPRLNLASFVTTWMEPECDKLIMDSINKNYVDMDEYPVTTELQNRCVNMIAHLFNAPIKEDETAIGVGTVGSSEAIMLAGLAFKRKWQNKRKEQGKPCDRPNIVTGANVQDPGTTNNGCKCWV

SEQ ID NO: 49321 - protein, 93 aa, Streptococcus constellatus
MLKPLGDRVVLKVEEREQKVGGFVIAGAGQDATKTAKVIAVGEGIRTLNGELVAPSVKADDTVLVESHAGIEVKDGEEKYLVVNETNILAIVE

SEQ ID NO: 49322 - protein, 127 aa, Vibrio fischeri ES114
MAYSEKVIDHYENPRNVGSFEKDDPSVGSGMVGAPACGDVMKLQIKVSPEGVIEDAKFKTYGCGSAIASSSLVTEWVKGKTLDEAAALKNAEIAEELELPPVKVHCSILAEDAIKAAVSDYRNKHQD

SEQ ID NO: 49323 - protein, 540 aa, Streptococcus constellatus
MAKDIKFSADARSAMVRGVDILADTVKVTLGPKGRNVVLEKSFGSPLITNDGVTIAKEIELEDHFENMGAKLVSEVASKTNDIAGDGTTTATVLTQAIVREGIKNVTAGANPIGIRRGIETAVATAVEALKANSVPVSNKEAIAQVAAVSSRSEKVGEYISEAMEKVGNDGVITIEESKGMETELDVVEGMQFDRGYLSQYMVTDNEKMVADLDNPYILITDKKISNIQEILPLLENILKTSRPLLIIADDVDGEALPTLVLNKIRGTFNVVAVKAPGFGDRRKAMLEDIAILTGGTVITEDLGLELKDATIEALGQASKVTVDKDSTVIVEGSGAAEAIANRVAVIKSQIESATSEFDKEKLQERLAKLSGGVAVIKVGAATETELKEMKLRIEDALNATRAAVEEGIVSGGGTAFVNVLNTVEALDLSGDEATGRNIVLRALEEPIRQIAINAGFEGSIVIDRLKNSEVGTGFNAATGEWVDMIEAGIIDPVKVTRSALQNAASVASLILTTEAVVASQPEPASPAPAMDPSMMGGMM

SEQ ID NO: 49324 - protein, 452 aa, Staphylococcus aureus subsp. aureus Mu50
MNYTQQLKQKDSEYVWHPFTQMGVYSKEEAIIIEKGKGSYLYDTNGNKYLDGYASLWVNVHGHNNKYLNKVIKKQLNKIAHSTLLGSSNIPSIELAEKLIEITPSNLRKVFYSDTGSASVEIAIKMAYQYWKNIDREKYAKKNKFITLNHGYHGDTIGAVSVGGIKTFHKIFKDLIFENIQVESPSFYRSNYDTENEIMTAILTNIEQILIERNDEIAGFILEPLIQGATGLFVHPKGFLKEVEKLCKKYDVLLICDEVAVGFGRTGKMFACNHEDVQPDIMCLGKAITGGYLPLAATLTSQKIYNTFLSDSHGVNTFFHGHTYTGNQIVCTVALENIRLYEKRKLLSHIETTSSTLEKQLHALKRHRNVGDVRGRGLMFGVELVTDKDSKTPLEIEKVERIVRKCKENGLMIRNLENVITFVPVLSMSNKEVKTMVRIFKKAVHNILDRKC

SEQ ID NO: 49325 - protein, 374 aa, Solibacter usitatus Ellin6076
MPQSYPAIQAPPRLLFGPGPSMVAPRVYQAMSQPVVGHLDPFFFQVVEEVRGLLGYAYSTKNHFNLATSGTGTSGMECAVANFTEPGDKFALLTNGFFGDRIGDMARRHGGEVVRLTKPWGEPFDAQEVREFIRRERPRVVAFVQAETSTGMFNQAKPICDAAREVDAVTIADCVTSLGGMPVLVDENGIDIAYSCSQKGLGCPPGLAPMTVGPRALGRLKERKAPVQSFYLDLQLLDSFYCGKKYHHTASATMFYALREGLAIVAEEGLEARWARHKANHEAFVKGIEAMGLSMLVPEGHRLWTLNTPRIPEGVDDAKVRQFLLEQYNMEIAGGFGPLAGKVFRIGTMGYSSTAENVQLILQALEEALKAAKA

SEQ ID NO: 49326 - protein, 357 aa, Nicotiana tabacum
MKKGSLAPNLKLSLPPPDEVNLSKFLTESGTFKDGDLLVNRDGVRIVSQSEVEAPSVIQPSDNQLCLADFEAVKVIGKGNGGIVRLVQHKWTGQFFALKAIQMNIEESMRKHIAQELRINQSSQVPYVVISYQSFFDNGAISIILEYMDGGSLADFLKKVKTIPERYLAAICKQVLKGLWYLHHEKHIIHRDLKPSNLLINHIGDVKITDFGVSAVLASTSGLANTFVGTYNYMSPERILGGAYGYRSDIWSLGLVLLECATGVFPYSPPQADEGWVNVYELMETIVDQPAPSAPPDQFSPQFCSFISACVQKDQKDRLSANELMRHPFITMYDDLDIDLGSYFTSAGPPLATLTEL

SEQ ID NO: 49327 - protein, 577 aa, Staphylococcus aureus subsp. aureus Mu50
MFQITFKILNWIRPYKARMILGFSMSFLNAIFIALPIFLAAKIFNNVLSHKPIYMKDILNVVIIMVLLVIGRFITAYFKSKSHESIAYEMSAKERLDIGDKLKNVRLGYFNSHHSNELTTIVTTDLTFLENFAMKMVDIVVNGYILITVLILSLLVVSWQVSLLACIGVLLSFFAIQLLERKSRQNAPAYHNVQNQLVEKVLEVIRGIQVIKSFAKENTSLKSFNQAVNESKRINTKIEMQYIPFNLLHLLSLKVVSIMIVLVACLLYMNHSIDLPTLIMISIFSFVIFDSVENINSAAHVLEMIDMTIDDIEKIKNAPELDENGKNLTIKNENIAFQNVNFSYDDKQVIKNVNFEIPTQTSTAIIGPSGSGKSTLCHLLLRFYDIDDGNIRIDGVDIKDMTLSTLMSKISAVFQKVYLFNDTIENNILFGNPGATKEEIIRAAKQACCHDFIMSLPEGYQTMLNEKGSNLSGGEKQRISIARAILKDAPIIILDEATASIDPENEQLIQTAINELSKGKTVITIAHKLETIKNADQIIVLNEGEIIQKGSHDELIRKPGMYQDFIRIKSKSAGWKL

SEQ ID NO: 49328 - protein, 422 aa, Zea mays
  misc_feature (72)..(72): Xaa can be any naturally occurring amino acid
  misc_feature (214)..(214): Xaa can be any naturally occurring amino acid
  unsure (1)..(422): unsure at all Xaa locations
MARRRPMDYEELNEKVKKAQYAVRGELYLRASELQKEGKKIIFTNVGNPHALGQKPLTFPRQTALHPVPVRXVVALCQAPFLLDDPNVGLMFPPDAIVRAKRYLAMAPGGLGAYSDARGIPGIRKEVADFIHKRDGYPSDPELIYLTDGASKGVMQILNTIIRNEMDGILVPVPQYPLYSATISLYGGSLVPYYLEEEANWSLDFVNIRQTVAXRAMVMINPGNPTGQCLSEANIKELLQFCYHENLVLLADEVYQQNIYQDERPFISARKVMFDMGPPISSELQVVSFHTVSKGYWGECGQRGGYFEMTNLPPKTVDEIYKVASIALSPNVPGQIFMGVMVNPPKPGDISYLKFAAERLNMLPLRSFSLPPVSTEKMDLCEIFKSIHESLRRRARMMTDGFNSCRNVVCNFTEGAMYSFPQ

SEQ ID NO: 49329 - protein, 436 aa, Thermoplasma volcanium GSS1
MYDAVVLGAGPGGYAAAIRLGQRKKKVAIIEKDKIGGECLNYGCIPSKAIIELANSINYLKEMPGVSINYNVDMKKWQEWKWSMINKLTGGVELLLKAYGVDIFRGTGYIQDKNHVKVNDKVLETDSLVIATGSKPVSINGINDVMYNREVLDLDHIPSSIVIIGGGYIGVEIGIALAKLGSKVTIVEMMPSILPGTDNELVRHVVRRMSQLGINVITGRKVLSTAKNGEVTVKLDDGQELRAEKVLMTVGRIPNTEGFGLENLKLAMDGRFIKTDSRKMTSVKGVYAIGDVSGQPMLAHKAYYEADIAADNICGIDSEVDYRAMPYVIYSDPEIAYTGVKGAKSTRFPVAANGRSLTMNENIGTFNIYYDEKGIVTGAGIAAPHASELISEISLAVESGLMAMDIGLTIHPHPTVSEGVKESAEEVYGKPLHFKL

SEQ ID NO: 49330 - protein, 304 aa, Oryza sativa
MVQCHEVGQPRGERRKVQEEEKHQGQYIDGLSPHRPRLHLISSFPNHSLLLEHTPLFLIIISSLIREELANMHIYKEQEAEPSTGLMMPEPAPVASPGSGGSGGSGSVGAEKIGSRGKIEIKRIENTTNRQVTFCKRRSGLLKKAYELSVLCDAEVALVVFSSRGRLYEYSNNSVKETIERYKKANSDTSNASTVAEINAQHYQQEAAKLKQQITNLQNSNRTLVGDNITTMNHRELKQLEGRLDKGLGKIRARKNELLCAEIEYMQRRETELQNDNMYLKSKVAESERGLQTVNMMGSASTSE

SEQ ID NO: 49331 - protein, 337 aa, Thermoplasma volcanium GSS1
MTEVLDQDQKSLYVKGFTSMVLGRLFDKKVITAQRQGLVGFYTPMMGQEATQAGAAMALSKQDLVYGYYRDVTLLIYLGYPIEKIFDQIMGNAEDTSKGRQMPSHYSAKAVNFMSVPSPVATNLPLAVGAAYAKKYRKEDGIVITSFGDGGTSTPDFHAAMNFASVYDLPVVFLCENNGWAISFPVERQTKAEIYKKAEAYGMKGVYVDGNDFIKTYNAVKEAVEYARSGNPILVEARSYRMGPHSTSDDPSKYRQNEVKEGDENDPLVIAEKAVISKGILSQSEVNRIKDESRKMIDEKFEERLKIPAPDPSTLFDDVYSETTWVIEEERGDILRR

SEQ ID NO: 49332 - protein, 378 aa, Arabidopsis thaliana
  misc_feature (328)..(328): Xaa can be any naturally occurring amino acid
  unsure (1)..(378): unsure at all Xaa locations
MANHLQVPLTKPDRVKEEQEVEEEARLLARRLANAAALPMVLKAALELGVIDTITTVGGGDLWLSPSEIALRLPTKPCNLEAPVLLDRMLRFLVSHSVLKCRTVIEENGQTGKVERVYAAEPVCKYLLNKSDDVSGSFASLFMLDLSDVFIKTWTHLKDVILAGRDAFSSAHGMKLFEYIQADERFGKVFNRAMLESSTMVTEKVLKFYEGFKDVKTLVDVGGGLGNTLGLITSKYPHLIGINFDLAPVLANAHSYPGVNHVAGDMFIKIPKGDAIFMKWILHDWTDEQCVAILKNCWKSLEENGKLIIVEMVTPVEAKSGDICSNIXFGMDMTMLTQCSGGKERSLYEFENLAYASGFSRCAIVCAVYPFSVIEIYK

SEQ ID NO: 49333 - protein, 80 aa, Brassica napus
MSCCGGNCGCGSGCKCGSGCGGCNMYPNLTFSDETTTTNTSVFGLAPAMKNQYEASGEGNAENDACKCGSDCKCDPCTCK

SEQ ID NO: 49334 - protein, 379 aa, Lactococcus lactis subsp. lactis Il1403
MNNSNKMAAILSNISSSKHLSPLTEVRPIATLPFDCKYHLIDFPLSSLSNAHVDNIFMTFNEGETQSVFDHLGSGGEWGLDGFNSRYFVYIQQDFDRLREQGKDYFAQQLNFLRKSKAPYTVLLGSKFICNVDLTAVLKIHKLAGKEITTVYKKVSPDLASEYDTILRFDESGKMSNCYVNQLENPQEKEALCLNLFIVNTDWLINFIKEMQDIGELTSIARLIRVYMKNYDVNTYEYTGYMSNITNIKSFYDANMVMLDPQNFTSLLYSSQPVYTKIKNEVPTYFSENSKVENSQLGSGCIINGKVKNSLISRGVKIQDDALIEESLVFTNSEVKSGAQVKFAIIDKGVVVENNVKIIGSSEKPVVIPKGTVVTADIL

SEQ ID NO: 49335 - protein, 483 aa, Lactococcus lactis subsp. lactis Il1403
MKERKMKVLFASSECAPFFKTGGLGDVAGALPKELAKKSEIDSVAVILPYFKNEMKEEYRSLLKDEFYDFVDVGWRHEYVGVKSLEKEGVKYYFLDNEHYFGRGQLYGYGDDGERFAFFDLALCQLLEKLDFIPDVLHVNDWQTAMVPFLLKEKYNWIKAYEKIKTVLTIHNIEFQGLMHGDALSELFGMGMERYFEGVVRHNGMLNMLKTGILYADRVNTVSPTYAKEIQTSEFGCGLESILQYVDGKVSGILNGIDYDIYNPENDILIPYHFSEEELSGKGQMKAELQKRTGLPLNPNVPLIGMVSRLTNQKGFDLVLSQLEKVLEENVQIVLLGTGFPEIEEGFRYFSQKYPDKLSANIAFDIQFAQEIYAGSDFFLMPSAFEPCGLSQMIAMRYGTLPIVHEIGGLKDTVIPFNPISKEGTGFGFVDFEGQILVETINRALEVYGKEPEVLNKMVLSAMSKDFSWGTKAQQYIELYQEL

SEQ ID NO: 49336 - protein, 459 aa, Pseudomonas syringae pv. phaseolicola 1448A
MQPALKELWIILRLAGPLIASQMAHMLMVFTDTVMMGKIGPEALAGGGLGAATYSFVSFFCVGVMAAVGTLVAIRHGAGDTEGATRLTQAGLWLAWGMALVAALLLWNLEPILLQFGQAEANVHMAAQFLITLPFALPGLLSFMALRGFTSALGRAGPVMTISLAGAAANFVLNYAMIHQWLGLPNLGLMGIGLVTAIVTNCMALALALHIKRHPAYAAYPISKGLSKLSRSHLKELWRLGLPIGGTYAVEVGLFTFAAFCMGAMGSTQMAAHQIALQTVSMAFMVPVGMSYAVTIRIGQHYGAGNLLMVRMAGRLGIGFGGCVMLMFGLLFWLAPNVVIGLFLDINDPAFAEIVVLAAKLLAIAALFEFFDGTQTIAMGAIRGLKDARTTFLIGLGCYWLIAAPAAWLLGFSTDAGASGVWWGLALGLFCSAVALTYAFEWKTARLLRREAAGLAVPA

SEQ ID NO: 49337 - protein, 600 aa, Lactococcus lactis subsp. lactis Il1403
MYYYNPWNLDYKQPFGAIKVGNSMSLRFATDQPSVLVTCVIRRDFGKRYEFSMTKDSGGDFRLTIPFDEEPGLYFYHFEIVESSDLGETRRFYGCSGIGGEGLLYTDENDVKPYQLTVFEKEDQAPSWYREAVFYQIFPDRFYNGNENGQINHPKPNSFIYGRKTDNPFYVKEENGDIARWDFFGGNLRGIIKKIPYLKELGINAIYLNPIFSGTSNHRYDTNDYLKIDSMLGRQEDFEELIQLLHQEKMHLILDGVFSHVGKNSLYFNINGDYGDDEGAAKNPDSPYFDWFKFENYPFEYKSWWGIKDLPEIDKDNDSFRNFIYGEKNSVLAKWNALGIDGWRLDVADELPDSFIKGIRENLDSYSDKILIGEIWEDASNKISYGKRRNYILGGSLQAAMNYPFRDLIINLLNGHRSSQDVAHQLMTLQENYPKDIFYNNLNNLGTHDTERILTMVGEKNLSVALAMLFVLPGIHCIYYGDEAGLSGGKDPENRKYFPWDNISPNVYNVYKSWTQKRLSENSLKYGEFSTFFTDRLLGILRYTDSEVFVELINPSEDELNIEVQEITFLQNLKFLPELKKLLTEKVISGKTNLELKMKI

SEQ ID NO: 49338 - protein, 350 aa, Gloeobacter violaceus PCC 7421
MRQPMPSDDLWSDEVLVEAEAETEVLAPEEFTVVRGSTDDLVRLYLQEIGRVALLKPAEEIELARRIATWLSLEEKRSKFQAVAAESWLESANLTPQQWSTIVREGERAKAHLVKANLRLVVSVAKKYQGRGLHLLDLIQEGTLGLIRAAEKFDYTRGFKFSTYATWWIRQGITRAIAMQARTIRLPVHIVEKVNRIKKATRQLSQQLGRSPSEDEIAQAVEMDADQLRFVRKAIQLPVSLETPVGREEDTALGDLIQAKGNEPEHGVVRDLMNQDLESLLQTLTPRERDVLRLRYGLIDGRSRTLDEVGQQFGLTRERIRQIEARALRKLRHPQRLQRVREYLEGIENT

SEQ ID NO: 49339 - protein, 672 aa, Rhodobacter capsulatus
MDLAALRAKTPDHWKLATAIRVLAIDAVQAANSGHPGMPMGMADVATVLFRNHLKFDAKAPNWADRDRFVLSAGHGSMLLYALLHLTGYEQATLDEVKNFRQWGARMAGHPEYGHLEGVETTTGPLGQGISTAVGMAIAEKSMAARFGKKLVDHKIWVIAGDGCLMEGISQEAIGLAGKQELDNLIVLWDNNNITIDGRVTVSDVTDQKARFAASGWDVLSCDGHDAEDIDRALTAAKKAKRPVLVDCKTLIGFGSPNKADSYAVHGAPLGDAEIKLTREAYGWEHGPFVIPAEIKAEWEAIGAKGAAERAEWEARLAALPAGKRAEFERQMARGVAPKLAGAIRAFKKAQSEAAPKVATRKASEMVLAAVNPVVLRNHRRLADLTGSNLTKTSDIEDFMPGNHKGRYMRYGIREHAMAAAMNGMWLHGGVRPYGGTFFCFTDYARGAMRLSSLMGVPTVYVMTHDSIGLGEDGPTHQPVEHLTICRATPNTWTFRPADVIETAEAWELALSSERTPSVLALSRQNLPTLRTKHEAKNLTAKGAYVIAEAEGKRQAILMATGSEVEIALKARALLQAEAIGTRVVSMPCMELFAAQDEAYRKRILPAGGVRVAVEAAIRQPWDRWLLGERGMERKAGFVGMEGFGASAPAERLYAEFGITPEAIAAKVKSLL

SEQ ID NO: 49340 - protein, 197 aa, Arabidopsis thaliana
  misc_feature (55)..(55): Xaa can be any naturally occurring amino acid
  misc_feature (94)..(94): Xaa can be any naturally occurring amino acid
  misc_feature (125)..(125): Xaa can be any naturally occurring amino acid
  misc_feature (189)..(189): Xaa can be any naturally occurring amino acid
  unsure (1)..(197): unsure at all Xaa locations
VRLKLRTFFVFIDANYRSIDRSRRVRPKSLSESSVKVGTAVVPWKGGRLALGRLXGDICEQLAELTSDGSEVSLGSSGAVGLARQRVRYSNSSXSSSFADLQKSQMGLDGKPSMLVLRQSSVMQXYEIMFGQWDVAAVQMPVSDSSHSDKVFRNRISVTVKGMQRMRVIPVFNEKDAIDAGRDGYKDHXGIFCDNRI

SEQ ID NO: 49341 - protein, 426 aa, Dechloromonas aromatica RCB
MREQTDMRFISHLTRNTFAIILAGGRGTRLKQLTDFRSKPAVPFAGKFRILDFTLSNCVNSGIRKIGVATQYKAHSLIRHIQRGWSFLDGRFDEFIQLLPAQQQIDETQWYQGTADAVYQNLHFLRRYQPDHILVVAGDHIYKMDYGRMLAHHVKHHADMTVACIDVPLDEAREFGVMGVDEQDRVIDFVEKPQNPPAIPGQPDRALASMGIYIFNTKFLFEQLERDAMTKGSNRDFGKDIIPYIVPRYRVFAHRFADSCVGSDNHRPYWRDVGTIDAYWEANMEMTKVTPELNVYDRDWPIWTYQEQIPPAKFVFDDEDRRGTAVDSLIAGGCIISGASVKRSLLFSSVNVHSWASVEDSVVLPDVDIGRHAVLKRCVIDKHCRIPEGMVIGVDPEEDRKRFHVSPKGITLVTAEMLGQGAAEGR

SEQ ID NO: 49342 - protein, 181 aa, Solanum tuberosum
MASSVISSAAVATRTNVTQAGSMIAPFTGLKSAATFPVSRKQNLDITSIASNGGRVRCMQVWPPINMKKYETLSYLPDLTDEQLLKEVEYLLKNGWVPCLEFETEHGFVYRENHKSPGYYDGRYWTMWKLPMFGCTDATQVLAEVQECKKSYPQAWIRIIGFDNVRQVQCISFIAYKPEGY

SEQ ID NO: 49343 - protein, 180 aa, Solanum tuberosum
MASSVMSSAAVATRGNGAQASMVAPFTGLKSAASFPVSRKQNLDITSIASNGGRVRCMQVWPPINMKKYETLSYLPDLSDEQLLKEVEYLLKNGWVPCLEFETEHGFVYRENNKSPGYYDGRYWTMWKLPMFGCTDATQVLAEVEEAKKAYPQAWIRIIGFDNVRQVQCISFIAYKPEGY

SEQ ID NO: 49344 - protein, 202 aa, Hypocrea jecorina
MNPEYDYLFKLLLIGDSGVGKSCLLLRFADDTYTESYISTIGVDFKIRTIELDGKTVKLQIWDTAGQERFRTITSSYYRGAHGICVVYDVTDMDSFNNVKQWLQEIDRYATEGVNKLLVGNKSDMSDKKVVEYTVAKEFADSLGIPFLETSAKNASNVEQAFLTMARQIKERMGTTTANNTKPSVHVGQGQGVGNSSSSSCC

SEQ ID NO: 49345 - protein, 180 aa, Solanum tuberosum
MASSIVSSAAVATRANGAQASMVGPFTGLKSTASFPVSRKQNLDITSIASNGGRVRCMQVWPPINMKKYETLSYLPDLSDEQLLKEVEYLLKNGWVPCLEFETEHGFVYRENNKSPGYYDGRYWTMWKLPMFGCTDATQVLAEVEEAKKAYPQAWIRIIGFDNVRQVQCISFIAYKPEGY

SEQ ID NO: 49346 - protein, 180 aa, Solanum tuberosum
MASSVMSSAAVATRGNGAQASMVAPFTGLKSTASFPVSRKQNLDITSIASNGGRVRCMQVWPPINMKKYETLSYLPDLSDEQLLKEVEYLLKNGWVPCLEFETEHGFVYRENNKSPGYYDGRYWTMWKLPMFGCTDATQVLAEVEEAKKAYPQAWIRIIGFDNVRQVQCISFIAYKPEGY

SEQ ID NO: 49347 - protein, 541 aa, GIBBERELLA ZEAE PH-1
MAPIAVFLSYYRPWAAIAIVVAVYYQIIVDQNYSVKNAPFYLGKYLLGFLSIWAVYTVFLYPALLSPLRHLPQPKPGSFINGHWAESVREPAGLPFRHWMRTIENNGLIRYKHLFNQERILVTSPEGLKEVLGQNSYDYVKPHLLRAMVGKILGYGLLLSEGNVHKMQRKNLMPAFSFRHIKELYPVFWSKAQELVHGIEKEMSEAPGSQIDIADWASRASLDIIGSAGMGHEFKSLSDPSIEDTMKMYGSMVKQSGGAKLLTVLQLVLPSMITDYLPFQRNMGVLAASKAARDTSQRLINAKKVQMAAKEKLSPDIISTALESGHFTDEGLVDTMMTFLAAGHETSAAALTWTIFLLAKNHGIQDRLREEIRQNVDGLADDVDSKKLDGLSYLHAVCQESLRLYAPIPFTVRDSLRDTTILGTFVPKGTMIILCPWAINRAHESWGADADDFYPERWMVPGQANSGGAKNNYANLTFLHGPRSCIGQKFSLAELMALTCALVGRYRFDIDKDYEVKDLTDGIVAKPREGLKVSVEEIQGW

SEQ ID NO: 49348 - protein, 304 aa, Rhodococcus fascians
MKVVVNERRCFGSGQCVLVAPEVFEQSNDGTVTLLVDKPSPDNHSLVRAAARSCPATAIRFEENAMRQEPTEFSYDDLPALISRMRGDERHSFSSSSTMDVLWVLYDEIPNVSPESPDDDDRDRFLLSKGHGPMAYYAVLAAKGFLRPELLDTWATKNSPLGFAPDRTKISGVEMSGGSLGHGLPLAVGVAMGLRIQNRHAPRVFVLIGDGEFDEGSNHEAMAFAGRARLNQLTVIVLDNGTASMGWPHGIDKRFDGEGWDTININGADHEEIAAALNRDHNDRPLAVVATVTRQSARSSIQQR

SEQ ID NO: 49349 - protein, 420 aa, GIBBERELLA ZEAE PH-1
MPSATTISDVIGIARQTIASETKRLQSHLEKVSLDIHSHPELCYEEVFAHDTIFDFLEANGFTVTRHAYDISTCFEAEIGSGEEEQTVIYCAEYDALPGIGHACGHNLIALSSITAFVAIAKAMAETGLAGKGKVRLLGTPAEEGGSGKVRLLDAGAFKGASAALMSHPTSMGRIKEVEGYAGAAGLVTIAASMISADFYGKSAHAGATPWQGHNALDAAVGSYVNISMLRQQIKPAERIHGVITDGGKAPNIIPDKTSIVYGVRSTTAAGCKDLLRKVKCCFDAAATATDCTVKTKSPLFYADQILNPVLCEAFTEEMRYLGDEFLPIAKETVSSSTDMGNVSHVLPSFHCSYGIHSGAASNHTPGFTAAAATPDALDRAIRVGRGLAMLGVYILHNPEFSTRMTTAFKAAKAQADANI

SEQ ID NO: 49350 - protein, 171 aa, Oryza sativa
  misc_feature (64)..(64): Xaa can be any naturally occurring amino acid
  misc_feature (153)..(153): Xaa can be any naturally occurring amino acid
  unsure (1)..(171): unsure at all Xaa locations
SVEETIERYKKANSDTSNTSTVAEINAQHYQQEAAKLKQHITYLQNSNRFIISLSCLDFFFSTXKVVHLVIGLEKIRARKNEYLCAEIEYMQRRETELQNDNMYSKSEVAESERGLQTVNMMGSASTSEYVQNMIHYDPRNFLQFNIMQQLAXPQYYPEQEDRKASQFIVQ

SEQ ID NO: 49351 - protein, 690 aa, Caulobacter crescentus CB15
MRRTTAHRAFRRTMNLIAGGKPLASALKAIVQAVEAEDPTILCGILLLDADRRRLLMGAAPSLPTFYNQAIEGVEIGPSVGSCGTAAYLGRRVMVDDIQSSPLWVGYQELAAQAGLAACWSEPIKTSDGAVAGTFAIYHREVSKPNKEDIAFIEAAAQLAAFAIDRRRAEEELAASEARARLLAEQALETSRNLSNFFDVSADLLSISNMQGRFVKVNRAWETALGYPIEALEGVPFLPLLHPEDQQSTRVQINRIEVDDEVNGFVNRYRRADGSYCQLEWRARRCDDLVFGVARDVTERLRIQAEMAEARDAAEAANRAKNDFLANMSHEIRTPLNGVIALAAALDETPLTSKQAEMVAMIRRSGETLERLVSDILDVSKIEAGQMTLQPQAFDLGALVDGLLDVTRLRAKEKGVAVRLERSPTAAGGFLGDSVRIGQVLSNLFSNAVKFTDQGEVIVRVDVEEAGNGQAARLFVEVEDTGVGFDAEKAEMIFQRFNQADSTITRRFGGSGLGLSISKTLVEMMGGEITAQSSPGAGSLFRVTLPLSRTQMGPDAEIDAPRSAAPGEGLKVLLAEDHPINQRVVQLILEPCGAAVTVVENGAQAVEAMASGAFDVVLMDMQMPVMDGLAATRAIRAREGEGQRTPIIMLSANAMDVHRREALQAGADLHVPKPITIAALLDSIGQVMAR

SEQ ID NO: 49352 - protein, 219 aa, Antirrhinum majus
MGRSPFCDKTGLKRGPWTPEEDQKLLACIQEHGHGNWRALPAKAGLERCGKSCRLRWNNYLRPDIKRGKFSSQEEQTIIQLHALLGNRWSAIATHLSRRTDNEIKNYWNTHIKKKLAKMGIDPVTHKPQRDHALSSNNAHVQSKNAANMSHLAQWESARLEAEARLARQSKLQANSECGGGSDTGGGGSDCCGDNKNYWDNILDLVNFSPSDSPIFRVF

SEQ ID NO: 49353 - protein, 493 aa, Oryza sativa
MQSASDLDLKSQLQELIPEQQDRLKKLKSEHGKVQLGNITVDMVLGGMRGMTGMLWETSLLDPDEGIRFRGLSIPECQKVLPTAVKDGEPLPEGLLWLLLTGKKIKNIVTDTYRDYGVFVPTKLYSASTINTPSFLYNVPPDGSLGCITNLCFCKHTACYPLTYLALIRLTYDTDAGHVYEAIDALPVTAHPMTQFTTGVMALQVESEFQKAYDKGMSKSKFWEPTYEDCLNLIARLPAVASYVYRRIFKGGKTIAADNALDYAANFSHMLGFDDPKMLELMRLYITIHTDHEGGNVSAHTGHLVGSALSDPYLSFAAALNGLAGPLHGLANQEVLLWIKSVIGETGSDVTTDQLKEYVWKTLKSGKVVPGFGHGVLRKTDPRYTCQREFALKYLPEDPLFQLVSKLYEVVPPILTELGKVKNPWPNVDAHSGVLLNHFGLSEARYYTVLFGVSRSIGIGSQLIWDRALGLPLERPKSVTMEWLENHCKKVAA

SEQ ID NO: 49354 - protein, 377 aa, Clostridium acetobutylicum ATCC 824
MKAITFEGMNNVKVKNVNDPNIIKNDDAIIKITSTTICGSDLHLLRGTMPKVPHGFIIGHEAMGIVEETGKEVTNLKKGDRVIVPFPVSCGHCWYCTHGLSSQCDNSNEHGEVGAIYGYGDLMGGYDGGQAEYLRVPYANFGPKLVPENLTDEQVLFLTDILPTSYWGTIVNGGVKQGDTVVVLGCGPVGLLAQKWAAYAGASRIIAVDNIDYRLEHAKKYNSAEILNFNDYDNTGEYIKEITHGGADVVIDCVGMDGERSPIENVETLLKIQGGSKSAIEISTQAVRRGGTVSVVGVYGARYNNFPFGDFFSRNITIKTGQCPAHSYVDVILDLIKQNKFDATDIITHTMSLSDGEKAYNLFNNKLDNCIKVILKP

SEQ ID NO: 49355 - protein, 390 aa, Saccharomycopsis fibuligera
MLFSKSLLLSVLASLSFAAPVEKREKTLTLDFDVKRISSKAKNVTVASSPGFRRNLRAASDAGVTISLENEYSFYLTTIEIGTPGQKLQVDVDTGSSDLWVPGQGTSSLYGTYDHTKSTSYKKDRSGFSISYGDGSSARGDWAQETVSIGGASITGLEFGDATSQDVGQGLLGIGLKGNEASAQSSNSFTYDNLPLKLKDQGLIDKAAYSLYLNSEDATSGSILFGGSDSSKYSGSLATLDLVNIDDEGDSTSGAVAFFVELEGIEAGSSSITKTTYPALLDSGTTLIYAPSSIASSIGREYGTYSYSYGGYVTSCDATGPDFKFSFNGKTITVPFSNLLFQNSEGDSECLVGVLSSGSNYYILGDAFLRSAYVYYDIDNSQVGIAQAKY

SEQ ID NO: 49356 - protein, 265 aa, Brassica napus
GDTEIAFTENVDQRFEALGWHVIWVKNGNTGYDEIRAAIKEAKTVTDKPTLIKVTTTIGYGSPNKANSYSVHGAALGEKEVEATRNNLGWPYEPFQVPEEVKSHWSRHTPEGKALESDWNATFAAYEKKYPEEAAELKSIITGELPAGWEKALPTYTPESPGDATRNLSQQCLNAIAKVVPGFLGGSADLASSNMTLLKASGDFQKATPEERNLRFGVREHGMGAICNGIALHSPGLIPYCATFFVFTDYMRGAMRISALSEAGV

SEQ ID NO: 49357 - protein, 181 aa, Solanum tuberosum
MASSIVSSAAVATRSNVAQASMVAPFTGLKSAASFPVTKKNNNVDITSLASNGGRVRCMQVWPPINMKKYETLSYLPDLSDEQLLKEVEYLLKNGWVPCLEFETEHGFVYRENHKSPGYYDGRYWTMWKLPMFGCTDATQVLAEVQEAKKAYPQAWIRIIGFDNVRQVQCISFIAYKPEGY

SEQ ID NO: 49358 - protein, 330 aa, Saccharomyces cerevisiae
MSSPANLFPGLNDITDVLEEFPLATSRYLTLLHEIDAKCVHSMPNLNERIDKFLKKDFNKDHQTQVRLLNNINKIYEELMPSLEEKMHVSSIMLDNLDRLTSRLELAYEVAIKNTEIPRGLRLGVDNHPAMHLHHELMEKIESKSNSKSSQALKSESRREAMAANRRQGEHYSASTHQQDDSKNDANYGGSRHESQDHTGNNTNSRKRANAANTNNADPETKKRKRRVATTAVSPSTISTATAVNNGRIGTSTASRGVSSVGNSNNSRISRPKTNDYGEPLYCYCNQVAYGEMVGCDGADCELEWFHLPCIGLETLPKGKWYCDDCKKKL

SEQ ID NO: 49359 - protein, 168 aa, Glycine max
MASPGGSGTYSSGSSSLQNSGSEGDRDIMEQRKRKRMLSNRESARRSRMRKQQHLEGLSAQLDQLKKENTQMNTNIGISTQLYLNVEAENAILRAQMEELSKRLNSLNEMISLINSTTTTNNCLMFDEAQETTTQLFNDCGFMDAWNYGIPLNQQIMAYADNDMLMMY

SEQ ID NO: 49360 - protein, 477 aa, Arabidopsis thaliana
MIALNREVETQSLKKLSLKSVRRAREIFSPVHGQFPQPDPESKRIRLCHKIQVAFGGVEPASKPTRIADHNSEKTAPLKALALPGPKGSKELRKSATEKALVVGPTLPPRDLNNTGNPGKSTAILPAPGSFSERNLSTAALMERMPSRWPRPEWHAPWKNYRVLQGHLGWVRSVAFDPSNEWFCTGSADRTIKIWDVATGVLKLTLTGHIGQVRGLAVSNRHTYMFSAGDDKQVKCWDLEQNKVIRSYHGHLHGVYCLALHPTLDVVLTGGRDSVCRVWDIRTKMQIFVLPHDSDVFSVLARPTDPQVITGSHDSTIKFWDLRYGKSMATITNHKKTVRAMALHPKENDFVSASADNIKKFSLPKGEFCHNMLSLQRDIINAVAVNEDGVMVTGGDKGGLWFWDWKSGHNFQRAETIVQPGSLESEAGIYAACYDQTGSRLVTCEGDKTIKMWKEDEDATPETHPLNFKPPKEIRRF

SEQ ID NO: 49361 - protein, 478 aa, Methylococcus capsulatus str. Bath
MQCRDHSTHLVSLPNSQGPAVPFTMRRPVRPPSVPMSRYRTAPLATTELPPGIPFIIGNELAERFSYYGMRAILVVFMTRYLVDAAGNPAPMQEGEAKGYFHLFVSLTYFTPFLGALLADGVLGKYRTIIALSLVYCLGHFALALDDTRTGLLLGQSLIALGAGGIKPCVSAHVGDQFGQSNRHLLSQIYGWFYLAINLGAFVSMLLIPWLLERHGASVAFAVPGLLMLIATLVFWAGRHRFVHIPPGGMRFIREAWSSEGRRGVGRLIGVFLFITMFWALFDQTGSSWVLQSQRMDRVLFGHAILPSQIQAANPLLIVLLTPFFHHLLYPALARLIPMTALNKIALGLSFTVLAFALAAWIQMRIDTGLKPSIGWQLLAYLLLTSAEVMVSITSLEFAYTQAPLTMKSFVMALYLGAVALGNLFTALVNFWIERSKTPWLDGAGYFWFFTGLMLATALGFFAYSRNYREELHLQTER

SEQ ID NO: 49362 - protein, 335 aa, Glycine max
YCLNNQTIGVQDFEVLKVVGQGAFGKVYQVRRTGTSEIYAMKVMRKDKIMQRNHAEYVKSERDILTKLDNPFVVRIRYAFQTKYRLYLVLDFVNGGHLFFHLYHQGLFREDLARFYAAEIICAVSYLHANDIMHRDLKRDKVHPGAGGQAVLTDFGLAKKFNENERSNSMCGTVEYMAPEIVMGKGHDKAADWWSVGILLYEMLTGKPPFSGGNRHKIQQKIIKDKIKLPAFLSNEAHSLLKGLLQKDVSKRLGSGSRGSEEIKSHKWFKLVNWKKLECRETRPSFVPDVAGKYCVANFEERWTSMPLLNSPAASPKKDDNTFNKFSYSGTPVAS

SEQ ID NO: 49363 - protein, 101 aa, Brassica napus
PARPVLTSYYRSEHFKKRPYDAYNVYTSPNEAILCPDSSQSMYTQMLCGLLMRHEVLRLGAVFASGPLRAIRFLQTNWQELVKDIATGTLSARNLEPGNTE

SEQ ID NO: 49364 - protein, 540 aa, Streptococcus pneumoniae
MSKEIKFSSDARSAMVRGVDILADTVKVTLGPKDRNVVLEKSFGSPLITNDGVTIAKEIELEDHFENMGAKLVSEIASKTNDIAGDGTTTATVLTQAIVREGIKNVTAGANPIGIRRGIETAVAAAVEALKNNAIPVANKEAISQVAAVSSRSEKVGEYISEAMEKVGKDGVITIEESRGMETELEVVEGMQFDRGYLSQYMVTDSEKMVADLENPYILITDKKISNIQEILPLLESILQSNRPLLIIADDVDGEALPTLVLNKIRGTFNVVAVKAPGFGDRRKAMLEDIAILTGGTVITEDLGLELKDATIEALGQAARVTVDKDSTVIVEGAGNPEAISHRVAVIKSQIETTTSEFDREKLQERLAKLSGGVAVIKVGAATETELKEMKLRIEDALNATRAAVEEGIVAGGGTALANVIPAEATLELTGDEATGRNIVLRALEEPVRQIAHNAGFEGSIVIDRLKNAELGIGFNAATGEWVNMIDQGIIDPVKVSRSALQNAASVASLILTTEAVVANKPEPVAPAPAMDPSMMGGMM

SEQ ID NO: 49365 - protein, 412 aa, Exiguobacterium sp. 255-15
MKRTTSTVQWIIFLLANTIALPIVVASLFDLSSVETAALVQRSFFVGGIACFLHGLFGHRLPIVSGPAGSWVSIFVVIAALPVDSKTAFTIAMAAVVIAGVVLIFLGLTGWTRFLLPVFTPLVSGTFLLLLCIQLTGVMLGAVLAVEATRLAGILTFLLVLGLSQFGPTRLRPFALMIGIVVGWLVSRPSLPEASGVFAVPTALPFGMPQFDGSAFLVAIPFAILLIVNLIAALSAVEATIQKKGALNQGLTVEGIIHLIAATFSTLVPVPLPITSGFIAQTGSKERRPFLIASLVIALVGFFPSIIGIIATLPRSVASAALLATLPHMFLIAWQSAESSMTTSRRKHAFAICAVIGISILLQSTVLAEILPLTLRPFFSNGLLIGTMLVLGFEVIERFRSRREAQSERLAS

SEQ ID NO: 49366 - protein, 604 aa, Anaplasma phagocytophilum
MIEVSRSAYEVVDHEYDVVVVGAGGAGLRAVVGMTAAGLSVACVTKVFPTRSHTVAAQGGISAALGNIAEDDWRWHMFDTVKGSDWLGDQDAIEYMCKNAMQSVVELEHCGCLFSRTKEGKIYQRPYGGMTTEYGKGKPAVRTCAASDKTGHAILHALYQQSLRFDAKFFVEYFAIDLIMSEDNRSCCGVLAWSLCDGVLHRFRAHAVVLATGGYGRVYFSATSAHTCTGDGGGMAARAGIPLEDMEFVQFHPTGIYGSGCLMTEGCRGEGGYLLNSAGERFMERYAPKAKDLASRDVVSRSMTMEIREGRGVGEKKDHIYLSIAHLDPKVIHERLPGISETAKTFAGVDVTKEPIPVIPTVHYNMGGIPTNYHGEVLSLNSSSGSYEVVEGLFAIGEAACVSVHGANRLGSNSLLDLVVFGRAAAIRAKEVIKPGGLHRPIRKDFEDSIIDRFDRMRYANGATRVAEIRSRMQNVMQEHAAVFRVAEVLEKGKKEIRGVAAMMKDISVTDRSMVWNSDLVEALELSNMMPQAVVTVDCAANRKESRGAHAREDFPERDDENWMKHTMAWCNCDTYEVKIGYKEVATYTLTNEVEYFPPQKRVY

SEQ ID NO: 49367 - protein, 232 aa, Pseudomonas fluorescens Pf-5
MSLFKRSVTELLGTFWLVLGGCGSAVLAAAFPNVGIGLLGVALAFGLTVLTMAFAIGHISGCHLNPAVSVGLVVGGRFPARELPAYIVAQVIGGVIAAALLYFIASGKPGFELASGLASNGYGAHSPGGYSMAAGFVCELVMTLMFVVIILGATDKRAPAGLAPIAIGLALTLIHLISIPVTNTSVNPARSTGPALIVGGWALQQLWMFWLAPILGAVIGGVVYRWLGKEDG

SEQ ID NO: 49368 - protein, 457 aa, Arabidopsis thaliana
MQIFVKTLTGKTITLEVESSDTIDNVKAKIQDKEGIPPDQQRLIFAGKQLEDGRTLADYNIQKESTLHLVLRLRGGMQIFVKTLTGKTITLEVESSDTIDNVKAKIQDKEGIPPDQQRLIFAGKQLEDGRTLADYNIQKESTLHLVLRLRGGMQIFVKTLTGKTITLEVESSDTIDNVKAKIQDKEGIPPDQQRLIFAGKQLEDGRTLADYNIQKESTLHLVLRLRGGMQIFVKTLTGKTITLEVESSDTIDNVKAKIQDKEGIPPDQQRLIFAGKQLEDGRTLADYNIQKESTLHLVLRLRGGMQIFVKTLTGKTITLEVESSDTIDNVKAKIQDKEGIPPDQQRLIFAGKQLEDGRTLADYNIQKESTLHLVLRLRGGMQIFVKTLTGKTITLEVESSDTIDNVKAKIQDKEGIPPDQQRLIFAGKQLEDGRTLADYNIQKESTLHLVLRLRGGF

SEQ ID NO: 49369 - protein, 188 aa, Legionella pneumophila subsp. pneumophila str. Philadelphia 1
MEVTTMDIKKLAPWNWFKEEEAQNKSVPLSTTGQSCISPLSQLHQEIDRIFDNVLRSVGISNLDIEKTPSNSAQNLLLKPCIDIAATDKEYTITVEVPGVEEDHIKLELSDNTLIIKGEKKHESEKKDKDIYRIERAYGSFQRVLSLPEDANQEDIKAQIKNGVLTITMPRKEVSKPKGKLIDIKKAS

SEQ ID NO: 49370 - protein, 542 aa, Solibacter usitatus Ellin6076
MSFFDKMRTQKFLSFTLILFTLSTGIVIGTLVNQGVKAAKNEGTVAPGATPLVIPNPVELSNTFSQIAKQVEPSVVNISTTYLPKATSSRVPRNGRRQAIPQPDEDQGDNGGMDDFIYRFFGNPFGGQGMGPDMPNRKSQALGSGVVVDRAGYILTNNHVVDKADRIQVKFNGDPVEYDAKVVGVDSATDLAVIRVEGKKDLTVAKIGNSDAVQVGDWAIAIGSPFGYQATMTAGIISAKERDVDPTMQFQHFLQTDAAINPGNSGGPLLNIRGEVIGINTAIATHSGGNQGVGFALPVNTAAQVYNDIIKNGKVTRGSIGISFTPSETDRARANLKVAGAKEGVFVEQVTPGGPSEKAGMKDGDVIVAINGKPVHDGNQLIGTVTATPLGNALNITVDREGKRHELKVVVADLAQVFPERYGNGRENPLKNEEPTAVSFGMQIQNLTDQQADRLGVKQKGGVQVVSVEPNSFAEDIGLAPGDIIVSINRQTVNTTEDIAKIRGGLHSGDAVQFKVMRKTGGRNSSEWGSSFVAGTLPSNAR

SEQ ID NO: 49371 - protein, 606 aa, Phaseolus vulgaris
MATVSMASCVASKGAWSTETKVKSSGQMSLNRHELKYDGLRSLNKVLVRSTHASKMGSSLAAKSSKSGREKVLEKIECGMNLIFVGAEVAPWSKTGGLGDVLGGLPSALAEHGHRVMTVSPRYDQYKDAWDTNVTVEVKVADRIETVRFFHCYKQGVDRVFVDHPCFLEKVWGKTGSKLYGPSAGVDYEDNQLRYSLLCQAALEAPRVLNLNSNKYFSGPYGEDVIFVANDWHTALLPCYLKSMYQTRGVYRNTKVAFCIHNISYQGRHPFEDFPLLNLPNEYRSAFDFTDGHLKPVRGRKINWMKAAILESDLVLTVSPYYAKELVSGEDRGVELDNIIRKTGVAGIVNGMDIREWSPKTDKFIDIHFDTTSVKEAKFLLKEALQAEVGLPVNRDIPLIGFIGRLEEQKGSDILVEAIPKFIDQNVQIIILGTGKKSMEKQIEQLEEIYPEKARGIAKFDGPLAHKIIAGSDFIMIPSRFEPCGLVQLHSMPYGTVPIVSSTGGLVDTVQEGFTGFHMGAFNVDCEAIDPADVEKIATTVRRALGTYGTVAMEKIIQNCMAQDFSWKGPAKQWEKVLFSLDVGRSEAGIEGDEIAPLAKENVATP

SEQ ID NO: 49372 - protein, 414 aa, Solanum tuberosum
MESRVLTGGATAIRGGLPLLRKPAAVMKFTTAAHAISRDFPAGAVTAKPVGPLIAGPNLIWGRQLRPAILLETSPKRESIKPCSAAASSSAGSSDSSGDAKVGFFNKATLTTGFFFFMWYFLNVIFNILNKKIYNYFPYPYFVSVIHLAVGVVYCLVSWGVGLPKRAPIDSTQLKLLTPVAFCHALGHVTSNVSFAAVRVSFTHTVKALEPFFNAAASQFILGQQIPLALWLSLAPVVLGVSMASLTELSFNWLGFTSAMISNISFTYRSIYSKKAMTDMDSTNVYAYISIIALIFCLPPAIFIEGPQLLQHGFNDAIAKVGLTKFVTDLFWVGMFYHLYNQVATNTLERVAPLTHAVGNVLKRVFVIGFSIVIFGNKISTQTGIGTCIAIAGVAIYSFIKAKMEEEKRQKKAA

SEQ ID NO: 49373 - protein, 108 aa, Brassica napus
MQDQLVCHGCRNTLMYPRGATNVRCALCHIVNMVPLHPHPPPPPPPHHAHAGMDLAHIVCGGCRTMLMYTRGASSVRCSCCQTVNLVPGPPPSNQVAHINCGNCRTTL

SEQ ID NO: 49374 - protein, 225 aa, Brassica napus
MALEYESLNENVKKCQYAVRGELYLRASELQKEGKKIIFTNVGNPHALGQKPLTFPRQVVALCQAPFLLDDPNVGMIFPADAIARAKHYLSLTSGGLGAYSDSRGLPGVRKEVAEFIQRRDGYPSDPELIFLTDGASKGVMQILNCVIRGERDGILVPVPQYPLYSATILLLGGSLVPYYLDESENWGLDVNNLRQSVAQARSQGISVRAMVIINPGNPTGQCLS

SEQ ID NO: 49375 - protein, 447 aa, Daucus carota
MGKEKIHISIVVIGHVDSGKSTTTGHLIYKLGGIDKRVIERFEKEAAEMNKRSFKYAWVLDKLKAERERGITIDIALWKFETTKYYCTVIDAPGHRDFIKNMITGTSQADCAVLIIDSTTGGFEAGISKDGQTREHALLAFTLGVKQMICCCNKMDATTPKYSKSRFEEIVKEVSSYLKKVGYNPDKIAFIPISGFEGDNMIDRSTNLDWYKGPTLLEALDQISEPKRPSDKPLRLPLQDVYKIGGIGTVPVGRVETGVIKPGMVVTFGPSGLTTEVKSVEMHHEALQEALPGDNVGFNVKNVAVKDLKRGYVASNSKDDPAKEAANFTAQVIIMNHPGQIGNGYAPVLDCHTSHIAVKFAEIQTKIDRRSGKELEKEPKFLKNGDAGFVKMIPTKPMVVETFMSYPPLGRFAVRDMRQTVAVGVIKSVEKKDPTGAKVTKAAIKKK

SEQ ID NO: 49376 - protein, 659 aa, Prosthecochloris aestuarii DSM 271
MTKLPCFHETDAYRSLNTINSPEDLKRFKPSELQQIADECRSYLIDVIAENGGHFASSLGVVELTVAMHYVFDSPKDKFIWDVGHQAYIHKILTGRRDLMHTNRRFNGLAGFPKIHESRHDAFGTGHASTSISAAAGMAAARDLEGGNEKIIAVIGDGSMTGGMAFEAMNHLGDLKSDVLVILNDNQMAISPSTGGLRDYLINISLNKTYNKLRQFVWNSLSLINNDVGDAAKTAIHKIEDGIKASLTPGAFFEALGFRYFGPIDGHNMDQLVKAMKEMQALPHPKLLHVITKKGKGFLPAEQNQSAWHAHSGGFDRTTGESLKPSQKKSPPKYQEIFGEALTEIATNDRKIVGITAAMPSGTSLDIFQKAHPRRFYDVGIAEQHAVSFAAGLAAHGYKPVCAIYSTFLQRAYDQLIHDVALQNQHVIFAIDRAGLVGEDGPTHHGSFDLSYLHPVPNMVIMAPKDGQELRDMLYTALEHHHGPSAIRYPRGQAAAMELRKEFKAIAIGKGEIIREGNDIAILAIGSMVGHALQAAEILEAKGIDPLVANMRFVKPLDTQLLDTIASSHEKIVVIEENSVIGGLGSGIGDALQKKGMKNKVFKIGLPDQFVTHGSMNELYSMLGLDRNGLAETVIKIYNGSSNAVNDSAQTMIRTERLA

SEQ ID NO: 49377 - protein, 173 aa, Lycopersicon esculentum
AGINISGINGEVMPGQWEFQVGPSVGISAGDEVWVARYILERIAEIAGVVVSFDPKPIPGDWNGAGAHTNYSTKSMREDGGYEIILKAIEKLGLKHKEHIAAYGEGNERRLSGKHETANINTFKWGVANRGASVRVGRDTEKAGKGYFEDRRPASNMDPYVVTSMIAETTIIG

SEQ ID NO: 49378 - protein, 226 aa, Bacillus clausii KSM-K16
MIFFDIDRTLLDYDYAEREGILAFFRTNSIFSFTPQQSIETWKQLSEKYFKKFLANEMSFQEQKRARMMDLFKKVEMNLTEQEADDQFEVYLSLYQKNWKVYPDVVEVLNKLKRRNFPLGVISNGDYQQQVKKLERIGVETYFDCVITSSEVGAAKPDKSIFLEACSQIKIAPKSSYYIGDRLETDALGSHLAGMTGIWLNRKNSQQSHPEIITIRSLKELLNILP

SEQ ID NO: 49379 - protein, 133 aa, Arabidopsis thaliana
MDQGGRSSGSGGGGAEQGKYRGVRRRPWGKYAAEIRDSRKHGERVWLGTFDTAEDAARAYDRAAYSMRGKAAILNFPHEYNMGTGSSSTAANSSSSSQQVFEFEYLDDSVLDELLEYGENYNKTHNINMGKRQ

SEQ ID NO: 49380 - protein, 443 aa, Silicibacter pomeroyi DSS-3
MSHLFYQGRGRKPVLDQARGVYMWDKDGKRYLDGSSGAMVCNIGHSNPNVLAAMQRQMEKSTFGYRLHFETEASEKLASKLAALAPGGLDKVFFVSGGSEAVESALKLARQYMNATGQGSRWKVISRQPSYHGSTLGALAVTGYTPLSAPFEPMLRQMPKIPAPRAYLDGRDPRDPASGHHYANMLASAIEAEGPETVAAFIVEPVGGASTGALVPPAGYMERIREICDRYGILMIADEVMTGAGRTGRFLGSDHWNARPDIIVMSKGLGAGYVPLGAMIADARLVEPVLDAGGFAHGYTYAGNPLACAAGLAVVEEIEGQALCANADRMGERLLARLRGLMQKHEVIGDVRGMGLLTAFELMSDRDSKAPLPKGLNAYQRLVDIAYDKGLIVYSRRTRDGIEGDHILVCPPLIVTDDHLDEIIEGLDAALSQFADEIAGTAG

SEQ ID NO: 49381 - protein, 152 aa, Neisseria gonorrhoeae
  misc_feature (94)..(94): Xaa can be any naturally occurring amino acid
  misc_feature (139)..(139): Xaa can be any naturally occurring amino acid
  unsure (1)..(152): unsure at all Xaa locations
GSHMAATYKKPSDAELKRTLTEEQYQVTQNSATEYAFSHEYDHLFKPGIYVDVVSGEPLFSSADKYDSGCGWPSFTRPIDAKSVTEHDDFSFNXRRTEVRSRAADSHLGHVFPDGPRDKGGLRYCINGASLKFIPLEQXDAAGYGALKGEVK

SEQ ID NO: 49382 - protein, 755 aa, Pseudomonas anguilliseptica
MLLATDLDGTFLGGDPKDRLSLYQTIAAHPEIRLAYVTGRSLESVLPLLADPTLPQPDFIISDVGASLVHGDSLQPIQPLQSAVDALWPGDSQVASAIERFALERQDVPQVRRCSYFCNPEQAANPELLTIAESLGCDLLYSAERYLDFLPKGVNKGSSLQALIDWLELDNDQVLTAGDTLNDLSMLSGQFKGVCVGASEPGLLQATRQYSLVFHAERAGCGGILEAFVHFGFLGKQGIAAEGKQVAEPGKADLMMVYHRLPYEEFRGADGKLQRRRPTSPNGIIPTLLSFFGDGRAGSWVAWAEHDENSGETFDSHTTVDAERYPKLTAARVALSKEEVDIFYKRFSKEAFWPTLHTFWERGQFREDDWQVFLKVNRAFAERTALEAAEGATVWLHDYNLWMVPGYLRELRPDLRIAFFHHTYFPSADVFNVLPWRRQIIGSLLQCDYIGFHIPRQVENFVDAARGVMPLQTVSRQNCAPRFITYGCAVGLERMTTAVDTGNRVVKLGAHPVGLDIERVRSALAAPKIREMMERLRSELAGVKLILSVERLDYTKGILEKLNAYERLLEENPELLGKVTLVTVCVPAAKEMTIYDELQGQIEQAVGRINGRFARIGWTPLQFFFRSLPFEEVSAWYAMADVMWITPLRDGLNLVAKEFVAAQGLLDGRGVLVLSEFAGAAAELKGALLTNPHDPVDMTQTCYVALNMPKAEAQARLRELFDIVNYNDIRRWGDEFLAAVSDPQEQLDRALGLVG

SEQ ID NO: 49383 - protein, 226 aa, Triticum aestivum
  misc_feature (176)..(176): Xaa can be any naturally occurring amino acid
  misc_feature (179)..(179): Xaa can be any naturally occurring amino acid
  misc_feature (192)..(192): Xaa can be any naturally occurring amino acid
  misc_feature (224)..(224): Xaa can be any naturally occurring amino acid
  unsure (1)..(226): unsure at all Xaa locations
MQIFVKTLTGKTITLEVESSDTIDNVKAKIQDKEGIPPDQQRLIFAGKQLEDGRTLADYNIQKESTLHLVLRLRGGMQIFVKTLTGKTITLEVESSDTIDNVKAKIQDKEGIPPDQQRLIFAGKQLEDGRTLADYNIQKESTLHLVLRLRGGMQIFVKTLTGKTITLGGESSDTIXYVXAKIPGQEGIPPDXQRLIFAGQQLGDGRTLADYNIQKESTPPLVLXPR

SEQ ID NO: 49384 - protein, 272 aa, Staphylococcus aureus subsp. aureus Mu50
MKRLENKVAVVTGASTGIGQASAIALAQEGAYVLAVDIAEAVSETVDKIKSNGDNAKAYNVDISDEQQVVDFVSDIKEQFGRIDVLFNNAGVDNAAGRIHEYPIDVYDKIMNVDMRGTILMTKMMLPLMMNQGGSIVNTSSFSGQAEDLYRSGYNAAKGAVINFTKSIAIEYGRDGIRSNAIAPGTIETPLVDKLTGTSEDDAGKTFRENQKWMTPLGRLGKPEEVAKLVVFLASDDSSFITGETIRIDGGVMAYTWPGEMLSDDSWKRTLE

SEQ ID NO: 49385 - protein, 585 aa, GIBBERELLA ZEAE PH-1
MRFGWAVLFTPAVLAATVSYDFTIEWVRADPDGEFERPTIGINGKWPIPRIEANVGDTVLVNARNNLGNQSTSLHFHGLFMNGSNHMDGPSQVTQCAIRPGESFLYNFTITQPGTYWYHSHTESQYPDGLRGPLIIHDPESPFKDQYDEEIIMTISDWYHDQMQTLIPEFMRKGNPTGAEPVPQAALMNETQDLQVDVQPGKTYLLRLANIGAFAGHFFWIEGHNLTIVEVDGAYTKPAPANMVYLSAGQRCSVLITTKENTLDNFPIVSSMDTDLFDVLPEDLNWNVTGWLVYDQQKDLPEPLIVHEFDPYDDMDLVPYDDMARLPEPSKHIELDVVMDNLRDGANYAFFNNITYRAPKVPTLYTALTSGKEATNPQIYGTYTHSFVLEKDEIVQIVVNNRDDGRHPFHLHGHHFQVLHRSEDDVGDFTGSEEFAETPMRRDTVVVRGNGNAVLRFKADNPGVWLFHCHIEWHVTSGLIATFVEDPLALQASLKLPQNHLDACKAGGVPTVGNAAGNKNLLDLTGENVPPPRLPEGFTLKGIVAFTFSTLMGIFGIYTVASYGMKKEKKTPERAPLLAEELPEQ

SEQ ID NO: 49386 - protein, 206 aa, Bartonella henselae str. Houston-1
MERTLVLIRHGQSEWNLKNLFTGWKDPGLTEKGRTEAIAAGKKLKETGLKFDIAYTSALQRAQKTAQNILEQMEQSDLELIKTPALNERNYGDLSGLNKDEVRQKWGEQQVQIWRRSYTIAPPNGESLRDTGARVWPYYLHHIQPHILRSQTVLIAAHGNSLRALIMALEGLNSEEIISQELATGIPIVYTFNSDSTISSKTIITP

SEQ ID NO: 49387 - protein, 52 aa, Desulfovibrio desulfuricans G20
MDFLRILVAILLPPLGVFLQVGLGGAFWLNILLTILGYIPGIVHAVWVIARR

SEQ ID NO: 49388 - protein, 728 aa, Magnetospirillum magnetotacticum MS-1
MAMFNGDVEDGGRGDASCGKDLKRYLMLMGVVALVVLFGAFIYRQSSGGLRLGAMLEQMGRGTGPAVNVPVQQGGPSAAANPAISVPAGARVAPPSAAGAIATMPPMVDFGPAPIGAGGPFSSVVTLLRNSVVAVTASSANGQAMPDPLGLANPDGLPHFANPATRSVENIGTGVIVRNDGFIVTNYHVVRGANSVFVTVQDDVGSTRYSAEIIKMDEALDLALLKVAPKTPLTAAVLGDSDGVQVADEVIAIGTPFGLDMTVSRGIISAKRKSMVIEGVTHSNLLQTDAAINQGNSGGPLVISNGTVVGINTAIYTPNGAFAGIGFAVPSNQARLFILDEVGWLPTSTAEGASMGLVAMQRPMGGGVGAAGPAIFAGTRAPHTDGRQNMDCTTCHDLIPAGNGRPAPMMPIAAPIPPPPIPMGAVSPHTDGRQNMNCANCHQMLGGAAPIAAPGLGGGAYRFAQPPGSLAINIQGPRSGQSTAAGTGRVTLLGAALTPMSQRLGAQTGVPVGRGVFISGVTPNTPAATAGLRPGDVLLKVDGRPVRLPEEVSAIMAEMHAGRSVRLGVLRDGDVRNMTLVAGPAGLAAAAVQAPAMADMAQPPIGGMAPTAPGMAAVPGGPAVMPKPPTEFNWLGMEIETFQAPRPITGVPGAVPVPGAKGAQVAEVLVGSRAAVAGLQANDLILEVNNRPVAGPARLDAAIKGATNAGQQILLKVNRNGQEFWIVL

SEQ ID NO: 49389 - protein, 618 aa, Rubrobacter xylanophilus DSM 9941
MRYPNRVRKRWIALRSGLGHAGEVLSGFAPFFAPRRRGLALALAVLLAETASSLAQPWPLALAIDYVIGDKEPPAALPGSLAGEDAMLAGVALLVVLVFTATRAASAFRRYLLQRLGQETVFDLREALYAKVHELGLDYHGRRRTGDTITRVTSDVREVRTLLVDSVVEVASSLMVLAGMLAVMLWLDAGLTLLALLTVPFLFAAVVRYRSALIERMRVVRAREGAIASVAQEAITGIRAVKIFGREEEERGRFREESEASLRASVDAALIEARFGTVLGLAGGAGTALVVYFGVRQVLAGEMSVGDLTVFVSYLGLFLSPLWALSRQANQIGKSLVSGERIAELLRAEPAVRDAPDARPAPRLAGRVAFEEVRFSYDERAGEVLRGMSFEVEPGSRVALVGASGAGKSTVASLIARLYDPQGGRVLVDGRDIRRFTLASLRAQISFVPQEPMLFRGTVAENIAYGRPGVRREEVERAARLAGADGFIRRLPRGYDTVIGERGESLSGGQRQRVSIARAMLRESPILILDEPQAGLDAGSAAAVRESWRALSEGRTTFVISHELRLARDVDRILVIEDGRVAESGTHEELLALGGSYARLYALQERGTSPGTTGRRKR

SEQ ID NO: 49390 - protein, 640 aa, Vitis vinifera
MISLNSSSFLSNSGFSGISRSVSQRKVLPPVVLALGSNGRAGELNVSAVMESTLKELRDGNTVLEVDSKSAVSGGVRDVQGEDAATEDQIVTPWTITVASGYSLLRNPHHNKGLAFTEKERDHHYLRGLLPPAVVSQDLQVKKLMANIRQYTVPLQKYMAMMDLQERNEKLFYKLLMDNVEELLPVVYTPTVGEACQKYGGILRRPQGLFISLNEKGKILEVLKNWPEKNIQVIVVTDGERILGLGDLGCQGMGIPVGKLSLYTALGGVRPSACLPVTIDVGTNNQKLLDDEFYIGLRQKRATGQEYAELIHEFMCAVKQNYGEKVLVQFEDFANHNAFDLLARYGTTHLVFNDDIQGTASVVLAGLISALNLVGGTLAEHTFLFLGAGEAGTGIAELIALEMSKQTQAPLEETRKKIWLVDSKGLIVSSRMDSLQHFKKPWAHEHEPIKNLVDAVKAIKPTVLIGSSGVGRTFTKEVVEAMASFNEKPIILALSNPTSQSECTAEEAYTWSEGRAIFASGSPFDPVEYNGKVFVPGQSNNAYIFPGFGLGLIISGAIRVHDDMLLAASEALAKQATQENFDKGMIYPPFSNIRKISAHIAANVAAKAYELGLATRLPQPENLVEYAENCMYSPAYRSFR

SEQ ID NO: 49391 - protein, 581 aa, Pseudomonas syringae pv. phaseolicola 1448A
MISSLIRAGERLAGQRDPRLNQGLRLAVLEGLLSAAPYLLLYWLLASLFEDTLQGWSVVWLALGMLACLAARITVGALGTPLIFTGAYAMMANARLRLVDHLQKLPLGWFATTNSGEISAQVTSDLAMVEHLWSHFLGVFALSLAELGFILLLLFWLEPVLACTVLVMLPLAALAIHVAIRKTLRHADHMLITSNRTQAALQEYIQGIAVIRSFGRFGSALQRLNRALDEQHSAMVSIELKPAVWVGLFGLVIEAGFILMVLLGCDLLLNGQMSIQHLIIFTVLAWPLYRKSIDLGFSVLLLRFGHRALSRTEQLLNQQPMPEPARPRSPEHFDIELRNVRFSYAEREAPVIKGLSCHLAAGTLTALVGPSGAGKSTLAHLVARLWDIDSGQLRIGGIEARDIDSNYLQKHISMVFQDVTLFSGTVLDNLLVGKPDASEQEVIHAACQAHAHTFIEALPDGYATRIGEGGGWLSGGERQRLSIARALLKNSPILLLDEATSSVDPSSEAAIQRGLDALVRDRTVLVIAHRLHNIQHADQILVMDRGRIVEQGRHDELLARQGLYARLWNRQSQARNWHLHT

SEQ ID NO: 49392 - protein, 440 aa, Arabidopsis thaliana
MSPAIKAPLLPNQEPSSSSSENHGSFAGAVFNISTSIVGAGIMAIPAAFKVLGVIPSLSIIVIIAWLSNVSAGFLMKSSLAGESTTYAGVMKESFGKSGAVAVTVVTMVVTFGSMIIFSIIIGDVISGNEKDGIIHLGLLQEWFGSHWWNTRFFGLLFIFVFLFLPLVLCRRVERLAFSSAISFLLALLFVVISSVLAIIALVQGKTKPPRLFPELNDGGLSFFSLFTASPVIVTAFTFHFNVHPVAFELKDPLNVLSATRISVILCATIYSATGLFCYLLFGDSTMTDVLMNFDQSTSSSVGSLLNDIVRLSYAIHLMLVFPLLNFSLRANLDELLFPMKLSLVEDNKRFFALTFPLLISCFLGAIAIPDIWYFFQFLGSTSTVSIAFIFPAAIVLRNVNGFSTLREKIVASVMLVLAVATSIIAISTNIYTFTATEET

SEQ ID NO: 49393 - protein, 280 aa, Bradyrhizobium sp. BTAi1
MHDGFGVREHRHLASIDRHREQIWSELLTSDYQIRRASCRERAAISGSVAVMRAIGVGGIEVECKRPETTTTPLSSWSVKQSTAGWSRAAVSGANDGILSTSGLIIGVASANGSRESILIAGISGLVAGAMSMASGDYVSVSTQSDAETADVGRERRELASDGAGETKKLAAIYVQRGLDPALASTVAGQLMAYDALGTLSRDELGLSDMTAARPIQAALSFVAGGIPPVLIALTAPVGWEAVAVSIVSLVFLVVLGAIGAKAGGAGMVSAAVRVVFWGA

SEQ ID NO: 49394 - protein, 236 aa, Escherichia coli K12
MGYRSIDTAAAYKNEEGVGKALKNASVNREELFITTKLWNDDHKRPREALLDSLKKLQLDYIDLYLMHWPVPAIDHYVEAWKGMIELQKEGLIKSIGVCNFQIHHLQRLIDETGVTPVINQIELHPLMQQRQLHAWNATHKIQTESWSPLAQGGKGVFDQKVIRDLADKYGKTPAQIVIRWHLDSGLVVIPKSVTPSRIAENFDVWDFRLDKDELGEIAKLDQGKRLGPDPDQFGG

SEQ ID NO: 49395 - protein, 133 aa, Glycine max
FVEVKNIFAGCITTKELGTVMRSLGQNPTEAELQDMINEVDADGNGTIDFPEFLNLMARKMKDTDSEEELKEAFRVFDKDQNGFISAAELRHVMTNLGEKLTDEEVDEMIREADVDGDGQINYEEFVKVMMAK

SEQ ID NO: 49396 - protein, 483 aa, Proteus mirabilis
  misc_feature (52)..(52): Xaa can be any naturally occurring amino acid
  unsure (1)..(483): unsure at all Xaa locations
EKKKLTTAAGAPVVDNNNVITAGPRGPMLLQDVWFLEKLAHFDREVIPERRXHAKGSGAFGTFTVTHDITKYTRAKIFSEVGKKTEMFARFSTVAGERGAADAERDIRGFALKFYTEEGNWDMVGNNTPVFYLRDPLKFPDLNHIVKRDPRTNMRNMAYKWDFFSHLPESLHQLTIDMSDRGLPLSYRFVHGFGSHTYSFINKDNERFWVKFHYRCQQGIKNLMDDEAEALVGKDRESSQRDLFEAIERGDYPRWKLQIQIMPEKEASTVPYNPFDLTKVWPHADYPLMDVGYFELNRNPDNYFSDVEQAAFSPANIVPGISFSPDKMLQGRLFSYGDAHRYRLGVNHHQIPVNAPKCPFHNYHRDGAMRVDGNSGNGITYEPNSGGVFQEQPDFKEPPLSIEGAADHWNHREDEDYFSQPRALYELLSDDEHQRMFARIAGELSQASKETQQRQIDLFTKVHPEYGAGVEKAIKVLEGKDAK

SEQ ID NO: 49397 - protein, 429 aa, Salmonella enterica subsp. enterica serovar Paratyphi A str.
MTRRAIGVSERPPLLQTIPLSLQHLFAMFGATVLVPVLFHINPATVLLFNGIGTLLYLFICKGKIPAYLGSSFAFISPVLLLLPLGYEVALGGFIMCGVLFCLVSFIVKKAGTGWLDVMFPPAAMGAIVAVIGLELAGVAAGMAGLLPAQGQSPDTKTIIISMVTLAVTVFGSVLFRGFLAIIPILIGVLAGYALSFALGVVDTTPIAQAHWFALPTFYTPRFEWFAILTILPAALVVIAEHVGHLVVTANIVKKDLVRDPGLHRSMFANGLSTIVSGFFGSTPNTTYGENIGVMAITRVYSTWVIGGAAIFAILLSCVGKLAAAIQIIPLPVMGGVSLLLYGVIGASGIRVLIESKVDYNKAQNLILTSVILIIGVSGAKVHIGAAELKGMALATIVGIGLSLIFKLISLLRPEEVVLEANDAESPHQ

SEQ ID NO: 49398 - protein, 145 aa, Alvinella pompejana epibiont 7G3
MLVKRYEPFNEIRRSFDLVNQIINSVDKNVESDNALVDFIPNINTREDSNAYYIEVELAGVKKEDVDIKIDENILSISGEKRFKDNLKAEDYYKIESKYGTFARSFTLPERVDVSKIEAKSEDGIIEIKIPKLTIEKESKKITIK

SEQ ID NO: 49399 - protein, 662 aa, Exiguobacterium sp. 255-15
MIVLTNMTTVELLAVNTIRTLSIDAVQKANSGHPGMPMGAAPMAFTLWADHMNHNPKNPEWFNRDRFVLSAGHGSMLLYSLLHLSGYDLAMDDLKSFRQWNSKTPGHPEYRHTAGVDATTGPLGQGIAMAVGMAMAERHLEAKYNRDDLNVVDHFTYGICGDGDLMEGVSAEAASLAGHLGLGKLVVLYDSNDISLDGDLDKSFSENVQQRFEAYNWQVIRVEDGTDLDSISKAIEAAKAETTKPTLIEVKTVIGFGSPNKSGKSASHGAPLGDAEIKLTKASYVWDHEEFYVPDEVKDLFEERIEKRGADTEAAWTEKMEQYKAAHPELHAELVQAINNELPSNWEADLPTYDLTSKKATRQTSGEVLNAIAKNVPTIFGGSADLAGSNNTMLKGEADFDIDPSGRNIWFGVREFAMAAAVNGMALHGGVIPYGATFFVFSDYLRPAVRLAALMGIQSIFVLTHDSIAVGEDGPTHEPVEHLMSFRAMPNLTVYRPADGKETIAAWKTAVQSTNKPTLLVMTRQGLPELEGTTVEGAEKGGYVIAGDIEKADTILMGTGSEVHLLVEAQKELGETAAVVSLPSWELFEAQSAEYKESVLPKRITKRLAIEAGASLGWYKYVGTEGQVIGIDRFGASAPGDLLLKEYGMSVENVLNTVKQLG

SEQ ID NO: 49400 - protein, 342 aa, Bacteroides thetaiotaomicron VPI-5482
MKHIIIAVILTISNVFLGIAKPMKSQAEIYFAGGCFWGTEHFLKQIRGVESTQVGYANSTVANPSYEQVCSGKTNAAETVKVVYDPEEVNLSLLLNLYFQTIDPTSLNRQGNDRGTQYRTGIYYINKADLSTINQAIQALATQYNKPIAVEVEPLTNFYPAEVYHQDYLDKNPGGYCHINLALFEMARKANAPKPPTFQKPDDATLRKKLSAEQYAVTQKNATEPAFHNEFWNEHRPGIYVDITTGEPLFVSTDKFDSGCGWPSFSKPIQKELIAEKKDTTHGMIRTEVRSKTGDAHLGHVFTDGPKDKGGLRYCINSASLRFIPKEKMKEEGYGEYLPLIK

SEQ ID NO: 49401 - protein, 197 aa, Brassica napus
MSASRFAKCVTVGDGAVGKTCLLISYTSNTFPTDYVPTVFDNFSANVVVNGATVNLGLWDTAGQEDYNRLRPLSYRGADVFILAFSLISKASYENVSKKWIPELKHYAPGVPIILVGSKLDLRDDKQFFVDHPGAVPITTAQGEELRKLIDAPTYIECSSKSQENVKAVFDAAIRVVLQPPKQKKKKSKTQKACSIQ

SEQ ID NO: 49402 - protein, 394 aa, Alvinella pompejana epibiont 7G3
MNLEELDKQFVLQTYARDYTNFVRGENATLFSEDGRDFIDFASGIGVSSVGHGNRRLSDAVCEQVRNIIHISNLQVIEPQVKLAQKICELSGYDGAIFFANSGAEANEGAIKVARKYGEVNFDKKRYKVITLEHSFHGRTISTLKATGQKSFHTPSFSPYPDGFLYVKSIEDIYGSIDDETVAVLIELVQGEGGVEPFSIGEVQNLAKFLRENGILLIVDEVQTGVFRTGEMLASNIYQIEPDIITLAKGLGGGVPIGAILTKHRDILKAGEHGSTFGGNYLSTRAGLEVLSILNGLYESGELKETISYFEERLKGIRERFSNLFSQDVGVGLMRGLRAEEADIPSKVVKSSMDSGLIVLKAGRNTVRFLPPLTISKSEIDKGFERFEKAISSI

SEQ ID NO: 49403 - protein, 129 aa, Exiguobacterium sp. 255-15
MKPIILFDGECNLCDTSVQFILKRDHGYYQFASLQGIKGQELIQKHRLPSDLNSVVVIEEGIPYVKSDAALQITKHLNGAWPLASIFRVLPRAARDLAYDFIAKHRHKWFGQKQQCLLPSKETRARFHE

SEQ ID NO: 49404 - protein, 303 aa, Lycopersicon parviflorum
TNSINDALSSSYLVPFESYRVPLVDLEEATNNFDDKFFIGEGGFGKVYKGVLRDGTKVALKSCKPESSQGIEEFETEIEILSFCRHPHLVSLIGFCDERNEMILIYKYMENGNLKRHLYGSDLPSMSWEQRLEICIGAARGLHYLHTRAIIHRDVKSINILLDENFVPKITDFGISKKGTELDQTHLSTVVKGTLGYLDPEYFIKGRLNEKSDVYSFGVVLFEVLCARSAIVQSLPREMVNLAEWAVESHNNGQLEQIVDPNLADKIRPESLRKFGETAVKCLALSSEDRPSMGDVLWKLEYA

SEQ ID NO: 49405 - protein, 314 aa, Glycine max
MKRLNSSDSSTALMTIFPSSSTEEHSPRNSHHMYGREFRSMLDGLDEEGCVEEPGHQSEKKRRLSVEQVKALEKNFEVENKLEPERKVKLAQELGLQPRQVAVWFQNRRARWKTKQLERDYGVLKANYDALKLNFGTLNQDNEALRKQIKELKSRLLQEENTAGSGVSVKEEEITTMPADSEEKTMEQSKSDPPSETSNINPSSESSEEDHLNYECFNNNSDDCVVGGSAAASLLQVDFMKDGSSDSDGSSAILNEDTMYLPSSMNCFQFQKPYHHAQYVKTEEHNFLSADEACNFFSDEQAPTLQWYCPEQWS

SEQ ID NO: 49406 - protein, 191 aa, Legionella pneumophila str. Lens
MLRILLYFLLLINTTFCLAKTEKAIFAGGCFWCMEADFDHLPGVLSTTSGFDGGTLKDPTYEQVSAGNTHYAESVMVEFDPNKLSYKKLVEYFFRHIDPTVKNAQFCDHGSQYRSAIFYLSDQQKKIAMEYKKELEQKFPTVYTEIAPSTSFYPAEEYHQNYYKKNPIRYKYYRYRCGRDTRIQEVWGNKK

SEQ ID NO: 49407 - protein, 492 aa, Zea mays
MDPYKHRPSSGSNSSFWTTNSGAPVWNNNSALTVGQRGPILLEDYHLIEKLAQFDRERIPERVVHARGASAKGFFEVTHDVSHLTCADFLRAPGVQTPVIVRFSTVVHERGSPETLRDPRGFAVKFYTREGNFDLVGNNMPVFFIRDGMKFPDMVHAFKPNPKTNLQENWRIVDFFSHHPESLHMFTFLFDDVGIPLNYRHMEGFGVNTYSLINRDGKPHLVKFHWKPTCGVKCLLDNEAVTVGGTCHSHATKDLYDSIAAGNYPEWKLYIQTIDLDHEDKFDFDPLDVTKTWPEDIIPLQPVGRMVLNKNVDNFFAENEQIAFCPAISVPAIHYSDDKLLQTRIFSYADTQRHRLGPNYLMLPVNAPKCAHHNNHHDGFMNFMHRDEEVNYFPSRFDPARHAEKVPIPPRVLTRCREKCIIQKENNFKQAGERYRSFDPARQDRFIQRWVDALTHPRVTHEHRTIWISYWSQCDAALGQKLPSRLNLKPSM

SEQ ID NO: 49408 - protein, 692 aa, Bacteroides thetaiotaomicron VPI-5482
MNKHLHFLSLLWLSMLMAFMTACSDDKNITDPAPEPEPPVEGQWTALTASPDTWDETKRADISYQLLLYSFADSDGDGYGDLNGVTQKLDYLNQLGVKALWLSPIHPCMSYHGYDVTDYTKVNPQLGTESDFDRLVTEAHNRGIKIYLDYVMNHTGTAHPWFTEASSSSESPYRNYYSFSEDPKTDIAAGKIAMITQEGAAGYNAAEWFQVSDETAAVKGLLKFTLDWSNAPSPILVVSTGTKADEDNPDTGTDNAKYLYYGEDICKKFYDKGNNIYELTVDFESTWGLLIRTSNASFWPSGTKYGASSSSEKLALNKDFKLTNAGNPANIMFDSQQITYFHSHFCTDWFADLNYGPVDQAGESPAYQAIADAAKGWIARGVDGLRLDAVKHIYHSETSEENPRFLKMFYEDMNAYYKQKGHTDDFYMIGEVLSEYDKVAPYYKGLPALFEFSFWYRLEWGINNSTGCYFAKDILSYQQKYANYRSDYIEATKLSNHDEDRTSSKLGKSADKCKLAAAVLLTSAGHPYIYYGEELGLYGTKDNGDEYVRSPMLWGDSYTTNYTDKTDATVSKNVKTVADQQADTHSLLNIYFSLTRLRNTYPALAEGNMTKHSVYNESQEKDYKPIAAWYMTKDNEKLLVIHNFGGTAMQLPLTDKIEKVLFVNGETQQNTDSDSYTLKLGGYASVVFKLGN

SEQ ID NO: 49409 - protein, 420 aa, Lupinus angustifolius
MASVNQSVSVSPTASSDSVFAHLLPAPEDPILGVTVAYNKDPSPVKLNLGVGAYRTEEGKPLVLNVVRRVEQQLVNEASRNKEYLPIVGVADFNKLSARLIFGADSPAIQENRVTTVQCLSGTGSLRVGGEFLARHYHQRTIYIPQPTWGNHPKIFTLAGLSVKTYRYYAPATRGLDFEGLLEDLGSAPSGSIVLLHACAHNPTGVDPTTEQWEQIRKLLRSKALLPFFDSAYQGFASGSLDIDAQAVRLFVADGGELLLAQSYAKNMGLYGERVGALSIVSKSADVASRVESQVKLVVRPMYSNPPIHGASIVAAILRDRDLYNEWTIELKAMADRIIKMRQQLFDALQSRGTPGDWSHIIKQIGMFTFTGLNAEQVSFLTKEYHIYLTSDGRISMAGLSSKTVPHLADAIHAAVTRVV

SEQ ID NO: 49410 - protein, 385 aa, GIBBERELLA ZEAE PH-1
MALSRIDGQDELFVGGLWALRRSDSLTDRRITHVLSLVPFDISSLKNFKDEPWIDYGKDFRHQLIDIDDVEDSDLLIELPKAVRFIEEGLGANYMEHADDDGGVSLEKDVDVVEKKRKKKGGVFVHCAVGKSRSVSAVIAYLLRRYPSRFDPNITPTAISDPSQSTGSETSAEKRSRKETAQEAVHAALTYVRRTRPMAEPNEGFMEQLALWWEMECPDDVESHPVYQRWAYKREIDENLAVGQAPTRLRFEDEETQPHDDSGLSLRCKKCRRTLVTAPFIMEHKPSEKKSSASTCQHYFVEPLSWMRGVLEKGELNGRLLCPNDKCGAGVGRYDWKGFRCSCGGWVTPAFSLQKARVDDVVKRPTGQSMGIRMPPGQAPRSGNL

SEQ ID NO: 49411 - protein, 378 aa, Brucella suis 1330
MNIAIIGTGFVADYYMTTLRNYPELSLRGVYDRSPERLKAFVAHYNVPAYESYEALLADPDVQIVVNLTTPESHFAVSHAALCAGKHVYSEKPLAMDFDDAKALLELARQSGLTLAAAPANGLSDAHKLVSSLIKTIGTPRLVYAEMEDGPVFRDKWSTWRSQSGAPWPGLHEFEIGCTLEHAGYALSWLVSLFGPVESVSAFSAITFPDKGPGTEHLHMAPDFSVGCLVFKSGLVARLTSGLAMPKDRSLTVVADKGSIVVDDLWDNRSAVRLERVEEKRRFFARLFANLERRLGKFLSWKPGVGRKIAYPKTGKYALPSFPSQIDFMRGVADQARSISSGEKAFFSGDVALHITEIALALNNAGQGAAVYRMKSSF

SEQ ID NO: 49412 - protein, 251 aa, Brassica oleracea var. italica
MGRGRVEMKRIENKINRQVTFSKRRAGLLKKAHEISILCDAEVSLIVFSHKGKLFEYSSESCMEKVLEHYERYSYAEKQLKVPDSHVNAQTNWSVEYSRLKAKIELLERNQRHYLGEDLESISIKELQNLEQQLDTSLKHIRSRKNQLMHESLNHLQRKEKEILEENSMLAKQIRERESILRTHQNQSEQQNRSHHVAPQPQPQLNPYMASSPFLNMGGMYQGEYPTAVRRNRLDLTLEPIYNCNLGYFAA

SEQ ID NO: 49413 - protein, 317 aa, Brassica juncea
MATLKVSSSVPSPSEDAEQLKSAFDGWGTNEELIISILAHRSAEQRKLIRQTYHESFGEDLLKSLEKELTSDFERAILLWTLEPGERDALLVNEATKRWTSSNQVLMEVACTRTSTQLLHARQAYHARFKKSIEEDVAHHTTGDFRKLLVSLVSSYRYEGEEVNMTLAKQEAKLIHEKIKDKHYNDEDFIRILSTRSKAQINATFNRYQDNHGEEILKSLEEGDEDDKFLGLLRSTIQCLTRPELYFVDVLRSAINKTGTDEGALTRIVATRAEIDLKVIGQEYQRRNSIPLEKAITKDTRGDYEKMLIALLGEDDA

SEQ ID NO: 49414 - protein, 843 aa, Frankia sp. EAN1pec
MRAVVMAGGEGTRLRPLTANLPKPLLPVVNRPIMEHVLRLLKRHGFDETVVTVQFLAAMIRNYFGSGDELGMHLSYATETTPLGTAGSVKNAEDALRHEEFLVISGDALTDIDLTDLVAYHRAQGALVTVALKSVPDPLEFGIVITGEDGRISRFLEKPTWGQVFSDTVNTGIYVMEPEVLDHVPAGEAVDWSGDVFPRLVAAGAPVFGYVAGGYWEDVGTIASFQRAQADVLNRQVDVSIGGFEVSPGVWIGEDADVHPDAILKGPLVVGDYSKVEAGAELREFTVLGSNVVVKRGAFLHRVVVQDNALIGPRTNLRGCVIGKSTDVLRAARIEEGAVIGDECVIQEEAFVSHDVKVYPFKTIEAGAVVNTSVIWESRGQRSLFGPRGVSGLVNAEITPELVVRLASAYATTLKKGSTVTTARDGSRAARALKRAVISALTAGAINVRDLEVAPLPVARFDVRTSDAAGGIMLRSKPGDAERIDIVFLDADGDDLSPAAQRKLDRVFTRQEFRRAFPGEIGDLRFPARTADVYTQDLLDRVDTSGLAEADLKVVVDPSGGAASLLLPTLLGRLGVDVLTVNGRLDETYPEPGAEQERRALDRLGALVASSRAAFGVRFDHIGERITIVDERGDLISDERALLVMLDLVAAENRGAQAAVPVTTTRVADQVGRFHGLTVRRMSMSGSELSRVVQAEPIVFAADGRGGFVVPEFAPVIDGLAAFVRLVALVARTRLTLSAIDARIPPVAMVRASVPTPWAEKGTVMRRVVESVDVDSGDQVDTTDGVRVVGPDGSWVLVLPDPSEAVTHLWAEAADLGGAQKLVRRWSAVVETVPPEQAPVTRS

SEQ ID NO: 49415 - protein, 617 aa, Bacteroides thetaiotaomicron VPI-5482
MKRNLLFIILLLLLPGLHQVFATSTIKKVAPTFWWAGMKNPELQILLYGDRISSADVSLSADNITLQEVVKQENPNYLVLYLDLSKAAPQNFDIILKQGKKQTKIPYELKQRRPNASAVEGFDSSDVLYLIMPDRFANGNPSNDIIPGMLEGNVDRNEPFARHGGDLKGIENHLDYIADLGVTSIWLNPIQENDMKEGSYHGYAITDYYQVDRRFGSNEEFRKLTQEANAKGLKVVMDMIFNHCGSDNYLFKDMPSKDWFNFEGNYVQTSFKTATQMDPYASDYEKKIAIDGWFTLTMPDFNQRNRHVATYLIQSSIWWIEYAGINGIRQDTHPYADFDMMARWCKAVNEEYPKFNIVGETWLGNNVLISYWQKDSRLAYPKNSNLPTVMDFPLMEEMNKAFDEETTEWNGGLFRLYEYLSQDIVYSHPMSLLTFLDNHDTSRFYRSEADTKNLDRYKQALTFLLTTRGIPQIYYGTEILMAADKANGDGLLRCDFPGGWPNDTKNCFDAANRTPQQNEAFSFMQKLLQWRKGNEVIAKGQLKHFAPNKGVYVYERKYGDKSVVVFLNGNDREQTIDLVPYQEILPASSAFDLLTEKKVELRNELTLPSREIYLLSF

SEQ ID NO: 49416 - protein, 404 aa, Brassica rapa
MGICMSVQVKAESPSNTGASPKYMSSEANDTQSMGSKCSSVSVRTSPRTEGEILQSPNLKCFSFAELKAATRNFRLDSVLGEGGFGCVFKGWIDEESLTASKPGTGMVIAVKRLNIEGWQGHQEWLAEVNYLGRLSHPNLVKLIGYCLEDEHHLLVYEFMPCGSLENHLFRRGSYFEPLSWNIRLKIALGCAKGLAFLHSAETQVIYRDFKTSNILLDSNYNAKLSDFGLAKDGPTGDNSHVSTRVIGTYGYVDPGYLLNGHLTTKSDVYSYGVVLLEMLSGRKVVDNNRPPREQKLVDWAKPLLANKKKVSRVIDNRIRDQISVKEAHKVATQVFRCLDVDKNQRPNMNEIVFHLENIQASREEGGNKTEKRMRRRRDSFAQQTGVGGIATAYPRPSASPLFV

SEQ ID NO: 49417 - protein, 324 aa, Arabidopsis thaliana
MSSGTVRRVSRQDIQLVQNLIERCLQLYMNQKEVVDTLLEQAKIEPGFTELVWQKLEEENREFFKAYYLRLMVKHQIMEFNKLLEQQVHHMRQMHPTGVASVQNTNGSHLQSMNQKQLCYPSEHTDQSLKSESAHHPMASSLSNAFLNGSSTLNTNVPSSINISTHARRVDASPNMLSSQTTNMPMMQGMNGGMIKSETAFTNPASFMYGGERNALEGHSAVGDTSIPNFSNESNNQPLSDPLLEAEASTFGFLGQIPRNFSLSDLTADFSQSSEILESYDRSPFLVPNAENFLDSRDRGEYQGDNKRLDTISEGFSYDNIGSE

SEQ ID NO: 49418 - protein, 448 aa, Zea mays
HAHQPTAQHSSRQNRVYGAAVARQERERERDAGFDLPPVRPCVPGGRSGRRRYSTGAMAPSCYDAAASMLLCAEEHSSILWYDEEEEELEAVGRRRGRSPGYGDDFGADLFPPQSEECVAGLVERERDHMPGPCYGDRLRGGGGCLCVRREAVDWIWKAYTHHRFRPLTAYLAVNYLDRFLSLSEVPDCKDWMTQLLAVACVSLAAKMEETAVPQCLDLQEVGDARYVFEAKTVQRMELLVLTTLNWRMHAVTPFSYVDYFLNKLSNGGSTAPRSCWLLQSAELILRAARGTGCVGFRPSEIAAAVAAAVAGDVDDADGVENACCAHVDKERVLRCQEAIGSMASSAAIDGDATVPPKSARRRSSPVPVPVPVPQSPVGVLDAAACLSYRSEEAATATATSAASHGPPGSSSSSSTSPVTSKRRKLASRCDGSCSDRSKRAPAQWTKE

SEQ ID NO: 49419 - protein, 215 aa, Glycine max
  misc_feature (47)..(47): Xaa can be any naturally occurring amino acid
  unsure (1)..(215): unsure at all Xaa locations
HDAFIAAVDKGNIRTMPNRSMPAAPYPTPGALLMGDAFNMRHPLTGXGMTVALSDIVVLRNLLRPLRDLNDAPSLCKYLESFYTLCKPVASTINTLARALYKVFCASLDPARKEMRQACFDYLSLGGLFSEGQVSLLSGLNPRPLSLVLHFFAVAIYSVGRLLLPFPSPKRMWIGVRLISSASGIILPIIKAEGVRQMFFTATVPTYYRIPPADA

SEQ ID NO: 49420 - protein, 197 aa, Brassica napus
MSASRFVKCVTVGDGAVGKTCLLISYTSNTFPTDYVPTVFDNFSANVVVNGATVNLGLWDTAGQEDYNRLRPLSYRGADVFILAFSLISKASYENVSKKWIPELKHYAPGVPIILVGSKLDLRDDKQFFVDHPGAVAITTAQGEELRKLIDAPTYIECSSKSQENVKAVFDAAIRVVLQPPKQKKKKSKAQKACSIQ

SEQ ID NO: 49421 - protein, 305 aa, Arabidopsis thaliana
MSSSNGGVPPGFRFHPTDEELLHYYLKKKISYEKFEMEVIKEVDLNKIEPWDLQDRCKIGSTPQNEWYFFSHKDRKYPTGSRTNRATHSGFWKATGRDKCIRNSYKKIGMRKTLVFYKGRAPHGQKTDWIMHEYRIEDTEDDPCEDGWVVCRVFKKKNLFKVGNDVGSNISNNRLEARSFIRRESPYQGISMFELNKPEEISVHQYPQPPMFQPHHKPLSIGYDYSLALLPRESEYQQACQPSGVEVGTCKAVSEWGIVNCNMVSHEDSSRAMRFEDDGNNTSSTVQPPSNLLSLRGENGFLGLF

SEQ ID NO: 49422 - protein, 465 aa, Oryza sativa
MVDRIGAAWWCACAVGMLVVGACLAGETSEYRRQLGSAVDMPLDADVFRAPPGRNAPQQVHITQGNHDGTAMIISWVTTIEPGSSTVLYGTSEDNLNFSADGKHTQYTFYNYTSGYIHHCTIKKLEFDTKYYYAVGIGQTVRKFWFRTPPKSGPDVPYTFGLIGDLGQSYDSNITLAHYESNSKAQAVLFVGDLCYADNYPYHDNVRWDTWARFVERNVAYQPWIWTAGNHEIDFAPELGETKPFKPYSYRYPTPYKASGSTAPFWYSVKRASAYIIVLASYSSYGKYTPQYKWLEAEFPKVNRSETPWLIVLLHAPWYNSYNYHYMEGESMRVMYEPWFVKYKVDLVFAGHVHAYERTHRISNVAYNIVNGQCTPVHDQSAPVYITIGDGGNQEGLATNMTAPQPGYSAFRESSFGHAILDIKNRTHAYYTWHRNQDGNAVAADSMWFTNRYWQPTDESLDDSQ

SEQ ID NO: 49423 - protein, 539 aa, Tsukamurella tyrosinosolvens
  misc_feature (426)..(426): Xaa can be any naturally occurring amino acid
  unsure (1)..(539): unsure at all Xaa locations
MAKTIAFDKKARRGLERGLNALADAVKVTLGPKGRNVVLEKKWGAPTITNDGVSIAKEIELEDPYEKIGAELVKEVAKKTDDVAGDGTTTATVLAQALVREGLRNVAAGANPLGLKRGIEKAVEAVTEHLLKAAKEVETKDQIAATAGISAGDPAIGELIAEAMDKVGKEGVITVEESNTFGLQLELTEGMRFDKGFISGYFATDAERQEAVLEDPYVLLVSGKISTVKDLLPLLEKVIQSGKPLAIIAEDVEGEALVTLIVNKIRGTFKSVAIKAPGFGDRRKAMLQDMAILTGGQVISEEIGLSLDTAGLEVLGQARQVVVTKDETTIVDGAGSKEQIAGRVSQIRAEIENSDSDYDREKLQERLAKLAGGVAVIKAGAATEDLKERKHRIEDAVRNAKAAVEEGIVAGGGSSLAQSGTVFDSXALEGDEATGANIVKVALDAPVKQIAVNAGLEPGVVAEKVRNSPAGTGLNAATGVYEDLLAAGINDPVKVTRSALQNAASIAALFLTTEAVVADKPEKAGAPVDPTGGMGGMDF

SEQ ID NO: 49424 - protein, 328 aa, Corynebacterium efficiens YS-314
MVNVGCMKAIQVSRTGGPEVLEYTDVDAPVPTDDQVLVKVTMAGVNYIDTYYREGMYHTRLPFIPGNEGSGEVLHDPQGLIAPGTKVAWYDGLGSYAEQVCVSRERLVAIPEGVAPEVAASMLLQGMTAHYLTHGVAQLGPGDSCLITAGAGGVGLMLTQMAVAAGARVYSVVSTDEKAELSLDAGATEVFRYSDNLAEQVRRHNGGIGVDVVYDGVGKATFSESLEAVRPRGMVCLFGAASGAVEPFDPQLLNTHGSIFLTRPTLGAWIAEEGEFAMRAQAVTQAIVDGTLRVRVTGIYELADAATAHSDLQNRATTGSIVLRVAQD

SEQ ID NO: 49425 - protein, 364 aa, Populus tremuloides
MGSTGETQMSPAQILDEEANFALQLISSSVLPMVLKTAIELDLLEIMAKAGPGALLPPSDIASHLPTKNPNAPVMLDRILRLLASYSILICSLRDLPDGKVERLYGLASVCKFLTRNEDGVSVSPLCLMNQDKVLMESWYHLKDAILEGGIPFNKAYGMTAFEYHGTDPRFNKVFNKGMSVHSKMAMKKILETYKGFEGLASLVDVGGGTGAVVSTIVSKYPSIKGINFDLPHVIADAPAFPGVENVGGDMFVSVPKADAVFMKWICHDWSDEHCLTFLKNCYDALPENGKVILVECILPVAPDTSLATKGVMHVDVIMLAHNPGGKERTDREFESLARGAGFKGFEVMCCAFNTHVIEFRKKA

SEQ ID NO: 49426 - protein, 700 aa, Corynebacterium efficiens YS-314
MTTLTLSPDLQALTERKYPSDWSDVDTRAVDTVRVLAVDAVENCGSGHPGTAMSLAPLAYTLYQRVMNVDPTDTNWAGRDRFVLSCGHTSLTQYIQLYLGGFGLEMDDLKALRTWGSLTPGHPEYRHTNGVEITTGPLGQGLASAVGMAMAARRERGLFDPEAPEGESPFDHHIFVIASDGDLQEGVTAEASSLAGTQQLGNLIVFWDDNRISIEDNTEIAFTEDVVARYKAYGWQTIEIEGGEDVVAIEAAVEEAKKDTTRPTFIRLRTVIAYPAPNAMNTGASHGAALGAEEVAAIKEILDFDPEKHFHIDDEVIAHTRKLAERAAEKKVAWQEKYDRWAAANPEAKALHERLITRALPEGFADNLPTWEPDAKGIATRKASEAVLQELGKTLPELWGGSADLAGSNNTIIKGEPSFGPESISTETWTAEPYGRNLHFGIREHAMGAIMNGIALHGGTRPYGGTFLIFSDYMRPAVRLAALQGTDAYYVWTHDSIGLGEDGPTHQPVETLAALRAIPNLSILRPADANETSAAWRAALEYKEGPKGLALTRQNVPVLEGTKEKAAEGVRRGAYVLVEGSKQTPDIILMGSGSEVQIAVEAAGILESEGVAARVVSVPCMDWFAEQDAEYIESVLPSEVTARVSVEAAIAMPWYRWLGTRGKAVSLEHFGASADYQTLFEKFGITTEAVLEAARATLDA

SEQ ID NO: 49427 - protein, 365 aa, Populus kitakamiensis
MGSTGETQMTPTQVSDEEAHLFAMQLASASVLPMILKTAIELDLLEIMAKAGPGAFLSTSEIASHLPTKNPDAPVMLDRILRLLASYSILTCSLKDLPDGKVERLYGLAPVCKFLTKNEDGVSVSPLCLMNQDKVLMESWYYLKDAILEGGIPFNKAYGMTAFEYHGTDPRFNKVFNKGMSDHSTITMKKILETYKGFEGLTSLVDVGGGTGAVVNTIVSKYPSIKGINFDLPHVIEDAPSYPGVEHVGGDMFVSVPNADAVFMKWICHDWSDAHCLKFLKNCYDALPENGKVILVECILPVAPDTSLATKGVVHVDVIMLAHNPGGKERTEKEFEGLANGAGFQGFEVMCCAFNTHVIEFRKKA

SEQ ID NO: 49428 - protein, 360 aa, Corynebacterium efficiens YS-314
MSHIDDLSQLGTSTWLDDLSRDRISTGNLKQVIEEKSIVGVTTNPAIFAAAMSKGNAYDDQIDQLKTAGASVDEAVYAMSIDDVRDACDLFTDIYESTGGYDGRVSIEVDPRISADAAATLEQAKELWAKVDRPNVMIKIPATPGSLPAISDALAEGISVNVTLIFSVDRYRQVIKAYIDGVKRAAENGHDVSKIHSVASFFVSRVDTEIDRRLEEIGTDEALELRGKAGVANARRAYALYRELFAEADLPEGANTQRPLWASTGVKNPDYPATLYVSELAGPDTVNTMPEGTIDAVLEQGNLHGDTLTDTADEAEQLFTRLGELGVDLGDVFEVLENEGVEKFVASWSELLESMEARLK

SEQ ID NO: 49429 - protein, 364 aa, Populus kitakamiensis
MGSTGETQMSPAQILDEEANFAMQLISSSVLPMVLKTAIELDLLEIMAKAGPGALLSPSDIASHLPTKNPDAPVMLDRILRLLASYSILICSLRDLPDGKVERLYGLASVCKFLTKNEDGVSVSPLCLMNQDKVLMESWYHLKDAILEGGIPFNKAYGMTAFEYHGTDPRFNKVFNKGMSDHSKMAMKKILESYKGFEGLASLVDVGGGTGAVVSTIVSKYPSIKGINFDLPHVIADAPAFPGVENVGGDMFVSVPKADAVFMKWICHDWSDEHCLRLLKNCYDALPENGKVILVECILPVAPDTSLATKGVMHVDAIMLAHNPGGKERTDKEFEGLARGAGFKGFEVMCCAFNTHVIEFRKQA

SEQ ID NO: 49430 - protein, 281 aa, Kineococcus radiotolerans SRS30216
MSHSNSTASAPPQRAVQRNPTLTGELLAEFAGTAILILFGVGVVAQVVAGQNGGDDSIHWAWGLGVTFGIYVAGRTTGAHLNPAVTIALAVFQGFSWKKVLPYSVAQFLGALVAALVVRWVYADAIATVDPDTTSATQGIFSTLPGEGVSIGTAFLDQVVGTAILVFLIFAISQTRAMPPGANLAPFIVGLVVVGIGMAWGSNAGYAINPARDFGPRVASWLTGYSTAMREPVGNQFYFWVPIVAPVLGGLIGGALYKVLVERHLPDEDAAEPEGRVRTDH

SEQ ID NO: 49431 - protein, 333 aa, Bacteroides thetaiotaomicron VPI-5482
MEFLTNEKLTIVGAAGMIGSNMAQTAMMMKLTPNICLYDPFAPALEGVAEELYHCGFEGVNLTYTSDIKEALTGASYIVSSGGAARKAGMTREDLLKGNAEIAAQFGKDVRQYCPNVKHIVVIFNPADITGLITLLYSGLKPSQVSTLAALDSTRLQNELVKYFHIPASDIQNCRTYGGHGEQMAVFASTTKVKGEPLTDFIGTTRLPLTEWEALKVRVIQGGKHIIDLRGRSSFQSPAYLSIEMIAAAMGGQPFRWPAGTYVSNGKFDHIMMAMETSITKDGVTYKEVAGSPSEQEELEKSYEHLCKLRDEVIEMGIIPAIKDWHSLNPNID

SEQ ID NO: 49432 - protein, 563 aa, Clostridium acetobutylicum ATCC 824
MSKVIYKISIDLGGIVKRNFEKETKNCGKVNEEVLFKILKSNDKSEIGIKFKFKDIKSIRQFKDSVPITEYKDYEKYINRMADGEGNVLMSEKVEYFGHTSGTTGKQKLVPCTKNSRRRASKYMALLVNRFCYDNFKENWNYARGMMIADIVMTTYTKGKIPICSATSGGMKGIKHLLPYLYTSPIEVMEIKDKETALYLHLLFGLEEEELLYISGVFISNILDLFRTLEKNNKALVRDIQKGSISEELNIDEGLRKVLNKKLKPNNKRAMELEKEFKKGFKGIAKRIWPNLLYIASVTGANFSIYNDKVYYYIDSIPIYSAAYGSTEAMIGINPYASKVLYVITPSAVFYEFIPIGEKGEESFDTLLLSELKLGGRYEVVITNYAGLYRYKIGDVVKVVGFYNKCPEIEFLYRKNQVLNMAAEKTNEEHLTYAIKNTIKKLNLDLVDYTTEPDNSITPGRYIFYFEFRNNMYGFSTEKLQNILDDELRVSNLAYNRARNNKKLGMLKVEVLAPNTFDLIKEALFNKGISKNQIKIPRVIINNKIVMDIINRNKIKFVKKSVI

SEQ ID NO: 49433 - protein, 244 aa, Corynebacterium efficiens YS-314
MVEVIRVTDTEDLVNRAAERFVDVARAATAPGGGINYDGVARIVLTGGTAGIKLLEKVAGIGADLPWEKIHIFFGDERNVPVTHPESNEGQAREALLSRVAIPEDNIHGYGLEGLDAAALAESAADYERVIDQFAPRGFDLHLLGMGYEGHINSLFPHTDAVREETRRVIPVLDSPKPPAERATLTLPAVRSSQRVWLLVSGAEKAEAAAAVVGGASAEDWPAAGATGAAETLMFLADDAATGI

SEQ ID NO: 49434 - protein, 453 aa, Arabidopsis thaliana
MASLMLSLGSTSLLPREINKDKLKLGTSASNPFLKAKSFSRVTMTVAVKPSRFEGITMAPPDPILGVSEAFKADTNGMKLNLGVGAYRTEELQPYVLNVVKKAENLMLERGDNKEYLPIEGLAAFNKATAELLFGAGHPVIKEQRVATIQGLSGTGSLRLAAALIERYFPGAKVVISSPTWGNHKNIFNDAKVPWSEYRYYDPKTIGLDFEGMIADIKEAPEGSFILLHGCAHNPTGIDPTPEQWVKIADVIQEKNHIPFFDVAYQGFASGSLDEDAASVRLFAERGMEFFVAQSYSKNLGLYAERIGAINVVCSSADAATRVKSQLKRIARPMYSNPPVHGARIVANVVGDVTMFSEWKAEMEMMAGRIKTVRQELYDSLVSKDKSGKDWSFILKQIGMFSFTGLNKAQSDNMTDKWHVYMTKDGRISLAGLSLAKCEYLADAIIDSYHNVS

SEQ ID NO: 49435 - protein, 575 aa, Staphylococcus aureus
MKRENPLFFLFKKLSWPVGLIVAAITISSLGSLSGLLVPLFTGRIVDKFSVSHINWNLIALFGGIFVINALLSGLGLYLLSKIGEKIIYAIRSVLWEHIIQLKMPFFDKNESGQLMSRLTDDTKVINEFISQKLPNLLPSIVTLVGSLIMLFILDWKMTLLTFITIPIFVLIMIPLGRIMQKISTSTQSEIANFSGLLGRVLTEMRLVKISNTERLELDNAHKNLNEIYKLGLKQAKIAAVVQPISGIVMLLTIAIILGFGALEIATGAITAGTLIAMIFYVIQLSMPLINLSTLVTDYKKAVGASSRIYEIMQEPIEPTEALEDSENVLIDDGVLSFEHVDFKYDVKKILDDVSFQIPQGQVSAFVGPSGSGKSTIFNLIERMYEIESGDIKYGLESVYDIPLSKWRRKIGYVMQSNSMMSGTIRDNILYGINRHVSDEELINYAKLANCHDFIMQFDEGYDTLVGERGLKLSGGQRQRIDIARSFVKNPDILLLDEATANLDSESELKIQEALETLMEGRTTIVIANRLSTIKKAGQIIFLDKGQVTGKGTHSELMASHAKYKNFVVSQKLTD

SEQ ID NO: 49436 - protein, 149 aa, Triticum aestivum
MADQLTDEQIAEFKEAFRLFDEDGDGCITTKELGTVMRSLGQNPTEAELQDMINEVDADGNGTIDFPEFLNLMARKMKDTDSEEELKEAFRVFDKNQNGFISAAELRHVMTNLGEKLTDEEVDEMIREADVDGDGQINYEEFVKVMMAK

SEQ ID NO: 49437 - protein, 380 aa, Saccharomyces cerevisiae
MNCIPSPISERKIQINNEDCIGKENAFHTIPRESSINLTPHSTNEKKVLSEVNSNKIDSLQLPRGKLQRDSTHLEKTRKRQLSNDSTDPIEPKTVKKIKCHQWKNLDSIEMDDPFMVAEYTDSIFSHLYEKEIQMLPTHNYLMDTQSPYHLKSSMRALLIDWLVEVHEKFHCLPETLFLAINLLDRFLSQNVVKLNKLQLLCITCLFIACKFEEVKLPKITNFAYVTDGAATVEGIRKAELFVLSSLGYNISLPNPLNFIRRISKADNYCIETRNMAKFIMEYSICCNKFIHLKPSYLAAMSMYIARKIKNENSKWDETFIHYSGGIDIESDPAFKDFISELVEDIAVPDTNLDSLRLKYKKPKHGMVYFKVFDWCKQKR

SEQ ID NO: 49438 - protein, 308 aa, Oryza sativa (japonica cultivar-group)
MGRPPCCDKEGIKKGPWTPEEDIILVSYIQEHGPGNWRSVPINTGLMRCSKSCRLRWTNYLRPGIKRGNFTAHEEGIIVHLQSLLGNRWAAIASYLPQRTDNDIKNYWNTHLKKKLAAAANSTSAASNRHPIFADATFPSAAGSHTVSSNSDVNQMAAIARRSPFADCPSSSYASSMDNISKLLDGFMKTNSPSPPPPPLQHYDGGYYDDVKPAVDVVGNPLLSSFDCMSGADLDCCFDVHQQQPASSFMEYGGYGGGYGDESKQQLMNQAAAPLSSIEKWLFDEAAAEQVADLMDLSDGCCSVPMMF

SEQ ID NO: 49439 - protein, 509 aa, Legionella pneumophila subsp. pneumophila str. Philadelphia 1
MNWKRFLIAAMTKKKYQFFLNDTKHPKEARERLWNSEIVPLLKKSSYWQELLKDQSSIVLNDFGITEYEDYQEGLLAAQHSTIQPFNGEELIFWSETSGTSGVRKFFPITDSFQKQFQRTMAPYIYSLTQRFPGFFKEKMLYLVAVDTHKTTPAGIPTGWISNFNYRHLPSFIKKFYAMPDEVFASHEAYNQWGPIYGLASDLSAVFAVTPMVIDAFYQRCIDGFKDYLPYLLGDKLLPSHLPPLKITRKRRRHLQALAKVDHLSFKQLWPSLEMAGCWTSGLCEYPAQQLQKLLGSEIKLVDGTYSATEGWLTVPVETNSVGGILHPGAHIVEFIPEGAAIEKENLLQCWELEVGKKYEVFLTTAMGFVRYRLKDIVKCTGYLNSSPKLEFCYKTQLLKLETCSITGKELQSAVQATLINLEPYWYFARNSVGNRIVLVTDDEAEISELPLKKLHEQLIHISPTYAHSVETEEVLPVTLLQLPKEKLLAGMHGQTKPKFISQEVIAER

SEQ ID NO: 49440 - protein, 474 aa, Arabidopsis thaliana
MDPYKYRPASSYNSPFFTTNSGAPVWNNNSSMTVGPRGPILLEDYHLVEKLANFDRERIPERVVHARGASAKGFFEVTHDISNLTCADFLRAPGVQTPVIVRFSTVIHERGSPETLRDPRGFAVKFYTREGNFDLVGNNFPVFFIRDGMKFPDMVHALKPNPKSHIQENWRILDFFSHHPESLNMFTFLFDDIGIPQDYRHMDGSGVNTYMLINKAGKAHYVKFHWKPTCGVKSLLEEDAIRVGGTNHSHATQDLYDSIAAGNYPEWKLFIQIIDPADEDKFDFDPLDVTKTWPEDILPLQPVGRMVLNKNIDNFFAENEQLAFCPAIIVPGIHYSDDKLLQTRVFSYADTQRHRLGPNYLQLPVNAPKCAHHNNHHEGFMNFMHRDEEVNYFPSRYDQVRHAEKYPTPPAVCSGKRERCIIEKENNFKEPGERYRTFTPERQERFIQRWIDALSDPRITHEIRSIWISYWSQV

SEQ ID NO: 49441 - protein, 404 aa, Oryza sativa
MPMWSQPPPPPSSLQLRRPPPPLPHRPRRLRSRLSPIAASQDPLTALSRLLWGRALPPSQLVLAVRHGWTAAWGLLMRQLAPSDPATGAFTRTPSRFPAVVGTPSARLHLYVGLPCPWAHRALLVRALLGLERRLPLSVAVPGDDGAWSFTPDSPDALYGKRKLREVYASARRGGFEGRASVPLLWDAERREVVCNESIEITKFLCDLAAADGSAGGLDLWPPELRQDIDRWYSFIYPSVNNGVYRCGFAQSQEAYDAAAGELFAALDRLEDHLSGSRYLCGDTLTLADVCLFTTLVRFDLVYHSLFRCTRRKLVEYASLHAYTRDIYQMPGVAGTCDMAAIADGYFGALFPLNPGGILPLVPASCSPEALLEPHGREALSSSAAADAGGGGNGRQLEATSASN

SEQ ID NO: 49442 - protein, 325 aa, Arabidopsis thaliana
ADYNIQKESTLHLVLRLRGGMQIFVKTLTGKTITLEVESSDTIDNVKAKIQDKEGIPPDQQRLIFAGKQLEDGRTLADYNIQKESTLHLVLRLRGGMQIFVKTLTGKTITLEVESSDTIDNVKAKIQDKEGIPPDQQRLIFAGKQLEDGRTLADNIQKESTLHLVLRLRGGMQIFVKTLTGKTITLEVESSDTIDNVKAKIQDKEWIPPDQQRLIFAGKQLEDGRTLADYNIQKESTLHLVLRLRGGMQIFVKNLTGKTITLEVESSGTIDNVKAKIQDKEGIPPDQQRLIFAGKQLEDGRTLADYNIQKESTLHLVLRLRGGSF

SEQ ID NO: 49443 - protein, 642 aa, Streptomyces coelicolor A3(2)
MGVRRDLKRARESGDLASRTRTETVRDADGTVREARTAALASRPATGSTADIPFTNAAEAPGAVVLRREVDGVWRPVTAEEFAREVTAVAKGLIAAGLEPGGRVAVMSRTRYEWTVLDFAIWAAGGQTVPVYATSSADQVEWIVQDSGARYAVTETAANTATVRAGTAGHPERPRVWELDAGALADLTALGRGVSDEEVTKRRTALTPDTVATVCYTSGTTGRPKGCVLTHANLHAEAANTVELLHPIFKEVTGQTASTLLFLPLAHILGRTIQISCLLARIEIGHFPSIRPDELRPALKSFRPTFLVGVPYLFEKIHDTGRATAERIGRGASFERAHRLAVRFGAAHLDRFLGRGKGPTPGLWAGWALYDLLVYRRVRKELGGRMRYAISGGSPLERELNLFFYAAGIMIYEGYGLTETTAAATIVPPLGPRPGTVGPPVPGTAVRIADDGEVLVKGGIVFGAYRGNPEATDAALTDGWFATGDLGSLDADGYLTITGRKKDLLVTSGGKNVSPAVLEDRLRSRPPVAQCLVVGDNRPFVAALITLDPDAVAHWLAVRGLPAQTPMSEVVRDDRMRADVQKAVDHANAAVSRAESIRAFRLVEGEFTEENGLLTPSLKVKRHAAVAAYADDIEALYATPGR

SEQ ID NO: 49444 - protein, 325 aa, Arabidopsis thaliana
ADYNIQKESTLHLVLRLRGGMQIFVKTLTGKTITLEVESSDTIDNVKAKIQDKEGIPPDQQRLIFAGKQLEDGRTLADYNIQKESTLHLVLRLRGGMQIFVKTLTGKTITLEVESSDTIDNVKAKIQDKEGIPPDQQRLIFAGKQLEDGRTLADNIQKESTLHLVLRLRGGMQIFVKTLTGKTITLEVESSDTIDNVKAKIQDKEWIPPDQQRLIFAGKQLEDGRTLADYNIQKESTLHLVLRLRGGMQIFVKTLTGKTITLEVESSGTIDNVKAKIQDKEGIPPDQQRLIFAGKQLEDGRTLADYNIQKESTLHLVLRLRGGSF

SEQ ID NO: 49445 - protein, 325 aa, Arabidopsis thaliana
ADYNIQKESTLHLVLRLRGGMQIFVKTLTGKTITLEVESSDTIDNVKAKIQDKEGIPPDQQRLIFAGKQLEDGRTLADYNIQKESTLHLVLRLRGGMQIFVKTLTGKTITLEVESSDTIDNVKAKIQDKEGIPPDQQRLIFAGKQLEDGRTLADNIQKESTLHLVLRLRGGMQIFVKTLTGKTITLEVESSDTIDNVKAKIQDKEGIPPDQQRLIFAGKQLEDGRTLADYNIQKESTLHLVLRLRGGMQIFVKTLTGKTITLEVESSGTIDNVKAKIQDKEGIPPDQQRLIFAGKQLEDGRTLADYNIQKESTLHLVLRLRGGSF

SEQ ID NO: 49446 - protein, 354 aa, Zinnia elegans
MGSNQDDQAFLFAMQLASASVLPMVLKTAIELDLLETIAKAGPHGSVSSSELVAQLPKVNNPEAPVMIDRICSLLASYSVLTCTLKETADGCAERFYGLAPVCKFLIKNDAGVSLAPLLLMNQDKVLMESWYYLKDPVLDGGIPFNKAYGMSAFEYHGKDQRFNKVFNSGMFNHSTMTMKKIVELYNGFSGLKTLVDVGGGTGASLNMITSKHKSLKGINFDLPHVIADATTYQGIEHVGGDMFESVPKGDAIFMKWILHDWSDAHCLQVLKNCYKSLPENGKVIVAECILPEAPDTTPATQNVIHIDVIMLAHNPGGKERTEKEFEALAKGAGFKGFNKAACALNTWVMEFCK

SEQ ID NO: 49447 - protein, 325 aa, Arabidopsis thaliana
ADYNIQKESTLHLVLRLRGGMQIFFKTLTGKTITLEVESSDTIDNVKAKIQDKEGIPPDQQRLIFAGKQLEDGRTLADYNIQKESTLHLVLRLRGGMQIFLKTLTGKTITLEVESSDTIDNVKAKIQDKEGIPPDQQRLIFAGKQLEDGRTLADYNIQKESTLHLVLRLRGGMQIFVKTLTGKTITLEVESSNTIDNVKAKIQDKEWIPPDQQRLIFAGKQLEDGRTLADYNIQKESTLHLVLRLRGGMQIFVKTLTGKTITLEVESSGTIDNVKAKIQDKEGIPPDQQRLIFGKQLEDGRTLADYNIQKESTLHLVLRLRGGSF

SEQ ID NO: 49448 - protein, 391 aa, Novosphingobium aromaticivorans DSM 12444
MRDAVIVSAARTPIGRAYKGAFNATPGATLGALSLEAAVARAGIDPAEVDDVLWGAALQQGAQAGNIARQVALRAGLPITTSGMSMDRQCSSGLMTIATASKQVIIDRMDVVAAGGQESISLVQTKDMRVAPDKSLMAMHKAIYMPMLQTAEIVGQRYGISREACDEYALQSQQRTAAAQAAGKFDDEIVAVDTTMGVQNKETGEVTFQDVHLTKDEGNRPSTTIENLQALKPVIEGGIVTAGNASQLSDGSAAVVVMEAALAAKKGLAPLGRYVGMAVAGTEPDEMGIGPVFAIPKLLQRFGLKMDDIGLWELNEAFAVQVLYCRDKLGIPNDLLNVNGGSISIGHPYGMTGARCTGHALIEGKRRGAKYVVVTMCVGGGMGAAGLFEVL

SEQ ID NO: 49449 - protein, 346 aa, Rubrobacter xylanophilus DSM 9941
MKAMALAAGKGTRLFPLTGEVPKPMAPVVNTPIIEHIFALLASHGMRKVYVNVHYLADALLNAYGQTSRINGMEVHLSREERLMGTAGGVKRLADRFDETFVVVSGDALTDIDLGELVAFHREKGALATIALKRVYDTSEFGVVDIDAGGNIRGFQEKPPPEEAISTLANTGIYVLEPRALEYIPEDTFFDFAKDVFPQLLEAGEKFVGYQGDFYWSDIGTLSAYRQAHYDVLSGKVRVRIPGEKRSKGLWIGEDAKIHPSASFEGYVVIGGDAVIGRDVVLSGSVTVGRDCWIRRGATIKSSILLPGSTVGDGAYLEDCIVGHGYDVRPGEIIRGGALIRRPPGH

SEQ ID NO: 49450 - protein, 439 aa, Corynebacterium efficiens YS-314
MDPSDLAWILAAFALVSLMFPGLALLYGGMLGGHQVLNTLMMVMGALAVTCLVYVTYGHGLVMGNSIGGLGIIGNPLDHLGFHDIMADDGAGGLMWAGFYVLFAAISLALVASGAAGRMKFGAWMVFGAIWLTLVYAPLAHWVFGGGWMITALGFHDFAGGTAIHMNAGASGLALALVLGRRHSMAVRPHSLPMTLLGAGMIMVGWFGFNGGTAGGANFLASYVVVTTLLATGGGMLGFILIERIREGRSTLLGLATGIIAGLVAITPAADAVSPVGALITGFLGSAVAAWVISWKRTHRIDDTLDVFAVHGMAGVAGALFVMLLGSPDAPAGLAGVLRGGELSLLWREPLAIIITLGYAFGMTWLIATVMNRITPIRIASEDEYTGIDTAIHAESAYSLTPVGMASRTNPETRIPEETAPADRAGVAKRNTDQKEDAR

SEQ ID NO: 49451 - protein, 919 aa, Corynebacterium efficiens YS-314
MNELLRDDIRYLGRILGEVISEQEGHHVFELVERARRTSFDIAKGRAEMDSLVEVFAGIDPEDATPVARAFTHFALLANLAEDLHDAAQREQALNSGEPAPDSTLEATWVKLDDAGVGSGEVAAVIRNALVAPVLTAHPTETRRRTVFDAQKHITALMEERHLLLALPTHARTQSKLDDIERNIRRRITILWQTALIRVARPRIEDEVEVGLRYYKLSLLAEIPRINHDVTVELARRFGGDIPTTAMVRPGSWIGGDHDGNPFVTAETVTYATHRAAETVLKYYVKQLHALEHELSLSDRMNVISDELRVLADAGQNDMPSRVDEPYRRAIHGMRGRMLATTAALIGEEAVEGTWFKTFTPYTDTHEFKRDLDIVDGSLRMSRDDIIADDRLAMLRSALDSFGFNLYSLDLRQNSDGFEDVLTELFATAQTEKNYRGLTEAEKLDLLIRELSTPRPLIPHGDPDYSEATNRELGIFSKAAEAVRKFGPLMVPHCIISMASSVTDILEPMVLLKEFGLIRANGKNPTGSVDVIPLFETIDDLQRGAGILEELWDIDLYRNYLEQRDNVQEVMLGYSDSNKDGGYFAANWALYDAELRLVELCRGRNVKLRLFHGRGGTVGRGGGPSYDAILAQPKGAVRGAVRVTEQGEIISAKYGNPDTARRNLEALVSATLEASLLDDVELPNRERAHQIMGEISELSFRRYSSLVHEDPGFIQYFTQSTPLQEIGSLNIGSRPSSRKQTNTVEDLRAIPWVLSWSQSRVMLPGWFGVGTALREWIGEGEGAAERIAELQELNRCWPFFTSVLDNMAQVMSKAELRLARLYADLIPDREVADRIYETIFGEYFLTKEMFCTITGSQDLLDDNPALARSVRSRFPYLLPLNVIQVEMMRRYRSGDEGTAVPRNIRLTMNGLSTALRNSG

SEQ ID NO: 49452 - protein, 95 aa, Silicibacter sp. TM1040
MALKPLHDRVLVRRTESEEKTAGGLIIPDSAKEKPSEGVVVACGEGARKDSGELIAMAVKEGDNILFGKWSGTEVTVDGEELLMMKESDIMGVIV

SEQ ID NO: 49453 - protein, 415 aa, Oryza sativa (japonica cultivar-group)
MARGKNHPDGEEEEAPAAAGEEEAPVEMDEEGEMEEEEEEEQGEGEGEERDEGEEEEEWEDAEEVEGGEESEQAAAEEEDSPLVVVEAEAAAPVVDGSPPKLAEGYYEIEDIRRRRLRKGKLQYLVKWRGWPESANTWEPLENLSACSDIIDAFEMRLQSPRPGRKRKRKITTTPVAGSNPSHGKRGRPRLDAKSHTRAPAPEPKQLPCRTSCRRATNCSSKTVAGLDASGSVVRNQLAQNIVQEGSSSVISRTPCQELPLSIRLTDQQNEHHLVNGSSNSENLVKVPPSQGGQVTGAKKRKSGNVRRFEQNKPTQGQGECGALVVAEDVGSTEGETGDKKKTEGCPNRVHITKIIKPVRFAAAVNNDVQQVSITFKALRSDGQEVMVDDKELKANNPLLLISYYEQCLRYNPTS

SEQ ID NO: 49454 - protein, 489 aa, Buchnera aphidicola
MNYFNTLNFRQKINQIKKCRFMEKKEFNKKNEILKNKKIVIVGCGSQGLNQGLNMRDSGLNISYALRKNSILKKNQSWINATKNNFLVGDYESLIPNADLVINLTPDKQHSNVVKELQKLMKKDACLGYSHGFNIVEKLRNIRKDITVIMVAPKCPGTEVREEYKRGFGVGTLIAVHNENDYSNMGLEVAKAWAFSTGGHRAGVLESSFVAEVKSDLMGEQTILCGMLQTASLVCYEKLITTQNHPGYAGKLIQFGWETITESLKHGGITLMMDRLSNSSKIRAFKLSQEIKEFSQNLFQKHMDDIISGDFSSKMIQDWKNKDQNLLNWRYKTKNTSFEQSPDYDKKILEQEYYDHGILMVAILKAGIELSFETMIQSGIMEESAYYESLHELPLIANTIARKKLYEMNMVISDTAEYGNYLFSESAYPILKEFVKNINNTDLGSALPRNSVNNIELYNVNTMIRNHPIEIIGRKLRSYMKNMKTIIVG

SEQ ID NO: 49455 - protein, 547 aa, Silicibacter sp. TM1040
MAAKDVKFDTDARNRMLKGVNTLADAVKVTLGPKGRNVVLEKSFGAPRITKDGVSVAKEIELEDKFENMGAQMVKEVASRTNDEAGDGTTTATVLAQSIVREGLKQVAAGLNPMDLKRGIDLATDKVVEAIKAMAREVKDSDEVAQVGTISANGEAEIGRQIADAMQKVGNDGVITVEENKGLETETDVVEGMQFDRGYLSPYFVTNADKMTAELEDCLILLHEKKLSSLQPMVPLLEQVIQSQKPLLIIAEDVEGEALATLVVNKLRGGLKIAAVKAPGFGDRRKAMLQDIAILTGGQVISEDLGMKLESVTMDMLGTAKKIQITKDETTIVDGAGEKAEIEARVAQIRAQIEETTSDYDREKLQERVAKLAGGVAVIRVGGMTEVEVKERKDRVDDALNATRAAVQEGVIVGGGVALVQAGKSLEGLTGVNADQNAGIAIVRRALEAPLRQIAENAGVDGAVVAGKIRESEDKNFGFNAQTEEYGDMFSFGVIDPAKVTRTALEDAASIAGLLITTEAMVADKPAKEGAAPAGGMPDMGGMGGMM

SEQ ID NO: 49456 - protein, 285 aa, Nicotiana tabacum
MSGLYNNNHNFSPSRAASPQIRSSNPDVDSNQYLSELLAEHQKVGPFMQVLPICSTLLNQEILRVSGMTPNQILGELDRFRHRSSSPMASANVMSNVGGTGLGGWSGLAQERLSGPPGMSMDWHGAPASPSSYTVKRILRLEIPLETYPNFNFVGRLLGPRGNSLKQVEATTGCRVYIRGRGSIKDPDQEENLRGIPGYEHLNEPLHILIEADLPANIVDIRLRQAQEIIEELLKPVDESQDYIKRQQLHELAMLNSNFREDSPGPSGSVSPFNSGGLKRPKTGR

SEQ ID NO: 49457 - protein, 666 aa, Salmonella enterica subsp. enterica serovar Paratyphi A str.
MSRKDLANAIRALSMDAVQKANSGHPGAPMGMADIAEVLWNDFLKHNPTDPTWYDRDRFILSNGHASMLLYSLLHLTGYDLPLEELKNFRQLHSKTPGHPEIGYTPGVETTTGPLGQGLANAVGLAIAERTLGAQFNRPDHEIVDHYTYVFMGDGCLMEGISHEVCSLAGTLGLGKLIGFYDHNGISIDGETEGWFTDDTAKRFEAYHWHVVHDIDGHDPEAVKKAILEAQSVKDKPSLIICRTVIGFGSPNKAGKEESHGAALGEEEVALTRQKLGWHHPAFEIPKEIYRAWDGREKGEKAQRQWQEKFAAYEKAYPELAAKFTRRMSGGLPETWESATQKFINDLQANPAKIATRKASQNTLNAYGPLLPELLGGSADLAPSNLTIWKGSTSLKEDPAGNYIHYGVREFGMTAIANGIAHHGGFVPYTATFLMFVEYARNAARMAALMKARQIMVHTHDSIGLGEDGPTHQAVEQLASLRLTPNFSTWRPCDQVEAAVGWKLAIERQHGPTALILSRQNLAQVERTPEQVKAIARGGYILKDSGGKPDIILIATGSEMEITLQAAEKLTGEGHNVRVVSLPSTDIFDAQDEAYRESVLPAHVTARVAVEAGIADYWYKYVGLKGAIIGMTGYGESAPADKLFPYFGFTVENIVEKARRVLNIKG

SEQ ID NO: 49458 - protein, 316 aa, Salmonella enterica subsp. enterica serovar Paratyphi A str.
MNQLDGIKQFTTVVADSGDIESIRHYQPQDATTNPSLLLKAAGLEQYGHLIEDAIAWGKKHGGTQEQQVAAASDKLAVNFGAEILKSIPGRVSTEVDARLSFDKEKSIEKARHLVGLYQQQGIDKSRILIKLAATWEGIRAAGQLEKEGINCNLTLLFSFAQARACAEAGVYLISPFVGRIYDWYQARSPLEPYVVEEDPGVKSVRNIYDYFKQHRYETIVMGASFRRTEQILALTGCDRLTISPNLLKELKEKEEPVIRKLVPSSQMFHRPTSMTEAEFRWEHNQDAMAVEKLSEGIRLFAVDQRKLEDLLAAKL

SEQ ID NO: 49459 - protein, 489 aa, Buchnera aphidicola
MNYFNSLNFRQKLINLRKCKLVEKNFFSKKCDILKRKNIVIVGCGSQGLNQGLNMRDSGLHVSYALRGSSILNKNKSWENATKNNFFVDTYENIIPTADLVINLTPDKQRKEVVTLLQKFMKENSVLGFSHGFHIVEIGQKIRNDITVIMVAPKCPGTEVREEYKKGFGVPSLIAVHMENDPKKIGFEIAKAWAYSLGSHRAGVLHSSFIAEVKSDLMGEQTILCGMLQTSSLVCYDQLVSQGKDPNYAGKLIQLGWESITESVKHGGITLMLNRLSNTAKIRAYILSKKLKVMFSSLFRKHMDDIISGEFSKNMIDDWNSDDKKLKEWRTQIKKTDFEKCKICHKEISEQEYFDQGLLMVAILKAGIELSFEIMVETGIKEESAYYESLHELPLIANTIARKRLYEMNLVISDTAEYGSYLFSQSAIPLLKEFMNELCPGDLGEKISDLQFDNVTLNKINHDIENHPVEIIGKKLRKYMVDMKPIKLS

SEQ ID NO: 49460 - protein, 412 aa, Glycine max
MEFLLSFMVLRKPNQQMKFLHTFMVLRKSNQQMKFLLSFMVLRKPNQQIKFLLFFLMVLRKPNQQIKFLLFFSYGAKKTQSTDQVPPFFYGAKKTQSTDQVPIFYGAKKTQSTDQVPIFYGAKKIQSTDQTPLFLYGAKKTQSEDQVPIFWYGIKKTQSEDQPPLWYGVKKTYVAKRSLSQEDETILVANGHQHDIPKADQVFFEEGLRPGTKLDAHFKKRENVTPLLPRQIAQHIPLSSAKIKEIVEMLFVNPEPENVKILEETISMCEVPAITGEERYCATSLESMVDFVTSKLGKNARVISTEAEKESKSQKFSVKDGVKLLAEDKVIVCHPMDYPYVVFMCHEISNTTAHFMPLEGEDGTRVKAAAVCHKDTSEWDPNHVFLQMLKTKPGAAPVCHIFPEGHLLWFAK

SEQ ID NO: 49461 - protein, 179 aa, Brassica napus
MADQLTDDQISEFKEAFSLFDKDGDGCITTKELGTVMRSLGQNPTEAELQDMINEVDADGNGTIDFPEFLNLMARKMKDTDSEEELKEAFRVFDKDQNGFISAAELRHVMTNLGEKLTDEEVDEMIREADVDGDGQINYEEFVKVMMAKRRRKSMAGKPSSSTERKEERRRRKSHCRIL

SEQ ID NO: 49462 - protein, 520 aa, Burkholderia pseudomallei K96243
MSPHPNSDNSTAQSNPPQLRRSLKARHLTMIAIGGSIGTGLFVASGASISQAGPGGAMLAYLLIGLMVYCLMMSLGEMAAFMPVSGSFATYGAKYVEEGFGFALGWNYWYNWAVTIAVELVAAQLVMHYWFPDVPGVWWSAAFLGVMFLLNVLTVRGFGEAEYWFALIKVVTVIAFIGVGLLMIFGILKGGPSNGWSNFTIGDAPFAGGLPAMMGVAMIAGFSFQGTELIGVAAGESENPRTTIPRAVRQVFWRILLFYVLAIFVIGVLIPYTDPNLLKSDVTDVGVSPFTLVFRHAGLAFAAGVMNAVILTAVLSAGNSGMYASTRMLHNLATEGRAPKLFAKLSAGGVPRNALYATTAVGALCFLSSLYGDKTVYLWLLNTSGMTGFIAWLGIALSHYRFRKGYVRQGFSVDQLPYQSSLYPYGPIFAFALCIVIALGQDYQAFLANRIDWIGVLATYVGIPLFLVVWLGYRLVHKTRVVRYEDMDIASWVAEHERAAAHEAREAAAVRVPSSPEAAS

SEQ ID NO: 49463 - protein, 1729 aa, Arabidopsis thaliana
MQSIMDSSAVNATEATEQNDGSRQDVLEFDLNKTPQQKPSKRKRKFMPKVVVEGKPKRKPRKPAELPKVVVEGKPKRKPRKAATQEKVKSKETGSAKKKNLKESATKKPANVGDMSNKSPEVTLKSCRKALNFDLENPGDARQGDSESEIVQNSSGANSFSEIRDAIGGTNGSFLDSVSQIDKTNGLGAMNQPLEVSMGNQPDKLSTGAKLARDQQPDLLTRNQQCQFPVATQNTQFPMENQQAWLQMKNQLIGFPFGNQQPRMTIRNQQPCLAMGNQQPMYLIGTPRPALVSGNQQLGGPQGNKRPIFLNHQTCLPAGNQLYGSPTDMHQLVMSTGGQQHGLLIKNQQPGSLIRGQQPCVPLIDQQPATPKGFTHLNQMVATSMSSPGLRPHSQSQVPTTYLHVESVSRILNGTTGTCQRSRAPAYDSLQQDIHQGNKYILSHEISNGNGCKKALPQNSSLPTPIMAKLEEARGSKRQYHRAMGQTEKHDLNLAQQIAQSQDVERHNSSTCVEYLDAAKKTKIQKVVQENLHGMPPEVIEIEDDPTDGARKGKNTASISKGASKGNSSPVKKTAEKEKCIVPKTPAKKGRAGRKKSVPPPAHASEIQLWQPTPPKTPLSRSKPKGKGRKSIQDSGKARGPSGELLCQDSIAEIIYRMQNLYLGDKEREQEQNAMVLYKGDGALVPYESKKRKPRPKVDIDDETTRIWNLLMGKGDEKEGDEEKDKKKEKWWEEERRVFRGRADSFIARMHLVQGDRRFSPWKGSVVDSVIGVFLTQNVSDHLSSSAFMSLAARFPPKLSSSREDERNVRSVVVEDPEGCILNLNEIPSWQEKVQHPSDMEVSGVDSGSKEQLRDCSNSGIERFNFLEKSIQNLEEEVLSSQDSFDPAIFQSCGRVGSCSCSKSDAEFPTTRCETKTVSGTSQSVQTGSPNLSDEICLQGNERPHLYEGSGDVQKQETTNVAQKKPDLEKTMNWKDSVCFGQPRNDTNWQTTPSSSYEQCATRQPHVLDIEDFGMQGEGLGYSWMSISPRVDRVKNKNVPRRFFRQGGSVPREFTGQIIPSTPHELPGMGLSGSSSAVQEHQDDTQHNQQDEMNKASHLQKTFLDLLNSSEECLTRQSSTKQNITDGCLPRDRTAEDVVDPLSNNSSLQNILVESNSSNKEQTAVEYKETNATILREMKGTLADGKKPTSQWDSLRKDVEGNEGRQERNKNNMDSIDYEAIRRASISEISEAIKERGMNNMLAVRIKDFLERIVKDHGGIDLEWLRESPPDKAKDYLLSIRGLGLKSVECVRLLTLHNLAFPVDTNVGRIAVRMGWVPLQPLPESLQLHLLELYPVLESIQKFLWPRLCKLDQRTLYELHYQLITFGKVFCTKSRPNCNACPMRGECRHFASAYASARLALPAPEERSLTSATIPVPPESYPPVAIPMIELPLPLEKSLASGAPSNRENCEPIIEEPASPGQECTEITESDIEDAYYNEDPDEIPTIKLNIEQFGMTLREHMERNMELQEGDMSKALVALHPTTTSIPTPKLKNISRLRTEHQVYELPDSHRLLDGMDKREPDDPSPYLLAIWTPGETANSAQPPEQKCGGKASGKMCFDETCSECNSLREANSQTVRGTLLIPCRTAMRGSFPLNGTYFQVNELFADHESSLKPIDVPRDWIWDLPRRTVYFGTSVTSIFRGLSTEQIQFCFWKGFVCVRGFEQKTRAPRPLMARLHFPASKLKNNKT

SEQ ID NO: 49464 - protein, 607 aa, Triticum aestivum
  misc_feature (521)..(521): Xaa can be any naturally occurring amino acid
  unsure (1)..(607): unsure at all Xaa locations
MKFMKLGSNPDTFQDDGSEVRIVETELVSDITVRLGNTKFYLHKFPLLSKCARFQKLIPTTGDENIDIHIHDIPGGPKAFEICAKFCYGMVVTLNAYNVVAARCAAEYLGPPATGDVGPPLPQIDVFLSSSIFRSWKDSIIVLGTTKAHLPWSEDLKLVSHCIDSIASKANVDTSKVEWSYTYNRKKLSAENDLDMQWNGVKKQPAVPKDWWVEDLTDLDIDSYKQVISAIKTMGMVPKDAVGEAIKAYTYKKLPSLSKVSMIHGDGKVRAMLVTITCLLPSEKGSVSCSFLLKLLRATNLLKCGEMCRKELVKRIGRQLDEASVSDLLIPTVDGETTGYDIDMILSIVEEYVRQDSKNAQKHNAEVNGHVQAPSASMITVAKIVDGYLTEVAKDPNTPVLKFINLAEAISGNSRPFHDGIYRAIDMYMKEHPSLSKSDKKKLCCLMDCKKLSPEACAHAVQNERLPLRTVVQVLYHEQTRASAAATVRADSICIGSYESSRSGATTNTGDEWDGRHSGGXTSAFHQRPRSWRDATAPRKSHGSSKSTANGKAKGGATPKKVLGKMLSSKALTGERSSSDSSDSAILRSQDHPKRTPSRSTKPSAAA

SEQ ID NO: 49465 - protein, 417 aa, Bacteroides thetaiotaomicron VPI-5482 [sequence omitted]

SEQ ID NO: 49466 - protein, 455 aa, GIBBERELLA ZEAE PH-1
MDDLHLAPEPHLMHRSLLTRPEAVSSASGVYLNLSSGRKILDGCAGAAVAIIGHGSTEVQDAVVAQASQVSYVHTLTYTTSSAEELADHLLENEPFGLTRAYLVCSGSEAMDSAMKLARQYHVENGQPERTRFVSRRQAYHGNTVGAMSVGSHLARRAPYEGAILLDNVSHVSAAYEYRTKKDGETEEEYSKRLVDELEAEFLSVGPEKIMAFIAETVGGATAGCITPPAGYFSGVSKVCKKYGILLILDEIMCGVGRCGTFFAFEQDGDVQPDMVTIGKGLGGGYMPIAATLVHKGIIETLKKGTASFNHGHTYQAHPVSCAAALAIQKIIRRDNLVSRCATLGERLHKSLVETFKDAEFVGNIRGRGLFWGIEFVQDKKTKMPFDSKIRFGVKVQERAFELGLAVYPGMGTADGLVGDHVIVSPPLTITEEEMDVLVGLLKRAYDDVASKYGV

SEQ ID NO: 49467 - protein, 360 aa, Bacteroides thetaiotaomicron VPI-5482
MKQEFTRIAVKVGSNVLARRDGTLDVTRMSALVDQIAELNKSGVEIILISSGAVASGRSEIHPQKKLDSVDQRQLFSAVGQAKLINRYYELFREHGIAVGQVLTTKENFSTRRHYLNQKNCMTVMLENGVIPIVNENDTISVSELMFTDNDELSGLIASMMDAQALIILSNIDGIYNGSPSDPASAVIREIEHGKDLSNYIQATKSSFGRGGMLTKTNIARKVADEGITVIIANGKRDNILVDLLQQPDDTVCTRFIPSTEAVSSVKKWIAHSEGFAKGEIHINECATDILSSEKAASILPVGITHIEGEFEKDDIVRIMDFLGNQVGVGKANCDSAQAREAMGKHGKKPVVHYDYLYIE

SEQ ID NO: 49468 - protein, 238 aa, Oryza sativa
RLHRPPRSASAAAAMGRRPARCYRQIKNKPYPKSRYCRGVPDPKIRIYDVGMKKKGVDEFPYCVHLVSWEKENVSSEALEAARIACNKYMTKNAGKDAFHLRVRVHPFHVLRINKMLSCAGADRLQTGMRGAFGKPQGTCARVDIGQVLLSVRCKESNAKHAEEALRRAKFKFPGRQKIIHSRKWGFTKFTREEYVKLKAEGRIMSDGVNAQLLGSHGRLAKRAPGKAFLAETIQASA

SEQ ID NO: 49469 - protein, 250 aa, Arabidopsis thaliana
ADYNIQKESTLHLVLRLRGGMQIFVKTLTGKTITLEVESSDTIDNVKAKIQDKEGIPPDQQRLIFAGKQLEDGRTLADYNIQKESTLHLVLRLRGGMQIFVKTLTGKTITLEVESSDTIDNVKAKIQDKEGIPPDQQRLIFAGKQLEDGRTLADYNIQKESTLHLVLRLRGGMQIFVKTLTGKTITLEVESSDTIDNVKAKIQDKEGIPPDQQRLIFAGKQLEDGRTLADYNIQKESTLHLVLRLRGGSF

SEQ ID NO: 49470 - protein, 229 aa, Daucus carota
MDHSEESQQQQEEVIDIAYGMPQYHAGPGVATGTPVVPVSAATQAQHFFQQKLQLQQQDQLQAFWANQMQEIEQTTDFKNHSLPLARIKKIMKADEDVRMISSEAPVVFAKACEMFIMDLTMRSWSHTEENKRRTLQKNDIAAAVSRTDVFDFLVDIIPKDEMKEDTRASIPLMGQPPADSVPYYYVPQQHAAGQAGFYPDQHQQQPLPYMQWQQPQQDQNQQQQENGN

SEQ ID NO: 49471 - protein, 250 aa, Arabidopsis thaliana
ADYNIQKESTLHLVLRLRGGMQIFVKTLTGKTITLEVESSDTIDNVKAKIQDKEGIPPDQQRLIFAGKQLEDGRTLADYNIQKESTLHLVLRLRGGMQIFVKTLTGKTITLEVESSDTIDNVKAKIQDKEWIPPDQQRLIFAGKQLEDGRTLADYNIQKESTLHLVLRLRGGMQIFVKTLTGKTITLEVESSDTIDNVKAKIQDKEGIPPDQQRLIFAGKQLEDGRTLAVYNIQKESTLHLVLRLRGGSF

SEQ ID NO: 49472 - protein, 249 aa, Daucus carota
MDESEEPQQQQEAVIDSASQMTYGVPHYHAVGLGVATGTPVVPVSAPTQHPTGTTSQQQPEYYEAQHVYQQQQLQLRTQLQAFWANQIQEIGQTPDFKNHSLPLARIKKIMKADEDVRMISSEAPVIFAKACEMFILELTMRSWLLTEENKRRTLQKNDIAAAISRTDIFDFLVDIIPRDELKEEGLGITKATIPLLGSPADSAPYYYVPQQHAVEQAGFYPDQQAHPQLPYMSWQQPHEHKDQEENGD

SEQ ID NO: 49473 - protein, 523 aa, Medicago truncatula
MGYGTRKLSDEYEVSEILGRGGFSVVRKGTKKSSIEEEKSQSQVAIKTLRRLGASNNPSGLPRKKDIGEKSTIGFPTMRQVSVSDTLLTNEILVMRRIVENVSPHPNVIDLYDVYEDTNGVHLVLELCSGGELFDRIVAQDKYSETEAATVVHQIASGLEAVHRANIVHRDLKPENCLFLDVRKDSPLKIMDFGLSSVEEFTDPVVGLFGSIDYVSPEALSQGKITTKSDMWSLGVILYILLSGYPPFIAQNNRQKQQMIMNGNFSFYEKTWKGISQPAKNLISSLLTVDPSKRPSALELLSDPWVKGEKAKDVQMDPEIVSRLQSFNARRKLRAAAIASVWSSTIFLRTKKLKSLVGSYDLKEEEIENLRMHFKKICADRDNATLSEFEEVLKAMNMLSLIPFASRIFDLFDNNRDGTVDMREILCGFSSLKNSKGEDALRLCFQMYDTDRSGCISKEEVASMLRALPYDCLPTDITEPGKLDEIFDLMDANNDGKVTFDEFKAAMQRDSSLQDVVLSSIRP

SEQ ID NO: 49474 - protein, 250 aa, Arabidopsis thaliana
ADYNIQKESTLHLVLRLRGGMQIFVKTLTGKTITLEVQSSDTIDNVKAKIQDKEGIPPDQQRLIFAGKQLEDGRTLADYNIQKESTLHLVLRLRGGMQIFVKTLTGKTITLEVESSDTIDNVKAKIQDKEWIPPDQQRLIFAGKQLEDGRTLADYNIQKESTLHLVLRLRGGMQIFVKTLTGKTITLEVESSDTIDNVKAKIQDKEGIPPDQKRLIFAGKQLEDGRTLAVYNIQKESTLHLVLRLRGGIF

SEQ ID NO: 49475 - protein, 702 aa, Nicotiana tabacum
MTILNQEKYIRFEDCKSEDNRLFSGRKPSTRSWMSSIRRGFSDRLSSLKRKSRCIPSLSDWPKQVSEGSSRNKILDPQEPFLQFWNKIFVLACIVSVAIDPLFFYISVVDIKRKCLDLDHSLKIPISVLRSATDLFYIYHIFGQFRTGFIAPSSRVFGRGELIEDSSLIAKRYIPYCIIDVLAVLPLPQLVLYINAPNANRAISLVMKKQLVIVVFTQYVPRIFRIFPLYREVTRTTGFFTETAWAGAAFNLFLFMIASNVVGALWYLITVERQDNCWSQVCKGFEECVLDHLCCGQQGKNAQFLNFSCRLLKPEEIQENDFDFGIFRDALQSRVVQRRNFWSKLSYCFWWGLRNLSSLGQGLNTSDFLGEILFAVFICILGLILFSLLIGNMQEYLQSITVRVEGMRLRRRDAEQWMSHRMLPDNLRERIRRYEQYKWQQTRGVDEDYLICNLPKDLRRDVKRHLCWSLLKRVPMFEKMDEQLLDALCDRLKPALFTENSFIIREGDPVNEMLFLMRGTLLTITTNGGRTGFFNSASLSAGDFCGEELLTWALDPNASSCLPASTRTVQAVIDVEAFALTADDLKFVAAQFRRLHSKQIRHTFRFYSQHWRTWAACFIQAAWRRHYRNKLEKSLREEEDRLQAALENETANIPSLGATIYASRFAANALRILRRNHPKGSKSSSKVSPLLLQKPAEPDFSS

SEQ ID NO: 49476 - protein, 462 aa, Arabidopsis thaliana
MSEEQPHANLAVPAFKTEKEPITQTRNGQSSVWRFGGSDKAAKASTVTLRGVIYMLFDNCGKDVNKTILPLGHGDPSVYPCFRTCIEAEDAVVDVLRSGKGNSYGPGAGILPARRAVADYMNRDLPHKLTPEDIFLTAGCNQGIEIVFESLARPNANILLPRPGFPHYDARAAYSGLEVRKFDLLPEKEWEIDLEGIEAIADENTVAMVVINPNNPCGNVYSHDHLKKVAETARKLGIMVISDEVYDRTIFGDNPFVSMGKFASIVPVLTLAGISKGWVVPGWKIGWIALNDPEGVFETTKVLQSIKQNLDVTPDPATIIQAALPAILEKADKNFFAKKNKILKHNVDLVCDRLKDIPCVVCPKKPESCTYLLTKLELSLMDNIKDDIDFCVKLAREENLVFLPGDALGLKNWVRITIGVEAHMLEDALERLKGFCTRHAKKTETETESLQALKLSDNNLEM

SEQ ID NO: 49477 - protein, 250 aa, Arabidopsis thaliana
ADYNIQKEPTLHLVLRLRGGMQIFVKTLTGKTITLEVKSSDTIDNIKAKIQDKEGIPPDQQRLIFAGKQLEDGRTLADYNIQKESTLHLVLRLRGGMQIFVKTLTGKIITLEVESSDTIDNVKAKIQDKEWIPPDQQRLIFAGKQLEDGRTLADYNIQKESTLHLVLRLRGGMQIFVKTLTGKTITLEVESSDTIDNVKAKIQDKEGIPPDQQRLIFAGKQLEDGRTLAVYNIQKESTLHLVLRLRGGSF

SEQ ID NO: 49478 - protein, 512 aa, Triticum aestivum
  misc_feature (337)..(337): Xaa can be any naturally occurring amino acid
  unsure (1)..(512): unsure at all Xaa locations
MPPRRPNTGAGGGGTSSAAPPPPPSRKVPLRSLLRAASVACGVQFGWALQLSLLTPYVQELGIPHAFASLVWLCGPLSGLLVQPLVGHLSDRIAPANSPLGRRRPFIAAGAASIAFSVLTVGFSADLGRLFGDDIVPGSTRFGAIIVYLIGFWLLDVGNNATQGPCRAFLADLTENDPRRTRIANAYFSLFMALGNILGYATGAYNGWYKIFPFTITESCTVSCANLKSAFLLDIIILAITTYVSVVTVQDNPTFGSDEAAPPSSHEEEAFLFELFGSFKYFTMPVWMVLIVTSLTWIGWFPFILFDTDWMGREIYRGSPEIVADTQKYHDGVKEDXKGSFGLMLNSVVLGITSIGMEKLCRKWGAGLVWGVSNIIMALCFVAMLIITYVAQNLDYGPSGAPPTGIVAASLIVFTILGAPLSVTYSIPYAMAASRVENLGLGQGLAMGILNLSIVIPQIIVSLGGGPWDQLFGGGNAPSFWVVAAASFVGGLVAILGLPRARLGPKKKTTQR

SEQ ID NO: 49479 - protein, 181 aa, Oryza sativa
  misc_feature (141)..(141): Xaa can be any naturally occurring amino acid
  misc_feature (155)..(155): Xaa can be any naturally occurring amino acid
  misc_feature (168)..(168): Xaa can be any naturally occurring amino acid
  unsure (1)..(181): unsure at all Xaa locations
QASNGSLGDGGRRATSVAPFQGLKSTAGLPVNRRSSSSSFGNVSNGGRIRCMQVWPIEGMEKFETLSYLPPLTVEDLLKQIEYLLRSKWVPCLEFSKVGFVYRENHRSPGYYDGRYWTMWKLPMFGCTDATQVLKELEEAXKAYPDAFVRIIGFXDNVRQVQLISFIXAYKPPGCEESGGN

SEQ ID NO: 49480 - protein, 504 aa, Rubrobacter xylanophilus DSM 9941
MRFWKGCAGSWRRRSTPGRAPSRCAWRPRATPRASAGEKAQGGRTEMAEQTRREGGVHPVDRVLPPGRMIAYGLQHVLAMYAGIVAVPLILATAIGLPQEQVVYIINASFFMCGVATLLQAVGVWKFGARLPIVQGTTFASVTPMILIGEAHGLQGIYGSIIVAGLLTVLAAPYFSKLLKLFPPVVAGSVITVIGISLMPVAINWAAGGAGSEGFGSPGNIGMAFAVLLVILAITRIFRGFVGRIAVLLGLVIGTAAAAALGMADFGTVGEAAWVRANLPFHFGPPEFYLIPIISMTLVMLIVMVETTADILAIGEITEKRIRPDDVARGLRADGLSTAVAGAFNAFPFTAFAQNVGLVRFSGVKSRFVVATGGVILLLMGFFPKLAALVASIPLPVLGGAGLVLFGTVAAAGIQTLSRVDLTDNRNLIIVAVSVAFGIIPAAVPDFYDGFPEAVRMIFESGITAASVAAIVLNLAFNILGRREPEPASTADAATHAPEPEEVL

SEQ ID NO: 49481 - protein, 365 aa, Arabidopsis thaliana
MEIDEEEPMVFLDRTTRATRGKRMTKLLDDEVEEDEQFWNQEALKEEEHDDEYEAEREVADEFDSDFNDDEPEPDAVAVNEKELRDLPKKRLIYPGKTASKKKKKKTKVVSQLEYIPGDEKPGEELGNKEQEEKEENEAQEDMEGEKVIRKSTRTSVVVRQAERDALRAAIQATTKPIQRKKVGEEKRMTQEEMLLEAAQTEIMNLRNLERVLAREEEVKKKAIVHKAVYKGPQIRYHSKDGCNYLEFCNGASFNSELSTKSVPYPEKAVCVITGLPAKYRDPKTGLPYATRDAFKAIRERFMDEHDGLRKKMEMGDLFDTLVAKGFATKQKRTKIPKSNKSFSLRSSARFLSSESEEESEEDSD

SEQ ID NO: 49482 - protein, 130 aa, Salmonella typhimurium
PAVTIALWLFACFPKQKVLPYIIAQFAGAFGGALLAYVLYSSLFTEFETAHHMVRGSVESLQLASIFSTYPAAALNVWQAALVEVGITSILMGMIMALTDDGNGIPKGPLAPLLIGILVAVIGASTGPLT

SEQ ID NO: 49483 - protein, 256 aa, Arabidopsis thaliana
MAFTLGGRARRLVSATSVHQNGCLHKLQQIGSDRFQLGEAKAIRLLPRRTNMVQELGIREEFMDLNRETETSYDFLDEMRHRFLKFKRQKYLPEIEKFKALAIAQSPKVMVIGCADSRVCPSYVLGFQPGEAFTIRNVANLVTPVQNGPTETNSALEFAVTTLQVENIIVMGHSNCGGIAALMSHQNHQGQHSSLVERWVMNGKAAKLRTQLASSHLSFDEQCRNCEKESIKDSVMNLITYSWIRDRVKRDREIWS

SEQ ID NO: 49484 - protein, 130 aa, Salmonella typhimurium
PAVTIALWLFACFPKQKVLPYIIAQFAGAFGGALLAYVLYSSLFTEFETAHHMVRGSVESLQLASIFSTYPAAALNVWQAALVEVAITSILMGMIMALTDDGNGIPKGPLAPLLIGILVAVIGASTGPLT

SEQ ID NO: 49485 - protein, 169 aa, Borrelia garinii PBi
MSMLLQKTLCIIKPDGVRRGLIGDVVARFERVGLKIVAAKMLIIDESLAKKHYLYDDIVLRHSEAVWKSLIKFISNSPVFAFVVEGVESIEVVRKLCGATEPKLAIPGTIRGDFSYHSFRYSNEKGFSIYNVIHASANEVDAIREIPIWFKDNEILNYKRDDECEHYYC

SEQ ID NO: 49486 - protein, 102 aa, Oryza sativa
MSSDGGPVLGGVEPVGNENDLHLVDLARFAVTEHNKKANSLLEFEKLVSVKQQVVAGTLYYFTIEVKEGDAKKLYEAKVWEKPWMDFKELQEFKPVDASANA

SEQ ID NO: 49487 - protein, 572 aa, Silicibacter sp. TM1040
MPMSSNLAPIPELYVSYDSAQKLKVEAADLTSHDLTPRQICDLELLMNGGFNPLKGFLSEEDYNGVVENMRLADGQLWPMPITLDVTEDFAASIEIGQDIALRDQEGVILATMTVTDRWEPNKSREAEKVFGADDEAHPAVNYLHNTAGKIYLGGPVTGIQQPVHYDFRARRDTPNELRAYFRKLGWRKVVAFQTRNPLHRAHQELTFRAAREAQANLLIHPVVGMTKPGDVDHFTRVRCYEAVLDKYPAATTSMSLLNLAMRMAGPREAVWHGIIRKNHGCTHFIVGRDHAGPGKNSAGEDFYGPYDAQDLFRAHQEEIGIEMVDFKHMVYVQERAQYEPADEIADKDDVTILNISGTELRRRLAEGLEIPEWFSFPEVVAELRKTKPPRAQQGFTVFFTGFSGSGKSTIANALMVKLMEMGGRPVTLLDGDIVRKNLSSELGFSKEHRDLNIKRIGYVASEITKNGGIAICAPIAPYAATRRHVREEIEQFGAFVEVHVATTIEECERRDRKGLYKLAREGKIKEFTGISDPYDVPQNPELRVETENVEVDNCAHQVLLKLESMGLINGN

SEQ ID NO: 49488 - protein, 261 aa, Brassica napus
  misc_feature (71)..(71): Xaa can be any naturally occurring amino acid
  misc_feature (97)..(97): Xaa can be any naturally occurring amino acid
  unsure (1)..(261): unsure at all Xaa locations
RPTRPADFFKTHVAKRSWDIGPLSLGNREFKEKAERGKKASIDEHECLKWLDTKRCESVIYLSFGTMSSFXTKQLMEIAAGLEMSGHDFVWVVNRKXGSQGEKVEWLPEGYEERTKGQGLIIRGWAPQVLILDHQAIGGFLTHCGWNSLLEGAASGLPMVTWPIGAEQFYNEKLVTQVLKTGVSVGVKKMVKGSGDFISREKVDIAVREVMVGDEMRKRAKQLAVMAKDAVREGGSSDLEVNRLMDELKLVRMQKDQGTRT

SEQ ID NO: 49489 - protein, 608 aa, Shigella flexneri 2a str. 2457T
MEQNPQSQLKLLVTRGKEQGYLTYAEVNDHLPEDIVDSDQIEDIIQMINDMGIQVMEEAPDADDLMLAENTADEDAAEAAAQVLSSVESEIGRTTDPVRMYMREMGTVELLTREGEIDIAKRIEDGINQVQCSVAEYPEAITYLLEQYDRVEAEEARLSDLITGFVDPNAEEDLAPTATHVGSELSQEDLDDDEDEDEEDGDDDSADDDNSIDPELAREKFAELRAQYVVTRDTIKAKGRSHAAAQEEILKLSEVFKQFRLVPKQFDYLVNSMRVMMDRVRTQERLIMKLCVEQCKMPKKNFITLFTGNETSDTWFNAAIAMNKPWSEKLHDVSEEVHRALQKLQQIEEETGLTIEQVKDINRRMSIGEAKARRAKKEMVEANLRLVISIAKKYTNRGLQFLDLIQEGNIGLMKAVDKFEYRRGYKFSTYATWWIRQAITRSIADQARTIRIPVHMIETINKLNRISRQMLQEMGREPTPEELAERMLMPEDKIRKVLKIAKEPISMETPIGDDEDSHLGDFIEDTTLELPLDSATTESLRAATHDVLAGLTAREAKVLRMRFGIDMNTDHTLEEVGKQFDVTRERIRQIEAKALRKLRHPSRSEVLQ

SEQ ID NO: 49490 - protein, 342 aa, Bartonella henselae str. Houston-1
MEKTQNTPNKLPVTVLTGYLGSGKTTLLNRILSENHGKRYAVIVNEFGEIGIDNDLIVESDEEIYEMNNGCVCCTVRGDLIRILESLMRRSHRFDAIIIETTGLADPVPVAQTFFMDDTVNTKTALDSVIAVVDAKHLSLQLKKSREAEEQIAFADIILLNKIDLVSVKERAQAESLILAINPRAVIYATERTNIPLDKLLDRGSFDLQRVLENDHHFLDHQHFDHVCGPDCNHDHTHHHTSVLHDITITSVSLKTGALQPEKFFPWIQQITQQKGPDILRLKGIIAFQGDDDRYVIQGIHMILEGQHQRPWREDEKRESRLVFIGRTLDAKQLKTGFENCA

SEQ ID NO: 49491 - protein, 321 aa, Kineococcus radiotolerans SRS30216
MRAVRIDRTGGPEVLTVTDLPAPEPGPGQVLVDVEAAGVNFIDTYRRGGVYPLDLPAVLGSEGAGRVARPGPGVEGFAAGQLVAWKEAPGSYAEQVLVPAAELVPVPEAVGATTAAAVLLQGLTAHYLATDTFPAAAGTWALVHAGAGGVGLLLTQVLKLRGANVLTTVSTPAKAELSRAAGADDVVVGYAGATPRARELTGGLGVDVVYDGVGRDTFDAGLDALRPRGLMVVFGGSSGQVPPFDVQRLNAKGSLFLTRPTLRSYTRDRAELLARTEEVFGWITAGRLDVRVGGTYPLTAARRAHEDLEGRRTTGKLLLVP

SEQ ID NO: 49492 - protein, 148 aa, Codonopsis lanceolata
MEQTFIMIKPDGVQRGLVGEIISRFEKKGFLLKGLKLLNVEQSFAEKHYADLSAKPFFGGLVEYIVSGPVVAMVWEGKGVVKTGRTIIGATNPAASAPGTIRGDFAIDIGRNVIHGSDAVESATKEIALWFPEGVANWQSSLHSWIYE

SEQ ID NO: 49493 - protein, 540 aa, Arabidopsis thaliana
MILWKSLSCFSFVFGLLLYSASFVCAGDIVHHDDSLPQRPGCNNNFVLVKVPTRVNGSEYTEYVGVGARFGPTLESKEKHATLIKLAIADPPDCCSTPKNKLTGEVILVHRGKCSFTTKTKVAEAAGASAILIINNSTDLFKMVCEKGENVLDITIPVVMLPVDAGRSLENIVKSNAIVTLQLYSPKRPAVDVAEVFLWLMAVGTILCASYWSAWTVREEAIEQDKLLKDGSDELLQLSTTSSRGVVEVTVISAILFVVVASCFLIMLYKLMSFWFIEVLVVLFCIGGVEGLQTCLVSLLSCFRWFRRFGESYVKVPFLGAVSYLTLAICPFCIAFAVFWAVKRQYSYAWIGQDILGISLIITVLQIVRVPNLKVGFVLLSCAFMYDIFWVFVSKWWFRESVMIVVARGDRSGEDGIPMLLKIPRMFDPWGGYSIIGFGDIILPGLLVTFALRYDWLANKRLKSGYFLGTMSAYGLGLLITYIALNLMDGHGQPALLYIVPFILGTLFVLGHKRGDLKTLWTTGEPDRPCPHVRLQPQSS

SEQ ID NO: 49494 - protein, 708 aa, Nicotiana tabacum
MNHRQDEFVRFQDWKSERSSEGNFHAKGGVHRSKVVIASDELHNRLESGKWRAKGIIQAVKSSLSGFVEESLGSKKNILDPQGPFLRKWNKIFVLSCVIAISLDPLFLYIPVIDNDNKCLGLNRTLEVTASVLRSFTDIFYFLHIALQFRTGFIAPSSRVFGRGVLIEDAWEIAKRYLSTYFLIDILAVLPLPQVVILIIIPKLRGSRSLNTKNLLKSVVFFQYIPRVLRVYPLYREVTRTSGILTETAWAGAAFNLFLYMLASHVLGAFWYLFSIERETTCWKQACGNSSPCHHASLYCDDDHTKFKTLLNSSCPIETPNATLFDFGIFLGALQSGVVGPMDFPQKFFYCFWWGLQNLSSLGQNLQTSTFIWEMCFAVFISIAGLVLFAFLIGNMQTCLQSSTLRLEEMRVKRRDAEQWMSHRLLPENLRERIRCYEQYRWQETRGVDEENLIHNLPKDLRRDIKRHLCLALLMRVPMFEKMDEQLLDALCDHLKPVLFTKDSFIVREGDPVDAMLFVMRGKLLSVTTNGGRTGFFNSEHLKAGDFCGEELLTWALDPNSSTNLPISTRTAQALSEVEAFALVADDLKLVASQFRRLHSKQLRHTFRFYSGQWRTWAACFIQAAWRSYCRKNVEESLRDEENRLQDALANEGGSSPSLGATFYASRFAANVLHALRRNTAKKARVPDRISPILLQKPTEPDFTAEDN

SEQ ID NO: 49495 - protein, 474 aa, Legionella pneumophila str. Lens
MLRRTKIVATLGPASKEPEILRSMLAAGVNVVRINFSHADSSALQLIALVRKIADELNHPVAVMADLQGPKIRVGRFQNKSITLIDGQNFTLDCMAPDTLGDISGVSVAYPNLANELSIGDHLLINDGLIELEVIETSGSKIHCKVVEGGVLTDLKGLNRKGGGLAARTLTEKDRNDLRTAIEAEVDYISLSFVKDAEDIRQARALMKDYGAQITPIIAKIERMEALDHLTDIIREADAIMVARGDLGVEVGAAEVPAIQKHIIEQTRLLDKVVITATQMMESMISNPQPTRAEVSDVANAILDGTDAVMLSAETASGLFPVKVITMVNKICLSAEKHASFFYHSDPETCHYQRADQAIAMATMHTANHFPIQAIITLTESGDTALWISRQHSTVPIFAISANKRTIGRLSLVNNVFPIYIDFHQFNPEGLNQQILHELVKSGHLEKKGYVLLTRGTQIGTPGGTNCMEIIPVI

SEQ ID NO: 49496 - protein, 250 aa, Vigna unguiculata
MGKSYPTVSADYQKAIEKAKKKLRGFIAEKRCAPLMLRLAWHSAGTFDVSTKTGGPFGTIKHPAELAHGANNGLDIAVRLLEPIKAEFPILSYADFYQLAGVVAVEVTGGPEVPFHPGREDKPEPPPEGRLPDATKGSDHLRDVFGKAMGLSDQDIVALSGGHTIGAAHKERSGFEGPWTSNPLIFDNSYFKELLSGEKEGLLQLPSDKALLSDPVFRPLVEKYAADEDAFFADYAVAHQKLSELGFADA

SEQ ID NO: 49497 - protein, 1764 aa, Cryptococcus neoformans var. neoformans JEC21
MSHHPQLSVSTGSAGAGPSTPTLPRRPQGARRRGVMPGLFIANPDNSDEENSPPKAGSQRSSSGVSPISVSSSSGRGGPSSVSIPQPASPSHSIKERGSLPYPSIPAPQSSPLPSISAFPSPQPLIPTPSPAPIAYGHTPEISSGPPQPPPQPQRHLQRAFTTATPENAPRLLPEPRSSSTGTTSFHQQVNNSPSRALPSLPSPITRQSTMPSPVSQSPSTSHGQPYSAPPAYHPHDPTRVASPDDVMSPATGSEHGSIMSAGIGHRNRSASVQGQQVRLQVTTDNEAFHLVDITGINTAEGIREKVFSKLRIRDEDYPTLSMYRTEIGEPADETPILPAALLNICRTLGDSRASLKFLVKQTDVPPSSAASVIPPVSQTDYHPFRAASDPRRAGVPPITTDLPNPVLYRVSSRHSKEGKDWSGPGLSRSTRKSVLQNAGVRLSTSTGGSRSPVTEHSASLGTSSPALPTPPIPPHSTSLQAGEPSIHSSPSSRPSSRHYEFNELSLPPQFDHFKPSNAISVFPRPGTPISDSYQNENAFAGPSRPVMNQEQGSQGLGLTLDDDIDPETRALIEQFQREEQEAQKKEEERRRQLEADEELAKREQQSERELWEMMQQMQKEQRQREQAQIAEDEARARQVEEEQRQEEEQRQALEAARTAWEAEQREQRDQREQREQQESRFHTFEKDRRQRQQFFQNRARMGAPLDDSATWESTWMVGPSAEGSLSSRRPSEGRMPMVQTSAPRTSQTQSPALPPRQSSQPIYQPSQSQYLPDFAYSHRRPSGFPNTSYAETSHAQERLHDPRLQQATGRAPAPGQRGGTSNTPRPESQRLRHPFSYAAHEPSNERLQAPALSTARSVDNLRMTNGPLGMTSRQSQVYGPPRTSITPAPGFAEHRNIQPASATATSYRSPSSDRARDGRYPEPLHSSSRVATPMAPAIIDTGLVPFPSPHPNSAASSNSWRGHTPQFNSLPRSARGPTFDITRPNTVHYDRSPPPPTSPETAIPPRRPSTYYDEFHPPDTARTIVEDGATIRRPSSPFPWGDRARSGNASTPYRTASPVPVDQPRTSETNTFDDTDSQLPYAHNASPQSSWLSVSRAGAHRSDSDTLSVAGTVSSEATVRPGKGMGEDNDTNSGDTAKAGQWDRHLKEMIAKMGPGGGEGTVRPRKEEEEDEATLFITPPVRAPETSSSRTNAIRPSPSKPNLIVNTASLSQQAYDQVNPVLSASTPSDSATESEGTGEGDGEIEGSNIKRGKSFARPRDPNQWNFRPEPEQLYENLDRVFPQIDLDRPIVQGAESTPSTPGIESPSRVEIIGGLPLPAGAAPGRQGGPQAGSGPLGRAPQATGPSSAPTGAFNRSKFNKAENRRSIRVVADHKRRTLQRQVSRHEDLPPEYDVGAEEVNSAMDDQVVDPRSEEQRKKDNRRSSSMWDHKLVEVTRFARAQANREADIPESPASDGKPGTVNWVKGELIGKGSYGRVYIALNVTTGDMMAVKQVELPATEIERHDSRQQGMVKALRDEIELLKGLEHKNIVAYLGYETSPEYLSIFLEYVPGGTIASIYRTPNQARFEPQLVRFFTEQILEGLAYLHSKNIWHRDLKGDNILVDAQGICKISDFGISKQTADAYDSFGQATNMKGSVFWMAPEVIHSYSERSYSGKVDIWSLGCVVLEMWSGKRPWGDMEQFAAMFELFNKRSRPPLPPDINLSSVALDFLNEKCLATDPRNRPMARDLLQHEFIKNRDLTWTFKDSKIGKAVAKRGAKRPQA

SEQ ID NO: 49498 - protein, 129 aa, Brassica napus
MNELKVEVESNSSSQESLPKPQAMYRCKKCRRIVAIEENIGPHEPGKGEECFAWKKRSGNYAERVQCSSILCEPMKWMQNIHDGTVEEKLLCLGCNAQVGYFNWAGKQCSCGAWVNPAFQLHKNRLDEC

SEQ ID NO: 49499 - protein, 456 aa, Arabidopsis thaliana
MENLDEIRTDIVESTAPLLQESSSESNGGGEFNGASFSGAVFNLATTIIGAGIMALPATMKILGLIPGITIIVLMAFLTDASIEFLLRFSNIGNQRSYGGVMDDSFGKCGRIMLQVSILVSNIGVLIVYMIIIGDVLAGKNEYGIHHAGMLEGWFGISWWNRRTFVLLVTTLTVFAPLTCFKRIDSLRFTSAISVALAVVFLVITAGITIIKLFTDGLMMPRLLPNVTDLSSFWKLFTVVPVLVNAYICHYNVHSIQNELEDPSRIKPVVRSALAMCSSVYVMTSLFGYLLFGDGTLDDVLANFDTDLGIPFGSVLNDAVRFSYAAHLMLVFPVVFYPLRINIDGLIFPTAPPLTSSESDLRFGSITAGLIAVIFLGANFIPSIWDAFQFTGATAAVCIGFIFPAAVILKDRHNQATKRDKTIAICMIVLAVFSNAIAIYSDAYALFKKHTYVYPI

SEQ ID NO: 49500 - protein, 228 aa, Zymomonas mobilis
MPTLVLSRHGQSEWNLENRFTGWWDVNLTEQGVQEATAGGKALAEKGFEFDIAFTSVLTRAIKTTNLILEAGKTLWVPTEKDWRLNERHYGGLTGLNKAETAAKHGEEQVHIWRRSYDVPPPPMEKGSKFDLSGDRRYDGVKIPETESLKDTVARVLPYWEERIAPELKAGKRVLIGAHGNSLRALVKHLSKLSDEEIVKFELPTGQPLVYELNDDLTPKDRYFLNER

SEQ ID NO: 49501 - protein, 343 aa, Arabidopsis thaliana
MGPKGSALICGYTTYHRLLESSLAQLKKKEDCLVCPTGFAANMAAMVAIGSVASLLAASGKPLKNEKVAIFSDALNHASIIDGVRLAERQGNVEVFVYRHCDMYHLNSLLSNCKMKRKVVVTDSLFSMDGDFAPMEELSQLRKKYGFLLVIDDAHGTFVCGENGGGVAEEFNCEADVDLCVGTLSKAAGCHGGFIACSKKWKQLIQSRGRSFIFSTAIPVPMAAAAYAAVVVARKEIWRRKAIWERVKEFKELSGVDISSPIISLVVGNQEKALKASRYLLKSGFHVMAIRPPTVPPNSCRLRVTLSAAHTTEDVKKLITALSSCLDFDNTATHIPSFLFPKL

SEQ ID NO: 49502 - protein, 310 aa, Arabidopsis thaliana
MAQLPPKIPNMTQHWPDFSSQKLSPFSTPTATAVATATTTVQNPSWVDEFLDFSASRRGNHRRSISDSIAFLEAPTVSIEDHQFDRFDDEQFMSMFTDDDNLHSNPSHINNKNNNVGPTGSSSNTSTPSNSFNDDNKELPPSDHNMNNNINNNYNDEVQSQCKMEPEDGTASNNNSGDSSGNRILDPKRVKRILANRQSAQRSRVRKLQYISELELLSPRVAFLDHQRLLLNVDNSALKQRIAALSQDKLFKDAHQEALKREIERLRQVYNQQSLTNVENANHLSATGAGATPAVDIKSSVETEQLLNVS

SEQ ID NO: 49503 - protein, 130 aa, Salmonella typhimurium
PAVTIALWLFACFPKQKVLPYIIAQFAGAFGGALLAYVLYSSLFTEFETAHHMVRGSVESLQLPSIFSTYPAAALNVWQAALVEVVITSILMGMIMALTDDGNGIPKGPLAPLLIGILVAVIGASTGPLT

SEQ ID NO: 49504 - protein, 201 aa, Wolbachia endosymbiont of Drosophila ananassae
GPTHQPIEHLASLRAIPNLYVFRPADAVETLECVSIALEKKESPPLFALSRQNVSYMRKFYSDIDQSANLSKFGAYILCECSKELKVTIFATGSEVEIAVEAREKLQEKGIGTRIVSMPCWRLFDEQSDEYKAAILNNDSIKVAIEAGSEMGWHKYIGSNGIFIGMKSFGESAPYKTLYEHFNISADHVVKCVCEKLVYIQ

SEQ ID NO: 49505 - protein, 130 aa, Salmonella typhimurium
PAVTIALWLFACFPKQKVLPYIIAQVAGAFGGALLAYVLYSSLFTEFETAHHMVRGSVESLQLASIFSTYPAAALNVWQAALVEVVITSILMGMIMALTDDGNGIPKGPLAPLLIGILVAVIGASTGPLT

SEQ ID NO: 49506 - protein, 130 aa, Salmonella typhimurium
PAVTIALWLFACFPKQKVLPYIIAQFAGAFGGALLAYVLYSSLFTEFETAHHMVRGSVESLQLASIFSTYPAATLNVWQAALVEVVITSILMGMIMALTDDGNGIPKGPLAPLLIGILVAVIGASTGPLT

SEQ ID NO: 49507 - protein, 338 aa, uncultured archaeon GZfos34H10
MATYAHNLFLDSNLGDSGLFPGTKAMEDELIRMIGSLLGNENAHGYISTGGTESNIQAIRAIRNRKRKEGLQEMNIIVPKTAHFSFDKIESLLCLEVKKAGLDDELRVDVNLVKELIDDNTISIVGIAGTTEFGQIDPIKELADIAHNSDIFLHVDAAFGGFVIPFLDAEYQFDFSLDAVSSISVDPHKMGMSTIPAGCILFRDESYLADLAVNTPYLTTNEQCSLIGTRSGAPVAATYAVLKYLGRNGLRAIVDECMLLTRMLVRGAKAMDIYPVIEPVMNVVTLRFPDVDRVAKALEARGWQVSTTRAPKALRLVIMPHVTEDTIEMFLNDLACVT

SEQ ID NO: 49508 - protein, 159 aa, Arabidopsis thaliana
MDLGRFPIISILEDMLEVPEDHNNEKTRNNPSRVYMRDAKAMAATPADVIEHPNAYAFVVDMPGIKGDEIKVQVENDNVLVVSGERQRENKENEGVKYVRMERRMGKFMRKFQLPENADLDKISAVCHDGVLKVTVQNFLLRNQRNQRQFKFKLLEFVL

SEQ ID NO: 49509 - protein, 130 aa, Salmonella typhimurium
PAVTIALWLFACFPKQKVLPYIIAQFAGAFGGALLAYVLYSSLFTEFETAHHMVRGSVESLQLASIFSTYPAAALNVWQAALVEVVITSILMGMIMALTDDGNGIPKGPLAPLLIGILVAVIGASTGPLT

SEQ ID NO: 49510 - protein, 409 aa, Arabidopsis thaliana
MAAEMALVKPISKFSSPKLSNPSKFLSGRRFSTVIRMSASSSPPPPTTATSKSKKGTKKEIQESLLTPRFYTTDFEEMEQLFNTEINKNLNEAEFEALLQEFKTDYNQTHFVRNKEFKEAADKLQGPLRQIFVEFLERSCTAEFSGFLLYKELGRRLKKTNPVVAEIFSLMSRDEARHAGFLNKGLSDFNLALDLGFLTKARKYTFFKPKFIFYATYLSEKIGYWRYITIYRHLKENPEFQCYPIFKYFENWCQDENRHGDFFSALMKAQPQFLNDWQAKLWSRFFCLSVYVTMYLNDCQRTNFYEGIGLNTKEFDMHVIIETNRTTARIFPAVLDVENPEFKRKLDRMVVSYEKLLAIGETDDASFIKTLKRIPLVTSLASEILAAYLMPPVESGSVDFAEFEPNLVY

SEQ ID NO: 49511 - protein, 255 aa, Arabidopsis thaliana
  misc_feature (15)..(15): Xaa can be any naturally occurring amino acid
  misc_feature (100)..(100): Xaa can be any naturally occurring amino acid
  misc_feature (239)..(239): Xaa can be any naturally occurring amino acid
  unsure (1)..(255): unsure at all Xaa locations
LRCSRGSYLVETCSXNPSSLGPSSSVSFSTGKPIKRAYDGLLLDAGGTLLQLSKPVHETYASLGQKYGLKTTPAEIKEGFKRVFSAPWPEKLRYQVPKCXGDGRPFWKLVVSEATGCSDNDYFEDVYQYYANGEAWHLPEGAYETMSLLKDAGVKMAVVSNFDTRLRKLLKDLNVIDMFDAVIVSAEVGYEKPDERIFKSALEQISVDVNRAVHVGDDEGADKGGANAIGIACWLWGEXVQTFSDIQKRILVSEL

SEQ ID NO: 49512 - protein, 322 aa, Silicibacter sp. TM1040
MAASERRRLLITRPMTAAVEARARAELDVEIRQETTPLSPEEMRQSLGAFDLVMPTLGDAYSADVFAAVPQPRCRLLANFGVGFNHIDAEAARAAGVEVTNTPGAVTDATADIALTLMLMTARRAGEGERLVRSGQWQGWHPTQMLGLHLSGKRLGVVGLGRIGDAIARRAHFGFGMEISYLARSDKETGYPATRASNLIELAASVDMLVVAVPGGAETRHLINADVLAALPSHAHLVNIARGEVVDEAALITALQAGQIAGAGLDVYEFEPKVPAELRAMEQVTLLPHLGTATEEVRSAMGHMALDNCVAFLTGAPLPNPV

SEQ ID NO: 49513 - protein, 258 aa, Arabidopsis thaliana
MFLKVHEIAFLFGLLGNIVSFGVFLSPVPTFYGIYKKKSSKGFQSIPYICALASATLLLYYGIMKTHAYLIISINTFGCFIEISYLFLYILYAPREAKISTLKLIVICNIGGLGLLILLVNLLVPKQHRVSTVGWVCAAYSLAVFASPLSVMRKVIKTKSVEYMPFLLSLSLTLNAVMWFFYGLLIKDKFIAMPNILGFLFGVAQMILYMMYQGSTKTDLPTENQLANKTDVNEVPIVAVELPDVGSDNVEGSVRPMK

SEQ ID NO: 49514 - protein, 356 aa, Agrobacterium tumefaciens str. C58
MYRSKLAWKKPSSISMHCSPAGKWRRPYEMARTILVTGGAGFIGSHICKALAQSGFKPIAYDNLSTGHADSVRWGPLIEGDILDGVLLKATLREFSPAFVIHCAANAYVGESVEDPRKYYRNNVGGSLSLLDACLDQNIGGLVFSSSCATYGVPQQLPIREETAQMPVNPYGRTKLIFEMALEDYAAAYGLRFVALRYFNAAGADPDGELYERHEPETHLIPRALMAAAARLPQLDVFGADYDTSDGTCIRDYIHVSDLADAHLAAVNYLSDGGETLRVNLGSGHGTSVGDIIRAIHRVTGQEVPVHFGARRAGDPPALFADIRRAEETLGFTPKRSDIDTIIRTAGPGFGLEARS

SEQ ID NO: 49515 - protein, 436 aa, Zea mays
RVSYFYEPSIGDYYYGQGHPMKPHRIRMAHSLVVHYGLHRLLELSRPYPASEADIRRFHSDDYVAFLASATGNPGVLDPRAIKRFNVGEDCPVFDGLFPFCQASAGGSIGAAVKLNRGDADITVNWAGGLHHAKKSEASGFCYVNDIVLAILELLKFHRRVLYVDIDVHHGDGVEEAFFTTNRVMTVSFHKYGDFFPGTGHITDVGAAEGKHYALNVPLSDGIDDTTFRGLFQCIIKKVMEVYQPDVVVLQCGADSLAGDRLGCFNLSVKGHADCLRFLRSYNVPMMVLGGGGYTIRNVARCWCYETAVAVGVEPDNKLPYNDYYEYFGPDYTLHIQPKSVENLNTTKDLENIKNMILENLSKIEHVPSTQFHDRPSDPEAPEEKEEDMDKRPPQRSRLWSGGAYDSDTEDPDSLKSEGKDVTANFQMKDEPKDDL

SEQ ID NO: 49516 - protein, 230 aa, Desulfitobacterium hafniense DCB-2
MRFLAELVYFMNLAGKILGLIYLRRRMHVKIIILGGFLGSGKTSVLLQLAKYLITQERDNKSEIKVAILENEIGTVGIDDKILANAGFTVENLFAGCVCCTLAGELVSSVKKMQNELNPAWLIIEATGVAFPGSISKAIFEAIGVGAYILTIVDAKRWRRLVSAMEPLVAGQLEESSQVLVNKKDLVNASELAQVKISVQEYSRAAKVICISAKEEIPVQCWQDMISEMG

SEQ ID NO: 49517 - protein, 452 aa, Oryza sativa
MAPTAEVAAAPVQEQEKCNGGGGGGFRGAAVRCHPALSTEKKASIRGVVGELLGAAAAAAGAGEERRRSLISLGVGDASSHACFRRGGEFAADAVADAARSGVFDCYAPSCGFPAARRAVADHLSAGARHRTRDADVFMTAGGTGAITAIATVLGGAPGANVLLPRPGFAPYEAACELAGAEPRFYDLLPRRGWEADLAGVRAMADGATAAIVVINPNNPCGAVYSAQHLFQIAETARELGIPIIADEVYAHMVFGGSKFVPMATFAHITPVITIGALSKKFMLPGWRLGWLAFCDPNGALKHVRNATEMLLNVTSGPASIVQAAVPKILSNEHNEFHRNVVNLLESAADALYRRVNQIEALQCYSKPHGSMFMMVEVNTSLLFGVEDDMDFARELIKEESVLVLPGSVIGLKNWIRIFFGAPTSVILEACDRIEAFCQKRAVQVKLLKKKF

SEQ ID NO: 49518 - protein, 369 aa, Neurospora crassa
MVLLKSLVVASLAAAVAAKSAVLDLIPSNFDDVVLKSGKPTLVEFFAPWCGHCKNLAPVYEELATALEYAKDKVQIAKVDADAERALGKRFGVQGFPTLKFFDGKSEQPVDYKGGRDLDSLSNFIAEKTGVKARKKGSAPSLVNILNDATIKGAIGGDKNVLVAFTAPWCGHCKNLAPTWEKLAATFASDPEITIAKVDADAPTGKKSAAEYGVSGFPTIKFFPKGSTTPEDYNGGRSEADLVKFLNEKAGTHRTPGGGLDTVAGTIAALDEIVAKYTGGASLAEVAEEAKEAVKSLKNSAELKYADYYLRVLDKLSKSEGYATKEFARLEGILKKGGLAPAKVDELTVKVNVLRKFVEKAAEEAKEEL

SEQ ID NO: 49519 - protein, 523 aa, Rhodopseudomonas palustris CGA009
MHDRRPVLSTQSSHRPQSRSLLSARKFALMASVVAGLGAGAFGLGNGSVDLIATPAHAQEVSANVQPAQQPVGFADIVDKVKPSVISVKVNIADKMAKNEDREDFSFPPGSPMERFFRRFGGEMPPGLRGHRGGGMITGQGSGFFISADGYAVTNNHVVEGADKVEVTTDDGKTYKAKVIGNDPRTDLALIKVEGGSSFPYAKLSEGKPRIGDWVLAVGNPFGLGGTVTAGIVSAMGRDIGNGPYDDFIQIDAPVNKGNSGGPAFNTAGEVVGVNTAIYSPSGGSIGIAFSIPANTVKAVVEQLKDRGSVSRGWIGVQVQPVTPEIADSLGLKKAEGALVAEPQSNGPAAKAGIESGDVIVAVDGTSVKDARELARTIGAFAPGHAVKLTVFHKGKERELTLTLGELPNKIEASNNTDRGDRGGANQGLDLPKLGLTLAPASSVAGAGKDGVVVTDVDPKGAAADRGFKEGDVILEVAGKNVSSPADVRDVLATAKTENKNSVLVRVRSGGASRFVALPIAKG

SEQ ID NO: 49520 - protein, 164 aa, Anabaena variabilis ATCC 29413
MRRLFALILVICLSFSFAPPAKALGADLTPCAENPAFQALAKNARNTTADPQSGQKRFERYSQALCGPEGYPHLIVDGRLDRAGDFLIPSILFLYIAGWIGWVGRAYLQAIKKDSDTEQKEIQLDLGLALPIIATGFAWPAAAVKELLSGELTAKDSEITVSPR

SEQ ID NO: 49521 - protein, 496 aa, Cryptococcus neoformans var. neoformans JEC21
MVNVTYTDSSSDMIYTADDGTQYLYNLGDMSFVIAAMALVWIMVPGVGLFYSGLLRRKNALSMIFLSMAGVAVGSFQWFFWGYSLAFSDTGSKYIGDLRYFGLKGVLAEPSAGSDRIPALLFCVYQCMFCLITGVLAIGGFAERSRIGPVMVFLFCWLTLVYCPLACWTWNPNGWSFVMGGLDFAGGTPVHISSGTASLAIALYLGKRRGYGTERLAYKPHNTAFVVIGTVFLWFGWFGFNGGSALSANLRAVQACIVTNLSASVGGLVWMFLDYRLERKWSAVGFCSGAISGLVGITPAAGYVGSPAALAIGAITAIACNFATKLKFLIGVDETLDVFASHGIGGMVGCFLTGLFAQGSVAGFDGITDIPGGWVSHYWIQAGYQMADLTAGFAYTFVMTTIICWLLHFIPGLRLRASEEAEIIGIDDAYLGEFAYDYVGTDPELRLHRIDSKPQFTSGDVIAEVSASNGHESSTTEKVDPHATGNAAAGGGRVDV

SEQ ID NO: 49522 - protein, 283 aa, Arabidopsis thaliana
MSGLYNYNNFSPSRAASPQIRTPSSDVDSQYISQLLAEHQKLGPFMQVLPICSRLLNQEIFRITGMMPNQGFTDFDRLRHRSPSPMASPNLMSNVSGGGLGGWNGLPPERIGGPHGMAMEWQGAPASPSSYPVKRILRLDLPVDTYPNFNFVGRLLGPRGNSLKRVEATTGCRVYIRGKGSIKDPEKEEKLKGKPGYEHLNEQLHILIEADLPIDIVDIKLRQAQEIIEELVKPVDESQDYIKRQQLRELALLNSNLRENSPGPSGSVSPFNSNAMKRPKTGR

SEQ ID NO: 49523 - protein, 333 aa, Zea mays
  misc_feature (187)..(187): Xaa can be any naturally occurring amino acid
  unsure (1)..(333): unsure at all Xaa locations
MGSQTLASQDGGSGGDVGGSAGAGQHGQMQSLARQGSLYNLTFDEVQSHLGEPLHSMNLEELLKSVFPDGLDPDGGTTSQYEQSSGLLRQGSITMLLELSKRTVDEVWKGIQDVPKRNLGEGCQQRQERERQPTLGKMTLEVFLVKAGVVAEGYLKDLNDVCNVDQVSSAGAAGLTAGGQWLDHYQXRVTAIEPHQHGQHSLPGAYMPGRLALQPLNVGPGAILESFSDGHINSPMMAALSDSPTPGRKRGSPGDVTDKLMERRQKRMVKNRESTARSTARKQAYTNELENKVSRLEEANEKLKKQKELEHILSSAPLPEPKYQLRRTDSATF

SEQ ID NO: 49524 - protein, 414 aa, Kluyveromyces lactis NRRL Y-1140
MLEAIAYAAAELLFKRQDVVTDGDTTEVDTHDHDEEDEDHVECESDNDYDGKDNMRVCALFIILISGGLGSYFPILSSRYSFIRLPDWCFFIAKFFGSGVIVATGFIHLLEPAADALGEECLGGTFADYPWAFGICLMSLFALFLSECVARYYTNKSYGFQNDHVHSHFPSSKDQKSLEDEDDEDSDKYNQVVDEENVSLTVANNNNGAEITATNPHPSMPGSNHFSHDKSHQDLATIGTPAQMTSKEKYQNQLLSVFILEFGIIFHSVFIGLALAVTGNDEFNTLFIVLVFHQMFEGMGLGARIAEVSWAKKHRFTPWLLAAGFTLTTPIAIAIGIGVRHSYAPGSRTALIANGCFDAISAGILIYTGLVELMAHEFLYSDNFKGENGLKKMLWAFFTMCWGAGLMALLGKWA

SEQ ID NO: 49525 - protein, 140 aa, Novosphingobium aromaticivorans DSM 12444
MAVTRTFSIIKPDATRRNLTGAVTKMLEEAGLRVVASKRIHMSREQAEGFYAVHKERPFFGELVEFMISGPVVVQVLEGEDAVKRNRDIMGATNPKDAAPGTIRKELAESIEANSVHGSDSEENAAIEIAYFFKPEEIVG

SEQ ID NO: 49526 - protein, 130 aa, Salmonella typhimurium
PAVTIALWLFACFPKQKVLPYIIAQFAGAFGGALLAYVLYSSLFTEFETAHHMVRGSVESLQLASIFSTYPAAALNVWQAALAEVVITSILMGMIMALTDDGNGIPKGPLAPLLIGILVAVIGASTGPLT

SEQ ID NO: 49527 - protein, 130 aa, Salmonella typhimurium
PAVTIALWVFACFPKQKVLPYIIAQFAGAFGGALLAYVLYSSLFTEFETAHHMVRGSVESLQLASIFSTYPAAALNVWQAALVEVVITSILMGMIMALTDDGNGIPKGPLAPLLIGILVAVIGASTGPLT

SEQ ID NO: 49528 - protein, 396 aa, Rhodococcus sp.
MVDTRLPVTVLSGFLGAGKTTLLNEILRNREGRRVAVIVNDMSEINIDSAEVEREISLSRSEEEKLVEMTNGCICSTLRDLLSEISALARSGRFDYLLIESSGISEPLPVGETFTFIDTDGHALSSPDSTPWSPLVDANSFLRDYTAGGRVEADAPEDERDIADLLVDQIEFADVILVSKADLISAPAPGRIDGVLRSLNEPLRLFDDGLGRIPLDTILDTGLFSLEKAAQAPGWLQELQGEHTPETEEVRWCTASTSHPSTPNVCMTSSAASGPTESYSGPRRSTGMTRAGSPRSDYFQAGHLIRHGYVEPLVEVLPRDEWPADDYRRDGILDKWEEPVGDCRQELVFIGQAIDPSLLHRELDACLLTTAEIELGPRRVDHLERPPGAGYTDQTV

SEQ ID NO: 49529 - protein, 130 aa, Salmonella typhimurium
PAVTIALWLFACFPKQKVLPYIIAQFAGAFGGALLAYVLYSSLFTEFETAHHMVRGSVESLQLASIFSTYPAAALNVWQAALLEVVITSILMGMIMALTDDGNGIPKGPLAPLLIGILVAVIGASTGPLT

SEQ ID NO: 49530 - protein, 459 aa, Pseudomonas putida KT2440
MSTHSSTVQNDLAALIHPNTNLAQHREVGPLVIARGDGVRVFDEQGNAYIEAMSGLWSAALGFSEQRLVDAAVEQFKQLPYYHSFSHKTNAPAAALAAKLAALAPGDLNHVFFTNSGSEANDSVVKMVWYVNNALGRPAKKKFISRQQAYHGATVAAASLTGIPSMHRDFDLPAIPVHHLTCPNFYRFARPGESQEAFTVRLANELERYILAEGPETIAAFIGEPVIAAGGVIPPPTGYWAAIQAVCKRYDILVVIDEIITGFGRLGTMFGSQLYGIQPDIMVLSKQLTSSYQPLAAVVVSDAMNDVLVSQSQRLGAFAHGLTCTGHPVATAVALENIRIIEERDLVGHVQHLAPVFQRHLRAFEDHPLVGNVRGVGLMGGIELVADKATRQPFAQPGTLGGYVFKQAHKHGLIIRAIYDTIAFCPPLITTQDDIEAIFSAFERTLADATDWARSQHLL

SEQ ID NO: 49531 - protein, 581 aa, Oryza sativa
  misc_feature (487)..(487): Xaa can be any naturally occurring amino acid
  misc_feature (506)..(506): Xaa can be any naturally occurring amino acid
  misc_feature (524)..(524): Xaa can be any naturally occurring amino acid
  misc_feature (564)..(564): Xaa can be any naturally occurring amino acid
  unsure (1)..(581): unsure at all Xaa locations
GRRRRRRGLPAEFWKKISPGEPYRIILGDVRDKLYNTCERARQILSKGISSIPEDQTYTNVEQFLEPLELCYRSLCDCGDKLIADGRLLDLMRQVSTFGLSLVKLDIRQESERHTDAMDAITTHLGIGSYREWPEERRQEWLVSELRGRRPLFGPDLPQSEEVADVLGAFRVIAELPADSFGAYIISMATAPSDVLAVELLQRECGVKKPLRVVPLFEKLADLQQARATMELLFSVDWYKERIDGKQEIMIGYSDSGKDAGRLSAAWQLYKAQEEIVGVAERHGVKLTIFHGRGGTVGRGGGPSHLAILSQPPNTVNGSLRVTVQGEVIEKSFGEENLCFRTLQRFTAATLEHGMNPPVSPKPEWRRLLDDMATVATDEYRSIVFQEPRFVEYFRAATPETEYGRMNIGSRPSKRKPGGGIESLRAIPWIFAWTQTRFHLPVWLGFGAAFRHAMQQSDAGGGLATLREMYDEWPFFRVTIDLLEGGXVPSFVGIAALYDELLVPDXDLRPFGEQLRANYVETQXLLLQVAGHKDLLESDPYLRQRLMLRDSYITALNVCQAVHXLSRIRDGGFRPETRAPL

SEQ ID NO: 49532 - protein, 954 aa, Polaromonas sp. JS666
MVISARARKVSENAKDGTPGKTGTRARDNERPLVEDIRLLGRILGDVIREQEGVTAYELIEQVRKLSVAFRRDADQEADKALKKLLKGLSGEQTVSVIRAFTYFSHLANLAEDRHHIRRRAVHERAGDTQEGSIEVALARLRWAGISPKTIATTLAHSFVSPVLTAHPTEVQRKSILDAERDIAQLLTARDDIKALALATNAAKDALTPRELAANEAQLRARVMQLWQTRLLRFSKLTVADEIENALSYYEATFLREIPKLYANLERELGNQPVHSFLRMGQWIGGDRDGNPNVSADTLNYALARQAEVALRHYLTEVHYLGGELSLSAMLVAVSPGMQALAESSPDTNEHRKDEPYRRALTGVYARLAATLKELTGGEAARHAVAPQNAYARAEDFLADLRTIETSLRSNHGEALIAQRLHPLIRAVEVFGFHLATVDLRQSSDKHEEVVAELLAVARIEPRYPSLDEAAKRALLIRLLNDARPLRVISTIYSAHAQSELAIFEAARTARARFGKEAIRHYIISHTETVSDLLEVLLLQKEVGLMHRTLDDKATNDLIVVPLFETIEDLRNAAPIMREYYALPGIAQLVQRSGAEQDIMLGYSDSNKDGGIFTSNWELYRAEIALVELFDQLANSHNIQLRMFHGRGGTVGRGGGPSYQAILAQPPGTVRGQIRLTEQGEVIGSKYANPEIGRRNLETLVAATLEATLLQPTKPATKAFLQAAAELSQASMAAYRALVYDTPGFNEYFFGATPIREIAELNIGSRPASRKASQKIEDLRAIPWGFSWGQCRLTLPGWYGFGAAIEKMLDAGGTPATRKEALALLQKMYKQWPFFRTLLSNMDMVLAKSDLALASRYAELVADARLRKKVFTAIEAEWHRTAEALTLITGEKQRLAGNAALQRSIRHRFPYIDPLHHLQVELVRRYREGKADQKVQTGIHISINGIAAGLRNTG

SEQ ID NO: 49533 - protein, 425 aa, Oryza sativa (japonica cultivar-group); identical to SEQ ID NO: 976

SEQ ID NO: 49534 - protein, 596 aa, Arabidopsis thaliana
MVRNSMKAEYDIDHLPHQTFYGDYSKTLVPMNKNSQIITKIKPKIRIIHIFAPEIINTDVKNFRTLVQSLTGKPEITKTGSKKKITNTNFPAPPGLPQDSGQEHTAELDNRIIGSHVVKEEWGSSSNTNTYFDFDGLIDLDEDDNIFSSRCVSAISRLRSRADLKSQMQEIIPEQQDRLKKLKSEHGKVPVGNITVDMVLGGMRGMTGLLWETSLLDADEGIRFRGMSIPECQKILPSAESGEEPLPESLLWLLLTGKVPTKEQANALSTELAHRAAVPDYIYKAIDALPSTAHPMTQFASGVMALQVQSEFQKAYEQGDISKSKYWEPTFEDALNLIARVPVVASYVYRRMYKDGSIIPLDDSLDYGANFSHMLGFDSPQMKELMRLYVTIHSDHEGGNVSAHAGHLVGSALSDPYLSFAAALNGLAGPLHGLANQEVLLWIKLVVEECGESISKEQLKDYVWKTLNSGKVVPGYGHGVLRKTDPRYICQREFALKHLPDDPLFQLVSKLYEVVPPILTELGKVKNPWPNVDAHSGVLLNYYGLTEARYYTVLFGVSRSLGICSQLIWDRALGLPLERPKSVNMDWLDNFTRLNR

SEQ ID NO: 49535 - protein, 481 aa, Arabidopsis thaliana
  misc_feature (7)..(7): Xaa can be any naturally occurring amino acid
  unsure (1)..(481): unsure at all Xaa locations
MALKALXYDTLNENVKKCQYAVRGELYLRASELQKEGKKIIFTNVGNPHALGQKPLTFPRQVVALCQAPFLLDDPNVGMLFPADAIARAKHYLSLTSGGLGAYSDSRGLPGVRKEVAEFIQRRDGYPSDPELIFLTDGASKGVMQILNCVIRGNGDGILVPVPQYPLYSATISLLGGTLVPYYLDESENWGLDVANLRQSVAQARSQGITVRAMVIINPGNPTGQCLSEANIREILKFCYNEKLVLLGDEVYQQNIYQDERPFISSKKVLMEMGSPFSKEVQLVSFHTVSKGYWGECGQRGGYFEMTNLPPRVVEEIYKVASIALSPNVSAQIFMGLMVNPPKPGDISYDQFARESKGILESLRRRARLMTDGFNSCKNVVCNFTEGAMYSFPQIRLPTGALQAAKQAGKVPDVFYCLKLLEATGISTVPGSGFGQKEGVFHLRTTILPAEDEMPEIMDSFKKFNDEFMTQYDNNFGYSKM

SEQ ID NO: 49536 - protein, 246 aa, Neurospora crassa
MGKITTLLFDCDNTLVLSEEVAFEGCADLINQIAATKNIPLEKPFTGESLIVEFVGQNFRGMLRSLQERYGFPLTDEEMEMYVKKEEDVVIAKIQEKLSPCPNVDGVLERLAAEGKYELAVVSSSALRRVKASIEKVGQDKYFGDRVFSAATSLNPPTSKPDPAIYLHALKELGKKAEECLAIEDSKSGTLSAARAGIKVIGYVGPYKAEERLKMEKVLAQAGASIIMRDWNQFEGYLAAIEKGDF

SEQ ID NO: 49537 - protein, 185 aa, Arabidopsis thaliana
YPYIAGMGIYVVSRDVMLDLLRNQFPGANDFGSEVIPGAPFLGLRVQAYLYDGYWEDIGTIEAFYNANLGITKKPVPDFSFYDRSAPIYTQPRYLPPSKMLDADVTDSVIGEGCVIKNCKIHHSVVGLRSCISEGAIIEDSLLMGADYYETATEKSLLSAKGSVPIGIGKNSHIKRAIIDINARI

SEQ ID NO: 49538 - protein, 336 aa, Glycine max
  misc_feature (35)..(35): Xaa can be any naturally occurring amino acid
  misc_feature (43)..(43): Xaa can be any naturally occurring amino acid
  misc_feature (276)..(276): Xaa can be any naturally occurring amino acid
  unsure (1)..(336): unsure at all Xaa locations
MFYIFSITVGGLLNATCGNVTELIIAIFALSSNKXAVVKYSLXGSILSNLLLVLGTSLLCGGIANLKVEQKYDRRQADVNSLMLLLGLLCYLLPMLFKYSGASAALTVDPSLHLSRASSIVMLIAYVVYIVFQLWTHRELFEEEDDGKDGEDGSEEQAVIGLWSGIAWLVGMTEFIAVLSEYVVDTIEDASDSWGLSVSFLSIILLPIVGNAAEHAGAIIFAFKNKLDISLGVALGSATQIAMFVVPLCVIVAWIMGINMDMNFNLLETGSLALAXIIVTGFTLQDGTSHYMKGLVLLLCYIVIGACFFVQRTPFNNQADVTNITLKPATNAVLSA

SEQ ID NO: 49539 - protein, 248 aa, Burkholderia vietnamiensis G4
MYKLVLIRHGESTWNKENRFTGWVDVDLTEQGRNEAYQAGALLKEAGYTFDIAYTSVLKRAIRTLWHVQDKMDLMYLPVVHSWRLNERHYGALSGLNKAETAAKFGDDQVLVWRRSYDTPPPALEPTDERAPFSDPRYAKVPREQLPLTECLKDTVARVLPLWNESIAPAVRAGKQVLIAAHGNSLRALIKYLDGISDSDIVGLNIPNGVPLVYELDENLKPIQHYYLGDQDAIAKAQAAVAKQGKAG

SEQ ID NO: 49540 - protein, 512 aa, Apium graveolens
MENGTKELNKQPPPSAAMQVQTSPPKLPIATWKLILVAAIAAGVQFGWALQLSLLTPYVQLLGIPHKWAAYIWLCGPISGMLVQPIVGYYSDRCQSSFGRRRPFIASGAGCVAISVILIGFAADIGYKAGDDMTKTLKPRAVTGFVIGFWILDVANNMLQGPCRALLADLCNGDTRRMRSANAFYSFFMAVGNILGYAAGSYNNLYKLFPFSKTHACDLYCANLKSCFIISIVLLIFITVLALTVVREKQWSPDEADEEPPSSGKIPVFGELFGALKDLPRPMLMLLVVTCLNWIAWFPFILFDTDWMGREIYGGTAGQGKLYDQGVRVGSLGLLLNSVVLGLTSIAVEYLVRGVGGVKILWGLVNFLLAIGLVMTVVVSKVAQHQRQHGANGQLLPPSAGVKAGALSLFSILGIPLSITFSIPFALASIYSSGSGAGQGLSLGVLNLAIVVPQMIVSVLAGPFDSLFGGGNLPAFVVGAISAAISGVLAIVLLPKPSKDAAAKLTLSGPYH

SEQ ID NO: 49541 - protein, 433 aa, Arabidopsis thaliana
MVMQDLKSQMQEIIPEQQDRLKKLKSEQGKVPVGNITVDMVLGGMRGMTGLLWETSLLDADEGIRFRGMSIPECQKILPSAESGEEPLPESLLWLLLTGKVPTKEQANALSTELAHRAAVPAIDALPSTAHPMTQFASGVMALQVQSEFQKAYEQGDISKSKYWEPTFEDALNLIARVPVVASYVYRRMYKDGSIIPLDDSLDYGANFSHMLGFDSPQMKELMRLYVTIHSDHEGGNVSAHAGHLVGSALSDPYLSFAAALNGLAGPLHGLANQEVLLWIKLVVEECGESISKEQLKDYVWKTLNSGKVVPGYGHGVLRKTDPRYICQREFALKHLPDDPLFQLVSKLYEVVPPILTELGKVKNPWPNVDAHSGVLLNYYGLTEARYYTVLFGVSRSLGICSQLIWDRALGLPLERPKSVNMDWLDNFTRLNR

SEQ ID NO: 49542 - protein, 501 aa, Glycine max
MGSAAKYELPFKLNNPDLLHNESFVHGKWVKSKSGKTFEVADPGTGKTWIDCPTNDASDVDEAVKSSHECFLEYKKISPRQRAQMLYKWDALIKENREDIATILVYETGKPRAEAYGEIDYSTGFTWWFAGEAERIQGSVFTPALPNRRIFTIKQPLGVAAALVPWNFPIAMILRKAGAALAAGCTMIVKPSPETPITVLALAYLADKAGFPKGALNVLTTDLDKTPELSEALCRHPLVNKVTFTGSTRVGKLVAKICSDNLKKVTLELGGNCPVLIFDDANIEQAMSQVFALKFRHAGQACITANRIYVQSGIFDKFLERWNAEAQKIVVGHGSDEKTTMGPVTTPRAVDKALSLVEDARKKGAKIHTGGNKVEKNGGYFFEPTVITGVTPDMDIAKEEVFSPISTFIKFETEDEVVKAANDTSMGLASYLFTKNVDRMWRLFENLEAGMIGLNTGNSSAAESPFGGIKQSGYGKESGKDVAVNEYMITKTGTFTLEDQS

SEQ ID NO: 49543 - protein, 278 aa, Triticum aestivum
PPRGPPITLRLFRRSIEQVCTKKQAGTGPEFPGYRRPTRPRRTNKKEKGKKSHQTLFRILLLGGSRFVRGSPAAAAAAMARKRKTDAAPRLDEADRTLYSSFCGAANSLSQLYSQAMAQQKLSFQAGERHALEKLHQWILRKHDEESRLTVADIMSHIQHEIDYGGTDAHVSPRVHQHPMSVNPFTSIQPSAGSYAQATSGHAPRPSLSDQSKNTIFSNALSSPVRRSLQTYHLTQGAGNGGRNTEANSAGQNREANSASSNDTSMDMVSDSAGNGYY

SEQ ID NO: 49544 - protein, 396 aa, Gossypium hirsutum
MALNFNAIASKSQKLPCFALPPKATLRSPKFSMISTIPSGSKEVGNLKKPFTPPKEVPVQITHSMPPHKIEIFKSLEGWAENNILTHLKPVEKCWQPADFLPDPNSDGFHEQVKELRERAKEIPDDYFVVLVGDMITEEALSTYQTMLNTLDGTRDETGASLTPWAIWTRAWTAEENRHGDLLNKYLYLSGRVDMRQIERTIQYLIGSGMDPHTENSPYRGFIYTSFQERATFISHGNTGRLAKEYGDINLAQICGSIASDEKRHETAYTKIVEKLFEIDPDETVLAFADMMKKKIAMPAEFIYDGRDYNLFDHYSAVAQRIGVYTAKDYVDIVEHLVDRWKVKELAGLSAEGRKAQDYLCSLPSRIRRLEERAQEKAKEAPSVPFSWIFDREVKL

SEQ ID NO: 49545 - protein, 442 aa, Burkholderia pseudomallei K96243
MTEHVSQTPDLSAFWMPFTANRQFKEAPRLLVAAKGMYYTSHDGRRILDGTAGLWCVNAGHGRDEIVAAVQAQAEEMDFAPTFQMGHPKAFEAATKIARHTPGDLKHIFFTNSGSEAVDTALKIALAYHRARGEGQRTRFIGRERGYHGVGFGGISVGGIAPNRNAYSGALLPSVDHLPHTLNLKEAAFSKGQPAWGAQLADELERLVALHDASTIAAVIVEPVAGSTGVLIPPRGYLERLRELCDKHGILLIFDEVITGWGRLGAPFAAQFFGVTPDLLTMAKGTNNAAVPMGAVAASGAIHDAIVGGAPAGIELFHGYTYSGHPLAAAAAVATIDLYEREGLLTRAARIAPIFEREIHKLKDARHVIDVRNLGIVGGVELTPRDGKPGARAYEVFVKCFEKGAMIRYTGDILAFSPPLIVEEAQIVELFSIVAQALKETE

SEQ ID NO: 49546 - protein, 399 aa, Zea mays
MGNCGTREENAVVAAHAQVQQLHLKHTCMSSDISDPSTPRKVEDAKNISIYNDVIAFTLFELETITKSFRVDYVLGEGGFGTVYKGYIDENVRVGLKSLPVAVKVLNKDGHQGHREWLTEVNCLGQLRHPNLVKLIGYCCEDDHRLLVYEFMFRGSLENHLFRKTATPLPWGTRMMSIALGAAKGLACLHNAQRPVIYRDFKTSNFGLSSDYTAKLSDFGLAKDGPEGDQTHVSTRVMGTYGYAAPEYVMTGHLTARSDVYSFGVVLLELLTGRKSIDKSRPSREQSLVDWALPKLNDKRRLLQIIDPRLEGQYSARAAHKSCSLAFYCLSQNPKARPLMSDVVETLAPLQQGGGGGSDASSGLPDCRGRRRLTGNSVVHFRAIPNPKCTPVVPACRVR

SEQ ID NO: 49547 - protein, 175 aa, uncultured archaeon GZfos19A5
MGKKPARKYTKVTGHAYVRKKYMGGVPGSKIALFDMGNLSMGMDFPVALSLVAKEACQIRHNALEAARIFANRYLVKEVGRNNFYLKIRPYPHHVLRENKIASGAGADRVSSGMRHAFGKAVSSAARVKPGQRILSVGVEAQNFDDAKEALRRASYKLPTPCRFIIDKGEELLGV

SEQ ID NO: 49548 - protein, 625 aa, Ustilago maydis 521
MSWRSNAQRTGMNAQPLQGARRWGGAGGAGEGPSSSGSPPSSYHQPSHPYQSSYSHQSQPYNAAPAPPTSSSSSSSNPRDAALAAAAAVAASIGIKRDRDRSSDAPGSNSYAAPSLLTSASTADGSGADAGPRKRKSRWGDANDKITIPTAIGANVSAQELDKYAIQVRLDEISRKLRSGDFVPPDRERSPSPPPTYDNQGRRTNTREVRYRKKLEDERVALVDRQLKLDPNFRPPSDYHAIKRNQRPTEKVYLPIKEFPEIKFFGLLVGPRGNTLKTMERQSGAKISIRGKGSVKTGKGKMDADEDEEEMHCVVTADDEASVKKCIKLINQVIETAASTPEGENDHKRNQLRELAALNGTLRDDENQLCKNCGNKGHRAFECPEQRNWTAHIICHRCGGQGHLARDCTQGRAGAFNGAPPGAAGTGNRQFDSEYANLMAELGEPAAAVDGAATAAGGAVGGAAVGPDGKKIPPWRNPEVWSQPGFGAPRGGDAGRGGWGHRGGYNNRGDRAGYNQHQQQQHPHAYHQQQQAYPAYDQSAPTAAPGGAENADQQHRDYSAEWAAYYAAQAAAGGAQGADPSAAAAGTTAAAEGAVDYSKEWEEYYRMQAAAAAQDGSAYAAGTQA

SEQ ID NO: 49549 - protein, 557 aa, Zea mays
  misc_feature (132)..(132): Xaa can be any naturally occurring amino acid
  unsure (1)..(557): unsure at all Xaa locations
RVQQDTLRKILELNGDAEYLNRFNLGRRTDSKSFKSCIPLCVHSDIESYIQRIADGDDSPVLTGEAHHFPLLKGKPKFLPFNDELLESTFQIFRTSYAFRNREYPIVNGQALQFVYGSKQVFTQGGILAATXTTNLYMSQRFKEAMKDVMTQCCSPDEVIFGPDFHQSLYCHLLCGLIYSDEIQFVFSPFAHSLVHAFHSLEEVWEDLCADIRDGVLSKRVTAPSIRQAVSKILRPNPELASSIYIKCQSLSNWYGVIPTLWPNVKYIYGIMTGSMEPYLKKLRHYAGHLPLLSADYGASEGWVGSNVNPTLPPEEVTYAVLPNIAYFEFIPLEKPKWEETEICSSVHYIESEPVGLTEVEVGKIYEVVITNFAGLYRYRLGDIVKIAGFRNATPELQFICRRSLVLSVNIDKNTEKDLQLAVEAAEKLLAAEKLEVVDFTSLVDRSSEPGHYVVFWELSSDDGASEDVLSGCASCMDLAFADAGYVGSRKTQTIGALELRVLRKGAFAQVMNHYLSLGGAVSQFKTPRFVSQSNSKVLQILSRNVTRSYFSTAYGL

SEQ ID NO: 49550 - protein, 807 aa, Glycine max
  misc_feature (603)..(603): Xaa can be any naturally occurring amino acid
  unsure (1)..(807): unsure at all Xaa locations
MANHPLTHSHSFRERFDETLTGHRNEILALLSRLEAKGKGILQHHQVVAEFEEIPEESRKKLQDGVFGEVLRSTQEAIVLPPFVALAVRPRPGVWEYLRVNVHMLVVDELRPAEYLRFKEELVEGSSNGNFVLELDFEPFNASFPRPTLNKSIGNGVEFLNRHLSAKLFHDKESMQPLLEFLRLHSYKGKTMMLNDKVQSLDSLQHVLRKAEEYLISVAPETPYSEFENRFREIGLERGWGDTAERVLEMIQLLLDLLEAPDPCTLETFLGRVPMVFNVVILSPHGYFAQDNVLGYPDTGGQVVYILDQVRALENEMLNRIKKQGLDITPRILIITRLLPDAVGTTCGQRLERVYDTEYCDILRVPFRTEKGIVRKWISRFEVWPYLETYTEDVALELAKELQAKPDLIVGNYSDGNIVASLLAHKLGVTQCTIAHALEKTKYPESDIYWKKFEEKYHFSCQFTADLFAMNHTDFIITSTFQEIAGSKDTVGQYESHTAFTLPGLYRVVHGIDPFDPKFNIVSPGADMGIYFPYTETERRLTEFHSDIEELLYSSVENEEHICVLKDRNKPIIFTMARLDRVKNITGLVEWYGKNARLRELVXNLVVVAGDRRKESKDLEEKAEMKKMYGLIETYKLNGQFRWISSQMNRVRNGELYRVICDTRGAFVQPAVYEAFGLTVVEAMTCGLPTFATCNGGPAEIIVHGKSGYHIDPYHGDHAAEILVEFFEKSKADPSHWDKISQGGLKRIHEKYTWQIYSDRLLTLTGVYGFWKHVTNLERRESKRYLEMFYALKYRKLAESVPLAIEE

SEQ ID NO: 49551 - protein, 479 aa, Arabidopsis thaliana
MENKPSVLTDKYDVGRLLGQGTFAKVYYGRSILTNQSVAIKMIDKEKVMKVGLIEQIKREISVMRIARHPNVVELYEVMATKTRIYFVMEYCKGGELFNKVAKGKLRDDVAWKYFYQLINAVDFCHSREVYHRDIKPENLLLDDNENLKVSDFGLSALADCKRQDGLLHTTCGTPAYVAPEVINRKGYDGTKADIWSCGVVLFVLLAGYLPFHDSNLMEMYRKIGKADFKAPSWFAPEVRRLLCKMLDPNPETRITIARIRESSWFRKGLHMKQKKMEKRVKEINSVEAGTAGTNENGAGPSENGAGPSENGDRVTEENHTDEPTNLNAFDLIALSAGFDLAGLFGDDNKRESRFTSQKPASVIISKLEEVAQRLKLSIRKREAGLFKLERLKEGRKGILSMDAEIFQVTPNFHLVEVKKSNGDTLEYQKLVAEDLRPALSDIVWVWQGEKDELTSQQETEYQQQQQQEQQEQEEPLKF

SEQ ID NO: 49552 - protein, 364 aa, Zea mays
MEQATGVSGPEHIIDIPREIGPPASVSRSAGRENHEESNPVDRPSTRALVPALQAPSAIGAVPITGHTSGTRRNDNYVRRHRSPLNSGLWISIEVIVNFSQIVAAIVVLCVSRKEHPQAPLLEWVIGYTVGCFATLPHLYWRYIHRNIVNGEHESSHTPQGSAHNNSNEATHAASASERRRNAARNAVLANPRINALFDHFKMALDCFFAVWFVVGNVWIFGGRSSAADAPNLYREDTNNTRGASSESINALPTYKFKIKKRRHGSGSETEGQEGGILAAGTDKERSLSAEDAVCCICLAKYAHNDELRELPCAHCFHKDCVDKWLKINALCPLCKSEIVSSSGTSDARQSDQNTVPVQEIEMH

SEQ ID NO: 49553 - protein, 181 aa, Arabidopsis thaliana
YPYIAGMGVYVFKKEILLNLLRWRFPTANDFGSEIILLAKEFYVNAYLSNDYWEHIGTIRSFFEANLALTEHPGAFSFYDAAKPIYTSRRNLPPSKIDNSKLIDSIISHGSFLTNCLIEHSIVGIRSRVGSNVQLKDTVMLGADYYQTEAEVAALLAEGNVPIGIGENTKIQECIDKNARI

SEQ ID NO: 49554 - protein, 673 aa, Cryptococcus neoformans var. neoformans B-3501A
MLSRFLYSEFPTFVVVFKNRNYHTVARMSVNKVQDWDFEKFPIDLKKYKPFPLDPTKDKKLSQEQKDGLIANISLLRDVIVFFTATGAARGLAGHTGGAFDTIPEVVILLSFLLADQDKSKYVDILFDEAGHRVATQYLLSALDGHIPVEHLLHYREANSKLPGHPELGLTPGVKFSSGRLGHMWPLVNGVALAEKNKAVFILGSDGSQQEGDDAEAARLAVAQGLNVKLFVDDNDVTIAGHPSEYLKGYSVARTLEGHGLKVVEANGEDLDSLYSAIVEVMNHKGPAAVVTHRPMAPKIKGIEGSPHAHDAIKVEPAIEYLDARHPKCAAILRAIQPSNYAELLSGSTKERGACRVQFGEAVSAVLDKTSKEQNKAKVLVIDSDLEGSTGLSVIHKKHPEVFLSSGIMERGNFSAAAGWGAFNADRQGVFSTFSAFSEMIISELTMARLNFANVLTHFSHSGVDEMADNTCHFGINQFFLDNGLEDGYETRLYFAADCSQMDAIVDRVFYDKGLRFVFSTRSKVPWILKEDGSRFFDSDYKFVPGKDEVIRKGTKGYVVAYGEILYRALDAVDRLRKEGLDVGLINKSTLNVVDEDMIKEIGSTEFVFVAESLNRKTGLGSKFGTWLLERDLRPRYNYIGTSKEGCGGLGEQIGHQNLGSSDIALKVKQMIK

SEQ ID NO: 49555 - protein, 308 aa, Agrobacterium tumefaciens str. C58
MILCCGEALIDMLPRQTTLGEAGFAPYAGGAVFNTAIALGRLGVPSAFFTGLSDDMMGDILRETLRASKVDFSYCATLSRPTTIAFVKLVDGHATYAFYDENTAGRMITEAELPALGADCEALHFGAISLIPEPCGSTYEALMTREHETRVISLDPNIRPGFIQNKQSHMARIRRMAAMSDIVKFSDEDLAWFGLEGDEDTLARHWLHHGAKLVVVTRGAKGAVGYSANLKVEVASERVEVVDTVGAGDTFDAGILASLKMQGLLTKAQVASLSEEQIRKALALGAKAAAVTVSRAGANPPFAHEIGL

SEQ ID NO: 49556 - protein, 473 aa, Pseudomonas fluorescens Pf-5
MSGQNSHSGELKRGLKNRHIQLIALGGAIGTGLFLGSAGVLKSAGPSMILGYAICGFIAFMIMRQLGEMIVEEPVAGSFSHFAHKYWGGFAGFLSGWNCWILYILVGMSELTAVGKYVHYWWPDVPTWASAAVFFVMINAINLANVKVFGEAEFWFAIIKVVAIVGMIALGSYLLVSGHGGPQASVSNLWSHGGFFPNGVSGLVMAMAIIMFSFGGLEMLGFTAAEADKPKTVIPKAINQVIYRILIFYIGALVVLLSLTPWDTLLVTLNASGDAYSGSPFVQVFSMLGSNTAAHILNFVVLTAALSVYNSGTYCNSRMLLGMAEQGDAPKALAKIDKRGVPVMSILASALVTFVAVVLNYLIPQHALELLMSLVVATLVINWAMISYSHFKFRQHMERTGQTSLFKALWYPYGNYVCLAFVVFILGIMLMIPGIQISVYAIPVWVVFMWVCYCIKNKRSAQHALQAASASLK

SEQ ID NO: 49557 - protein, 499 aa, Burkholderia vietnamiensis G4
MRKLLMSLLMAGSLIAAGVGPALADDAASAAAASAPATTASDASAASAPAATDASAPAAATAPASGAADASAAAAASAPAAPAAPTAPFSVDSSKISAGDTAWMLTSSALVLFMTIPGLALFYAGMVRKKNVLATVMQSFAITALITVLWTVVGYSLAFTPGNGFIGGLSRVFLHGMNYIKGDKATTLTVSHLATTIPESVYFVYQMTFAIITPALICGAFADRMKFSAMLVFMALWSLIVYVPIAHMVWEPTGWLSADGVLDFAGGTVVHINAGIAGLISCLVLGKRVGYGRESMAPHNLVLTMIGGSMLWVGWFGFNAGSAVAADGRAGFAMLTTQVATACAALGWMFAEWVAKGKPSVLGIVSGAVAGLVAITPAAGFVGVTGALVIGIAAGVVCFWSATWLKSKLGYDDSLDAFGVHGVGGILGALLTGVFAVKDIGGADGSLLLQAKGVLITLVYSGVLSFVLLKLIDMTIGLRVTEEEEREGLDVILHGEHVE

SEQ ID NO: 49558 - protein, 551 aa, Staphylococcus epidermidis ATCC 12228
MKRNWWKEAVAYQVYPRSFNDSNGDGIGDLPGLIEKLDYLENLGIDVIWLSPMYPSPNDDNGYDISDYKGIMSEFGTMNDFDQLLSSIHQRGMKLILDLVVNHTSDEHPWFIESKSSKTNAKRDWYIWADPKPDGSEPNNWESIFNGSTWEFDESTKQYYFHLFSKKQPDLNWENPDVRQAVFEMMNWWFEKGIDGFRVDAITHIKKNFEAGDLPVPDGKKFAPAFDVDMNQPGIQEWLQEMKDKSLSRYDIMTVGEANGVTPNDAEEWVGEENGKFNMIFQFEHLGLWSTGDTKFDVKSYKQVLNRWQKQLENVGWNALFIENHDQPRRVSTWGDDKNYWYESATSHATAYFLQQGTPFIYQGQEIGMTNYPFESIESFNDVAVKTEYQIVKKEGGDVNQLLDKYKMENRDNARTPMQWNNSINAGFTTGKPWFHVNPNYTEINVKQQLNDKFSILSYYKALIQLKKSDLIYIYGKFNMVDAENKQVFAYTRTFKNNTVLIVANLTNEVSELNLPFELDISSVDIKLHNYHLNDINLDHIKPYESFVVEI

SEQ ID NO: 49559 - protein, 124 aa, Arabidopsis thaliana
  misc_feature (24)..(24): Xaa can be any naturally occurring amino acid
  misc_feature (90)..(90): Xaa can be any naturally occurring amino acid
  misc_feature (94)..(94): Xaa can be any naturally occurring amino acid
  unsure (1)..(124): unsure at all Xaa locations
VALYFAATHPHLVKGVTLLNATPXWGFFPNPVRSPKLARLFPWPGAFPLPERVKKITELVWQKISDPESIAEILKQVYTDHSTNVDKVFXSRIXEVTQHSGCLQAVLSIYGFSWVEPLFFPFIR

SEQ ID NO: 49560 - protein, 325 aa, Zea mays
MATPPNPPPPSTPIAAAAPLLPAEFTRFTFRALYVRRTGPSSREMIQPGRPYDELGRRLTSDYPVYDGRGSDAALVARMQGITVLVGNAHQLFTIVFETGRFKGSTLLINGMVTEGSDEWAVYGGTGAFAMATGVIRRKNLFAGGGDSGGNSDELSMEVFCPVFGSPQQPPKDDHHGSAVTKIGLWGGPGGSAQDITTTEAPRRLNSVTIRAGIAVDSIEFTYTGKDRQRRTAGRWGGLGGNVRTIDLGDNEHIREVSGTYGTFEGATTLTSLRFITSTRAWGPWGTENGTRFCITAPIGSSVVGFYGRAGTRLVDAIGVYLRQL

SEQ ID NO: 49561 - protein, 357 aa, Legionella pneumophila subsp. pneumophila str. Philadelphia 1
MMSVDNIKNDNQVLAEEDFLEYALSHGFGDLHFKVDPQTGMKAMIAIHSTKLGPALGGCRFIEYPNTAAALKDAMRLARGMSFKAASVNLPLGGGKSVIIKPKGFFNRAEYMHRFGEFVNELNGRYITALDSGTELSDMDIIAEHTDYVASLSRYNGDPSPSTSKGVLRGIQAAVAFKLGKDSLKGLHIAIQGLGHVGYALAKQLHELGATLTVADISPAAVNMAVQELGAKAVGTDIIHKVPCDVFAPCALGAIINDLTIPQLQTSIIAGAANNQLAHTYHGKILHEKGILFAVDYVINAGGLIFAASKYLQTPEDKVSEQIDSIYTSLTEIFTRSAKDNLPTSEIADTLAKEKLA

SEQ ID NO: 49562 - protein, 525 aa, Arabidopsis thaliana
MAPTIFVDHCILTTTFVASLFAFLLLYVLRRRSKTIHGSVNVRNGTLTVKSGTDVDIIIVGAGVAGAALAHTLGKEGRRVHVIERDLTEPDRIVGELLQPGGYLKLIELGLEDCVKDIDAQRVLGYALFKDGKHTKLSYPLDQFDSDVAGRSFHNGRFVQRMREKASLLPNVRMEQGTVTSLVEENGIIKGVQYKTKDGQELKSFAPLTIVCDGCFSNLRRSLCKPKVEVPSNFVGLVLENCELPFPNHGHVVLGDPSPILFYPISSSEVRCLVDVPGSKLPSVASGEMAHHLKTMVAPQVPPQIRDAFISAVEKGNIRTMPNRSMPADPIHTPGALLLGDAFNMRHPLTGGGMTVALSDIVILRDLLNPLVDLTNKESLSKYIESFYTLRKPVASTINTLAGALYKVFLASPDDARSEMRRACFDYLSLGGVCSSGPVALLSGLNPRPMSLVLHFFAVAIFGVGRLLVPLPSVKRLWLGARLISSASGIIFPIIKAEGVRQMFFPRTIPAIYRAPPTPSSSSPQ

SEQ ID NO: 49563 - protein, 373 aa, Bacteroides thetaiotaomicron VPI-5482
MKLFDVYPLYDINIVKGQGCKVWDENGTEYLDLYGGHAVISIGHAHPHYVEMISNQVATLGFYSNSVINKLQQQVAERLGKISGYEDYSLFLINSGAEANENALKLASFYNGRTKVISFSKAFHGRTSLAVEATNNPTIIAPINNNGHVTYLPLNDIEAMKQELAKGDVCAVIIEGIQGVGGIKIPTTEFMQELRKVCTETGTILILDEIQSGYGRSGKFFAHQYNHIQPDIITVAKGIGNGFPMAGVLISPMFKPVYGQLGTTFGGNHLACSAALAVMDVIEQDNLVENAKAVGDYLLEELKKFPQIKEVRGRGLMIGLEFEEPIKELRSRLIYDEHVFTGASGTNVLRLLPPLCLSMEEADEFLARFKRVL

SEQ ID NO: 49564 - protein, 259 aa, uncultured archaeon GZfos19A5
MKAKAFEMIDIANRTEKPRDIGLTMVLDKGLGYRAAQDLMEYASEYIDIIKLGWGTHRLCSEEIVKRKIQLYTDNSILISNGGTLFEIAYLQRKIDAFFEYAHQIGLSSVEISDGSIQIGREERSEIIRKCKNMGFEVFTEVGKKDPLEDARLTIDYRLKEAKRDLDAGATKVIMEARESGKGIGVYDKEGKVKEDMVKKLTEGIGLRNIMFEAPEKSQQVYLILNLSPEVNLGNIKPEDVIPLETLRRGLRGDTLGRL

SEQ ID NO: 49565 - protein, 573 aa, Arabidopsis thaliana
MKMDKKTIVWFRRDLRIEDNPALAAAAHEGSVFPVFIWCPEEEGQFYPGRASRWWMKQSLAHLSQSLKALGSDLTLIKTHNTISAILDCIRVTGATKVVFNHLYDPVSLVRDHTVKEKLVERGISVQSYNGDLLYEPWEIYCEKGKPFTSFNSYWKKCLDMSIESVMLPPPWRLMPITAAAEAIWACSIEELGLENEAEKPSNALLTRAWSPGWSNADKLLNEFIEKQLIDYAKNSKKVVGNSTSLLSPYLHFGEISVRHVFQCARMKQIIWARDKNSEGEESADLFLRGIGLREYSRYICFNFPFTHEQSLLSHLRFFPWDADVDKFKAWRQGRTGYPLVDAGMRELWATGWMHNRIRVIVSSFAVKFLLLPWKWGMKYFWDTLLDADLECDILGWQYISGSIPDGHELDRLDNPALQGAKYDPEGEYIRQWLPELARLPTEWIHHPWDAPLTVLKASGVELGTNYAKPIVDIDTARELLAKAISRTREAQIMIGAAPDEIVADSFEALGANTIKEPGLCPSVSSNDQQVPSAVRYNGSKRVKPEEEEERDMKKSRGFDERELFLLKMRFSN

SEQ ID NO: 49566 - protein, 144 aa, uncultured archaeon GZfos34H9
MVNLAKQKRIAAKVMKVGLGRVWIDPEATGDVAEAITREDIRGLVEEGLIKKKQKKGVSRGRAREVAIKRALGRRKGHGSRKGAKGARRGKKRVWIIKIRALRRRLKELRDEGDIDKTTFRRLYLKAKGGEFRSIAHLNEFIKL

SEQ ID NO: 49567 - protein, 347 aa, Rubrivivax gelatinosus PM1
MSLIPATILTGFLGSGKTTLLKRVLSEAHGQKIAVIENEFGEENIDNDILVTDSKEQIVQMSNGCICCTIREDLRATLTDLAAKKRKGELDFDRIVIETTGLADPGPVAQTFFMDDEIAESYLLDSILTLVDAKHAGQQLDDRQEARRQVGFADQIFLSKTDLVAKDATDALIHRLKHMNPRAPLQAVHFGEVPLKDVFDLRGFNLNAKLDIDPDFLKADDHEHHHHDHEHGEHCDHPSHAHGHHHAHDDDVKSFVFRSNRPFNPAKLEEFLGTMVNVYGPRMLRYKGVLRVQGFDKKVIFQGVHQLMGSDVGPLWAAGETRGSKMVFIGIDLPKDVFLQGLEQCLA

SEQ ID NO: 49568 - protein, 172 aa, Glycine max
MKRGREESKLDMANCLMLLTKVGESETNYPISKGSDIGDFKCKTCNRRFSSFQALGGHRASHKKPKLMVTDLSCHQELPNPTMKQQPRMHPCPICGLEFAIGQALGGHMRKHRTAINDGLLCGKPSSSLSILKESSKDGDQKLNLRLDLNLTPLEEDDLKLNLRTPVLNCFI

SEQ ID NO: 49569 - protein, 414 aa, Polaromonas sp. JS666
MSRRRVVVTGLGCVSPVGTTVADSWTNLLAGTPGIDLITQFDASNFACKFAGEVKGFKIEDYIPEKEARHMDRFIHLGLAAACQAVADSGLPTGDALGEELATRIGCNIGSGIGGLPMIEQTHAELVNRGPRRISPFFVPASIINMISGHVSIKFGFKGPNIAVVTACTTGLHAIGLSARMIEYGDCDVMVAGGAESCVSPLGVGGFAAARALSTRNDDPKTASRPWDKDRDGFVLGEGGGVLVLEEYEHAKARGAKIYAEVIGFGMSADAYHMTSPDINGPRRSMAMALKNAGVNADQVQYLNAHGTSTPLGDLNETNAIKAAFGSHAKNMVVSSTKSMTGHLLGGAGGIESVFTVLALHHQKIPPTINMFSQDPECDLDYCANVARDANIEFAVKNNFGFGGTNGTLVFKRV

SEQ ID NO: 49570 - protein, 434 aa, Novosphingobium aromaticivorans DSM 12444
MQGLGLFAYFPENSMRRVVVTGLGLVTPLGADVETVWKNLLAGKSGAGLITKFDTTDQKCKIACEVKPADHEYGFDAGKRVDHKIQRQVDPFIVFGIDAAGQALEDAGLADMDDDLKMRTGCSIGSGIGGLPGIESESIILHEKGPGRVSPHFVHGRLINLISGQVSIKYGLMGPNHAVVTACSTGAHSIGDAARMIKDGDADVMLAGGAESTINPLGVAGFAQARALNCSYNDRPTEASRPYDKDRDGFVMGEGAGVVVLEEYEHAKARGAKIYAEVVGYGLSGDAYHVTAPHPEGKGAELAMRMALRKAGLSAGDIDYVNAHGTSTMADTIELAAVKRVLGDDLSGASMSSTKSAIGHLLGGAGAVETIFCILAIRDQIVPPTLNLHNPDEGTEGVDLVPLKAKPRKVRAALNNSFGFGGTNASVIVKAVED

SEQ ID NO: 49571 - protein, 481 aa, Bacteroides thetaiotaomicron VPI-5482
MEDLNFRKGDAKTDVFGSDRMLQPSPVERIPDGPTTPEVAYQMVKDETFAQTQPRLNLATFVTTYMDDYATKLMNEAININYIDETEYPRIAVMNGKCINIVANLWNSPEKDTWKTGALAIGSSEACMLGGVAAWLRWRKKRQAQGKPFDKPNFVISTGFQVVWEKFAQLWQIEMREVPLTLEKTTLDPEEALKMCDENTICVVPIQGVTWTGLNDDVEALDKALDAYNAKTGYDIPIHVDAASGGFILPFLYPDTKWDFRLKWVLSISVSGHKFGLVYPGLGWVCWKGKEYLPEEMSFSVNYLGANITQVGLNFSRPAAQILGQYYQFIRLGFQGYKEVQYNSLQIAKYIHGEIAKMAPFVNYSENVVNPLFIWYLKPEYAKSAKWTLYDLQDKLSQHGWMVPAYTLPSKLEDYVVMRVVVRQGFSRDMADMLLGDIKNAIAELEKLDFPTPTRMAQEKNLPVEAKMFNHGGRRHKTVKK

SEQ ID NO: 49572 - protein, 218 aa, Legionella pneumophila subsp. pneumophila str. Philadelphia 1
MKHLSLTPELYKYLLDISLREHPALAALRKETSTMELANMQVAPEQAQFMQMLIRLTRAKKVLELGTFTGYSALAMSLALPDDGQVITCDINEGWTKHAHPYWREAKQEHKIKLRLGPALDTLHSLLNEGGEHQFDFIFIDADKTNYLNYYELALKLVTPKGLIAIDNIFWDGKVIDPNDTSGQTREIKKLNQVIKNDSRVFVSLLAIADGMFLVQPI

SEQ ID NO: 49573 - protein, 498 aa, Oryza sativa
MAAAAVAADQKVVTMTSLREGCACAAPPAAAAPPMPKMAAAQRVVAELREACATPAARLAEVAAAMAGEMEAGLAVEGGSSEMKMIVSYVDSLPTGGEEGSYYALDLGGTNFRVLRVRLAGGGVAERVAREVPIPPGLMSGGGATSECLFGFIASALAEFVGEEEEEGGLDGGERELGFTFSFPVHQTSIASGTLIRWTKAFAVDDAIGEDVVAALQAAMSERGLDMRVSALINDTVGTLAAGSYYDEDVVAAVILGTGTNAAYVEDATAIAKLHPSQLPASNTMVINTEWGSFASPCLPLTEFDEALDQESLNPGEQTYEKLISGMYLGEIVRRVLLKISSRCPSLLGGAGELATPFVLRTPDVSAMHHDETPDLSIVGEKLERTLGIRGTSPEARRMVVEVCDIVATRAARLAAAGIVGILKKIGRVDGGEGRRRRSVVAVDGGLFEHYGKFRRCMESAVRELLGEAAAERVVVKLASDGSGLGAALVAAAHSQRA

SEQ ID NO: 49574 - protein, 212 aa, Bacteroides fragilis YCH46
MKETDLLDEYILQHIDEEGEYLKSLYRDTHVKLLRPRMASGHLQGRMLKMFVRMIRPRQILEIGTYSGYSALCLAEGLEEGGMLHTFEINDEQEDFTRPWLENSAYADKIKFYIGDALRLIPALGITFDLAFVDGDKRKYIEYYEMTLAHLSVGGYIIADNTLWDGHVLEEPHSNDHQTIGIKAFNELVAHDERVEKVILPLRDGLTIIRKK

SEQ ID NO: 49575 - protein, 205 aa, Neurospora crassa
MSSRKKVLLKVIILGDSGVGKTSLMNQYVNKKFSASYKATIGADFLTREVLVDDRQVTMQLWDTAGQERFQSLGVAFYRGADCCVLVYDVNNSKSFDALDSWRDEFLIQASPRDPDNFPFVVLGNKIDMEESKRVISTKRAMTFCQSKGNIPYFETSAKEAINVEQAFEVIARNALMQEESEEFSGDFQDPINIHIENDRDGCAC

SEQ ID NO: 49576 - protein, 550 aa, Salmonella enterica subsp. enterica serovar Paratyphi A str.
MQNPYTVADYLLDRLAGCGIGHLFGVPGDYNLQFLDHVIDHPTLRWVGCANELNAAYAADGYARMSGAGALLTTFGVGELSAINGIAGSYAEYVPVLHIVGAPCSAAQQRGELMHHTLGDGDFRHFYRMSQAISAASAILDEQNACFEIDRVLGEMLAARRPGYIMLPADVAKKTAIPPTQALTLPVHEAQSGVETAFRYHARQCLMNSRRIALLADFLAGRFGLRPLLQRWMAETPIAHATLLMEKGLFDEQHPNFVGTYSAGASSKEVRQAIEDADRVICVGTRFVDTLTAGFTQQLPAERTLEIQPYASRIGETWFNLPMAQAVSTLRELCLECAFAPPPTRSAGQPVRIDKGELTQESFWQTLQQYLKPGDIVLVDQGTAAFGAAALSLPDGAEVVVQPLWGSIGYSLPAAFGAQTACPDRRVILIIGDGAAQLTIQEMGSMLRDGQAPVILLLNNGGYTVERAIHGAAQRYNDIASWNWTQIPPALNAAQQVECWRVAQAIQLAEVLERLARPQRLSFIEVMLPKADLPELLRTVTRALEARNGG

SEQ ID NO: 49577 - protein, 332 aa, Staphylococcus epidermidis ATCC 12228
MIDYKSAGLTEEDLKKIYKWMDLGRKTDERLWLLNRAGKIPFVVSGQGQEATQIGMAYAMQKGDISSPYYRDLAFVTYMGISPLDTMLSAFGKRDDINSGGKQMPSHFSHKEKGILSQSSPVATQIPHSVGAALALKMDNKPNIATATVGEGSSNQGDFHEGMNFAAVHKLPFVCVIINNKYAISVPDSLQYAAEKLSDRALGYGMHGIQVDGNDPIAVYKAMKEARERALAGEGPTLIEAVTSRMTPHSSDDDDTYRTKEERDLLKQEDCNIKFKTALLDQGIINENWLSQLETEHKELINEATKSAEAAPYPSEEEALTYVYEEGGQQND

SEQ ID NO: 49578 - protein, 52 aa, Agrobacterium tumefaciens str. C58
MDVIRILIAIILPPVGVFLQVGLGLQFWLNILLTLCGYVPGIIHAIWVILRR

SEQ ID NO: 49579 - protein, 473 aa, Staphylococcus epidermidis ATCC 12228
MSEKQYDLVVLGGGTAGYVAAIRASQLGKKVAIVEKSLLGGTCLHKGCIPTKALLKSAEVNHTIKNAHTFGIDVNHFKINFPKILERKDAIVKQLHEGVNQLMKHHHIDIYNGIGRIMGTSIFSPQSGTISVEYEDGESDILPNKNVLIATGSSPQSLPFIKFDHKQILSSDDILRLNTLPQRLAIIGGGVIGLEFASLMNDLGADVVVIEANDRVLPTESTQVASLLKEELTNRGVTFYENIQLTKDHFNQTDKGVTINISDEPVQFDKVLVAIGRKPNTNDIGLNNTQIKTSDAGHIITNAYQQTEDKHIYAAGDCIGQLQLAHVGSKEAIVAVEHMFDCSPIPINYDLIPKCVYTNPEIASIGKNLEQAKKAGIKAKSIKVPFKAIGKAIIEDVTQSKGFCEMVVNKDDDEIIGLNMIGPHVTELINEISLLQFMNGSSLELGLTTHAHPSLSEVVMELGLKANGQAIHV

SEQ ID NO: 49580 - protein, 564 aa, Pseudomonas putida
MPSILTRRTFVKGLAAGSLLGGLGLWRTPVWALNGAAPVNELSGNEFELFIGETPVNFTGSARTAMTINGSLPGPLLRWREGDTVTLRVRNRLTADTSIHWHGILLPANMDGVGSEFHAIEPGGVYVYQFKVRQHGTYWYHSHSGLQEQAGVYGPLVIEAKEPEPFHYDRDYVVMLSDWTDEDPASLMKTLKKQSDYYNFHKRTVGDFINDVSEKGWGATVADRTMWAQMNMNPTDIADVSGATYTFLINGQAPDDNFTWLFRPGEKLRLRLINGSAMTYFDVRIPGLKMTVVAADGLHVKPVSVDELRIAVAETYDVIVEPETEAYTLFAQAMDRSGYARGTVATRAGMSAAVPALDPRPLVSMDDMGMGGMDHGSMDMSAMDHSSMGPMQAHPDSENNNPLVDMQAMVTAPKLDDPGLGLRNNGRRVLTYADLRSTFEDPDGRDPSRTIELHLTGHMEKFAWSFNGIKFSDAEPLRLKYGERIRLVLVNDTMMTHPIHLHGMWSDLEDENGNFQVRKHTIDMPPGSRRSYRVTADALGRWAYHCHLLYHMKRACSAKVRVEE

SEQ ID NO: 49581 - protein, 528 aa, Mycobacterium bovis
MAATKASTATDEPVKRTATKSPAASASGAKTGPKRTAAKSASGSPPAKRATKPAARSVKPASAPQDTTTSTIPKRKTRAAAKSAAAKAPSARGHATKPRAPKDAQHEAATDPEDALDSVEELDAEPDLDVEPGEDLDLDAADLNLDDLEDDVAPDADDDLDSGDDEDHEDLEAEAAVAPGQTADDDEEIAEPTEKDKASGDFVWDEDESEALRQARKDAELTASADSVRAYLKQIGKVALLNAEEEVELAKRIEAGLYATQLMTELSERGEKLPAAQRRDMMWICRDGDRAKNHLLEANLRLVVSLAKRYTGRGMAFLDLIQEGNLGLIRAVEKFDYTKGYKFSTYATWWIRQAITRAMADQARTIRIPVHMVEVINKLGRIQRELLQDLGREPTPEELAKEMDITPEKVLEIQQYAREPISLDQTIGDEGDSQLGDFIEDSEAVVAVDAVSFTLLQDQLQSVLDTLSEREAGVVRLRFGLTDGQPRTLDEIGQVYGVTRERIRQIESKTMSKLRHPSRSQVLRDYLD

SEQ ID NO: 49582 - protein, 340 aa, Synechococcus elongatus PCC 6301
MCGTSVMANLDVALLPNHWYAIAASTDLGSTPIAASLLDQQLVVYRTTAGQVVVLDDRCPHRGASLACGQVKGNAIACPYHGWQFDLDGHCAQIPSQQASARIPQAAKVASYPVQERYGLIWVFTGDRDRAAQTPLWELPEYDQAGWRVVQGQFDWAADYRRVTENGMDVAHSPFVHANSFGASGNEVIADFELEKSDLGAQIWIPIEPKANYRGSFNLLGRKQETPKAGRSGAAFHLPNITRIDIEFGNFHLILVGIHQPISATTTRSHWLHVRNFLTAGWADGGTRKRTAKLFQEDQKIIEGIAPLRDRNEISVASDRLQLYYRQLWQQHHSSLVAQG

SEQ ID NO: 49583 - protein, 233 aa, Synechococcus elongatus PCC 6301
MFLKNYWYPVALAQKVGDRPLSVTLCGEAIALYRDSAGQIHALSDRCVHRGAALSGGWVENDCLVCPYHGWQYDAQGHCRKIPANTEQQRIPFAAKVPHYDAIERYGLVWLFYGDLPEADRPPLPPLPEYDDPAWRTVQGEVTYTTHYTRVTENLMDFAHAPFTHSGSFGAASDPLIEPYKVEQLPDGLRAQTQFTNRPIAAFGSCSIVAMPHVPSPPQSPFTCPASSAPKRT

SEQ ID NO: 49584 - protein, 215 aa, Pseudomonas aeruginosa PAO1
MVLRSEILTKKSELPTPDQALPGRESAMPVPEAHFVNGRPLTAPFPAGLQQVLFGMGCFWGAERRLWQQPGVWVTAVGYAGGYTPNPTYDEVCSGLTGHSEVVLVVYNPQETSFEQLLKVFWEAHDPTQGMRQGGDIGTQYRSVIYTFDAAQKAAAMASRESFQAELAKAGYDRITTEIADVPPFYYAEAYHQQYLAKNPNGYCGLGGTGVCLPA

SEQ ID NO: 49585 - protein, 773 aa, Hordeum brevisubulatum
MVVAAAILPELATQLVVPVAAAVGIAFAVLQWFLVSKVKVAPERRGEGSGSAGAGGGKDGASEYLIEEEEGLNDHNVVLKCAEIQTAISEGATSFLFTEYKYAGGFMTVFAVLIFVFLGSIEGFSTKSQPCHYSVGKTCKPALANAAFSTIAFVLGAVTSLVSGFLGMKIATYANARTTLEARKGVGKAFIVAFRSGAVMGFLLAASGLFVLYVAINLFGLYYGDDWEGLFEAITGYGLGGSSMALFGRVGGGIYTKTADVGADLVGKEERNIPEDDPRNPAVIADNVGDNVGDIAGMGSDLFGSYAESSCAALVVASISSFGINHEFTPMMYPLLISSVGIIACLITTLFATDFFEVKEVDQIEPALKKQLIISTAVMTVGIALVSWLGLPYTFTIFNFGAQKTVHSWQLFLCVAVGLWAGLVIGFITEYYTSNAYSPVQDVADSCRTGAATNVIFGLALGYKSVIIPIFAIAFSIFLSFSLAAMYGVAVAALGMLSTIATGLAIDAYGPISDNAGGIAEMAGMSHRIRERTDALDAAGNTTAAIGKGFAIGSAALVSLALFGAFVSRAGITTVDVLTPNVFIGLLVGAMLPYWFSAMTMKSVGSAALKMVEEVRRQFNTIPGLMEGTAKPDYATCVKISTDASTKEMIPPGALVMLTPLIVGTFFGVETLSGVLAGALVSGVQIAISASNTGGAWDNAKKYIEAGASEHAKSLGPKGSDCHKAAVIGDTIGDPLKDTSGPSLNILIKLMAVESLVFAPFFATYGGILFKYL

SEQ ID NO: 49586 - protein, 545 aa, Bradyrhizobium sp. BTAi1
MNFQPRGLNDQALQGPASYQAEVEAARALLETHPTWNGVTAEAVARMRLQNRFKTGLDVARYTAAVMRADMAAYDEDSTKYTQSLGCWHGFIAQQKLISIKKHFGKTDRRYLYLSGWMIAALRSEFGPLPDQSMHEKTSVPALIEELYTFLRQADSRELNDLFRSLDAARKAGDKAKETEIIARIDGFQTHVVPVIADIDAGFGNAEATYLLAKKMIEAGACALQIENQVSDEKQCGHQDGKVTVPHDVFLAKIRACRHAFLELGVEDGIIVTRTDSLGAGLTQQIAFSSQPGDLGDQYNSFLDCEEVTPGNARNGDVIINRDGKMLRPKRLPSNLYQFRPGTGEDRCVLDCITSLQNGADLLWIETEKPHIEQIAKMVDRIRKVIPNAKLAYNNSPSFNWTLNFRWQVYDAMKEAGQDVSRYNRAELMKAEYDDTPLAKEADERIRTFQADSAKRAGIFHHLITLPTYHTAALSTDNLAREYFGEQGMLGYVKNVQRAEIRQGIACVKHQNMAGSDIGDDHKEYFAGEKALKAGGAHNTMNQFS

SEQ ID NO: 49587 - protein, 500 aa, Agaricus bisporus
MPSIFTHQWDTPVYKGSTSINTGLFINGEFVDGVKNTTIDVVNPANGKLITKISEATEADIDIAVEAAHKAFETTWGLNCSGSKRGDMLYKLAQLMEKNIDDLSAIEALDNGKTFLWAKSVDLSLSISTIKHYAGWADKNFGQVIETDEKKLTYSRHEPIGVVGQIIPWNFPLLMLAWKIGPALATGNCIVLKPSEFTPLSALRMCALIQEAGFPPGVVNVVTGYGSTTGQAISSHMKIDKVAFTGSTLVGRKVMEAAAKSNLKNVTLELGGKSPVVIFDDADLEQSVNWTAHGLFWNHGQACCAGTRIFVQEGIYDKFLQKFTDKIKEIKLGDPFGLGIDQGPQVSQIQYDRIMSYIESGRAEGATVHVGGERHGNEGYFIQPTIFTDTTPDMKIVKEEIFGPVGAVIKFKDGKEVIKQANDSNYGLAAAVFSQDINKAIETAHAFKAGTAWVNCANTIDAGVPFGGYKQSGIGRELGEYALHNYTNVKAVHVNLNWKM

SEQ ID NO: 49588 - protein, 1786 aa, Neurospora crassa
MYQNGQRDPPRPFAVPPPPPPMSPPQVGSGVAGINSVMNIPPPPPRYPGAPGTVGGSLLPPPPGPPPGNPGFPPSAIAPPSALGAAPWHGAWGRPYNGQTAFNLPPPPPGGNGGLQAYNPLLHAQAAAAAAAAAASASNTPGPPATSITIPPPPPPSEQMSATYIPSAGDTYGEGVGIPGLGLPEELGGPGNWTGAEQQRLGGTSMEDAHRLHAAPTADRGLSTTSNTPNSSSAIPPELAAQWPLDRVLMWLQANSFSQDWVNTFKVLNLHGAQFLELGSGHGGRGNFGMMHQQVYPQLAHECQMSKTGWDQTKEREEGKRMRRMIRGIVTGRSVDPSKVAASGGAQGGAGGAGGGGHARRESVSASVPPSAGPDSADSPNVEFSKSHLFVQEEQVQSGPKAPGPGFAGRRFSQSRATTMPLLTSTMSSGEPNHRSMMRNLDIDSARRHSPSTSNVSESGDLNAGTFRTVGRERQDSPIGGSPNPSSALFPSNAGNTILSSSPHRSGSRFGHRSRNSSDSVSSNAAQYGSGIPADAAAMFKNGSLADMIKNSFNSNNPDRRNGQDGGRPLGVVETGDRSAGTDPPNSAKGPKSFLSFLSRNKRKEDGTSPDELDSPTSPATGFKAHSLGSRAGHVSETSLDQRPGSSISTHEHSVGFQSGHSRKKSVVSTRVYLLATLDHWNYRMLDVTDIDSAHDLRQLVCINLGLPDSEGAAIYVTELGKFDHEEPLDDMKLLTNKRLRADAIGTLKLFVKPGGLTSSPYPGPGTQSGQPSSYVPRDAPPMDEETFNRLNGQRQRSSSSPPTSRQNTISSKDRDEKMPVPEPVEHKAEPPRKHAIKETSPIGETTPFGIVGRKVDFDQPRLSPFEDKRPDHLFPVRKAPAPPGDPSATLKKVNSLSKKTGQGFRPSTAHATQHHHHNAIDHGYHQRRVSTDIRENMTSERQTRRPAAIRGTAEVPSPSGGIGSLLINIGGHLGGIGHPVAGGARALSPNRVASAPVGHGGEMSEQQRDAKLRYQAARAPSPSLSPNARRRPSESHISQQQYQQNHRPPSSQQHHPHLQHQAQPQPQPQPQQQQQQQQQQQQQQQYQPRQQQTQQPQQQQQAQQPQQQQQAPAQHEESKRKSHGPDVDFSDNDVRFTPPPESESLNASSNHQDYADDQDDSDDSDDGLFAVPISKNKTAETSKTKDNSGGSDEGLGKRPSLKVATDRSKKNLSVAFTTPQASPRMASFTDETEHASVPASSGHGHRQSAPVPSGSSKEWEQDETECKIGRRKSFIEKDVWANRPPTDALINNLEDFFPNLDVDQPVLEEGGDTEVEVDAPSPIAEVDESQFQTRPQPMAETMAQSNTAVASSSNNNAPMLPPLNRVSSAFNESDTLGSDESTLKALESRPPSMVSGSVRRSRGLGRMKSIREVARGAHEAHKRYTQTSMQTNVATPAVPNATTNLMRRKSTKMFNANIVQIEPRRGSILSTIPQETLPTQDNINTLPKRQTTFRWFKGQLIGKGTFGRVYLGMNATTGEFLAVKEVEVNPKAAQGDKKKMQELVAALDQEIDTMQHLDHVNIVQYLGCERKETSISIFLEYISGGSIGSCLRKHGKFEEPVVASLTRQTLSGLAYLHREGILHRDLKADNILLDLDGTCKISDFGISKKTDNIYGNDKTNSMQGSVFWMAPEVIRSQGEGYSAKVDIWSLGCVVLEMFAGRRPWSKDEAVGAIYKIANGEAPPIPDDIREEITPIAIAFMLDCFTVDPTDRPTADVLLSQHPFCELDPNYSFMDTELYAKIRGTY

SEQ ID NO: 49589 - protein, 487 aa, Polaromonas sp. JS666
MLELNRKPLRSYLLAGLLGVVTATVVLPVAPAWAQVRTLPDFTDLVDQVGPSVVNIRTIEKVKASGAGSVDEQMLEFFRRFGIPVPPNMPRAPRPDRGQPQPDEEQPRGVGSGFILTGDGFVMTNAHVVEGADEVIVTLTDKREFKAKIIGADKRSDVAVVKIEASGLPAVKIGDINRLKVGEWVMAIGSPFGLENTVTAGIVSAKQRDTGDYLSFIQTDVAINPGNSGGPLINMRGEVVGINSQIYSRSGGFQGISFSIPIDEATRVSDQLRSSGRVTRGRIGVQIDQVSKEVAESIGLGSPRGALVRGVEAGAPAEKAGVEAGDIIIKFDGKQIEKSSDLPRMVGNVKPGTKAVVTVFRRGATRDLPVVIAEVEAEKPLRKASSPEAKPPVAGPAQALGLVVSDLPDAQKKELKIKGGVRVDSAEGGAARAGLREGDVIVAIANSEITTVKEFEAALAKIDKSKPVNVLFRRGELAQFVLIRPAR

SEQ ID NO: 49590 - protein, 229 aa, Brassica napus
RPTRPPTRPDNSNQQSSPSAAGIPPPVSAVGGASYHHLLQQQQQQLQMFWSYQRQEIEQVNDFKNHQLPLARIKKIMKADEDVRMISAEAPILFAKACELFILELTIRSWLHAEENKRRTLQKNDIAAAITRTDIFDFLVDIVPREEIKEEPGIGGMMPPAVSGVPYYYPPMGGPGGMMIGRPAMDPSGVYVQPPSQAWQSVWQTSATGDDVSYGSGGSGGQGNLDGQV

SEQ ID NO: 49591 - protein, 443 aa, Glycine max
MGKGNMELETNKVYDYEDARGDVEVPDTAHQISTDSWFQVAFILTTGINSAFVLGYPGTVMVPLGWIGGVIGLILATMVSLYANALIAYLHELGGQRHIRYRDLAGFIYGKKAYNLTWVLQYINLFMINTGYIILAGSALKATYVLFRDDGLLKLPYCIAIGGFVCAMFAICIPHLSALGIWLGFSTVFSLAYIVISFVLSLKDGLQSPPRDYEIPGDGVSKIFTIIGASANLVFAFNTGMLPEIQATIKQPVVKNMMKALYFQFTVGVLPLYLVAFTGYWAYGSSTEVYLLNSVNGAVWVKALANITAFLQSVIALHIFASPMYEFLDTKYGIKGSALNAKNLSFRVVVRGGYLAFNTFVAAFLPFLGDFMSLTGAISTFPLTFILANHMYLKAKKDKLNSSQKLWHRFNIGFFAIMSLAATISAIRLISVDSKTYHVFADL

SEQ ID NO: 49592 - protein, 375 aa, Streptomyces avermitilis MA-4680
MSAARQGVAQARRIVVKVGSSSLTTAAGGLDADRVDALVDVLAKSRSGGEKEIVLVSSGAIAAGLAPLGLRRRPKDLARQQAAASVGQGLLVARYTASCARHGIRVGQVLLTSDDTSRRAHHRNASRTLDKLLAMGALPVVNENDTVATDEIRFGDNDRLAALVAHLVRADLLVLLSDVDGVYDGDPSKPGTSRVAQVHGPQDLAHVEIGSAGRAGVGTGGMVTKIEAARIAAAAGIPVVLTSAVHAADALAGRDTGTYFHPTGKRSADRLLWLQHASTPQGALTLDDGAVRAVVERRKSLLPAGIAAVEGEFTAGDPVELRDSEGRAVARGLVSFDAKEIPQLLGRSTRELARELGPAYEREVVHRDDLVLLQP

SEQ ID NO: 49593 - protein, 428 aa, Streptomyces avermitilis MA-4680 [sequence omitted]

SEQ ID NO: 49594 - protein, 422 aa, Agrobacterium tumefaciens str. C58
MAVREGESGLRLLGKKLGRNWLPVLIVSMLAVVAVTELHTPYMPAALWLCAIIAILAVREKPAAPEKDKETAADVDEPDVPGENVISGVRAGLAVLDTPVFILDKNASVLFQNGAAERAFGQLPAGAHISARLRSPGLLDVIRETITTGQPNQVEHSERFPSERVFIVRIARADVGEGASPPFYILSFRDVSELRRIDRMRSDFVANASHELRTPLASLRGFIETMQGPARNDPKAQERFLAIMLDQATRMSRLVDDLMSLSRLELRANIAPDQKVDLVPVIGHVRDALLPLADELDVTITLHLPDRPAEVQGDRDELVQVFQNLVENACKYGQEGKVVDVWLRAEPGKPVEVSIIDKGPGIPAEHVPRLTERFYRVSVADSRSKKGTGLGLAIVKHILTRHRARLIIKSEMGSGTDFTVRF

SEQ ID NO: 49595 - protein, 413 aa, Yersinia pestis KIM
MSKRRVVVTGLGMLSPVGNTVESTWKAVLAGQSGISLIDHFDTSAYATRFAGLVKDFNCEDYISRKDARKMDAFIQYGVAAGMQAMQDAGLDITEANASRIGAAIGSGIGGLGLIEENHTALVNGGPRKISPFFVPSTIVNMIAGHLTIMYGLRGPSISIATACTSGVHNIGHAARIIAYNDADVMVAGGAEKASTPLGVGGFGAARALSTRNDNPQAASRPWDKDRDGFVLGDGAGMMVLEEYEHAKKRGAKIYAEVVGFGMSSDAYHMTSPPEDGSGAALAMVNALRDAGITTSQIGYINAHGTSTPAGDKAETQAVKSVFGEDAYKVMVSSTKSMTGHLLGAAGAVESIFTVLALRDQAIPATINLDNPDEGCDLDYVPHDARQVKDMEYTLCNSFGFGGTNGSLVFRKV

SEQ ID NO: 49596 - protein, 406 aa, Gloeobacter violaceus PCC 7421
MYLSPSNEFSAARPALLQAISAETHRVLPRLVALRQHLHAHPELSGEEYRTADCVAELLAELGLEVKSGVGRTGVVGLLTGNGRDERTVGVRADMDGLPIAEQTELPYRSQVRGVMHACGHDLHTAIGLGTAMVLASLRESLPGRVKFLFQPAEETAQGARWMVDDGALEDPRVSALFALHCFPSLPVGVIGVRPGVFTAAADSLVIEVFGRSGHGARPHEAVDAIWVAANVVTALQQGISRMHNPLRPVVLSIGQMQGGRAPNIICDHVVLKGTVRSLDPQTRTALPTWIEQIVAQTCAAFGADYRLHYGNGTPSVINDPHLTHLVEDCVRTLLGAQYLQALPEPSMGAEDFAVFCEQVPGTMFRLGVGGPTSYPLHHPSFDGGDGAIAPGVMTLAAAAVSYWRL

SEQ ID NO: 49597 - protein, 745 aa, Glomerella cingulata
METNIRGIHQALSRNNSSSSSSVYEMPTADLTELARKGIIKVTTDSNGRLSYTTEVRLRSRNGEYRWHLIRCVEIDNIDFGNGASSYFGSATDINDHKLLEAKLKEAMESKSRFLSNMSHEIRTPLIGISGMVSFLQDTTLNEEQRDYTNTIQTSANSLLMIINDILDLSKVDAGMMKLKYEWFHTRSLIEDVNELVSTMAIAKRLELNYIVEEDVPAWVKGDKVRIRQVLLNVIGNAIKFTAEGEVFSRCRIFTNTKSALSNDEIMLEFAVIDTGRGFTKEEADLIFKPFSQIDGSSTRQHGGSGLGLVISRQLVELHGGKMEGTAVPGKGSTFTFTAKFALPTSADHPDGPIGPEAFKPVVQAPEEVTVLRPAVKASPAAKATSGASPSTDAEFVSPALASSGSSDPSIRSNISHVTERTSVSSINVGLVHFSEAARASGQDLSEMKLELPLSESSPGTTPTPETSKPAKLEDFRPPMYSILVICPQTHSREATAQHIETTLPKDVPHQITALDSVDKAQSLLGGDESVNFTHIVLNLPSPEEIIGLMERITKSMTISNTTILILSDSVQRQAVMKLATETKYEQLVSENLVTFIYKPVKPSRFAVIFDPDKVRDLSIDRNRSTAQRMVETQKASYQEIEKRMGNKGYKVLLVEDNPVNQKVLKKYLKKVGVEVEVVADGAECTETVFSRSHSYFSLILCDLHMPRKDGYQACREIRQWEKERGFKKLPIIALSANVMSDVSG

SEQ ID NO: 49598 - protein, 455 aa, Triticum aestivum
  misc_feature (139)..(139): Xaa can be any naturally occurring amino acid
  misc_feature (164)..(164): Xaa can be any naturally occurring amino acid
  unsure (1)..(455): unsure at all Xaa locations
MARPEENAKFPSCDAYFDTIQSKKKLPLALQESLTAAFAQIPVASFPDVPSGRVTEIPGETSVLDAVRILSEHNIRAAPVLNPEPGVPADWQGRYLGIIEYSAIILWVLDNADLAAVALSAGSATAAGVGMGAVGAVGXVAALGATGPAAVAGLTAAAVGAACXLGGLTAEKGVAKDGVTAADHLGEDFYKVLLQQEPFKSTTVRSIVESYPWSPFVPVTLDSSMLAVLLLLSKYRLRNVPVIEPDKPVIKNFITQTGVVKGLQQCKGRDWFDYISALPLSDLGLPFMSLDEVITVNSDDLILEAFKCMKDNKIGGVPVVEGPRRKLVGSVSIRDIRFLLLRPDLFSDFRHLTVLEFMNALGSTLPDSGGNGLVKPPLTCAPDASMGSVIDSIGSRITHRIYVVDGDFEVVGVVTLRDVISCFIHEPPGFCDSYLASAMEKLEDKGDADSSVENS

SEQ ID NO: 49599 - protein, 495 aa, Aspergillus niger
MSSALLDEAARIARQFDYPAAEVQRGVTEYIREIDEGLSKEHTTLSQIPTYVTAVPNGTEKGLYLAVDLGGTNFRVCSIDLHGDTTFSLTQSKIMIPRETMASGTAKDLFLFLARQIESFLRIHHNDHFEAHLRRRNEKNGNCEEDLFDLGFTFSFPVRQLGINKGTLIRWTKGFNIPDAVGKDVCALLQNAIDDLGLPVRVAALVNDTVGTLMARSYTSPGETGTFLGAIFGTGTNGAYVEKLDRITKLQTIEHSEYDKTTGEMIINAEWGSFDNHLSVLPNTIYDQQLDADSNNPGIQMFEKRVSGMFLGEILRRVMLDMQRNESLGFLRAGGASTVSVPQESSLYRQWGIDTSLLSLVEADKTENMEQIKVALKDHLKIERPTTDDCKAIQTVVHAIGKRAARLSAVPLAAILLSTGKLQKDDLVDIGVDGSLVEFYPNFEGYMRDALREVPEVGEAGNKKIRIGISKDGSGVGAALIALVASKEETRRKSQ

SEQ ID NO: 49600 - protein, 268 aa, Shigella flexneri 2a str. 301
MERYESLFAQLKERKEGAFVPFVTLGDPGIEQSLKIIDTLIEAGADALELGIPFSDPLADGPTIQNATLRAFAAGVTPAQCFEMLALIRQKHPTIPIGLLMYANLVFNKGIDEFYAQCEKVGVDSVLVADVPVEESAPFRQAALRHNVAPIFICPPNADDDLLRQIASYGRGYTYLLSRAGVTGAENRAALPLNHLVAKLKEYNAAPPLQGFGISAPDQVKAAIDAGAAGAISGSAIVKIIEQHINEPEKMLAALKVFVQPMKAATRS

SEQ ID NO: 49601 - protein, 408 aa, Lyngbya majuscula
MNDINITGMGIVSPIAQGVEPFREALFSGKTQFGYLQRPGREKPSKPFIGAELPELDVRNLFPKYSGLLRSATWSGQIALLAVAEAWEDAKLTSNQVNPERIGLVIGGSNLQQRHQQQTWQRYQSRPEFIRPTYGLTVWDTDILGLLSQCFPIQGEGYTVGGASASGAVAIIHGARQILTGVTDISIVVGSLFDICAYECQGLMNLGAMGSERFADSPELACRPFDHNHDGFIYGEGCGVIVLEKADSAQQRGVLSQGKLLGWGLNLAGNRSPEPSQKAEAQAMSAALAMADLKPEQIDYVNTHGTSSPIGDNTEVSALKSTGVDHCLLNSTKSLTGHCLTAAGVIEAIATLLQMNSSFCHPTHNLVNPVDDSLNWVKETAVQAEIQYAISNSFAFGGINTALLLGKE

SEQ ID NO: 49602 - protein, 167 aa, Glycine max
INISYVMASSSGTSSTSILLQSSGSEEDLQLLMEQRKKKRKQSNRESARRSRMRKQKHLDDLIAQVDLLKKQKSLTLKKVNITTQHCLKVEAENSILGAQKTELTQSLQSLNDIINLINTTTTSDHNNYYYNNNNNNNNNNFMMNPMHMAYLNQPIVATADNNMFLW

SEQ ID NO: 49603 - protein, 528 aa, Mycobacterium bovis
MAATKASTATDEPVKRTATKSPAASASGAKTGAKRTAAKSASGSPPAKRATKPAARSVKPASAPQDTTTSTIPKRKTRAAAKSAAAKAPSARGHATKPRAPKDAQHEAATDPEDALDSVEELDAEPDLDVEPGEDLDLDAADLNLDDLEDDVAPDADDDLDSGDDEDHEDLEAEAAVAPGQTADDDEEIAEPTEKDKASGDFVWDEDESEALRQARKDAELTASADSVRAYLKQIGKVALLNAEEEVELAKRIEAGLYATQLMTELSERGEKLPAAQRRDMMWICRDGDRAKNHLLEANLRLVVSLAKRYTGRGMAFLDLIQEGNLGLIRAVEKFDYTKGYKFSTYATWWIRQAITRAMADQARTIRIPVHMVEVINKLGRIQRELLQDLGREPTPEELAKEMDITPEKVLEIQQYAREPISLDQTIGDEGDSQLGDFIEDSEAVVAVDAVSFTLLQDQLQSVLDTLSEREAGVVRLRFGLTDGQPRTLDEIGQVYGVTRERIRQIESKTMSKLHHPSRSQVLRDYLD

SEQ ID NO: 49604 - protein, 249 aa, Pisum sativum
GKSYPTVSPDYQKAIEKAKRKLRGFIAEKKCAPLILRLAWHSAGTFDSKTKTGGPFGTIKHQAELAHGANNGLDIAVRLLEPIKEQFPIVSYADFYQLAGVVAVEITGGPEVPFHPGREDKPEPPPEGRLPDATKGSDHLRDVFGKAMGLSDQDIVALSGGHTIGAAHKERSGFEGPWTSNPLIFDNSYFTELLTGEKDGLLQLPSDKALLTDSVFRPLVEKYAADEDVFFADYAEAHLKLSELGFAEA

SEQ ID NO: 49605 - protein, 1198 aa, Bacteroides thetaiotaomicron VPI-5482
MNKKVIAVALALALAGGSYAQDDTAKKKVKAYMVSDAHLDTQWNWDIQTTINEYVWNTISQNLFLLKKYPEYVFNFEGGVKYAWMKEYYPEQYEEMKKFIEEGRWHIAGSSWEASDVLVPSVEASIRNIMLGQTYYRQEFGKEGTDIFLPDCFGFGWTLPTIAAHCGLIGFSSQKLDWRNHPFYGKSKHPFTIGLWKGIDGKQVMLAHGYDYGRKWNNEDLSKNKDLEKLAQRTPLNTVYRYYGTGDIGGSPTLGSVRSVEQGIKGDGPVEVISATSDQLFKDYLPFNNHPELPVFDGELLMDVHGTGCYTSQAAMKLYNRQNEQLGDAAERAAVAAEWLGTASYPQHTLTEAWKRFIFHQFHDDLTGTSIPRAYEFSWNDELISLKQFSQVLTSSVNAIAGQMDTRVKGTPVVLYNANAFPVSDLTEIILEQPKTPKGFTVYNAQGKKVASQMIGYENGRAHILVAASLPANSYAVYDVRTGGSEKTISPSAASAIENSVYKITLDKNGDIISLTDKRNNKELVKDGKAIRLALFTENKSYAWPAWEILKETIDREPVSITDGAKITLVENGALRKALCIEKKYGKSLFKQYIRLYEGSRADRIDFYNEIDWQSTNTLLKAEFPLNIENEKATYDLGIGSVERGNNVQTAYEVYAQQWADLTDKNNSYGVSILNDSKYGWDKPDNNTIRLTLLHTPETKGNYAYQDHQDFGFHTFTYSLTGHNGALDKPATAIKAEILNQPIKAFSSPKHAGTLGKEFAFVRSSNDQVVIKALKKAEVSDEYVVRVYETGGAAPQQAAITFAGEIEKAVLADGTEKEIGSADFNKNQLNVSIAPYSIQTFKVKLKKKADLQAPACAYLPLDYDRRCFSWNAFRKEGNFESGNSYAAELLPDSILKADGIPFRLGEKEIANGLTCKGNVLQLPTGHSYNRIYFLAASAGEDAVATFSTGNNSQEITVPSYTGFIGQWEHLGHTEGFLKDAEIAYVGTHRHASDKDEAYEFTYMFKFGMDIPKGATTVTLPDHADIVLFAATLVNEKYPAVTPASELFRTALKADNGEEATTKTNLLKQAKLIKCSGETNEKEVARYAVDGDVKTKWCDTSTAPNYIDFDFGKEQTIRGWKLVNAGNEGSVFITHTCFLQGRNSPDEEWKTIDELSDNKKNTVVRQFKPTSVRYVRLLVTQSTQNNSLKAARIYELEVY

SEQ ID NO: 49606 - protein, 762 aa, Bordetella parapertussis 12822
MKKPQNLAGAGRREVPAEWRDAIHSHLDAGETVLAWLETDLDARLRFETGMVLATDRRILACAPGRREWSSWPYSPDLRLALHDHAGAASLELDAGARRLASWRFTLGRNPAALRLLEQFESLQALRLAGAAPTAGESPRPCPTCQAPIPADREDCPECSQEPAAPPATWALLRLWRFARPYRGALLAGFLLTLLGTAATLVPPYLTMPLMDDVLIPFQNGAPIDYAKVRLYLAGLLASAVLAWGLGWARTYILAWVSERIGADLRTTTYEHLQQLSLEYFGGKRTGDLMARIGSETDRICVFLSLHLLDFATDVLMIAMTAAILVSINPWLALATLVPLPFIMWMIHVVRDRLRHGFEKVDRIWSEITNVLADTIPGIRVVKAFAQERREVQRFREANNRNLEVNDRVNTVWSLFSPTVTLLTEIGLLIVWIFGIWQVLQKHITVGVLAAFLAYIGRFYTRLDSMSRIVSVTQKAAAGAKRIFDILDYVSSVPEPHKPVHLPRVNGHIELRDVGFRYGNRSVIRGLDLSIAPGEMIGLVGHSGSGKSTLINLICRFYDVSEGAVLVDGVDIRSLRIADYRRNIGLVLQEPFLFFGTIADNISYGKPDATRAEIIAAARAAHAHEFILRLPHGYDSLVGERGQALSGGERQRISIARALLIDPRILIMDEATSSVDTTTEKEIQKALDNLVRGRTTIAIAHRLSTLRRADRLVVLDRGQIVEEGAHEALMAREGAYYRLYQAQQTRQAEGGDDGSDAIAAIA

SEQ ID NO: 49607 - protein, 353 aa, Cryptococcus neoformans var. neoformans JEC21
MEQGKTTTILSLIQQLPKEYKVVLLKNEYGDVEVDSVLASQSNITGVSEILNGCLCCTSVGLISNALMEVKSTMKPDRIIIESSGSAFPATLALQIKELEPEGFKLDGVVTVVDCVNFEGYEDSSPSAKLQAKYTDLILLNKHHLPNPRQFDTLLDRLNDLNDETPKLRIGPAPSNPPKPEVIFGLDSKLWSVKDGERKDWGEMATREGWHGDEVEVKGVYKGKKPKHEHKRVGGKGEGKECGDCQKPEVEENVGPVEPIERELLEKELSKLSYEIYRVKGIVRFMSPSNPSKAFDTYILNYAFSRYTLTPAPSLDDDPALEGVSIRLTVMGERGEVARRARRFGEAIGAMME

SEQ ID NO: 49608 - protein, 191 aa, Blumeria graminis
MSLRCVVVGDGAVGKTCLLISYTTNKFPSEYVPTVFDNYAVTVMIGDEPYTLGLFDTAGQEDYDRLRPLSYPQTDVFLVCFSVTSPASFENVREKWFPEVHHHCPGVPCLIVGTQTDLRDDLSVREKLNKQKMQPVKREDGERMAKDLGAVRYVECSALTQYKLKDVFDEAIVAALEPPAPKKKHRNCLIL

SEQ ID NO: 49609 - protein, 316 aa, Candida glabrata CBS138
MSSPANLFPGLNDIVDVLEELPLEISRYFTLLHEIDAKCVLAGPALDDKIKGFLENDPTEKQDEIAQKDKLQSLVSINQFLEELMPSFEEKMHVSSIMLESLQRLTSRMELAYEVAIKNEEIPYSLRLGVDNHPAMHLHHELMQKVDHKANSKSSQAQKSESRREAMAANRRTDPQQHQSTNNNNNSANEKSNSVPAHSDNANTNNRKRANNDKNSANGNGHSNNDNKKRKRKVTTTTTPLGSHPKSSGNIRSPRPKTNEYGEPLYCYCNQVAYGEMVGCDGEDCELEWFHLPCIGFETIPKGKWYCEDCKKKLAQ

SEQ ID NO: 49610 - protein, 548 aa, Neurospora crassa
MATSPAPEKVESDGHEQHETKSGAGSVRAVSRTTTHDGEDILGLQDLDRALNRKMHLVNNVRTAMLPVHHPLYSCANNLDSRQAIDEIGWTPYHTKLFILNGFGYAVDSLVLLLQGVIAGPAFREFGEHGYNNAMTIAGYVGMLIGALFWGLGADIIGRRFAFNVSLLLCSISVIIAGAMPNWPSLGLWIALIGFGAGGNLVLDTTVFLEYLPGNKQWVLTLMAGWWGLGQAVTGFVAWGFLVPEKWNCPSVDVCTRQNNMGWRYVMFTSGALVFVMSILRVTVIRLRETPKYLLALGEDAQVVETFQFLASKYNRHCSLTVDKLDACGVVLGTHSKNRFSFAETLVHLRGLFSTPKIALSTSLIWVSWAMMGLAYPLFYVFLPSYLASRGANLNVSPFETWRNYTLTNISSIFGPLLAGWMCNIPFLGRRYTMLIGTLMTAAFFFAYTSVRNGAQDVGFSCSIAFCLNIYYGTLYAYTPEVLPSAHRATGNGVAVACNRVMGILSAVIATVSNTSTSAPLYICGALLVAMGVLSAFFPFEPYGRRSS

SEQ ID NO: 49611 - protein, 840 aa, Mangifera indica
MMATASSELSIKSSNETSKSPMEEDKDLNLETALYKELWHACAGPLVTVPRQGERVYYFPQGHIEQVEASTNQFADQQMPIYDLRSKILCRVINVQLKAKPDTDEVFAQITLLPEPNQDENAVEKEPPPPLLPRFHVHSFCKTLTASDTSTHGGFSVLRRHAEECLPELDMSQQPPTQDLVAKDLHGNEWRFRHIFRGQPRRHLLQSGWSVFVSSKRLVAGDAFIFLRCEKELRVGVRRAMRQQGNVPSSVISSHSMHLGVLATAWHAVSTGTMFTVYYKPRISPAEFIVPFDQYMESVKSNYSIGMGFEMRFEGEEAPEQRYTGTIVGIEDADPQRWPDSKWRCLKVRWDETSTVPRPERVSPWKIEPALAPLALNPLPLSRPKRPRSNMVPSSPDSSVLTREGSFKVNVDPSSATGFSRVLQGQEFSTLRGNFAERDSNEFDTAEKSVVRPSSLDDKKIDVVFASRRYGFENCVPAGRSEPMCTDLLSGLGTNSDSVHGYSPSIDQSLASAVPVRKSLLSQEGKFNMLGSPWSLMPSSLSLKMPETNAKVQVQGGDINYLVQGNARYGGLSDYPTLQSHRVGPSNGNWFMPPLVSSHFENLVPSRELMEKPISVQHHEAGKTKDCKLFGIPLVSSSCVTPEPILLHQNSMNEPVGHMNHQLGVLESDPKSEQSKSPTLANDSNCVSEQGKPSQTCQPHVKDVHSKPQSGSSRSCTKVHKQGIALGRSVDLSKFNNYEELIAELDRLFEFGGELMTPKKNWLIIYTDDEGDIMLVGDDPWKEFCGMVRKIFIYTREEVQKMKPGSSLSKGDENLSIGEGTEAKEVKHQSVPSACNDENC

SEQ ID NO: 49612 - protein, 733 aa, Candida glabrata CBS138
MGSSEEHKGLLHPEYTTVGPREIRQSQRRDNDSTSNYSGSFRRGSMSMALTPTAAKNINIPVSSSMDNRHVMVDIGSPDFKTLHPQKEKQIVNSLRKNYLNTYMTGSISSSYTERRRPSSVSQAGRLGNVNTGPSVRPKDDSELRTGTPDLSYDPNLSTAGGDITRDIYKVATKAMPTPVKRMQSTDDVMSVASSQRRQSTASSLNVPGGFRREFIVTKKRKEKLLNKSNDNVDSSTTPNNSSPSINEALTDDEEDDKMPFLTKNFLEFLYMYGHFAGESFEDDFYSVDGMPYALDESSHLLSQTTKAKGPPKGTTSTRKVFFLLLKSFIGTGVLFLPNAFNNGGLFFSIFMLAFFGLYSYLCYYLLISSKIAAQVRSFGGIGLKLYGPTMKYLILFSLVITQLGFSSVYVIFTARNLKAIGEHVFKLPNVSITFLMISQLLLFIPLSFVRKISKLSLPSLFANVFILVGLVIVVFFSMKHLFYDLSGSPADGVIFGINNSRWTLFIGTAIFSFEGIGLVIPVQDSMRKPEKFPLVLGLVIICTTVVFIIVATIGYLAYGSEVDTVILLNLPQKNILVSLIQLLYSIAIMLSTPLQMFPAIRIIESGLFKQYDRWVNRSDREGHATEHNTSSGKSSWKVKWMKNAVRSSIVILVVAIACVGADNLDKFLSIIGSFACIPLVYMYPPMLHLKSTSLPRSNGKIMSRRVIIDIVLIIFGGISMVYTSYQSIFVTD

SEQ ID NO: 49613 - protein, 415 aa, Moritella marina
MANNRRVVITGLGIVSPVGNTVATAWEAIKSGISGIENIEHFDTTNFSTKFAGLVNDFDAESVGINRKDCRKMDLFIQYGIAAAEQALTDSGLEITEQNATRIGTAIGSGIGGLGLIEQNVHSFGKGGAPKVSPFFVPATIVNMVAGHVSIRNNLKGPNIAIATACTSGTHCIGQSARMIAYGDADVMVAGGAEKASTEMGLAGFGSAKALSTRNDDPQKASRPWDKDRDGFVLGDGAGVLVMEEYEHAVARGATIYAELAGFGMSGDAFHMTSPPEDGAGAALSMNNAIADAGITADKVGYVNAHGTSTPAGDKAETAAVKSVFGEHAYTLAVSSTKSMTGHLLGAAGAIEAIFTILALKDQILPPTINLENPSEGCDLDYVTDGARPVNMEYALSNSFGFGGTNGSLLFKKAD

SEQ ID NO: 49614 - protein, 231 aa, Pisum sativum
MAVTFYNLKSESGLKKLNEYLLTRSYITGYQASKDDITVYSALSSVPSSEYENVARWFKHIDALLRLSGVSGEGSGVTVESSLVAEEAVATPPAADTKATEAEDDDDDDVDLFGEETEEEKKAAEERAAAVKASGKKKESGKSSVLLDVKPWDDETDMKKLEEAVRSVQLDGLLWGASKLVPVGYGIKKLQIMMTIVDDLVSVDNMVEDYLTVEPINEYVQSCDIVAFNKI

SEQ ID NO: 49615 - protein, 223 aa, Rubrivivax gelatinosus PM1
MTTDLKELFDNNREWAKQTEVREPGFFSRLLKQQSPQYLWIGCADSRVPANDLVGLLPGELFVHRNVANVVVHSDLNCLSVVQFAIDMLKVQHLIVVGHSGCGGVAAALADRRVGVADNWLRHVQDVRNKHQTWLDGVREIDRVNALCELNVVEQALNLCSTTVVQDAWQRSQQVVIHGWFYGLHNGLLEDLTMTVDSADAVIPAYQRALATVKARYDARGVA

SEQ ID NO: 49616 - protein, 457 aa, Photorhabdus luminescens subsp. laumondii TTO1
MQKYLKEARSLLALGIPVIIAQFSQTAMGVVDTVMAGSVSATDMSAVAVGTSIWLPVILFGYGLLLALTPIIAQMNGSGRRNLIASQTQQGFWLAIFLSIIIIAILYNSKFLIDRQHNIDPILAEKAVGFIHAIMWGAPGYLFYQVLRNQCEGLSKTKPGMVISFLGLLINIPINYIFIYGKFGAPALGGVGCGVATASVYWVMFLLMRWYVKRASSQRDIRPKHRFAAPEWHILKRISALGLPIAMAVFFEITLFAIVALLISPLGVTAVAGHQIAQNFSSLMFMFPISLAAATTIRVGYNLGKKSIENARISAYTGIMVGLVFACLTATFSIILREPIALMYNDNPEVITMASHLMLFAALYQLSDAIQVVGAGVLRGYKDTRSIFYITFIAFWILGLPSGYILGLTDYIVPAMGPQGFWIGFIIGLTASAVMIFARISWTQKQPDEVILQHSTH

SEQ ID NO: 49617 - protein, 100 aa, Triticum aestivum
  misc_feature (6)..(6): Xaa can be any naturally occurring amino acid
  misc_feature (19)..(20): Xaa can be any naturally occurring amino acid
  misc_feature (25)..(25): Xaa can be any naturally occurring amino acid
  misc_feature (28)..(28): Xaa can be any naturally occurring amino acid
  misc_feature (31)..(31): Xaa can be any naturally occurring amino acid
  misc_feature (41)..(42): Xaa can be any naturally occurring amino acid
  misc_feature (48)..(48): Xaa can be any naturally occurring amino acid
  misc_feature (66)..(66): Xaa can be any naturally occurring amino acid
  unsure (1)..(100): unsure at all Xaa locations
MSCNCXSSCGCGSSCKCGXXYPDLXETXTAXQATVVLGVAXXKNAAPXFVEAAAESGEAAHGCSCXGNCNCDPATADIDLTTMYDYLTCGGNNNKRWVHT

SEQ ID NO: 49618 - protein, 469 aa, Photorhabdus luminescens subsp. laumondii TTO1
MKKTKIVCTIGPKTESEEKLAELLNAGMNVMRLNFSHGDYEEHGQRIQNIHSVMTKTGKQAAILLDTKGPEIRTMKLEGGNDVSLTAGQTFTFTTDTSVIGNKDRVAVTYRGFPADLAPGNTVLVDDGLIGMTVKEVTKSEVICQVLNNGDLGENKGVNLPGISISLPALAEKDKQDLIFGCQQGVDFVAASFIRKRSDVLEIREHLKAHGGENIQIISKIENQEGLNNFDEILEASDGIMVARGDLGVEIPVEEVIFAQKMMIQKCNIARKVVITATQMLDSMIKNPRPTRAEAGDVANAILDGTDAVMLSGESAKGKYPIEAVTIMATICERTDRVMPSRIEAVHCRNLRVTEAVCRGAVETAEKLEAPLIVVATYGGKSAKSIRKYFPDAPILALTTNEVTARQLLLVKGVFTQIVKEIASTDDFYRIGKEAALASGLAKKGEIVVMVSGALVPSGTTNTSSVHVL

SEQ ID NO: 49619 - protein, 271 aa, Thermus thermophilus HB8
MTTLEAFAKARSEGRAALIPYLTAGFPSREGFLQAVEEVLPYADLLEIGLPYSDPLGDGPVIQRASELALRKGMSVQGALELVREVRALTEKPLFLMTYLNPVLAWGPERFFGLFKQAGATGVILPDLPPDEDPGLVRLAQEIGLETVFLLAPTSTDARIATVVRHATGFVYAVSVTGVTGMRERLPEEVKDLVRRIKARTALPVAVGFGVSGKATAAQAAVADGVVVGSALVRALEEGRSLAPLLQEIRQGLQRLEANPGLKESSKKPLP

SEQ ID NO: 49620 - protein, 150 aa, Zea mays
  misc_feature (11)..(11): Xaa can be any naturally occurring amino acid
  misc_feature (28)..(28): Xaa can be any naturally occurring amino acid
  unsure (1)..(150): unsure at all Xaa locations
YIPLLASQLGXGFFDDKLGALCMQGWKXQVFSIRDAAANNLKRLAEEFGPEWAMQHIIPQAISLLAPVMGAEITCQKLLPVVINSWKDRVPNIKFNVAKVLQSLVPILDQSAPQKTVKPCLVELSEAPEVDVRYYANQALQACDQMMVSS

SEQ ID NO: 49621 - protein, 416 aa, Zea mays
MEAAVAAALKSPTAARPSWRPAAPGATSLPFDRRRSFAFGSIKGLGRQQLTSRTRRRSSVVRASWSPSESLPPSSSMAPLRMESPAGQLLSQILHTHPHLLPAAAEQQLELLQTDREAEKDKDKESDAGDKLAPTGVDLMLYRRIAQVKEKERRRTLEEILYALVVEKFVEAGVSLVPALSRSIDSSGRVDQWAETVEGRLQRLHSPEAYEMIENHLALILGQRQSDATIAAISKLRVGQVYAASVMYGYFLKRVDQRFQLEKTMKSLPWGSEEEDGALNQLMTTDSMPSAQASSSHPEMGSWTTAPDFNAGGPSESIKPCRLRSYVMSFDPDTLQRYATVRSKEAFGIIEKHTEALFGKAEIVVTPGGTVGSSKDEHIRISFAGLRRLVLEAVTFGSFLWDVESFVDSSYHFVTS

SEQ ID NO: 49622 - protein, 390 aa, Triticum aestivum
  misc_feature (212)..(212): Xaa can be any naturally occurring amino acid
  unsure (1)..(390): unsure at all Xaa locations
MSDNLMEKVNALGERLKITGSEVGKQMQAGMSSMSFKMKELFQAQTPADKIVEDATAENLEGPDWAANLEICDLINTEKVNSVDLIRGIKKRIMLKEARVQFLALFLLETIVKNCEKAFSEVAAERILDEMVRLIDDPQTVVNNRNKALTLIEAWGESGDELRYLPVYEQTYKSLKSRGIRFPGRDNESLAPIFTPPRSVAEAEVAANFSQXFEDVHVHTYTAEETKEAFDVARNSMELLSTVLSSSPQQDALQDDLTTTLVQQCYQSQHTIQRFIETAGDNEALLFEALSVNDEVLKVLSKYEEMKKPMASARAEQPVVIPIATEHEDSVTVGNEDALVRKPAAARAMSGGDDDILDDLDEMIFGKKGGSSSQDVSKRQDPKKDDLINF

SEQ ID NO: 49623 - protein, 727 aa, uncultured archaeon GZfos34H9
MRRLLIISNRLPVSVERRKNEFRFSSSVGGLATGLNALHQKYKSVWVGWPGIAINREETDYVESKLSEFNCYPVFLSQGEVEKYYYGFSNKTLWPLFHYFPQYAKYEHSEWSAYEHVNRKFCERVAEIAKPEDIIWIHDYHLMLLPGLIRERFPDATIGFFLHIPFPSADLFRLIPWRRRILEGVLGADLIGFHIYDYAHNFLCSVLRLLGYEHEFGKFAIGDRIVQVDVHPMGIEVQKFVRATSGRGIKREVARLRSRFKNCKIIFSMDRLDYTKGIPERLYAFEHFLETHPEWHEKVVFILKIAPSRTKVGQYRVLKQEIDELVGRINGKYGTPEWVPISYFYRSLPFQTIIAFYLAADVALLTSMRDGMNLIAKEFVASRVDGKGVLILSEMAGAARELGEALVVNSNNKEEVAEALNEALRMPDEEQKSRNEEMQKRLSHYDVFHWGSGFIRSVLETKRLQEELNMKKLSEKIREELKNSYKAADKRLLLLDYDGTLVPFADKPERAKPDRELLDLFRALSEPPENTVVIISGRDKETLERWFGDTGVCLVAEHGVWLREEEGEWKEIELLKEDWKEKIIPILDLFVDRAPGSFIEEKRFSLVWHYRKVDPELGELRAKELTDQLIDLTACTELQVMKGNKVVEVKDGRVNKGIAASHWLTKGFGFILAVGDDLTDEDMFKVLPEDAYSVKIGFTPSEARFYLGSPKEVRALLDEMEMVEVYK

SEQ ID NO: 49624 - protein, 222 aa, Pinus radiata
MGRGKIEIKRIENTTNRQVTFCKRRNGLLKKAYELSVLCDAEVALIVFSSRGRLYEFANHSVKRTIERYKKTCVDNNHGGAISESNSQYWQQEAGKLRQQIDILQNANRHLMGDGLTALNIKELKQLEVRLEKGISRVRSKKNEMLLEEIDIMQRREHILIQENEILRSKIAECQNSHNTNMLSAPEYDALPAFDSRNFLHANLIDAAHHYAHQEQTTLQLG

SEQ ID NO: 49625 - protein, 315 aa, Lycopersicon esculentum
MSSLKVPASVPDPYEDAEQLKKAFKGWGTNEELIIQILAHRNARQRKLIRDSYAAAYGEDLLKDLDSELTSDFQRVVLLWTLSPAERDAYLVNEATKRLTASNWGIMEIACTRSSDDLFKARQAYHAPYKKSLEEDVAYHTVGDFRKLLVPLITAFRYEGDEVNMTLARKGSKYLHEKISDKAYHDEEIIRIISTRSKAQLSATFNHYHDHHGHEIIKDLEADDDDEYLKLLRAAIECLKPREHFEKVLRLAIKKLGTDEWDLTRVVATRAEVDMERIKEEYHRRNSVTLDRAIAGDTSGDYEKMLLALIGHGDA

SEQ ID NO: 49626 - protein, 314 aa, Lycopersicon esculentum
MASLTVPAEVPSVAEDCEQLRSAFKGWGTNEKLIISILAHRNAAQRKLIRQTYAETFGEDLLKELDRELTHDFEKLVVVWTLDPAERDAYLAKEATKRWTKSNFVLVEIACTRSPKELVLAREAYHARNKKSLEEDVAYHTTGDHRKLLVPLVSSYRYGGDEVDLRLAKAESKVLHEKISDKAYSDDEVIRILATRSKAQLNATLNHYKDEYGEDILKQLEDEDEFVALLRATIKGLVYPEHYFVEVLRDAINRRGTEEDHLTRVIATRAEVDLKTIANEYQKRDSVPLGRAIAKDTGGDYENMLVALLGQEEE

SEQ ID NO: 49627 - protein, 603 aa, Escherichia coli
MEQNPQSQLKLLVTRGKEQGYLTYAEVNDHLPEDIVDSDQIEDIIQMINDMGIQVMEEAPDADDLMLAENTADEDAAEAAAQVLSSVESQIGRTTDPVRMYMREMGTVELLTREGEIDIAKRIEDGINQVQCSVAEYPEAITYLLEQYDRVEAEEARLSDLITGFVDPNAEEDLAPTATHVGSELSQEDLGDDDSADDDNSIDPELAREKFAELRAQYVVTRDTIKAKGRSHATAQEEILKLSEVFKQFRLVPKQFDYLVNSMRVMMDRVRTQERLIMKLCVEQCKMPKKNFITLFTGNETSDTWFNAAIAMNKPWSEKLHDVSEEVHRALQKLQQIEEETGLTIEQVKDINRRMSIGEAKARRAKKEMVEANLRLVISIAKKYTNRGLQFLDLIQEGNIGLMKAVDKFEYRRGYKFSTYATWWIRQAITRSIADQARTIRIPVHMIETINKLNRISRQMLQEMGREPTPEELAERMLMPEDKIRKVLKIAKEPISMETPIGDDEDSHLGDFIEDTTLELPLDSATTESLRAATHDVLAGLTAREAKVLRMRFGIDMNTDHTLEEVGKQFDVTRERIRQIEAKALRKLRHPSRSEVLRSFLDD

SEQ ID NO: 49628 - protein, 58 aa, Anabaena variabilis ATCC 29413
MKLLRLLLGLLLPPVGVFLTVGVGPTLVINILLTLLGWLPGSIHAVWVIAKHEEQFNY

SEQ ID NO: 49629 - protein, 405 aa, Oenococcus oeni PSU-1
MNRLASRIERTSNSGLDKLFAAKKENQIVFSAGYPDHKLFPEQELGQAAKEVFEKNQLKLLQYNTSVGLPELRQKLVKKMAWHDKIKTDNDHVMLTQGAQQGIYLTARLMLNKDDGLVVEGPTYIGALAAFQAYEPTFYEIPIKEDGMDVNFLEDTLKTHAVKMIYTVPDFQNPTGAVMSLEKRRQIIELANKYNVVILEDGTYRDLRYSGQNLPTIKSLDSEGRVIYVSSFSKILAPGLRLGWLTAEDKLFKALIGLKSGADIESSNLTMSIVNTYLDDNSLENHIALICNCYRQKKDAMLSAMRKNMPSIAQFTNPQGGFFIWLTMPKNFNMDKFVNQQQLSKSGVLITSSTNLYPSGNIKNGARINFTGESLANIEVGIKKLGQALSAAWDEQIKNKIIQVG

SEQ ID NO: 49630 - protein, 262 aa, Arabidopsis thaliana
ACGNHHRVDDFSFSPVSFGGFGLKKSFSCLKLKSQKPLRSVFYGKQIVFGDSQDESFRRSSAITAQTTLRIGTAQKWWEKGLKDNMREISSAQELVDSLTNAGDKLVVVDFFSPGCGGCKALHPKICQFAEMNPDVQFLQVNYEEHKSMCYSLGVHVLPFFRFYRGSQGRVCSFSCTNATIKKFRDALAKHGPDRCSLGPTKGLEEKELVALAANKELNFTYTPKPVPVEKEAATPDSNPSLPVPLPSMSSNDEKTLVSAGR

SEQ ID NO: 49631 - protein, 467 aa, Kluyveromyces lactis NRRL Y-1140
MLPYGTRAAVRSVGRFGTRSVPMGLTYRFVSQTNATKSTMAPATAIHDMAASQHTVPAPDAHLRTLSKSELFSLGMIGVCTINKPMLDLVIKLFPYVPLFMVKLFISPLYCGGDTPAEVVETGKRLQNRGINNMMLSLTIEDAEGTKNVDINYIVSETIKSVHTILKPLLVEQLESGKDINSIPPGYIALKPSALVANPAQVLLNFNNPEWKTQRDELVNNCSKITQEVYNLNQELLAKYPERKSPFFVSTIDAEKYDLQKAGVYELQRILFSKFNPASSPLISCVGTWQLYLVDSAADLAKDYERAKKEGYKLGLKLVRGAYIHSEPNRSVVYATKEGTDANYNKVMTTAIKDLLVNGEKSYYGHLVVASHNYDSQMLATKLLADQKNSVGKANVTLAQLLGMSDNVTHDLITNHKVENIIKYVPWGPPLETKDYLLRRLQENGDAVRADNGIPLIKAVLKTALHL

SEQ ID NO: 49632 - protein, 411 aa, Shewanella sp. ANA-3
MYTMDSNKMKRVVITGMGVVSSIGNNKQEVTESLKAGRSGITHSAQFEEMQLRSHVWGNIKLDPSELIDRKALRFMGDAAAYAYIAMQEAIKDAQLTEEQYSNPRVGLIVGTGGASSSNQVQAADILREKGVKRVGPYIVPRIMSSTASACLATPFKIKGMNYSISSACATSAHCIGHAVELIQMGKQDMVFAGGSEEVDWTLTMGFDAMGALSTKYNDTPEKASRTYDADRDGFVISGGGGILIVEELEHALARGAKIYAEVIGYGASSDGYDMVAPSGEGAVRCMQMALADVDTPIDFINTHGTSTPVGDVRELEALREVFKDKCPPVASTKSMTGHALGAAGVHEAIYSLIMMENSFIAPSINIDNLDEAAKDMPIVREYRDAELNTVMSNSFGFGGTNATLVMRKYK

SEQ ID NO: 49633 - protein, 588 aa, Thiobacillus denitrificans ATCC 25259
MCGIAGELRFDDRAPDAATMTRMLARLARRGPDAEGQHAAGPLRLGHRRLAIIDLSPRSAQPMVDAATGTALVFNGTIYNYPELRAELIALGHAFHSDGDTEVILRAYLEWGERCVERLHGMFAFAIWHRDELFLARDRLGIKPLYYSENAGSLRFASTPQALLAAGEVDTGLDAVALHHLFTLHAVVPAPRTILNGVRKLAPGTTLTVNLRGELRHRSYWSLHAQRPAETRSEAEWTDAIHDALRRAVQKRIEIADVKVGVLLSGGLDSSLLVALLAELGVSDLMTFSVGFEDHPEERGNEFEYSDPVAAMYGTRHHKYLIPNSEVLRRLPEAVGEMSEPMFAQDAVAFYLLAEQVSRTVKVVQSGQGADEVFGGYFWYPRMAAEAEGSALDRFRRHYFDRDHAEFLELADPRYHGPDYTGELIAARLAEPFADEFIDQVLRTDTTMLITDDPVKRVDNMTMAWGLEARVPFLDHTLVELAATMPPAMKLASEGKHVLKRIARGRVPDAVIDRKKGYFPMPALKYVRGEFLDFMRDILDSQACRQRGLYRRAYVEHLLDAPEQHHTRIQGSKLWHLALLEYWLQTHV

SEQ ID NO: 49634 - protein, 1123 aa, Neurospora crassa
MQTAKGKAEALGRKAKLASSYQELLDEFSSKDLRSVGNYTLGRLIGKGSFGKVYLATHKLTNGSKVVLKSANKDDTNLAREIHHHRQFVHPHIARLYEVVVTENLVWMVLEYCPGDELYNYLLQHGKLPVDKVQRIFAQLVGAVCYVHRQSCVHRDLKLENILLDKHENVKLCDFGFTREYEGSAKYLQTFCGTICYSAPEMLKGEKYAGEKVDVWSLGVILFALLCGELPFDDDDEQVTRRKILGEEPVYPDTLPEDALSLLKTLLSKRPLIRPSLPDILAHPFLAEYAPQQQEILKLEHPPPFSTPLEKETLHRMRSAGVDTEAVMESVIAQKCDALAGWWTLLIEKEERKAARRERKRREKEENRNSRRFSQASSRLNALATVEESQYAPFGEHSQRPRGRSESRRSGHYPALLIPDMPNLADYPRSATDTRSPIEGDMPPPPLDKDSIRGRSTSSSRHRKPIPPPKEGILRSARSRGSTLHLVTTSEVLDLNGSLQLPDDQNQVKKRPSKTKIFWKNWTHWLFESTRRHKNSQKRASQSTPNLADKAAVQSVKDGKSKDGDIQRPQTTNGYANKASPALSAGSAPFKNSNGCVGLSSSLPSSLPPVPRTYTSGSHKRQSLSPSPVTPRSTMRRASGTAGLRGRKSTSSSVSSIRSMHPTHHHTHSKASSTSSNNSVSTSVSKSALQASRSPHHSVKVLPATPTTVGFPSNIRYVRDRTGPPLGIGSIGGPSLFANSPNDYGSSDDGRLNAAFLGNGGGGRGGLSALNTNTQYYHMPPAPGSPNPFASVNSGGYFAPRAPGNGSPVVGPGGHGGVMFAKRKKNIFKGPVLNFGGSSAGASSRQREERSNSGASGSASASHSRSASASGMGRRSGEITIQEEEEPGEEEEEEQNAHGGGGYTGGGGGGYHNSHWGGSRTGAGWGGLGMAGMEEEEEVEEVDSFSPIITGPGEIVEERIIEDGEEEEEDDDAQESADEGTITDQRSRRSRPRSQDYDEEEEGMDVAGDARRHSNSNSNSNSNPIQTPTRPSAHGVEEEEEEEDHVDVGEEFKGLGYDVGVAITTAPHRLSADGPPLSSSTVRAVPEQQQKRGHRRGWSNGTSSSGGGGSNNNGEGSSGKVSR

SEQ ID NO: 49635 - protein, 272 aa, Polaromonas sp. JS666
MSRIASTFSALKSQGRKALIPYVTAGFPFADITPELMHSMVAGGADVIELGVPFSDPSADGPVIQKAGEKALALGIGLAQVLEMVRVFRQKDGTTPVVLMGYANPVERYDIKHGGSATESAFIRDAAQAGVDGVLIVDYPPEECVEFAARLRAHNMDLIFLLAPTSTSARMAQVAEVASGYVYYVSLKGVTGAGTLDVDAVEAMLPRIRQHVKVPVGVGFGIRDAATAKAIGKVADAVVIGSKIIQLIENQPRDKVATVARDFLKEIRAALD

SEQ ID NO: 49636 - protein, 111 aa, Oryza sativa
MAALQRSSQTFRRSGSSGLVWDERLMLDGHSERDQEDGALELRHSRSVGLIGLQRRHGDGAGHTRCNNSQAFHTRRVPPAQDPPSPKVPGCIFCGIFRKPVLSEPSKPRRF

SEQ ID NO: 49637 - protein, 390 aa, Zea mays
  misc_feature (272)..(272): Xaa can be any naturally occurring amino acid
  unsure (1)..(390): unsure at all Xaa locations
MQVTPAATLRAAAAHALRLSTDHCREEGPKIRVRFGSRKLSWTETLDATSPTRATRRQRRHSSVLKVSCWAAAHHQQNSNRQQFQATGIRIAKTLHAFYQFCRPHTIFGTIIGITSVSLLPVKSLDDFTLIAIWGFLEALAAALCMNVYVVGLNQLFDIEIDKVNKPTLPLASGEFSVPTAVVLVVAFLVMSISIGIRSKSAPLMCALLVSFLLGSAYSIDVPLLRWKRHAFLAAFCIIFVRAVVVQLAFFAHMQQHVLKRPLAPTRSVVFXTCFMCCFAAVIALFKDIPDVDGDRDFGIQSMTVRLGQQRVHRLCINILMTAYAAAILVGASSTNLYQKIVIVSGHGLLASTLWQRAQQFDIENKDCITQFYMFIWKLFYAEYFLIPFV

SEQ ID NO: 49638 - protein, 660 aa, Xylella fastidiosa Ann-1
MIARMVNVKRAFDWSEASTSVDALPVPETVTYSDNKQMQSVIAYLKQQEIKPLLRFITCGSVDDGKSTLIGHLLYGSQCLAEDQLADLTVDSQRYGTQGEHIDYALLLDGLAAEREQGITIDVAYRYFDTEKRKFIVADCPGHAQYTRNMATGASTADAAVVLVDARKGLLTQTRRHSYIVALLGIRHVVLAVNKMDLVGYDQQTFEAIASDYLALAVKLGINQVQCIPLSALEGDNLSKRSARMPWYVGPSLLEYLEALEPADVDLGAAMCLPVQWVNRPDSQFRGFTGTLAAGRVRSGDGVVVLPSGCVSRVVRVFNGDTEVHEAVAGQAVTLTLADEIDISRGDVIAATDDPPDVADQVTAYVLWMDDTALLPGRRYWLKLGARMVAASVSDIKHRVDVNTQEQRVAQRLQLNELGYCQLSLDAPVAFVPYARNRVLGSFILIDRQSNATVGAGTLDSGVHRASNVHWQPPYIDHVARARIKGQTPKVLWFTGLSGAGKSVIANIVDKRLHALGYHTFILDGDNVRHGLNRDLSFTAEDRVENIRRVAEVARLMVDAGLVVLVSFISPFRDERQLARERFAADEFVEVFVDVPLAVAEARDVKGLYAKARAGLIIDFTGIDSPYEPPQHPELHLRADQGTPEQLASQVLSLLGVEGK

SEQ ID NO: 49639 - protein, 804 aa, Lyngbya majuscula
LIQDVLESDEKSDLRHFTSQLKTAEPRYLLRNEILAAFNEYCTKHKKSEYFYHSSHLGKLIYYTQEIILEDESLCLIIRPKIAAKRAFRLFEDLRAQEVTPEELLDIRDRFVNRYNPKVGEVLQLDFQPFYDYSPLIRDPKNIGKGVRFLNRYLSSKLFQDPEQWLESLYGFLKVRHFHGNQLLINERIHNHQQLSEQVKLALEFVSDRPDSESYDKFRFKLQEMGFEPGWGNTASRVRETLAMLDELIDEPDDRALEQFLSRIPMIFRIVLVSVHGWFGQEGVLGRPDTGGQVVYVLDQAKSLEKQLQENLTLAGLNIQPKVIILTRLIPNNDGTRCNERLEKIKGTENAWILRVPFREFNPKVTQDWISRFEIWPYLETYAIDAEKELLAEFQGRPDLIVGNYSDGNLVAFLLARRLKVTQCNIAHALEKSKYLFSNLYWQDSEQQYHFSLQFTADLIAMNAANFIISSTYQEIVGTADSVGQYESYQNFTMPDLYHVINGIELFSPKFNVVPPGVNETVFFPYTRTQGRVASDIKRLDEFLFTLDDEAQVFGKLDYPNKRPIFSMARLDRIKNLTGLAECFGKSRKLQERCNLILIAGNLRTEDSSDSEEKAEIIKLYQIIEEYNLYGKIRWLGVRLSKSDSGEVYRVIADRHGIFVQPALFEAFGLTILESMISGLPTFGTQFGGPLEIIQDKVNGILINPTNQEEMAQKILDFVTKCEENPQYWEEISNQGIERVYSTYTWKIHTTRLLSLARIYRFWNYTSKANQEDMLRYLEALFHLIYKPRAKKLLEEHLTLPARA

SEQ ID NO: 49640 - protein, 266 aa, Novosphingobium aromaticivorans DSM 12444
MTRLSNAFAKGRPALVTFVTGGDPTPGATDAILDALVEGGADVIELGMPFTDPMADGPAIQLANLRSLGAGTKTADVFRIAADFRARHPEVPLVLMGYANPMVTRGPDWFAAECVKAGVDGVICVDIPPEEDPELGPALRGAGVSLIRLATPTTDAARLPAVLEGSSGFLYYVSVAGITGMQQAAQASIEEAVARIKQSATIPVAVGFGVRTPEQAAAIAKVADGVVVGSALVDLVARHGADAAGPVKELTAALAAAVHSARKEIA

SEQ ID NO: 49641 - protein, 428 aa, Prochlorococcus marinus str. MIT 9313
MNTTRSQAIFSAAQRLMPGGVSSPVRAFRSVGGQPIVFDRVKGAYAWDVDGNRFIDYIGSWGPAICGHAHPEVIVALQDALEKGTSFGAPCELENQLAEMVIDAVPSVEMVRFVNSGTEACMSVLRLMRAFTGRDKLIKFEGCYHGHADMFLVKAGSGVATLGLPDSPGVPRSTTSNTLTAPYNDLEAVKELFAENPDAISGVILEPVVGNAGFITPEPGFLEGLRELTREHGALLVFDEVMSGFRISYGGAQARFGVTPDLTTMGKVIGGGLPVGAYGGRAEIMEMVAPAGPMYQAGTLSGNPLAMTAGIKTLELLKQEGTYERLESTTERLIKGILEAAKAAEVPITGNSIGAMFGFFLCEGPVRNFEDAKATDTELFGKLHRAMLERGIYLAPSAFEAGFTSLAHSEADIETTLKAFRESFAAVA

SEQ ID NO: 49642 - protein, 153 aa, Calystegia sepium
MAVPMDTISGPWGNNGGNFWSFRPVNKINQIVISYGGGGNNPIALTFSSTKADGSKDTITVGGGGPDSITGTEMVNIGTDEYLTGISGTFGIYLDNNVLRSITFTTNLKAHGPYGQKVGTPFSSANVVGNEIVGFLGRSGYYVDAIGTYNRHK

SEQ ID NO: 49643 - protein, 712 aa, Zea mays
MAATTSTTPAVSFSLPSPPHRQGAPRRRAPFLLRAASTAAPPSPDLSIQLSPRASPPASTNGAATALGRPVAASFARDRAEDLQAEARAMARAAGATVYSPELLAARYGSRPFKVALRAAEVLSKLASFGVKVLLDERRGESSSERRRARAVELRTIFTRLGPTFVKIGQGLSTRPDLCPAEYLEELAELQDSLPTFPDEDAFACIERELGFTLDSIYSSISPSPIAAASLGQVYKAQLKYSGKLVAVKVQRPGIEDAIGLDFYLLRGLGFLINKYVDIVTSDVVALMDEFARRVFQELNYVQEGQNARRFKKLYADKQDILVPDIFWDYTSAKVLTMEWIEGVKLNQQAAIESQGLKVLDLVNIGIQCSLRQLLEYGYFHADPHPGNILATPEGKLAFLDFGMMSETPEDARVAIIGHVVHLVNRDYEAMARDYYALDFLEPDVDVSPIVPALKNFFDDALNATVSELNFKTIVDGLGAVLYQYPFNVPAYYALILRSLTVLEGLALYADPDFKVLAASYPYFAKRLLTDPNPYLRDALIELVFKDGKFRWNRLENLLVQGRQDREFAAKDALQPVLKLLLGPDGEELRVLVVKEAVRVTEAITIGTLIDSYNASPAFLKPLISSGNPAGPFKFSEAEQEQMLELRDQVFRVWGLLRSSNNFDPSLLQPIVQVLQEPEARVLGSRVAGGVTQRLAARLLQQLLRIPSPGSS

SEQ ID NO: 49644 - protein, 113 aa, Zea mays subsp. parviglumis
MGRTACCAKEGVKRGAWTSKEDDALAAYVKAHGEGKWREVPQKAGLRRCGKSCRLRWLNYLRPNIRRGNISYDEEDLIIRLHRLLGNRWSLIAGRLPGRTDNEIKNYWNSTLV

SEQ ID NO: 49645 - protein, 328 aa, Neurospora crassa
MENYQKLEKIGEGTYGVVYKARDLANSGRIVALKKIRLEAEDEGVPSTAIREISLLKEMRDPNIVRLLNIVHADGGQGHKLYLVFEFLDLDLKKYMEALPVSDGGRGKALPEGTGAGLHNLGLGEDIIKKFMSQLCEGVRYCHSHRVLHRDLKPQNLLIDRDGNLKLADFGLARAFGVPLRTYTHEVVTLWYRAPEILLGGRQYSTGVDMWSVGCIFAEMCTRKPLFPGDSEIDEIFKIFRLLGTPTEDIWPGVTSYPDFKASFPKWVRDYNVPLCQNLDDVGLELLESMLVYDPAGRISAKAACNHPYFEDYNPKPKSKYRDSSRYA

SEQ ID NO: 49646 - protein, 166 aa, Oryza sativa
MPNPRTQRKHICFVLTAPCSTPHTLSSHIGRQYVATPCARAHTYTHTTTGRRRALFALLARPYMAGLQRSSETFRRSGSSGMVWEDKLQQSGELGGKAEAPAPAARAAAQRSGSSGHGGYKAGHVQPALDPPSPRVAACGFCNLFGKDKHHQARPRGGASAKSRRR

SEQ ID NO: 49647 - protein, 428 aa, Escherichia coli K12
MKIATIKTGLASLAMLPGLVMAAPAVADKADNAFMMICTALVLFMTIPGIALFYGGLIRGKNVLSMLTQVTVTFALVCILWVVYGYSLAFGEGNNFFGNINWLMLKNIELTAVMGSIYQYIHVAFQGSFACITVGLIVGALAERIRFSAVLIFVVVWLTLSYIPIAHMVWGGGLLASHGALDFAGGTVVHINAAIAGLVGAYLIGKRVGFGKEAFKPHNLPMVFTGTAILYIGWFGFNAGSAGTANEIAALAFVNTVVATAAAILGWIFGEWALRGKPSLLGACSGAIAGLVGVTPACGYIGVGGALIIGVVAGLAGLWGVTMLKRLLRVDDPCDVFGVHGVCGIVGCIMTGIFAASSLGGVGFAEGVTMGHQLLVQLESIAITIVWSGVVAFIGYKLADLTVGLRVPEEQEREGLDVNSHGENAYNA

SEQ ID NO: 49648 - protein, 217 aa, Medicago sativa subsp. X varia
GSWLVMRLMEPGYMVRATVRDPENLKKVSPLLELPGAKSKLSIWKADLGEEGSFDEAIKGCTGVFHVATPMDFESKDPENEMIKPTIKGVLDIMKACLKAKTVRRLIYTSSAGTLNVTEDQKPLWDESCWSDVEFCRRVKMTGWMYFVSKTLAEQEAWKFAKEHKMDVITIIPPLVVGPFLIPTMPPSLITALSPITGNEAHYSIIKQGQYVHLDDL

SEQ ID NO: 49649 - protein, 257 aa, Bradyrhizobium sp. BTAi1
MTDSIRLDGRVAVVTGAAGLIGAATMRLLAARGARIVAIDRREQDLNAAIAALPASAEPLAIAADVTDEAQVAAYVQRACDQFGTIDVFFNNAGIEGEIKSITDYPLEAFRRVLDVNVVGVFLGLKHVLPVMLQQNRGSIINTASIAGLIGSPQIAVYSASKHAVIGLTKSAAWECTGTNVRVNCICPGLIDSRMLSAIIEGRSGAPVPIDRIVDRVPARRLGQGSEVAAIVAFLASDDASYVSGAAYTVDGGRTAA

SEQ ID NO: 49650 - protein, 388 aa, Bradyrhizobium sp. BTAi1
MFERLSRQPDDPLLALIGIFKADPRADKVDLGVGVYRDEAGHSPIFRAVKAAERLIWESQSSKAYVAPEGDQTYLDLLWTMVGGTASPVHAAGVQTPGGSGALRLAADLIRQAGTGKIWLGLPSWPNHAGIFAAAGLKIETYPYFDVPSQSLQLDSMIEALQRAEPGDAVLLHASCHNPTGAPLGAEDWARVTAVIAARGLVPLIDSAYQGFGAGFDGDVAGLRAMIAAIPEALIAVSCSKSFGLYRERTGALYAVAAAQAAADTARSNLVAIARTSYSMPPDHGSAIVKTILGTPDLYDDWRSELDSMRQRLATLRRAFADALGDRWSNSLAIGRQEGMFSLLPVTPADVMALREKHGVYMPTSGRINIAGLKLADVARVAGLFKAL

SEQ ID NO: 49651 - protein, 285 aa, Brassica napus
MAKDVEGAEGFAARDYEDPPPTPFFDAEELTKWSLYRAVIAEFVATLLFLYVTVLTVIGYKISSDTKAGGDECGGVGILGISWAFGGMIFILVYCTAGISGGHINPAVTFGLFLARKVSLVRAVLYMVAQCLGAICGVGFVKAFQSAYYVRYGGGANSLADGYSTGTGLAAEIIGTFVLVYTVFSATDPKRNARDSHVPVLAPLPIGFAVFMVHLATVPPPGPGINPARSFGAAVIYNESKPWDDHWIFWVGPFIGAAIAAFYHQFVLRASGSKSLGSFRSAANV

SEQ ID NO: 49652 - protein, 449 aa, Bacillus anthracis str. A2012
MISIGGVIGAGLFVGSGAVVHSAGPGSIVSYALAGLLVVFVMRMLGEMAAINPTSGSFATYAREAIGPWAGYTIGWLYWFFWVIVIAIEATAGAGIIQYWIPEIPLWLLSLILTILLTLTNVFSVKSFGEFEYWFSFIKVISIVLFLCLGLAVILGFVPGTEAPGTSNLVGQGGFMPNGISSVLLGITVVIFSFMGSEIVAVAAGESAEPVKAVKTATNSVIWRILVFFIGSIAVVVTLLPWNSANILKSPFVAVLEHIGIPAAAQIMNFIVLTAVLSCLNSGLYTNSRMLFSMAERGDAPKAFLKLNSSGVPVRAVLFGTFFAYIGVVFSYISPDKVFLFLVNASGGIALLVYLVIAISHLKIRKKMGRVEQQNLKVKMWFFPYVTYVTIAAIIAVLIAMLAIESLRSQALLTMLVTVLIIISYFIFNRNKNSTVLNTKSKNEESVRF

SEQ ID NO: 49653 - protein, 436 aa, Polaromonas sp. JS666
MKLADNKATLSFSNGSPSVDLPVYHGSVGPDVVDIRKLYAQTGMFTYDPGFLSTASCQSAITYIDGDKGELLYRGYPIEQLATTCDYMETCHLLLYGELPNGDQKKDFVSRVTNHTMVNEQMQFFLRGFRRDAHPMAIMTGLVGALSAFYHDSTDITNPEHREIAAIRLIAKMPTLVAMAYKYTVGQPYMYPKNNLSYAGNFLHMMFATPCEEYKVSPVLERALDRIFILHADHEQNASTSTVRLCGSSGTNPFAAIAAGVACLWGPAHGGANEAALNMLGDIQKNGGVEKIGDFIKQVKDKNSGVKLMGFGHRVYKNYDPRAKLMQETCKEVLHEMGLENDPLFKLAMALEKIALEDDYFVSRKLYPNVDFYSGIVQRAIGIPVPLFTAIFALARTVGWIAQLNEMIGDPEYKIGRPRQLFTGSIPRDVKPMAQR

SEQ ID NO: 49654 - protein, 312 aa, Zea mays
MAESFVLNTGSRIPSVGLGVWQIQPDAANDAIYAAVKAGYRHIDCAAAYNNEKEVGLALKKLFEDGVVKRDDLFITSKLWAANHAPEDVEEGIDTTLQDLQLDYLDLYLIHGPIRIKKGTSTMTPENFLPTDIPATWAAMEKLYDSGKARAIGVSNFSCKKLHDLLAVARVPPAVNQVECHPVWQQDKLRKLCQSNGVHLSAFSPLGSPGSPWINGPSVLKNPIVVSVADKLQKTPAQVALRWGIQMGHSVLPKSANESRIKENIDIFGWSIPEDLMAKFSEIKQVRLLTAEFVVHPQAGYNTLEDFWDGEI

SEQ ID NO: 49655 - protein, 436 aa, Glycine max
MSPAAGVSVPLLGDSKGTPPPASVPGAVFNVATSIVGAGIMSIPAIMKVLGVVPAFAMILVVAVLAELSVDFLMRFTHSGETTTYAGVMREAFGSGGALAAQVCVIITNVGGLILYLIIIGDVLSGKQNGGEVHLGILQQWFGIHWWNSREFALLFTLVFVMLPLVLYKRVESLKYSSAVSTLLAVAFVGICCGLAITALVQGKTQTPRLFPRLDYQTSFFDLFTAVPVVVTAFTFHFNVHPIGFELAKASQMTTAVRLALLLCAVIYLAIGLFGYMLFGDSTQSDILINFDQNAGSAVGSLLNSLVRVSYALHIMLVFPLLNFSLRTNIDEVLFPKKPMLATDNKRFMILTLVLLVFSYLAAIAIPDIWYFFQFLGSSSAVCLAFIFPGSIVLRDVKGISTRRDKIIALIMIILAVVTSVLAISTNIYNAFSSKS

SEQ ID NO: 49656 - protein, 94 aa, Brassica napus
  misc_feature (92)..(92): Xaa can be any naturally occurring amino acid
  unsure (1)..(94): unsure at all Xaa locations
MGFSEAQEELVLRSWKAMKSDSESTALKFFLRIFEIAPGAKQMFSFLRDAGDAPLEKHPKLKAHAVTVFVMACESATQLRSTGDVKVREATXKR

SEQ ID NO: 49657 - protein, 113 aa, Zea luxurians
  misc_feature (109)..(109): Xaa can be any naturally occurring amino acid
  unsure (1)..(113): unsure at all Xaa locations
MGRRACCAKEGVKRGAWTTKEDDALAAYVKAHGEGKWREVPQKAGLRRCGKSCRLRWLNYLRPNIRRGNISYDEEDLIIRLHKLLGNRWSLIAGRLPGRTDNEIKNYWXSTLV

SEQ ID NO: 49658 - protein, 475 aa, Bordetella parapertussis 12822
MSKQFDVVIIGAGPGGYIAAIRAAQLGMSVACIDAWQNGQGGPAPGGTCTNVGCIPSKALLQSSEHYEQANHHFAEHGIEVKGVSLKLDTLIGRKNTVVKQNNDGILYLFKKNKVTYFHGKGAFAGQVDGGWSIKVTGTTDADLVAKHVIVATGSSARELPGLPFDEKNILSNDGALNIGAVPKKLGVIGAGVIGLEMGSVWRRLGAEVTILEAMPEFLAAADQQVAKEALKSFAKQGLDIQTGVKIGEIKAAAKSITVPYVDAKGAEQKLVVDKLIVSIGRVPYTGGLNAEAVGLKLDERGFVAVDEDCKTNLPNVWAVGDVVRGPMLAHKAEEEGVAVAERIAGQHGHVNFATVPWVIYTSPEIAWVGKTEQQLKAEGREYKAGSFPFMANGRARALGDTTGFAKVIADAKTDEVLGVHIIGPMASELISEAVTIMEFRGAAEDIARICHAHPTLSEAVKEAALAVDKRTLNF

SEQ ID NO: 49659 - protein, 113 aa, Zea luxurians
MGRRACCAKEGVKRGAWTSKEDDALAAYVKAHGEGKWREVPQKAGLRRCGKSCRLRWLNYLRPNIRRGNISYDEEDLIIRLHRILGNRWSLIAGRLPGRTDNEIKNYWNSTLV

SEQ ID NO: 49660 - protein, 498 aa, Anabaena variabilis ATCC 29413
MKTPLNCQNYINGQWLNAATETTLNSHNPANKSEIVATFPRSQADDTDRAVTAARQAYGSWRKVPAPARAEYIFRVGELLLQHKEELAQLISREMGKPITEARGDVQEGVDCAFYSAGEGRRLFGQTTPSEMPNKFAMTVRMPIGVCALITPWNFPVAIPCWKAMPALVCGNTVILKPAEDTPACATKLIEIFAAAGLPPGVINLVHGVGEEAGKALVEHPNIDLVSFTGSSATGAYVGETCGRTHKRVCLEMGGKNAQVVMEDADLELALDGALWGAFGTTGQRCTATSRLILHRDIKEKFTTMLRERTSQLRLGAGTEPETDIGPIINNRQLQRVHEYMNIAREEGAKILIGGEIVTEGQLKQGYFFQPTILDNVTPQMRVAREEIFGPVVALIEVSTFEEAIAILNDTKYGLSSSVYTRDINRAFVAMRDIEVGITYINGPTIGAEVHLPFGGVKQTGNGHREAGTTALDVFTEWKSVYVDFSGSLQRAQIDNRS

SEQ ID NO: 49661 - protein, 329 aa, Rubrivivax gelatinosus PM1
MITGFLGAGKTTLLNRILQGAAGKRYAVIVNEFGELGIDGSLVVGAEEEVHELNNGCVCCRVRGDLIRVMSGLIRRPGRFDGIIIETSGLADPAPVIQTLHFDDFLRQHTQPDSVICVADARHLARQLQAAPEAGAQLAQADLVLLNKCDLAKADELAVSEIAVERVNPTAEVVRCERGDIELDRLIGRGAFDLSRLRVPPLQIQRGRIGRVPHAYVEVEEGRHGDGLRCVSLSIEQAFDPSLFVGWLLRFVRENGEHLLRGKGIVSLRGSEKRFVFQTVHMTVDSGMDRAWKDGEPRGSRLVFIGRDLSAIALREQLEACLAQVEVTP

SEQ ID NO: 49662 - protein, 131 aa, Brassica napus
MVQTKKFRGVRQRHWGSWVAEIRHPLLKRRIWLGTFETAEEAARAYDEAAVLMSGRNAKTNFPLKNNSTIDTSESKTDISSSSSSSSSSSSSSLSSILSAKLRKCCKSPSPSLTCLRLDTTSSHIGVWQKR

SEQ ID NO: 49663 - protein, 793 aa, Arabidopsis thaliana
MAARNLEKMASIDAQLRLLAPGKVSEDDKLIEYDALLLDRFLDILQDLHGEDVREFVQECYEVAADYDGNRNTEKLEELGNMLTSLDPGDSIVVTKSFSNMLSLANLAEEVQIAYRRRIKKLKKGDFADEASATTESDIEETLKRLLQLNKTPEEVFDALKNQTVDLVLTAHPTQSVRRSLLQKFGRIRDCLTQLYAKDITPDDKQELDEALQREIQAAFRTDEIRRTPPTPQDEMRAGMSYFHETIWKGVPKFLRRVDTALKNIGINERVPYNAPLIQFSSWMGGDRDGNPRVTPEVTRDVCLLARMMAANLYFSQIEDLMFEMSMWRCNEELRVRAERQRCAKRDAKHYIEFWKQIPANEPYRAILGDVRDKLYNTRERARQLLSSGVSDVPEDAVFTSVDQFLEPLELCYRSLCDCGDRPIADGSLLDFLRQVSTFGLALVKLDIRQESERHSDVLDAITTHLGIGSYKEWSEDKRQEWLLSELSGKRPLFGPDLPKTEEVADVLDTFKVISELPSDSFGAYIISMATAPSDVLAVELLQRECGITDPLRVVPLFEKLADLESAPAAVARLFSIEWYRNRINGKQEVMIGYSDSGKDAGRLSAAWQLYKTQEELVKVAKEYGVKLTMFHGRGGTVGRGGGPTHLAILSQPPDTIHGQLRVTVQGEVIEQSFGEEHLCFRTLQRFTAATLEHGMHPPVSPKPEWRVLMDEMAIIATEEYRSVVFKEPRFVEYFRLATPELEYGRMNIGSRPSKRKPSGGIESLRAIPWIFAWTQTRFTYPCGLALEEHSNA

SEQ ID NO: 49664 - protein, 805 aa, Zea mays
MPPATAMAPPSQPPSNSGDPLYPELWRACAGPLVTVPRVGDLVFYFPQGHIEQVEASMNQVAGNQMRLYDLPPKLLCRVLNVELKAETDTDEVYAQIMLMPEPEQTDVPAEKPSSAPAASPRPAVRSFCKTLTASDTSTHGGFSVLRRHADECLPPLDMTQSPPTQELVAKDLHGMEWRFRHIFRGQPRRHLLQSGWSVFVSSKRLVAGDAFIFLRGENGELRVGVRRAMRQLSNVPSSVISSQSMHLGVLATAWHAINTKSMFTVYYKPRTSPSEFIIPYDQYMESVKNNYSIGMRFRMRFEGEEAPEQRFTGTIVGCENLDPLWPDSSWRYLKVRWDEPSTIPRPDRVSPWKIEPASSPPVNPLVHSSRAKRPRQNVPPPSLESSVLTKEGATKVEIDSAQTQHQNSVLQGQEQMTLRNNLTESADSDSTVQKPMMWSPSLNGKAHTHFQQRPAMDNWMPLGRRENDFKDTRSAFKDARTASQSFGDTQGFFVQAYDDNHHRLSFKNQGSTHRFADPYFYMPQQSSVTVESSTRTQTANNDLCFWGDQNAMYGNPSDQQQGFNFGQNPSSWLNQPFPQVEQPRVVRPHATVAPFDLEKTREGSGFKIFGFQVDTTSPSPVQLSSPLPAIQEHVLQTRPSAPVNELQPVQIECLPEGSVSTAGTATENIQQAPQSSKDIQSKSQGASTRSCTKVHKQGVALGRSVDLSKFTDYGELQAELDKMFDFEGELVSGSQNWQIVYTDDEGDMMLVGDDPWEEFCSIVRKIYIYTKEEVQKMNSKSAAPRKEESPAAGGGGGCAAATNE

SEQ ID NO: 49665 - protein, 377 aa, Thermus aquaticus
MEVARGLEGVLFTETRMCFIDGEAGRLYYYGIPIQELAEKSTFEETTYLLLHGRLPQRGELEAFKKDLAARRALPSHLLESFRRYPASAHPMSFLRTAVSELGMLDPTEGDISREALYQKGLDLIAKFATIVAANKRLKEGKEPLPPREDLSHAANFLYMANGVEPSPEQERLMDAALILHAEHGFNASTFTAIAAFSTETDLYSAITAAVASLKGPRHGGANEAVMKMIQEIGAPERAREWVREKLSKKERIMGMGHRVYKAFDPRAGVLEKLARRVAEKHGHSPEYQILKIVEEEAGKVLNPRGIYPNVDFYSGVVYSDLGFGLEFFTPIFAVARISGWVGHILEYKEQDNRLLRPDAKYIGELDRPYVPLEARG

SEQ ID NO: 49666 - protein, 533 aa, Oryza sativa (japonica cultivar-group)
MGSCCSRATSPDSGRGGANGYGYSHQTKPAQTTPSYNHPQPPPPAEVRYTPSAMNPPVVPPVVAPPKPTPDTILGKLYDDVRSVYSLGKELGRGQFGVTYLCTEIASGKQYACKSISKRKLVSKADKEDIRREIQIMQHLSGQQNIVEFRGAYEDKSNVHVVMELCAGGELFDRIIAKGHYSERAAATICRAVVNVVNICHFMGVMHRDLKPENFLLATKEENAMLKATDFGLSVFIEEGKMYRDIVGSAYYVAPEVLRRNYGKEIDVWSAGVILYILLSGVPPFWAETEKGIFDAILQGEIDFESQPWPSISESAKDLVRKMLTQDPKKRITSAQVLQHPWLRDGEASDKPIDSAVLSRMKQFRAMNKLKKMALKVIASNLNEEEIKGLKQMFTNMDTDNSGTITYEELKAGLAKLGSKLSEAEVKQLMEAADVDGNGSIDYVEFITATMHRHKLERDEHLFKAFQYFDKDNSGFITRDELESALIEHEMGDTSTIKDIISEVDTDNDGRINYEEFCAMMRGGGMQQPMRLK

SEQ ID NO: 49667 - protein, 598 aa, Polaromonas sp. JS666
MTATSKLPKRKFDVVIVGAGGSGMRASLQLARAGLNVAVLSKVFPTRSHTVAAQGGIGASLGNMSEDNWHYHFFDTVKGSDWLGDQDAIEYMCREAPKVVYDLEHMGMPFDRNPDGTIYQRPFGGHTANYGEKPVQRACAAADRTGHAMLHTLYQQNVKEKTSFFVEWLAMDLIRDADGDVVGVTALEMETGDVHIFEAKTTLLATGGAGRIFAASTNAFINTGDGLGMAARAGIPLEDMEFWQFHPTGVHGAGVLLTEGCRGEGAILRNSNGERFMERYAPAYKDLAPRDYVSRCMDQEIKEGRGCGPNKDYINLDMTHLGAETIMKRLPSVFEIGHNFANVDITKEPIPVVPTIHYQMGGIPTNIHGQVVTQNADNKSEVVNGLYAVGECSCVSVHGANRLGTNSLLDLLVFGRAAGNHIVEFNNANKMHKPLPADAADLTLARIARLDNASGGEYAQDVANDIRTAMQTHAGVFRTQALMDEGVTKIAALRERVKNIGLKDKSKIFNTARIEALEVENLIEAAEATIVSAAARHESRGAHSVDDYGDTPEHPNGRNDTDWHKHTLWHSEGSRLSYKPVQMKPLTVESVPLKVRSF

SEQ ID NO: 49668 - protein, 679 aa, Kluyveromyces lactis NRRL Y-1140
MTIDQRYNLNVPSDGPRVHQHYMMNSLKLFDAKVSINHWQLRNCITADTLNPGSVYYIFDHSIRSLDTRTLSGDAGVRKRRYSTSVGRVPYTNDFHAATNRVAEFPFKPRSFNEKNGLIVCGGHIGNDDNGYIPSRPMGNYEQGFISPEERSMDVNCVKIATSNILSDHTAYSNTRQWKGIISLYNKKTNISMTSKLGQYINNCVELYESSNNQFDLYTCNNDGHLYQCEINNSDFVLKRRFADLKFALNNTAISHDGKTMCVTGDSNKIALYKKNELTDVFSLSYDTLSGGATDGSGSSTTYTHKRIPRYALPDNSSYVDHIYELPGADNGFFTSFGENDMMMATVFQNGNCYVYDVRNMENPLTEIHTTRSQGSVPQSGAFRICKFSEGMEDLLFISEHQQRVHVIDTRNFMNRQVIMVPYKYTDSEFAGDDSDSSLNYENRNWHEPTMSADRRRNSEPFSDNPYITMATKIPIQHLQPTILPYSSVSDSALTSEEESNDQGYPDDDEFDNDTETYPSRDTVSQEGGQVRRRNSNFTVRRYSTSSRVLTEVNEEPVVNIDPTIMGAEAPHYEDTTFATFPPTLQTLRQTYSENVDASIPVMRPFQMPSRLLRRRPRNYTPGRNPRDLMTEREECNISGIEWLRDREGSSLVIGTDYGIIKWNINYWARRSFPSYDFC

SEQ ID NO: 49669 - protein, 585 aa, Arabidopsis thaliana
MDVMKLDHDSVLKELERITSKAAEVQDNILRGILERNKDTEYLSKYMNGSKDVLEFKRAVPIIIYKDIYPYIQRIANGEDSSLITGHSITEILCSSGTSAGEPKLMPTIPEDLDRRTFLYNLIIPIVNKYITGLDKGKAMYLNFVKAETSTPCGLPIRAVLTSYYKSKHFQCRPYDPFNDLTSPIQTILCEDSNQSMYCQLLAGLIHRHKVMRLGAVFASAFLRAISYLEKKWSQLCEDIRTGSLNPMITDPGCQMAMSCLLMSPNPELASEIEEICGRSSWKGILCQLWPKAKFIEAVVTGSMAQYIPALEFFSQGKIPLVCPMYASSETYFGVNVEPLSKPSDVVFTLLPNMCYFEFIPLGKNGTLSFDLDDDEQVPCDKVVDLVNVKLGRYYELVVTTFAGLYRYRIGDVLQVAGFYNGAPQFRFICRRNVVLSIDLDKTNEEDLHRSITLAKKKLGSNAFLAEYTSYADTSSVPGHYVLFWEIQGHLEPKLMEECCVAVEEELDYIYRQCRTKERSIGALEIRVVKPGTFEKLMDLIISQGGSFNQYKTPRCVKSNSATFKLLNGHVMASFFSPRDPTWVP

SEQ ID NO: 49670 - protein, 135 aa, Agropyron cristatum
KSRPDALVQIAALAIRSGNGLLLKGGKEAMRSNTILHKVITSVIPDVVGKKLIGLVKSKDEIADLLKLDDVIDLVIPRGSNRLVSQIKAQTKIPVLGHADGICHVYIDKSADMDMAKRIVLDAKVDYPAACNAME

SEQ ID NO: 49671 - protein, 328 aa, Polaromonas sp. JS666
MSKKPVRVAVTGAAGQIGYALLFRIASGEMLGKDQPVILQLLEVPVEGPQKALKGVMMELDDCAFPLLAGMEAHSDPMTAFKDADYALLVGSRPRGPGMERAELLAVNGAIFTAQGKALNAVASRNVKVLVVGNPANTNAYIAMKSAPDLPRKNFTAMLRLDHNRAASQIAAKTGKAVADIEKLTVWGNHSPTMYADYRFATINGESVAKMINDQEWNANVFLPTVGKRGAAIIEARGLSSAASAANAAIDHMRDWALGTNGKWVTMGIPSDGQYGIPKDTMFGFPVTCENGEYKLVEGLEIDAFSQERINKTLEELQGEQAGVAHLL

SEQ ID NO: 49672 - protein, 241 aa, Solibacter usitatus Ellin6076
MNPDISLILPAYNEARVIPMTVGEAVQYFVSRGLSYEIIVAADGSDGTREIVREMARENPALQTIGSDARRGKGLAIREGVALATGNIIGYADADNKVPIEELDKFRPVLATGVDAAIGTRRGGATIERAQPLYRRIGSLGFLWFMQTLVGLPGINDTQCGFKFFQRDAAKEVFRRQKVDAYMFDVEILAIARRLGYRIQQVPVRWRDDADSRLDLVSGNLRNVRDIFRIGLEHRFGGRLK

SEQ ID NO: 49673 - protein, 400 aa, Gloeobacter violaceus PCC 7421
MTQANNVLDALQQPAMELEALALMAEEDDPYAAQAAEAADAAAARPARRRSRAQRAHYTEDSIRVYLQEIGRIRLLRADEEIELARQIADLLTLERLRARMGAAGTDMHSDVADLLGDDDLLTENLLASGDQVTESEQELRRWAEAAGIAYEQFRDRIAYGRRAKDKMVQSNLRLVVSIAKKYMNRGLSFQDLIQEGSLGLIRAAEKFDHEKGYKFSTYATWWIRQAITRAIADQSRTIRLPVHLYETISRIKKTTKLLSQELGRKPTEEEIATRMEMTIEKLRFIAKSAQLPISLETPIGKEEDSRLGDFIEADGETPEDKVAKNLLREDLEAVLNTLSPRERDVLRLRYGLDDGRMKTLEEIGQLFNVTRERIRQIEAKALRKLRHPNRNSVLKEYIR

SEQ ID NO: 49674 - protein, 781 aa, Gloeobacter violaceus PCC 7421
MGARAFKPGWTSVAAALSRLDLGLLAIGYAVLLTLRNSYSEIARWPWCLLPQGLLLLGALQATVHCRRLGQPFDALVGLTVAALVVSAALSPDPERSWWYATMAGGYFALLYGFSGRWPRGVPLLGIVALAQVLVSVAGLYQYALLVVIPEWQAGPPFHFFNNVYPLGHHNFGSGLLSLTLPVTLALALARPGKGRWLWGLSGLLGLALLFSTQSRGGWLGALAGCVLVCGLLIRLDRRAWLALGAAGGVLLAVGMLSLTFASTKSQLFLQGRDISAAQRWVFWQTGVRLWLDHPLFGVGQGVTGFLFPGYRSEIDPWMARTAQQLHSTPVHLLAETGLAGLAAYLGWLGGCALAIGRLLSRERTAAAALAGALAGYAVSSLTDFQLENPAIALTLVLLAAELVRLSHPEPPLAVPGLRPLAVLLLAAVLSGWVRIDRGWQKADQAFALRRRGDIPAFIEAMRQAESLDPRQPYYPLQTAQTLLFAARRLEEADPRRAQWIAVANRAAERAVRLLPTDPFTLTASGWLHYYRGELSQAAGRFGEALRYDPTTTATLRLGLGLTLAAQGETEAALPHLKAELLLFPDQWTDERWHTGALSALAPRLAREALTVYDRLLARYPMEHDALYLRSTLWLWLGRPEQALQSLNAMPATQTVQPDMPIALRLPWRVTAGRAAGVRILALRQAGRREQAEEAIEALAGSELRTARCLADAFAQPVARAKERYYVANGQDYFLLRRTGGPVLEFYEPLHLKTWAAMDCVTYGGDGRNWRLPTAGWLPVQ

SEQ ID NO: 49675 - protein, 185 aa, Zea mays
  misc_feature (36)..(36): Xaa can be any naturally occurring amino acid
  unsure (1)..(185): unsure at all Xaa locations
PGYDAVEFELHVQEPYFTQLRAGVKKVEGRLATGTXRITQGSLLLFNKCLLLNVEAVRKYNSFSEMLKGEKISNVLPGISSIVEGVKVYRKFYAEEKENSYGVLAISVSKPTSQPYITMNNILAGLGYDGLGRLLGMAKTTGTVPDGLPPPRSALLSSCMGLVQPNFIGFLEPYTPEGYAKGWKH

SEQ ID NO: 49676 - protein, 423 aa, Oryza sativa
  misc_feature (220)..(220): Xaa can be any naturally occurring amino acid
  unsure (1)..(423): unsure at all Xaa locations
MEAPPGPEPMELDAPPPPAAVAAAAATAGISEKVLQKKEEGGGDAVTGHIISTTIGGKNGEPKRTISYMAERVVGTGSFGIVFQAKCLETGETVAIKKVLQDRRYKNRELQLMRAMEHPNVICLKHCFFSTTSRDELFLNLVMEYVPETLYRVLKHYSNANQRMPLIYVKLYIYQLFRGLAYIHTVPGVCHRDVKPQNVLVDPLTHQVKLCDFGSAKVLXVPGEPNISYICSRYYRAPELIFGATEYTTSIDIWSAGCVLAELLLGQPLFPGESAVDQLVEIIKVLGTPTREEIRCMNPNYTEFKFPQIKAHPWHKIFHKRMPPEAIDLASRLLQYSPSLRCTALDACAHSFFDELREPNARLPNGRPFPPLFNFKHELASASPELIHRLIPDHIRRQHGLNFGACWELKGTATPPFCSFIFP

SEQ ID NO: 49677 - protein, 220 aa, Triticum aestivum
  misc_feature (45)..(45): Xaa can be any naturally occurring amino acid
  unsure (1)..(220): unsure at all Xaa locations
VRRHNGGGFSVPRYCAETIFPKLDYRADPPVQTVLAKDVPREVWXFRHIYRGTPRRHLLTTGWSTFVNQKKLVAGDSIVFLRTEHGELCVGIRRAKRVTCGGMECISGWNAPGYGGFSAFLKDEENKMMNGGPAGYVKGRGKVKIADVVEAATLAANSQPFEVVYYPRASTPEFVVKAAAMQAAMRIHWCPGMRFKMAFETEDSSRISWFMGTISSVQVA

SEQ ID NO: 49678 - protein, 582 aa, Arabidopsis thaliana
MGSCVSSPLKGSPFGKRPVRRRHSSNSRTSSVPRFDSSTNLSRRLIFQPPSRVLPEPIGDGIHLKYDLGKELGRGEFGVTHECIEISTRERFACKRISKEKLRTEIDVEDVRREVEIMRCLPKHPNIVSFKEAFEDKDAVYLVMEICEGGELFDRIVSRGHYTERAAASVAKTILEVVKVCHEHGVIHRDLKPENFLFSNGTETAQLKAIDFGLSIFFKPAQRFNEIVGSPYYMAPEVLRRNYGPEIDVWSAGVILYILLCGVPPFWAETEEGIAHAIVRGNIDFERDPWPKVSHEAKELVKNMLDANPYSRLTVQEVLEHPWIRNAERAPNVNLGDNVRTKIQQFLLMNRFKKKVLRIVADNLPNEEIAAIVQMFQTMDTDKNGHLTFEELRDGLKKIGQVVPDGDVKMLMDAADTDGNGMLSCDEFVTLSIHLKRMGCDEHLQEAFKYFDKNGNGFIELDELKVALCDDKLGHANGNDQWIKDIFFDVDLNKDGRISFDEFKAMMKSGTDWKMASRQYSRALLNALSIKMFKEDFGDNGPKSHSMEFPIARKRAKLLDAPKNKSMELQISKTYKPSGLRN

SEQ ID NO: 49679 - protein, 458 aa, Xylella fastidiosa Temecula1
MNAWLDNRAEAASNTNAISPISSLPTGTVPQTTATNQPLPSLAPMLQQVMPAVVSINSKQVVRVRNPFFDDPILRRLFPEIPQERINESLGSGVIIDARNGYVLTNHHVIENADAVQVTLADGRSFKAEFLGSDADTDIALIRIKANKLTEIKLADSNKLRVGDFVVAIGNPFGFTQTVTSGIVSAVGRSGILGLGYQNFIQTDASINPGNSGGALVNLHGQLVGINTASFNPQGSMAGNIGLGLAIPSNLARNVVEQLVTKGVVVRGTIGVQTQNIDARMAQSLGLSNPHGALVTRVLPNSAGAAAGLQPGDVILAANDQRVDNAETLHNYEGLQPVGSSVTLEVHRGGKPLKIRLTLKELPRAIAGETLDSRLSGAIFVDLPESLRQSGIGGVMVNKIKHGSRAAANGLVAGDVIIAASIGEFSDLASWRASFSHPPQRLILRVLRGNAQYDALMR

SEQ ID NO: 49680 - protein, 368 aa, Staphylococcus epidermidis ATCC 12228
MSDNQVKIKKQTIDPTLTLEDVKKQLIDKGKKEGHLSHEEIAEKLQNFEMDSDQMDDFFDQLNDNDITLVNEKDSSDTDDKINPNDLSAPPGVKINDPVRMYLKEIGRVNLLSAQEEIELAKRIEQGDEIAKSRLAEANLRLVVSIAKRYVGRGMLFLDLIQEGNMGLIKAVEKFDFSKGFKFSTYATWWIRQAITRAIADQARTIRIPVHMVETINKLIRVQRQLLQDLGRDPAPEEIGEEMDLPPEKVREILKIAQEPVSLETPIGEEDDSHLGDFIEDQEAQSPSDHAAYELLKEQLEDVLDTLTDREENVLRLRFGLDDGRTRTLEEVGKVFGVTRERIRQIEAKALRKLRHPSRSKRLKDFMD

SEQ ID NO: 49681 - protein, 113 aa, Zea luxurians
  misc_feature (42)..(42): Xaa can be any naturally occurring amino acid
  unsure (1)..(113): unsure at all Xaa locations
MGRRACCAKEGVKRGAWTTKEDDALAAYVKAHGEGKWREVPXKAGLRRCGKSCRLRWLNYLRPNIRRGNISYDEEDLIIRLHKLLGNRWSLIAGRLPGRTDNEIKNYWNSTLV

SEQ ID NO: 49682 - protein, 113 aa, Zea luxurians
MGRRACCAKEGVKRGAWTSKEDDALAAYVKAHGEGKWREVPQKAGLRRCGKSCRLRWLNYLRPNIRRGNISYDEEDLIIRLHRLLGNRWSLIAGRLPGRTDNEIKNYWNSTLV

SEQ ID NO: 49683 - protein, 436 aa, Bordetella parapertussis 12822
MNLSDKKATLSFSDGSAPIEFPVYKGTVGPDVIDIRKLYGQTGMFTFDPGFMSTAACASGITYIDGDKGELLYRGYPIEQLAVNCDFLDICYLILNGELPNGGQKQDFDSQVTHHTMVNEQLHFFLRGFRRDAHPMAVLTGLVGALSAFYHDSTDITNPHHRHVSAIRLIAKMPTLVAMAYKYSQGQPFIYPQNDLSYTGNFLRMMFATPCEEYKVNDVVERALDRIFILHADHEQNASTSTVRLCGSSGTNPFAAIAAGVACLWGPAHGGANEACLQMLEELQANGGVAKVGEFMEKVKDKNSGVRLMGFGHRVYKNYDPRAKLMQETCKEVLVALGLENDPLFKLAMELERIALEDDYFVQRKLYPNVDFYSGIVQRAIGIPTSLFTAIFALARTVGWIAQWNEMLSDPDYKIGRPRQLFTGSVTRDVPGMDKR

SEQ ID NO: 49684 - protein, 96 aa, Tripsacum dactyloides
MGRRACCAKEGVKRGAWTSKEDDVLAAYVKAHGEGKWREVPQKASLRRCGKSCRLRWLNYLRPNIKRGNISYDEEDLIIRLHKLLGNRWSLIAGRL

SEQ ID NO: 49685 - protein, 443 aa, Anabaena variabilis ATCC 29413
MEETLKILVVDDDEVDRMTVRRALVKAGVRMEMSEVSDGNTALSILRNTSFDCAFIDYRLPDQDGLNLIETIRSLNIKIPLVVLTSQGDEQIAVELMKAGATDYLSKFRVSSETLAQVLRNAMRLYRAEMQTAIAYQQLRESHEQLVRKNQELERQRQQIQIQNLKLLEASRLKSQFLATMSHELRTPMNAIIGFSQILLRPKFGNLTGQQADMVERILNNGKHLLMLLNEVLDFSKLEEGRLELKPELFDLTKVINAAVAEMRSLAEAKKLSLLVQIDLQNPLLVNDPVRIKQILINLLSNAIKFTDSGSIWIDVKDLPGSWVEIRVKDTGIGIASKDFKYIFEAFRQVDQSITRKYAGTGLGLAIIDSLVQMMSGKIILESQLGVGSIFTITLPRQLPLSNLSLSSSSVQDAKEMMQPDHKVHHPTAKSNPAPRKYHNLKL

SEQ ID NO: 49686 - protein, 800 aa, Yarrowia lipolytica CLIB122
MLPEIITPTAARALNVPISGRVINCVTTLPYEIYREGATYKIRPRRGNSALYSALDYMQSGDGDTTWTSSLVAWTGEIALPAATSLPDLELYQKLTEQDKHMLERELTEAQGGTPTHPIWTDSGDTVSTGYNEQLSPTRRYAENILWPILHYIQGEPTDGRDEKKWWSDYEDLNRKYCDKVLDIYNEGDVIWIHDYYLFLLPKMIREKLPDARIGFFMHAPFPSSEYFRCLAKRQELLQGVLASNLISTQSEAHKRHFMSACSRIVGAETATPTSVYAYGQSVSVVALPIGIDTAKVEADAFTDEITEKVRAIRQLYPDKKIIVGRDRLDSVRGVVQKLYAFDVFLKRYPEWRDRVVLVQVTSHTATGTRKVEKKVAELVSSINGRYGAIHFSPVHHYTKHIAREEYLALLRVADLCLITSVRDGMNTTALEFIVCQNGNNSPLILSEFTGSAGNLPGAILVNPWDAVGVAEQINRTFRMGQDEKLAIEQPLYQRVTANTVQHWVNRFVSQVISNTFRTDQSHLTPILDNHKLVERFKMAKKRVFLFDYDGTLTPIVTDPAAATPSDGLKRDLRALAKDPRNAIWIISGRDSTFLDKWLGDIAELGMSAEHGCFMKNPGTTDWENLAANFDMSWQKDVNDIFQYYTERTQGSHIERKRVALTWHYRRADPEFGLFQARECRAHLEQAVVPKWDVEVMSGKANLEVRPKSVNKGEIVKRLISEYSSEGRPPQFVLCMGDDQTDEDMFKALKDVPDLDSESIFPVMIGPPEKKTTASWHLLEPKGVLETLNELAKLEGESKM

SEQ ID NO: 49687 - protein, 592 aa, Bordetella parapertussis 12822
MVAVMNSLPRRQFDVVVVGAGGAGMRCSLQLAQAGLSVAVLSKVFPTRSHTVAAQGGVSASLGNMSEDNWYWHMYDTVKGSDWLGDQDAIEFMCREAPNAVYELEHFGMPFDRNADGTIYQRPFGGHTANFGEKPVQRACAAADRTGHALLHTLYQRNVAARTQFFVEWMALDLLRNEAGDVLGVTALEMETGEIYVLEAKTTVLATGGAGRIWAASTNAFINTGDGLGMAARAGIPLQDMEFWQFHPTGVAGAGVLITEGVRGEGGILLNKDGERFMERYAPTLKDLAPRDFVSRSMDQEIKEGRGCGPDGSYVVLKLDHLGADVINKRLPSIREIAIKFGNVDPIKEPIPVVPTIHYQMGGIPANYHGQVLERANGENKIVNGLYAIGECAAVSVHGANRLGTNSLLDLIVFGRATGNHIVDSHPERQHAHQPLPKEAVDRSRARVDELESRTSGEKTQDVANAIRMSMQRHCGVFRTLELLNEGVGQIEDLAQTAQHIYFKDKSKVFNTARVEALELANMTEVARATIKSAANRTESRGAHALNDHPERDDVNWLKHTLWYSEGSRLDYKPVQMKPLTVESFPPKARTF

SEQ ID NO: 49688 - protein, 1550 aa, Anabaena variabilis ATCC 29413
MKAQLPDNEVQRIAALLEYKILDTQSEAAFDDITRLASYICGTPIALISLIDQNRQWFKSKVGLERRETPRDEAFCTYTILESDVFIVPDATTDERFATNPLVISDPKIRFYAGVPLTNPEGYSLGTLCVIDYIPRNLSPEQIEALQILGRQVIKQLELRRNLANLVLVNNQHKQAQKIRHPFFKKIAGGFGLASVILVLLGLASYQSEIELIHSSNQVQITQESINNLEKLLSQIKDAETGQRGYILTGKDLYLQPYQTALTNIDQKFAELKNTTVDQVQQQRLVILKPLITAKITELKQTIKLRQNQGFQTALQVIQSDKGQTLMDDIRKVMREMETEEKVRLQQQLQAVKASGQKVIVILAIAIVSGLIILAVVYYLIYCEVIARQSMENILNEERNFISAVLDTVSALVIVLDSQGRIVRFNQACEVITGYSFDEVRGRHFWNLFLLPEDVESSKASFAKFPTDSRVSGIQESENYWVTKDGSRRLIAWSRTILQNHEGSVEYIIGTGIDITERKRADKHLTIQYAITRVLAESTTITEATPQILQAICETLKWDVCEIWMVNQQGNFLSFFDLWDQTSLEMQEFKTQSQPITFASGIGLPGQIWASGQPIWLTDIADDASFLRNQLAAQVGLRGAFGFPIRSGQKILGVITCFSHQVQPHDPDLAKIMDSIGEQVGQFIHRKQAEEELQRQNLRSQLFTEITLKIRQSLQIEEILQITVKEVQKILQTDRVLIYQLLPDGSGSLIIEAVVAGWAAIKGQNITDFYLQTEYQQQYCLQQYRLRHLEAIANLDLAEIQQSHLELLRKFGVKANLVIPILVKDELCGLLIVHQCANSRQWTSFETHLLRQIADQVGIAVAQAQLLEVETRQRQELEVARSQAELASHAKSAFLANMSHEIRTPMNAVLGMTGLMLETLLNQEQRDFMETIRISGDALLTLINEILDLSKLEAGEMALENLNFNLSTCVEEVLDLLAPQAHSKGLEIAALIYRHVPIQLQGDASRLRQILMNLIGNAIKFTSFGEVVMRVELRSETPTTAIIHFAVTDSGLGITLEDQHKLFTPFTQVDASTTRKYGGTGLGLAICKQLVTLMGGEIGVESQLGKGSKFWFEIPFAKQLQPVSFVEDCGLLNNRRLLVVDDHATNRKIIYHQVSRWGMQVDQADRAVAALGMIVEACQQNKPYDVILIDMQMPEMDGMALGKQIKANSAIPPTPLIMLTSTNQRDEVQQAIKIGFAAYLVKPVKSSRLLDTIMSVLKTPSQLEAEKLEVKSQELEKNNLDHSRNRNFTATQAQNSVSTKTRILLAEDNLVNQKVALKQLQSLGYTADVAANGKEVLQLLKQIPYDLILMDCQMPILDGLETTKEIHRWAESSFASGRRPVIIAMTANAMKEDKQMCLDVGMDDYLSKPVMKEQLATALEYWCQLILNARQAVEFDIHSLPIDWEHLHQLSENDTEFELHLLQIFVEDVRARLELAKEAIANTDFQKMAQQVHQLKGASTNLGATAMYLAAERLEQLANNQERRGSMELITEIEESVNQIQAFLTRSQVV

SEQ ID NO: 49689 - protein, 415 aa, Yarrowia lipolytica CLIB122
MEDDKTTATPPTEFVWKLYMMLEEGNDNTVFWTPDGRSFVISDTIEFSKTTLPRHFRHKNFSSFVRQLNKYDFHKVKSTNDDGEPVYGENGWEFKHPNFLQFDTSGIDSIRRKLPEKRRAEGPSGYRELEDELHDLKRKHESLQKHFTSLSEDFSNAIGKLSGLQESLKKKEETMNHVFSMLAEFEYRFERLGMSQDDTASFDHIKRRRTDPSAAAQAQAQAQAQAQAQAQAQAQAQATTNYDDHMWPSTTHTWLPLHPPQVRRDSNGKAHPDGHADNTAESTEIHQNGEVQKILIASDDSDCVKICSTLLQKAGQVVEVIPDGVDAVEFLQTSASHVGLVLMETVLPRLDGCSAVELIRSMNRQVPIIMINDGSVNPKLEFLLQSGYVNEVLARPFNKDDFFKAVSPHVSLASY

SEQ ID NO: 49690 - protein, 683 aa, Yarrowia lipolytica CLIB122
MVEFPRSLFSFHKKSAPTVTDTNSSPNPPAGSYSNTTTGPSTNTNAPSPAPPILRSPSTTHLQQVPKAVCTSETVNVSGEIIHGKRQSRDRLQELDLKKKSLSSNTTTPTVSQPTSSKSSLNSTTMNFGQIQEKTPHVGLEESTSSKAKLVAKIVAARNLQAAPNCRPYVVCTFGTSEFITETGDSDPNDVAMGNTTPMASNAGVNIMPKKPIMASGHTVGSINPTWKEETVFDVTARDASELVISVYDGANNDAFLGHVRISTILGPGKVLDAWYPLENRVEGEHVNGEVRVQAYYEDTVRTKMGPEDFEILRLIGKGTFGQVYQVRKKDTRRIYAMKVLSKKVVVQKKEIAHTIGERDILVRTSTTQSPFIVGLKFSFQTEADLYFVTDYMSGGELFWHLQREGRFSEQRAKFYIAELVIALEHLHDNNIVYRDLKPENILLDANGHIALCDFGLSKANVTQGDTTSTFCGTTEYLAPEVLLDESGYTKMVDFWSLGVLIFEMCCGWSPFHADDTQQMYKNIAFGKVKFPKDALSAEGRSFVKGLLNRNPENRLGAQDDARELRRHPFFHDIDWDQLIQKKIPPPFKPHVASETDTSNFDPEFTEASTSLFKSMKVGTPLSPRIQDNFVGFTFVGESSMDEHFKHRPTSRPVETVDEDMMESDNEDEDMGDEEMFSGRFEM

SEQ ID NO: 49691 - protein, 342 aa, Arabidopsis thaliana
  misc_feature (243)..(243): Xaa can be any naturally occurring amino acid
  misc_feature (263)..(263): Xaa can be any naturally occurring amino acid
  misc_feature (269)..(269): Xaa can be any naturally occurring amino acid
  unsure (1)..(342): unsure at all Xaa locations
MATTTQHMNQIFLVLLLISFAISPAISTVPKECETDSTDSCIDKTKALPLKIVAIVAILVTSMIGVAAPLFSRYVTFLHPDGKIFMIIKCFASGIILGTGFMHVLPDSFEMLSSPCLEDNPWHKFPFTGFVAMLSGLVTLAIDSIATSLYTKKAVADDSEERTTPMIIQIDHLPLTTKERSSTCSKQLLRYRVIATVLELGIIVHSVVIGLSLGATNDTCTIKGLIAALCFHQMFEGMGLGGXYTNVKKFVMAFFFAVTTPSXIALGIXLSSVYKDNSPTALITVGLLNACSAGLLIYMALVDLLAAEFMGSMLQRSVKLQLNCFGAALLGCGGMSVLAKWA

SEQ ID NO: 49692 - protein, 400 aa, Bordetella parapertussis 12822
MSTSQKKPTVQQKKPAAQPAEKAAFKPKKSVALSGVVAGNTALCTVGRTGNDLHYRGYDILDFAGSAEFEEIAHLLVHGKLPNKAELKAYKEKLRALRGLPAQLQNVLECLPASSHPMDVMRTAVSVLGCVLPEKDDHNTPGARDIADRLMANLGSALLYWYHYSHNGRVIDVQTDDDSIGGHFLHLLHGAKPSDEWVRAMHTSLILYAEHEFNASTFTGRVIAGTGSDMYSSITGAIGALRGPKHGGANEVAFEVQKRYETPDEAEADTRQRVENKEVIIGFGHPVYTVSDPRNKVIKDVAKKLSRKAGSTKMFDIAERLETVMWDIKKMFPNLDWFSAVSYHMMGVPTAMFTPLFVIARTAGWSAHIIEQRIDNKIIRPTANYVGPEDQTYVPISKRA

SEQ ID NO: 49693 - protein, 226 aa, Triticum aestivum
FVKTLTGKTITLEVESSDSIENVKQKIQDKEGIPPDQQRLIFAGKQLEDGRTLSDYNIQKESTLHLVLRLRGGMQIFVKTLTGKTITLEVESSDSIENVKQKIQDKEGIPPDQQRLIFAGKQLEDGRTLSDYNIQKESTLHLVLRLRGGMQIFVKTFTGKTITLEVESSDSIENVKQKIQDKEGIPPDQQRLIFAGKQLEDGRTLSDYNIQKESTLHLVLRLRGGF

SEQ ID NO: 49694 - protein, 533 aa, Pseudomonas aeruginosa PAO1
MKLLAVRRLLRIQRVVIRYRLDDLILELPMLPWWLRLLGATLPWRWLPRRKLELTRGARLRLALQDLGPIFIKFGQILSTRRDLLPDDIANELAWLQDKVPPFPPELAVKRIEEQLGAKIEQVFARFEREPLASASVAQVHAARLKSGEEVVVKVIRPNLEPVIRSDIAWLFILARLAERVSSEARRLHPVEVVSDYEKTIVDELDLLREAANASQLRRNFEGSPLLYVPQVYWDWCRPKVLVMERIYGIPVTDLETLRDQRTDFKALAERGVEIFFTQVFRDSFFHADMHPGNIFVSTRAPWSPQYIAVDCGIVGSLTDEDQDYLARNLIAFFKRDYRKVAQLHIDSGWVPAETKVNDFEAAIRTVCEPIFEKPLKDISFGQVLLRLFQTARRFNMEIQPQLVLLQKTLLNIEGLGRQLYPELDLWATAQPFLERWMRERVSPKQLLRNFQQQVEQVPHLSQMARDTLERLSQPHAHNAPPPEWKGSRHDWLGRLVGAVLLVGAAEVGLGQQLEAWPAWVMLAGGVFLILRR

SEQ ID NO: 49695 - protein, 536 aa, Magnaporthe grisea 70-15
MSAIRMHRNACSASRLVARTSAPRRTVPFLSPSYARLASTQVPKLKDPSLFKQNVCYVNGAFVPAKSGATFAVADPTTGEHIGDAPEFDAADTEAAIAAAENAFKTYRLTTGRERSKLLRRWYDLMIANADDIATLITWENGKTIADAKGEVTYAANFFEWFSEEAPRVYGDTIQPTLAANRVVTRKEPVGVCSLITPWNFPAAMGTRKIGPALAAGCTVVCKAPAETPFTSLALAELAHRAGVPAGVVNFVTSHSNTKTVGEVLCTHQAVRKISFTGSTGVGKTLMQQAAGTLKKCSFELGGNAPFIVFDDADLDAAVDGAIACKFRSSGQTCVCANRIYVQRGIYDAFAERLAKRVKETFKIGSGFDPETTHGPLIHDRAVSKVASQVEDAVGKGAKLLAGGKRLPDLGPHFFAPTVLGDMTPEMSIAREETFGPIAGLFKFDTEAEVVKMANDTEVGLAGYFFSKDIHRAYRVAEALEVGMVGVNTGIISDVASPFGGVKESGFGREGSMYGIHEYQVTKTITFGGMGKELQG

SEQ ID NO: 49696 - protein, 450 aa, Shewanella sp. ANA-3
MKTKLSVLSAAMLAATLTMMPAVSQAAIPQSVEGQSIPSLAPMLERTTPAVVSVAVSGTHVSKQRVPDVFRYFFGPNAPQEQVQERPFRGLGSGVIIDADKGYIVTNNHVIDGADDIQVGLHDGREVKAKLIGTDSESDIALLQIEAKNLVAIKTSDSDELRVGDFAVAIGNPFGLGQTVTSGIVSALGRSGLGIEMLENFIQTDAAINSGNSGGALVNLKGELIGINTAIVAPGGGNVGIGFAIPANMVKNLVAQIAEHGEVRRGVLGISGRDLDSQLAQGFGLDTQHGGFVNEVTAGSAAEKAGIKAGDIIVSVDGRAIKSFQELRAKVATMGAGAKVELGLIRDGDKKTVNVTLGEASQTTEKAAGAVHPMLQGASLENASKGVEITEVAQGSPAAMSGLQKGDVIVGINRSAVKDLKSLKEQLKDQEGAVALKILRGKSLLYLVLR

SEQ ID NO: 49697 - protein, 360 aa, Shewanella sp. ANA-3
MTIKETLLYLGKAVLFGLIMAAMFLLVTHYFDNKNLGSSLLQNRGNNTVELSFAKAVRRAAPAVVNIYSLSIDQNRPLNSGSLQGLGSGVIMSKEGYILTNYHVIKKADEIVVALQDGRKFTSEVVGFDPETDLSVLKIEGDNLPTVPVNLDSPPQVGDVVLAIGNPYNLGQTITQGIISATGRNGLSSGYLDFLQTDAAINAGNSGGALIDTNGSLIGINTAAFQVGGEGGGHGINFAIPIKLAHSIMGKLIKNGRVIRGALGISGEPINPVVAQILNLPDLRGVLVTGVDPNGPAARAHLQPRDVIIKYDGEDVPGVEMLMDRIAETTPGKKIMMTVIRQGKEQVLPVIIDEKVVVDN

SEQ ID NO: 49698 - protein, 146 aa, Nicotiana tabacum
MAPRADKKPAEKKPGAEKTPVAEKAPAEKKPRAGKKLPRDAGAAGDKKKKRAEMSVETYKIYIFRVLKHVHPDIGISSKAMGIMNSFINDIFEKLARESSRLAGYNKKPTISSREIQTAVRLVLPGELAKHAVSEGTKAVTKFTSS

SEQ ID NO: 49699 - protein, 538 aa, Zea mays
EFGSRAHGISVQSFNGDLLYEPWDVYDENGQAFTTFNKYWEKCMNLPIEISQYLAPTRLVAAPGLANVRCCSIDDLGLESSKDVESSNALLSRAWSPGWRNAENMLEEFVSYGLLEYSEHGMKVGGSTTSLLSPYLHFGELSVRMIYQLVKMRQVKWQNEGKSEAEESVRLFLRSIGFREYSRYLCFNYPFTHERSFLGNLKHYPWLLDEGRFKSWRQGMTGYPLVDAGMRELWATGWTHNRIRVIVSSFAVKFLQIPWIWGMKYFWDVLLDADLESDILGWQYISGSLPDGHELSRLDNPEVQGQKYDPDGEYVRTWIPELARMPTEWIHSPWAAPNSILQVAGVELGFNYPKPIVELHMARECLDDAISTMWQLDTAAKLAELDGEVVDDNLNNIRNFDIPKVVLNKKLSPSTSSMEHRVLSTNGKDEKSQPTEVKALYKQIIRDDMMNDSNMDDTCSTANLKVTRKRSSNDSAFNVPSCSSSLVMESRIHHNEPSSVLYSGYFQKTADRDGTSKVEDNDSEDSGTSISRPSKKAA

SEQ ID NO: 49700 - protein, 359 aa, Nicotiana tabacum
MGRSRICNTLAILALFLFSSALAEDVVVLTEENFEKEIGQDRAALVEFYAPWCGHCKKLAPEYEKLGASFRKAKSILIGKVDCDEHKSVCSKYGVQGYPTIQWFPKGSLEPKKYEGGRTAEALAEFVNSEGGTNVKIASTPSSVVVLSPDNFDEIVLDETKDVLVEFYAPWCGHCKSLAPIYEKVATSFKQEEDVVIANLDADKHRDLGEKYGVSGFPTLKFFPKGNKAGEHYDGGRHLYDFVNFINEKSGTSRDSKGQFTLNAGIVESLDTLVNEFVSATNEEKKAVFSKMEDEAGKLNGFAARYGKIYLKAAKSSMEKGADYAKNEIQRLERMLAKSISPAKSDEFTLKKNILATFA

SEQ ID NO: 49701 - protein, 391 aa, Heliobacillus mobilis
MNTYGRLPIALVKGEGAKVWDADGREYLDFLAGLAVNSLGHCHPKVTEAVKAQVDQLIHVSNLYWIEPQIELAQSLVENSFADKVFFCNSGAEANEGAIKLARKYAKLHMGPDKYEIITMEKSFHGRTLATVTATAQPKYQKAFTPLPEGFRYVPFGDLKALEKAIGPHTCAIMVEPVQGEGGVNLAEPAFWEGLAKLAKEQNLLLIFDEVQSGLGRTGKLFAHEHYGITPHIMTLAKALGGGTPIGALLATDEVASAFEPGDHASTFGGNPLVTAAGVATMDVLVQGGLLAHCLEMGAYFRGHLNRLAEKYTFIQEVRGLGLILACELDRPGADIVAACLEKGLIINCTAVNVLRFLPPLIITKEDIDHAVAILEEVLASVEANAGGTPA

SEQ ID NO: 49702 - protein, 463 aa, Staphylococcus epidermidis ATCC 12228
MVKNMDTIVQLAKHRGFVFPGSDIYGGLSNTWDYGPLGVELKNNIKKAWWQKFITQSPYNVGIDAAILMNPKTWEASGHLGNFNDPMIDNKDSKIRYRADKLIEDYMQNEKGDENFIADGLSFDEMKKIIDDEGIVCPVSKTANWTDIRQFNLMFKTFQGVTEDSTNELFLRPETAQGIFVNYKNVQRSMRKKLPFGIGQIGKSFRNEITPGNFIFRTREFEQMELEFFCKPGEEIEWQNYWKTFASEWLTDLNISEDNMRLRDHDEDELSHYSNATTDIEYKFPFGWGELWGIASRTDYDLRQHSEHSGEDFKYHDPETNEKYIPYCIEPSLGADRVTLAFLCDAYAEEGVEGSKDARTVMHFHPALAPYKAAVLPLSKKLSSEAIKIFEQLSSSFAIDFDESQSIGKRYRRQDEIGTPYCITFDFDSLEDNQVTVRDRDSMEQVRMPISELETFLAEKVKF

SEQ ID NO: 49703 - protein, 477 aa, Nicotiana tabacum
MISSSPASPSSYLAFPPSLSPSVLLDSPVLFNNSNTLPSPTTGSFGNLNSKEDNSRISDFSFQSKAATSSSMFQSSAPRNSLEDLMTRQQHANQQNEFSTVKTRGVKSEVAPIQSFSQEKMQSNPAPVHYTHPSQYVREQKAEDGYNWRKYGQKQVKGSENPRSYYKCTFPNCPTKKKVERNLDGHITEIVYKGNHNHPKPQSTRRSSSQSIQNLAYSNLDITNQSNAFLDNAQRDSFAGTDNSSASFGDEDIDQGSPISKSGEDDGNEPEPKRWKGDNENEVISSASRTVREPRIVVQTTSDIDILDDGYRWRKYGQKVAKGNPNPRSYYKCTFTGCPVRKHVERASHDLRAVITTYEGKHNHDVPAARGSGSYAMNKPPSGNSNNSMPVVPRPSMLANNSNQGMNFNDTFFNTRVQTTQNQPPITLQMLQSSGNSSYSGFDTSSGSYMNQMQPMNNIKPISKEEPKDDFFSSFLN

SEQ ID NO: 49704 - protein, 369 aa, Brassica napus
  misc_feature (52)..(52): Xaa can be any naturally occurring amino acid
  misc_feature (212)..(212): Xaa can be any naturally occurring amino acid
  misc_feature (329)..(329): Xaa can be any naturally occurring amino acid
  unsure (1)..(369): unsure at all Xaa locations
IKDCLAQLYTKDITPDDKQELDESLQREIQAAFRTDEIKRMPPTSQDEMRAXMSYFHERIWNGVPKFLRRALKNIGIDERVPYNAPLIQLSSWMGGDRDFWKTIPPTEPYSVVLGDVRDTLYHTRERTRQLLSNGISDIPEEATFTDVEQFLEPLELCYRSLCSSGDRPIADGTLLDFLRQVSTFGLSLVRLDIRQESERHNDVLDDITKHXNTGSSYRDWSEERRQEWLLAELRGKRPLFGLDLPKTEEIADVLDTFKVISELPSDCFGAYIISMATSPSDVLVVELLQRECHVKKPLRVVPLFEKLADLEAAPAAVSRQLLLLSMGXTLQFRLNPSGALCLMEWLLLLPRSIDLWSSKNLDLSSTSA

SEQ ID NO: 49705 - protein, 227 aa, Oryza sativa
MAEEHETRPPSAGRPPSSGRGRADDADEREEGEIADDDSGHAPPQANPAAPHPLEHAWTFWFDNPQGKSKQATWGSSIRPIHTFSTVEDFWSLYNNIHHPSKLVVGADFHCFKNKIEPKWEDPICANGGKWTFSCGRGKSDTMWLHTLLAMIGEQFDYGDEICGAVVSVRGKQERIAIWTKNAANEAAQISIGKQWKEFLDYKDSIGFIVHDDAKKMDKGLKNRYTV

SEQ ID NO: 49706 - protein, 453 aa, Brassica napus
IRDCLTQLYAKDITPDDKQELDEALQREIQAAFRTDEIRRTPPTPQDEMRAGMSYFHETIWKGVPKFLRFWKQIPSNEPYRAILGDVRDKLYNTRERARQLLSSGVSDIPEDSVFASVDQFLEPLELCYRSLCDCGDRPTADGSLLDFLRQASAFGLALVKLDIRQESDRHTDVLDAITQHLGIGSYKEWSEDKRQEWLLSELSGKRPLFGHDLPKTEEIADVLDTFKVISELPHDSFGAYIISMATAPSDVLAVELLQRECGIIHPLRVVPLFEKLADLENAPASVARLFSIEWYRNRINGKQEVMIGYSDSGKDAGRLSAAWQLYKTQEELVKVAKEYGVKLTMFHGRGGTVGRGGGPTHLAILSQPPDTIHGQLRVTVQGEVIEQSFGEEHLCFRTLHGFTARTLEHGIDPPVSPKPEWRVLMDEMAVIATEEYRSVVFKEPRFVEYFRL

SEQ ID NO: 49707 - protein, 241 aa, Agrobacterium tumefaciens str. C58
MSRKFISEFLGTFWLVFGGCGSAVFAAAFPELGIGFLGVAFAFGLTVLTMAYAVGGISGGHFNPAVSVGLTVAGKFPAANLVPYIVAQVLGAVVAAAALYVILTGKAGAEIGGFAANGYGEHSPGGYSLLSALLIEIILTAFFLVVILGSTHGRVPVGFAPVAIGLALTLIHLISIPVTNTSVNPARSTGQALFVGGWALQQLWLFWLAPILGGAIGAVVWKIFGEEEKAGHAGSVQPAKT

SEQ ID NO: 49708 - protein, 477 aa, Salmonella typhimurium LT2
MQVLHVCSEMFPLLKTGGLADVIGALPAAQIADGVDVRVLLPGFPDIRRGIPDAHVVSRRDTFAGKISLLFGHYNGVGIYLIDAPHLYERPGSPYHDTNLYAYTDNVLRFALLGWVGCEMACGLDPFWRPDVVHAHDWHAGLAPAYLAARGRPAKSVFTVHNLAYQGMFYAKHMDDIELPWSFFNMHGLEFNGQLSFLKAGLYYADHITAVSPTYAREITEPQFAYGMEGLLRQRHLEGRLSGILNGVDEKIWNPESDLLLASRYTRDTLEEKAENKRQLQIAMGLKVNDKVPLFAVVSRLTNQKGLDLVLEALPGLLEQGGQLALLGAGDPVLQEGFLAAAAEHPGQVGVQIGYHEAFSHRIMGGADVILVPSRFEPCGLTQLYGLKYGTLPLVRRTGGLADTVSDSSLENLADGIASGFVFEDSNAWSLLRAIRRAFVLWSRPSLWRFVQRQAMAMDFSWQVAAKSYRELYYRLK

SEQ ID NO: 49709 - protein, 431 aa, Salmonella typhimurium LT2
MVSLEKNDRVMLARQLPLKSVALILAGGRGTRLKDLTNKRAKPAVHFGGKFRIIDFALSNCLNSGIRRIGVITQYQSHTLVQHIQRGWSLFSEEMNEFVDLLPAQQRMKGENWYRGTADAVTQNLDIIRRYKAEYVVILAGDHIYKQDYSRMLIDHVEKGARCTVACMPVPIKEATAFGVMAVDESDKIIDFVEKPANPPAMPGDASKSLASMGIYVFDADYLYELLAADDKDDASSHDFGKDIIPKITREGMAYAHPFPLSCVQSDPQAEPYWRDVGTLEAYWKANLDLASVTPELDMYDQNWPIRTHMESLPPAKFVQDRSGSHGMTLNSLVSGGCIISGSVVVQSVLFPRVRINSFCNIDSAVLLPEVWVGRSCRLRRCVIDRACIIPEGMVIGENAEEDARRFYRSEEGIVLVTREMLRKLQVKQER

SEQ ID NO: 49710 - protein, 132 aa, Arabidopsis thaliana
  misc_feature (42)..(42): Xaa can be any naturally occurring amino acid
  misc_feature (60)..(60): Xaa can be any naturally occurring amino acid
  misc_feature (89)..(89): Xaa can be any naturally occurring amino acid
  unsure (1)..(132): unsure at all Xaa locations
TSLNSTLFATFYPFPQKPALGEVPPEVLEPQVTPPVWEISGXMVLKRKEDSEGASRGYRXRLLAEASLSEERFKEVTALAFEAIGCSNXQEEVLEGTIVHQQNFSGNVNQKSNRTHGGPITNGTAAECLVLQ

SEQ ID NO: 49711 - protein, 424 aa, Streptococcus agalactiae 2603V/R
MKFNVQSNSQAALLGLQHLLAMYAGSILVPIMIASALGYNAKQLTYLIATDIFMCGIATLLQLRLSKHFGVGLPVVLGCAFQSVAPLSIIGAQQGSGYMFGALIASGIYVVLVAGIFSKVANFFPPIVTGSVITTIGLTLIPVAMGNMGDNAKEPSLQSLTLSLVTIGVVLLINIFAKGFLKSISILIGLISGTILAAFMGLVDASVVADAPLVHIPKPFYFGAPRFEFTSILMMCIIATVSMVESTGVYLALSDITNDKLDSKRLRNGYRSEGLAVLLGGLFNTFPYTGFSQNVGLVQISGIRTRKPIYFTALFLVILGLLPKFGAMAQMIPSPVLGGAMLVLFGMVALQGMKMLNQVDFEHNEHNFIIAAVSIAAGVGFNGTNLFISLPNTLQMFLTNGIVISTLTAVVLNIILNGLPKKLI

SEQ ID NO: 49712 - protein, 416 aa, Ehrlichia canis str. Jake
MITGLGLVTSLGSDVKTVWDLLSNGVSGISKINRFDTSDLDCKIAGQVIMKSESEEYVFNAADYIPEKDLKKMDNFIHFGIAAATQAVNDSNLLDCKDLDYDRVGVIVGSGIGGLPFIEKTVICLQERGPRRISPFFIPASLINLVSGHISIKYGFTGLTDAVVTACSTGAQAIGNAARVIQSGEADVIIAGGAEGAVCRIGIAGFSAMKALSTKFNDTPELASRPWDKQRDGFVMGEGAGIVILEDYEHAKKRGAKIYGELLGYGMTSDAYHISAPHPEGKGGMKAMELALSSAQLNPESINYINAHGTSTPLGDSTEIQAIKSIFKESIYKVPISSTKSSIGHLLGAAGSVEAIFSILAMNTSITPPTLNLYESSEDPQLNLVPLNAQEHKINYCLSNSFGFGGVNISLVFGKL

SEQ ID NO: 49713 - protein, 419 aa, Zea mays
  misc_feature (298)..(298): Xaa can be any naturally occurring amino acid
  unsure (1)..(419): unsure at all Xaa locations
MAGIDLNTVEEEDEEEAEALPLPGPGGRGAVCLELWHACAGPVPPLPRKGSAVVYLPQGHLEHIGGDAARGAAAAAVPPHVLCRVVDVTLHADGATDEVYARVSLLPEDEDAEKRAQAQARVPEDEDRRDGEDGGAMRPLARTPHMFCKTLTASDTSTHGGFSVPRRAAEDCFPPLDYSQQRPSQELVAKDLHGTEWKFRHIYRGQPRRHLLTTGWSAFVNRKKLISGDAVLFLRGEDGVLRLGVRRAAQLKIVTPIPAPHNQCSSNSNLGNVAQAVATKTVFHIYYNPRLTQSEFIXPYWKFTRSFNQPISVGMRCRMRYESDDASERRCTGIIIGSREADPIWYGSKWKCLVKNIPTNVKSVLLNVKGVRAQGCRTPTTEFVVAIRGRRQGYTPTPPLFVNRVMPPGCRLRRIERGD

SEQ ID NO: 49714 - protein, 372 aa, Bacillus cereus G9241
MKAEEKFSPGLDGVVAAETKISFLDTVKGEIVIQGYDLIELSKTKEYLDIVHLLLEEHLPNEDEKATLERKLKEEYAVPEGVFNVLKALPKETHPMDGLRTGVSALAGYDNDIENRSLEVNKSRGYKLLSKVPNIVANSYHILNNEEPIEPLKELSYSANFFYMLTGKKPTELEEKIFDRSLVLYSEHEMPNSTFTARVIASTQSDLYGALTGAVASLKGSLHGGANEAVMYMLLEAGNVEKFEELLQKKLYNKEKIMGFGHRVYMKKMDPRALMMKEALKQLCDVKGDYTLYEMCEAGEKIMEKEKGIYPNLDYYAAPVYWMLGIPIQLYTPIFFSSRTVGLCAHVIEQHTNNRLFRPRVNYIGERHVLSQ

SEQ ID NO: 49715 - protein, 216 aa, Yarrowia lipolytica CLIB122
MQRVRDSTWSHINSVVMIGDSGVGKTNILGRFTRDEFNLDSKSTIGVEFATRTVNIDNKIIKAQIWDTAGQERYRAITSAYYRGAVGALLLYDVTSTQSYKNISRWLQELQDHADSNIVLMLVGNKCDLKHLRAVPTEEAKQFASQNKLLFIETSALDGTDVALAFRNILTEIYHRVSAAENVHANLEDSRKPQQGTTISLTPQPGDSDKKSSSCC

SEQ ID NO: 49716 - protein, 1313 aa, Arabidopsis thaliana
MGGCFSVSLPCDQVVSQFSQLLCVRGSYIHNLSKNLASLQKAMRMLKARQYDVIRRLETEEFTGRQQRLSQVQVWLTSVLIIQNQFNDLLRSNEVELQRLCLCGFCSKDLKLSYRYGKRVIMMLKEVESLSSQGFFDVVSEATPFADVDEIPFQPTIVGQEIMLEKAWNRLMEDGSGILGLYGMGGVGKTTLLTKINNKFSKIDDRFDVVIWVVVSRSSTVRKIQRDIAEKVGLGGMEWSEKNDNQIAVDIHNVLRRRKFVLLLDDIWEKVNLKAVGVPYPSKDNGCKVAFTTRSRDVCGRMGVDDPMEVSCLQPEESWDLFQMKVGKNTLGSHPDIPGLARKVARKCRGLPLALNVIGEAMACKRTVHEWCHAIDVLTSSAIDFSGMEDEILHVLKYSYDNLNGELMKSCFLYCSLFPEDYLIDKEGLVDYWISEGFINEKEGRERNINQGYEIIGTLVRACLLLEEERNKSNVKMHDVVREMALWISSDLGKQKEKCIVRAGVGLREVPKVKDWNTVRKISLMNNEIEEIFDSHECAALTTLFLQKNDVVKISAEFFRCMPHLVVLDLSENQSLNELPEEISELASLRYFNLSYTCIHQLPVGLWTLKKLIHLNLEHMSSLGSILGISNLWNLRTLGLRDSRLLLDMSLVKELQLLEHLEVITLDISSSLVAEPLLCSQRLVECIKEVDFKYLKEESVRVLTLPTMGNLRKLGIKRCGMREIKIERTTSSSSRNKSPTTPCFSNLSRVFIAKCHGLKDLTWLLFAPNLTFLEVGFSKEVEDIISEEKAEEHSATIVPFRKLETLHLFELRGLKRIYAKALHFPCLKVIHVEKCEKLRKLPLDSKSGIAGEELVIYYGEREWIERFSDKLEKAGPTLIGRYQRLDLLTQINFSEKNATLVAISALCNSLCFNPSTLLFAYFFQSHKGRWKTLAAGFSVTPLPAVNFSLRRSIPRILASASSSSSPASSSLEAGENNELNAVSAFSEIVPDTVVFDDFERFPPTAATVSSALLLGICGLPDTIFRNAVDMALADSSCAGLETTESRLSCFFNKAIVNVGGDLVKLVPGRVSTEVDARLAYDTNGIIRKVHDLLRLYNEIDVPHDRLLFKIPATWQGIEAARLLESEGIQTHMTFVYSFAQAAAASQAGASVIQIFVGRLRDWARNHSGDTEIESAIKSGEDPGLALVKRSYNYIHKYGYKSKLMAAAVRNKQDLFSLLGVDYVIAPLKVLQSLKDSPAIPDDEKYSFVRKLTPETATHYHFTNKELVKWDQLSLASSMGPASVELLSAGVEGYANQAKRVEELFGKIWPPPNV

SEQ ID NO: 49717 - protein, 109 aa, Halobacterium sp. NRC-1
MAIGLNVTEPEGTCSDEDCPFHGNLSVRGQVLEGEVASTDMEKTVVVEREYDVFVPKYDRYMKRRSRVPAHAPECFDISVGDTVSIAETRPLSKTKSHVVVEITDGGDA

SEQ ID NO: 49718 - protein, 372 aa, Magnaporthe grisea 70-15
MSATNGSAAAAPSKKNIGVFTNPKHDLWINEAEPSLESVQKGSDELKEGQVTIAIRSTGICGSDVHFWHHGCIGPMIVREDHILGHESAGEIIAVHPSVTSLKVGDRVAVEPQVICYECEPCLTGRYNGCEKVDFLSTPPVPGLLRRYVNHPAVWCHKIGDMSWEDGAMLEPLSVALAGIQRAGITLGDPVLVCGAGPIGLITLLCAKAAGACPLVITDIDDGRLKFAKELVPDVITFKVEGRPTAEDAAKSIVEAFGGVEPTLAIECTGVESSIASAIWAVKFGGKVFVIGVGRNEISLPFMRASVREVDLQFQYRYCNTWPRAIRLIQNKVIDLTKLVTHRFPLEDALKAFETAADPKTGAIKVQIQSLE

SEQ ID NO: 49719 - protein, 461 aa, Bradyrhizobium sp. BTAi1
MSSTAVIDVSDVIEHQRRNALVLKVVTLSTIMMCLDGYDLHAMAFAAPSLIRSWGIDKATLGIVFSAGVFGILVGGLIFGYLGDRIGRRLSIVAATVTFGGFSLLTAWAGDLNMLIALRFLAGIGIGGLAPLCFSLNLEYVPSRYRGTVVAIIMLGYVAGGSAGGLIAAWLVPHLGWPIVFWIGGVLPLLAAIVSFFSLPESIKFLVAQGRQPDEVARIVNRIAPGLNAQPTSRFVIREDEPTPAGSGPFARLTALFDGRLAVITPLLWVAYIASSMTMFFLNSWTPILAEASGYSPAQAAFGLSMFSLGGSVGALLAGWALDRFGVLAIAAVPMIACPLVASLGFAGFSDAGFLTAMMCVGFFVVGGHQGLNSAVGQFYPSANRATAVGWALSVAKIGSIGGPLIAGLLIARHLPASSLFVLAALPPLVMACCVVSLGLSQRRRSLAAPEPDKVDQAAPA

SEQ ID NO: 49720 - protein, 99 aa, Triticum aestivum
HASDHHPDTLITSSDRSMEASRKLLSAALLLVLLLAGTGEMGGPVAVAEARTCEAKSHRFRGPCVRHHNCANVCKTEGFPGGKCRGFRHRCFCTTHCRQ

SEQ ID NO: 49721 - protein, 194 aa, Triticum aestivum
  misc_feature (34)..(34): Xaa can be any naturally occurring amino acid
  misc_feature (47)..(47): Xaa can be any naturally occurring amino acid
  unsure (1)..(194): unsure at all Xaa locations
MQIFVKNLTGKTITLEVESSDTIDNVKAKIQDKXGIPPDQQRLIFVXTLTGKTITLEVESSDTIDNVKAKIQDKEGIPPDQQRLIFAGKQLEDGRTLADYNIQKESTLHLVLRLRGGMQIFVKTLTGKTITLEVESSDTIDNVKAKIQDKEGIPPDQQRLIFAGKQLEDGRTLADYNIQKESTLHLVLRLRGGQ

SEQ ID NO: 49722 - protein, 600 aa, Oryza sativa
MPPCRCAHSPEGECAAVEWPCLGAPPPLSPLSGIGYGRRRQTTAGGGGGLPRGVCDNRLWGEGGAEEEMIEVTVILRLSDCHEEKMLFSTIESIRKIGKCAIKRNIPEIEFDADGSIFFFSGIIADCCRGKERSAFPASDSGASIQNQKQISSHKYAILDVDSTLRVLEFISDEERRMMAQFFCRMWDRAQGKLYVVRICDKVFTELSDKNTQLLDISSLHVATLMVYNSINKQLAGPHKDPPCMNVVAKQMEQYKKETPEGITLEEFRRLIMEWVRKDLRLVLANKAAVAIMAAPLLAVTTKSAGRQVPRVGPAVEKVPTPLLFTVFSVGLMFLQDIRAGKQINSKTQSPTWPGTFGDVGPEGEVSALLLISPRGVGESWGFHPEPPAEPAKGGLCGLPREILPSPIFFPSKTPISSHSGVSSADVAMGQAWASLQDKLQGRQWKEKQVRKITDKVFDRLTEDTKKREQEALTFEEVYIAVLCVYNDINKYLPGPHYDPPSKEKLKAMMNEYDINLDGLLDREEFAEFIRKLTAESLCAISFKLLVTLVAAPALALATKRATEGVPGVGRVVRKVPNSIYASVITLGVVMAQKSTEGVE

SEQ ID NO: 49723 - protein, 167 aa, Brassica napus
MKTIFDLPENLVEDEIFSRLQISSVRSTCRKWNTLCNRIFLGEEAAAKKQFLMMNSSRINLMNFDLSKDDGDPSIEQVSVLDQIQISKVFQCDGLLLCVLEDSSRPLLVWNPYLGQTRWIEPRSSSFHSSYRFSLGYDNNLNHKILRISNEIHPVTSEHVSGFELYD

SEQ ID NO: 49724 - protein, 441 aa, Candida albicans SC5314
MTRVVVTGMGMVSPLGVGLSRNWKQLIANKSGLISTTTLPDYESAGWDKIPSKVIGKVPHGTISEGHWQVGDHIPASEARRMATFSHYALASTHEALQDARLLTEDNNALNMDTNKVGVAVGSGIGSFEDIYNNSIAYNASGYKKVQPLFIPKLLNNMAAGNISIKYQTKGPLHSVSTACATGLQAIGDGFNFLKMGYGQVMICGGTESSIHPLALAGFARARSVVTDSEFNSNPTKASRPFDKSRNGFVLSEGCGILVLETLSHALERGVTPDQIYGEILGYGVSGDAYHITAPHEDGTGAYNAMNQAIERSGIDPEQIDYVNAHATSTVIGDRAENNAMMRLFNPQKTKVSSTKSSIGHLLGAAGAVESIFTLNAIKTGQIPATLNLDNVGQHEGDEQSQFKFDYVANKSITMDVNYAVCNSFGFGGVNSSLCFAKYHN

SEQ ID NO: 49725 - protein, 358 aa, Nostoc punctiforme PCC 73102
MVDSLKKPGFEEIRPGIKVPAKETLLTPRFYTTDFDEMARMDISVNEDELQAILEEFRTDYNRHHFVRDAEFEQSWDHIDGETRKLFVEFLERSCTAEFSGFLLYKELGRRLKGKSPVLAECFNLMSRDEARHAGFLNKALSDFNLSLDLGFLTKSRNYTFFKPKFIFYATYLSEKIGYWRYITIYRHLEAHPEDRVYPIFRFFENWCQDENRHGDFFDAIMKSQPQILNDWKARLWSRFFLLSVFATMYLNDIQRKDFYATLGLDAREYDIHVIQKTNENAGRVFPLMLDVENPEFYQRLDTCISNNEKLGAIANSNTPKFLQLFQKLPLYISNGWQLLRLYLMKPIDTVSAQGAVR

SEQ ID NO: 49726 - protein, 136 aa, Cichorium intybus
MARTKQTARKSTGGKAPRKQLATKAWNTLATATGGVKKPHRFRPGTVALREIRKYQKSTELLIRKLPFQRLVREIAQDFKTDLRFQSSAVAALQEASEAYLVGLFEDTNLCAIHAKRVTIMPKDMQLARRIRGERA

SEQ ID NO: 49727 - protein, 206 aa, Glycine max
MDKKQLCNTSQDPEVRKGPWTMEEDLILINYIANHGEGVWNSLAKAAGLKRTGKSCRLRWLNYLRPDVRRGNITPEEQLLIMELHAKWGNRWSKIAKHLPGRTDNEIKNYWRTRIQKHIKQAENFQQQSSNNSEINDHQASTSHVSTMAEPMETYSPPCYQGMLEPFSIQFPTINPDQSSCCTNDNNNINYWSMEDSWSMQLLNGD

SEQ ID NO: 49728 - protein, 317 aa, Yersinia pseudotuberculosis IP 32953
MTDKLTSLRQITTVVADTGDIAAMKLYQPQDATTNPSIILNAAQIPEYRKLIDEAIAWAREQSSDHAQQIIDATDKLAVNIGLEILKLIPGRISTEVDARLSYDTVASVTKAKRLIKLYNEAGISNDRILIKLASTWQGIRAAEQLEKEGINCNLTLLFSFAQARACAEAGVFLISPFVGRILDWYKANGDQKEFAPSEDPGVVSVTEIYQYYKKHGYKTVVMGASFRNLGEIIELAGCDRLTIAPSLLKELAESEGPVERKLAYTGEIQAKPAPLTEAEFYWQHNQDPMAVDKLADGIRKFAIDQGKLEKMISDLL

SEQ ID NO: 49729 - protein, 448 aa, Cichorium intybus
  misc_feature (311)..(311): Xaa can be any naturally occurring amino acid
  misc_feature (319)..(319): Xaa can be any naturally occurring amino acid
  misc_feature (361)..(361): Xaa can be any naturally occurring amino acid
  unsure (1)..(448): unsure at all Xaa locations
MGKEKIHISIVVIGHVDSGKSTTTGHLIYKLGGIDKRVIERFEKEAAEMNKRSFKYAWVLDKLKAERERGITIDIALWKFETTKYYCTVIDAPGHRDFIKNMITGTSQADCAVLIIDSTTGGFEAGISKDGQTREHALLAFTLGVKQMICCCNKMDATTPKYSKSRYEEIVKEVSSYLKKVGYNPDKIPFVPISGFEGDNMIERSTNLDWYKGPTLLDALDQINEPKRPSDKPLRLPLQDVYKIGGIGTVPVRRVETGVIKPGMSSPSVHLVDHESKSVEMHHERCLKPLPGDNVGFNVKERSVMDLKRGXVASNSRDXPAKGAASFTSQVIIMNHPGQIGNGYAPVLDCHTSHIAVKFQXLLTKIDRRSGKELEKEPKFLKNGDAGMVKMIPTKPMVVETFAEYPPLGRFAVRDMRQTVAVGVTKNVDKKDPTGAKVTKAAAKKGVK

SEQ ID NO: 49730 - protein, 392 aa, Prochlorococcus marinus str. MIT 9313
MKAMILAAGKGTRVQPITHVIPKPMIPILQKPVMEFLLELLKEHGFKEVMVNVSHLAEEIENYFRDGQRFGVEIAYSFEGRIEEGELIGDALGSAGGLKKIQDFQQFFDDTFVVLCGDALIDLDLSEAVKRHRAKGALASLVTKRVPKDQVSSYGVVVTDENDCVQAFQEKPSTDAALSDTINTGIYLFEPEIFEHIPSDQPFDIGSDLFPKLVEMGLPFFALPMDFEWVDIGKVPDYWRAIRSVLQGEVRQVGIPGKEVRPGIYTGLNVAANWDKINVQGPIYVGGMTRIEDGATIIGPSMIGPSCCICEGATVDNSIIFDYSRIGAGVQLVEKLVFGRYCVGKNGDHFDLQEAALDWLITDARRQDLVEPSPQQKAMAELLGTDLTPAPS

SEQ ID NO: 49731 - protein, 184 aa, Brassica napus
  misc_feature (129)..(129): Xaa can be any naturally occurring amino acid
  unsure (1)..(184): unsure at all Xaa locations
MTTIYGTNPTAANDLAPKLEYITRTNNQHHVRPGLATRRPWKQMLDLRSFHFPRKIASVITRIKTNVVYFQTNYTIVVLFSVFLSLIWKPFALLILLALIGAWLFLYFLRDEPLTVFDREIDHRVVLIXMSVLTLSVLFLTDAKLNIAVAVVVGVVVVLLHAAVRKTEEINQNEDETSPLLPQV

SEQ ID NO: 49732 - protein, 443 aa, Bacillus anthracis str. A2012
MIQNGAINEGQKLPSIRSLVTQYECNKATVIRALYELEKRHIIYSVPQSGYYVVKKSGSTIENDEIIDFASSAPDPDVFPYLDFQHCINKAIDTYKNDLFVYGTPKGLPSLIPVIQKQLANYQVFTKEDNIFITSGVQQALAILTSIPFPNKNETILVEQPTYHLYIEYLEINKVPVIGIKRTSEGIDLNELERIFRTGKIKFFYTIPRYHHPLGTSYSKGEKEKVVLLAKKYNVFIVEDDYLADLETDSKADPLYSLDHDNHVIYLKSYSKIIFPGLRVGVAVIPPVISSAFHTYKKVLDIDSPMISQAALEIYIKSGMFERHKNKIKSSYNNRSKKLAEALERIHSENPLLFTYKKQNTIGIHTCLELHKTSISEMLFQRLNEMQICIDTIDKNYVRGFPKQRLLKLNVSNVKEDRIEKGIRIVMEEIKQAERLNFQFKKE

SEQ ID NO: 49733 - protein, 149 aa, Halobacterium sp. NRC-1
MSDLSAQKRLAADVLDVGENRVWFDPDAQSEIADAITREDIRELVADGTIDAEDTQGNSRGRARERDAKESYGHKKGAGSRKGKAGARQNEKREYVAGIRAQRQQLRELRDDGTLSPAQYREMYNMANGGEFDSVRRLTNYVEENYGDS

SEQ ID NO: 49734 - protein, 488 aa, Zea mays
MVSSQPSSLTAILAQGPNHCPVKILLPMGPPDVVSSDNVEYDFSDVFGSTPVQTPTNLCGFGPESPAPTAESNEEFYSDPVVIINRSHSLVGPTSLVSRSLRLSKLSLGKNEGSSELVKCLSEEKEGDQGQLSDEDLGNAMTEDGGIGLDDLEILKLVGQGAFGKVFQVRKKNTSEIYAMKVMRKDRILEKNHSEYMKAEREILTKVDHPFIVQLRYSFQTKYRLYLVLDFINGGHLFFQLYKQGLFREELARIYTAEIVSAVAHLHANGIMHRDLKPENILLDADGHAMLTDFGLAKEFCENTRSNSMCGTLEYMAPEIVLGRGHDKAADWWSVGILLFEMLTGKPPFVGNREKVQQKIIKDKLKLPSFLSSEAHSLLRGLLHKEPNKRLGSCPGGSNEIKNHKWFKPINWRKLEARQIQPSFRPNVAGLTCIANFDDDECWTKTPVLDSPVSTPAGGGHSNFAGFTYVRPAPILEEVNASGSRLKD

SEQ ID NO: 49735 - protein, 470 aa, Lactobacillus plantarum WCFS1
MVVGDFAEERDTMIIGAGPGGYVAAIRAAELGQKVTVVEKEYIGGVCLNVGCIPSKALISAGHRLQEAKDSKIFGIKNIQDPVLDFKVTQDWKDHQVVDRLTGGVEMLLKKHKVEVVRGEAYMHDNHTLRVMNGDHTGQTYKFKHLIIATGSRPVEIPGFKFSGRVVDSTGGLNLPEVPKELVVIGGGYIGSELAGAYANLGAHVTILEGTPQILPNFEKDMVKLVLNSFKKKGVDVITNAMAKNSEQDDSGVTVTYAVDGKETEIHADYVMVTVGRRPNTDDMGLEYTDVKLTKRGLIEVDEQGRTAAEDIFAIGDIVAGAALAHKAFAEAKVAAGAISGKKTANDYVSIPAVCFTDPELATVGMTKAEAEEAGLQVKTSKFPFAGNGRAISLNAMDGFFRLVSTKDEGTIVGAQIAGPGASDLISELSVAVNGGMNVEDLALTIHPHPTLGEVVQEAADEAMGYPTHI

SEQ ID NO: 49736 - protein, 491 aa, Halobacterium sp. NRC-1
MGWKEAAAPVLTRMPAVERPEGHVPFRRKMYWTGGVLVLYFFLTNVPLWGIQTAGNDFFGQFRSLLAGGQGTVLQLGIGPIVTASIVLQLLGGANLLGLDTDNDPRDQAIYQGLQKFLVGVMVVLTGAPMVFLGNFLQPSQQLAQSMPGGAFGVEVLIFAQIAAGGILLLFMDEVISKWGVGSGIGLFIVAGVSQSLVGGLVFWEGGVGSQGLLPTWFDIIVGNVSNMPPLLSGSGIEFLLMQAGILGLLTTLFIYVVVVYAESVRVEIPLSHARVKGARGRFPVKLIYASVLPMILVRALQANIQFLGQILNSTLASMPTWLGVYGGNGQVTGGLFYYLAPIYSPNAWMWWTSGATAARWQVLIRIAIDLSFMIIGGAIFAIFWVETADMGPDATARQIQNSGMQIPGFRKNQGVIEKVMERYIPQVTVIGGALVGLLAVMANMLGTIGNVSGTGLLLTISITYKLYEEIAEEQMMEMHPMMREMFGGGD

SEQ ID NO: 49737 - protein, 235 aa, Matricaria chamomilla
MIRNNAFDSDFALLESVRRHLLDDNAPPMSCRSNNFLFPHLSDSWGELPLQQNDSEDMLIAKFLNEALPLQQNDSEGIITPEMTSSSENIFFVKSEPETSSFQPKSLGSQKGKHYRGVRRRPWGKYAAEIRDPAKNGARVWLGTYETAEDAAVAYDMAAYRMRGSRALLNFPLRINSGEPEPVRITSKRKTTSPSEGLVVKKVKVELEMSTQAEFPLVYGCYYCVILGPFLVKCF

SEQ ID NO: 49738 - protein, 370 aa, Lactobacillus plantarum WCFS1
MDNEKPIVDFGAIRDVLGKDFEPVQVLDGQAKVIKPEIVSKYSNEQLVEFFKLMLWERTLHQRSNALTRQGRLGFYAPTEGQEASEMGSNAAMKKTDVLMPAYRDIPQLIQHGLPVYKAFLWSRGHVLGNEYPEDFHAMPPQIIIGAQYVQAAGVALGIKKNGTEDKVAYTYTGDGGTSQGDFYEGMNFAGAFEAPAVFIVQNNGYAISVPRRKQTAAKTLAQKAVAAGIPSVQVDGMDFLAVYEVTKAAREYAAAGNGPVMIETLTYRFGPHTNAGDDPKRYRTKDEEQPWFDNDPLIRYRKYLTDQGVWSEDQENEYVEQVKEDIKAAVKQADEAPKQKMTEFLGNVFEEQPQNIQQQITEFQAKESK

SEQ ID NO: 49739 - protein, 450 aa, Thermoplasma volcanium GSS1
METYDVITLGAGGAAYPAAFRLKKSGYSVLMIDKKGIMSGNCLAEGCVPSKAIIETVHNYSKLKKFGKYSIAYEDIVKHKDDVQNIRYKQHDEELHEAGLKILKGTAKLIDENTVEVETDTGKERYRAESIIIGTGSDTYVPKIPGAELAWTSRELYALNPKVRKLPKSIAIIGGGYIGLETASFMSLLGTDVTVIELLDRVLSTMDSGMVSKLVPLLPKMNLILSSPVKEIRRGGDMFEVSYDHEGKTEKIRVEAVLMAVGRMPMFPEGLDDLGIKYDKHGIKVNMAMQTNIKHIYATGDVNGLTPLFHAAKRQSLVAANNIMANHVPVDYFDPLSVPFTVYTVPQVAYVGILPDQAKKLGISYIETDYQMEKDAMAQVNSEMEGEIRLFFDSRMKIIGGYVIGNDAGNLINEIALGISKGLSARDFAEMAHQHPMSFEGLDSAARKLY

SEQ ID NO: 49740 - protein, 476 aa, Thermoplasma volcanium GSS1
MSFEDVVELAKRRGFFWPSFSIYGGSSGFYDYGPLGTLLKDNIISIWKKSYAKEGAIFLDTPVIAPADVFKASGHLEKFSDIAVKCEKCKTAYKLENLLKSVGIDVPLNNVEKANAVLEEYDVKCPKCGAPLRGAYEFNLMFKVGTNELYLRPETAQGIFINFKNLYNYSRNTMPIIVCQVGKGFRNEISPRQALIRMREFTQAEVEVFYLNDSDFNPNGNSLKFKLLRNTGEEVTVDLKEALHSGIVKNPVMAYFLEKTYSILSSIGFNPNHLRAREHDPLERAHYSSETWDFEYLMDGEWIEIVGVSDRGTYDLGRHQQFSGENMEVDGNIPRVVEPSYGIDRIVLTILNDGYYIRDNGYKVLKLDPAVSPLHFAVFPLQRRDGLDAKAKELFNKIKQIDPFVYYDEGGNIGRRYARQDEIGTPFCITVDYETLEDSTVTIRERDSTKQVRENIEELLQKISDYPEYPTSLFKN

SEQ ID NO: 49741 - protein, 472 aa, Xanthomonas campestris pv. vesicatoria str. 85-10
MHRHVHEPEILADPAAAQTAEHWRQRDLGVVWHPCTQMREHPHTLPLVPIARGEGAWLVGHDGRRYLDAVSSWWTNLFGHTEPRIGAAIARQAGELEQVMLAGFTHTPAVQLAEQLLAIAPRQAGRAPLSKVFYADNGSAGVEVALKMAFHYFHNRGDHRRTRFIALENGYHGETIGALSVGDIPLYRRVYAPLLLEAMFTPSPDAYLAEPGQSAEDYALQAADALQALFERSPGEICALILEPRVQCAGGMRMYHPAYLRRARELCDAHGAFLIADEIATGFGRTGTLFACEQAGVMPDLLCLSKGLTGGFLPLSAVLATQQLYDAFLDDSRERAFLHSHSYTGNPLACAAALATLKIFADDDVIARNQPIAARMRELAAQIGAHPAVADVRQAGMIVAFELTQGGDKRTPFASAARVGLKAYRAALEKGVVLRPLGDVLYWMPPYCVDEAQLALLADTTGHAITEAVACA

SEQ ID NO: 49742 - protein, 354 aa, Arabidopsis thaliana
MDEYIDFRPLKYTEHKTSMTKYTKKSSEKLSGGKSLKKVSICYTDPDATDSSSDEDEEDFLFPRRRVKRFVNEITVEPSCNNVVTGVSMKDRKRLSSSSDETQSPASSRQRPNNKVSVSGQIKKFRGVRQRPWGKWAAEIRDPEQRRRIWLGTFETAEEAAVVYDNAAIRLRGPDALTNFSIPPQEEEEEEEPEPVIEEKPVIMTTPTPTTSSSESTEEDLQHLSSPTSVLNHRSEEIQQVQQPFKSAKPEPGVSNAPWWHTGFNTGLGESDDSFPLDTPFLDNYFNESPPEMSIFDQPMDQIFCENDDIFNDMLFLGGETMNIEDELTSSSIKDMGSTFSDFDDSLISDLLVA

SEQ ID NO: 49743 - protein, 362 aa, Glycine max
  misc_feature (141)..(141): Xaa can be any naturally occurring amino acid
  misc_feature (157)..(157): Xaa can be any naturally occurring amino acid
  unsure (1)..(362): unsure at all Xaa locations
MKETCCCASFSFGKAKPYLLTVGLQFGFAGAYIFSVASLNHGMNRYVFVVYRNAIAALALAPFALIFERKIRPKITLPVFLQIVALGFVEPVIDQGFTFLGMQYTSASFASAIMNAVPSVTFVLAVILRLERVNVKEVRSXAKVIGTLVSFSGALLXLYKGPQIKLFFSPDTTHHQDGSHSPQVIKHWLSGTLFLLLGCVAWSSFFILQSITLKRYPAELSLSSLVCLSGALQASVVAIVATRHSGLVAWALGWDFRLYGPLYTGIVTSGITYYAQGLILQTRGPVFLTAFNPLCMVITSALGSFLFAEQLHLGSIIGAVIIALGLYSVVWGKGKDYSNPTPSSPTTKHTETPQLPITSSDI

SEQ ID NO: 49744 - protein, 258 aa, Borrelia hermsii DAH
MIYIRFKEFIAEFLGTFILLALGTGSIAMTTLFPSNPAVAGEIIKGGYTNIVLGWGLGVTFGVYTAAKISGAHLNPALSIGLASIGKFPTSKLFHYILAQILGAFSGALMTLIVFYPKWIEIDPTFEITQGIMSTFPAVSGFWPGFIDQIFGTFLLMFLVLVVGKFVKEETQNPFFPFIIGAIVLAIGISFGGMNGYAINPARDLGPRILLLLAGFKNHGFDDMTVFIIPILGPIIGAILGAIVYEFTLEDKNNLKEF

SEQ ID NO: 49745 - protein, 361 aa, Hedera helix
MASTVNSNSMVLDNLKSPPNLQVTHSMPPQKLEIFKSLDDWARNNVLIHLKSVEKSWQPQDYLPDPVSDGFEEQVRELRERAKEIPDDYFVVLVGDMITEEALPTYMSMLNRCDGIKDETGAEPSAWAMWTRAWTAEENRHGDLLNKYLYLSGRVDMRKIEKTIQYLIGSGMDIKSENSPYLGFIYTSFQERATFISHANTAKLAQHYGDKNLAHICGSIASDEKRHATAYTKIVEKLAEIDPDTTVIAFADMMRKKITMPAHLMYDGSDELLFKHFTAVAQRVGVYSALDYCDILEFLVDKWNVERLTGLSDEGRKAQEYVCELGPKIRRVEEKVQGKEKKKKAEHPVSFSWIFNRELKI

SEQ ID NO: 49746 - protein, 247 aa, Zea mays
  misc_feature (76)..(76): Xaa can be any naturally occurring amino acid
  unsure (1)..(247): unsure at all Xaa locations
MPPRPVPLFSRLRFRLPSCAAVSISTPPSSAAPLHYGHRTPLASPFPLSPPCPRILRAAVAVSSLDLRPITGGFAXYSAWLLASSATSVHDFTVKDASGKDVDLSTYKGKVLLIVNVASQCGLTNSNYTELSQLYEKYKDQGFEILAFPCNQFGGQEPGTNEEIVQFACTRFKAEYPIFDKVDVNGDNTAPIYKFLKSSKGSLFGDNIKWNFSKFLVDKEGHVVERYAPTTSPLSIEKDIKKLLGSY

SEQ ID NO: 49747 - protein, 218 aa, Prochlorococcus marinus str. MIT 9313
MFGFLKKVVDYTRDAADAANYLIQGLAVTFDHLRRRPITVQYPYEKLIPSERYRGRIHYEFDKCIACEVCVRVCPINLPVVDWVMNKETKKKELRNYSIDFGVCIFCGNCVEYCPTNCLSMTEEYELAAYDRHSLNYDNVALGRLPTSVTTDPSVQPLRELAYLPKGVMDPHDVPANQPRAGQLPAEALKSLSLQQESVQGDEGESLQDASDQDQPSG

SEQ ID NO: 49748 - protein, 71 aa, Casuarina glauca
MSSCGCGSGCSCGSGCNCKNPVLGLSEKTTSKTIVADVAPVKSHPEGSEMSVEGGHGCKCGSSCNCDPCNC

SEQ ID NO: 49749 - protein, 341 aa, Mycobacterium avium subsp. paratuberculosis K-10
MRTVVVDGPRSIRVDTRPDPVLPGPDGAIVEVSAAGICGSDLHFYEADFPMPDPIALGHEAIGTVVEAGPQVRNVKVGDQVMVSSVAGCGSCAGCATRDPVLCHSGFQIFGGGVLGGAQADLLAVPAADFQLLKIPEGISTEQALLLTDNLATGWAAAQRADIPFGGTVAVIGLGAVGLCALRSALFQGAATVFAVDQVDGRLARAARWGATPVKAPALEAILAATGGRGADAVIDAVATDASLTEALNAVRPGGTVSVVGVHDMNPFPLNALGCLIRSITLRMTTAPVQRTWPELIPLLQSGRLDVDGIFTTTMPLDEAAIGYATAGSRSGDDVKILLKP

SEQ ID NO: 49750 - protein, 404 aa, Prochlorococcus marinus str. MIT 9313
MPRSCRDAVGQEQVGEIRHDRSGISFRPGLEGVPVTQSAICDIDGLQGRLAYRGYPIAELSAHSSFLETTYLLIWGDLPSPQQLRDFEAEVQMHRRVSFRVRDMMKCFPASGHPMDALQSSAASLGLFYSRRAIDDPKYVYNAVVRLIAKIPTMVAAFKLIRKGQDPIQPRDDLAYSANFLYMLTEREPDPLAARVLDRCLILHAEHSLNASTFSARVTASTLTDPYAVVASAVGTLAGPLHGGANEDVLAMLEEIGSPEHAGDYLDEAIASKRKVMGFGHREYRVKDPRAVILQGLAEELFARFGTDEMYDVAKALEQAAATRLGPKGIYPNVDFYSGLVYRKLGIPRDLFTPVFAISRVAGWLAHWREQLGANRIFRPSQIYTGPQNRTWIPSDERFSSTGA

SEQ ID NO: 49751 - protein, 274 aa, Bacillus clausii KSM-K16
MKMVTLNNGVNMPQLGFGVWQVPDEEATPAVAKALEVGYTSIDTAMIYKNEAGVGKAIKESGIDREKLFITTKVWNADQGYEQTLKAFDASLERLGLDYIDLYLIHWPTPHYDQYIETYKALEKLYNDGRVRAIGVCNFDIDHLERLLDECDITPVLNQVECHPYFAQNELKDFCAKHNIYVEAWSPLDQGGEVLTDEVVEKIAKAHNKTTAQVVLRWHLQNNTIVIPKSVTPSRIEENFDVFDFELSDEEMDAINRLDRNQRRGAKPSEMNTR

SEQ ID NO: 49752 - protein, 389 aa, Bacillus thuringiensis serovar konkukian str. 97-27
MNRVWKSLISEENIVKWRRHFHKYPELSFHEKETSQFIYDTLCTFSSFEVTRPTKYSVLAIKRGTEQGKVVAIRADIDALPIQEEISKSYTSVNKGIMHACGHDAHAAILLSTAEVLSNIKEDFAGEIRLFFQHAEEVYPGGGQEMVEAGVMDGVDYVIGLHVMSGLESGKIGIAYGPMMAAPDVFTVEIQGKGGHAARPEETIDPIAIGAQIITNLQHIVSRNTSAFMQRVVSVTQFHGGMADNIIPSVATLMGTVRSFNQALRVEAEEKIEKIVKGITKAHGGAYTYTYRYGYDPVINDEYITKVVEESAIHLFGNERVVKLEPSMGGEDFSAYLRKAPGCFIKLGTGNEKINTCYPHHHPKFDVDESALINGVELFLETAIRLLKS

SEQ ID NO: 49753 - protein, 228 aa, Rubrivivax gelatinosus PM1
MIDLYTSATPNGWKASILLEELGVPYTVHPLSLQKQDQKTPAFLSINPNGRIPAIVDRSAGDFAVFESGAILIYLAEKHGRFLPADVKGRSLVIQWLMFQMGGIGPMQGQANVFHRYAPEKIPYAIERYQSETKRLYRVLDGRLADHEFLAGDYSIADIANWSWVSLYDWAGVSIDDLPHLRRWLDTIAARPAVQRGIVIPEPLQLGGGGEAVKKMAQSILVSAPGTA

SEQ ID NO: 49754 - protein, 360 aa, Glycine max
MATKQLPQIAILGAGIFVKTQYLPRLSEISHLFILKSIWSRTQESATAAVDIARKHFPQVETKWGDNGFDDIIHDGSIDAVAVVLAGQNQVDISLRLLKAGKHVLQEKPAASCTSELEAALSSYKSISSDAPGQLIWSVAENYRFEPGLVECKKLIAGIGKMMSVQVIIEGSMNSSNPYFSSSWRRNFTGGFILDMGVHFIAGLRMLVGCEIVSVSAMTSHVDLTLPPPDNISSVFHLENGCSGVFVMVVSSRSPKTLWRVVGLNGTLQVERGFQGQHGYLVSFYGTDGQNKSSFFPFSGVTEELKAFINDVSEITLKKRNQFVTEPRLSYVEGARDVAVLEAMLESGARQGELVRLKKF

SEQ ID NO: 49755 - protein, 253 aa, Desulfovibrio desulfuricans G20
MYKLVLVRHGQSTWNLENRFTGWTDVDLTPLGETEAREGARLIAAAGLTFDECHTSVLKRAIRTLNIIQEELDLLWLPVHRHWRLNERHYGALQGLNKKEMSEKYGEEQVFIWRRSFDTPPPALTADDPRHPAHDRRYASLTARQMPLCESLKDTVARVLPYWHETLAPAIQAGRRLLVAAHGNSLRALVMHLDGMSPDEVTGLNIPTGLPLVYELDSNLTPLRRAYLGDAEAAEAKARAVAEQAKAGTTERP

SEQ ID NO: 49756 - protein, 399 aa, Pseudomonas aeruginosa
MSHFAKVARVPGDPILGLLDAYRNDPRADKLDLGVGVYKDAQGLTPILRSVKLAEQRLVEQETTKSYVGGHGDALFAARLAELALGAASPLLLEQRADATQTPGGTGALRLAGDFIAHCLPGRGIWLSDPTWPIHETLFAAAGLKVSHYPYVSADNRLDVEAMLAGLERIPQGDVVLLHACCHNPTGFDLSHDDWRRVLDVVRRRELLPLIDFAYQGFGDGLEEDAWAVRLFAGELPEVLVTSSCSKNFGLYRDRVGALIVCAQNAEKLTDLRSQLAFLARNLWSTPPAHGAEVVAAILGDSELKGLWQEEVEGMRSRIASLRIGLVEALAPHGLAERFAHVGAQRGMFSYTGLSPQQVARLRDEHAVYLVSSGRANVAGLHARRLGRLAQAIAQVCAD

SEQ ID NO: 49757 - protein, 276 aa, Gloeobacter violaceus PCC 7421
MSSLASPGRIARVFAALHARREVAFIPFITAGDPDLETTAEALLTLDRNGADLLELGLPYSDPLADGPTIQAAATRALARGTTPGAVLDLVARLTPELRAPLIVFTYFNLILAVGIEAFVERLAASGASGLLVPDLPVEEGDALQTAANVQGLDVIWLVAPTSPPERLRRIAERTTGFVYLVSTTGVTGARTQVASSVRTSLAQLRALTTRPVAVGFGISTPEQAHEVASLGADGVIVGSACVQLLATAAPEERLGQLAEFCRQLKKASQTLPVKS

SEQ ID NO: 49758 - protein, 312 aa, Zea mays
MLIFLGGCWPACLHWKPRPTLGRSRPKGPCHWLSPPGRRAAAGRLEAPFPTGGMRIQCDACEAAAATVVCCADEAALCARCDVEIHAANKLASKHQRLPLGDAAALPASLPRCDVCQERPAFIFCVEDRALLCRDCDEPIHVPGTLSGNHQRYLATGIRVGFSSVCGASAEGLPPAPPKGSSKPAAVVSAPAAGTTTKTRTVKDALPQEVPSSPFLPPSGWAVEDLLELSDYESSDKKDSSLGLKELEWFEDIDLFHAHSPAKTAMAEFFASPQPVSNAGFYKANGARLFKKSRMEVPDDDDEDYFIVPDLG

SEQ ID NO: 49759 - protein, 412 aa, Frankia sp. CcI3
MTGSSPARFDAAITGLGLVSAAGIGTDATWERVCSGVSTAARDPALAGLPVDFSCRVPDFDGTKLLGRAMAWRLDRFVQLAIVAARQAIADARLDPGTWDGARVGVVIGNSLGGTDTWERQHRSLVEGAPEDVSPLMIPMGMANMVAGCVAIDCQALGPSLVTATACASGSTAVGLARDLLRSDTCDVVIAGGAESALSAGAITGLQRMGALSARRDDPAAASRPFDVARDGFVAGEGAGILVLERPADARARGADVHALVSGFGASSDAYHATAPDPAGAGIERAVRAALRDAGIAGDDVDHVNAHGTSTPLNDVTEARALRRTLGERPLVTSTKGVTGHALAAAGSIEAGLTALALRHGAVPPTANLTDLDPAVDLTVVAGTATTASLDVALSTSLGFGGHNAALVLLAA

SEQ ID NO: 49760 - protein, 276 aa, Halobacterium sp. NRC-1
MTRSDLAAAFDDGPALVSYVVAGDPTPAATAEYIDALVDGGTDVIELGLPFSEPVAEGTTIQNAIKRALDAGMTPDAYLDLVARIDADVPVVCMTYYNLLFQYGDRAGPAAFVSAAAEAGVSGFVVPDLPVDESGPLREACRAHGLDLVFVVAPTTTADRRERMLDLTTGFVYVQGRVGTTGAREEVSAATPDALAALQHTDIPKAVGFGVSSGEQAREITASGADGVIVGSAYVDTVADGVADDDPPSVVADRLRDLAAELKAGAARGVPEPEHK

SEQ ID NO: 49761 - protein, 229 aa, Zea mays
MQIFVKTLTGKTITLEVESSDTIDNVKAKIQDKEGIPPDQQRLIFAGKQLEDGRTLADYNIQKESTLHLVLRLRGGMQIFVKTLTGKTITLEVESSDTIDNVKAKIQDKEGIPPDQQRLIFAGKQLEDGRTLADYNIQKESTLHLVLRLRGGMQIFVKTLTGKTITLEVESSDTIDNVKAKIQDKEGIPPDQQRLIFAGKQLEDGRTLADYNIQKESTLHLVLRLRGGQ

SEQ ID NO: 49762 - protein, 328 aa, Arabidopsis thaliana
MEEEVLSRVPVKSLGKLRLTCKKWNTITKSESFLKKKQRNGIEVVMMMDYRVSLMSVDLLSPSIDPIGNLNADGIKISKIFHCQGDKDSSRVVVWNPYLGQTRYIELPRNSIYHKCVKYALGYEKKNHKILRFVNEYLETSRDRIRELQIYSLYSNSWEVIDDFTPDWYILYKHSGVSLKGNTYWYALEEIPFHAVFGDTVTLASVREEQLAVLFHRASVVEIWITNKIEPNAVSWSNLLFAVDMKPVAGFWFPNVGRSFFVDEEKKVAVVLDKEIIDKCHLPARNIAYIIGNNGILSKVDLGESRDKFCYPLVCSYVPSSVQIPNTP

SEQ ID NO: 49763 - protein, 375 aa, Glycine max
  misc_feature (125)..(125): Xaa can be any naturally occurring amino acid
  misc_feature (136)..(136): Xaa can be any naturally occurring amino acid
  misc_feature (151)..(151): Xaa can be any naturally occurring amino acid
  unsure (1)..(375): unsure at all Xaa locations
MKEGGSSPGSVLRAHQKSGSTTDPTLQGTVTSLLEEKGVIKGVHSKTKDSQELSACAPLTIVCDGCFSNLRRSLCNPKVDVPYHFVGLILENCELPCANHGHVILGDPSPVLFYRISSSEIPCLXDVPGQKVPSIXNGEMTNYLKTVVAPXGKFMQIPPELHDAFIAAVDKGNIRTMPNRSMPAAPYPTPGALLMGDAFNMRHPLTGGGMTVALSDIVVLRNLLRPVRDLNDAPGLCKYLESFYTLRKPVASTINTLAGALYKVFCASPDPARKEMRQACFDYLSLGGLFSEGPVSLLSGLNPRPLSLVLHFFAVAIYGVGRLLLPFPSPKRMWIGVRLISSASGIILPIIKAEGVRQMFFPATVPAYYRNPPAQ

SEQ ID NO: 49764 - protein, 239 aa, Oenococcus oeni PSU-1
MDAQSIFIYMERNMNLAEKINVVRASVMGANDGIISVAGIVLGVFAATQGRTNDNWVIFVAGFSGTIAGMISMAAGEYVSVHGQRDAENAAIEKEEIANQESFNQQISLVKDFLIKDDISKELAQRAASEMMKTKPIETAVRVKHGFNISDKINPYHAALASFISFPIGATLPMLAILMVNRSYKVASTYFGVLLALIITGYLAARIGNNDRKKGITRNVLSGLFTMTATYLIGRLLHK

SEQ ID NO: 49765 - protein, 249 aa, Eucalyptus gunnii
MATAGEESQTQAGRHQEVGHKSLLQSDALYQYILETSVYPREPEPMKELREITAKHPWNIMTTSADEGQFLNMLLKLINAKNTMEIGVFTGYSLLATALALPDDGKILAMDINRENYELGLPVIQKAGVADKIDFREGPALPILDQLIEDGKQGSFDFIFVDADKDNYLNYHKRLIELVKVGGLIGYDNTLWNGSVVAPPDAPLRKYVRYYRDFVLELNKALAADPRIEICMLPVGDGITLCRRIQLSI

SEQ ID NO: 49766 - protein, 227 aa, Prochlorococcus marinus str. MIT 9313
MENGSPINIKTMSSAPQGDTNPKGTNIVWHEASVDRQSRAQQRGHRSAILWFTGLSGSGKSTLANAVNAALFEQGLATYVLDGDNIRHSLCKDLGFSDSDREENIRRIGEVAKLFLDAGVIVLTAFVSPFRADRDKARKLVDVDDFIEIHCAADLSICEERDTKGLYAKARAGEIKDFTGISSPYEEPASPELKINTGEQSLDSCVEIVLKTLLNRKVIPAKHQPVS

SEQ ID NO: 49767 - protein, 1751 aa, Zea mays
MEYSAKTSLPLYTFGIIFPCRCQRFNTNQQKEQVRLQKKGAKRKPKCSLVWCTRLSSVPPDSVRCTTRQCPVHQGESAQTPQLRVSEAQLRYNSPDCPVCHWTVRCTSGATTIYAQRSTLTDEQCSTVSRQKSEQQRMIEMAADVGLLGRVLPNKAKQRYSLYADDVGVFIRADKEDLKVLKKILEVFEGFSRLKINFDKTEIFPIRYPQTLWPDLMDVFPGKYSKFPREYLGLPLHFRNVRRIDVQPLIGKINKRLAGWKGRLLSKADLFNASTIVTIGNGKMADFWGSSWIEGHAPKNIAPKLYKKARRKNISVFKALRNNYWMQFCAPFSREEEPASLSLGDWVLQSLQFPPALPVLPHAPLCLSVSLASLLQTPARRPGRGGVMVFKGRFFSSRHKSSESSSSPDGSNSPRTPTSAPASASAASPASSSSSRSDKKKTKSETPKKRDKLFGSAATAPKSAASSASSSPAGDGRKGSVPHHRDAGVGGGGGASAAALSPILASSLGLNRIKTRSGPLPQEGQRMAAVIGSSNLSRGQGQAEPSAASAGVGGRKGVTSWADTSSSSRGKGKTTELPMRSTAGTSLGPVGKSAVKAKPSAQRNHSGDLRTPTHIPEAACAYDPCETPKESESPRFKAIMQATSAPRKRLPADIKSFSHELNSKGVRPFPFLKPRGIYNLKEVIKVIHVRFEKAKEEVNSDLAVFAGDLVSVMEKYADSHPEWKDALEDLLILARTCCVMTPGEFWLQCEGIVQDLDDHRQELSMGVLKKLYTRMLFILTRCTRLLQFHKESGFAEDEVVIDQRDKIIQSADRQILTQSGVGDTTSRASKSEARKSYSQEQHNLKWKRSQEIKPVNLLPPLDTDVKKVADSPTKERISSWKPFPSPVTKVPKESTPTKLESPNKKTDAHSTVSSHVELSSPVESLPQQQLPVKHQHKTSWGHWSDQPNISEEGSIMCRICEEYVPTQYVEDHSRVCAIADRCDKKGVSVDERLIRVAEMLEKMVESYSPKDLPNAAVSPDVAKVSSSSINEESDGPSPKLSDWSRRGSADMLDYLQETDNTISLDDIKNLPSMTCKTRFGPKSDHGMATSSAGSMTPRSPLTPRSNHIDMLLAGKNAINESGDLPQEARLPTSGIRAMVIVGDVPRRERFRRSASTHMTFLNAQGCDGAHADLLQGLTRLSVQEAEGQGAAAGARGRAGVGWREERAGLAAPERKIVELADIARCIANTPLDEESALSQMVTCIEDLQEIVNRRKHEALTVQTFGTRIEKLHREKYLQLCDSVDMDKVDSASTIMDEEDDVVRSLRASPVHPVKDRTSIDDFEIMKPISRGAFGRVFLAKKRTTGDLFAIKFYVLVSPSDPQYVYSKQVLRKADMIRKNAVESILAERDILITVRNPFVVRFFYSFTSRENLYLVMEYLNGGDLYSLLRNLGCLDEDVARVYLAEVVLALEYLHSMHIVHRDLKPDNLLIAHDGHIKLTDFGLSKVGLINSTDLSGPAVSGASLYGDDEPQMNELEQMDHRARRQNRSAVGTPDYLAPEILLGTGHGCSADWWSVGVILFELIVGIPPFNAEHPEAIFENIMNRKIPWPHVPEEMSFDAQDLIDRLLTEDPHQRLGANGASEVKQHPFFKDISWDTLARQKAAFVPSSDSAFDTSYFTSRYSWNQSDENIYEAYELEDSSDNGSLSGSSSCVSNQDDMGEDSTGLNEFESSANVNYSFSNFSFKNLSQLASINYDLLTKGLKDDPPPRTEM

SEQ ID NO: 49768 - protein, 241 aa, Glycine max
MSFLEEFQANWIHCQLYSEEVCVLRDLDKSLHDIQRQNEQRCEQEIEDIRRGVRSGNITPDTSVIRFSDEALDEQNHSIRVADEKVALAVQAYDLVDTHIQHLDQYLKRFGEEIRRERENAAITGVPASGSEGNTKSGRGNESGTGRGGRKKTRQTTVTPAATEAQATANPTGMDLELPVDPNEPTYCFCNQVSYGAMVACDNPNCKIEWFHFGCVGLKEQPKGKWYCSNCAATKNRRRGK

SEQ ID NO: 49769 - protein, 550 aa, Lycopersicon esculentum
MAGGGGGGAAPAAKASEPVPHPPKDQLPNVSYCITSPPPWPEAILLGFQHYLVMLGTIVIIPTALVPQMGGGNEEKAQVIQTSLFVAGLNTLLQSIFGTRLPAVIGGSYTFVAPTISIILSGQWNDEDPVSKFKKIMRATQGALIVASTLQIVLGFSGLWRNVTRFLSPLSAVPLVSLVGFGLYEFGFPGVAKCVEIGLPELVLLVIFSQYLAHLIRPGKNIFDRFAVLFTVIIVWIYAHLLTVGGAYNGKPPKTQASCRTDRAGLISGAQWISIPYPFQWGPPSFNAGEAFAMMMASFVALVESTGAFIAVARYASATPLPPSILSRGVGWQVRLEKEEIYLVYLNEGVGILLSGLFGTGNGSSVSVENAGLLALTRVGSRRVVQISAAFMIFFSILGKFGAVFASIPAPIVGALYCLFFAYVGAGGLGFLQFCNLNSFRTKFILGFSVFLGLSIPQYFNEYTAVAGYGPVHTHARWFNDMANVPFQSKAFVAGIVAFFLDNTMHKKDGQTRKDRGKHWWDKFKSFKTDTRSEEFYSLPFNLNKYFPSV

SEQ ID NO: 49770 - protein, 116 aa, Yarrowia lipolytica CLIB122
MGFRYTEYLDGQVYRCKKCGQHLTTHDDLMSKSFKGAMGTAYLFKKVVNIQEHEVVEKEMTTGKHLVCDITCGECTTTLGWKYIKAFEKQEKYKEDKYILEKYFMTAPRLSQQRFV

SEQ ID NO: 49771 - protein, 467 aa, Pseudomonas aeruginosa PAO1
MTHDTGLRRGLNARHIRFMALGSAIGTGLFYGSASAIQMAGPAVLLAYLVAGAAVYMVMRALGEMAVHEPVSGSFGHYASSYLGPLAGFVTGWTYAFEMIIVCLADVTAFGIYMGFWFPDVPRWIWVLSIVLFIGGLNLCHVKVFGELEFWLSLVKVGAIVAMILAGLGIMFFGFSLGGAATSATGVHNLWQHGGFLPNGWAGLVASLSVVVFAFGGIEIIGITAGEAQDPQRVIPRAINAVPLRILLFYVLTLFVLMAIFPWQQIGSNGSPFVQIFDGLGIESAAAILNVVVITAAISAINSDIFGAGRMLYGMARQGQAPVGFSRVSRHGVPWMTVLLMAVALLLGVALNYLIPQSVFLLIASIATFATVWVWLMILLAQVGMRRRMGPRQVAALKFPVPLWPFAPAAAIVFMLFIFVVLGYFPDTRPALWVGAIWIALLVIAYRRWVRPKGDAAHGVLQAQGGL

SEQ ID NO: 49772 - protein, 194 aa, Oryza sativa (japonica cultivar-group)
MATTSACCYRPLSAPPLHRRRGPPPQQQQLRTAVGGPRPRPSLQVAAAAATGGGQSVKAATDAEFFQTSDTRPIMLFDGVCNLCNGGVRFVQEHDPNRSIRYIPLQSESGRKLLQRSGRAPDDISSVVLVEKDRSYIKSEAVLRIMGYLNLPFPQLATFLNFVPLFLRDFAYDNVADNRYAVFGRSESESCEIL

SEQ ID NO: 49773 - protein, 462 aa, Halobacterium sp. NRC-1
MHLYWHQRDLRVPDNRGLHAATDGDTVVPVYVFDDTVLSQVGRPKRAFLAAGVRALRAAYRERGSDLLVREGDAESVLPALADEFDADTVFHAAHYDAARRNRRTRVADALAAAGVDTAGHVDHTLVDPATLDDAYPSHSQFYDDWQQAPKPDPVPAPDADALADVHDDHTLSVPAPEPPLPDAGHAAATDRLAAFLDDGIASYNDTRDDLAAAVDAPASAVSRLSPYLAAGNIGVREVWAAVADAYDDATGNAARNIGKYRYELSWREQNYHLLYHTPRLQTENYVSFDAPIAWQNSDDHFEAWTRGETGYPLVDAGMRQLRAEGYVHNRPRQVVASFLTKHLLVDWRRGERHFADRLVDYDPANNAANWQWTASTGTDTVAVRIFDPVSQMAKYDSDAAFVTEYVPELRGVDPETIVDWPTLRHSQRERLAPDYHHPIVDRDHAYERAQRVFEAALDGDA

SEQ ID NO: 49774 - protein, 185 aa, Triticum aestivum
  misc_feature (65)..(65): Xaa can be any naturally occurring amino acid
  misc_feature (80)..(80): Xaa can be any naturally occurring amino acid
  misc_feature (86)..(86): Xaa can be any naturally occurring amino acid
  misc_feature (123)..(123): Xaa can be any naturally occurring amino acid
  unsure (1)..(185): unsure at all Xaa locations
PRHTRGFATGDTKRDAKAIPIFLAHGHHIECAHLYAKNMDLYPQREERLSILCEDDMQAVAVNNXLQHIERPMYTNPPVXHGALLXQLLLTDPELNNEWLEQVTGMYDRIIGMRKALKENLDXIRSPSSWEHVTYQIGTLCYTVMTQKPDDRMTSEYRIYMTRNVRIRVDVVTTTNDVYLANIIH

SEQ ID NO: 49775 - protein, 455 aa, Xanthomonas axonopodis pv. citri str. 306
MSRLVVVSNRVAVPGENRAGGLAVGLLAALKERGGVWFGWSGKTVRGDSGGMHEQTEGDITFVTMDLNKRDIDSYYNGFANRTLWPLLHFRLDLVDYDRATREGYMRVNRLFAEKLAPLLKDSDTLWIHDYHMIPLGAMLRELGVGCKMGFFLHVPMPSADLVQAMPDHARLFSTFYAYDLVGFQTQRDAERFKAYVRLFGGGRILEGDLVEGPGGRRFTASSFPIGIDTDLIAHQAKASAGKQAVRDLRESLRGRQLAIGVDRLDYSKGLPERFQGFERYLERYPDQSGSLTYLQIAPVSRGDVTEYRQLRSQLEQIAGHINGGHAEPDWTPLRYVNQNFSHATLTGFYRAASVCLVTPLRDGMNLVAKEFVAAQDPADPGVLVLSLFAGAADEMKEALLVNPHDLDGVADAIATAASMPLASRIERWHAMMDHLRKNNINHWRQRYLQALSEV

SEQ ID NO: 49776 - protein, 435 aa, Aquifex aeolicus [sequence omitted]

SEQ ID NO: 49777 - protein, 451 aa, Oryza sativa
MASAPPVQEEALQPGTNHFRSRLAAAVRSISWSYTIFWSTSTSLPGVLTWNDGFYNGEVKTRKISNLEDLTADQLVLRRSEQLSELYYSLLSGECDHRARKPVAALSPEDIADTEWYYVVCMTYAFRPGQGLPGRSYASNRSVWLCNAQSADSKTFLRALLAKSASIQTIVCIPFMSGVLELGTTDPVSEDPNLVNRIVAYLKELQFPICLEVPSSTPSPDETEDADTVFDGLIEEDQMVILQGEDELGDVVVAECETNGANPETITMETDEFYSLCEELDLDLGSYQLVPTSARETVAAAAAAANDVDGVAYSHASCFVSWKRANPAEKVVAVPMTAGIESQKLLKKAVGGGTAWMSNIDDRGSVAITTTPGSNIKSHVMSERRRREKLNEMFLILKSLLPSVRKVDKASILAETITYLKVLEKRVKELESSSREPSRWRPTEIGQGKAP

SEQ ID NO: 49778 - protein, 395 aa, Magnetococcus sp. MC-1
MEQPHLAYRAFCQSREAAGQWRQLHAVQPLPRGRVLRDGVELINFSSNNYMGLADHPLLKQRAMAWTEQWGTGAQASRLVCGDLEPFARIEARLVAGKGCEAALVLNAGYQANSSVIPALLDKRVLGGEPLVFSDRLNHASMHHGVQLAGVRQLRYRHGDLDHLERLLKRHAGEKVAKFILSETVFSMDGDRIDVGGLIALKQRYGAFLYLDEAHATGVLGPDGFGLAAAYPGQVDLVMGTFSKGLGGFGAYVTCSHALRAYLINRAGGFIYSTALPPGVLGAMDAALELLPQMGEVRARVLAGAQRVRAALRAAGLDTGNSSTPIIPVMVGDEQRTLALSEGLRAEGLLGIAIRPPTVPEGTSRLRLSLSAAHSDEDWSLLAAAVPRCLREING

SEQ ID NO: 49779 - protein, 219 aa, Arabidopsis thaliana
MAMKLYGDEMSACVARVLLCLHEKNTEFELVPVNLFACHHKLPSFLSMNPFGKVPALQDDDLTLFESRAITAYIAEKHRDKGTDLTRHEDPKEAAIVKLWSEVEAHHFNPAISAVIHQLIVVPLQGESPNAAIVEENLENLGKILDVYEERLGKTKYLAGDTYTLADLHHVPYTYYFMKTIHAGLINDRPNVKAWWEDLCSRPAFLKVSPGLTVAPTTN

SEQ ID NO: 49780 - protein, 640 aa, Haloarcula marismortui ATCC 43049
MPDDQGGFEGVRENVDGHPMVNLVSYATPYWLRLFVGILAAFCTRFARLVPPIIVAAAIDRVVLNSGEPGLLTDAGLLPPGQITGEAARIAFLQRLVVIAAIAYLIRSAARFASRYLLQSSAQKIQRDLRNETYDHLQHLSLSFFANHQTGGMMSILNSDINRLESFLNTEFRQMIRVVATVGGIAVILYTYSPKLALIALAPVPIIGVASGFFLTWIEPRYRSIRQTVSRLNTRLENNLSGAPVIKAFDRYDFERKRVTDQSQEYHDEKVAALRIRRAFFAGLRLLTGIVFVLILYVAGMDFITNPQGETALSAGAFTAFFLYIRRLYSPMRRVGKSANKYQLAKSSAERVFGLLGQEPEVTDPEDTYEPDSIDGLVEFDDVTFGYGDEPPVVRDVSLDVPDGATVGLAGATGAGKSTLLKLVPRFHDVDSGAVRVDGVDVREYGLQSLRSEIAIVEQQPYLFSGTVAENIAYGDREVLDAEQSDDEARGSSWETARDRVRDAAEAAQAHEFIEDLPDGYDTQIGERGIKLSGGQRQRVAIARALLNDPEIIIFDEATSDVDTETEDRIQESIEQLVADRTAFVIAHRLSTIQDADRIVVMDDGKIVERGSHTDLLAADGDYADLWHAQADDRTVSADD

SEQ ID NO: 49781 - protein, 432 aa, Bacillus cereus ATCC 14579
MNFTKSEALHKEALEHIVGGVNSPSRSFKAVGGGAPVAMERGKGAYFWDVDGNKYIDYLAAYGPIITGHAHPHITKAITTAAENGVLYGTPTALEVKFAKMLKEAMPALDKVRFVNSGTEAVMTTIRVARAYTGRTKIMKFAGCYHGHSDLVLVAAGSGPSTLGTPDSAGVPQSIAQEVITVPFNNVETLKEALDKWGHEVAAILVEPIVGNFGIVEPKPGFLEKVNELVHEAGALVIYDEVITAFRFMYGGAQDLLGVTPDLTALGKVIGGGLPIGAYGGKKEIMEQVAPLGPAYQAGTMAGNPASMASGIACLEVLQQEGLYEKLDELGAMLEKGILEQAAKHNIDITLNRLKGALTVYFTTNTIEDYDAAQDTDGEMFGKFFKLMLQEGVNLAPSKYEAWFLTTEHTKEDIEYTIEAVGRAFAALADNK

SEQ ID NO: 49782 - protein, 502 aa, Oryza sativa (japonica cultivar-group)
MASLARRRAAEAALLRRAPAAAWASAWRGYAAAAAGEESDVVVIGGGPGGYVAAIKAAQLGLKTTCIEKRGTLGGTCLNVGCIPSKALLHSSHMYHEAKASFAHHGIKFSNLEIDLPAMMSQKDKAVAGLTKGIEGLFKKNKVEYVKGFGKFVSPSEVSVDLLDGGSTTVKGKNIIIATGSDVKSLPGVTIDEKKIVSSTGALALSEIPKKLVVIGAGYIGLEMGSVWNRLGSEVTVVEFASDIVPSMDGEIRKQFQRMLEKQKMKFMLKTKVVGVDTSGSGVKLTVEPAAGGEQSVLECDIVLVSAGRVPYTSGLGLNALGVETDKGGRILVDKRFMTNVKGVYAIGDAIPGPMLAHKAEEDGVACVEFIAGKEGHVDYDTVPGVVYTHPEVASVGKTEEQVKASGVAYQVGKFPLLANSRAKAIDDAEGLVKVVAEKETDRILGVHIMAPNAGEIIHEAVLALQYGASSEDIARTCHAHPTVSEALKEACLQTYLKAIHI

SEQ ID NO: 49783 - protein, 524 aa, Zea mays
MDVALSTIVFVIAIFIPALLTLVQRSRSRHAGHNQPPPPEPRAIPLVGHLHQLLRKKPLHRTLAHLAERHGDVLGLRFGSSRVAVVSSASVAQQCLVALDTSFGNRPRLPSARILSYEWSTMGHSNCGPYWRQARRTTSTEFSSVERVQHFADVHEQAARAMARSLCRLALASGRGRALVDVKPRLFEMLMNGLLDMLFKGTASRSGSSDEKDEAVEVSEEARCFMAMAEETMELTLTVWDFLPPLARWLDVDAVGRRLQRLQANRTEFLQRLIEEHKEMEKGGQVTRRTLVGVMLELQDKDPEAYTDQLIRSMCVSALEAGTLSTGYTIEWVMSLLLNNPHIMKKARDEIDACVGEPKRLLDATDLPKLPYLRCIILETLRLYPVVPLLVPRESSTNCTVNGFNIAKGTMLLVNTFAIHRDPRTWDDPETFLPERFEDGSNQAGKTTMDLSFGMGRRRCPAENLGMQLAGIALGTMIQCFNWERVGTELVDMAEGSGLTMAKKVPLEAFCQPRASMVDLLANI

SEQ ID NO: 49784 - protein, 463 aa, Lycopersicon esculentum
MAFAAQQKKAIHSMLANKLTHLKIPDSSSSSSPPPTDPDFDFSDVFGAPTSPSSSSSFLTDPQIIHSRSHSFVGPSPRITLSKPLPFHQEVDSEGESDSDKVNTHVGTHQTECSDGIEEISGDEGSAVTKFGPGDFEILRMIGKGSFGKVFQVKMKGYGGEGEGDGILAMKVMRKDTVIKNNHVDYMRAERDILTKVEHPFIVQLRYSFQTKSKLYLILDFINGGHLFYHLYRQGIFSEDQARIYAAEIVSAVSHLHQRGIVHRDLKPENILMDGDGHVMLTDFGLAKEIDESSRSNSMCGTMEYMAPEIIQSKGHNKDADWWSVGVLLYEMLTGQPPFTHANRKKLQEKIISEKLKLLPRLTGEAHSLLKGKDPSKRLGSGPRGGDEIKSHKWFRTINWKKLDARELQPKFKPDVIGRDCTANFDKCWTTMPPDDSPASTPTTGEHFQGYTYVAPNPWLSSS

SEQ ID NO: 49785 - protein, 144 aa, Xanthomonas axonopodis pv. citri str. 306
MNRADQSPVSPPAARATIVFDGVCLLCNGWVKFLLRHDRHGRYRFAAMQGQAGRALLQQHGLDPDDPLSFLLVDATGAWTDSDAIVRVLAGLGGLWQLSGVLRLVPRRVRDLGYRLIARNRYRWFGRSDHCMLPTPEQHARFLD

SEQ ID NO: 49786 - protein, 227 aa, Paulownia kawakamii
MAREKIQIKKIDNATARQVTFSKRRRGIFKKAEELSVLCDADVGLIIFSSTGKLFEYASSSMKEILGRHNLHSKNLDKLEQPSLELQLVEDSNYSRLSKEVAERSHQLRRMRGEELQGLSIEKLQHLKKSLESGLSRVIEKKGEKIMKGDQSTSRKGKQLMEENERLRQQVADISNDCKNNAASDSENIVYDEGQSSESVNACNSVGPPQDYDSSDTSLKLGLPYSG

SEQ ID NO: 49787 - protein, 164 aa, Triticum aestivum
MAAATKIVGITTNSLLKSAAPASLSAAAPSRHNSWWSHVQMGPPDPILGVTEAYKRDQNSNKINLGVGAYRDDNGKPFVLPSVIEAEDRMRKKNQDKEYAPISGPAEFCKHSITLALGEDNEHVKNSLNATVQGISGTGSLRIGGAFLQRFLPGKDLYLPTSSW

SEQ ID NO: 49788 - protein, 525 aa, Hordeum vulgare subsp. vulgare
  misc_feature (297)..(297): Xaa can be any naturally occurring amino acid
  misc_feature (331)..(331): Xaa can be any naturally occurring amino acid
  unsure (1)..(525): unsure at all Xaa locations
MDMDQLCLMAVATILLTLILRQVLGGKGTGAKLPPGPWNLPVIGSLHHLVATKPPPHRALLSLSRRYGPVMLLRLGEVPNVIVSTPEAAVLVLKTNDLTFATRTSGPTLDVVGSASEGIIFAPYGEHWRQMRKVCVVELLSAMQVRRIQSIMQAEIAHLLESVAAASSASPFRSAVVDVGKGLARLTNNVIARAVFGGKSRQQEAYLRELGVMAILGGGFSLVDLFPSSRLVRWLSSSGRAMRRLHSRMQRILGDIIQDRKETRAPNGASDAATARDNEDLLDVLLRLGKQDALSFXLTSEIISAVIFDIFSAATDTTAATLEWAMAELVXNPQAMARAKLEVRQMLRHRRSSTITSADLAGLHYLRMVIKETLRLHPSAPLIHRASQENCRVMGYDIPKGTAVMINAFAVGRDPAHWGADAAEFRPERFQGTSVEYSSQGPHMEFVPFGAGRRQCPGALFATTMLELVLANLLYHFDWAIPGGESPEAMDMGEVFGIIVHTRSSLHLQASEACHLQDQTTGVVS

SEQ ID NO: 49789 - protein, 360 aa, Arabidopsis thaliana
MRTISDLPVALVEEILSRVPLTSLSAVRSTCKTWNALSKTQIFGKTRQQFLGFMMIDFGLYSIKFDLQGLNYESDFVEPSIKRVSILDQLDIFKVFHCEGLLLCVFRGNRWPVVWNPYLGGTGWIQPISDFHKYQVSDKFAFGYENKNHFFGFYDIYDLNSSAWKVLDVNPDCDIKCGVSLKGKTYFFAKEIAKAPNVKDFLVCFDFTAERFGPRLPLPFHSCGLFSEHVTLSCVRDEHLAVLYRRYNGVMEIYITTKIEPNEVFWSNFLKVDLTTFPDRFYGSRSHYFFIDEEKKVAVVFKNEPEWTMDCSYQTAYIIGKGGYLKSVKFGETPNDRKHNNAWNINSFMLSSYVPSLVQL

SEQ ID NO: 49790 - protein, 415 aa, Arabidopsis thaliana
SRRSFDFRLSSLHKGKAQGSSFREYSSSRDLLSPVIVQTSRWANLPPELLFDVIKRLEESESNWPARKHVVACASVCRSWRAMCQEIVLGPEICGKLTFPVSLKQPGPRDAMIQCFIKRDKSKLTFHLFLCLSPALLVENGKFLLSAKRTRRTTRTEYIISMDADNISRSSNSYLGKLRSNFLGTKFLVYDTQPPPNTSSSALITDRTSRSRFHSRRVSPKVPSGSYNIAQITYELNVLGTRGPRRMHCIMNSIPISSLEPGGSVPNQPEKLVPAPYSLDDSFRSNISFSKSSFDHRSLDFSSSRFSEMGISCDDNEEEASFRPLILKNKQPRWHEQLQCWCLNFRGRVTVASVKNFQLVAARQPQPQGTGAAAAPTSAPAHPEQDKVILQFGKVGKDMFTMDYRYPLSAFQAFA

SEQ ID NO: 49791 - protein, 320 aa, GIBBERELLA ZEAE PH-1
MSKTLKVAAIQAEPVWQDLQGGVEKSIRLIQDAASNGANVIGFPEVFIPGYPWSIWANSPVENAAWINEYFKNSLERESPEMDQIRAAVREAGVFVVLGYSERYRGTLYIAQSFIDETGTIVLHRRKIKPTHVERAIYGDGQGESLNNVIQTTFGKVAGLNCWEHTQPLLRYYEYSQDVDIHVSSWPSIFPENSDQWPYHITPNCCKAFSHIVSMEGACFVILSSQILTAENFEKANVKGFDYTKNGGGGFTMIFSPFGKELVKALDPGVEGIVYADIDLEDKYKAKQNLDIVGHYARPDALSLRVNRHPAKPVFFANDL

SEQ ID NO: 49792 - protein, 578 aa, Hordeum vulgare subsp. vulgare
MGGGNGIVDGFRRLFHRRTPSGSVLGSSNQSSAGEDSSELEAVEDLDLVGLRPIRVPKRKMPLPVESHKKNIMEKEFFTEYGEASQYQIQEVVGKGSYGVVAAAIDTRTGERVAIKKINDVFEHVSDATRILREVKLLRLLRHPDVVEIKHIMLPPSRREFQDIYVVFELMESDLHQVIRANDDLTAEHYQFFLYQLLRALKYIHGANVFHRDLKPKNILANADCKLKICDFGLARVSFNDAPSAIFWTDYVATRWYRAPELCGSFFSKYTPAIEIWSIGCIFAELLTGRPLFPGKNVVHQLDIITDLLGTPSSETLSRIRNEKARRYLRYMRKKHPVPLTQKFPNADPLAVRLLGRLLAFDPKDRPSAEEALADPYFASLANVEREPSRHPISKLEFEFERRKVTKDDVRELIYREILEYRPQMLEEYMKGGDQISFLYPSGVDRFKRQFAHLEEHYSKGERGSPLQRKHASLPRQRVGASNDSNNEQHISDQEMSAEPDAHGAVSPQKPQDAPGVGQNGLSPTSLSSRTYLKSASISASKCVVVNPNKQPEYDDAISEETEGAVDGLSEKVSKMHA

SEQ ID NO: 49793 - protein, 82 aa, Brassica napus
MSASRFIKCVTVGDGAVGKTCLLISYTSNTYPTDYVPTVFDNFSANVVVNGATVNLGLWDTAGQEDYNRLRPLSYRGADVSS

SEQ ID NO: 49794 - protein, 415 aa, Arabidopsis thaliana
SRRSFDFRLSSLHKGKAQGSSFREYSSSRDLLSPVIVQTSRWANLPPELLFDVIKRLEESESNWPARKHVVACASVCRSWRAMCQEIVLGPEICGKITFPVSLKQPGPRDAMIQCFIKRDKSKLTFHLFLCLSPALLVENGKFLLSAKRTRRTTRTEYIISMDADNISRSSNSYLGKLRSNFLGTKFLVYDTQPPPNTSSSALITDRTSRSRFHSRRVSPKVPSGSYNIAQITYELNVLGTRGPRRMHCIMNSIPISSLEPGGSVPNQPEKLVPAPYSLDDSFRSNISFSKSSFDHRSLDFSSSRFSEMGISCDDNEEEASFRPLILKNKQPRWHEQLQCWCLNFRGRVTVASVKNFQLVAARQPQPQGTGAAAAPTSAPAHPEQDKVILQFGKVGKDMFTMDYRYPLSAFQAFA

SEQ ID NO: 49795 - protein, 415 aa, Arabidopsis thaliana
SRRSFDFRLSSLHKGKAQGSSFREYSSSRDLLSPVIVQTSRWANLPPELLFDVIKRLEESESNWPARKHVVACASVCRSWRAMCQEIVLGPEICGKLTFPVSLKQPGPRDAMIQCFIKRDKSKLTFHLFLCLSPALLVENGKFLLSAKRTRRTTRTEYIISMDADNISRSSNSYLGKLRSNFLGTKFLVYDTQPPPNTSSSALITDRTSRSRFHSRRVSPKVPSGSFNIAQITYELNVLGTRGPRRMHCIMNSIPISSLEPGGSVPNQPEKLVPAPYSLDDSFRSNISFSKSSFDHRSLDFSSSRFSEMGISCDDNEEEASFRPLILKNKQPRWHEQLQCWCLNFRGRVTVASVKNFQLVAARQPQPQGTGAAAAPTSAPAHPEQDKVILQFGKVGKDMFTMDYRYPLSAFQAFA

SEQ ID NO: 49796 - protein, 258 aa, Calystegia sepium
MAGRWSLQGMTALVTGGTRGLGHAIVEELSSLGAIAYTCSRNQKELDECLKNWKEKGYPVFGSTCDISQQSERENLIQLVCKQFDGKLHILVNSAATIIPKETLNLNAEDNSIVIGTNLMTSLNFSQLAHPLLKASGNGSIVFISSCASFVFVPVHTVYAATKGAINSLAKNLACEWANDNIRVNAVAPWAMRTSLTEAAREEAGGEILEALIQRTPQHRLVEPKEASAAVAFLCFPASSFVTGQVICVDGGATSYGL

SEQ ID NO: 49797 - protein, 133 aa, Xanthomonas campestris pv. vesicatoria str. 85-10
MSENIAAGGELAGLKVMVIDDSKTIRRTAETLLKREGCEVVTATDGFEALAKIADQQPQIIFVDIMMPRLDGYQTCALIKGNQLFKSTPVIMLSSKDGLFDKARGRIVGSEQYLTKPFTREELLSAIRTYVHA

SEQ ID NO: 49798 - protein, 350 aa, Glycine max
  misc_feature (50)..(50): Xaa can be any naturally occurring amino acid
  unsure (1)..(350): unsure at all Xaa locations
MPAPLILVTGGAGYIGSHTILQLLFGGYHVFAVDNFDNSSETAIATVGPXPPRIANNLSFCKLDLRDRAALEKIFSTVKFDAVIHFAGLKAVGESVKKPLLYFDNNLIGTIVLFEVMAAHGCKKLVFSSSATVYGWPKEVPCTEEFPLSATNPYGRTKLFIEEICRDIHRADSDWTVILLRYFNPVGAHPSGYIGEDPLGIPNNLMPFVQQVAVGRRPALTVFGSDYKTTDGTGVRDYIHVLDLADGHIAALRKLDDPKIGCEVYNLGTGKGTSVLEMVNAFEQASGKKIPLAMAGRRPGDAEIVYASTEKAERELNWKTKYSIDDMCRDQWNWASKNPYGYGASADSSN

SEQ ID NO: 49799 - protein, 172 aa, Glycine max
  misc_feature (3)..(8): Xaa can be any naturally occurring amino acid
  misc_feature (104)..(104): Xaa can be any naturally occurring amino acid
  unsure (1)..(172): unsure at all Xaa locations
VGXXXXXXAICKHEGVPLWFPGTKAVWECYNTASDADLIAEQHIWGAVDPRAKNEAFNCSNGDVFKWKHVWKVLAERFGIREYGFLEGEDLRLSEMMKEKGAVXEEIVKKNGLQRTKLEDVGDWWFADLILRMEAVLDSMNKAREHGFFGFRDSKKSFMNWIDKTKACKIVP

SEQ ID NO: 49800 - protein, 498 aa, Oryza sativa (japonica cultivar-group)
MAVGGDDDMERDFAARLRLAPSPASPNAAAGGGGGGIAFRAPQEQFTVGDFELGKIYGVGSYSKVVRAKKKDTGNVYALKIMDKKFITKENKISYVKMERIVLDQLDHPGVIRLFFTFQDTYSLYMALESCEGGELFDQIVRKGRLSEDEARFYAAEIVDILEYLHSLGLIHRDVKPENLLLTSDGHIKIADFGSVKPTKDTPIKVLPNSTNERACTFVGTAAYVPPEVLNSAPPTFGNDLWALGCTLYQLLSGSSPFKDASEWLIFQRIIARDLKIPEYFSDDARDLIDKLLDVDPSKRPGAGPDGYVSLKKHPFFRGIDWKNIRSTRAPKLAMEANANEDEDSQDSSWLSHMGSAPVNQHVSPVGNDGASSSSEVRSHISRLASIDSFDSRWQDFLEPGESVVLISKLKKINKLTNKKVQLILTDKPQLICVDPGKMVTKGNIMWSDDPSELNVQVSNSSHFRICTPKKVSSFEDAKQRAWQWKKAIEDLQRCQKN

SEQ ID NO: 49801 - protein, 805 aa, Citrus unshiu
MAERALTRVHSLRERLDETLSAHRNEILALLSRIEGKGKGILQNHQLIAEFESISEENRKHLTEGAFGEVLRATQEAIVLAPWVALAVRPRPGVWEYIRVNVHALVVEELLVAEYLHFKEELVDGGSNGNFVLELDFEPFNASFPRPTLSKSIGNGVEFLNRHLSAKLFHDKESMHPLLEFLRVHCHKGKNMMLNDRIQNLNSLQHVLRKAEEYLTTVVPETPFSELALRFQEIGLERGWGDTAERALEMIQLLLDLLEAPDPCTLETFLGRIPMVFNVVILTPHGYFAQDDVVGYPDTGGQVVYILDQVRALEDEMLLRIKQQGLDITPQILIITRLLPDAVGTTCGQRLEKVYGTKYSDILRVPFRTEKGVVRKWISRFEVWPYLETYTEDVAVEIAKELQGKPDLIIGNYSDGNIVASLLAHKLGVTQCTIAHALEKTKYPDSDIYWKNLDDKYHFSCQFTADLIAMNHTDFIITSTFQEIAGSKDTVGQYESHTAFTLPGLYRVVHGIDVFDPKFNIVSPGADMSIYFPYTEEKRRLKSFHPEIEELLYSDVENKEHLCVLKDRNKPILFTMARLDRVKNLTGLVEWYGKNAKLRELVNLVVVGGDRRKESKDLEEQAEMKKMYSLIDQNKLNGQFRWISSQMNRVRNGELYRYICETKGAFVQPALYEAFGLTVVEAMTCGLPTFATCKGGPAEIIVNGKSGYHIDPYHGEQAAEILVDFFEKCKADPSYWDKISLGGLKRIEEKYTWKIYSQRLLTLTGVYGFWKHVSNLDRLESRRYLEMFYALKYRKLAESVPLAVE

SEQ ID NO: 49802 - protein, 445 aa, Nocardia farcinica IFM 10152
MSASPRATHASAAASARLFDRAAQVIPGGVNSPVRAFRSVGGTPRFIASADGYTLTDADGNEYVDLVCSWGPMILGHAHPAVVDAVRRAATGGLSFGAPTEAEVELAEHIVARVAPVDRVRLVNSGTEATMSAVRLARGFTGRTKIIKFAGCYHGHVDALLADAGSGVATLGLPTSPGVTGAQAADTIVLPYNDLDAVAAAFEANPGEIACVITEAAAGNMGAVAPLPGFNAGLRELTENHGALLIMDEVMTGFRVSRSGWYGREGVAGDLYTFGKVMSGGLPAAAFGGRAEVMNQLAPLGPVYQAGTLSGNPVAVAAGLATLRAADDAVYAALDRNAERLGGLLTEALTAAGVEHQVQFAGNMVSVFFSDRPVTDYATAKASQTWRFPAFFHALLDGGVYAPPSAFEAWFVSAALDEDAFARIAAALPAAARAAAAATPEGSRA

SEQ ID NO: 49803 - protein, 762 aa, Mycobacterium avium subsp. paratuberculosis K-10
MAIIDKETQVRPSFDDEVAATQRYFDDPRFARITRLYTARQVAEQRGTIRTDYTVARDAAAAFYERLRELFAQKKSITTFGPYSPGQAVTMKRMGIEGIYLGGWATSAKGSTTEDPGPDLASYPLSQVPDDAAVLVRALLTADRNQQYLRLQMSEQQRAATKEYDYRPFIIADADTGHGGDPHVRNLIRRFVEVGVPGYHIEDQRPGTKKCGHQGGKVLVPSDEQIKRLNAARFQLDIMRVPGIIVARTDAEAANLLDSRADERDQPFLLGATNLDIPSYKACFLAMVRRFYELGVKDLNGHLLYALPEAEYAEATAWLERQGIQGVISDAVNAWRENGQQSIDDLFDQVESRFVAAWEDDAGLMTYGEAVAEVLEFAASEGEPADMSADEWRAFAARASLYSAKAKAKELGFDPGWDCELAKTPEGYYQIRGGIPYAIAKSLAAAPFADILWMETKTADLADAKQFADAIHAEFPDQMLAYNLSPSFNWDTTGMTDEQMKQFPEELGKMGFVFNFITYGGHQIDGVAAEEFATSLQQDGMLALARLQRKMRLVESPYRTPQTLVGGPRSDAALAASSGRTATTKAMGEGSTQHQHLVQTEVPKKLLEEWLAMWSENYHLGEKLRVQLRPRRAGSDVLELGIYGDGDEQLANVVVDPIKDRHGRSILQVRDQNTFAEKLRQKRLMTLIHLWLVHRFKADAVIYVTPTEDNLYQTSKMKSHGIFSEVYQEVGEIIVAEVNRPRIAELLQPDRVALRKLITKEG

SEQ ID NO: 49804 - protein, 225 aa, Oryza sativa (japonica cultivar-group)
MVGWVVSGVAFWWTAFLLARGAFPKRSYDFCNRAVSAAHAAAAVSLACLSVADWSRPLSPLAAASSPPQMKALAVTLSYMVYDAACCYLNDDVRVDNTVHHLVSIVGIAAGLAYRRCGTEMVASLFVTEISSPLLHLREILKEFGIKDTDLNLLVDILFAVIFSVARMGFGPYLTYVTVTADNPILIKAMATGLQLVSAYWFLRILRMVRHKLGKKRPAPKVAGD

SEQ ID NO: 49805 - protein, 398 aa, Candida albicans SC5314
MFLKNIFIALAIALLADATPTTFNNSPGFVALNFDVIKTHKNVTGPQGEINTNVNVKRQTVPVKLINEQVSYASDITVGSNKQKLTVVIDTGSSDLWVPDSQVSCQAGQGQDPNFCKNEGTYSPSSSSSSQNLNSPFSIEYGDGTTSQGTWYKDTIGFGGISITKQQFADVTSTSVDQGILGIGYKTHEAEGNYDNVPVTLKNQGIISKNAYSLYLNSRQATSGQIIFGGVDNAKYSGTLIALPVTSDNELRIHLNTVKVAGQSINADVDVLLDSGTTITYLQQGVADQVISAFNGQETYDANGNLFYLVDCNLSGSVDFAFDKNAKISVPASEFTAPLYTEDGQVYDQCQLLFGTSDYNILGDNFLRSAYIVYDLDDNEISLAQVKYTTASNIAALT

SEQ ID NO: 49806 - protein, 559 aa, Candida albicans
MSSLQQPIPPNSTLATTASSNQSGSNDFVKKLFLMLQEDSYKEVVRWTAKGDSFVVINTNEFTKDILPKHFKHSNFASFVRQLNKYDFHKVKISNKAKASYPYGEDAWEFKHPEFRINDAEALENIKRKGPTAKKSASNVTIKTEANNNGTQPTCNHNYSQLVSATNHLKEQVESLKKDKHSLYQEISVLERKYKTVVENIVAINTFNERYYRSMNVLINSIVQNGMKLPPLDFPPPVQLGPDSGIGSNLGPISSDTALPSISHHLSSPLPHHQQLLNRTIRPISSPIDGIPLVKLQQQSLGQNLQAPIGTPSAVPFSEEASSSIQAATPAPLAQPVAQPINQPPPPPPPPATQQQPLPPPPPPATATSQIPSAPPPPTQQQVGTSSSSVPTISPKSQGIVVSNSASPTTSAQISTTSVPNPKFHVLLVEDDNVCIQLCRKFLVKYGCSVTVVTDGLNAISTVEHTKYDLVLMDIVMPNLDGATATSVIRSFDTKTPIIAMTGNIEDNDLVTYLQNGMSDILAKPFTKDDLYAILSKHLLDPKENKQDNEPTVKKQKLS

SEQ ID NO: 49807 - protein, 185 aa, Volvox carteri
MAAIVAKSSVATAVVRPARSSVRPVAVLKPAIKAAPVASPAQANKMMVWTPVNNKMFETFSYLPPLTDEQIAAQVDYIVANGWIPCLEFAEADKAYVSNESTVRFGPVSCLYYDNRYWTMWKLPMFGCRDPMQVLREIVACTKAFPDAYVRLVAFDNVKQVQIMGFLVQRPKSARDWQPANKRSV

SEQ ID NO: 49808 - protein, 293 aa, Haloarcula marismortui ATCC 43049
MGLERAFADEPAFVPYLAAGDPNYEASLEYVEALARGGADVIELGLPFSEPIAEGKTIQNAIVRSLEAGMTPDRFFQFVEDLDVDVPLVCMTYYNLIYQYGEGDSESRSDSENASGETASQGPRPFVEKAAAVGIEGLVVPDLPGEEAGPLRTACDEFDLDLVFIVAPTTKGDRLERMLEQVSGYVYVQARLGVTGAREDVDDATEDSLARLSDWDVPKAVGFGIKTGAHAERIVSAGADGIIVGSALVDIVAEGHENGDSTDAVADRLEAKARELKEGALRGAAERPQPERT

SEQ ID NO: 49809 - protein, 723 aa, Phaseolus vulgaris
MDAYSSGEEVVVKTRKPYTITKQRERWTEEEHNRFLEALKLHGRAWQRIEEHIGTKTAVQIRSHAQKFFTKLEKEALVKGVPIGQALDIDIPPPRPKRKPSNPYPRKTTIGTATLHSGAKDGNLVESSHNNQALDLEKEPLPEKYDLDEGLTTVKENKDENCSKVFKVIQEVPCSSISSANRSSISMSVPLGNSCVLKEITSSVKEVITRDENTESFLTVELGNRNLEINDGKQANGTSKNSTLENSDALQTKLVQNEKTDGLDSALTIDGMQGNQNYPRHVTVHVVDGKLGTSTQNPSQDMLFRDSMFQPIGGDNGQPNLFTNSAPTNTSESQNNTARSSVHQSFLPYPPFTQHNQDDYQSFLHMSSTFSNLVVSTLLQNPAAHVAASFAATFWPYANPETSADSPRCSQGGFTSRQIGSPPSVAAIAAATVAAATAWWAAHGLLPLCLPLHAAFACPPASVTAVPSMNPPVQDQKHPEYSEAPQAQHSDSKSLAVISSDSETGNAKLNTSPKATDHVTNETISEHLDSDKTKGRKQVDRSSCGSNTASSSDVETDALGKDEKGKEEPETPDANNLAIEFSNRRRSIYNLTDSWKEVSSEGRLAFQALFSREVLPQSFSPPHALKNKDQMDITNDYKQNIADRNEDLDSKKCSSNALHKIPSFVENNVGLLTIGLGQGKLKTRRTGFKPYKRCSVEARENRVGANCEEKGCKRIRLEGDTST

SEQ ID NO: 49810 - protein, 664 aa, Bacillus cereus ATCC 10987
MTQNINQLAVNTLRTLSIDAINAANSGHPGLPMGAAPMAYALWANHLNHNPNHPKWFNRDRFVLSAGHGSSLLYSLLHLAGYDVSIDDLKSFRKLNSKTPGHPEFGHTSGVEATTGPLGQGIANAVGMAMAEAHLAAKFNKDGHSIIDHNTYALVGDGDLMEGVAYEAMSMAGHMKLGKLIVLYDSNEISLDGELNIAFSEDMQKRVESAHWQYVRVEDGNDVDAITKAIQLAKDNTDQPTLIEIRTIIGYGSPKVAGTNKAHGNPLGVEEATATKQAYGWHYEEDFFVPEEVTAHFNELKQKGIEKENKWNEQFNVYRESNPALADELEKAITGEVLIEAKDILSFDTEKTISTRVASGEAINHYVKSIPSIFGGSADLSHSTMTDIKGEAVYAVESYAGRNIYFGVREHAMGAAANGLALHGGVKPFVSTFFVFNDYLRPSIRLAALQKLPVTYVFTHDSIAVGEDGPTHEPIEHLAALRAIPGLTVIRPSDANETASAWAYALQQTEGPVVLVLSRQNLPVFHETKANIENLSKGAYVLTQTNENPDVILIATGSEVSLAASAKAKLEEDQVSVRIVAMPSWELFDRQSKEYKESVLPSSVTKRVSLEMGVSLGWERYVGQEGKVLSIETFGASGTGAEVMNLFGFTTENVVQITKNVLNS

SEQ ID NO: 49811 - protein, 277 aa, Rhodopseudomonas palustris CGA009
MQTADAHFVEAHGAKIPALGLGTWELSGHSCSRIVEQALRLGYRHIDTAQIYDNEREVGEGIRNSHIRRDQLFVTTKVWTTHFAPNDLVRSAKESLVKLRLSEVDLLLLHWPNAHVPLAETLGALAQARALGLTRHIGVSNFTVALLAEAVAVCPAPLVCNQVEYHPFLDQQKVLAACALYGMALVAYSPIARGNAKKSEVLTRIGNVHGKTAAQVCLRWLIQQNVAAIPRSSRLERLAQNIDVFDFELSDAEMQEIFTLGSPKGRLTTMPTAPVWD

SEQ ID NO: 49812 - protein, 900 aa, Zygosaccharomyces rouxii
MVNSGHRRQRIINCVAQLPYKIQLGETNDEWNIVPATGSSSLYSSIEYLNSEEKAKDYEQHVLGWTGEIGRESLPSRLFNSKNRDKSENGEKGENDLHAKEEREKEEDPLYLTNDQIDGITKDLRRHGKSDDHYNVDNVHPVWLLRRDQKRWRGFAENVLWPTFHYILKFSSDSGEKENLSWYDYVRFNEAYAMKIGEIYEKGDIIWIHDYYLLLLPQLLRMKFNDQDLTIAYFHHSPWPSNEYFRVLPRRKQILDGLMGADRGWFQNEGFARHFVSSCKRLLDSTSRKSKNRLGMEQYQISAYGGDIVVDSLPIGINRVKLLEDTFTKDIAQKVLAIKDAFQGKKIIVGRDRLDSVRGVVQKLRAFETFLSMYPEWRDQVVLIQVSVPSMKGGTNQLIRLEQQVNELVTSINMQYGSLNFSPVHHYYMRIPKDVYLSLLRVADLCVIASVRDGTNTTALEYVTVKSHMSNYNCYGNPLILSEFSGTSTILKDAMIINPWDSVAVAKSINRALSLSRDEKRALEDKIWPQVPTIQKWTDQFLSTLSDIVDEAHNTTDRKMTPALNRPALLEHYRQSKRRLFLFDYDGTLTPIVQDPAAAIPSARLISILQKLASDPCNQIWIISGRDQAFLNKWLGSRLPQLGLSAEHGCFYKDVDEENWINLTEKFDMSWQEKVGSIMEEFTRRTPGSFIERKKVALTWHYRRADPELGEFYASELKKELDKICADYDLDVMEGKANIEVRPKFVNKGEIVKRLVWHHHGRRQDMLNTKKEELPISEMPDFTLCLGDDFTDEDMFNQLNDIEAVWKKQYEDEVNQWGGFGLYPCTVGSASKKTVAKAHLTDPQQVLDTLGLLVGDVSLFQSAGTVELDSRGHVKHSDSSIRSEQASARYAMKRQQSYKN

SEQ ID NO: 49813 - protein, 411 aa, Zea mays
MSSKEKPTLGGTRIKTRKRNIAAPLDPASFSDAIVQIYLDNGGDLELVAKSIESSDLNFSRYGDTFFEVVFVGGRTQPGTVKPEEGDRHPYSVLDCASQREAILPFVLYIQKTLRRRPFLIKNLENVMRKFLQSLEFFEENERKKLAIFTALAFSQKLSGLPPETVFQPLLKDNLVAKGIVLSFITEFFKEYLEENSLDDLIALLKKGKMEDNLLDFFPSAKRSSEALSEHFTKEGLTSLVEYNEKKMFEVKLKEIKSTLTAMINDEAAISEVIETVKQQVKDAKFPDLEVIRMLWDVLMEAVQWSGKNQQQNSNAALRQVKAWTELLNAFCTSGRLELELIHKVQTQCYEDAKLMKLFPEIIRTLYDQDVLAEDTIVLWFRKGSNPKGRQSFVKALEPFVKWLEEAEEEE

SEQ ID NO: 49814 - protein, 218 aa, Glycine max
GFRKVVPDRWEFSNEYFRRGEKRLLCEIQRRKILSASPPPAGATATVAVPSPLPLSAIPTAKPIVSPSNSAEEQVLSSNSSPARAPVELLDENERLRKENILLTKELVKMRSLCNNIFNLMSNYANAQADGSSAAAAKRCSGEDAVEEMNPKLFGVAIGKKRAREEEGHGAKYDTALSLHQPFHADVKSEALDLPGRGENKKTPWLNQCHRANQRVCN

SEQ ID NO: 49815 - protein, 537 aa, Halobacterium sp. NRC-1
MRRERARILLDALLTLGPTFIKLGQLLSTRPDVLPTEYIEELAELQDRVPPADWAEAQRVIEDELGPVDDVFDAFNRESISGASLGQVYTADVDDQQVAVKVRRPGIESLVEADLRAIRWSIPIVVRFVGQGQAFSLENLADEFAKTIREEMDYSREGRMLTEIRANFADEPDIVIPTVYEEYSSDRVLTMQYIEGTKISDVDTLERRGVDRSQVSETLERAYLQMIIEDGVFHADPHPGNLAVQDDGSIVFYDFGMSGRVDSFIQDKIVEFYVGVANQDIDAILDALIDMGTLSPEADRAVMADVMELAIQDARGENIETYRVQQIVGKVEDTIYEFPLRLPPNLALVLRVATVVEGVCVTLDPEFDFITVATDYLAEQGYREESIRQFAAGTAEEFQAAATSVLRVPPKLERALDKVEREDLYVRADLEDSNRVIDALARRVVLGLVLATSVPTTAFLYVTADVTAAAISGAFTAAVGAALYKTFRRRNGLQASPQFTRQNLRERDGDGDDGGTALARSGSQIEADDAGTATNGD

SEQ ID NO: 49816 - protein, 385 aa, Desulfovibrio desulfuricans G20
MPVKPEIEARFEELKSIRQYLHSCPEVGLETVNTAAFVKKQLDGLGIGYEDIGVNSLLAKVEGTAPGVTVAFRADMDGLETCEETGLPYASQTCGRMHACGHDGHTATLLAFAGYLAQHRDFKGTVLLLFQSGEEGYGGALEVIKDGLFEKYSIDYMFGMHNWPPYGENQMIVHKGTAMASEDRFDLVIRGKSGHASVPHACNEPFAAVADFIKNAQSIVARRISAHDKGVISITQVHGGSAYNIIPDEVTIRGNVRTTDPRVQDLIEESLAQLAQGLEVTYGVKAAFTYHRKHPPVINSTPDMAIAAAARVVGQENVLTEELPAMGSEDYAFYMQKTKGCFVWIGNGTDSALIHNSKYDFNDKIILLGASLFAELLDEVLSAQP

SEQ ID NO: 49817 - protein, 413 aa, Arabidopsis lyrata
SRRSFDFRLSSLHKGKAQGSSFREYSSSRDLLSPVIVQTSRWANLPPELLFDVIKRLEESESNWPARKHVVACASVCRSWRAMCQEIVLGPEICGKLTFPVSLKQPGPRDAMIQCFIKRDKSKLTFHLFLCLSPALLVENGKFLLSAKRTRRTTRTEYIISMDADNISRSSNSYLGKLRSNFLGTKFLVYDTQPPPNTSSSALITDRTSRSRFHSRRVSPKVPSGSYNIAQITYELNVLGTRGPRRMHCIMNSIPTSSLEPGGSVPNQPEKLVPAPYSLDDSFRSNISFSKSSFDHRSLDFSSSRFSEMGISCNDNEEETSFRPLILKNKQPRWHEQLQCWCLNFRGRVTVASVKNFQLVAARPSQPQGTGTAPATAPAHPEQDKVILQFGKVGKDMFTMDYRYPLSAFQAFA

SEQ ID NO: 49818 - protein, 402 aa, Fagus sylvatica
MEACDCIEPQWPADELLMKYQYISDFFIALAYFSIPLELIYFVKKSAVFPYRWVLVQFGAFIVLCGATHLINLWTFTMHSRTVAIVMTTAKVLTAVVSCATALMLVHIIPDLLSVKTRELFLKNKAAELDREMGLIRTQEETGRHVRMLTHEIRSTLDRHTILKTTLVELGRTLALEKCALWMPTRTGLELQLFYTLRQQNPIGYTVPIHLPVINQVFSNNRAVKIAPNCPVARIRPLAGKYVPGEVVAVRVPLLHLSNFQINDWPELSTKRYALMVLMLPSDSARQWHVHELELVEVVADQVAVALSHAAILEESMRARDLLIEQNVALDLARREAETAIRARNDFLAVMNHEMRTPMHAIIALSSLLQETELTPEQRLMVETILKSSNLLATLINDVLDL

SEQ ID NO: 49819 - protein, 93 aa, Streptococcus sanguinis
MLKPLGDRVVLKVEEKEQKVGGFVIAGNGQAATKTAEVVAVGQGIRTLNGELVSLSVKEGEKVLVENHAGVEVKDGDEAYLLVSEANILAVVE

SEQ ID NO: 49820 - protein, 199 aa, Zea mays
  misc_feature (98)..(98): Xaa can be any naturally occurring amino acid
  unsure (1)..(199): unsure at all Xaa locations
MARMAVLGLAILLAASCALAAASFDKEFDITWGDGRGKILNNGQLLTLGLDKVSGSGFQSKHEYLFGKIDMQLKLVPGNSAGTVTAYYLSSQGPTHDXIDFEFLGNVTGEPYTLHTNVFTHGQGQREQQIRLWFDPTNDFHTYSILWNPKHIIFMVDDVPIRDFWNLEGEGIAVPQNQPMRLYSILWNADDWVTEAGRI

SEQ ID NO: 49821 - protein, 540 aa, Streptococcus sanguinis
MAKDIKFSADARSSMVRGVDILANTVKVTLGPKGRNVVLEKSFGSPLITNDGVTIAKEIELEDHFENMGAKLVSEVASKTNDIAGDGTTTATVLTQAIVREGIKNVTAGANPIGIRRGIEAAVATAVEALKSNSVPVSNKEAIAQVAAVSSRSEKVGEYISEAMEKVGNDGVITIEESKGMETELDVVEGMQFDRGYLSQYMVTDNEKMVAELDNPYILITDKKISNIQEILPLLENILKTNRPLLIVADDVDGEALPTLVLNKIRGTFNVVAVKAPGFGDRRKAMLEDIAILTGGTVITDDLGLELKDATIEALGQASKVTVDKDSTVIVEGSGNPEAIANRVAVIKSQIESSTSEFDREKLQERLAKLSGGVAVIKVGAATETELKEMKLRIEDALNATRAAVEEGIVSGGGTAYINVLDAVAGLELAGDEGTGRNIVLRALEEPVRQIALNAGFEGSIVIDRLKNSEVGTGFNAATGEWVNMIEAGIIDPVKVTRSALQNAASVASLILTTEAVVANQPEPASPAPAMDPGMMGGMM

SEQ ID NO: 49822 - protein, 546 aa, Bacillus anthracis str. 'Ames Ancestor'
MAENQDKNSLEEQDVKRETLTTRQGHPVKDNQNIRTIGNRGPATLENYHFIEKISHFDREEVPERVVHARGAGAFGYFETYGKVGDEPAEKYTRAKVFSGAGKKTPLMVRFSTVAGAKDSPETARDPRGFAVKMYTEDGNWDLVGNNLKIFFIRDAMKFPDMIHAFKVDPVSNVSNPQRMFDFVSRTPEATHMITFLFSPWGIPATYRHMQGSGVNTYKWVNEKGEAVLVKYHWEPKQGIRNLTQEDANSIQAMNVSHATQDLYEAIERKDYPEWELFVQIMEDGYHPELDFDPLDDTKLWPEEQFPWLPVGRMVLDRNPVDYHSEIEQAAFGTGVLVDGMDFSDDKMLQGRTFSYSDTQRYRVGANYLQLPVNAPKAPVRTNQHRGQMDMRNPKESGENPHINYEPSMLGGYKDAKQEKHHPHQPTYNAAAMSAPIDRPNNYGQAGHTYRSFEEWERNELVKNLSEALAVCDKRIQNAMIAHFTQADEDYGRRVKEGIEKKMKEAKTENKLPGREVSKSKYGQGSLAANEATKDAVKKSHESDPY

SEQ ID NO: 49823 - protein, 185 aa, Volvox carteri
MAAVIAKSSVATAVARPARSGVRPVAVLKPSVRATPVATPTQANKMMVWTPVNNKMFETFSYLPPLSDEQIAAQVDYIVANGWIPCLEFAEADKAYVSNESTVRFGPVSCLYYDNRYWTMWKLPMFGCRDPMQVLREIVACTKAFPDAYVRLVAFDNVKQVQIMGFLVQRPKSARDWQPANKRSV

SEQ ID NO: 49824 - protein, 304 aa, Triticum aestivum
  misc_feature (243)..(243): Xaa can be any naturally occurring amino acid
  unsure (1)..(304): unsure at all Xaa locations
AYLGDTTEQVCTKKQAGTGPEFPGYRRPTRPRTAVSDAFFEDPGSLKKVPCPSIFDPAEKYISLIVPAYNEECRLPEALTETLNYLKQRSSADKSFTYEVLIVDDGSTDRTSKVAFEYVKKHNIDNVRVLLLGRNHGKGEAVRKGMLHSRGQLLLMLDADGATKVTDLAKLEAEVLALAGKALSASSSQRLSDVEIAVFGSRAHLEKQALATRKWYRNFLMKGFHLVVLLTAGPGIRDTQCGXFKMFTRSAARKLFTNIRLKSGCFDVEIVYLCKHLRIPMAEVSVSWTEIPGPNAHDNILHMG

SEQ ID NO: 49825 - protein, 185 aa, Volvox carteri
MAAIVAKSSVAAVVARPARSSVRPVAGLKPAVKAAPVAAPAQANKMMVWTPVNNKMFETFSYLPPLTDEQIAAQVDYIVANGWIPCLEFAEADKAYVSNESTVRFGPVSCLYYDNRYWTMWKLPMFGCRDPMQVLREIVACTKAFPDAYVRLVAFDNVKQVQIMGFLVQRPKSARDWQPANKRSV

SEQ ID NO: 49826 - protein, 585 aa, Pyrenomonas salina
MRRFSETYGQKKQITFFCSNLSITAVVIEGLLKHKEEYGALERGMDILAEAVSVTLGPKGRNVVLESGKYGPPQIVNDGVTIAKEIELEDHIENTGVALIRQAASKTNDVAGDGTTTATVLAHAMVKQGMKNVRCRSKSIAIKRGIEKATQFVISQIAEYSRPVEDTKSITQVAAISAGNDMEVGQMIADAIEKVGREGVISLEEGKSTVTELELTEGNGWFLKKGFISPYFVTDTDRMETTQENPYILLTDKKISLVQELVPIHLELISKTSRPLLIIAEDVEKEALATLVVNKLRGIVNVVAVRAPGFGDRRKTMLEDIAILTGGQVISEDAGFSLETVQLDMLGQARRITVVKEGTTIIAEGHEREVKARCEQIRRQIEASESSYEREKLQERLAKLAGGVAVIKVGAATETEKDKKLRLEDAINATKAAVEEGIVPGGATLIHFIEDLNDWAEDNLLDDELIGALIVEKALSAPMKRIIENTGISSSIIIEKIKDKDFSIGYNAAQGEIEDMYEIGVIDPAKVTRSAMQNAASIASMILTTECIVVDKKKTCSLETSIYWLVLTNKYFCLDLLRLYFFLKD

SEQ ID NO: 49827 - protein, 336 aa, Magnaporthe grisea 70-15
MVKCGINGFGRIGRIVFRNAIEHPDCEIVAVNDPFIEPKYAKYMLEYDSTHGRFKGTVEVSGSDLVVNGKKVKFYTERDPANIPWSETGAEYVVESTGVFTTTDKASAHLKGGAKKVIISAPSADAPMYVMGVNEKSYDGSASVISNASCTTNCLAPLAKVINDKFGIVEGLMTTVHSYTATQKTVDGPSAKDWRGGRGAAQNIIPSSTGAAKAVGKVIPALNGKLTGMSMRVPTANVSVVDLTCRLEKGASYEEIKAAIKEAADGPLKGILEYTEDDVVSSDMIGNNASSIFDAQAGIALNDKFVKLVSWYDNEWGYSRRVIDLVTYISKVDGGK

SEQ ID NO: 49828 - protein, 520 aa, Zea mays
MERFYYVAVATFVLVFLLHHLLTRKKQQRLPPGPRFAYPILGHLPLLKKPLQTSFADLVSRHGPIIHLRLGRRHAVVVGSAAVAKECFSGELDVAIANRPHFPSAREVTFDYSVLTAVNYGALWRTMRRVSTVHLLSAHRVNVMSDTVIARELRVMVRRLARASASAPGDAARVELKRRLFDLSHSVLMEIMAQTRNTYSDDPEEDMSREARDMKDIIEEIIPLVGAANLWNYVPLLRWLDLYGAKRKLADVVNRRDLIFDNMIGAERQKLRQLERKKGEAHASESDKMGMIGVMLSLQKTEPDVYTDTFINALVSNLLAAGTETTSTTLEWAMSLLLNHPDVLKRAQEEIESNVGRDRLLDKNDLPRLPYLHCIISETLRLYPPTPMLLPHEASTDCKIHGYDVPAGSMVLVNAYAIHRDPAMWEDPEEFRPERFELGRAEGKFMMPFGMGRRRCPGENLAMRTMGLVLGALLQCFDWTRVGDREVDMATATGTIMSKAVPLEAQCKPRANMSAVLQKI

SEQ ID NO: 49829 - protein, 355 aa, Arabidopsis thaliana
MADTSSRTDVSTDGDTDHRDLGFYYLYNVTPGRLVPESLGKTWGILPSDRGHMHAAASDSSDRSKDKLDQKTLRRLAQNREAARKSRLRKKAYVQQLENSRLKLTQLEQELQRARQQGVFISSSGDQAHSTGGNGALAFDAEHSRWLEEKNRQMNELRSALNAHAGDTELRIIVDGVMAHYEELFRIKSNAAKNDVFHLLSGMWKTPAERCFLWLGGFRSSELLKLLANQLEPMTERQVMGINSLQQTSQQAEDALSQGMESLQQSLADTLSSGTLGSSSSDNVASYMGQMAMAMGQLGTLEGFIRQADNLRLQTLQQMLRVLTTRQSARALLAIHDYSSRLRALSSLWLARPRE

SEQ ID NO: 49830 - protein, 437 aa, Schizosaccharomyces pombe
MLARNLRCLHPNTFASLKTNVSYHGVKCLASQSKRGFKVWADVPMGPPDPIFGITEAYKKDGDVKKMNLGAGTYRDDAGKPYVLPSVRQAETELLSQKLDKEYAPITGIPSFRVQATKLAYGDVYESIKDRLVSAQSISGTGALCIAANFLASFYPSKTIYVSDPTWGNHKNVFSRAGLTVKSYKYYDPATRGLDIKGMLSDLTSAPDGSIILLHACAHNPTGVDPTKAQWDDILKTMQKKNHFALLDMAYQGFASGDFARDAYATRLFASSNVPMLLCQSFAKNMGLYGERAGCFSILANDAEEAARIESQTKILIRALYSNPPVNGARIANHILSNPALREQWAGEVVGMSERLKSMRKALRNILEKDLKNKHSWKHITDQIGMFCYTGLNPQQVDVLAKQYHIYLTKNGRISISGLNTSNVRYFAEAINAVTSN

SEQ ID NO: 49831 - protein, 332 aa, Bacillus cereus E33L
MNPLIFKENRPFDLIAVGRLCVDLNANETQRPMEETRTFTKYVGGSPANIAIGAARLGLQTGFIGKVSDDQMGRFITGYLKDNKINTDQIRIDCTGAVTGLAFTEIKSPEDCSILMYRDNVADLNLDPTEVSEDYIKQSKALLISGTALAKSPSREAVFLALEYARKHDVVVFFDVDYRPYTWQSEAETAVYYNLAAEKSDVIIGTREEFDMMEKLLNYEQSNDQVTAERWFSHYAKIVVIKHGGDGSIAYTRDGQSHRGGIFKTKVLKTFGAGDSYASAFIYGLIQGLEIPQAMRLGGASASIVISKHSCSDAMPTRAEISAFMETAEELV

SEQ ID NO: 49832 - protein, 478 aa, Rickettsia conorii str. Malish 7
MISNFFNLIRIFRIISKKQILIDSRSPKYCRFIGYILALFFAPVSLIKKSREDYGKRLIDCLSDLGPIYIKFGQTLSTRADLVGTEIAGYLRLLQDKLPPFDGGVARRLITSLRGDIYVDEAISASKQKIATQSMTVSHDALPFLHLDDTPIAAASISQVHKAQLITGEYVAVKILRPGIHKKYNRDIKLLYFLAKIISKFSKAKRLKPIKVVDKFHETMKFELDLRLEAAAASELTDNMRNDINVIIPKIYWDLTSENILTTEWLDGTSIYDTLLLKEMGLEPAKISQDFAVMFFNQAYRDGFFHADLHAGNILVNKQGKIILLDFGIMGRLKEKDRLAVAESLFGFLRRDYKLVAKVHLRAGYIPSNTDLALFAQSCRAVTEPIVGTPIKNISIGKLLAHLFKITEDFGMEVQPELLLLQKTLIMVEGIGRQLDGNVNMWQLAEPWIKKWAVKNLSPEAKLLRLVKHDLDSLEDII

SEQ ID NO: 49833 - protein, 326 aa, Synechococcus elongatus PCC 6301
MLPRFPVAKTETPTSDLVRTYLREIGRVPLLTHEEEVVLGKRVQQWMKLQELRQTLQSEEGDRDPSDLEWAAAAGLSIEELRQQQHLGEQAKRKMIEANLRLVVSVAKKYLKRNMDLLDLIQEGTIGMQRGVEKFDPTKGYRFSTYAYWWIRQAITRAIAEKARTIRLPIHITEKLNKIKKMQRQLSQQLGRTATLPELAAALDLTPAQVRDYLEKARHPLSLDLRVGDNQDTELGDLLETDCTTPEEFTLQASMRRDIDRLLDQLTEQQRQVIALRYGLEDGQVMTLASIGDRLQISRERVRQLEREALHTLRQARSQVQEYLAS

SEQ ID NO: 49834 - protein, 512 aa, Mycobacterium avium subsp. paratuberculosis K-10
MLSKCSALSAVGAGHDGSPEDSPEERDQMTVQAVLDDIRKRPGTGDVIAVIDPATEEKITEFTDCGAEAVDEAAARAKASFESGVWSQLPGRERAKILWRIGDLIDEHAEEFAQLDSLNTGMPLLQAQLQMSTCSEFFRYYAGWCSKINGTAYDVKTDGIATDTFVNMHAYTLKEPYSVVGLIFPWNGPIFNANAKLAPALAAGCSLLVKPAEETPLSALLLDRLVHEAGVPEGVVNLLTGYGHTAGAAITAHPDVEKVAFTGSTEVGKEIVRASAGNLKKVTLELGGKSPVLIFDDADLDKAILMASLGIFVHSGQGCVCGSRIFVQRGVYDRVVEGIAMMANTFKLGAPSEEGCVSGPLISQKQLNRVMGFIDEGKNDGVEVVTGGYRLDRKGYFVHPTVLTNVDPGMRLYQQEIFGPVVAILPFDDEDEAVAMANDTTYGLAATAWTENLGRAHRIVKRLQAGSVQVNCQLVFDHDVPFGGYKQSGWGHEFGKEGLEIYLKTKSVWAQL

SEQ ID NO: 49835 - protein, 77 aa, Brassica rapa
MKLSMRLISAVLLLFMIFVATGMGPVTVEARTCESKSHRFKGTCVSSTNCGNVCHNEGFGGGKCRGFRVRCYCTRHC

SEQ ID NO: 49836 - protein, 439 aa, Streptococcus pneumoniae TIGR4
MGSFLMPKSEVYMKQESTVDLLLDVDQRPSAGKGILLSFQHVFAMFGATILVPLILGMPVSVALFASGVGTLIYMIATGFKVPVYLGSSFAFITAMSLAMKEMGGDVSAAQTGVILTGLVYVLVATSIRFVGTKWIDKLLPPIIIGPMIIVIGLGLAGSAVTNAGLVADGNWKNALVAVVTFLIAAFINTKGKGFLRIIPFLFAIIGGYLFALTLGLVDFTPVLKANWFEIPGFYLPFSTGGAFKEYNLYFGPEAIAILPIAIVTISEHIGDHTVLGQICGRQFLKEPGLHRTLLGDGIATSVSAFLGGPANTTYGENTGVIGMTRIASVSVIRNAAFIAIALSFLGKFTALISTIPNAVLGGMSILLYGVIASNGLKVLIKERVDFAQMRNLIIASAMLVLGLGGAILKLGPVTLSGTALSAMTGIILNLILPYENKD

SEQ ID NO: 49837 - protein, 147 aa, Solanum demissum
MGRFDKEGLKKGPWTPEEDQKLLSFIDKHGCGSWRALPAKAGLQRCGKSCRLRWINYLRPDIKRGKFSLQEERTIIQLHALLGNRWSAIAAYLPSRTDNEIKNYWNSCLKKRLTKMGIDPMTHNQMVKAHQNMLQILVIWLNGKVQD

SEQ ID NO: 49838 - protein, 152 aa, Arabidopsis thaliana
MGALNYLSEYFSNHFYVSIRKRKKRKVMQTVNIKVKIDCDGCERKIKNAVSSIKGAKSVEVNRKMHKVTVSGYVDPKKVLKTVQSTGKKKAELWPYVPYTMVAYPYAAGAYDKRAPPGFVRKSEQAQAQPGSTDDKLMSLFSDENPNACTVM

SEQ ID NO: 49839 - protein, 158 aa, Lilium longiflorum
MPPRRKKKAAAAAAAAAAAAAAAGKAAAGKDGKAGIMTPKKPKKGKKKIPLMKYRVYIRRVLTQVRPELGISSKSMLIMNNFVVHNFQNIAKEASILAQYSKKKTITVKELKAAVKLVLPHQLLEYADRDGDRAVHNFESETSKKNSQGRKRGRGQQT

SEQ ID NO: 49840 - protein, 694 aa, Thiobacillus denitrificans ATCC 25259
MSQKKKPAKAGPDENFERGAGGEIHQTANGAHPPLTTNDGVPISDDQNSLRSHPRGPTLLEDFVLRDKITHFDHERIPERVVHARGSAAHGYFELTESLEKYTTARILTEVGEKTPVFTRLSTVAGGAGSVDTPRDVRGFAVKFYTKEGNWDLVGNNIPVFFIQDAIKFPDLVHSFKMEPDRGFPQSSTAHDTFWDYVSLTPESMHMILWIMSDRTTPRSLRMIEAFGVHSFRLVNAKGASTFVKFHWRPKLGLQSTIWDETVKIAGADPDFHRRDLFEAISEGNFPEWEFAVQLFTEADAERFPFDHLDATKLIPEELVPLKVIGRMVLDRWPDNFFAETEQVAYCPTHVVPGIDFSNDPLLQGRLFSYVDTQLLRFNSPNFHQVPVNMPKCPFANLQRDGHMQMERPKGRVNYEPNTLGTDTPRETPQGFRSAAVTESGEKGRIRAERFADHYSQARQFYVSQTEYEQAHIASTLVFELAKVDHVHIREAMVGHLRHVDEDLAHRVAKGLGIDPLPPAPEAAAPVQDLPPSPALQIIGNMKDTLEGRMVGILVGDGSDGARVEALRRAATDAGAAVKIIAAHVGQVKLANGKMLKVDKQLAGTPSVLFDAVAVVVSEDAAKMLLKESAALDFVHDAFGHLKAIASDAGGQALLDAVHVVRDAGVVDAADVGAFIAAAKTRQWDREPSVRLLA

SEQ ID NO: 49841 - protein, 635 aa, Fagus sylvatica
MESCDCIETQWHDELLVKYQYISDFLIALTYFSIPLELIYFVQKSAFFPYRWVLMQFGAFIGLCGATHFISLWTFSMHSKAVAVVMTVAKIACAIVSCATALMLVHIIPDLLSVKTRELFLKNKAEELDREMGLILTQEETGRYVRMLTHEIRSTLDRHTILKTTLVELGRTLGLEECALWMPSRTGMNLQLTHTLNSQIQGSTVPLSDSIVNEVFNNARAMRIPYTCPLARFRPLVGRYVLPEVVRVPLLPLSNFQINDWPDLSAKSYAIMVLILPTDGARKWRDYELELVDVVADQVAVALSHAAIIEESMRARDQLMEQNVALDLARREAERAIHARNDFLAVMTHEMRTPMHATIALSSLLLESELSPEQRVVIETVLKSSNLLATLINDVLDLSRLEDGSLELEIGTFNLHGVFREVLNLIKPIASVKKLSMTLLLTPDLPVCAVGDEKRLMQTVLNVAGNALKFTKEGYVSIIASVAKPESFRDWRAPEFYPIASDGHFYLRVQVDKDSGCGILPQDIPHLFTKFTQSQSGSNRRNGGAGLGLAICKRIRFVNIMGGHIWIESEGPDKGSIATFIVKLGICDNPNDSALQQVAPIGRAHNASGDLTGHKPVSRDIVNMDSSNLRYQRSF

SEQ ID NO: 49842 - protein, 375 aa, Fagus sylvatica
MCGGAIISDFIAPTGSRRLTADYLWGDRKKPISGKRFSKPVVDLDDEFELDFQGFKDEEESDIDEEEVLVQDVKPFTFSAPPSSGSKPVKSVEFNGQAEKSAKRKRKNQYRGIRQRPWGKWAAEIRDPRKGVRVWLGTFNTAEEAARAYDAEARRIRGKKSKGNFPMRLPVPKRSVKANLQKPLAKANLNSVQPNLNQNFNFMNSDQDYTMGLMEEKPFTNQYGYMDSIPVNADVGLKSFASNNTAPYFNSDQGSNSFDCSDYGWGEQGSKTPEISSVLSATLEGDESQFVEDAVPTKKLKSDSGNAVFIENNTAKTLSEELSAFESQMNFQMPFLEGSWESNMEALFSGDTTQDGNSMDLWSFDDLPVMAGGVL

SEQ ID NO: 49843 - protein, 591 aa, Bacillus thuringiensis serovar konkukian str. 97-27
MLWRSVVGKLWMTILLLVSFVLGFVAILLSQFFRTYYVDMSEARLQKVATSVSELIEEGADVKTIENIAYKFSDPLSRIIIVEDGKEISSSPKQEGLVTLTMDDLKEDKELAAVFTDKKEIKNNIRKASNSRKNKNTENDIMIVGKPVQSKNESAVFVYESLQVPIQGMERTTDFIFLSAGIAIILTTFFAFFLSTRITAPLRKMREVAFEVSRGKFDAKAPMVSQDEIGELATALNQMGKQLKFNMNALQQEKEQLASILSSMADGVITLNQEGEVVVINPPAEHFLQVWQEEKEIELSKKLPSELVELFHLVVESEQQQVVEINLQKGNYVVLMTPLYNQTKIRGAVAVLRDMTEERRLEKMRQDFIANVSHELRTPMVMLQGYSEAILDDIVQTKEEINEFVQIIYDESVRLGKLVNELLDLARMESGNVELHIGEVDIHPFVEKIGRKFQGIAKDKEVALTVDFKDPIEQYPFDADRMEQVLTNLIDNAIRHTNAGGHVTLVIDTKNNGLIFEVQDSGAGIPEEDIPFLFDRFYKADKARTRGKKGGTGLGLAIAKNIVQGHDGKIAVSSVVGEGTTFSVYLPNRII

SEQ ID NO: 49844 - protein, 404 aa, Brevilegnia macrospora
PAGQCGNQIGAKFWEVISDEHGVDPTGSYHGDSDLQLERINVYYNEATGGRYVPRAILMDLEPGTMDSVRAGPYGQLFRPDNFVFGQTGAGNNWAKGHYTEGAELIDSVLDVVRKEAESCDCLQGFQITHSLGGGTGSGMGTLLISKIREEYPDRIMCTYSVCPSPKVSDTVVEPYNATLSVHQLVENADGVMCLDNEALYDICFRTLKLTTPTYGDLNHLVCAAMSGITTCLRFPGQLNSDLRKLAVNLIPFPRLHFFMIGFAPLTSRGSQQYRALTVPELTQQQFDAKNMMCAADPRHGRYLTAACMFRGRMSTKEVDEQMLNVQNKNSSYFVEWIPNNIKASVCDIPPKGLKMSTTFIGNSTAIQEMFKRVSEQFTAMFRRKAFLHWYTGEGMDEMEFTRG

SEQ ID NO: 49845 - protein, 1298 aa, GIBBERELLA ZEAE PH-1
MAADMIHNDNNGEQEKRPSLTENNERPQRTPQVSDYLRVFNYATKWDFFIYALASVASIGAGITMPLMNIIFGQLVNQFTDFAKSSTEISSDGFRDILDRQVLYIVGLFIGRWGLNSINKYCFRMIGIRLSSAIRLHYLQSLFSQSIHVIDSMPAGAPATAITSTSNTLQVGISERLGTFLEFNGTIWASIIVAFIWSWDITLVTASLILYMATAMSITMPILVKGQTATGTADAQGTAIASEALKGIRLVTACGAQSRVMSRYQEWVRKAMVEGQRIAPFTGLHLAFIFFGVFGAFGLSFWYGTKRYIDGAIDNPGVIIIVLMSVMLIITSLERIATPLMAISKAMVAACEFFTVIDAPLPTSGSLKPDITSCDIVFEGATFEYPSRPGACVLDALNLCIRSGQNTAIVGPSGSGKSTIVGLLERWYSLKEHHILPQVVQAIPKPKADESTEILPGGEVEASGGAKLAGTISISGHSIEDLDLKWWRSQIGLVQQEPFLFNDTIFNNVAHGLIGSKWQDEPEEKKRALVSQACKEAYADEFINRLPDGYDTRVGDGGAKLSGGQKQRLAIARSIIKQPRIVILDEATSAIDAKSEKIVQAALDRVTQGRTTITIAHRLSTIKKADTIIVLQKGKVVEQGAHADLIDRAGVYSALVGAQALRVADQADDTATFPDTEKIEPSSELEATKTEVSVPSGDGGDTSRKPRGFFQSFGRLLREQRGKWPNYLGIVLSSMAVAAGTPIQAWLFAKAIGVFLSQGDELKRESNFWGLMWLALAGGVALSYFCEGWIGLRTQYYISAVYKAQYLNDMLYQKMSFFDQEENSHGTLSARVSGDAKQLEELLGVNLALMISAMFNVIGCMAISLAFGWKLGLICMSVALPVMLAAGRWKLKHEVQFDKMNSAVFMESSQFATEAIEAVRTVSSLTMEDSINGRYRDLLDDHVKKANRKAQWTSAIFGFADSVSLGVQALLLWYGGTLLASGEYSMEAFFVCFMAVMQGSEAGSMGLALAPSVVQVTASANRILDVQRSVDPDHQNTTGQLHAITDTEGGVKIELRDVSFKYPTRDTPIFDHLNLTIEKGQYAAFVGASGCGKTTIISLLERFYDVQPGNGAVLCEGQDIKDSNVFEYRESISLVSQESAMFQGSVRDNVLFGISNPDSVSDDRIHQVCRDAFIHDFIVSLPEGYNTDVGQRGVSMSGGQKQRIAIARALIRDPKLLLLDEATSALDSESEKMVAAAIDQARNGRTVISVAHRLSTIQNADVIFVFDNGKVVEKGTHTELVNKHGIYWEMCQSQALDR

SEQ ID NO: 49846 - protein, 453 aa, Atriplex hortensis
MSSYDPENAATNGVPPVKNDNSNHQQQHQQTVVVPETAHQISTDSWLQVGFVLTTGINSAYVLGYSGAIMVPLGWIPAVLGLIAATLISLYANSLVAKLHEYGGKRHIRYRDLAGFIYGPKAYSLTWALQYINLFMINTGFIILAGSSIKAAYHLFTDDPALKLPYCIIISGFVCALFAIGIPHLSALRIWLGVSTFFGLIYIIIAIALSLKDGINSPPRDYSVPTERGKVFTTIGAAANLVFAFNTGMLPEIQATVRKPVVGNMMKGLYFQFTAGVVPMYAIVFIGYWAYGNKTDSYLLNNVHGPVWLKALANISTFLQTVIALHIFASPMYEYLDTRFGITGSALNPKNLGSRVLIRGGYLAVNTFVAALLPFLGDFMSLTGAISTFPLTFILANHMYFKAKRNKLSMAMKIWLWINIVFFSCMAVASFIAALRLIATDSKQYHVFADLEG

SEQ ID NO: 49847 - protein, 404 aa, Heterosigma akashiwo
PAGQCGNQIGAKFWEVISDEHGVGPTGTYHGDSDLQLERINVYYNEATGGRYVPRAILMDLEPGTMDSVRAGPYGQLFRPDNFVFGQTGAGNNWAKGHYTEGAELIDSVLDVVRKEAESCDCLQGSQLTHSMGGGTGSGMGTLLISKVREEYPDRIMSTYSVVPSPKVSDTVVEPYNATLSVHQLVENADQCFTLDNEALYDICFRTLKLTTPTYGDLNHLVSAAIAGTTCSLRFPGQLNCDLRKLAVNMVPFPRLHFFMIGFAPLTSRGSQQYRALTVPELTQQQFDAKNMMCAADPRHGRYLTCACMFRGRMSTKEVDEQMLNVVNKNSSYFVEWIPNNVKASICDIPPKGLKMATTFVGNSTAVQEMWKRVSEQFTAMFRRKAFLHWYTGEGMDEMEFTRG

SEQ ID NO: 49848 - protein, 240 aa, Atriplex hortensis
MSYSYPPPLPSNTLNNFLSPKPVTMKTTGGPPKPTKLYRGVRQRHWGKWVAEIRLPKNRTRLWLGTFDTAEEAALAYDKAAYKLRGDFARLNFPNLRHEGSHIGGEFGEYKPLHSSVNAKLEAICESLAKQGNEKQGKSGKSKKKDVANNNNNTSSSSSSSCCTTATAAADAPQQQQRMPENGGDVKTESTSDSEVGSGGSSPLSDLTFGDNEEMGSENFLLESCPSHEIDWDAILSSES

SEQ ID NO: 49849 - protein, 401 aa, Isochrysis galbana
  misc_feature (124)..(124): Xaa can be any naturally occurring amino acid
  misc_feature (340)..(340): Xaa can be any naturally occurring amino acid
  misc_feature (370)..(370): Xaa can be any naturally occurring amino acid
  unsure (1)..(401): unsure at all Xaa locations
GNQIGAKFWEVVSDEHGIDPTGTYHGDSDLQLERINVYYNEATGGRYVPRAILMDLEPGTMDSVRSGPFGQIFRPDNFVFGQSGAGNNWAKGHYTEGAELIDAVLDVVRKEAEGCDCLQGFTLXHSLGGGTGSGMGTLLISKIREEYPDRVMCTYSVFPSPKVSDTVVEPYNCVLSIHQLVENSDESLLIDNEALYDICFRTLKLTTPTFGDLNHLVAAVMSASTCCLRFPGQLNCDLRKLAVNMIPFPRLHFFMVGFAPLTSRGSQQYRSLTVPELTQQMFDAKNMMAAADPRHGRYLTCCALFRGRMSTKEVDEQMLNVQNKNSSYFVEWIPNNMKCXMCDIPPKGLKMSVGFMGNSTCMQEVMKRVXEQFTAMFRRKAFLHWYTGEGMDEMEFTRGKG

SEQ ID NO: 49850 - protein, 274 aa, Oryza sativa
  misc_feature (10)..(10): Xaa can be any naturally occurring amino acid
  misc_feature (30)..(30): Xaa can be any naturally occurring amino acid
  misc_feature (225)..(225): Xaa can be any naturally occurring amino acid
  misc_feature (240)..(240): Xaa can be any naturally occurring amino acid
  unsure (1)..(274): unsure at all Xaa locations
DPRAAGWKPXCGVKSLLDDEAVTVGGTNHXHATQDLYDSIAAGNFPEWKLFIQTIDPDHEDRFDFDPLDVTKTWPEDIVPLQPVGRMVLNRNIDNFFSENEQLAFCPGIIVPGIYYSDDKLLQTRIFSYSDTQRHRLGPNYLLLPPNAPKCAHHNNHYDGFMNFMHRDEEVDYFPSRYDPAKHAPRYPIPSATLTGRREKVVIAKENNFKQPGERYRSWDPARQXRFIKRWIDALSDPRXLTHEIRSIWLSYWSQADRSLGQKLASRLSAKPSM

SEQ ID NO: 49851 - protein, 806 aa, Bradyrhizobium japonicum
MLLDLASRDGEFKEVTARMRRLMLNLLGGAKDYSVVPIQGGGSFAMEAARSSFVSRNDKPLVCINGIYGERIFKILRLWGVEALKLVKRATEPLDPQEVAEQLSRNPGVTHLCLVHCETTTGIVNPLDAIIEEARRRGVKTIVDGMSSFGAIDIDLSRGGPDVLVTSSNKCIEGPPGLAFVIASRELLEKAVQEPRSFVLDVTHQWLSLERTGEWRSTPPTHIVQATTKALEILEGEGIDARRRRYEKVRDDLVQELEGVVSPLLSAELQSPVCVAFSAPSGIADQAGFDGLYRHLAAHNLYIYSKLHLATRSFRVGCIGEIQPSWIEQLGCAFRTYFRSGPASSMGTPSTRQACERGVEMSSSFAKDSQLPFSAETAVLHAGYRRDPVTKAVAVPIYQNTAYELDGDLNHIADVYNVKADGFTYTRIINPTTRALEKRYAAVDMGSDSLAVASGQAATFLAILNLSSGEVGDNIVASPYLYGNTWNLLHNTLKRLGISVRTADPRRPETFERAIDDRTICLFGEVISNPCLIPLPVKQLAEIGRKHGVPLVVDNTTTPLVCRPSDLGAAITTYSATKYICGHGTTLGGLIVDNGKFSYRGASRFPLFNSPDEAHGGIIWRNALQDVDDLGKSEVLLKARMTWLRDTGAAIAPFASFQLIQGLETLPLRMKQHCANARIVADVLKEHPKVRRVFYPGLFEGADRETVDQTLNPAYGHGAMVMFEVEDEQAGRKFIQNVDLMYHVSNVGDARTLVTHPVSTTHTTVPREKREPPAYLAARSDFAWASKMSTTSCAIWTGRFPQSDNL

SEQ ID NO: 49852 - protein, 117 aa, Sorghum bicolor
PGYTKGDGLGAEIVGTFILVYTVFSATDAKRNARDSHVPILAPLPIGFAVFLVHLATIPITGTGINPARSLGAAIIYNRDHAWSDHWIFWVGPFIGAALAAIYHQVIIRAIPFKSRS

SEQ ID NO: 49853 - protein, 368 aa, Clarkia breweri
MGSTGNAEIQIIPTHSSDEEANLFAMQLASAAVLPMALKAAIELDVLEIMAKSVPPSGYISPAEIAAQLPTTNPEAPVMLDRVLRLLASYSVVTYTLRELPSGKVERLYGLAPVCKFLTKNEDGVSLAPFLLTATDKVLLEPWFYLKDAILEGGIPFNKAYGMNEFDYHGTDHRFNKVFNKGMSSNSTITMKKILEMYNGFEGLTTIVDVGGGTGAVASMIVAKYPSINAINFDLPHVIQDAPAFSGVEHLGGDMFDGVPKGDAIFIKWICHDWSDEHCLKLLKNCYAALPDHGKVIVAEYILPPSPDPSIATKVVIHTDALMLAYNPGGKERTEKEFQALAMASGFRGFKVASCAFNTYVMEFLKTA

SEQ ID NO: 49854 - protein, 171 aa, Haloarcula marismortui
KPASMYRDIDKPAYTRREYITGIPGSKIAQHKMGRKQKDADDYPVQISLIVEETVQLRHGSLEASRLSANRHLIKELGEEGDYKMTLRKFPHQVLRENKQATGAGADRVSDGMRAAFGKIVGTAARVQAGEQLFTAYCNVEDAEHVKEAFRRAYNKITPSCRIDSSPAGNA

SEQ ID NO: 49855 - protein, 596 aa, Saccharomyces cerevisiae
MKLSVLTFVVDALLVCSSIVDAGVTDFPSLPSNEVYVKMNFQKKYGSSFENALDDTKGRTRLMTRDDDYELVELTNQNSFYSVELDIGTPPQKVTVLVDTGSSDLWVTGSDNPYCSTKKKDTTGSSFKQVNKDALASVVESVFTEISYDTTIVTSEATATFDSTASTSQLIDCATYGTFNTSKSSTFNSNNTEFSIAYGDTTFASGTWGHDQLSLNDLNITGLSFAVANETNSTVGVLGIGLPGLESTYSGVSLSSVQKSYTYNNFPMVLKNSGVIKSTAYSLFANDSDSKHGTILFGAVDHGKYAGDLYTIPIINTLQHRGYKDPIQFQVTLQGLGTSKGDKEDNLTTLTTTKIPVLLDSGTTISYMPTELVKMLADQVGATYSSAYGYYIMDCIKEMEEESSIIFDFGGFYLSNWLSDFQLVTDSRSNICILGIAPQSDPTIILGDNFLANTYVVYDLDNMEISMAQANFSDDGEYIEIIESAVPSALKAPGYSSTWSTYESIVSGGNMFSTAANSSISYFASTSHSATSSSSSKGQKTQTSTAALSISKSTSSTSSTGMLSPTSSSSPRKENGGHNLNPPFFARFITAIFHHI

SEQ ID NO: 49856 - protein, 211 aa, Magnaporthe grisea 70-15
MADLGGFLPNAVVLIGDSGVGKSNLLSRFTRNEFNLDSKSTIGVEFATRSIQVDSKTIKAQIWDTAGQERYRAITSAYYRGAVGALLVYDISKHQTYENVTRWLKELRDHADANIVIMLVGNKSDLRHLRAVPTEEAKAFASENHLSFIETSAFDASNVELAFQNILTEIYRIVSSKALDSGDTPSMPQTGTNIALSNPTEDSAAKNGKCC

SEQ ID NO: 49857 - protein, 508 aa, Nicotiana tabacum
MMSTAAVIGLSAGKRLLSSSFYYSDLNEKLTCTSDHSLPCHHVPSIKNVITAKKSSDYSPSCVSSRKSQSAKSLKEHVDITADPSDVPSWFEMYEQLQNESDDEDESVEVLLLLQKSMLEKQWNLSLEQTLTASPQHEKKSKKMHITCSGTSARRRRMDSRQRVLDRHSSATPTSAAKPLRSIIGPELLQNRLKGYVKGVVSEELLTHAEVLQLSKKIQVGLYLEEQKSRLKERLGCEPSDDQLAVSLKMSRTDLQSTLIECSLARERLAMSNVRLVMSIAQRYDNVGAEMADLVQGGLIGLLRGIEKFDPSKGYKISTYVYWWIRQGVSRALVENSRTLRLPTYLHERLSLIRNAKARLEEKGITPSVNNIAASLNMSQKKVRNATEASSKMYSLDREAFPSLNGLPGETLHSYIADNHLENNPWHGVDVWALKDEVNNLISSTLRDREREIIRLYYGLDNECLTWEDISKRIGLSRERVRQVGLVALEKLKHAARKRQLDAMLIKQ

SEQ ID NO: 49858 - protein, 252 aa, Mycobacterium avium subsp. paratuberculosis K-10
MLTVDFDRLGIGPSSKVIDVGCGAGRHAFEAYRRGADVVAFDQNEAELRSVDTVLRAMADSGEAPAGASATVVVGDALKLPYADQTFDCVIASEILEHIPHDDAAIAELIRVLKVGGTLAVSVPRWLPERVCWLLSDEYHSNEGGHVRIYRASDLRAKILSGGMTLTHAHHAHALHSPFWWLKCAVGVHNTDHRAVAAYHKLLVWDLMRRPKITQLAESLLNPLVGKSVAMYFVKQQDAKSQATAGYSIASV

SEQ ID NO: 49859 - protein, 363 aa, Bacillus licheniformis ATCC 14580
MVYHGLKGITCVETAISRIDGEKGKLIYRGYNADELALSSTFEEVAYLILNGAFPTEAELSRFNELLASFRVLPEACERLIRSLPAELDDMAVLRTAVSSFGDISFAFKPTMEQALRLIAAVPSIIAFRKRLADGEEPVQPLDELGFVENYFYMLKGKRPTEAQKKALETYMILAMEHGMNASTFSARVTVSTESDLVSAVTSALGTMKGPLHGGAPSAVTDMLEGIGEKQHAESYIREKLEKGERLMGFGHRVYKTHDPRAKALRVKAEEIAGGDRDIDLALHVENTAIRLLEEYKPGRKLYTNVEFYAAAVMKAIDFDAALFTPTFSAARMVGWCAHVLEQADNNMIFRPSAKYVGELVSQ

SEQ ID NO: 49860 - protein, 473 aa, Brassica napus
  misc_feature (158)..(158): Xaa can be any naturally occurring amino acid
  misc_feature (160)..(160): Xaa can be any naturally occurring amino acid
  misc_feature (174)..(174): Xaa can be any naturally occurring amino acid
  misc_feature (350)..(350): Xaa can be any naturally occurring amino acid
  unsure (1)..(473): unsure at all Xaa locations
MGGGFRVLHLVRPFLAFLPEVQSADRKVPFREKVIYTVISLFIFLVCSQLPLYGIHSTTGADPFYWMRVILASNRGTVMELGITPIVTSGLVMQLLAGSKIIEVDNNVREDRALLNGAQKLLGILIAIGEACAYVLSGMYGPVGTTHAIPPPLQLYFXNXLTTRNINELLQKVXLGSGSSHLNFIVNCELIIWVAFSPTTINTGRGAEFEGAVIALFHMLITKSNKVAALRQAFYRQNLPNVTNLLATVLIFLIVIYFQGFRVVLPVRSKNARGQQGSYPIKLFYTSNMPIILQSALVSNLYFISQLLYRKFSGNFFVNLLGQWKESEYSGQSIPVSGLAYLITAPASFXSDMAAHPFHALFYIGFMLTAWALFSKTWIGRAGSSARDVAKQLKEQQMVMPGHRESNLQKELNRYIPTAAAFGGVCIGALTVLADFMGAIGSGTGILLAVTIIYQYFETFEKEKASELGFFGF

SEQ ID NO: 49861 - protein, 191 aa, Ralstonia solanacearum
MQESTMTERQALETAVLGGGCFWCTEAVFQQVQGVHSVVSGYAGGHLERPTYRAVCGGDTGHAEVVRVEFDPAVIPYREILDIFFATHDPTTLERQGNDIGPQYRSAVFAQSPEQFAEAGATIRALSAANVFDAPIVTEVVDASGGKVPFWQAEDEHQNYFRDHPAQGYCAFVISPKVAKFRERFAHRLQA

SEQ ID NO: 49862 - protein, 605 aa, Vibrio vulnificus CMCP6
MQTIITDIAVIGAGGAGLRTAIAAAEANPDLEVALISKVYPMRSHTVAAEGGSAAVIKDEDSLDNHFNDTVGGGDWLCEQDVVEYFVENATREMIQMEQWGCPWSRKENGEVNVRRFGGMKVERTWFAADKTGFHMLHTLFQTSMKYSNIKRFDEYFVVDLLVDEGEVQGLIAIHMAEGELVTIKAKSVVLATGGAGRVYHCNTNGGIVTGDGMAMAYRHGVPLRDMEFVQYHPTGLPGTGILMTEGCRGEGGIIVNKNGYRYLQDYGMGPETPVGQPKNKYMELGPRDKVSQAFWHEQQKGNTIKHPLGDVVHLDLRHLGEEYLQERLPFICELAKAYVNVDPAKEPIPIRPTVHYTMGGIETDKQCETRIKGLFAVGECASVGLHGANRLGSNSLAEFVVFGRVAGEQAVKRAAEFKGWNEASIAAQVKAVEERIAALMNQEGDENWADIRTEMGHTMEAGCGIYRQEDLMQATIEKITELKERYKKISIKDKGKVFNTDLLYAIEVGYGLEVAEAMVHSAILRKESRGAHQRLDDGCTDRDDVNFLKHSLAFFQEDQAPNISYSDVTITKSQPKARLYGEAAEKAAAEEAAKAAEKNAEEQA

SEQ ID NO: 49863 - protein, 375 aa, Glycine max
  misc_feature (27)..(27): Xaa can be any naturally occurring amino acid
  misc_feature (71)..(71): Xaa can be any naturally occurring amino acid
  misc_feature (76)..(76): Xaa can be any naturally occurring amino acid
  misc_feature (139)..(139): Xaa can be any naturally occurring amino acid
  misc_feature (300)..(300): Xaa can be any naturally occurring amino acid
  unsure (1)..(375): unsure at all Xaa locations
MQKKKKNRNEVVLCSAEGTGGCSRLAXAAMDLASNLGGKIDKAEVLSAVQKYEKYHVCYGGQEEERKANYXDMVNXNTNDLVYQPFMEFWLGGESFPFLHPDMVKGESLRESIKRHEHFLPLQLGLKPGQKVLDVGCGXIGGPLREISRFSSTSITGLNNNEYQITRGKELNRIAGVDKTCNFVKADFMKMPFPDNSFDAVYAIEATCHAPDAYGCYKEIFRVLKPGQYFAAYEWCMTDSFDPQNPEHQKIKAEIEIGDGLPDIRLTAKCLEALKQAGFEVIWEKDLAVDSPLPWYLPLXKSHFSLSSFRLTAVGRLFTKNMVKVLEYVGLAPKGSLRVQDFLEKAAEGLVEGGKREIFTPMYFFLARKPDLDRN

SEQ ID NO: 49864 - protein, 483 aa, Rhodopseudomonas palustris CGA009
MLTPASSRPLIVWFRDDLRLADHPALHAAAQSGAPVLCVYVLDEVSDDVRALGGAVRWWLAQSLRALESELRALGGALILRRGPTAAVLAELAQQHDAAAVHWNEIEIAAHRAVADALADALTVAGIAYHRHRGDTLVEPSAIRSKDGRGMRVFTPFWRRVLSLGDPPQPLPRPTTLRPAPAVPTEQLSDWQLEPTAPDWAGGLRQTWTPGEAAAQTRLAAFLAMQPGYAEGRDYPDRHITSGLSPHLRFGEISPRQVWYAARFAAAERPAIAPDIDKFLSEVGWREFCRHLLFDHPDLASRNLQPAFDAFPWQSDDAVLTAWQRGRTGYPIVDAGMRELWHSGVMHNRVRMVVGSFLVKHLLIDWRLGEQWFWDTLVDADPGSNPGNWQWVAGCGADAAPYFRVFNPVLQSEKFDAGGAYIRRWVPELARLPNDLIHQPWTATPLELAAAGIKLGGNYPGPIVDHKTGRQRALSAYAELRQR

SEQ ID NO: 49865 - protein, 338 aa, Solanum demissum
MGRSKCCDEEGLKKGPWTHEEDQKLLSFIDKYGCGSWRGLPAKAGLQRCGKSCRLRWINYLRPDIKRGKFSLQEERTIIHLHAFLGNRWSTIATYLPSRTDNEIKNYWNSRLKKRLMKMGIDPMTHKPNAAGSSKYVANLSHMAEWESARLEAEARLVRKSKILFNKNNNSHNYNINPTTISQQLPYHQQLPCLDILKAWQMTSTKLPTINDISHAILLNNSRNKNLESSIPSTLNSSENIFANNVPTTTKVADDHQNLHNLSTINSCFEDDQLQTELPSFMQEFSGVFPEYTQNSTNGLQVDNIMGSFYGDFEDNKLINWNNFPNYLVNSPIGSPVF

SEQ ID NO: 49866 - protein, 529 aa, Yarrowia lipolytica CLIB122
MRAVAPDIDIQLCSVFVNSLVPHHHIEFDKKAQMHSPSSSNNMFTGKSNVWGNSQMTRLFILTLTIAGLQFTWGVEMSYVNVYLLSLGMSKSTISLVWAMGPLAGLVTQPVVGLLSDSCTSRYGRRRPFMVVGSLFVSLSLVTMAWATELSPILFFLNKSISTRVIAVFSVFLTDFSINTVQACCRALIVDILPASLQQAGNGWAARQTAVGHLIGYFLGFLNLVHITNGWMGDTQLKCLCVISSAALLLTVGITSMLTREQVLVKTEQHEPVTLKSVLSHTCGIFTTIFKTATTLPPRMKRIVSVQFFAWYGWFSFLYYSSTWIGEVYQRQHGGVDEDGDKVGKVGRIGSMSLTVFSVVSLIASFVMPFLATNTVFRYKPRLTSIWTGAHIVFSLAMFSTLYVGSVGAATAVIASCGYSWAITTWAPFALMGEEIHRLEGTPLPISQEINETDQLGPNSSATSDAKHTGVFLGIHNIAISAPQFVCTFVSSFVFFLLEGEGDGGRAIAVTFQIGGVMTLIAAYISRAL

SEQ ID NO: 49867 - protein, 636 aa, Yarrowia lipolytica CLIB122
MAILHKPSFHFQKATFENPFHRSPEEKNETWIKYIFDPHVTVVTTKTHDHSNNKADGAKEIETIKQFMDKKMLFFAWISLMLVSTVVALERGTTSTYAAVATSHFNELGLLSAVGVVRSVLYAVTRPTIAKLADVLGRVEALVLAIIFYIIGFAMLAGGSNIATYFAAHIFYVSGEVGIQFMEAVFATDTSNLRNRTFFLALPNFAYVWASWVSAPIASGVLKNSTYRWGYGMWCIIMPVVSIPVCIILLRLKFKARAMGLEYGKAVRNFRGTFSQFDMVGLILFTAGLCLLFLAVTLATSPTSWGQAHILVMIIIGPILLFIFPFWEIFGPKYPFMPSYVITNRTMFTTCLLIFCYALAYFLYGTYYLPWLMVCKNLSVKAATNTVNVFVVGSTVSSFFAAAYAKYFKRMKPVIIAGAAIYMLGIGLTYNYRKPTHRLSQFIVSQCVEAVGAGFLQTPMISMIHAVVPHHNVVTATAIYQSIMTVGSIVAEAIAGTLYRQSYPKQLAKHAPFLSPREAHQVVNNLMAPIKLYPWGTPEREAIVTAFNDIYRKLLYPPIIIAGFIFVAAFTLPNVYLGDTDEPTQSDSEVDSSSIDEKIHPHDEEAQYEQHHDMEASTSPENIPQISEGMEEEKKM

SEQ ID NO: 49868 - protein, 402 aa, Streptomyces coelicolor A3(2)
MEFRQSNKLSEVCYEIRGPVIEHANALEEAGHSVLRLNTGNPALFGFEAPEEIVQDMIRMLPRAHGYTDSRGILSARRAVAQRYQALGLEVDVDDVFLGNGVSELISMAVQALLEDGDEVLIPAPDFPLWTAVTTLAGGKAVHYLCDEQAEWYPDLADMEAKITDRTKAVVIINPNNPTGAVYPKEIVEGILDLARRHGLMVLADEIYDQILYDDAVHHSAASLAPDLVVLTFCGLSKTYRVAGFRSGWLVVTGPKQHARDYLEGLTMLASMRLCANAPAQYAIQAALGGRQSIRELTAPGGRLHEQRDVAWEKLNEIPGISCVKPKGALYAFPRIDPAVHKIHDDERFVLDLLLREKIQVVQGTGFNWPSPDHFRILTLPHAEDLEAAIGRIGRFLSGYRQ

SEQ ID NO: 49869 - protein, 406 aa, Pavlova lutheri
QGGQCGNQIGAKFWEVISDEHGVDPTGTYHGDSDLQLERINVYFNEATGGRYVPRAILMDLEPGTMDSVRSGPFGQIFRPDNFVFGQSGAGNNWAKGHYTEGAELIDAVLDVVRKEAESCDCLQGFQITHSMGGGTGSGMGTLLISKIREEYPBRIMATYSVFPSPKVSDTVVEPYNATLSVHQLVENSDECFLLDNEALYDICFRTLKLTTPTFGDLNHLVAAVMSGATCCLRFPGQLNSDLRKMGVNLVPFPRLHFFMIGFSPLTSRGSQQYRALTVPELTQQMFDAKNMMAAADPRHGRYLTAAALFRGRMSTKEVDEQMLNVQNKNSSYFVEWIPNNIKSSICDIPPKGLKMAVAFVGNSTCMQEVMKRISEQFTAMFRRKAFLHWYTGEGMDEMEFTRGKG

SEQ ID NO: 49870 - protein, 404 aa, Phaeodactylum tricornutum
PAGQCGNQIGAKFWEVMSAEHGIAGDGTYHGDNPLQLQRIDVYFHEGMEGRYVPRAVLTDLEPGTMDSIRGGPFGDLFRPDNFVFGQSGAGNNWAKGHYTEGAELVDSVMEVIRKESESCDVLQGFQLTHSMGGGTGSGMGTLLVSKIKEEYPDRILSTYSVVPSPKVSDTVVEPYNATLSIHQLVENAVQCFALDNEALYDICFRTLKLSNPSYGDLNQLIANAITGTTCSLRFPGQLNCDLRKLAVNMVPFPRLHFFLVGFAPLTAAGSQSFRVLTVPELTQQAFDAKNMMCAADPRHGRYLTCAMMFRGTMSSKEVDDQMLQMVSKNSSYFVEWIPNNLKASICDIPPKGLAMSSVFIGNSTAIQEAWKRVADQFTVMFRRKAYLHWYTGEGMDEMEFTRG

SEQ ID NO: 49871 - protein, 404 aa, Phytophthora palmivora
  misc_feature (271)..(271): Xaa can be any naturally occurring amino acid
  misc_feature (342)..(342): Xaa can be any naturally occurring amino acid
  unsure (1)..(404): unsure at all Xaa locations
PAGQCGNQIGAKFWEVISDEHGVDPTGSYHGDSDLQLERINVYYNEATGGRYVPRAILMDLEPGTMDSVRAGPYGQLFRPDNFVFGQTGAGNNWAKGHYTEGAELIDSVLDVVRKEAESCDCLQGFQITHSLGGGTGSGMGTLLISKIREEYPDRIMCTYSVCPSPKVSDTVVEPYNATLSVHQLVENADEVMCLDNEALYDICFRTLKLTTPTYGDLNHLVCAAMSGITTCLRFPGQLNSDLRKLAVNLIPFPRLHFFMIGFAPLTSRGXQQYRALTVPELTQQQFDAKNMMCAADPRHGRYLTAACMFRGRMSTKEVDEQMLNVQNKNSSYFVEWIPNNXKASVCDIPPKGLKMSTTFIGNSTAIQEMFKRVSEQFTAMFRRKAFLHWYTGEGMDEMEFTRG

SEQ ID NO: 49872 - protein, 500 aa, Leifsonia xyli subsp. xyli str. CTCB07
MSEQNREPAETSEESALQPTAAMRRKVTGLALAAAVGGFLFGFDSSVINGAVDSIQRNFALNAFVTGFIVAIAFFGCAVGAFVAGRLADRWGRLRVMLLGAVLFLISSVGAGLAFSVWDLGLWRIVGGLGIGIASVVAPAYIAEISPRQSRGRLGSLQQLAITLGIFVALLSDALLAGIAGSASSQLWLGLEAWRWMFLVGVIPSVVYGVLALTLPESPRYLLTTGRHKDARAIFSTMVPEGDVDRQVRDIERVIEEDKEGRRGTLAGNRFGLKPIVWIGVILSVFQQFVGINVIFYYSTTLWRAVGFTESNSLLITVITSVTNVVVTIVAILLVDRVGRRPILLTGSVGMALALGVMALSFTFAVKQDGAVSLPSPWGPLALVAANVFVVCFGASWGPLVWVLLGEIFPSRIRGKALGVAAAAQWIANFLVTVSFPPMSDFSLPFTYGMYAVFAALSWFFVFFKIPETNGMALEHAETLFQEAGGRRRGIQVRSSGDSV

SEQ ID NO: 49873 - protein, 320 aa, Melittangium lichenicola
MKVLVTGAAGFIGYHVCERLLARGDTVIGVDNLDTSGDVTLKATRLSRLRAAPNFGFHRMDIRDAKACRELFDGARPERVVHLAARVGVRTLDSESPEYAETNVTGFLQVLELCRRSRVEHLVFASSSSVYGAGSDMPFSEDSAADRPLSLYAATKRANEMMAHAYSHQYAMPITGLRLFSVYGPWGRPDMAPMMFLRAMLEGRSLELHGEGKAQRDFTYIDDVVEALVRVLDAAPTGLPLYRVLNVGRGTPVSMSRLVDLLEEHLGTTAWVEMRSSRSEEMDATCADVTALERETGFRPSVTLEQGLARLVAWYRGREG

SEQ ID NO: 49874 - protein, 129 aa, Brassica napus
  misc_feature (99)..(99): Xaa can be any naturally occurring amino acid
  misc_feature (124)..(124): Xaa can be any naturally occurring amino acid
  unsure (1)..(129): unsure at all Xaa locations
MEADDGGNNSSHASKQRLRWTHELHERFVDAVAQLGGPDRATPKGVLRVMGVQGLTIYHVKSHLQKYRLAKYLPDSSSEGKKTDKKESGDVLSGLDGSXGTQITEALKLQMGVQKRLHEQLEVXRQLQL

SEQ ID NO: 49875 - protein, 188 aa, Stigmatella aurantiaca
MADLSVRRGTGSTPQRTREWDPFQQMQELMNWDPFELANHPWFANRQGPPAFVPAFEVRETKEAYIFKADLPGVDEKDIEVTLTGDRVSVSGKREREKREESERFYAYERTFGSFSRAFTLPEGVDGDNVRADLKNGVLTLTLPKRPEVQPKRIQVASSGTEQKEHIKAYPAPAEPGLAAPLGWPGFS

SEQ ID NO: 49876 - protein, 199 aa, Campylobacter jejuni subsp. jejuni
MDKNLTWHNTNITKEQRSKLKNQKPCVLWLTGLSASGKSTIANALEQKLHELGFHTYLLDGDNIRMGLNKDLGFDENSRVENIRRIAELCKLFVDSGLIILSAFISPFKSDRALARSLVKKDEFIEIFVDTPLELCEKRDPKGLYKKARNGEIKNFTGIDSPYEKPQNPEIHLQNSKAKFNENVDIILNYLKENGYIDT

SEQ ID NO: 49877 - protein, 216 aa, Gloeobacter violaceus PCC 7421
MKAVLFDAVGTLFGVRGSVGEIYSAIARTFGVKSDPEAIEKHFCVAFAARRSPNADARPWWRSVVAQTFTDTDFPDFEAYFERVWSHFATAEPWFVYPETVGVLAELRSRSLVLAVVSNFDERLYPVLEALGLRGYFQVVAISTEVGHAKPDPRLFTHALQRLGCSVDEAIHVGDSTEDVIGAKAAGIRVFKVDRSGAAGADTINSLARLLEMDYF

SEQ ID NO: 49878 - protein, 152 aa, Brassica rapa subsp. pekinensis
MGALNFLSGYFSDHFYVSIRKRKKRKVMQTVNIKVKIDCDGCERKIKNAVSSMKGAKSVEVNRKMHKVTVSGYVDPKKVLKKVQSTGKKKAELWPYVPYTMVAYPYAAGAYDKRAPPGFVRKSEQAQAQPGGTDDKLMSLFSDENPNACTIM

SEQ ID NO: 49879 - protein, 1006 aa, Desulfovibrio vulgaris subsp. vulgaris str. Hildenborough
MDQQHLDGKVVERGKEFFRSISGEAPSIFNKGWWTGKVMDWAMQNEDFKVQLFRFVDVLPYLNTSESLLRHIREYFATEDADIPPVLKWGAGKAGIGGALTAKLMGMTIRSNIEGMARQFIIGDNSKEAVKGLAKLRKDGFTFTVDLLGEATVSEEESEAYAQGYHEVVDAIAREQEKWKALPGNGPVEGFDWGATPKVNVSIKPSALYSQAKPVDVEGSVRGILSRLVPIYRKVVAMGGFLCIDMEQLKYKEMTLELFKRLRSDPEFRHYPHLSIVLQAYLRDTEKDLDDLLHWARSEKLPIGIRLVKGAYWDYETVIAKQNGWEIPVWTDKPESDIAYEKLAHRILENSDIVYFACASHNVRTIAAVMETALALNVPEHRYEFQVLYGMAEPVRKGLKNVAGRVRLYCPYGELIPGMAYLVRRLLENTANESFLRQSFAEGAALERLLENPQKTLHRLLAARPEPRAVEPGPGGLPPFTNDAMIDFTVPDNRKAFVEALADVRSRFGQTVPLYIGGRDVTTADLIPTTNPAKPAEVVASICQAGRPEIDDAIAAAKKAALTWRDTSPADRAAYLRRAADICRKRIWELSAWQVVEVGKQWDQAYHDVTEGIDFLEYYAREMLRLGAPRRMGRAPGEHNHLFYQPKGIAAVIAPWNFPFAIAIGMASAAIVTGNPVIFKPSSISSRIGYNLAEVFREAGLPEGVFNYCPGRSSIMGDYLVEHPDISLICFTGSMEVGLRIQEKAAKVQPGQRQCKRVIAEMGGKNATIIDDDADLDEAVLQVLYSAFGFQGQKCSACSRVIVLDAIYDRFIERLVKAASSIHIGPSEDPSNYMGPVADATLQKNVSDYIRIAEEEGRVLLKRTDLPAEGCYVPLTIVGDIRPEHRIAQEEIFGPVLAVMRAATFDEALSIANGTRFALTGAVFSRSPEHLDKARREFRVGNLYLNKGSTGALVERQPFGGFAMSGVGSKTGGPDYLLQFMDPRVVTENTMRRGFTPIDEDDDWIV

SEQ ID NO: 49880 - protein, 469 aa, Bacillus anthracis str. 'Ames Ancestor'
MFQKDFRLYDNPALFEAAQSGEVVPVYVHDETFSMGSASKWWLHHAIIDVKKQLEALGSTLIIRKGSTQEEILSLVEQLGITAVYWNICYDPDRLQSNQKMKMMLEHKGMICKEFNSHLLLEPWVIKKKDNTEYKVFTPFYNAFQKQVIHKPISKVQSIKGGNSLPVSLSVSELHLLPTIPWTSHMESIWEPTEEGAYKTWKEFFSSKLASYSEGRDFPNQNAHSMLAPYLSFGQISVKLIYHYLINKSTESQCSLFEKQVNSFIRQLIWREFSYYLLYHYPFTAYKPLNKSFEHFPWNNEEELLRVWQKGDTGYPFIDAGMRELWQTGFMHNRTRMAVASFLVKHLLIPWQEGAKWFMDTLLDADIANNTMGWQWVAGSGADASPYFRIFNPITQGEKFDKNGEYIRKWVPELKDMPNKYIHKPWEAPEHILQKANIQLGHTYPLPVVDHKAARERALCAYKSMKEFV

SEQ ID NO: 49881 - protein, 493 aa, Euphorbia characias
MDPYKFRPSSAYNSGFFTTNSGAPVWNNNNSLTVGSRGPILLEDYHLVEKLANFDRERIPERVVHARGASAKGFFQVTHDISHLTCADFLRAPGVQTPVIVRFSTVIHERGSPETLRDPRGFAVKFYTREGNFDLVGNNFPVFFIRDGMKFPDMVHALKPNPKSHIQENWRILDFFSHHPESLHMFTFLFDDIGVPQDYRHMDGSGVNTYTLINKAGKAHYVKFHWKPTCGVKSLLEEEAIKIGGANHSHATQDLYDSIAAGNYPEWKLFIQTMDPADEDKFDFDPLDMTKIWPEDMFPLQEIGRLVLNRNIDNWFAENEMLAFDPGLIVPGIYYSQDKLFQLRTFAYADTQRHRLGPNYKMLPVNAPKCPYKNNHFDGAMNFMHRDEEVDYFQSRYAPTSHAEQVPIPNAIISGGRRMKTVLPKECNFKQPGERYRSWAPDRQERFLCRLANALSEPRISQEIRGIWVSWWAQCDQTLGQKLASRLNVRPNI

SEQ ID NO: 49882 - protein, 404 aa, Pythium graminicola
PAGQCGNQIGAKFWEVISDEHGVDPTGSYHGDSDLQLERINVYYNEATGGRYVPRAILMDLEPGTMDSVRAGPYGQLFRPDNFVFGQTGAGNNWAKGHYTEGAELIDSVLDVVRKEAESCDCLQGFQITHSLGGGTGSGMGTLLISKIREEYPDRIMCTYSVCPSPKVSDTVVEPYNATLSVHQLVENADEVMCLDNEALYDICFRTLKLTTPTYGDLNHLVCAAMSGITTCLRFPGQLNSDLRKLAVNLIPFPRLHFFMIGFAPLTSRGSQQYRALTVPELTQQQFDAKNMMCAADPRHGRYLTAACMFRGRMSTKEVDEQMLNVQNKNSSYFVEWIPNNIKASVCDIPPKGLKMSTTFIGNSTAIQEMFKRVSEQFTAMFRRKAFLHWYTGEGMDEMEFTRG

SEQ ID NO: 49883 - protein, 365 aa, Glycine max
MGSTGETQITPTHVSDEEANLFAMQLASASVLPMVLKSALELDLLEIIAKAGPGVHLSPSDIASRLPTHNPDAPVMLDRILRLLACYNILSFSLRTLPHGKVERLYGLAPVAKYLVRNEDGVSIAALNLMNQDKILMESWYYLKDAVLEGGIPFNKAYGMTAFEYHGTDPRFNKVFNKGMADHSTITMKKILETYTGFEGLKSLVDVGGGTGAVVNMIVSKYPTIKGINFDLPHVIEDAPSYPGVEHVGGDMFASVPKADAIFMKWICHDWSDEHCLKFLKNCYEALPDNGKVIVAECILPVAPDSSLATKGVVHIDVIMLAHNPGGKERTEKEFEALAKGSGFQGFRVLCCAFNTYVMEFLKKV

SEQ ID NO: 49884 - protein, 610 aa, Staphylococcus epidermidis ATCC 12228
MKWLKQLQSLHTKLVIVYVLLIIIGMQIIGLYFTNSLEKELLDNFKKNITQYAKQLDVNIEKVYKDKDKGSVNAQKDIQDLLNEYANRQEIGEIRFIDKDQIIMATTKQSNRGLINQKVNDGSVQKALSLGQTNDHMVLKDYGSGKERVWVYNIPVKVDKQTIGDIYIESKINDVYNQLNNINQIFIVGTAISLFITVILGFFIARTITKPITDMRNQTVEMSKGNYTQRVKIYGNDEIGELALAFNNLSKRVQEAQANTESEKRRLDSVITHMSDGILATDRRGRVRIANDMALKMLGLAKEDVIGYYMLGVLNLENEFSLEEIQENSDSFLLDINEEEGIIARVNFSTIVQETGFVTGYIAVLHDVTEQQQVERERREFVANVSHELRTPLTSMNSYIEALEEGAWQDKELAPSFLSVTREETERMIRLVNDLLQLSKMDNESDQITKEIIDFNMFINKIINRHEMAAKDTTFVREIPQQTIFAEIDPDKMTQVFDNVITNAMKYSRGEKRVEFHVKQNALYNRMTIRIKDNGIGIPINKVDKIFDRFYRVDKARTRKMGGTGLGLAISKEIVEAHNGRIWANSVEGQGTSIFITLPCEIIEDGDWDE

SEQ ID NO: 49885 - protein, 502 aa, Nicotiana tabacum
MMAIIGLSAGNRILSSSFYYSVLTEKFCVSDHALPCHHFPSPKNVINAKNSSNYSPSYVSNRKKQSVKALKEHVDIASNRDSDTEPWVQMFKQLQNGSCSEEDSVEVLLLLQKSMLEKQWNLSAEKAMTNENNCKKKMQITCSGTSARRRRMDTRKRDLLPKNSATSDSSSKRLRSVIGPELLQNRSKGYINGVVGQELLTHTEVVQLSKKIKFGLYLEEQKSRLKERLGCEPSDDQLAISLKISRADLRSTLIECSLAREKLAMSNVRLVMSIAQRYDTNGTEMADLIQGGLIGLLRGIEKFDHSRGFKISTYVYWWIRQGVSRALVENSRTLRLPIHLHERLSLIRNAKIKLKENGITPSIEKIAECLNMSQKKVRNATEASSKVFSLDREAFPSLNGLPGETLHSYIADNRLENIPWHGVDEWMLKDEVNNLISSTLREREREIVRLYYGLDNECLTWEDISRRIGLSRERVRQVGLVALEKLKHAARKRRLDAMLVKH

SEQ ID NO: 49886 - protein, 544 aa, Oryza sativa
MVAGGGNGGAAVLVGITVLLFVVVVVVVVLVRWWSGGEGGAAPSPPALPVLGHLHLLKKPLHRSLAAVAAGVGAPVVSLRLGARRALVVSTHAAAEECFTACDAALAGRPRTLAGEILGYDHTIVLWTPHGDHWRALRRFLAVELLSAPRLAALAADRHAEAASLVDAILRDAAGGAKVTLRPRLFELVLNVMLRAATTRRRHASVDARKLQEIIEETFSVNGTPSVGDFFPALRWVDRLRGKVGSLKKLQARRDAMVTGLIDDHRQWRSGSAGDGDQDKEKKGVIDALLALQETDPDHYTDNVVKGIILFSITVPLLHFYSIVINMYNGFDHGVQSLLFAGTDTSALTIEWAMAQLVTHPETMKKARAEIDANVGTARLVEEADMANLPYIQCVIKETLRLRTAGPVIPAHEAMEDTTVGGFRVARGTKVLVNAWAIHRDGDVWDAPEEFRPERFVDSDAGGAVTAPMMPFGLGRRRCPGEGLAVRVVGVSVAALVQCFDWEVGDDDVVDMTEGGGLTMPMATPLAAVCRPREFVKTILSTSM

SEQ ID NO: 49887 - protein, 109 aa, Nostoc sp. PCC 7120
MQTLPKERRYETLSYLPPLTDVQIEKQVQYILSQGYIPAVEFNEVSEPTELYWTLWKLPLFGAKTSREVLAEVQSCRSQYPGHYIRVVGFDNIKQCQILSFIVHKPSRY

SEQ ID NO: 49888 - protein, 585 aa, Arabidopsis thaliana
MSPPSATAGDINHREVDPTIWRACAGASVQIPVLHSRVYYFPQGHVEHCCPLLSTLPSSTSPVPCIITSIQLLADPVTDEVFAHLILQPMTQQQFTPTNYSRFGRFDGDVDDNNKVTTFAKILTPSDANNGGGFSVPRFCADSVFPLLNFQIDPPVQKLYVTDIHGAVWDFRHIYRGTPRRHLLTTGWSKFVNSKKLIAGDSVVFMRKSADEMFIGVRRTPISSSDGGSSYYGGDEYNGYYSQSSVAKEDDGSPKKTFRRSGNGKLTAEAVTDAINRASQGLPFEVVFYPAAGWSEFVVRAEDVESSMSMYWTPGTRVKMAMETEDSSRITWFQGIVSSTYQETGPWRGSPWKQLQITWDEPEILQNVKRVNPWQVEIAAHATQLHTPFPPAKRLKYPQPGGGFLSGDDGEILYPQSGLSSAAAPDPSPSMFSYSTFPAGMQGARQYDFGSFNPTGFIGGNPPQLFTNNFLSPLPDLGKVSTEMMNFGSPPSDNLSPNSNTTNLSSGNDLVGNRGPLSKKVNSIQLFGKIITVEEHSESGPAESGLCEEDGSKESSDNETQLSLSHAPPSVPKHSNSNAGSSSQG

SEQ ID NO: 49889 - protein, 334 aa, Frankia sp. CcI3
MRTRRARGDGPDPTRPGGSLPVEPLDAYSAVVTRVAAALTPSVASLRVRTRRGAGAGSGVVFTDDGFLLTSAHVVEGHRAISGASVGLAQFADGTEREVDLVGADPLSDLAVLRARGTTPPAAVLGDAAGLRVGQLVVAVGNPLGLTGSVTAGVVSALGRSLPTRSGSAVRVVDEVIQTDAALNPGNSGGALVTADARVVGVNTAVAGVGLGLAVPVNDTTRKILAALMRDGRVRRAYLGVAGAGVPLPPAVAERIGQRHGVWLAEVVVGSPAGIAGLFTGDLVLSVAGTPVVAPGDLQRLLTEGTIGRPVELTVWRRGALVDVIVVPAELVIA

SEQ ID NO: 49890 - protein, 487 aa, Oryza sativa
MAPSRRMVASAFLLLAILVATEMGTTKVAEARHCLSQSHRFKGMCVSSNNCANVCRTESFPDGECKSHGLERKCFCKKPCVNSQMAGEAILFSDDIIANILAWLPPKNAARMRLVCKQWHAVTSEHHFMHTNFSRSRDGHSVAGFFLSNELHKKFSYNPLRDSSATHPAAPDLSFVPESGSTVPRKINVTSSCNGLLLCRRPMDSSVASGARWCCYYVCNPATKRFVEIPTPPDGRGRHLNLAYDPSRSPVYKVVALGLAGVHVYSSQARSWRAALRYERGSNPFAGIHHSRGVHWNGSLVWVTSRSRSLLRFAVDDGEGELSSLPMPPARHLQPENRWICGYLGVGESAGAGRGHLRMIGYTEEEKLAARFDVVGMAGDCREWRVLYRVDLTRMKELYPDIQRKTRKHHLIWPRRARLVDCLDLWPLHVAEHGSLLLFGIPGKIMAYGMEDQAISVVWEDAAPPQPRFFRYAWFDFYPYTAGLFAV

SEQ ID NO: 49891 - protein, 245 aa, Nocardia farcinica IFM 10152
MTYTLVLLRHGESEWNALNLFTGWVDVHLTDKGVAEGKRAGELLAEHGILPDIVYTSLLRRAISTANIALDAADRHWIPVVRDWRLNERHYGELQGKNKAQIRDKYGEEQFMLWRRSYDTPPPPIEAGNEYSQEGDARYAGIDIPKTECLLDVVNRMVPYWESTISKDLLAGKTVLIAAHGNSLRALVKHLDQISDEEIAGLNIPTGIPLRYELDENLRPVRPREYLDPEAAAAGAAAVASQGGK

SEQ ID NO: 49892 - protein, 245 aa, Bacillus cereus E33L
MIKLVLIRHGQSLWNLENRFTGWTDVDLSENGLSEAREAGAILKKNGYTFDVAYTSVLKRAIRTLWIVLHEMNLAWVPVHKSWKLNERHYGALQGLNKDETAQKYGEEQVHIWRRSIDVRPPALTEDDPRYEMNDPRYKALKKGEFPLTECLVDTEKRVLDYWHSEIAPKLKNGNKVIISSHGNTIRSLVKYLDNLSSDGVVSLNIPTSIPLVYELDENLRPIRHYYLSMDGEVPEGEIPKHISF

SEQ ID NO: 49893 - protein, 242 aa, Shigella boydii
LKERKEGAFVPFVTLRDPGIEQSLKIIDTLIEAGADALELGIPFSDPLADGPTIQNATLRAFAAGVTPAQCFEMLALIRQKHPTIPIGLLMYANLVFNKGIDEFYAQCEKVGVDSVLVADVPIEESAPFRQAALRHNVAPIFICPPNADDDLLRQIASYGRGYTYLLSRAGVTGAENRAALPLNHLVAKLKEYNAAPPLQGFGISTPDQVKAAIDAGAAGAISGSAIVKIIEQHINEPEKML

SEQ ID NO: 49894 - protein, 561 aa, Bacillus cereus E33L
MIHLKTQYTVSTYLLDRLSELGIEHIFGVPGDYNLAFLDDVLAHKNLEWIGNCNELNAAYAADGYARIKGIGALITTFGVGELSAINGIAGSYAENVPVIKITGTPTTTVMENGELVHHTLGDGKFNHFSNMYREITVAQTNLTPEHAVEEIDRVLRACWNEKRPVHINLPIDVYNKPINKPAEPILHKPILSNKETMDKMLLHAISKINSAKKPIILADFEVDRFHAKEYLYQFVEKTGFPIATLSMGKGIFPEKHPQFIGIYTGDVSFPYLRKRIDESDCIISIGVKLTDTITGGFTQGFTKEQVIEIHPYTVKITDKKYGPVVMKDVLQQLSDIIKHRNEETLDIKPFISESLSMTEEFNPKAHMVTQKRFWQQIYHFLQENDVLLAEQGTPFFGSAAIPLPNNTTYVAQPLWGSIGYTLPALLGTQLANLSRRNILIIGDGSFQLTVQELSTMLRQNLKPIIFLINNNGYTVERAIHGQNEPYNDIQMWEYTKLANVFGTEEKSQTFKVENETELQEVLTKISIDKDQLTFVEVVMSQGDQPELLAKLGKRFGQQNS

SEQ ID NO: 49895 - protein, 616 aa, Lactobacillus johnsonii NCC 533
MKKIKSVLNSINFKIAIIFMLLLLATIEVVGASFTRQLEQNSIQNFESSIQVPNIITNQIASQLSRANSKSANQQLSQIISNYNLGDISQLMVVDNKGVIRAVSNVNDQNRIGQRTSNADIKSVLSNGKQVSKVINDNGNYMVQISPLTSANGTNTPVGAIYVRASLQGVFNNLRQVSIYFLIASLIAAVLGAVVALVISRAITRPIEEMRKQALRVANGDYSGHVRVYAQDELGQLAEAFNTLSVRIERTQEISDSERRRLDNVLTHMTDGVIATDRHGNITIINETALDFLGKTEKDVIGKPITNLLGLKDVTIQDLLSTQQELVVRVNDNTRDEMILHANFSLIQRVTGFVSGLVCVLHDITQQQKNEREQQQFVSNVSHELRTPLTSLRAYVEALNDGAWKDPNIAPQFLHVIQDETERMIRMINDLLSLSRMDRGVAKMDLEWVNLNDFVNHVLNRFDMMLKSDTDKTHKKKYSIKREFPHQALWVEIDTDKMMQVIDNIMNNAIKYSPDGGVITVRLLQAQKHVILSISDQGLGIPRKDLNKIFDRFYRVDKARSRKQGGTGLGLAISKEIVEAHHGRIWADSAEGSGSTFYISLPYEAISEEGENWDEV

SEQ ID NO: 49896 - protein, 406 aa, Lactobacillus johnsonii NCC 533
MAENNTKNSNKHNALIKTGIVGVVAGLLGGGVAYAGLSQVNGQNAPQTTVAPTAKVEKSNSKNSSQMTNAFNTVKNSVVSVVNLKRQSSSSTSDPFGIFGSDSSSSSKKNSKSDLETYSEGSGVIYMKSNGKGYIVTNNHVVSGSDEIQVILSDGKKVTAKKVGTDAETDLAVLTIDGKYVTQTAQFGSSKNLEPGQQVIAVGSPLGSEYATSVTQGIISAKNRTVDVTNSSGQVTNQATVIQTDAAINPGNSGGPLVNMSGQVIGINSMKLSSSSDGTAVEGMGFAIPSDEVVSIINQLVKNGKITRPKLGVRIVSVDELTEYGRKKLGLPDSVKSGVYVASVTKNGSADKAGIKARDVITKIDGKDVDSVVSLHTALYAHKIGDTVTLQVVRDGKSQDIKVTLS

SEQ ID NO: 49897 - protein, 375 aa, Thermus caldophilus
MVIYREEYRLYNFGPDHPFSPVRLEMLTSLLQALGVWRAPLSPPEASREEVLSVHSERLVKRVEAASRGELYPDLEHYGLGTGDTPVFPGMDRAARILVGGTLEGARRIMAGEKRVLQLGGGLHHAQYDRASGFCVYNDLSVAIRHMTRAGLRVAYVDIDVHHGDGVQWIHYEEGEVLTLSLHESGRYLFPGTGHVYEIGRGAGLGKKLNLPLEPFTEDESYLEVFEALVPWALKAFRPDVLVVQAGADAHYLDPLADLLLTARAYERLFRLLLEYAEAYAGGRVLFTLGGGYSLDGTVRVWALLYHLFHGLPLPERLPEGWLRTWEARLGRPLTPTLHDPEGAYPEIPRREEIAKRNRLTLQRLTELVAPHLLH

SEQ ID NO: 49898 - protein, 399 aa, Synechococcus elongatus PCC 6301
MTQLISIDKEREEAGMTQATELLDPALKPAETKAKRSSRKKATTAVVEPATTIAPTADVDAIDDEDSVGEDEDAAAKAKAKVPKTYTEDSIRLYLQEIGRIRLLRADEEIELARQIADLLALERIRDELLEQLDRLPSDAEWAAAVDSPLDEFRRRLFRGRRAKDKMVQSNLRLVVSIAKKYMNRGLSFQDLIQEGSLGLIRAAEKFDHEKGYKFSTYATWWIRQAITRAIADQSRTIRLPVHLYETISRIKKTTKLLSQEMGRKPTEEEIATRMEMTIEKLRFIAKSAQLPISLETPIGKEEDSRLGDFIEADGETPEDEVAKNLLREDLEGVLSTLSPRERDVLRLRYGLDDGRMKTLEEIGQLFNVTRERIRQIEAKALRKLRHPNRNSILKEYIR

SEQ ID NO: 49899 - protein, 393 aa, Desulfitobacterium hafniense DCB-2
MDALKMFFRDQACIVWKEAWEAARLIGERPELGYQEYFAVETLTQLLKSHGFEIQQPAAGLDTAFIARFSGYKPGPRLAFLAEYDALPGIGHGCGHNLIGAASVGAAIALSKSLELPGEIWVVGSPAEETSGGKVILVNEGAFEGVDAALMFHPGSQNATIISSLALDALEFVFLGKAAHAVAAAYYGVNALEALIDFFNRTNRLKDNLPQDAYINGIITEGGTSPNVIPERAVARFYLRARQRKVLNIIRNQVIRCAQEAASAVSAKVTWNMFENSYDEMQSNRALAGAFETNLRELGVRNISPPQSAMGSVDMGNVSRIVPAIHPYLTLGGGMNIPHTRDFAQACLSAPGERLLLLAIQALALTGWDILSSPKLLNLAKRELNPRPSGKQR

SEQ ID NO: 49900 - protein, 648 aa, Yarrowia lipolytica CLIB122
MTRSRSYSLPTPPQPRTPRRFSASSLILGGEKRFIASDHTVEQLLLLCDDEGHITIDTTTTSSDNFLQVETDAGWCYQVIGAYQLATVLNYLLLKRGGPETGLKRLKQNQKTIAPSSCVTHISSDKILEPPHQRLKNLVDNQFWHQLTRSMDTKTIYSLLGDSKVQGEGVLYLPHASEQRQYYASLDVNLQDLPKRISPEYVLSINSSPGVLALAMDKSHNPLPYIVPGGRFNEMYGWDSYFELLGLLESGGPGYIHIAESMCLHFCYQIKNYGKILNANRSYYLSRSQPPFLTDMGLRVYCRTRNKEFLKEIYNSAVTEYNTVWMGNPRLDRRTGLSKYCPAGLGIPPEVETGHFDGVLGPYAQKYGLTLDEFVQAYNSGNIVQPELDEYFLHDRAIRESGHDTSYRLEGVCADLATVDLNSLLYKYEVDLEYIERELNLSPCGFYEAAERRKEAFTQFLWNSEDSCFYDYNCKTNAQRKYTSSTGLWPLWSGIATREQARGIVSTIASLEEYGGLASGSKASLDEFSGGSGVPRQWDYPNGWAPHQVLAWQGLQNYGYDNVATRLAFKWCAMMVHSFRDYSGLVVEKYNVTDPTKPHVVTAEYGNQGSVASGFGWVNASYVVGLGYLSNQQRQRLEWGVWKRHEKL

SEQ ID NO: 49901 - protein, 322 aa, Streptococcus pneumoniae TIGR4
MSTLDKNLLLEMFRKMEEIRRMDLKIAQLVKKGKVPGMTHFSVGEEAANVGAMLALNPDDLITSNHRGHGQAIAKGIDLNGMMAEILGKYTGTCKGKGGSMHIADLDAGNLGANGIVGGGMGIAVGAALSQQMQNTGKIVVCFFGDGATNEGVFHEAVNMASIWNLPVIFYCINNGYGISADIKKMTNIEHIHQRSAAYGIPGMFIEDGNNVIDVYEGFQKAVDHVRSGNGPVLIESVTYRWLGHSSSDPGKYRTREEVELWKQKDPIENLRNYLIENNIASAEELEEIQAQVKEAVEASVKFAEESPFPPLESAFEDIYAD

SEQ ID NO: 49902 - protein, 306 aa, Zea mays
  misc_feature (284)..(284): Xaa can be any naturally occurring amino acid
  misc_feature (299)..(299): Xaa can be any naturally occurring amino acid
  unsure (1)..(306): unsure at all Xaa locations
LSSKRLQRFAQQTKIYIRFATPTPRCHTPARRWYIIIVKKKRSCFWDGCIYAGTLLPAATTGWKEGGVVVKPGRCGWLVQRRQAAVRAMSAAAASSVTKFIKCVTVGDGAVGKTCMLICYTCNKFPTDYIPTVFDNFSANVSVGGSIVNLGLWDTAGQEDYSRLRPLSYRGADVFILSFSLVSRASYENVLKKWMPELRRFSPTVPVVLVGTKLDLREDRSYLADHSAASIISTEQGEELRKQIGAVAYIECSSKTQRNVKAVFDTAIKVVLQPPRRREVTRNXMKARSNQSLRRYLCXGSGCFTS

SEQ ID NO: 49903 - protein, 545 aa, Neurospora crassa
MSPRAFALAHQRDRGSFVGCSRIADYEVLGKLGEGTFGEVHRARSRKTGALVALKKIIMHNERDGFPITALREIKLLKLLSHKNVLRLEEMAIEHPPRTDKRTRPIVYMVTPYMDHDLSGLLDNPSVRFTEPQVKCYLLQLLEGLKYLHANHILHRDMKAANLLINNKGVLQIADFGLARHYEGDIPQPGKGSGEGKRDYTSLVVTRWYRPPELLMHLKRYTTAIDMWGVGCVFAEMLEGKPVLQGESDLHQLELVWDLCGTPSEETMPGWRTLPGGQAFSSKPRPGNLARRFEKHGPVVISLLKELFKLDWRSRINAIDALNHPYFRTAPLPALPGDLPTFEESHEFDRRKFQDRKAALPPAPKGGTVGRGAVVNSQGPDTGFSGRDGYGGGGRNGANGGRYPPYHRGPPPGDERVPSWHSARGLPPRPPMPADYHGSGPMDHTDGYRDRPPRRGPGGPPGGGGGPSNVDTYIPSYDRDGPAPRREDWRRRDDWDDRRGGVDRDRRRPEYDVRSRDSRTRSRTRSRSPVRDRDRGRDRDAYARR

SEQ ID NO: 49904 - protein, 404 aa, Spumella uniguttata
PAGQCGNQIGAKFWEVIADEHGVDPTGTYHGDSDLQLERINVYFNEATGGRYVPRAILMDLEPGTMDSVRAGPFGQLFRPDNFVFGQTGAGNNWAKGHYTEGAELIDSVLDVVRKEAESCDCLQGFQMTHSMGGGTGSGMGTLLISKIREEYPDRVMSTFSVIPSPKVSDTVVEPYNATLSVHQLVENADQCFTLDNEALYDICFRTLKLTTPTYGDLNHLVSAAICGTTCCLRFPGQLNCDLRKLAVNMVPFPRLHFFMMGFAPLTSRGSQQYRALTVPELTQQQFDAKNMMCAADPRHGRYLTCACMFRGRMSTKEVDEQMLNVVNKNSSYFVEWIPNNVKASICDIPPKGLKMATTFVGDTTAIQEVWKRVSEQFTAMFRRKAFLHWYTGEGMDEMEFTRG

SEQ ID NO: 49905 - protein, 364 aa, GIBBERELLA ZEAE PH-1
MKGLILVGGYGTRLRPLTLSVPKPLVEFANKPMIVHQIEALVAAGVTDIVLAVNYRPEVMEKFLAEYEEKFGINIEFSVETEPLDTAGPLKLAERILAKDDSPFFVLNSDVICDFPFEDLLAFHKSHGNEGTIVVTKVEEPSKYGVVVHQPGHRSLIDRFVEKPVEFVGNRINAGLYIFNTSILDRIELRPTSIEKETFPAMVKDNQLHSFDLEGFWMDVGQPKDFLSGTCLYLSSLTKKGSKELTSPSEPFVHGGNVLIDPSAKIGKNCRIGPNVTIGPNVVIGDGVRLQRCVLLKGSKVKDHAWVKSTIVGWNSTIGRWARLENVTVLGDDVTVGDEIYVNGGSVLPHKSIKANVDIPAIIM

SEQ ID NO: 49906 - protein, 406 aa, Thraustotheca clavata
  misc_feature (210)..(210): Xaa can be any naturally occurring amino acid
  unsure (1)..(406): unsure at all Xaa locations
PAGQCGNQIGAKFWEVISDEHGVDPTGSYHGDSDLQLERINVYYNEATGGRYVPRAILMDLEPGTMDSVRAGPYGQLFRPDNFVFGQTGAGNNWAKGHYTEGAELIDSVLDVVRKEAESCDCLQGFQITHSLGGGTGSGMGTLLISKIREEYPDRIMCTYSVCPSPKVSDTVVEPYNATLSVHQLVENADEVMCLDNEALYDICFRTLKXTTPTYGDLNHLVCAAMSGITTCLRFPGQLNSDLRKLAVNLIPFPRLHFFMIGFAPLTSRGSQQYRALTVPELTQQQFDAKNMMCAADPRHGRYLTAACMFRGRMSTKEVDEQMLNVQNKNSSYFVEWIPNNIKASVCDIPPKGLKMSTTFIGNSTAIQEMFKRVSEQFTAMFRRKAFLHWYTGEGMDEMEFTRGKG

SEQ ID NO: 49907 - protein, 404 aa, Apodachlya brachynema
SRPQVGNACWELYCLEHGIQPDGQMPSDKTIGGGDDAFNTFFSETGAGKHVPRAVFVDLEPNVCDEVRTGTYRQLYHPEQIISGKEDAANNYARGHYTVGKEIVDSVLDRVRKLADMCTGLQGFMVFNAVGGGTGSGLGSLLLERLSVDYGRKSKLGFTIYPSPQVSTAVVEPYNSVLSTHSLLEHTDVAVMLDNEAIYDICRRSLDIDRPSYTNLNRLIAQVISSLTTSLRFDGSLNVDITEFQTNLVPYPRIHFMLSSYAPVISAEKAYHEQLSVAEITNSCFEPASMMAKCDPRHGKYMAACLMYRGDVVPKDVNAAVATIKTKRTIQFVDWCPTGFKCGINYQPPSVVPGGDLARVQRAVCMISNTSAIAEVFSRIDHKFDLMYAKRAFVHWYVGEGMAR

SEQ ID NO: 49908 - protein, 404 aa, Heterosigma akashiwo
SRPQVGNACWELYCLEHGIQPDGQMPSDKTIGGGDDAFNTFFSETGAGKHVPRAVYVDLEPTVCDEVRTGTYRQLYHPEQIISGKEDAANNYARGHYTIGKEIVDLVLDRIRKLADNCTGLQGFLMFHATGGGTGSGLGSLLLERLSVDYGRKSKLSFAVTPAPQVATAVVEPYNSVLSTHSLLEHTDCTFCLDNEALYDVCRRNLDIERPTYTNLNRLIAQVISSLTASLRFDGALNVDMTEFQTNLVPYPRIHFMLTSYAPVISAEKAYHEQLSVAEITNSVFEPANMMTKCDPRHGKYMACCMMYRGDVVPKDVNAAIATIKTKRTIQFVDWCPTGFKCGINYQPPTVVPGGDLARVQRAVCMVANTTAIAEALSRIDHKLDLMYAKRAFVHWYVGEGMAR

SEQ ID NO: 49909 - protein, 381 aa, Arabidopsis thaliana
MENHLQHSLTIIPKPDLIKEEQRYHEDTVSLQAERILHAMTFPMVLKTALELGVIDMITSVDDGVWLSPSEIALGLPTKPTNPEAPVLLDRMLVLLASHSILKYRTVETGDNIGSRKTERVYAAEPVCTFFLNRGDGLGSLATLFMVLQGEVCMKPWEHLKDMILEGKDAFTSAHGMRVFELIGSNEQFAEMFNRAMSEASTLIMKKVLEVYKGFEDVNTLVDVGGGIGTIIGQVTSKYPHIKGINFDLASVLAHAPFNKGVEHVSGDMFKEIPKGDAIFMKWILHDWTDEDCVKILKNYWKSLPEKGKVIIVEVVTPEEPKINDISSNIVFGMDMLMLAVSSGGKERSLSQFETLASDSGFLRCEIICHAFSYSVIELHK

SEQ ID NO: 49910 - protein, 404 aa, Isochrysis galbana
  misc_feature (64)..(64): Xaa can be any naturally occurring amino acid
  misc_feature (158)..(158): Xaa can be any naturally occurring amino acid
  misc_feature (393)..(393): Xaa can be any naturally occurring amino acid
  unsure (1)..(404): unsure at all Xaa locations
SRPQVGNACWELFCLEHGIQPDGQMPSDKTIGGGDDAFNTFFSETGSGKHVPRTVFVDLEPTVXDEVRTGTYRQLYHPEQLISGKEDAANNYARGHYTVGKEIVDLVLDRIRKLADNCTGLQGFFAFNAIGGGTGSGLGALLLERLSVDYGRKSKVSXTIYPAPQVSTAVVEPYNCVLSTHTLLEHTDVTFMVDNEALYDICRRNLDIERPTYTNLNRLTAQIISSMTASLRFDGALNVDLTEFQTNLVPYPRIHLAIASFAPIISAEKAYHEQLSVAEITNSVFEPASMLVKVDPRHGKYMACCLMYRGDVVPKDVNAAVATIKTKRTIQFVDWCPTGFKCGINYQPPTVVPGGDLAKVMRAVTMMSNSTCIAELYSRIDHKFDLMYAKRAXVHWYVGEGMAR

SEQ ID NO: 49911 - protein, 588 aa, Lactobacillus casei
MKKTKIVSTLGPASNTTDIIVKLIEAGANVFRFNFSHGDHEEHLARMNMVHEAEKITGKTVGIMLDTKGAEIRTTLEDTPNGKIDFHTGDKVRISMDASLKGTKEKVAVTYPGLYDDTHVGGHVLFDDGLIDMKITEKDEKNRELVTVVQNDGVLGGKKGVNAPGVAINLPGITEKDSDDIRFGLDNGINFIAASFVRKPQDVLDIRELLEEKNALNVQIFPKIESQEGIDNIDDILKVSDGLMVARGDMGVEIPFEHVPIVQKRLIKKCNSLGKPVITATQMLDSMQENPRPTRAEVNDVANAVFDGTDATMLSGESANGDYPVESVAAMARIDEYTEAAMMDQDAFALKEYSNKNVTEAVGQSVAHTARNLGVKTIVAATESGYTARMISKYRPKADILAITFSEKTQRGLMVNWGVYPIIAEKPANTDAMFDLATKKAQDLGFAKEGDLILITAGVPVGESGTTNVMKVQLIGSKLVQGSGVGDESTIGKAVIASNAQEAAAKMQKGDILVVKTTDKDYLPAIEKAAALVVETGGLTSHAAVVGIAMGIPVVVGAENATSVISDGQIITVDSRRGIIYKGATNAL

SEQ ID NO: 49912 - protein, 461 aa, Chlamydophila pneumoniae TW-183
MTQEFDCVVIGAGPSGYVAAITAAQSKLRTALIEEDQAGGTCLNRGCIPSKALIAGANVVSHITHAEQFGIHVDGYTIDYPAMAKRKNTVVQGIRQGLEGLIRSNKITVLKGTGSLVSSTEVKVIGQDTTIIKANHIILATGSEPRPFPGVPFSSRILSSTGILELEVLPKKLAIIGGGVIGCEFASLFHTLGVEITVIEALDHILAVNNKEVSQTVTNKFTKQGIRILTKASISAIEESQNQVRITVNDQVEEFDYVLVAIGRQFNTASIGLDNAGVIRDDRGVIPVDETMRTNVPNIYAIGDITGKWLLAHVASHQGVIAAKNISGHHEVMDYSAIPSVIFTHPEIAMVGLSLQEAEQQNLPAKLTKFPFKAIGKAVALGASDGFAAIVSHEITQQILGAYVIGPHASSLIGEMTLAIRNELTLPCIYETVHAHPTLSEVWAEGALLATNHPLHFPPKS

SEQ ID NO: 49913 - protein, 411 aa, Synechococcus elongatus PCC 6301
MPGGVSSPVRAFKSVGGQPIVFDRVKDAYAWDVDGNRYIDYVGTWGPAICGHAHPEVIEALKVAMEKGTSFGAPCALENVLAEMVIDAVPSIEMVRFVNSGTEACMAVLRLMRAYTGRDKIIKFEGCYHGHADMFLVKAGSGVATLGLPDSPGVPKSTTANTLTAPYNDLEAVKALFAENPGEIAGVILEPIVGNSGFIVPDAGFLEGLREITLEHDALLVFDEVMTGFRIAYGGVQEKFGVTPDLTTLGKIIGGGLPVGAYGGKREIMQLVAPAGPMYQAGTLSGNPLAMTAGIKTLELLRQPATYEYLDQITKRLSDGLLAIAQETGHAACGGQVSGMFGFFFTEGPVHNYEDAKKSDLQKFSRFHRGMLEQGIYLAPSQFEAGFTSLAHTEEDIDATLAAARTVMSAL

SEQ ID NO: 49914 - protein, 288 aa, Zea mays
MASEEVLHKVQNLIERCLQMYMNKKEVVDALSHHSRIEPCITELVWQQLEQQNPLFFKAYDMRLMLKNQIMVFNRLLQDQFEIMNKEFSSGIPSMSLPNDSNSNLLKQDSCFLPETAPGNAMPDGIMHNGSSSGIINDTPSGDQLLNASKDLHGLHSQIDASTSLQSDQNATAVLYGVDNETSATIKTESCYSSNADFAFCGNTFLESCQSIGDASGGGSFSSSELNGQPLNDSILDMESSSFSFLNQMPQSFMFSDLADDFNQNAEITPFLTPETNFSDSTGGDHTG

SEQ ID NO: 49915 - protein, 242 aa, Shigella boydii
MKERKEGAFVPFVTLGDPGIEQSLKIIDTLIEAGADALELGIPFSDPLADGPTIQNATLRAFAAGVTPAQCFEMLALIRQKHPTIPIGLLMYANLVFNKGIDEFYAQCEKVGVDSVLVADVPVEESAPFRQAALRHNVAPIFICPPNADDDLLRQIASYGRGYTYLLSRAGVTGAENRAALPLNHLVAKLKEYNAAPSLQGFGIFRPDQVKAAIDARAAGAIFGSAIVKIIEQHINEPEKML

SEQ ID NO: 49916 - protein, 369 aa, Ralstonia eutropha JMP134
MKAGVAQTDDRVELDAFDKDVGADLIPPTDEPISTTTTVGLREADLLSDDNDRQLRDDDEDEAEEEEESESENVAEAAPEHDDFRTVLHTELAADTVQHYLNRISIKPLLSAPEELHFSTLAKDGDFSARQVMIERNLRLVVSIAKGYLNRGVPLLDLIEEGNLGLMHAIEKFDPSRGFRFSTYATWWIRQSIERAIMNQARTVRLPVHVIRELNQVLRAKRHLEKGGTDGRDASLEDIAHLLGKTPDEVQDVLALNEHTTSLDTPFDLDPGSSLLDFLSDEHNAAPDQEVAHRELEGLMKLWLARLSEKHRYVVERRFGLNHIEPATLEELAEEMGLTRERVRQIQQEALVKLKRHFASQGVRKDAVL

SEQ ID NO: 49917 - protein, 678 aa, Chlamydophila pneumoniae AR39
MGVVQNQVISSIRDVLKLVWELRFAEHKMLLLSRQSGSGGTFQLSCAGHELAGVLAGKSLIPGKDWSFPYYRDQGFPIGLGCDLSEIFASFLARTTPNHSSARMMPYHYSHKKLRICCQSSVVGTQFLQAAGRAWAVKHSSADEVVYVSGGDGATSQGEFHEMLNFVALHQLPLITVIQNNHWAISVPFEDQCGADLASLGRCHQGLAVYEVDGGNYTSLTETFSHAVDQARQHSVPALILIDVVRLSSHSNSDNQEKYRSALDLKLSMDKDPLILLEKEAINVFGLSPFEIEEIKAEAQEEVRKSCEIAEALPFPSKGSTSHEVFSPYTETLIDYENSESAQNLRNSEPKVMRDAISEALVEEMTRDSGVIVFGEDVAGDKGGVFGVTRNLTEKFGPQRCFNSPLAEATIIGTAIGMALDGIHKPVVEIQFADYIWPGINQLFSEASSIYYRSAGEWEVPLVIRAPSGGYIQGGPYHSQSIEGFLAHCPGIKVAYPSNAADAKALLKAAIRDPNPVVFLEHKALYQRRIFSACPVFSHDYVLPFGKAAIVHPGKDLTIVSWGMPLVLSLEVAQELASRGISIEVIDLRTMVPCDFATVLKSLEKTGRLLVIHEASEFCGFGSELVATMSEQGYAYLDAPIRRLGGLHAPVPYSKVLENEVLPHKESILQAAKSLAEF

SEQ ID NO: 49918 - protein, 242 aa, Shigella boydii
LKERKEGAFVPFVTLGDPGIEQSLKIIDTLIEAGADALELGIPFSDPLADGPTIQNATLRAFAAGVTPAQCFEMLALIRQKHPTIPIGLLMYANLVFNKGIDEFYAQCEKVGVDSVLVADVPVEESAPFRQAALRHNVAPIFICPPNADDDLLRQIASYGHGYTYLLSRAGVTGAENRAALPLNHLVAKLKEYNAAPPLQGFGISAPDQVKAAIDAGAAGAISGSAIVKIIEQHINEPEKML

SEQ ID NO: 49919 - protein, 242 aa, Shigella flexneri
LKERKEGAFVPFVTLGDPGIEQSLKIIDTLIEAGADALELGIPFSDPLADGPTIQNATLRAFAAGVTPAQCFEMLALIRQKHPTIPIGLLMYANLVFNKGIDEFYAQCEKVGVDSVLVADVPVEESAPFRQAALRHNVAPIFICPPNADDDLLRQIASYGRGYTYLLSRAGVTGAENRAALPLNHLVAKLKEYNAAPPLQGFGISAPDQVKAAIDAGAAGAISGSAIVKIIEQHIYEPEKML

SEQ ID NO: 49920 - protein, 528 aa, Streptococcus pneumoniae TIGR4
MTDKVSMELEAEEDGYLIAILKGDGETVPVTEVIGYLGEERENIPTAGAASPEASPVPVASTSNDDGKSDDAFDIVVIGGGPAGYVAAIKAAQFGGKVALVEKSELGGTCLNRGCIPTKTYLHNAEIIENIGHAANRGIVIENPNFTVDMEKLLETKSKVVNTLVGGVAGLLRSYGVTVHKGIGTITKDKNVLVNGSELLETKKIILAGGSKVNKINVPGMESPLVMTSDDILEMNEVPESLVIIGGGVVGIELGQAFMTFGSKVTVIEMMDRIVPAMDVEVSKNLRLILERKGMTILTGTKLQEIIEENGQLRIKVEGKDDIIASKALLSIGRMPDLEGIGEVEFELDRGCIKVTEYMETSVPGIYAPGDINGTKMLAHAAFRMGEVSAENALKGNHAVAKLNLTPAAIYTLPEVAAVGLTEEQAREKYDVAIGKFNFAANGRAIASDAAQGFVKVIADKKYGEILGVHIIGPAAAELINEASSIIEMEITVEEMLKTIHGHPTYSEVMYEAFADVLGMAIHSPKKK

SEQ ID NO: 49921 - protein, 197 aa, Arabidopsis thaliana
MILSLCCLGSWPAILTLLERRGRLPQHTFLDFATANLLAAIVIAFSLGEIGKSTFLKPDFTTQLPQDNWPSVLLAVAGGVLLSIGNLATQYAFAFVGLSVTEVITASITVVIGILPLVCDESKTYVSMVSCVSRLNFIGTTLNYFLDNKINKAEILFPGVGCFLIAVFLGAAVHASNAADVKEKLKSLPSEYKAETN

SEQ ID NO: 49922 - protein, 184 aa, Arabidopsis thaliana
MYVVESKAGAIGCMILSLCCLGSWPAILTLLERRGRLPQHTFLDFATANLLAAIVIAFSLGEIGKSTFLKPDFTTQLPQDNWPSVLLAVAGGVLLSIGNLATQYAFAFVGLSVTEVITASITVVIGTTLNYFLDNKINKAEILFPGVGCFLIAVFLGAAVHASNAADVKEKLKSLPSEYKAETN

SEQ ID NO: 49923 - protein, 798 aa, Ustilago maydis 521
MRFAAFTSLAALVPALTLVAAQDGSAISATSVVSGVASSASVTGAASSVTSAASSTITSASGTGTSDSAASSASVNPLTEKPPAAVPSATGSPTGFIPTGALPPSQDLCSSPIYCPGPLLQAVQLAGIFEDSKTFVDKPTSKPESEVVDNFNRLGGGNTSNITYQEIVQFVQDNFVAEGVELVPADLGDEFVEDPEFLTRVEDEVVRDWLKQVHSYWELLARTTNSSSPSGAQCDGCVSSFIPFNESRVFVIPGGRFRELYYWDTFFVIEGLITSQLQSVVKAILENFGDLIDRLGFIPNGNRIYYENRSQPPFFALMVDKYIEAYNDTSVLERFLPLLEREMWFWKNNRTIEFTSPFTNNTHNVTHYKVDTSAPRPESYLEDYKTVQDAGESGLELNDTQKATLYSNIAAGAESGSDYSAARWSSRPTINLSDTIPAQRFLETAAQLPVDLNAILFACEQKLSAFYKISSNQTQVNATRANYWAQQAQARKEAILDLFWDPSKRFFYDFNTTLGDRAPFFTPAGFFPLWAKILPQEFVNESISIDQRRQNLQGVFSGLRYIIDRFNGTLPASLVTTGQQWDFANAWPPHTYIALEALRNVPDILGAGAQLAAENGSFALIPMHNGTNQLGQTQDSLPVQGLENQPGSAINETLAGATDPNNAAVELKPALNTGNTTSGESWRDELVRELANRYVASALCSWRATGGKLNTTDPAFQPVADDVLTANGLNASTAIGNMFEKFNASDINAAGSGGEYVVQTGFGWTNGVAIWLGGQLGANLTRPDCPPVIAQNTTPAEA

SEQ ID NO: 49924 - protein, 453 aa, Arabidopsis thaliana
  misc_feature (422)..(422): Xaa can be any naturally occurring amino acid
  unsure (1)..(453): unsure at all Xaa locations
MASLMLSLGSTSLLPREINKDKLKLGTSASNPFLKAKSFSRVTMTVAVKPSRFEGITMAPPDPILGVSEAFKADTNGMKLNLGVGAYRTEELQPYVLNVVKKAENLMLERGDNKEYLPIEGLAAFNKATAELLFGAGHPVIKEQRVATIQGLSGTGSLRLAAALIERYFPGAKVVISSPTWGNHKNIFNDAKVPWSEYRYYDPKTIGLDFEGMIADIKEAPEGSFILLHGCAHNPTGIDPTPEQWVKIADVIQEKNHIPFFDVAYQGFASGSLDEDAASVRLFAERGMEFFVAQSYSKNLGLYAERIGAINVVCSSADAATRVKSQLKRIARPMYSNPPVHGARIVANVVGDVTMFSEWKAEMEMMAGRIKTVRQELYDSLVSKDKSGKDWSFILKQIGMFSFTGLNKSQSDNMTDKWHVYXTKDGRISLAGLSLAKCEYLADAIIDSYHNVS

SEQ ID NO: 49925 - protein, 230 aa, Arabidopsis thaliana
MYVVESKAGAIGCMILSLCCLGSWPAILTLLERRGRLPQHTFLDFATANLLAAIVIAFSLGEIGKSTFLKPDFTTQLPQDNWPSVLLAVAGGVLLSIGNLATQYAFAFVGLSVTEVITASITVVIGTTLNYFLDNKINKAEILFPGVGCFLIAVFLGAAVHASNAADVKEKLKSLPSEDLYSSIENGEDKPEIEKTDVESQEKLAEKAKAGTAGFYVELENKRAIKVQLQ

SEQ ID NO: 49926 - protein, 199 aa, Campylobacter jejuni subsp. jejuni
MDKNLTWHNTNITKEQRSKLKNQKPCVLWLTGLSASGKSTIANALEQKLHELGFHTYLLDGDNIRIGLNKDLGFDENSRVENIRRIAELCKLFVDSGLIILSAFISPFKSDRALARSLVKKDEFIEIFVDTPLELCEKRDPKGLYKKARNGEIKNFTGIDRPYEKPQNPEIHLQNSKAKLNENVDIILNYLKENGYIDT

SEQ ID NO: 49927 - protein, 152 aa, Schizosaccharomyces pombe
MATELVVQSERAFQKQPHIFQNAKKGAGRRWYKDVGLGFKTPAEAIYGEYVDKKCPFVGQVSIRGRILTGTVVSTKMHRTIIIRREYLHFIPKYNRYEKRHKNLAAHVSPAFRINEGDVVTVGQCRPLSKTVRFNVLRVVKHTEGPKQFGKF

SEQ ID NO: 49928 - protein, 406 aa, Mallomonas rasilis
  misc_feature (15)..(15): Xaa can be any naturally occurring amino acid
  misc_feature (56)..(56): Xaa can be any naturally occurring amino acid
  misc_feature (162)..(162): Xaa can be any naturally occurring amino acid
  unsure (1)..(406): unsure at all Xaa locations
RPSRPQVGNACWELXCLEHGIQPDGQMPSDKTIGGGDDSFNTFFSETGAGKHVPRXVFVDLEPSVCDEVRTGSYRQLYHPEQVISGKEDAANNYARGHYTIGKEIVDLVLDRVRKLADNCTGLQGFMIFHATGGGTGSGLGSLLLERLSVDYGRKSKLSFTXTPAPQVATAVVEPYNHVLSTHSLLEHTDCTFCLDNEALYDVCRRNLDIERPTYTNLNRLTAQVVSSLTASLRFDGALNVDISEFQTNLVPYPRIHFMLTSYAPIISAEKAYHEQLSVAEITNSVFEPSNMMTKCDPRHGKYMACCLMYRGDVVPKDVNASVATIKTKRTVQFVDWCPTGFKCGINYQPPTVVPGGDLARVQRAVCMVSNTTAIAEALSRIDHKFDLMYAKRAFVHWYVGEGMAR

SEQ ID NO: 49929 - protein, 399 aa, Mallomonas rasilis
RGLTWVNACWELYCLEHNISPDGLMADKIDDGFNTFFSETSAGKHVPRAVYVDLEPTVCDEVRSGTYRKLYHPEQIINSKEDAANNYARGHYTIGKEIVDLVLDRVRKLTDVCTGLQGFLIFHATGGGTGSGLGALLLERLSVDYGRKSKLSFTVTPAPQIATAVVEPYNHVLSTHSLLEHTDVTFCLDNEALYDVCRRSLNIERPNYNNLNRLIAQVCSSLTASLRFDGALNVDISEFRTNLVPYPRIHFMLTAYAPIISAEKAYHEQLTVAEITNAVFEPANMMTKCDPRHGKYMACCLMYRGDVVPKDCNAAVATIKTKKTVQFVDWCPTGFKCGINAIPPATVPGDPLARLPRALCMVSNSTAIAEALSRIDHKFDLMYAKRSFVHWYVGEGMAR

SEQ ID NO: 49930 - protein, 409 aa, Pavlova lutheri
GPQVGNACWELFCLEHGIQPDGQMPSDKTIGGGDDAFNTFFSETGSGKHVPRTVFIDLEPTVIDEVRTGTYRQLFHPEQLISGKEDAANNYARGHYTVGKEIIDLVLDRIRKLADNCTGLQGFLVFNAVGGGTGSGLSSLLLERLSVDYGRKSKLTFTIYPSPQISTAVVEPYNTVLSTHSLLEHSDVSFTVDNEALYDICRRNLDIERPTYTNLNRLVAQIISGLTASLRFDGALNVDLTEFQTNLVPYPRIHFVLSSFAPIISAEKAYHEQLSVAEITNAVFEPASQLVKVDPRHGKYMSCCMMYRGDVVPKDVNAAIATIKTKRTIQFVDWCPTGFKCGINYQPPTVVPGGDLAKVMRAVTMEANSTAFAELYSRIDHKFDLMYAKRAFVHWYVGEGMEEGEFSGP

SEQ ID NO: 49931 - protein, 481 aa, Magnetococcus sp. MC-1
MRVLFVTSEIYPLIKTGGLGDVAAALPAALIEQGVDIRVLVPGYPSVLEGMQRQGDAIVLGEVFGHGDARLIPGRLPDSDVFLWALDIPTLYNRPGNPYLSHDGRDWGDNAIRFAALSRVAALIAEAGGFLGWRPDVLHANDWQAGLASAYLHFSGNRHCKSIITVHNIQFQGNFPARVVHEVGLPASAMHVYGAEFYGQFSFLKAGLFYSNWLTTVSPTYANEICTPAYSFGMDGLLQDRVHQLHGILNGIDYHAWNPETDPLIPHPYSRDTLENKLLNKRALQQEMGLLVEDDRPLFGLVSRLTEQKGIDLILEAIPAVLSAGAQLVVLGSGHRAFEDQLRQLAAQNPLQVAVHIGYDEIHSHRIQAGVDILLVPSRFEPCGLTQLYAMRYGTLPLVRRTGGLADSVTPIHSENHGTGFLFDRPDTISLLTVMLQAMGCLRNPTLWRNAQQRAMSMDFGWRKSARAYMHLYESGAPPVM

SEQ ID NO: 49932 - protein, 376 aa, Phaeodactylum tricornutum
MRECISIHLGQAGIQTGNQCWELYCLEHGIEPDGTMPGDKSLGKADDSFNTFFSETSSGSHVPRAVYVDLEPSVCDEVRNGTYKQLYHPEQIINGKEDAANNYARGHYTTGKEIVDLVLDRIRKLADNCTGLQGFLVFHATGGGTGSGLGSLLLERLSVDYGRKSKLSFAVSPSPQVSTAVVEPYNSVLSTHALLEHTDCTFCLDNEALYEVCRRNLGIERPTYTNLNRLIAQVISSLTASLRFDGALNVDVTEFQTNLVPYPRIHFMLTSYAPVISTEKAFHENLTVAEITNSVFEPSNMMTKCDPRHGKYMACCLMYRGDVVPKDVNAAVATIKTKRTIQFVDWCPTGFKCGINYHAPMQVPGGDLAQVKRAVC

SEQ ID NO: 49933 - protein, 589 aa, Bacillus subtilis subsp. subtilis str. 168
MIKREGESTVGVMKRYMQFVKPYKKQIFVTVLIGIVKFSIPLALPLLLKYVVDDIIQGGGTASDKTTSLFTIMAIMFALFLILRPPVEYYRQYFAQWTASKVLYDIRAKLFDHIQKLSLRFYANTRTGEVISRVINDVEQTKDFVITGLMNIWLDMLTILIVISIMLTLDVKLTLISIVLFPLYGISVKYFYGRLRKLTRERSQALAQVQGHLHERIQGMPVIRSFAIEDHEQAQFNEKNGHFLDKAIRHTNWNAKTFAVVNTITDLAPLIVIACAGYFVINGPLTVGTMVAFVGYIDRMYNPVRRLINSSTTLTQSIASMDRVFEFIDEPYELTDKPNAIKADQIRGGVEFQNVSFQYEKDKENILHDVSLKVNRGETVALVGMSGGGKSTLVSLIPRFYDVTSGRLLIDGTDIRDYEARSLRNQVGMVLQDTFLFSETIRENIAIGKPDATLEEIIEAAKAANAHEFIMSFPEGYETRVGERGVKLSGGQKQRISIARVFLKNPPLLILDEATSALDLESEHYIQEAMDKLAKDRTTFVVAHRLSTITHADKIVVMENGTIIEIGTHDELMDYESQYKHLFTIQNLN

SEQ ID NO: 49934 - protein, 602 aa, Pichia angusta
MSYQRAVPSSSNHTMPERDRLDELLDAVKKEFDNLTRETTIYKDHHHDYELKINQQHQELTNIRNTVYELEQAHRTMKEAYEKEILRLKQDLENRDRLFQQQSLQQAQAQAQAQAQVKAQVQSQQHPLLDRPQGAFPQTPQQLPPPNLSGSPSDYRGAGFNGALPQINAQASGAKPEISQSTQLPPPPPVSTQEQQAASQTQTSPEQPPTAVQTSVVKTEADAGYVMRSQHNKPIPTFLKDFDSYSTLPYKKQHSEYYIVYNPKVPKKVDTSLVHSFDHTSVVCCVRFSKDGKFLATGCNKLTQVFSVETGDLVARLSDESSASSNGSYDTDTGDLYIRSVCFSPDGKFLATGAEDKIIRIWDLATRTIVKYLKGHEQDIYSLDFFPDGSKLVSGSGDRTVRIWDVFTGQCSLTLSIEDGVTTVAASPDGKLIAAGSLDRTVRVWDANQGFLVERLDSANESGNGHMDSVYSVAFTHDGKEIASGSLDRTVKLWSLKDLQKQQGSSKSNCEVTYVGHKDFVLSVCCTPDDEFILSGSKDRGVIMWEKATGEPYIMLQGHRNSVISVNVSPVMTQKRGVNGGYFATGSGDCKARIWRWEKVSS

SEQ ID NO: 49935 - protein, 425 aa, Magnetococcus sp. MC-1
MADKSKNGVANLNEAIRQSLILVLAGGRGSRLKNLTDTEAKPAVPFAGKFRIIDFALSNCVNSGMRRVGVLTQYRAHNLIQHVQRGWGSFRAEFDEFVEVWPAQQQTAAESWYSGTADAVYQNIDLIESHHPKYVVILGGDHIYKQDYSVMLDHHITSGAQVTVACLEVPVAEAREFGVMDVDEQDQIVKFLEKPQTPPELPNRPGWALASMGIYIFDHELLVEQLERDALLEDSSHDFGKDLIPYLVPKVKVMAHRFSHSCVGLDGKKEPYWRDVGTLDAYWEANMDLTHVTPELDLYDPKWPIWTYQVQRPAAKFVFNDDSRRGYAVDSLVSAGCVVSGSAVERSLLFTDVRVNSYSFVSDSVILSHADIGRKCTLIKCIVGPNTVIPDGMVIGKDPQLDAQRFYRTEGGVTLVTQEHIDKLK

SEQ ID NO: 49936 - protein, 404 aa, Phytophthora palmivora
SRPQVGNACWELYCLEHGIQPDGQMPSDKTIGGGDDAFNTFFSETGAGKHVPRAVLVDLEPSVCDEVRTGTYRQLYHPEQIISGKEDAANNYARGHYTIGKEIVDLVLDRIRKLADNCTGLQGFLVFNAVGGGTGSGLGALLLERLSVDYGRKSKLGFTIYPSPQVSTAVVEPYNSVLSTHSLLEHTDVAVMLDNEAIYDICRRSLDIERPTYTNLNRLIAQVISSLTASLRFDGALNVDVTEFQTNLVPYPRIHFMLSSYAPVISAEKAYHEQLSVAEITNSAFEPASMMAKCDPRHGKYMATCLMYRGDVVPKDVNAAVATIKTKRTIQFVDWCPTGFKCGINYQPPSVVPGGDLARVQRAVCMISNTSAIAEVFSRIDHKFDLMYAKRAFVHWYVGEGMAR

SEQ ID NO: 49937 - protein, 601 aa, Arabidopsis thaliana
MDLDFDDQPSDHAAPAVRAGARFKPKGRPQPKKKQVSLSTTQTTLSPDVAQEKLSTQSEDLVPLDGSSEIPSNALPSETNVPDSGSINKSTIGTLSEENEDAFPRGVHWSVKPSILRACNNVNLVGNRRDDGIEATTSFPDDPRTQDSAIFGDYVTPETGADEGRVDMETLDIVQEEGTTSSYVQHTGKLQPKPRLLETVVEEPEPHYSAGDTGYFPMGTNESEFMANVESRNGFSTYEDLQEEELNIPEAPRETVGEMEAQNASGGWEQEEQGVSPCINNTVTGEEENCMGNTVEEQSKRESKTGKSKRATSRKRKKTSEEPNKSSEKTEQKKFKHSSRRQKRTLEKELLETPDHEIRSLPLRDMLRLVEYKEWMQKKEAKGAGVQPSQESNNMNGSGSQYHSQGFDEEDEFGDFGIESSEYQENNVVKPDSPVNYQTYMNKTSRTRWSKEDTELFYEGIQEFGSNLSMIQQLFPERTREQMKLKFKLEERRNPLKLNDALSSRSKHFTHFKNVIKKLQQEAAAAKEGEEEEEAGAEAETTDVPENEEPEKSEETERASDGVAAGVKESDGGDVENGVRSDGGDECDDDEDFWNSYKSDM

SEQ ID NO: 49938 - protein, 450 aa, Geobacillus kaustophilus HTA426
MQTEQTHQLWLDKDDRYIWHSMKPYNPQATLIAAEAKGCWVTDAAGHQYLDAMAGLWCVNVGYGREELAEAAYEQLKTLAYFPLTQSHLSAIQLGEKLNELLGDEYVIFFSNSGSEANETAFKIARQYHQQRGEHHRYKIISRYRAYHGNSMGALSATGQAQRKYKYEPLAPGFIHVPPPDVYRDPDAADDPRRLRAVKAIDDVMTWELSETIAAVIMEPIITGGGVLIPPDGYMKAVKEVCEKHGALLIVDEVICGFGRTGKAFGFQHYGVKPDIITMAKGITSAYLPLAATAVRKEIYEAFKGTGEYDYFRHVNTFGGHPAACAVALKNIEIMEEERLFDRSREAGEWLLSALKTKLADHPYVGDVRGKGLLVGIELVADRATKEPLDVSLVNQVIHRCKENGLIIGKNGTTVAGYNNVLTLSPPLCITDDELSFVVRVLTGALAAIQ

SEQ ID NO: 49939 - protein, 236 aa, Brassica napus
  misc_feature (59)..(59): Xaa can be any naturally occurring amino acid
  misc_feature (132)..(132): Xaa can be any naturally occurring amino acid
  misc_feature (183)..(184): Xaa can be any naturally occurring amino acid
  misc_feature (199)..(199): Xaa can be any naturally occurring amino acid
  misc_feature (204)..(204): Xaa can be any naturally occurring amino acid
  misc_feature (209)..(210): Xaa can be any naturally occurring amino acid
  misc_feature (216)..(216): Xaa can be any naturally occurring amino acid
  misc_feature (219)..(219): Xaa can be any naturally occurring amino acid
  misc_feature (227)..(227): Xaa can be any naturally occurring amino acid
  unsure (1)..(236): unsure at all Xaa locations
MKGEGNEMFPKLPQNHSLSSHFHLPATIAVDDSSIEVVRRPRGRPPGSKNKPKPQVYVXTRDTEPPMSPYILEVPSGNDVVEAINRFCRRKSIGENPSACAFSVALDSVANITLRQPSPAAPGSTITFHGKXFDLLSVSATFLPPPPRTSLSPPVANFFTVSLAGPQGQIIGGFVAGPLISAXXTVYVIAASFNNPSYXRFTGXREEHXXSISARXREXGDGQSPRXFGRRRAKKG

SEQ ID NO: 49940 - protein, 259 aa, Listeria monocytogenes EGD-e
MWKLALCQTDVVFKYPDANYARIEKAIVEAAKNGADIAVLPEMWNTGYALNELAGVADLNGGRTKEFLATLSEKHQIAIIGGSVSISEGTKFSNTMYAFDKYGGLLSSYKKVHLFQLMNEHLYLEAGNDKNLFRLDGVSCAGFICYDIRFPEWIRKHTSEGSEVIFVSAQWPAERVTQWEQLLIARAIENQTFVVAVNRVGDDPNNHFNGHSLVIDPLGNIVVHGGEEEGNIYAEIDLNLVAETRGIIPVFTDRRPELY

SEQ ID NO: 49941 - protein, 401 aa, Bacillus anthracis str. 'Ames Ancestor'
MGATGVASQRKTIEESIERNKEKYIETSHDIHANPEIGNQEFYASRTLSLLLGSAGFQLQHNIAGHETGFIARKSSGKQGPAIAFLAEYDALPGLGHACGHNLIGTISVAAAIALSETLEEIGGEVVVFGTPAEEGGPNGSAKSSYVKAGLFKNIDAALMIHPSGKTATTSPSLAVDPLDFHFYGKTAHAAASPEEGINALDAVIQLYNSINALRQQLPSDVKIHGVITEGGKAPNIIPDYAAARFFIRAATRKRCAEVTEKVKNIAQGAALATDTKVKIHQFQNEIDELLVTKTYNDVVAEELELLGEDVNRKERFGIGSTDAGNVSQVVPTIHPYIKIGPDDLIAHTNEFREAARSELGDKALITSAKALANTAYRLITEEGLLEKVKEEFREAQRNQG

SEQ ID NO: 49942 - protein, 472 aa, Nocardia farcinica IFM 10152
MAKQVPTSRLARGTKLGAVAAGSVLRTQRTRLSMRGRSEAVRAKMAEESMIRTTEQVVAVLGTMKGVAMKLGQMMSVLDLDLVPEAHRERFQQRLAVLRNAAPTVPFEGMRRVVEEDFGAPLDTVFAEFEPEPIAAASIGQVYRARLHDGRVVAVKVQYPGIDAAVRADLKNLTMFRKVLQSAMPWVTPAVLDELRLNIESELDYRAEAQTQAELAELYADHPFIVVPGTLLELSTTRVLVSEYLPGRGFDEIRGLPDADRNRIGEIIYRFYVGSLFEFAEFCGDPHPGNVLLLDDGRVGFLDFGLFNRMDPAHVRFEITCLRAAAEERAEDLRQLMIQRGVIDSPEEIGAEECLEYVLAASEWCLVDEELTITPELASGAFLLAVDPRASEFAGMKQQNLPPEHLFSRRADFLTFGMLGQLHTTANWHRIAREWLYDEDPVTELGRAHRQWLAQRTPPKPARARKKTATRR

SEQ ID NO: 49943 - protein, 441 aa, Pseudomonas syringae pv. tomato str. DC3000
MVNRLHGKSLLALLTLSALAPWAQAAETPVLNTGSTAWMITAAVLVLFMCLPGLALFYGGLVRAKNMLSLFTQCFGIAGVVGVLWVIYGYSMVVDTSNMVEGQVTFNSFVGGLSRAFLAGMTPDSLVGEIPEGVFVTFQMTFAIITPALIAGAFAERMKFSAALLFMALWFTLVYAPVAHMVWGGAGALMHNWGVLDFAGGTAVHINAGVAALAACLVLGKRKGYQNTPMPAHNLSLTMAGAAMLWVGWFGFNIGSGGGLSGTSGIVMLNTQVGACAGILGWMFTEWFKVGKPSALGLASGALAGLVGITPACAYVGVGGALAIGVLCGVFCYLSVTVLKKRLGYDDSLDVFGLHGIGGMIGAVLTGVFCVPALGGLVPEVTMGAQVIAQVKGVLFTTVYCFAVSWIILKAVNALIGLRAHESVEEMGLDLAEHNERAYNH

SEQ ID NO: 49944 - protein, 483 aa, Pseudomonas fluorescens PfO-1
MSVRRTKIVATLGPASNSPEVLEQLILAGLDVARLNFSHGTPDEHKARAKLVRDLAAKHGRFVALLGDLQGPKIRIAKFANKRIELKIGDQFTFSTSHPLTEGNQQVVGIDYPDLVKDCGVGDELLLDDGRVVMRVETATATELNCVVTIGGPLSDHKGINRRGGGLTAPALTEKDKADIKLAAEMEVDYLAVSFPRDAADMNYARQLRDEAGGTAWLVAKIERAEAVADDETLDGLIKASDAVMVARGDLGVEIGDAELVGIQKKIILHARRHNKAVIVATQMMESMIQNPMPTRAEVSDVANAVLDYTDAVMLSAESAAGAYPLEAVQAMARICVGAEKHPTSKTSSHRIGKEFERCDESIALATMYTANHFPGVKAIIALTESGYTPLIMSRIRSSVPIYCFTPHREAQARAAMFRGVYTVPFDPASLAPNEVSQKAIDELVKRGVVEKGDWVILTKGDSYHTTGGTNGMKILHVGDPQV

SEQ ID NO: 49945 - protein, 534 aa, Haloarcula marismortui ATCC 43049
MARLESAEMLDAPQQEAIPTLADDEAGTVVWHREHLRIRDQGAVARAAASEYVLPLFVFDPAFYGADGLACDSRIRFLHDCLADLSDQYHTATGCGLTYAHGDPVDVLGRFREAGWDIVTMAAPTGRYGRERDRRVREQCDVTFVDGDGLVRDRAATRDGWQDDVSAWFAADQHDWDPSTVTSRSFDSGIDISTIEDHYDIAPSKSDVPRGGTGPARERLSAFAERIDDYPGNISAPVDARDGTSGLSPYLAFGCLSVRQVIQYIDEHAPDGRGKEMFVSRLFWNKHYEQKLEDWPGWLETAVNPVLEGFNAEQYDPDLVAAWKHGQTGFPMVDASMRCLRQTGWLNFRMRSMSASVYYHLLQQPWRIGADWFYHHLIDASAAINYTQWQSQCGLVGKPALRLYNPRKQVRDQDPDGEFIRQWVPELESLPDEYLDRPEQTPVHVQASCGVDIGDDYPHPVVDYDAARQAFHRRYEAVRPDAADALHDPTIARRVSFSGGREAAARIAAEHGTDASNGTENSRTQASLDSFGDE

SEQ ID NO: 49946 - protein, 338 aa, Salmonella enterica subsp. enterica serovar Typhi Ty2
MRVLVTGGSGYIGSHTCVQLLQNGHDVVILDNLCNSKRSVLPVIERLGGKHPTFVEGDIRNEALITEILHDHAIDTVIHFAGLKAVGESVAKPLEYYDNNVNGTLRLVSAMRAANVKNLIFSSSATVYGDQPKIPYVESFPTGTPQSPYGKSKLMVEQILTDLQKAQPEWSIALLRYFNPVGAHPSGDMGEDPQGIPNNLMPYIAQVAVGRRESLAVFGNDYPTEDGTGVRDYIHVMDLADGHVVAMEKLADKSGVHIYNLGAGVGSSVLDVVNAFSKACGKPINYHFAPRRDGDLPAYWADASKADRELNWRVTRTLDEMAQDTWHWQSRHPQGYSD

SEQ ID NO: 49947 - protein, 242 aa, Shigella flexneri
LKERKEGAFVPFVTLRDPGIEQSLKIIDTLIEAGADALELGIPFSDPLADGPTIQNATLRAFAAGVTPAQCFEMLALIRQKHPTIPIGLLMYANLVFNKGIDEFYAQCEKVGVDSVLVADVPVEESAPFRQAALRHNVAPIFICPPNADDDLLRQIASYGRGYTYLLSRAGVTGAENRAALPLNHLVAKLKEYNAAPPLQGFGISAPDHVKAAIDAGAAGAISGSAIGKIIEQHINEPEKML

SEQ ID NO: 49948 - protein, 337 aa, Zea mays
MGKIKIGINGFGRIGRLVARVALQSEDVELVAVNDPFITTDYMTYMFKYDTVHGHWKHSDITLKDSKTLLFGDKPVTVFGIRNPEEIPWGEAGAEYVVESTGVFTDKDKAAAHLKGGAKKVVISAPSKDAPMFVVGVNEDKYTSDVNIVSNASCTTNCLAPLAKVIHDNFGIVEGLMTTVHAITATQKTVDGPSAKDWRGGRAASFNIIPSSTGAAKAVGKVLPDLNGKLTGMSFRVPTVDVSVVDLTVRIEKGASYEDIKKAIKAASEGPLKGIMGYVEEDLVSTDFLGDSRSSIFDAKAGIALNDHFVKLVSWYDNEWGYSNRVVDLIRHMFKTQ

SEQ ID NO: 49949 - protein, 587 aa, Lotus corniculatus var. japonicus
TVSISLISNSCSPGRPTRPNRLESLQSAFDYAVQSEGYGSHYQGVYPVKCNQDRFVVEDIVRFGSSFRFGLESGSKPELLMAMSCLCKGNAEALLICNGFKDAEYISLALAARKLALNSVIVLEQEEEVDLIIDLSNKMHIRPVIGMRAKLRTKHSGHFGGTSGERGKFGLTTAQILRVVKKLEHAGMLDCLQLLHFHIGSQIPSTALLADGVGEAAQIYCELVRLGAQMRVIDIGGGLGIDYDGTKSSDSDISVGYGLQEYATAVVRAVQGVCDRRSIKHPVICSESGRAIVSHHSVLVFEAVGASSYGAPPAFSSLALQYLVEGLSEEARADYCNLSDAAIRGEHETCLLYTEEMKRRCVEEFKQGLLGMEELAGVEGLCDLVRKTVGEADPVRRYHVNLSIFTSIPDVWSIDQVFPIIPIHRLDEKPTVKGILSDLTCDSDGKIDKFINGESSLAMHELEGGRKYYLRMFLGGAYEEALGGYHNLFGGPSVVRVLQSEGPHSFAVTRAMPGPSNGDVLRVMQHQPELMFETLKHRAEESVHDDELTAAALATALARSFHNMPYLVTAADHAGEDEHDQWSYCIA

SEQ ID NO: 49950 - protein, 396 aa, Aeromonas hydrophila
MFEKVVAAPPDPILGLTEAFRADSRSHKINLGVGIYKDETGATPILHCVKKAEQKLLTDEKTKNYLGIEGNIEYGRIVQQLLFGQDSALIASGRAKTAQAPGGTGALRIAAEFVVRNGLAKTIWISDPTWANHVSVFQAAGLTVKWYKYYDAATKGLDFAAMQASLNDVQAGELVLLHGCCHNPTGIDPTAEQWRALAKQSAAAGWLPLFDFAYQGFARGIEEDAEGLRIFAECHDELLVASSFSKNFGLYNERVGAFTLVSATKAIADVAFTQVKTVIRANYSNPPSHGAAVVTTIVSDPALYVEWVEEVAAMRVRIREMRELLVEKLAALGVSQDFSFIREQNGMFSFSGLSKDQVEQLKSEFAIYIVGSGRISVAGITRANIDPLCDAIAKVL

SEQ ID NO: 49951 - protein, 263 aa, Arabidopsis thaliana
METLHPFSHLPISDHRFVVQEMVSFHSSSSGSWTKEENKMFERALAIYAEDSPDRWFKVASMIPGKTVFDVMKQYSKLEEDVFDIEAGRVPIPGYPAASSPLGFDTDMCRKRPSGARGSDQDRKKGVPWTEEEHRRFLLGLLKYGKGDWRNISRNFVVSKTPTQVASHAQKYYQRQLSGAKDKRRPSIHDITTGNLLNANLNRSFSDHRDILPDLGFIDKDDTEEGVIFMGQNLSSENLFSPSPTSFEAAINFAGENVFSAGA

SEQ ID NO: 49952 - protein, 2528 aa, Cochliobolus heterostrophus
MTVRDSKTGGITPIAVVGMSFRGPGDATNVEKLLNMISEGRESRAEVQAKKWDPEGFYHPDSSRHGTHNVEYGHWFQQDVYNFDAPFFNVSPAEAAALDPQQRMLLECSYEAFENSGTPMSKIVGTDTSVFVSSFATDYTDMLWRDPESVPMYQCTNSGFSRSNLANRISYSFDLKGPSVLVDTACSGGLTALHLACQSLLVGDVRQALAAGSSLILGPEMMVTMSMMKFLSPDGRCYAFDERANGYARGEGVAVLLLKRLEDALADNDTIRAVIRGTGCNQDGKTPGITMPNSVSQEALIRSVYKKAALDPLDTTYVECHGTGTQAGDTTEASALSKVFSPGRRLPLLIGSVKTNIGHLEGASGLAGVVKSILMLEQGVILPNRNFERPNTKIPLEKWNLRVPTTLECWNNVKTRRVSINSFGYGGANVHAILESATDFLRDNSMGTDSTRFASRRSVVVGNVGQTKPAVSLVQDMSSNDRSHEDPTPLLFALSAFDSSAGDAWARSLSIYLSQRQGSDEKTILSSLAYTLSDRRTWHPWKAALSATTIQELITKLEKVRFVNMAPRHNIGFVFTGQGAQWCGMGRELISIFPRFRQSLIACDIALQSFGADFHVIDELEADVESSRINKALYSQPLCTALQIALVDLLVSWGIYAQSVTGHSSGEIAAAYAAGALSLSDAMLVAYARGCATANLAKKGAKGAMAAVSMETQELSHILSALENGKVGIACFNSPTSCTVSGDKSALDELQDVLRQKGVYNRRLIVDVAYHSHHMELIADSYRSAISSIQPLPGSDVKFFSSVTGELLDKNKLGVDYWVSNLVGQVKFAQSLSSLVSSHHGTGTPQIQALIEIGPHAALGGAISQVIDSEPLANPTGYFSALVRKKNAVTTILSLAADLFLSGYPIQLSAVNQNCNSRHTPLVDLPSYSWNHSKAYTAESRISKTYRQRRYPRLDLIGVFDVHSSVLEPRWRQVIRLSELPWLQDHKIQSSILYPVAGYIAMAIEAATQRNQMREMGNDILGYQFRDVAISSALTIPDMPGQVEVFITLRSFSESVRSPSNLWDEFSISSVNDENRWTEHCRGLISVLKSSKLSNLVNGKMQDASTIACQHDLREVFATCCKTEWDVKDMYEHFWETGMQYGPTFANLCDVRCTSNKCIGKVKVPDTAAVMPMKHEAPFIIHPGTLDSIIQTYLPALVQAGHLKSATIPVAIESMFISRNVTRQAGDLLTSYASSTRKDYRYFSTSMSVFADGPSSENQLVITIDDMTLVALDRPNSSEESGEALPLAFNLHWKPDVDMLTEEQLVEMINASTKVKDHIAAKKMKQTAAQLGKEILARVPFEQAQVVGESSRHLWKLLHASLESLSTPDHRGALDEISSLKNVDSTLAQAADRLSNVLTGRVAPSDVASMYDLMEAVRIPELYDNNLPTATYLHLLGHKKPSLRVLTVGPQSGPTSLNLLMLLAELGGGEIPFAVLHHSDAELNIDQTVRSRFPSWADSVGFRDVFNESGASQQNPPIVNETYDIVVAFNVLGSSPGFSKTLSAAAPLLNARGKILLVDNSHKSPMAALVWGPLPSFLSTWVDEKSADSPDVDCAVQSMGYDIYARLCPNVTVIQRAAQVQKAEKTIGLDVLVVTDGEPAGVDLQQLQTLCEDQYAEVHVASLEHARPRPGQACIVLSELSRPVLAAPTAAEWEAVKRITDTCSGIVWVTRGAADNVCSNPQVSLIQGFARTVRAEAGDKPITTLDLDNDKVLSAQAAAAYIAAVFQRMMQGGEDIDVELQERRGILHVARLIEDGDAAKQLQGEATAMELRLDQAGPCRLFAGTPGLLDSLHFTVDDRVQESLETGQIEVQVHATGINFKDVMMAMGQIAVEDLGCECSGVVSAVGDGVVGLRVGDRVACMGPGSFCTQLRVDARLAHRIPHHMELETAAALPITYVTAYHSIHNIAHLRHGETILIHAAAGGLGQALVELSQLVGARVLVTVGSTEKKRLIMQRFRLSEEDILFSRDTSFVHDVMRLTNGRGVDVIMNSLAGESLRQSWTCIAPNGRFVELGQRDITVNSRLDMAPFARNVSFTAYNLAYMLRHDPQAAHEVLAEVLALYDQGKLRGPEPLEKCTFSQLGNAFRKIQTGRHMGKMVAVANPDDMVWYKPPPASRRTLFRPDASYLLVGGVGGLGSATALWMSTRGARHLLLLNRSGADTEAARTTLATLRANGCTATVLACDVADKAQLSSVLAEARSNWPPIRGVIQGAMVLRDSMLANMTLEDYMAVVRPKVQGTWNLQTHLPADLDFFILESSISGIIGNPGQAAYAAANTFLDAFARWRRARCQPATVIDIGAVHGIGYLERNVDVKLSMERQGFAFTDEQLLMRLLEFAISHSSREPHRAQIVTGLGPWHPDTSLPGLNAPLFSRYRMLSCQNSTGSTDVDTLRGILAQSSSFDSAVTIVLSALVDQVVSRTEIPIENVHTTKSLQDYGIDSLVAVELRNWLIKDMDSVVPMLELLGAESLSALAVKIAARSQLISTNNRG

SEQ ID NO: 49953 - protein, 632 aa, Vibrio parahaemolyticus RIMD 2210633
MDVKERTQRRFSIGNQLMLAVLTLSLIFTLVISAISLYRDFQEELSHLDTDLKQVESSYLSSFSASLWVEDRELLLTQALGAMRLPSVDYLRIATKDEVIIELGTEITQDVVERRWPMQFSVGEKTFELAELTVQSDLSAVYQDLWQQFFFLLTTEAIKILLLMVGVLWVAFRLLVNPLQLLSGAVSDFSGGNAPSTVTLPKRWCFDEVSLLAQKYNRSVQKVREHQAELEAERDKAEVANRKKSEFLATMSHEIRTPMNGIIGVASLLSDTKLDPQQKEFVEIIDNSSQSLMTIIDDILDFSKVEAGKVELASETYHFRQLLDDVISLHTVKAQQKNLQLLSDIDPKLPAEVQGDEGRLKQVLNNLLSNAVKFTERGHVKLLVSLHEQNNDIAQVRFRVVDSGIGIAKEHQQAVFERFQQADGSTTRKYGGTGLGLAICAQLVHIMGGDIKLTSELGLGSCFDFTIPLTVVSGLPTYTDPLNVLDFPRTEANEATNKNPDKPWVLIVEDTEVNQRVVRIMLEQLGLKVSVASHGEEAFQLCREHAFDLIFMDCQMPVMDGFIATEQIRDMNEWGAHVPIIALTANVVKEDQQRCFEAGMNEFVAKPVTKARLQQIFEQYLPKALKNIATPK

SEQ ID NO: 49954 - protein, 134 aa, Glycine max
  misc_feature (59)..(59): Xaa can be any naturally occurring amino acid
  misc_feature (78)..(78): Xaa can be any naturally occurring amino acid
  misc_feature (90)..(90): Xaa can be any naturally occurring amino acid
  unsure (1)..(134): unsure at all Xaa locations
LYKLQRDLELDLDKAAELEHVLAMLHDMFAEELGAKIKDYGIDYAETKNYIYDPYPDNXMFKTIIDTSSVSPGFMRPXTGHGIVHNIKDXYNDNGNKLAFTVAQIGQAIGHEISTELGLLQVLEFTLADIEHYI

SEQ ID NO: 49955 - protein, 404 aa, Plectospira myriandra
SRPQVGNACWELYCLEHGIQPDGQMPSDKTIGGGDDAFNTFFSETGAGKHVPRAVLVDLEPSVCDEVRTGTYRQLYHPEQIISGKEDAANNYARGHYTIGKEIVDLVLDRIRKLADNCTGLQGFLVFNAVGGGTGSGLGALLLERLSVDYGRKSKLGFTIYPSPQVSTAVVEPYNSVLSTHSLLEHTDVAVMLDNEAIYDICRRSLDIERPTYTNLNRLIAQVISSLTASLRFDGALNVDVTEFQTNLVPYPRIHFMLSSYAPVISAEKAYHEQLSVAEITNSAFEPASMMAKCDPRHGKYMAACLMYRGDVVPKDVNAAVATIKTKRTIQFVDWCPTGFKCGINYQPPTVVPGGDLARVQRAVCMISNTSAIAEVFSRIDHKFDLMYAKRAFVHWYVGEGMAR

SEQ ID NO: 49956 - protein, 548 aa, Desulfovibrio desulfuricans G20
MKTKFIFITGGVLSSLGKGLAAASVGALLQARGLKVTIQKLDPYINVDPGTMNPFQHGEVYVTDDGAETDLDLGHYERYLGIPMNQRNNYTSGSIYHRVITKERRGDYLGGTVQVIPHITDEIKSVIMNLASDDLDVALVEIGGTVGDIEGQPFLEAIRQLRSDLGRDRCMYIHLTLVPYLAAAGEHKTKPTQHSVKELRSIGIQPDIILCRCEKAVTDDLKHKIALFCNVEKDAVFSAVDVKNIYEVPLSFYEEGFDQKIAIMLQLPAKNPDLSKWQELVDTCANPQGKVTIGIVGKYVDLKEAYKSLHEALIHGGVANKLAVELKYVNSELITDENVAESLAGLDGILVPGGFGSRGVEGKIRAIRYARENKVPFFGICLGMQCAVIEFARNVAGLPAANSEEFDEQTPDKVIYLMTEWFDFRSKQVERRDSGSEKGGTMRLGSYPCAVVKGTNAFTAYQAEKVDERHRHRFEFNNAYLDKLKEAGLVFSGLSPDGELVEMVEIKDHPWFLGCQFHPEFKSYPMTPHPLFREFIKAAGKQAVKSKR

SEQ ID NO: 49957 - protein, 453 aa, Ustilago maydis 521
MTLELPTETTHLSDSLLAEFARHTTIDIDNNVASIAAQHNLAHRRLLELDETKHTNRAQIDQQVVNEFQSLFHDMTSNQIIVLSTYSELLTNDKNKAAKLVEMCVAAAKQIKGGMWNGKQLSSTVLERISVDGLTGAESDEEKHQQLASDILTVHFGLEMLPNLLASGNLHAQTATSQAYNASATVRHARRFVALYELISGDTVDSSRVCIKIPTTIAGLQAMRFLSSGGILDENNVGGPLLEGKIQVLATTVFAVEQGLAAAQAAGATYVAPYINALAAHFFDAENPSAEDKQKALDAGGRSISEIIYPLQRCLRRMRQQNNKIKTKVMAASFINAEEAIELCGLDHVTLGAGIVQALATTKLTDGIVETMHQASDKMRIAEEKELERYCATLAAIKDGEAQGCGGWLKQGHRSHARLEIVLTQDERCRYMLADALARFTSAEVKLRQLFVV

SEQ ID NO: 49958 - protein, 232 aa, Arabidopsis thaliana
  misc_feature (64)..(64): Xaa can be any naturally occurring amino acid
  misc_feature (67)..(68): Xaa can be any naturally occurring amino acid
  misc_feature (83)..(84): Xaa can be any naturally occurring amino acid
  misc_feature (91)..(91): Xaa can be any naturally occurring amino acid
  misc_feature (95)..(95): Xaa can be any naturally occurring amino acid
  misc_feature (101)..(101): Xaa can be any naturally occurring amino acid
  misc_feature (103)..(103): Xaa can be any naturally occurring amino acid
  misc_feature (107)..(107): Xaa can be any naturally occurring amino acid
  misc_feature (109)..(109): Xaa can be any naturally occurring amino acid
  misc_feature (112)..(113): Xaa can be any naturally occurring amino acid
  misc_feature (118)..(118): Xaa can be any naturally occurring amino acid
  misc_feature (122)..(122): Xaa can be any naturally occurring amino acid
  misc_feature (124)..(124): Xaa can be any naturally occurring amino acid
  misc_feature (126)..(126): Xaa can be any naturally occurring amino acid
  misc_feature (128)..(128): Xaa can be any naturally occurring amino acid
  misc_feature (130)..(130): Xaa can be any naturally occurring amino acid
  misc_feature (134)..(134): Xaa can be any naturally occurring amino acid
  misc_feature (139)..(139): Xaa can be any naturally occurring amino acid
  misc_feature (143)..(143): Xaa can be any naturally occurring amino acid
  misc_feature (150)..(150): Xaa can be any naturally occurring amino acid
  misc_feature (162)..(162): Xaa can be any naturally occurring amino acid
  misc_feature (174)..(174): Xaa can be any naturally occurring amino acid
  misc_feature (182)..(182): Xaa can be any naturally occurring amino acid
  misc_feature (197)..(198): Xaa can be any naturally occurring amino acid
  misc_feature (212)..(212): Xaa can be any naturally occurring amino acid
  unsure (1)..(232): unsure at all Xaa locations
MQIFVKTLTGKTITLEVESSDTIDNVKAKIQDKEGIPPDQQRLIFAGKQLEDGRTLADYNIQKXSTXXLVLRLRGGMQIFVKXXTGKTITXEVEXSDTIDXVXAKIXDXEGXXPDQQXLIFXGXQXLXDXRTLXADYNXQKEXTLHLVLXLRGGMQIFVKTXTGKTITLEVESXDTIDNVKXKIQDKEGIPPDQQRXXIFAGKQLEDGRTLXDYNIQKESTLHLVLRLRGGF

SEQ ID NO: 49959 - protein, 242 aa, Malus x domestica
MEFANQAPESSTQKKLGRGKIEIKRIENTTNRQVTFCKRRNGLLKKAYELSVLCDAEVALIVFSTRGRLYEYANNSVRATIDRYKKACADSTDGGSVSEANTQFYQQEASKLRRQIREIQNSNRHILGESLSTLKVKELKNLEGRLEKGISRIRSKKNEILFSEIEFMQKRETELQHHNNFLRAKIAESEREQQQQQTHMIPGTSYDPSMPSNSYDRNFFPVILESNNNHYPRQGQTALQLV

SEQ ID NO: 49960 - protein, 409 aa, Prymnesium parvum
WAPGRQCCWELYCLEHGIQPDGQMPSDKTIGGGDDAFNTFFSETGSGKHVPRTVFVDLEPTVVDEVRTGTYRQLYHPEQLISGKEDAANNYARGHYTIGKEIVDLVLDRIRKLADNCTGLQGFLLFNAVGGGTGSGLGALLLERLSVDYGRKSKLSFTLYPSPQVSTAVVEPYNCVLSTHSLLEHTDVSFMVDNEALYDICRRNLDIERPTYTNLNRLIAQIISSLTASLRFDGALNVDVTEFQTNLVPYPRIHFVMSSYAPIISAEKAYHEQLSVAEITNSAFEPASMLVKVDPRHGKYMAVCLMYRGDVVPKDVNAAVATIKTKRTIQFVDWCPTGFKCGINYQPPTVVPGGDLAKVMRAVAMMSNTTAIAELYSRIDHKFDLMYAKRAFVHWYVGEGMEEGEFSGP

SEQ ID NO: 49961 - protein, 245 aa, Malus x domestica
MAYESKSLSLDSPQRKLGRGKIEIKRIENTTNRQVTFCKRRNGLLKKAYELSVLCDAEVALIVFSNRGRLYEYANNSVKGTIERYKKASADSSNTGSVSEASTQYYQQEAAKLRARIVKLQNDNRNMMGDALNSMSVKDLKSLENKLEKAISRIRSKKNELLFAEIEYMQKRELDLHNNNQLLRAKIAENERASRTLNVMAGGGTSSYDILQSQPYDSRNYFQVNALQPNHQYNPRHDQISLQLV

SEQ ID NO: 49962 - protein, 404 aa, Pythium graminicola
SRPQVGNACWELYCLEHGIQPDGQMPSDKTIGGGDDAFNTFFSETGAGKHVPRAVLVDLEPSVCDEVRTGTYRQLYHPEQIISGKEDAANNYARGHYTIGKEIVDLVLDRIRKLADNCTGLQGFLVFNAVGGGTGSGLGALLLERLSVDYGRKSKLGFTIYPSPQVSTAVVEPYNSVLSTHSLLEHTDVAVMLDNEAVYDICRRSLDIERPTYTNLNRLVAQVISSLTASLRFDGALNVDVTEFQTNLVPYPRIHFMLSSYAPVISAEKAYHEQLSVAEITNSAFEPASMMAKCDPRRGKYMAACLMYRGDVVPKDVNAAVATIKTKRTIQFVDWCPTGFKCGINYQPPTVVPGGDLARVQRAVCMISNTSAIAEVFSRIDHKFDLMYAKRAFVHWYVGEGMAR

SEQ ID NO: 49963 - protein, 444 aa, Gluconobacter oxydans 621H
MSIADRLERLSFSGFHYRLLFLGGAGYCFDGLDGAILAFVMPALQHLWGLSMAQLGLLGSGAFFGYFIGALSAGLVADRWGRRSVMMWALACYCVGSLVSALCMNWHGFVLARVVAGLGTGAESAIIAPYLSEFVPRRYRGVFTGALAGFFSFGFVGASLLGYALVPGSANGWRWAVGLTACPVVMLLWWRRALPESPRWLESMGRSKAAHSVLCGIEKSVGVVSPAYEPGAVTLERPSVGGQFARLWGSGLRRVTAMSWVLWLSVTFSYYAFFSWLPTLLIARGFTITHSFGFSIAICVAQIPGYFSAGFCNEYFGRKATVVTYLAAAMLSAVAMALVSSSGGILAAGMLLSFFMNGAFAGLYAYTPEIFPTVLRATGMGSASAVGRTGAIAAPLLIGALYPRAGFAGVFGLTALILLAGALSILIFGPSTVNRSLEEIGDAY

SEQ ID NO: 49964 - protein, 146 aa, Brassica napus
PDEDNRRQQTLGEITLEDFLVKAGVVQEPLKTTMKMSSSDFGYNPEFGVGLHCQTQNNYGDNRTGFNENRPFYSGMGESSSCMTGKERSDQYLPGLNAFRIQKRIIDGPPEILMERRQRRMIKNRESAARSRARRQVSLGSNRYQF

SEQ ID NO: 49965 - protein, 406 aa, Thraustotheca clavata
SRPQVGNACWELYCLEHGVQPDGQMPSDKTIGGGDDAFNTFFNETGAGIHVPRAVLMDLKPSVCDEVRTGTYRQLYHPEQIISGKEDAANNYARGHYTIGKEIVDLVLDRIRKLADNCTGLQGFLVFNAVGGGTGSGLGALLLERLSVDYGRKSKLGFTIYPSPQVSTAVVEPYNSVLSTHSLLEHTDVAVMLDNEAIYDICRRSLDIERSTYTNLNRLIAQVISSLTASLRFDGALNVDVTEFQTNLVPYPRIHFMLSSYAPVISAEKAYHEQLSVAEITNSAFEPASMMAKCDPRHGKYVAACLMYRGDVVPKDVNAAVATIKTKRTIQFVDWCPTGFKCGINYQPPTVVPGGDLARVQRAVCMISNTSAIAEVFSRIDHKFDLMYAKRAFVHWYVGEGMARRA

SEQ ID NO: 49966 - protein, 571 aa, Chlamydia trachomatis D/UW-3/CX
MRMDTLDSQAAEAAQEEEIQRKLEELVTLAKDQGFITYEEINEILPPSFDTPEQIDQVLIFLAGMDVQVLNQADVERQKERKKEAKELEGLAKRSEGTPDDPVRMYLKEMGTVPLLTREEEVEISKRIEKAQVQIERIILRFRYSTKEAVSIAQYLINGKERFDKIVSEKEVEDKTHFLNLLPKLISLLKEEDAYLEERLLALKDPALSKPDQARLNDELEKCRIRTQAYLRCFHCRHNVTEDFGEVVFKAYDSFLQLEQQINDLKARAERNKFAAAKLAAARRKLHKREVAAGRTLEEFKKDVRMLQRWMDKSQEAKKEMVESNLRLVISIAKKYTNRGLSFLDLIQEGNMGLMKAVEKFEYRRGYKFSTYATWWIRQAVTRAIADQARTIRIPVHMIETINKVLRGAKKLMMETGKEPTPEELGEELGFTPDRVREIYKIAQHPISLQAEVGDGGESSFGDFLEDTAVESPAEATGYSMLKDKMKEVLKTLTDRERFVLIHRFGLLDGRPKTLEEVGSAFNVTRERIRQIEAKALRKMRHPIRSKQLRAFLDLLEEEKIGSGKIKSYKN

SEQ ID NO: 49967 - protein, 483 aa, Bacillus subtilis subsp. subtilis str. 168
MSSNKLTTSWGAPVGDNQNSMTAGSRGPTLIQDVHLLEKLAHFNRERVPERVVHAKGAGAHGYFEVTNDVTKYTKAAFLSEVGKRTPLFIRFSTVAGELGSADTVRDPRGFAVKFYTEEGNYDIVGNNTPVFFIRDAIKFPDFIHTQKRDPKTHLKNPTAVWDFWSLSPESLHQVTILMSDRGIPATLRHMHGFGSHTFKWTNAEGEGVWIKYHFKTEQGVKNLDVNTAAKIAGENPDYHTEDLFNAIENGDYPAWKLYVQIMPLEDANTYRFDPFDVTKVWSQKDYPLIEVGRMVLDRNPENYFAEVEQATFSPGTLVPGIDVSPDKMLQGRLFAYHDAHRYRVGANHQALPINRARNKVNNYQRDGQMRFGDNGGGSVYYEPNSFGGPKESPEDKQAAYPVQGIADSVSYDHYDHYTQAGDLYRLMSEDERTRLVENIVNAMKPVEKEEIKLRQIEHFYKADPEYGKRVAEGLGLPIKKDS

SEQ ID NO: 49968 - protein, 967 aa, Arabidopsis thaliana
MEGQTLIFTFLFISLSLTFIIGRIKRRPNLPPSPSWALPVIGHLRLLKPPLHRVFLSVSESLGDAPIISLRLGNRLVFVVSSHSLAEECFTKNDVVLANRFNSLASKHISYGCTTVVTASYGDHWRNLRRIGAVEIFSAHRLNSFSSIRRDEIHRLIACLSRNSSLEFTKVEMKSMFSNLTFNNIIRMLAGKCYYGDGAEDDPEAKRVRELIAEGMGCFGAGNTADYLPILTWITGSEKRIKKIASRLDEFLQGLVDERREGKEKRQNTMVDHLLCLQETQPEYYTDNIIKGIMLSLILAGTDTSAVTLEWTLSALLNHPQILSKARDEIDNKVGLNRLVEESDLSHLPYLQNIVSESLRLYPASPLLVPHVASEDCKVGGYHMPRGTMLLTNAWAIHRDPKIWDDPTSFKPERFEKEGEAQKLLGFGLGRRACPGSGLAQRLASLTIGSLIQCFEWERIGEEEVDMTEGGGGVIMPKAIPLVAMCKARPVVAIFLLTRSKRKLNLPPSPAISLPVIGHLHLLKPPLHRTFLSLSKSIGNAPVFHLRLGNRLVYVISSRSIAEECFTKNDVVLANRPKFTISKHLGYNATYLLSASYGDHWRNLRRIAAVEIFSTHRLNSFLYIRKDEIRRLISHLSRDSLHGFVEVEMKTLLTNLASNTTIRMLAGKRYFGEDNDDAKLVKNLVSEAVTSAGAGNPIDYLSILRWVSSYEKRIKNLGNRFDTFLQKLVDEKRAEKEKGETMIDHLLALQDIQPDYYTDVIIKGIILTLIIAGTDTSSVTLEWAMSNLLNHPEILKKARMEIDEKVGLDRLVDESDIVNLSYLQSIVLETLRMYPAVPLLLPHLSSEDCKVGGYDIPSGTMVLTNAWAMHRDPEVWEDPEIFKPERFEKEGEAEKLISFGMGRRACPGAGLAHRLINQALGSLVQCFEWERVGEDFVDMTEDKGATLPKAIPLRAMCKARSIVDKLI

SEQ ID NO: 49969 - protein, 610 aa, Listeria monocytogenes EGD-e
MHKMRFFQSVQFKLVIMYLLLIIVAMQVIGAYFVRELEGQLEKNFQDSITNSITLLDYNAREEIIKNSDNSVKLQNDIRELLVDYSRASSNLIEVRIVDDKGKILGTSNLNNQGIVGQKSNDPLVKRTLSLGTTSEDKIYKDESNKNNRVWVNVSSIKNKGQVIGAIYLVADIESVYKQVDDITNIFITGTLIAMIITAVLGILLSRTITKPIVEMKRQAYAMARGNYSRKVKVYGVDEIGELADSFNTLTKRVQEAQAMTEGERRKLSSVLAYMTDGVIATDRRGKVILINTPAEKMLRVKHESANGRSIIDVLDIGDTYQFEDLMEVDGSLTMDRSTLDKPYVLRANFSVIQRETGFNNGVIAVLHDITDQEKVDQERRDFVSNVSHELRTPLTSMHSYLEALSDGAWEDKEIAPRFLEVTQNETERMIRLVNDLLKLSRMDGGREQLEKSFVNFTDFFNHIIDRFEMMKKETIMFKRHIPREPVIIEIDEDKVMQVLDNIISNANKYSPDGGRISFYLKKFEDEIEVSIADEGLGVPDEDLANVFDRFFRVDKARSREMGGTGLGLAIAREVIEAHGGRIWAERNKNKGTIIKFTLPYSDLPEDDWE

SEQ ID NO: 49970 - protein, 123 aa, Magnaporthe grisea 70-15
MRSKFKDEHPFEKRKAEAERIRQKYTDRIPVICEKVEKSDIATIDKKKYLVPADLTVGQFVYVIRKRIKLSPEKAIFIFVQDTLPPTAALMSSIYELHKDEDGFLYITYSGENTFGDLFEEVE

SEQ ID NO: 49971 - protein, 276 aa, Salmonella typhimurium LT2
MNVTEITQLARDIRVATLKSLNHLGFGHYGGSMSVVETLAVLYGAVMKIDPADPDWPERDYFVLSKGHAGPALYSTLAIKGYFPREELNTLNQNGTRLPSHPDRLKTRGVDATTGSLGQGISIAGGMALSHKLARRPNRVFCIVGDGELNEGQCWEAFQFIAHHRLNNLTVFIDWNKQQLDGELEEIINPFDLEGKFRAFGFDVVTVKGDDIAGLLAVVQPVPPADAQPRVVILDSIKGQGVPCLEQLTNSHHLRLTDGMKQTLNEAIHQLEVMHD

SEQ ID NO: 49972 - protein, 176 aa, Triticum aestivum
  misc_feature (132)..(132): Xaa can be any naturally occurring amino acid
  misc_feature (158)..(158): Xaa can be any naturally occurring amino acid
  unsure (1)..(176): unsure at all Xaa locations
MAPTVMASSATSVGPFQGLKSTVGLPVSRRSNGASLGSVSNGGRIRCMHVWPIEGGGKVDTLSYLPPLRTEALLEQVDYLIRSKWVPCLEFSKVGFIFRDHNTSPGYYDGRYWTMWKLPMFGCTDATQVINXVEEVKKEYPDAYVRIIGFDNMRQVQXCVSFIAFKPPGCEESGKV

SEQ ID NO: 49973 - protein, 500 aa, Listeria monocytogenes EGD-e
MDEKEKNLNENSENESTPKREVEDTLHTPESAQPVQETPIVEGVTPEGEKFAGATEDAAEASSTNAFFEEASNKESEPARPAPGPRRAGTTGGGAVPPNRVNNGGSGNGNGEPPKRGKHFIGYFLTALIGVIIGGLIIFFVAWDNGDNADTTSNSNNKATKVEKVSVDTTSDVTKAVDKVQDAVVSVLNYQSSSSLDGTTTSEQEASSGSGVIYKKANGKAYIVTNNHVVADANKLEVTFTNGKKSEAKLLGTDEWNDLAVLEIDDKNVTTVAAFGDSDSLKLGEPAIAIGSPLGTEFSGSVTQGIISGLNRAVPVDTNGDGTEDWEADVIQTDAAINPGNSGGALINIEGQVIGINSMKISMENVEGISFAIPSNTVEPIIEQLETKGEVERPSLGVSLRDVDTIPETQQKNILKLPDSVDYGAMVQQVVSGSAADKAGLKQYDVIVELNGQKVTNSMTLRKILYGNDVKIGDKVKVKYYRDGKEKSTDIKLEAAKTTT

SEQ ID NO: 49974 - protein, 399 aa, Thermococcus kodakarensis KOD1
MIKPSERAMGVEYAIRDVVLPARELEKKGIEVIRLNIGDPGKYDFQPPEHMKEAYCRAIKEGHNYYGPSEGLPEMREAVVQREKRKNGVDITPDDVRVTTAVTEALQLLFGALLDPGDNILVPSPSYPPYTGLVKFYGGIPNEYDTIEENGWQPDIDDMRKRINERTKAIAVINPNNPTGALYEKKTVKEILDLAGEYDIPVISDEIYDLMTYEGEHVSPGSLTKDVPVIVMNGLSKVYFATGWRLGYFYYVDPENKLAEVREAVDKLMRIRICPSTPAQFAAIAGLTGPMDYLEEYMKKLKERRDYIYKRLTEIPGVSTQKPQGAFYIFPRIDERSKWKSDKEFVLDVLHEAHVLFVHGSGFGRAGNWHFRIVFLPPVEILEKAMDRFEEFMRKRLAE

SEQ ID NO: 49975 - protein, 166 aa, Zexmenia serrata
MFPMVTEFMNYGQQTIRAARYIGQGFMITLSHANRLPVTIQYPYEKLITSERFRGRIHFEFDKCIACEVCVRVCPIDLPVVDWKLETDIRKKRLLNYSIDFGICIFCGNCVEYCPTNCLSMTEEYELSTYDRHELNYNQIALGRLPMSIIDDYTIRTILNLPEIKT

SEQ ID NO: 49976 - protein, 242 aa, Shigella flexneri
LKERKEGAFVPFVTLRDPGIEQSLKIIDTLIEAGADALELGIPFSDPLADGPTIQNATLRAFAAGVTPAQCFEMLALIRQKHPTIPIGLLMYANLVFNKGIDEFYAQCEKVGVDSVLVADVPVEESAPFRQAALRHNVAPIFICPPNADDDLLRQIASYGRGYTYLLSRAGVTGAENRAALPLNHLVAKLKEYNAAPPLQGFGISAPDQVKAAIDAGAAGAISGSAIVKIIEQHINEPEKML

SEQ ID NO: 49977 - protein, 175 aa, Lavatera thuringiaca
ECDPQQYGACNAGCSGGLMTSAFEYTLKAGGLEREEEYPYTGIDRGGCKFDKTKIAASVSNFSVISVDEDQIAANMVKHGPLAVGINAAFMQTYIGGVSCPYICFRSLDHGVLLVGYGAAGYAPVRFKEKPFWIIKNSWGANWGEDGYYKICRGRNVCGVDSMVSSVAALQTKSQ

SEQ ID NO: 49978 - protein, 242 aa, Shigella flexneri
LKERKEGAFVPFVTLGDPGIEQSLKIIDTLIEAGADALELGIPFSDPLADGPTIQNATLRAFAAGVTPAQCFEMLALIRQKHPTIPIGLLMYANLVFNKGIDEFYAQCEKVGVDSVLVADVPVEESAPFRQAALRHNVAPIFICPPNADDDLLRQIASYGRGYTYLLSRAGVTGAENRAALPLNHLVAKLKEYNAAPPLQGFGISAPDQVKAAIDAGAAGAIFCLAIVKIIEQHINEPEKML

SEQ ID NO: 49979 - protein, 303 aa, Lycopersicon chmielewskii
TNSINDALSSSYLVPFESYRVPLVDLEEATNNFDDKFFIGEGGFGKVYKGVLRDGTKVALKSCKPESSQGIEEFETEIEILSFCRHPHLVSLIGFCDERNEMILIYKYMENGNLKRHLYGSDLPSMSWEQRLEICIGAARGLHYLHTRAIIHRDVKSINILLDENFVPKITDFGISKKGTELHQTHLSTVVKGTLGYLDPEYFIKGRLTEKSDVYSFGVVLFEVLCARSAIVQSLPREMVNLAEWAVESHNNGQLEQIVDPNLADKIRPESLRKFGETAVKCLALSSEDRPSMGDVLWKLEYA

SEQ ID NO: 49980 - protein, 250 aa, Salmonella enterica subsp. enterica serovar Typhi Ty2
MAVTKLVLVRHGESQWNKENRFTGWYDVDLSEKGVSEAKAAGKLLKEEGFSFDFAYTSVLKRAIHTLWNVLDELDQAWLPVEKSWKLNERHYGALQGLNKAETAEKYGDEQVKQWRRGFAVTPPELTKDDERYPGHDPRYAKLSEKELPLTESLALTIDRVIPYWNDTILPRMKSGERVIIAAHGNSLRALVKYLDNMSEDEILELNIPTGVPLVYEFDENFKPIKHYYLGNADEIAAKAAAVANQGKAK

SEQ ID NO: 49981 - protein, 303 aa, Lycopersicon chmielewskii
TNSINDALSSSYLVPFESYRVPLVDLEEATNNFDDKFFIGEGGFGKVYKGVLRDGTKVALKSCKPESSQGIEEFETEIEILSFCRHPHLVSLIGFCDERNEMILIYKYMENGNLKRHLYGSDLPSMSWEQRLEICIGAARGLHYLHTRAIIHRDVKSINILLDENFVPKITDFGISKKGTELDQTHLSTVVKGTLGYLDPEYFIKGRLTEKSDVYSFGVVLFEVLCARSAIVQSLPREMVNLAEWAVESHNNGQLEQIVDPNLADKIRPESLRKFGETAVKCLALSSEDRPSMGDVLWKLEYA

SEQ ID NO: 49982 - protein, 364 aa, Nocardia farcinica IFM 10152
MQDEPRGSGGRWSALLVAAVLALAGFLGFRGELPGWPFGDTGTTAAPTVRPPNPPLDQAAVAAEVTPALVNISTRTRPLGQGAAGTGIVLTADGQVLTSHHVVKGAEQVVVTTQATGAEYRATVLGYDSTADIALLSLPGANGLPTARLGSSSSVRVRDEVLALGNAGGTGGPPTATPGLVTALNSTIVALNAADLSRKALRGMVEVAAPVSSGQSGGALVDWQGAVVGVVTASSGEAAAELERPNGYAVPIDTAMRVVRQIRSGIPTDTVHIGPTATLGVLISDASPSGARIDVALYGLPAYAAGLADGEVIVSIDGRPIGSARVLRTAIDRRRPGETVRLGVLGVDGVERTVTVELGLGTPN

SEQ ID NO: 49983 - protein, 242 aa, Shigella flexneri
LKERKEGAFVPFVTLGDPGIEQSLKIIDTLIEAGADALELGIPFSDPLADGPTIQNATLRAFAAGVTPAQCFEMLALIRQKHPTIPIGLLMYANLVFNKGIDEFYAQCEKVGVDSVLVADVPVEESAPFRQAALRHNVAPIFICPPNADDDLLRQIASYGRGYTYLLSRAGVTGAKNRAALPLNHLVAKLKEYNAAPPLQGFGISAPDQVKAAIDAGAAGAISGSAIVKIIEQHINEPEKML

SEQ ID NO: 49984 - protein, 331 aa, Glycine max
MTTFTHSIFHHDLLFLFYFFLLTEFPPQATAQPPNTLTPPPQQDRFTRLKFDKSMAIVLLILVVVFFILGFLSVYTRQCAERRMGGRFDLSILISRRQRGLGREVIETFPTFVYSTVKSLKLGRATLECAVCLNEFEEVETLRFIPNCSHVFHSECIDAWLANHSTCPVCRANLFPKPDDPSFDPIQIPDPEQPVISSPTRAETGGSNPRSPNLIDQNPTSRSRSTGFRIAGWFPRSHSTGHSLVQPGENCERFTLHLPEEVRNQLMLSRTKSCGVGVTFTRENSERRGYRARSVGSSLSPHVRGWFSVKDDVGERSSDRLFSTSTRDSEV

SEQ ID NO: 49985 - protein, 562 aa, Shewanella oneidensis MR-1
MDDNKRPLYLPFAGPAILEAPLINKGSAFSEEERIFFNLEGLVPYAIETIEEQASRAYDQFRSFNNDLDKHIYLRNIQDTNETLFYRLVQNHISEMMPIIYTPTVGLACERFSKNYRRNRGLFISYPNKDRIDDILNNSTRQKVKIIVVTDGERILGLGDQGIGGMGIPIGKLSLYTSCGGISPAYTLPITLDVGTDNPQLLEDPMYMGWRHPRIGGEEYAEFIEAFMQAVHVRWPDTLIQFEDFAQKNAMPILERYKERYCCFNDDIQGTAAVTVGSLLAACKAAGTELNKQRVAFLGAGSAGCGIAEAIVAQMVSEGISDEQARSQVCMVDRWGLLLDNMPNLLPFQQKLAQKCADISHWNNFSDNISLLDVVNNAKPTVLIGVSGAPGLFTEEIVRAMHSHCPRPIIFPLSNPTSRVEATPKDILHWTSGQALVATGSPFEPVVVDGETYEIAQCNNSFIFPGIGLGVLASGARHVSDAMLMASSRALAECSPLAINGSGPLLPKLEDIHSVSKHIAFAVGKVAIEQGLSLPASDELLMQSIEDNFWKPEYRRYKRTSF

SEQ ID NO: 49986 - protein, 172 aa, Glycine max
MALQLPPLPGRAMRFNSSVCSLPARKSSTFATLSQPRSDWVEATNSFFDQDKRPIMLFDGVCNLCNGGVKFVRDNDRNKTIRYEPLQSETGKILLRRSGRAPDDISSVVLVEKERSYIKSEAVLKIMEYIDLPFPQLAILLQFVPLFIRDFVYDNVANNRYLIFGRSESCEI

SEQ ID NO: 49987 - protein, 242 aa, Shigella flexneri
LKERKEGAFVPFGTLGDPGIEQSLKIIDTLIEAGADALELGIPFSDPLADGPTIQNATLRAFAAGVTPAQCFEMLALIRQKHPTIPIGLLMYANLVFNKGIDEFYAQCEKVGVDSVLVADVPVEESAPFRQAALCHNVAPIFICPPNADDDLLRQIASYGRGYTYLLSRAGVTGAENRSALPLNHLVAKLKEYNAAPPLQGFGISAPDQVKAAIDAGAAGAISGSAIVKIIEQHINEPEKML

SEQ ID NO: 49988 - protein, 463 aa, Rhodopseudomonas palustris CGA009
MNPIRTFAVLCVSLALTTPLAAQDRRVPSSPAELKLSYAPIVQHVQPAVVNVYAAKVVQNRNPLLEDPIFRRFFGVPGQPEQIQRSLGSGVMVDASGLVVTNNHVIEGADQVKVALADKREFEAEIVLKDSRTDLAVLRLKDTSEKFPTLDFANSDDLLVGDVVLAIGNPFGVGQTVTHGIVSALARTQVGITDYQFFIQTDAAINPGNSGGALVDVSGKLVGINTAIFSRSGGSQGIGFAIPANMVRVVVASAKSGGKAVKRPWLGARLQAVSPEIAETLGLKRPGGALVASVTKGSPAERAGLKLSDLIVSIDGFAIDDPNAFDYRFATRPLGGAAQLEVQRSGKAVKLSIPLETAPDSGRDELVITSRSPFQGAKIANISPAIADEMRLDPSVEGVVVTDLPDDSTAANVGFQKGDIIVAVNNTRIGKTSDLERVAGQTARLWRIMLVRGGQQIQVTLGG

SEQ ID NO: 49989 - protein, 429 aa, Geobacillus kaustophilus HTA426
MRSYERSKTAYEEAVKLMPGGVNSPVRAFKSVGMTPIFMARGQGAKIYDIDGNEYIDYVLSWGPLILGHANPQVVEALKRVAEQGTSFGAPTLLENELAKLVIERVPSVEIVRMVNSGTEATMSALRLARGYTKRNKIMKFEGSYHGHGDSLLIKAGSGVATLGLPDSPGVPESVAQHTITVPYNDLDSVRYAFERFGEDIAAVIVEPVAGNMGVVPPVPGFLEGLREVTKQYGALLIFDEVMTGFRVDYHCAQGYYGIEPDLTCLGKVIGGGLPVGAYGGKAEIMELVAPSGPVYQAGTLSGNPLAMTAGYETLRQLTPETYEELGRKAARLADGLHQAAEKYDIPHTINRAGSMIGFFFTNEPVVNYETAKTSDLELFAAYYREMANEGIFLPPSQFEGLFLSTAHSDDDIEYTIAAAERVFARLRG

SEQ ID NO: 49990 - protein, 152 aa, Zea mays
MSLVRRSSVFDPFSVDLFDPFDSMFRSIVPSSSSSGSETAAFASARIDWKETPEAHVFKADLPGVKKEEVKVEVEDGNVLLISGQRSREKEDKGDKWHRVERSSGQFVRRFRLPENAKTEEVRAALENGVLTVTVPKAEVKKPEVKSIQISG

SEQ ID NO: 49991 - protein, 153 aa, Triticum aestivum
  misc_feature (28)..(28): Xaa can be any naturally occurring amino acid
  unsure (1)..(153): unsure at all Xaa locations
MEQGAARQDEARKEREAPPPVPFPRENXERDLKLPSRVVSLFFGGDISTTAQSFEKWVSLVRLRSGTFRPSGFPRRNSKIEVMPSGSFSLFGSADLREEVIKAEAASREKNPTLDQPPEISLWERLGNASALDIESSGFSWNMLSSLHHTEHS

SEQ ID NO: 49992 - protein, 400 aa, Xanthomonas campestris pv. campestris str. ATCC 33913
MSFFANVEQVPGDPILGLTEAYNADSRPNKVNLGVGIYYDENGRIPLLRAVQKIEQQLALDAKPRGYLPIDGLAAYDKATQELLFGAESALVASGRVATSQTVGGSGALRVGADLLKKLLPTSTIAISNPSWENHRAVFGAAGFEVVDYTYFDAASHGLNFDGMLADLAKLEPGTVVLLHACCHNPTGADLSREQWKQLAGLLKERNLFPFVDIAYQGFDKGIEADAYAVRLLAAEGIDTYVVASSYSKSFSLYGERVGALSVVSATAAEAKAVQSQVKRIIRTIYSSPSTHGAALVAGVLTSPELRDVWEQELTEMRERIHALRAGLVAKLAALGAPEFEFIQRQAGMFSYSGLTKSQVDRLRDEFAIYAVGTGRICVAALSQRNLDYVAQAVATVSRG

SEQ ID NO: 49993 - protein, 273 aa, Triticum aestivum
  misc_feature (174)..(174): Xaa can be any naturally occurring amino acid
  misc_feature (176)..(176): Xaa can be any naturally occurring amino acid
  misc_feature (196)..(196): Xaa can be any naturally occurring amino acid
  unsure (1)..(273): unsure at all Xaa locations
MLLLNPASEAAAAAALDSIRQQLLEEPARPAYCRSASFGSLVADQWSESLPFRPNDADDMVVYGALRDAFSCGWLPDGSFAAVKPEPLPSPGSYDGSCLGSFLASPPELDAPWTEEEAEVAATASRGKHFRGVRQRPWGKFAAEIRDPAKNGARVWLGTFDSAEDAAVAYDRAXYXMRGSRALLNFPLRIGSRDRXAAAAAGQKRPSPQPASPDSSSPSCSAPGSSKRRKRGEAAAASMAMALVPPPPAQAPVQLTLPAQPWLAAGAVQQLVS

SEQ ID NO: 49994 - protein, 520 aa, Solanum habrochaites
MKSTVHLGRVSTGGFNNGEKEIFGEKMRGSLNNNLRINQLSKSLKLEKKEKKIKPGVAYSVITTENDTETVFVDMPRLERRRANPKDVAAVILGGGEGTKLFPLTSRTATPAVPVGGCYRLIDIPMSNCINSAINKIFVLTQYNSAALNRHIARTYFGNGVSFGDGFVEVLAATQTPGEAGKKWFQGTADAVRKFIWVFEDAKNKNIENILVLSGDHLYRMDYMELVQNHIDRNADITLSCAPAEDSRASDFGLVKIDSRGRVVQFAEKPKGFELKAMQVDTTLVGLSPQDAKKSPYIASMGVYVFKTDVLLKLLKWSYPTSNDFGSEIIPAAIDDYNVQAYIFKDYWEDIGTIKSFYNASLALTQEFPEFQFYDPKTPFYTSPRFLPPTKIDNCKIKDAIISHGCFLRDCSVEHSIVGERSRLDCGVELKDTFMMGADYYQTESEIASLLAEGKVPIGIGENTKIRKCIIDKNAKIGKNVSIINKDGVQEADRPEEGFYIRSGITIISEKATIRDGTVI

SEQ ID NO: 49995 - protein, 298 aa, Solanum tuberosum
MCGGAILYDIIPRDRRLSSTDLWPSSADFWQTSSFSKPISTQNVPPKPKRAQLSRGSEQMKKRQRKNLYRGIRQRPWGKWAAEIRDPRKRVRVWLGTFNTAEAARAYDREARKIRGKKAKVNFPNEDDDHYYSHPEPPPLNIVYESYDTTSTYNQESNNCYPFHSIENTEPVMEFAIANKNSSGSAYNGIEDQNVEGEEQTVKNSNNRIVEEEEKTEDEVQILSDELMAYESLMKFYEIPYVDGQSVAATVNPAADTEVGGGSMELWSFDDVSRLQPSYNVSLIIVLFKLLHLFSLLN

SEQ ID NO: 49996 - protein, 625 aa, Methylococcus capsulatus str. Bath
MTKANWTLSDARDTYAIEHWSDGYFNIAPEGEVVVCPQRGSVEGGVSIAAIARGVRAEGLSLPVLMRFPHILHDRVRLLTSAFGKARAAYHYGAGYTPVYPIKVNQQRNVIENILRAGGVGLEAGSKSELLAILALAESGTIICNGYKDRAYIRLALIGSRLGLRVFIVVEKLSELELVVSESEALGIAPQLGVRIRLSSISAGKWQNSGGEKSKFGLHAGEILKFLKRLERAGGLGWVRLMHFHMGSQVANINDVKTALREASRYYAELRRLGAPVDHVDVGGGLGIDYEGTHSVSDCSINYSVDEYAHSIVRAFSELCAEQGLPQPDLITEAGRAMSAHHAVLVTNVVDIEAATYDASPVSASVAQPLKDLEDLLRRVDSESVLGIYHDAEFDLAETRTMYVQGKIGLDQLAEAERLHATLCREVQQRLDIRLRAHRAVLDELNERLADKLFCNFSVFQSIPDAWAIDQIFPVMPLQRLGEEPTRRAVIQDMTCDSDGRINAYIDRQSIENTLRMHAPAPGEPYLIGFFLVGAYQEILGDMHNLFGDTHSVDVELDGAGGYTFTHTRRGDGADDLLRYVHIDPDELERSYRKKLIEADIPMHQRKQYESELIAGLSNYTYLEE

SEQ ID NO: 49997 - protein, 361 aa, Brassica napus
MAKSQIWFGLALVALLVVSAVADDVVVLTEDSFEKEVGKDKGALVEFYAPWCGHCKKLAPEYEKLAASFMKAKSVLIAKVDCDEHKGVCTKYDVSGYPTIKWFPKGSLEPQKYEGPRNAEALAEFVNKEGGTNVKLAAVPQNVVVLTPDNFDEIVLDQNKDVLVEFYAPWCGHCKSLAPVYEKVATVFKQEDGVVIANLDADAHKSLGEKYGVSGFPPLKFFPKDNKAGQDYDGGRDLDDFVSFINEKVGTSRDSKGQLTSKAGVVESLDALVKELVAASEDEKKAILSRIEEEASNLKGSTARYGKLYSSLAKKYIEKGSGYATKEAERLGRVLSKSMSPVKADELTLKRNILNTFVASS

SEQ ID NO: 49998 - protein, 264 aa, Gluconobacter oxydans 621H
MRVALGQFAVAPDWETNQRQCLDLIARAREGGAELLVLPEGILAQDINNPELLPQTAQPLDGPFMEGLRKASQGIAVAGCVNVPDGNGRFYNTQFVLRDGAFIATYRKLHLYDAFSMKESQRTSPGLELPPVVQIGDMKVGLMTCYDVRFPELARHLALAGAEVLLLPAAWVRGPGKERHWEIMSVARALENTCYVVAVGECGARNTGFSMVVDPLGVVTLALGEAPALGFATLDRERIAHARQVLPVLENRRFAAPVLADLKN

SEQ ID NO: 49999 - protein, 531 aa, Oryza sativa
  misc_feature (155)..(155): Xaa can be any naturally occurring amino acid
  unsure (1)..(531): unsure at all Xaa locations
MAMAASPFLILPSLFPKPTILAARIHPSIFRGRHIRCSPNGAAVPESPEPAPRRGRRKSPSPSPPKAKTTRRRTKKNTQESDSEGEEEPPKRRGRRTRKSKQEAEQEAAEKEDEVRAASPGTEDSKRAVQDEDGEAEATGSNSARGEDSPYDWPXLVCCFGAPRWEFVPTVRVSDRQMHPDIYSTWLHLQWEPPEFARAPGSAASNVGIALTRGGGRAAVLGKVGDDDFGRELVYRMNCERVQTRAIRFDDGAATATARMKVGFRDREDGSGGTRLVAETVKSAAEDSLSKAEINVDVLKEARVFHFNSEVLLTPSMESTLFRAIELSKKFGSKIFFDLNLPLPLWRSRDETKELINKAWNEADIIEVSRDELEFLLDHEYYQYKRANPPQYYLDGFHLTRNWPQYYHYTPEEIAPIWHDGIKLLLVTYGTLRIHYYTPKFHGCVIGTEDALITPYTTDRTGSGDAVVAAAIRKLTSCPEMYEDQDTLERNLRFAVAAGIISQWTIGAVRGFPTESAAQNLKEQVYVPSMW

SEQ ID NO: 50000 - protein, 738 aa, GIBBERELLA ZEAE PH-1
MTEQVTGAIKHAVMGHKNDKIDQLKANMVEPNENSRITSDYGVKQNNTDQWLRVASEDQTGPSLLEDAFGREKIHRFDHERIPERVVHARGAGAHGTFRLFESAADVTKAGLFTDTSRETPVFVRFSTVLGSRGSADTVRDVRGFAIKFYTQEGNFDIPGNNIPVFFIQDAMKFPDVIHAGKPEPNNEVPQAQTAHNNFWDFMFEHPEATHMHTWAMSDRTIPRSYRMMQGFGVNTYTLVNEKGERRFVKFHWTPELGVHSLVWDEALKLAGQDPDFHRKDLQEAIENGAFPKWKFGIQVLDESQEHDFDFDILDATKVWPEDLIPVRYIGELELNQTVDEYFTQTEQVAFCTSHLVPGIGHSDDPLLQGRNFSYQDTQLSRLGTNWEELPINKPVCPVMNFNRDGAMRHTITKGKVNYWPNRFSHQPPATESEGAYVDYAAKIVGMKQRTLSKKFKDHFTQAQLFYNSLSEIEKSHVQAAYSFELDHCDEAIVYERLTERLGEIDGDLANTIAEMVGGKKPANPKPNAGKKAKNLSQLDFVPETPTIKSRRIAIIIADGYDPVAFNAMYGAIKAQSALPFVIAPRRAPIFSAAEDSSSSKGIFPDHHLEGQRSTMFDAIFVPGGAKSIETLSKNGRALHYIREAFGHLKTIGGTGEAVEFINKAIQLSEVALSSTDGSGVVDSYGVVTLKNASPDTLKEIATVASDAKGFLEKFVYNVSCHRNWQRELDGLSTMVAY

SEQ ID NO: 50001 - protein, 616 aa, Exiguobacterium sp. 255-15
MLKGTNFFKSIQWKLVVIYALLILVAMQVIGVYFVRSLEKQYITNFSKSVEDRAGLVAYNVGKEFDKTGDDEASKRQLSESLGQLLSEFSSGSTSRNDILEVQIIDQDSIIQATSDEDNQSAVGQRATNSLIKKAQATSSSRVDTVLDPTTEDKIRIFAVPVTSERTGATTGMIYVRASMESIYSQMQQVTRILATGTVIALVITSILGVLLSRTITRPISDMRRQAIEMRRGNFSRKVKVYSDDEIGQLARSFNELTDELLEANATTEAERRKLTSVLENMTDGVIATDRTLRVILMNDQAKDIVGVDESGIVGTNLKDLLALGDDFMIPEDGTMPPRLLDFSSEDELFLVRAFFSPVKKHSGPITGMIIVLHDVTEQEQVEQDRREFVANVSHELRTPLTTMRSYLEALAEGAYQDEELAPRFLETTQNETERMIRLVTDLLQLSKMDSKEYKMNKVRFDYIQFLNDILDRHDMTKPERIRFRRKIMKRKVYIRGDQDKLIQVADNILTNAIKYSPEGGTITVRTMLRAKRIVISIKDEGVGIPKANLQKIFERFYRVDKARARKIGGTGLGLSIAKDVVSAHGGDIWAESEWGRGTTIYFTLPYEVIEEVDIG

SEQ ID NO: 50002 - protein, 397 aa, Klebsiella pneumoniae
MFQKVDAYAGDPILSLMERFKEDPRSDKVNLSIGLYYNDDGIIPQLQAVAEAEARLNAEPHGASLYLPMEGFSGYRQAIAPLLFGAEHTALKQNRIASIQTVGGSGALKVGADFLKRYFPESHVWVSDPTWENHIAIFEGAGFEVSTYPWFDKATNGVRFENLLAMLQTLPARDIVLLHPCCHNPTGADLTPAQWDRVVEVLKARQLIPFLDIAYQGFGGGLEEDAYAIRAIASAGMPMLVSNSFSKIFSLYGERVGGLSVVCEDSETAGRVLGQLKATVRRNYSSPPSFGAQVVATVLNDAALKATWQAEVDAMRAHILTMRQALVDALQQVAPGSKVDYLLKQRGMFSYTGFSAAQVDRLRDEFGVYLIASGRMRVAGLNSRNVQQVAKAFVAVM

SEQ ID NO: 50003 - protein, 242 aa, Shigella dysenteriae
LKERKEGAFVPFVTLGDPGIEQSLKIIDTLIEAGADALELGIPFSDPLADGPTIQNATLRAFAAGVTPAQCIEMLALIRQKHPTIPIGLLMYANLVFNKGIDEFYAQCEKVGVDSVLVADVPVEESAPFRQAALRHNVAPIFICPPNADDDLLRQIASYGRGYTYLLSRAGVTGAENRAALPLNHLVAKLKEYNAAPPLQGFGISAPDQVKAAIDAGAAAAISGSAIVKIIEQHINEPEKML

SEQ ID NO: 50004 - protein, 436 aa, Geobacillus kaustophilus HTA426
MRKMDEKTLTLGLDALWVMLSAVLVIGMQAGFALLEAGSTRMKNSGHVAGKQILSFAIASLAFWAFGFAITFGAGNSFIGTEGWFLKEGKGTFDSLSWANVPLELKFLFQLGFAGVSLAIAWGGFAERAKLSVYFLFGTIFTIAIYPVIGHWVWGGGWLGKMGMQDFAGSTVVHLQGAIAALVATILLGPRIGKFNKDKTPNVIPGHNQVYTVIGGLILWIGWFGFNAGSTMAVGDGFFGYVALTTNLAAAAGAIAAIVTAKILVGKADIPAMVNGVLAALVAITAACAFVEPWAAVVIGAVAGSFTFWTSIYFERKGIDDPIYAFSVHGVAGIIGTISTGFFASPRLVEITGIGKAGLFYGGGFDQLIVQTVGVLGAAVYVAAVSFVILYALKKTIGLRVTAEQEISGLDISEHGSYGYPEQLDPAYQPKTLAQQ

SEQ ID NO: 50005 - protein, 581 aa, Pseudomonas syringae pv. tomato str. DC3000
MISSLMRAGERLAGQRDPRLSQGLRLAVLEGLLSAAPYLLLYWLLASLFDNTLQGWSLIWLALGMLACLIGRIVVGALGTPLIFTGAYAMMANARLRLVDHLQKLPLGWFATAHSGEISAQVTSDLAMVEHLWSHFLGVFALSLAELTFILLLLFWLEPLLACTVLVTLPLAALAIYVAIRKTLLHADPMLATSNRTQAALQEYIQGIAVIRSFGRFGSALKRLNRALDEQHRAMVSIELKPAAWVALFGLVIEAGFILMVLLGCNLLLNGQMSIQHLMIFTVLAWPLYRKAIDLGFSILLLRFGHRALSRTEQLLDQQPMPEPAQPRSPGHFDIDLKEVCFSYAGREAPVIEGLSCHLAAGTLTALVGPSGAGKSTLAQLVARLWDIDSGQLQIGGIEARDIGSDHLQKHISMVFQDVTLFSGTVLDNLLVGKPDASEQEVIHAARLAHAHTFIEALPDGYATRIGEGGGWLSGGERQRLSIARALLKNSPILLLDEATSSVDPSSEAAIQRGLDALVRDRTVLVIAHRLHNIQHADQILVMDRGRIVEQGRHDELLAQQGLYARLWNRQSQARNWHLHT

SEQ ID NO: 50006 - protein, 598 aa, SYNECHOCOCCUS SP. WH 8102
MTDRAISTRSLPLVRLLRHLAPQRRLVITAVICSLLNKLFDLAPPALIGLAVDVVVRGQQSLLASFGIQSVSQQLWVLALLTFVIWAAESLFEYLYDVLWRNLAQTTQHRLRLEAYDHLQRLELAFFEQDSSGRLMAVLNDDINQLERFLDRGANQILQLITTVLIVGIGMAVVAPEVALFAYLPIPVILLGSLRFQRQLAPRYREVRARAGDLASRLANNLGGMLTIKSFTAEPLEAQRLEAESLAYLESNGRAIRLSAAFIPLIRFAILFAFVAILLVGGFQALSGQLAVGTYSVLVFITQRLLWPLTALGRTLDEYQRSMASTQRVLDLIDTPVTIRSGQTPLDRRLVRGEIRFEQVDFAYPGRASLLQGFDLVVPSGATVGIVGSTGSGKSTVVKLLLRLYERQGGRILLDGRPIEQLQLPDLRGAIALVSQDVYLFHGTVAENIAYSVANPDPLAIEQAARLAEAAGFIEALPDRYDTLVGERGQRLSGGQRQRIALARAILKDAPVLVLDEATAAVDNDTEAAIQRSLDQITRNRTTVVIAHRLSTVRHADRIVVMEQGRIVEQGRHDQLLAHGGVYANLWQVQAGERLIAS

SEQ ID NO: 50007 - protein, 451 aa, Lactobacillus johnsonii NCC 533
MDEKEKLKLKRSLKSRHVTMIAIGGAIGTGLFLGSGTAIQSAGPSIILSYLIVGIISFFMMRALGELILADPEQHSFIESVKKYLGNRMEFVAGWTYWLCWLSLAMADLTATGIYLKYWFKNLPQWVGPLVIVILLMLVNMVNVGLFGELESWFSMIKVLAILALIITGLILLIMHTKIDSRTVSLSNLVNYGGFFPTGSWGFLKSFQMVVFAFVGIEIVGLTAGETANPDKDIPKAINTLPVRIGLFYVGSMIAIMAVYPWNKIVTTTSPFVQVFGAIGIPAAAGILNFVVLTAAMSATNSAIFSTSRSLYALSRGNNAPKRFGKLSKKAVPNNALTFSSLILFIVVILNYIMPAQVFDIISSVSTINFIMVWIIIMWTHLKYRAENKEQLGKFRMPGFPITSWITIIFYLVILVILALIPATRLPLIISIIFILALALSYTLLERRKSK

SEQ ID NO: 50008 - protein, 430 aa, Exiguobacterium sp. 255-15
MDRPEEPRNESDQPYASTDETNGFPPRRPSEDEPVSPYRESYEEEPPAPKRRGGGKAFFVGLIGGIIGALLIALIAWPFVRDEMTSPTPVSNATPEQAATKATESENDIVSAVGQTKEAVVSVTNLQSSFQGADQETGAGSGVIYKKDGNKAYVVTNYHVVEGASRLSVTLSDGTALEAKVLGEDPTYDLAVLSIDASKVTQVVKLGDSDTLRAGETVLAIGNPLGIFANSVTRGVISAQERTVPVDTNKDGQQDFNTEVIQTDAAINPGNSGGALINTSGQLIGINSMKIAEASVEGVGFAIPINEALPIMRDLEQNGEVIRPQLGIQIRDVQEFPSGFREDRLKLPSDVNRGIVVVGLTKNSGAAKAGMKENDVIVEINGKDIRSFADLKSVLYRDAKVGDNVKVTFYRGGEKQTLDVKLSAQAATVQ

SEQ ID NO: 50009 - protein, 54 aa, Arabidopsis thaliana
MSTATFVDIIIAILLPPLGVFLRFGCGVEFWICLVLTLLGYIPGIIYAIYVLTK

SEQ ID NO: 50010 - protein, 320 aa, Bacillus licheniformis ATCC 14580
MDKPFVYVTRKLPEEQLSALKEEAHIEMWEKEEEPCPRAILKEKAKKAHGLLTMLSDTIDEELLKGAPHLKVVANLAVGYDNIDVEAAQKHRVICCNTPGVLTESTADLTFALLMASARRIVEASDWIRQGKWTGWGPLLLAGADVHHKTIGIVGMGSIGQAVARRAKGFGMKILYHNRTRNPDAEAELGASYLPFDELLEQADFVVCLTPLTHETKHLFNRSAFKKMKRSAIFINVSRGQVVNEDDLYEALVEKDIAGAGLDVFAEEPVQKDHPLVSLPQVTALPHIGSAAVETREAMMRLCAENIALVLRGKQAKTEI

SEQ ID NO: 50011 - protein, 242 aa, Shigella dysenteriae
LKERKEGAFVPFVTLGDPGIEQSLKIIDTLIEAGADALELGIPFSDPLADGPTIQNATLRAFAAGVTPAQCFEMLALIRQKHPTIPIGLLMYANLVFNKGIDEFYAQCEKVGVDSVLVADVPVEESAPFRQAALRHNVAPIFICPPNADDDLLRQIASYGRGYTYLLSRAGVTGAENRAALPLNHLVAKLKEYNAAPPLQGFGISAPDQVKAAIDAGAAGAIFGSAIGKIIEQHINEPEKML

SEQ ID NO: 50012 - protein, 491 aa, Arabidopsis thaliana
  misc_feature (93)..(93): Xaa can be any naturally occurring amino acid
  misc_feature (117)..(117): Xaa can be any naturally occurring amino acid
  unsure (1)..(491): unsure at all Xaa locations
MGAVSMESLPLGFRFRPTDEELVNHYLRLKINGRHSDVRVIPDIDVCKWEPWDLPALSVIKTDDPEWFFFCPRDRKYPNGHRSNRATDSGYWXATGKDRSIKSKKTLIGMKKTLVFXRGRAPKGERTNWIMHEYRPTLKDLDGTSPGQSPYVLCRLFHKPDDRVNGVKSDEAAFTASNKYSPDDTSSDLVQETPSSDAAVEKPSDYSGGCGYAHSNSTADGTMIEAPEENLWLSCDLEDQKAPLPCMDSIYAGDFSYDEIGFQFQDGTSEPDVSLTELLEEVFNNPDDFSCEESISRENPAVSPNGIFSSAKMLQSAAPEDAFFNDFMAFTDTDAEMAQLQYGSEGGASGWPSDTNSYYSDLVQQEQMINHNTENNLTEGRGIKIRARQPQNRQSTGLINQGIAPRRIRLQLQSNSEVKEREEVNEGHTVIPEAKEAAAKYSEKSGSLVKPQIKLRARGTIGQVKGERFADDEVQVQSTKRERERIKCSLM

SEQ ID NO: 50013 - protein, 242 aa, Shigella dysenteriae
LKERKEGAFVPFVTLGDPGIEQSLKIIDTLIEAGADALELGIPFSDPLADGPTIQNATLRAFAAGVTPAQCFEMLALIRQKHPTIPIGLLMYANLVFNKGIDEFYAQCEKVGVDSVLVADVPVEESAPFRQAALRHNVAPIFICPPNADDDLLRQIASYGRGYTYLLSRAGVTGAENRAALPLNHLVAKLKEYNAAPSLQGFGISAPDHVKAAIDARAAGAISGSAIVKIIEQHINEPEKML

SEQ ID NO: 50014 - protein, 337 aa, Glycine max
MEERYETLKELGSWNFGVARLAKDKETGELVAIKYIERGKKIDANNVQREIINHRSLRHPNIIRFKEVLLTPTHLAIVLEYASGGELFERICTAGRFSEDDARYFFQQLISGVSYCHSMEICHRDLKLENTLLDGNPSPRLKICDFGYSKSALLHSQPKSTVGTPAYIAPEVLSRKEYDGKISDVWSCGVTLYVMLVGAYPFQDPEDPRNFRKTIGRIIGVQYSIPHYVRVSPDCRNLLSRIFVADPAKRITIPEIKQYPWFLKNMPKEIIEAERKGFEETTKDQPNQKVEEIMRIIQAARIPGQGSKAGEGGQAGTGSLDIEDDEEIDVSGDYEQV

SEQ ID NO: 50015 - protein, 242 aa, Shigella dysenteriae
LKERKEGAFVPFVTLGDPGIEQSLKIIDTLIEAGADALELGIPFSDPLADGPTIQNATLRAFAAGVTPAQCFEMLALIRQKHPTIPIGLLMYANLVFNKGIDEFYAQCEKVGVDSVLVADVPVEESAPFRQAALRHNVAPIFICPPNADDDLLRQIASYGRGYTYLLSRAGVTGAENRAALPLNHLVAKLKEYNAAPPLQGFGISAPDQVKAAIDARAAGAISGSAIVKIIEQHINEPEKML

SEQ ID NO: 50016 - protein, 106 aa, Oryza sativa (japonica cultivar-group)
MAELVGPRVYSCCNCRNHVCLHDDIISKAFQGRNGRAFLFSHAMNVVVGAKEDRQLMTGLHTVADIYCNDCREVLGWKYERAYEETQKYKEGKFIFEKSKIVKENW

SEQ ID NO: 50017 - protein, 126 aa, Oryza australiensis
MSERRRREKLNEMFLILKSVVPSIHKVDKASILAETIAYLKELEKRVEELESSNQPSPCPLETRRRKSREITGKKVSAVAKRKASTPEVASDDDTDGVHHCVSNVNVTIMDNEVLLELQCQWKELL

SEQ ID NO: 50018 - protein, 388 aa, Burkholderia mallei ATCC 23344
MLLALMFIVATLKPQWLQRQGQLGKQLAAPIVALREVAPGVGGAPAQSSYADAAQKAMPAVVNVFSSKDGSLPPDPRAKDPLFRYFFGDRNARRQQEEPAANLGSGVIVSSEGYILTNQHVVDGADQIEVALADGRTATAKVTGSDPETDLAVLKINMTNLPTITLGRSDQSRVGDVVLAIGNPFGVGQTVTMGIISALGRNHLGINTFENFIQTDAPINPGNSGGALVDVNGNLLGINTAIYSRSGGSLGIGFAIPVSTARNVLESIITTGTVTRGWIGVEPQDVTPEIAESFSLAQKSGAIVAGVLQGGPADKAGIKPGDILMSIDGEDITDTTKLLNVVAQIKPGTPAKVHVVCKGKELDVTVVIGKRPPPPKQALDDQNSDEEE

SEQ ID NO: 50019 - protein, 125 aa, Oryza eichingeri
MSERRRREKLNEMFLILKSVVPSIHKVAKASILAEPIAYLKELEKRVEELESSSQPSPCPLETRRRKCREITGKKVSAGAKRKASPEVASDDDTDGVHHCVSNVNVTIMDNEVLLELQCQWKELL

SEQ ID NO: 50020 - protein, 349 aa, Nicotiana tabacum
MSKQGALFDLASGVGGKINKEKVLSAVDKYEKYHGYYGGEEEERKNNYSDMVNKYYDLSTSFYEYGWGESFHFAPRWKGESLLESIKRNEHFLALQLGLKPGQKVLDVGCGIGGPLREIARFSSTSITGLNNNEYQITRGQELNNKIGLTLNQTCNFVKGDFMKMSFPDNSFDAVYAIAATCHAPDVVGCYKEIYRVLKPGQCFAVYEWCMTDSYDPNNEEHEKIKSEIELGNGLPEVRLTSQCLEAAKQAGFEVVWDKDLAEDSPVPWYLPLDTSHFSFSSFPLTALGRLLTRNLVSALEFVGLAPKGSQRVQGFLEKAAQGLVGGAKKGIFTPLYFFLVRKPISDLK

SEQ ID NO: 50021 - protein, 476 aa, Neurospora crassa
MSSLRFLDLVKPFVPFLPEVQQPETKIPFNQKLMWTGLTLLIFLVMSQMPLYGIVSSDTSDPLYWLRMMMASNRGTLMELGITPIISSGMVFQLLAGTHMIDVNLDLKADRELYQTAQKLFAVILSIGTATVYVFTGLYGPPSDLGAGIVFLLILQLVVAGMIVILLDELLQKGYGLGSGISLFIATNICESIMWKAFSPTSINTGRGPEYEGAVIALFHLLMTWDNKQRALYEAFYRQNLPNIMNLLATLVVFAAVIYLQGFRVEIPVKSSRQRGARGSYPIRLFYTSNMPIMLQSALSSNVFLISQMLYSRFSENLLVRLFGVWEAKEGTAQLSAVSGLVYYMSPPLNFKDALLDPIHTAVYIAYMLTACAVFSKTWIEVSGSSPRDVAKQLKDQGLVMAGHREQSMYKELKRIIPTAAAFGGACIGALSVASDLMGALGSGTGTLLAVTIIYGYFEIAAKEGDLQGMKGMIMG

SEQ ID NO: 50022 - protein, 261 aa, Candida albicans
MSLPASFDLTPEDAKLLLAANVHLGAKNVQVHNKPYVYKTRPDGMNIINIGKTWEKIVLAARIIAAVPNASDVAVCSSRTFGQRAVLKFAAHTGATAIAGRFTPGNFTNYITRSFKEPRLVVVTDPRTDAQAIKESSYVNIPVIALTDMDSPSEYVDVAIPCNNKGKHSIGLIWWLLAREVLRLRGIIPDRTTEWSVMPDLYFYRDPEEIEQNAVEEAKTEEVEEAPVAEAETEWTGETEDVDWADSGATPAAEDAAASNW

SEQ ID NO: 50023 - protein, 409 aa, Lactococcus lactis subsp. lactis Il1403
MTNRVVISGYGVVSAIGNSPEEFWNNLKAGKTGIGPITHFDAEATGISVAAEVKEFPFDKYFQKKDARRMDTFSLYAVYAALDAMEMSGITEENTNFDRLGCIMASGIGGLEQSQKNSQAIVAKGPRKGVAPLYVPLAIANMATGNVALRTGARGVSRAEVTACAAGANSIGSAFREIKHGYADAMIAGGAEAAICELGIAGFANLTALTKETDPEKACIPFDKNRSGFVMGEGSGVLILESLEHAQARGANILAEIVGYGNTNDAFHMTTPSGVGAENAIKLALEEAGASPADVDYVNAHGTSTHANEETESKAIHNVIGDKAYVSSTKALHGHALGATGAIEAVATVQALLNQYAPVNAGTTELDEGMTINVVLGEGKPADINLALSQDFGFGGHNAVLAFKKWTGE

SEQ ID NO: 50024 - protein, 400 aa, Chlamydia trachomatis D/UW-3/CX
MSLFEQLPSFSPDSILGLAQAFQEDPREDKINLLLGTYEREKKRYGGFSSVRKAQSVFFDDEKDKNYLPIKGSSTFLEEMAALCFGEVDASRWVGVQAIGGTGALHLGASVYANASLAGKVYIPSQTWGNHSRIFAHQGLALEYYPYYDQETKELDLQGLKAILRSAPETSLVLLHCCCHNPTGKDIPLSEWPEIITIIKERDLIPFFDMAYLGFASGIEEDRRPVRLCIEAGVTTFVAGGASKIFSLYGSRVGFFGAIHQDKLDLNRILSFLEEQIRGEYSSPAREGVAIVTSILSNPYLRQEWELELNGIRQSLEEIRSSFVIAMRNVAGHSFDFIASQKGFFGYPGFSKEQVLFLREELGIYTTAGGRFNLNGITDKNINRVTHGFAQAYEYPRSVS

SEQ ID NO: 50025 - protein, 490 aa, Buchnera aphidicola
MKNYFNSLNFRQKLINLQKCKLIDNQFLSEKNNVLKGKNIVIVGCGSQGLNQGLNMRDSGLNISYALRDDSIFNKNQSWINATSNGFFVGTYENIIPTADLVINLTPDKQHEQVVNVLQKFMKPNSVLGFSHGFNIVEVGQLIRNDITVIMVAPKCPGTEVREEYKRGFGVPALIAVHSENDPHDIGFEIAKSWAISIGSHHAGILHSSFIAEVKSDLMGEQTILCGMLQASSLVCYNQLIFQGVNPSYAGKLIQTGWEVITESVKHGGITLMLDRLSNTAKIRAYFLSKKLKKIFFPLFRKHMDDIISGEFSKNMMFDWKNNDQQLKEWRTEIQNTDFEKCNIYYKQIPEQEYFDNGLLMVAILKAGIELSFEIMIETGIKEESAYYESLHELPLIANTIARKRLYEMNLVISDTAEYGSYLFSHAAIPLLKKFMNELQPGDLGNKISTSELDNITLYKVNAKIESHPIEIIGKKLRLYMTSMVPIKTK

SEQ ID NO: 50026 - protein, 73 aa, Arabidopsis thaliana
MENKFFAAFFLLLVLFSSQEIIGGEGRTCQSKSHHFKYMCTSNHNCAIVCRNEGFSGGRCHGFHRRCYCTRLC

SEQ ID NO: 50027 - protein, 154 aa, Magnaporthe grisea
MQIFVKTLTGKTITLEVESSDTIDNVKSKIQDKEGIPPDQQRLIFAGKQLEDGRTLSDYNIQKESTLHLVLRLRGGGKKRKKKVYTTPKKIKHKHKKVKLAVLSTTRSTVTERLSASAASCPNETCGAGIFMAAMQDRQYCGRCHLTYVFDKKD

SEQ ID NO: 50028 - protein, 379 aa, Magnaporthe grisea
MQIFVKTLTGKTITLEVESSDTIDNVKSKIQDKEGIPPDQQRLIFAGKQLEDGRTLSDYNIQKESTLHLVLRLRGGMQIFVKTLTGKTITLEVESSDTIDNVKSKIQDKEGIPPDQQRLIFAGKQLEDGRTLSDYNIQKETTLHLVLRLRGGMQIFVKTLTGKTITLEVESSDTIDNVKSKIQDKEGIPPDQQRLIFAGKQLEDGRTLSDYNIQKESTLHLVLRGGMQIFVKTLTGKTITLEVESSDTIDNVKSKIQDKEGIPPDQQRLIFAGKQLEDGRTLSDYNIQKESTLHLVLRLRGGMQIFVKTLTGKTITLEVESSDTIDNVKSKIQDKEGIPPDQQRLIFAGKQLEDGRTLSDYNIQKESTLHLVLRLRGGQ

SEQ ID NO: 50029 - protein, 242 aa, Shigella dysenteriae
LKERKEGAFVPFVTLGDPGIEQSLKIIDTLIEAGADALELGIPFSDPLADGPTIQNATLRAFAAGVTPAQCIEMLALIRQKHPTIPIGLLMYANLVFNKGIDEFYAQCEKVGVDSVLVADVPVEESAPFRQAALRHNVAPIFICPPNADDDLLRQIASYGRGYTYLLSRAGVTGAENRAALPLNHLVAKLKEYNAAPPLQGFGISAPDQVKATIDAGAAGAISGSAIVKIIEQHINEPEKML

SEQ ID NO: 50030 - protein, 605 aa, Oryza sativa
METHIGSVDGAAAAADNGAVGCPASAVGCPMTSARPAPVSAGEASLGRHLARRLVQVGVSDVFAVPGDFNLTLLDHLIAEPGLRLVGCCNELNAGYAADGYARARGVGACAVTFTVGGLSVLNAIAGAYSENLPVICIAGGPNSNDYGTNRILHHTIGLPDFSQELRCFQTVTCHQAVVTNLEDAHEQIDTAIATALRESKPVYLSISCNLPGLPHPTFSRDPVPFFLAPRLSNKMGLEAAVEATVEFLNKAVKPVLVGGPKLRVAKAGKAFVDLVDASGYAYAVMPSAKGLVPETHPHFIGTYWGAVSTAFCAEIVESADAYLFAGPIFNDYSSVGYSFLLKKDKAIIVQPERVIVGNGPAFGCVMMKEFLSELAKRVNKNTTAYENYKRIFVPEGQPLESEPNEPLRVNVLFKHVQKMLNSDSAVIAETGDSWFNCQKLKLPEGCGYEFQMQYGSIGWSVGALLGYAQGAKDKRVIACIGDGSFQVTAQDVSTMIRCAQNSIIFLINNGGYTIEVEIHDGPYNVIKNWNYTGLVDAIHNGEGKCWTSKVKCEEELTEAIGMALGEKDCLCFIEVIAHKDDTSKELLEWGSRVSAANSRPPNPQ

SEQ ID NO: 50031 - protein, 588 aa, Salmonella enterica subsp. enterica serovar Typhi Ty2
MKLPVREFDAVVIGAGGAGMRAALQISQSGQTCALLSKVFPTRSHTVSAQGGITVALGNTHEDNWEWHMYDTVKGSDYIGDQDAIEYMCKTGPEAILELEHMGLPFSRLDDGRIYQRPFGGQSKNFGGEQAARTAAAADRTGHALLHTLYQQNLKNHTTIFSEWYALDLVKNQDGAVVGCTALCIETCEVVYFKARATVLATGGAGRIYQSTTNAHINTGDGVGMALRAGVPVQDMEMWQFHPTGIAGAGVLVTEGCRGEGGYLLNKHGERFMECYAPNAKDLAGRDVVARSIMIEIREGRGCDGPWGPHAKLKLDHLGKEVLESRLPGILELSRTFAHVDPVKEPIPVIPTCHYMMGGIPTKVTGQALTVNEQGEDVVIPGLFAVGEIACVSVHGANRLGGNSLLDLVVFGRAAGLHLQESIAEQGVLRDASESDVEGSLDRLNRWNNNRNGEDPVAIRKALQECMQHNFSVFREGDAMAKGLEQLKVIRERLKNARLDDTSSEFNTQRVECLELDNLMETAYATAVSANFRTESRGAHSRFDFPERDDANWLCHTLYQPQTESMTRRSVNMEPKLRPAFPPKIRTY

SEQ ID NO: 50032 - protein, 130 aa, Oryza longistaminata
MSERRRREKLNEMFLILKSVVPSIHKVDKASIFAETIAYLKELEKRVEELESSSQPSPCPLETRSRRKCREITGKKVSAGAKRKAPAPEVVASDGDTDGERRHCVSNVNVTIMDNKEVLLELQCQWKELL

SEQ ID NO: 50033 - protein, 670 aa, Penicillium janthinellum
AAAQRRQNDSSVFLAIMVAAAVESESSLTDGDAGALLLQDISEWDEVFRFDRLEAVERAAHAAAAAAFGAFVARGDWTASAAAAFQAAGKQIAFMAAFSTVAGAKGSATVRDADAFAAKFASAAALQELVGNNSPISFFIFDLLFAAILFASKAKAANQAAFAAAAELAAESLFVRLPSLHQVSFFALAGFAAVAAHRHMNGYGSHTFKLVAKDGSVYCSKFWYKADQGQAAEVWKDAEEVAAEDVDYFRDLNFQAEAAGRYPLWELASQVMTFSDFEIDPFNENIPTKVVPRESVPLIVDAELLLNRNPLNMFAEVEQVFMDVAAASKGADEVEDPLIQRQFAYIDTHLSELTASYGIPVCRPYATVLNDQEDGARYDDVQDVLVIAPNAFSASAVEVQIPAAAAFNLAAARVAAAGDVRVNAVVEADQRKQSRQFWASDVNAQKKRLVDAFRMEVASAVSASIQVDVTVEFSFVAAAAAARIAAAVGSAAAGALANRRQIKVIASLAVLAKADAKVRQKNALESSSQAVAVDAKAAAQDIVDSSDAANVVTVAREFAVLPQTAAADAAEFVAAASAKAFSSFPAMEVISVAAAAGAVAEPARASLDLNMAMFFSRIVASRGAAANAIAALVKASRDGVFVAAVLAKAAANNRAAEAIFKFEVRQAVDA

SEQ ID NO: 50034 - protein, 118 aa, Oryza longistaminata
MSERRRREKLNEMFLILKSLVPSIDKVDKASIPLEPIPSSKELKRRFQELESGKKLSSPPKRKPCSETIIGGGDAGAVKEHHHWVLSESQEGTPSDVRVIVMDEDELHLEVHCRWKEL

SEQ ID NO: 50035 - protein, 242 aa, Shigella dysenteriae
LKERKEGAFVPFVTLGDPGIEQSLKIIDTLIEAGADALELGIPFSDPLADGPTIQNATLRAFAAGVTPAQCFEMLALIRQKHPTIPIGLLMYANLVFNKGIDEFYAQCEKVGVDSVLVADVPVEESAPFRQAALRHNVAPIFICPPNADDDLLRQIASYGRGYTYLLSRAGVTGAENRAALPLNHLVAKLKEYNAAPPLQGFGISAPDHVKAAIDAGAAGAIFGSAIVKIIEQHINEPEKML

SEQ ID NO: 50036 - protein, 211 aa, Agrobacterium tumefaciens
MIHSFDLGPQSSETHNEKLDRSISRKGADPGAVIWLTGLSGSGKSTVAVSVDRILHERGRSSVVLDGDIIRRGLSKDLGFEHRDRYENVRRIAEVAKLLAEAGFTVLVSCISPLEKDRQSARRIIAPVRFLEVFVETPIEECIRRDPKGLYRKALSGEIKNFTGISSPYEAPLKPDLCIRTADADSETLAALVVRTVCERGDAAFAFHQSG

SEQ ID NO: 50037 - protein, 341 aa, Geobacillus kaustophilus HTA426
MAKVYYNGDANEQYLQGKTVAIIGYGSQGHAHAQNLRDSGVRVIVGLRKGKSWEQAEQDGFEVYSVREAAKQADIVMVLLPDEKQPAVYKEEIEPELEPGNALVFAHGFNIHFSQIVPPNHVDVFLVAPKGPGHLVRRTYTEGAGVPALIAVYQDVTGHARETALAYAKAIGAARAGVLETTFKEETETDLFGEQAVLCGGLTALIKAGFETLVEAGYQPEVAYFECLHEMKLIVDLLYEGGLSWMRYSISDTAQWGDFITGPRIINDAVKAEMKKVLDDIQTGKFAKSWILENQANRPEFNAINRRENEHLIEIVGRELRSMMPFVKAKQVEAVVPGAKN

SEQ ID NO: 50038 - protein, 82 aa, Brassica napus
  misc_feature (63)..(63): Xaa can be any naturally occurring amino acid
  misc_feature (77)..(77): Xaa can be any naturally occurring amino acid
  unsure (1)..(82): unsure at all Xaa locations
MSASKFIKCVTVGDGAVGKTCMLICYTSNKFPTDYIPTVFDNFSANVSVDGQIVNLGLWDTAXQEDYSTLRPLSYRXADIFV

SEQ ID NO: 50039 - protein, 126 aa, Oryza officinalis
MSERRRREKLNEMFLILKSVVPSIHKVDKASILAETIAYLKELEKRVEELESNNQLSPCALETRRRKCSEITGKKVSAGAKRKASAPEVASDDETDGERHCVSNVNVTIMDKEVLLVVQCQWKELL

SEQ ID NO: 50040 - protein, 427 aa, Salmonella enterica subsp. enterica serovar Typhi Ty2
MADTKAKITLTGDTAIELDVLKGTLGQDVIDIRSLGSKGVFTFDPGFTSTASCESKITFIDGDEGILLHRGFPIDQLATDSNYLEVCYILLYGEKPTQEEYDEFRTTVTRHTMIHEQITRLFHAFRRDSHPMAVMCGITGALAAFYHDSLDVNNPRHREIAAFRLLSKMPTMAAMCYKYSIGQPFVYPRNDLSYAGNFLNMMFSTPCETYEVNPVLERAMDRILILHADHEQNASTSTVRTAGSSGANPFACIAAGIASLWGPAHGGANEAALKMLEEISSVKHIPEFVRRAKDKNDSFRLMGFGHRVYKNYDPRATVMRETCHEVLKELGTKDDLLEVAMGLEHIALNDPYFIEKKLYPNVDFYSGIILKAMGIPSSMFTVIFAMARTVGWIAHWNEMHTDGMKIARPRQLYTGYDKRDFKSALKR

SEQ ID NO: 50041 - protein, 495 aa, Zea mays
MAMAAIASPSSRTLIPPRHHGAAPSPSTSGDSSLRLLCAHPRHGRRGRAMSVSTPAARSRPFVFSPRAVSDSKSSQTCLDPDASTSVLGIILGGGAGTRLYPLTKKRAKPAVPLGANYRLIDIPVSNCLNSNISKIYVLTQFNSASLNRHLSRAYGNNIGGYKNDGFVEVLAAQQSPDNPNWFQGTADAVRQYLWLFEEHNVMEFLILAGDHLYRMDYEKFIQAHRETDADITVAALPMDEKRATAFGLMKIDEEGRIIEFAEKPKGDQLKAMMVDTTILGLDDERAKEMPYIASMGIYVFSKDVMLQLLREQFPGANDFGSEVIPGATSIGKRVQAYLYDGYWEDIGTIEAFYNANLGITKKPIPDFSFYDRSAPIYTQPRHLPPSKVLDADVTDSVIGEGCVIKNCKIHHSVVGLRSCISEGAIIEDTLLMGADYYETEADKTAVAVTAPPHAARPFSAVAASSLRPTADGDGDGRDGRHLHGLDPGRRYVPR

SEQ ID NO: 50042 - protein, 129 aa, Oryza rufipogon
MSERRRREKLNEMFLILKSVVPSIHKVDKASILAETIAYLKDLEKRVEELESSSQPSPCPLETRSSRKSREITGKKVSAGAKRKAPAPEVASDDDTDGERRHCVSNVNVTIMDNKEVLLELQCQWKELL

SEQ ID NO: 50043 - protein, 506 aa, Oryza sativa (japonica cultivar-group)
MAAAGGGGDAKYNSYKAAGLRGAILEAAHVSCLEDRYALGPQLGWGQFGVIRSCSDMVTGEALACKSIAKDRLVSPDDVRGVKLEIEVMARLSGHPNVVDLKAVYEDEASVHLVMELCAGGELFHRLEERGCFSEHEAAALFRYLMEVVAHCHSKGIVHRDLKPENILLVSKSPSSPIKLADFGLATYIQPGRSLSGMVGSPFYIAPEVLAGGYNEAADVWSAGVILYILLSGIPPFWGKTKSKIFECIRSTELRFPSDPWDKVSDSAKELITEMLRRDPRQRLTAKQVLEHSWIQDHADQSQDSCGHCHEINLRGEDAGSCSFSTPLASCSRDVSFNTGGPVACQSMSEEACSPTFACRSSFSAFVAENAPSCALSGFSFGGVCEPCNAVFPSPVASMPSFSFFCGQEPGEPESSPDGDALGEKAHCDATVVALVSSSAPRTAEVLRAAVRANPSRAIGMNSRRNHTIGAGEREHLDVAVAESVIRWASCTNLSTTHSLRASLVC

SEQ ID NO: 50044 - protein, 432 aa, Juglans nigra
MAHILTPTTRWQMRITKNSANASPMTAKMWGSLLLKQNKKGSSKSSAKFRVFATKSENSTVNRIEKLLNLDLTPYTDKIIAEYIWIGGSGIDLRSKSRTISKPVEHPSELPKWNYDGSSTGQAPGEDSEVILYPQAIFKDPFRGGNNILVICDTYTPAGEPIPTNKRHRAAEIFTNKKVADEVPWYGIEQEYTLLQQNVKWPLGWPVGGYPGPQGPYYCGAGADKSFGRDISDAHYKACLYAGINISGTNGEVMPGQWEYQVGPSVGIEAGDHIWCSRYILERITEQAGVVLSLDPKPIEGDRNGAGCHTNYSTKSMREDGGFEVIKKAILNLSLRHKDHISAYGEGNERRLTGKHETASINTFSWGVANRGCSIRVGRETEKQGKGYLEDRRPASNMDPYIVTSLLAETTILWEPTLEAEALAAQKLALNV

SEQ ID NO: 50045 - protein, 121 aa, Oryza rufipogon
MSERRRREKLNEMFLILKSLVPSIDKVDKASILSETIDYLKGLERRFQELESGKKLSSPPKRKPCSETIIGGAAARGAGAVKEHHHWVLSESQEGTPSDVRVIVMDKDELHLEVQCRWKEL

SEQ ID NO: 50046 - protein, 315 aa, Glycine max
MKRLGSSDTLGALMTICPPTDEHSPRNNHVYGKEFQSMLEGLDEEGCVEEAGHHSEKKRRLNVDQVKALEKNFEVENKLEPDRKVKLAQELGLQPRQVAVWFQNRRARWKTKQLERDYGVLKANYGSLKLNFDTLQQDNEALLKQIKELKSRLVQEENNNNTESDVSVKEEMIATLQDSNPLCESAIPGSDSKELSYECFNKSDEVGGGSVFPVDFKDGSSDSDSSAILNEENNNHSPNNNAAISSCGVLQSHGLLSSPSSSSMNNCFQFQKQYQTTTQYVKMEEHNFLSADEACNFFSDEQAPTLQWYCSEEWS

SEQ ID NO: 50047 - protein, 407 aa, Neurospora crassa
MTDPTISTTIASAIQSNKSEIALINTHIHSNPELAYLEFTAHSTLVHSLRRLGGFTITSPAYGLPTSFEAEYGSGGRLIIFNAEYDALPEIGHACGHNLIASASLAAFLGVAAALKQSGQPGRVRLLGTPAEEGGGGKLKLIEAGAYKGCDACLMVHPGPQSKLPPGINAVSYVRMLANVKYRVYFTGREAHASIAPWHGVNALDAVCLSYNAVSMLRQQIRPEERIHGIFREAGTRPNVTPADCCVEYYVRSTTRRGAEELGKRVLKCFEGAALATGCEWRKEDLPAYFDVRPSKPLCKAWMEAVQPAGSVAWEDPTDFFQGSTDMGNVCYECPGFHGVFGIETEDGAANHTKGFTKGAGTQDAFERALECGRAMAEVGWRVLADEEFAADVRREWEVDMKVAGGN

SEQ ID NO: 50048 - protein, 785 aa, Desulfovibrio vulgaris subsp. vulgaris str. Hildenborough
MRTHNLGFPRIGAGRELKKAVEGYWKGRVSRHALEGEAARLRACHWAMQRDAGIDVVPVGDFALYDHMLDLTLMLGAIPPRFSPSGAAASPAGTGQDIDLMFRMARGEAGLSPVAPLEMTKWFDTNYHYLVPELDADTAFAPDASPLVAQLREAQDAGFTPKAVLPGPLTWLWLARSVDGSDRFALLPALCDAYATLLRELTSACPPACPRGYSSGGLMVQLDEPVLALDLPQTVRDLFPAVYTRLRAAVPDATLMVASYFAPCADNLPVALNLPVDVLHLDLVRGRDDLDAALQVLGAGEGTPGLALSLGVVDGRNVWCADIDAAVNLVRRAADSLGEDRVWVAPSCSLLHCPVDLGSERELDPEVARWLAFARQKCAEVRLVAEVVRGVYGPSTAASLEANREVRRQRAVSPRIHDPAVASRLAAVTSDMEHRTSPYAERIVAQRAALHLPTLPTTTIGSFPQTPDIRAARRALRDGSLTQDAYEAAMRDALAMMVREQEALGLDVLVHGEPERNDMVEYFGGLLQGFCITSDGWVQSYGTRCVKPPLLYGDVSRPEPMTVAWSAYARSLTARPMKAMLTGPVTIACWSFVRDDISRETVLRQLALALRDEVADLESAGLAVVQVDEPALREGLPLRRAAQEAYLDAAVRAFRLATSGVADATQLHTHMCYCDFHDIIDRIAGMDADVISLEASRSRMELLDVFATHGYPNEVGPGVYDIHSPRVPSVDEMEALLLRAAAVLPVDRLWVNPDCGLKTREWPETRAALANMVEAARRVRARLDA

SEQ ID NO: 50049 - protein, 762 aa, Bordetella bronchiseptica RB50
MKKPQNLAGAGRREVPAEWRDAIHSHLDAGETVLAWLETDLDARLRFETGMVLATDRRILACAPGRREWSSWPYSPDLRLALHDHAGAASLELDAGARRLASWRFTLGRNPAAQRLLEQFESLQALRLAGAAPTAGESPRPCPTCQAPIPADREDCPECSQEPAAPPATWALLRLWRFARPYRGALLAGFLLTLLGTAATLVPPYLTMPLMDDVLIPFQNGAPIDYAKVRLYLAGLLASAVLAWGLGWARTYILAWVSERIGADLRTTTYEHLQQLSLEYFGGKRTGDLMARIGSETDRICVFLSLHLLDFATDVLMIAMTAAILVSINPWLALATLVPLPFIMWMIHVVRDRLRHGFEKVDRIWSEITNVLADTIPGIRVVKAFAQERREVQRFREANNRNLEVNDRVNTVWSLFSPTVTLLTEIGLLIVWIFGIWQVSQKHITVGVLAAFLAYIGRFYTRLDSMSRIVSVTQKAAAGAKRIFDILDHVSSVPEPHKPVHLPRVNGHIELRDVGFRYGNRSVIRGLDLSIAPGEMIGLVGHSGSGKSTLINLICRFYDVSEGAVLVDGVDIRSLRIADYRRNIGLVLQEPFLFFGTIADNISYGKPDATRAEIIAAARAAHAHEFILRLPHGYDSLVGERGQALSGGERQRISIARALLIDPRILIMDEATSSVDTTTEKEIQKALDNLVRGRTTIAIAHRLSTLRRADRLVVLDRGQIVEEGAHEALMAREGAYYRLYQAQQTRQAEGGDDGSDAIAAIA

SEQ ID NO: 50050 - protein, 370 aa, Glycine max
MALGDDAQHHSHSPSFLDSLLCEERETFEEDFDANGDECETENNDPSVIKSQPLPLVLYDNDLFWEDDELVSLIAKEGETHLRSFSDGALEGPRVEAVNWVSKVSGHYGFSALTTVLAVNYFDRFITSLKFQRDKPWMTQLAAVACLSLAAKTEETHVPLLLDLQVEESRFVFEAKTIQRMELLVLSTLKWRMLPVTPISFFEHIVRRLGLKSRLHWEFLWRCERVLLNIIADSRVMSYLPSTLAAATMIHVIKEIESFNATEYIDQLLGLLKISEEQVNKCYRIIQKLLGCHEGIYGLPQKCKRLSELGSPSAVTDASFSCDSSNDSWAVSSSVSLSLEPQLKRRRSQDQQMRLPSVSRVSIDVLNSPH

SEQ ID NO: 50051 - protein, 99 aa, Corynebacterium efficiens
MANVNIKPLEDKILVQINEAETTTASGLVIPDSAKEKPQEATVIAVGPGRFDEKGERIPLDIKEDDVVIFSRYGGTEIKFDGVEYLLLSARDILAIVEK

SEQ ID NO: 50052 - protein, 608 aa, Leifsonia xyli subsp. xyli str. CTCB07
MNLSETPALVPADPEANATDLLVQRVQATPDAALFSLPNGASWTDVTAAEFHRQVVELAKGLAAAGVQPGDKIGLMCKTRYEWSLIDFAVWFAGAVLVPIYETSSPAQIQWNMADSGANTIILENAEMFSRFDEVHADLPLVQNFWQLHLGDLGKLATTGAAVPDEEIERRRNLARGEDIGTLIYTSGSTGRPKGCVLTHSNFVELARNSAEALQEVVKQPGASTLLFITTAHVFARFISVLCVTAGVKVGHQADTKQLLPALASFKPTFLLAVPRVFEKVYNSAEQKAEASGHGKIFRAAAEVAFEHSRAVETGRVPFGLKVKFALYDRLVFSKLRAAMGGRVIYAVSGSAPLGSHLGHFFHSLGIKILEGYGLTETTAPATVNRPGTFKIGTVGPSLPGVDLRLADDGEIQVRGVNVFKEYWQNPEATAEAFEDGWFRTGDLGSFDADGFLTITGRKKEMIVTAGGKNVSPAALEDPIRAHPLVGQVVVVGDQRPFISALVTLDTEMLPVWLANNGENRDMTLAEASVNPAVNEEIQRAIDAANTRVSRAESIRKFVVLATELTEASGHLTPKLSIKRSVILADFADVIDRLYSDNPKTQGISLSH

SEQ ID NO: 50053 - protein, 504 aa, Staphylococcus epidermidis ATCC 12228
MKIRKRLDTYYTTIFLSTNSNYSYLSKEESRMTGEVKKYVDLLVIGAGSGGYVAAIRAAQLGKKVVLVDKAELGGVCLNRGCIPSKALISASERVKHIKHANTMGLKVSGEVQVDMPEVVKWKDGIVNKLTDGIRTLLKGNGVEVISGEAYLTEAHIAKIKIEDEEQIFSYKDLILAIGSLPVELKSMPFDQKRIISSTEALQLQEVPNHLVVVGGGYIGLELGTAYAKFGAKVTILEGSDTILSGTDPILTKTVKRHLKEIGITVITDALVQGGENTGDEVNVHVQVDGKEEIIQCDYCLVSIGRKPNTGKIGLENIGVVLDDQGFIKINNKCQTNIEHVYAIGDCAGGDLLAHKASYEAKIAAEVISGQNSVIDFQAMPFVIFSDPEVAYTGLTEKEAKEKGYETVSSRFPFQANARALSVSDADGFVQVVAEKNTKRVLGVQMVGPEVSSLIAEAVFAIEAGANAEDLSLTIHAHPTLPEPLMEAAEGVMGHATHMLNKKQ

SEQ ID NO: 50054 - protein, 477 aa, Methanosarcina acetivorans C2A
MWEEGGSILDYGEPETLEKWRNSEKTEKSEDPMRKQETELDFFEQEIGLLDVVGPRAREIIGQDCKVMSACVSRPYPLVVDRAKGSVIKDIDGKEYIDFIAGIAVMNSGHSNPEVNAAISAQLEKMVHCGYGDFFAEPPLKLAKKLRELSGYSKVFYCNSGTEAVEAAMKLALWKTKRPNFIAFYNAFHGRTLGALSLTCSKVRQKEHFPTMRTVHTHYAYCYRCPLNLEYPSCGVECAKQIENLIFRKELSPEDTAAVFIEPVQGEGGYIVPPQEFHKEVKRICTDNDVLLIADEVQTGCFRTGPFLAMENFEVRADITCLAKALGAGLPIGAMLADSTLMDWPPGVHSNTFGGNLLSSASALASLEFLEKENMENRVREMGTHIRQRLRELQENCPCIGDVRGLGLMIGAEIVKSDKSIDPIRRDRIVREAFKEGVLLLPCGDSVIRFSPPLVMTDEEADLGLDKFEKALRRAAK

SEQ ID NO: 50055 - protein, 503 aa, Methanosarcina acetivorans C2A
MVLYSLFQGDFVVQEYKLHIGGESRDSATGETFDNINPATLENLATVQVAGSEDVDRAVEAAEEGFRVWSEVPAPRRAEVLFRTARILQERKEDLARLMTEEMGKVLPETRGDVQEAIDIAIYAAGEGRRMFGETTTSELKDKFCMTVLRPIGVVGMITPWNFPLAIPGWKIMPALIAGNAIVFKPASDTPLLAIKLVEILMEAGLPPGVVNLVTGPGGSTGKAIVQHPRIKAISFTGSLETGKWIMEECAKTMKRVSLELGGKNPVIIMDDADLELALEGVLWGAFGTTGQRCTATSRLILHEKIKDEFTARLLAKTKLLRVGNGLLPETDIGPIINKAQLEKIERYVRIGMEEGATLLLGGKAIDPGLPGYFFEPTVFTDVRPDMRIAQEEIFGPVLSIITVSGLEEAIEVANNTRYGLSSAIYTENVGKAFRAVKKIEAGITYVNAPTIGAEVHLPFGGVKGTGNGFREAGTEAIKEFTEIKAVYIDYSGRLQRAQIDME

SEQ ID NO: 50056 - protein, 728 aa, Neurospora crassa
MTSQPSSGKGRGRNLSIDEYNVYDDAKTYYTTEDRHHNHRAGARTRTYSQNSLFKQFERLGLQKEPYRRGSHDESTIPQSRRFLIQVEPTLQSLQSQEDTDGNMQITIEDNGPKVLSLRTAASNGYNRFDIRGTYMLSNLLQELYLAKEYGRKQIILDEARLNENPVNRLSRLIKDHFWEGLTRRIDASSIEIAARDPKDWTDDPRPRIYIPRGAPEQHEYYTKVALDRPELRLDVQYLPEKITPEIVRDMNAKPGLLAVDMEEVVDPKTGEKTLRGRPFVVPGGRFNELYGWDSYMESLGLLVNDRVDLAKSMVQNFCFCIKHYGKILNATRSYYLCRSQPPFLTDMTLRVYDKIKHEPGALEFLRQSLLAAIKEYYSVWTAEPRLDPVTGLSRYRPEGLGVPPETEAGHFIHILEPYAKKHNMSFDEFVYAYNHGEIKEPTLDDYFMHDRAVRESGHDTTYRFEGICADLATIDLNSLLFKYETDIARTIRNVFHDKFEVPDDWLATNNPAASKLETSAMWDRRAKRRKLAIDKYLWNEEAGMYFDYNTATRKQCNYESATTFWALWAGVSNPKQAAAMVTKALPKLEAFGGLLSGTKESRGEIGLERPNRQWDYPYGWAPQQILAWTGLYRYGFNEEAERLAYKWLFMITKAFVDFNGVVVEKYDVTRPIDPHRVDAEYGNQGLDFKGVAKEGFGWVNASYVYGLQIVNAHMRRALGTLTPYETL

SEQ ID NO: 50057 - protein, 455 aa, Exiguobacterium sp. 255-15
MEQQGLKRDLSNRHVQLIAIGGTIGTGLFLGSGKAIQLAGPSIVFAYLLVGIAIFFVMRALGELLLSKAGYQSLTDIAEDYLGPRAAFVTGWTYWFCWIMTAMADVIAVGVYVKYWFDIPQWIPAVIALLILLGFNLLTVKLFGELEFWFALIKVVTILALIGVGIVLLVIGFNTDAGPVTVKNLWQHGGMFPNGVTGFLLSFQMVVFAYVGVELVGVSAAETADPKKNIPSAINKIPLRILFFYVGALLVLLMINPWTGLNATESPFVKTFSLIGIPVAAGIINFVVLTSAASACNSGMFSTSRILYNLGNQKQAPQSFSKLNKNHVPANALFVSTLVVSGGALLSKLLPGQAFSIVTTISAICFIWVWGVILVCHLKYKKTQPELHAASTFKAPLTPFVNYLVLGLFTLILIVMLVADETRPALLLTPVWFIGLFILYQLRTKKHQKAERHSA

SEQ ID NO: 50058 - protein, 242 aa, Shigella dysenteriae
LKERKEGAFVPFVTLGDPGIEQSLKIIDTLIEAGADALELGIPFSDPLADGPTIQNATLRAFAAGVTPAQCIEMLALIRQKHPTIPIGLLMYANLVFNKGIDEFYAQCEKVGVDSVLVADVPVEESAPFRQAALRHNVAPIFICPPNADDDLLRQIASYGRGYTYLLSRAGVTGAENRAALPLNHLVAKLKEYNAAPPLQGFGISAPDQVKAAIDAGAAGAISGSAIVKIIEQHINEPEKML

SEQ ID NO: 50059 - protein, 408 aa, Bacillus licheniformis ATCC 14580
MTIGEMNIPKRTIMTPGPVEVHPRVLRALSSPVLGQFDPAFTDMMNDVMALLRQIFRTTNKWAFPIDGTSRAGLEAVLASLIKPGDRVLIPIFGRFGYLLAEICERYQADVYTMECPWGDVFEPKEVISEIKRTKPEIVAVVHGETSTGCIQPLEEIGRACRELDVLCVVDAVATIGGTDVNTDEWCLDAVVGGTQKCLSVPSGMAPITFNSRVEKRINERKKVERGIATREDIVLETGRLPISSNYFDLGMLMDYWSPRRLNHHTEATSMLYGLREGARVVLEEGLRERFSRHRLHETALIKGIKAMGLELFTEGRKKLPTVTCVKVPDRVDADLVRKMMLDDFGVEIASSFGPLAGKIWRIGTMGYSCRKENVLFTLAALEAVLIRTGASVSPGNALQAALDFYHE

SEQ ID NO: 50060 - protein, 185 aa, Oryza sativa
MADGPGSPGGGGGSHESGSPRGGGGGGGGGGGGGGVREQDRFLPIANISRIMKKAIPANGKIAKDAKETVQECVSEFISFITSEASDKCQREKRKTINGDDLLWAMATLGFEDYIEPLKVYLQKYREMEGDSKLTAKAGDGSVKKDVLGSHGGSSSSAQGMGQQAAYNQGMGYMQPQYHNGDVSN

SEQ ID NO: 50061 - protein, 427 aa, Mannheimia succiniciproducens MBEL55E
MTDSNTLFSRAQQVIPGGVNSPVRAFKGVGGTPVFIQKAKGAYIWDTDDKQYVDYVGSWGPMILGHNHPAILSAVIKTAENGLSFGAPTPIEIDLAELVCKLIPSMEMVRMVSSGTEATMSAIRLARGYTNRDKIIKFEGCYHGHADSLLVKAGSGALTLGQPNSPGVPADFAKHTLTCTYNDLESVKQAFEQYPQDIACIIVEPVAGNMNCVPPQNNFLQGLRELCNQYGAVFIIDEVMTGFRVALGGAQSYYNVEPDLTCLGKVIGGGMPVGAFGGKKEIMQFIAPTGPVYQAGTLSGNPIAMAAGLACLTELQKAGNQERLAQLTEKLALGLKALADKHHVPFTVNYVGGMFGLFFTDKAQVTCYQDVMACDTEKFKVFFHKMLDEGVYLAPSAFEAGFMSLAHTDADIDRTLTAADKAFAALA

SEQ ID NO: 50062 - protein, 358 aa, Moorella thermoacetica ATCC 39073
MTYMIPEKMKALVLFGPNDVRLVEKPVPKPGPGEVLVRVAACGICGTDVKIITKGMPKMPPYGEFTFGHEWAGTIVALGETVDEFQVGDRVAIEAHKGCGRCENCIDGKYTACLNYGRLDKGHRAAGMTVDGGFAEYAVQHVNSVYKIPDNITFNEATYVTTAGCALYAIDKSGGYIAGDTVLVIGPGPIGLSVVQGARSLGAEKIILMGTREDRLVKGRELGATHTINIREVADPVAEVMAITGGKGCKRVFECAGNSQSFEYGIKAAKKGGVMVLVSFYKEPVMANLDYVVLNQISLLTVRGEGNQNCKRALSLMAQGKIDAKPIMTHAFPLEEFQKGLDYFVNRKDGAMKVVINP

SEQ ID NO: 50063 - protein, 668 aa, Legionella pneumophila str. Lens
MNSFTELANAVRMLSIDAVNQAQSGHPGMPLGMADIATVLWKKFLKFNPQNPHWFNRDRFVLSNGHGSMLLYSLLHLTGYNLDIGELKNFRQLHSKTPGHPEHGHTPGVETTTGPLGQGLANSVGMALAERVLASTFNHDHFNLVDHYTYTFAGDGCLMEGISHEACSLAGTLGLGKLIVFYDDNGISIDGKVESWFTDDTTSRFKAYNWQVIGPIDGHDANQIEHAISEARENTTQPSLIICKTVIGLGSSVAGSEKAHGSPLSAQDISNVREFFNWKHASFEIPDSIYKQWNHKEQGEKEEQLWLQLLHEYQQQYPSEHDDFLRRANGDLPDDWQEISAGFLKQCLNNEKAIATRKASQQCIEFFAPILPEMFGGSADLTGSNNTDWSGSKAITAHNFSGNYLYYGVREFAMAAIMNGLAVHGGFIPYGGTFLVFADYARNAIRLSALMKQRVIYVLTHDSIGLGEDGPTHQPVEHIAMLRMTPGMTVWRPADLMETAVAWQQSLEHHNGPSALLLSRQNLPALAHGTDAADLIKKGGYIIADCEGKPDAILIATGSEVQLAITAAEKAKARGLQVRVVSMPCAEQFLAQSDDYKNQILPGQVRTRIAIEAASSAYWHQFVGFDGAVIGLDCFGVSAPATDAFNYLGITVEKIINTLDTLTKQTMV

SEQ ID NO: 50064 - protein, 242 aa, Shigella sonnei
LKERKEGAFVPFVTLGDPGIEQSLKIIDTLIEAGADALELGIPFSDPLADGPTIQNATLRAFAAGVTPAQCFEMLALIRQKHPTIPIGLLMYANLVFNKGIDEFYAQCEKVGVDSVLVADVPIEESAPFRQAALRHNVAPIFICPPNADDDLLRQIASYGRGYTYLLSRAGVTGAENRAALPLNHLVAKLKEYNAAPPLQGFGISTPDQVKAAIDSGAAGAISGSTIVKINEQHINEPEKML

SEQ ID NO: 50065 - protein, 586 aa, Oryza sativa
MEETPLPSGKNFRSQLAAAARSINWTYAIFWSISTSRPGVLTWKDGFYNGEIKTRKITNSMNLTADELVLQRSEQLRELYDSLLSGECGHRARRPVAALLPEDLGDTEWYYVVCMTYAFGPGQGLPGKSFASNEFVWLTNAQSADRKLFHRALIAKSASIKTIVCVPFIMHGVLELGTTDPISEDPALVDRIAASFWDTPPRAAFSSEAGDADIVVFEDLDHGNAAVEATTTTVPGEPHAVAGGEVAECEPNADNDLEQITMDDIGELYSLCEELDVVRPLDDDSSSWAVADPWSSFQLVLTSSPAPDQAPAAEATDVDDVVVAALDGSSIDGSCRPSPSSFVAWKRTADSDEVQAVPLISGEPPQKLLKKAVAGAGAWMNNGDSSAAAMTTQESSIKNHVMSERRRREKLNEMFLILKSVVPSIHKVDKASILAETIAYLKELEKRVEELESSSQPSPCPLETRSRRKCREITGKKVSAGAKRKAPAPEVASDDDTDGERRHCVSNVNVTIMDNKEVLLELQCQWKELLMTRVFDAIKGVSLDVLSVQASTSDGLLGLKIQAKFASSAAVEPGMITEALRKAIAS

SEQ ID NO: 50066 - protein, 242 aa, Shigella sonnei
LKERKEGAFVPFVTLGDPGIEQSLKIIDTLIEAGADALELGIPFSDPLADGPTIQNATLRAFAAGVTPAQCFEMLALIRQKHPTIPIGLLMYANLVFNKGIDEFYAQCEKVGVDSVLVADVPIEESAPFRQAALRHNVAPIFICPPNADDDLLRQIASYGRGYTYLLSRAGVTGAENRAALPLHHLVAKLKEYNAAPPLQGFGISTPDYVKAPIDAGAAGAISGSAIVKIIEQHINEPEKML

SEQ ID NO: 50067 - protein, 339 aa, Neisseria meningitidis
MKKILVTGGTGFIGSHTVVSLLKSGHQVVILDNLCNSSINILPRLKTITGQEIPFYQGDIRDREILRRIFAENRIDSVIHFAGLKAVGESVAEPMKYYDNNVSGSLVLAEEMARAGVFSIVFSSSATVYGDPGKVPYTEDMPLGDTTSPYGTSKSMVERILTDIQKADPRWSVILLRYFNPIGAHESGLIGEQPNGIPNNLLPYICQVAAGKLPQLAVFGDDYPTPDGTGMRDYIHVMDLAEGHVAAMQAKGGVAGVHLFNLGSGRAYSVLEIIRAFEAASGLNIPYQIQPRRAGDLACSFADPSHTKQETGWETKRSLAQMMEDSWRWVSRNPDGYGD

SEQ ID NO: 50068 - protein, 242 aa, Shigella sonnei
LKERKEGAFVPFVTLGDPGIEQSLKIIDTLIEAGADALELGIPFSDPLADGPTIQNATLRAFAAGVTPAQCFEMLALIRQKHPTIPIGLLMYANLVFNKGIDEFYAQCEKVGVDSVLVADVPIEESAPFRQAALRHNVAPIFICPPNADDDLLRQIASYGRGYTYLLSRAGVTGAENRAALPLNHLVAKLKEYNAAPPLQGFGISTPDQVKAAIGAGAAGAIFGLAIVKIIEQHINEPEKML

SEQ ID NO: 50069 - protein, 295 aa, Brassica oleracea var. botrytis
MAVSSTPWALVALFLMASSTVMAIPPRKAIDVPFGRNYVPTWAFDHQKQLNGGSELQLILDKYTGTGFQSKGSYLFGHFSMHIKLPAGDTAGVVTAFYLSSTNNEHDEIDFEFLGNRTGQPVILQTNVFTGGKGNREQRIYLWFDPSKAYHTYSVLWNLYQIVFFVDNIPIRVFKNAKDLGVRFPFNQPMKLYSSLWNADDWATRGGLEKTNWANAPFIASYRGFHIDGCQASVEAKYCATQGRMWWDQNEFRDLDAEQYRRLKWVRMKWTIYNYCTDRTRFPVMPAECRRDRDV

SEQ ID NO: 50070 - protein, 193 aa, Triticum aestivum
LKMLVSYVDNLPTGDEHGLFYALDLGGTNFRVLRVQLGGKEKRAVQQYEEVPIPPHLMVGTSTELFDFIAAELERFVETEGDDFHLPEGRHRELGFTFSFPVHQTSISSGTLVKWTKGFCINGTVGEDVVAELSSAMERQGLDMKVTALVNDTVGTLAGGIYADNDVVAAVILGTGTNAAYVEHANTIPKWHG

SEQ ID NO: 50071 - protein, 409 aa, Capsicum annuum
DSHYQGVYPVKCNQDRFVVEDIVKFGSPYRFGLEAGSKPELLLAMNCLSKGSADALLVCNGFKDTEYISLALIARKLLLNTVIVLEQEEELDLVIDISRKMAVRPVIGLRAKLRTKHSGHFGSTSGEKGKFGLTTTQILRVVKKLEGSGMLDCLQLLHFHIGSQIPTTELLADGVGEATQIYSELVRLGAGMKFIDIGGGLGIDYDGSKSSDSDVSVAYGIEEYASAVVQAVQFVCDRKGVKHPVICSESGRAIVSHHSIMIFEAVSASTTNVSPQLSSGGLQSLTETLNEDARADYRNLSAAAVRGEYDTCLLYSDQLKQRCVEQFKDGSLDIEQLAAVDSICDLVSKAIGVSDPVRAYHVNLSVFTSIPDFWAFGQLFPIVPIHRLDEKPTMRGILSDLTCDSEITS

SEQ ID NO: 50072 - protein, 500 aa, Arabidopsis thaliana
MLYFILLPLLFLVISYKFLYSKTQRFNLPPGPPSRPFVGHLHLMKPPIHRLLQRYSNQYGPIFSLRFGSRRVVVITSPSLAQESFTGQNDIVLSSRPLQLTSKYVAYNHTTVGTAPYGDHWRNLRRICSQEILSSHRLINFQHIRKDEILRMLTRLSRYTQTSNESNDFTHIELEPLLSDLTFNNIVRMVTGKRYYGDDVNNKEEAELFKKLVYDIAMYSGANHSADYLPILKLFGNKFEKEVKAIGKSMDDILQRLLDECRRDKEGNTMVNHLISLQQQQPEYYTDVIIKGLMMSMMLAGTETSAVTLEWAMANLLRNPEVLEKARSEIDEKIGKDRLIDESDIAVLPYLQNVVSETFRLFPVAPFLIPRSPTDDMKIGGYDVPRDTIVMVNAWAIHRDPEIWEEPEKFNPDRYNDGCGSDYYVYKLMPFGNGRRTCPGAGLGQRIVTLALGSLIQCFEWENVKGEEMDMSESTGLGMRKMDPLRAMCRPRPIISKLLL

SEQ ID NO: 50073 - protein, 135 aa, Zea mays
MSSSRRCSSPDSNDTTDERKRKRMLSNRESARRSRARKQQRLEELVAEVARLQAENAATQARTAALERDLGRVDGDNAVLRARHAELAGRLQSLGGVLEVLQMAGAAVDIPEMVTDDPMLRPWQPSFPPMQPIGF

SEQ ID NO: 50074 - protein, 334 aa, Arabidopsis thaliana
MATATSHQSVVSFASLRSSPSSTISQCGFKIDSSLSFTSKKTNFCKIKAMASSVSFNNTLLSPSKTIPDNSQKKSNEAALILIRHGESLWNEKNLFTGCVDVPLTEKGVEEAIEAGKRISNIPVDVIFTSSLIRAQMTAMLAMIQHRRKKVPIILHDESEQAKTWSQVFSDETKNQSIPVIPAWQLNERMYGELQGLNKQETAERYGKEQVHEWRRSYDIPPPKGESLEMCAERAVAYFQDNIEPKLAAGKNVMIAAHGNSLRSIIMYLDKLTCQEVISLELSTGIPLLYIFKEGKFMKRGSPVGPTEAGVYAYTKRLAQYRQKLEDDSEVLCA

SEQ ID NO: 50075 - protein, 180 aa, Glycine max
  misc_feature (41)..(41): Xaa can be any naturally occurring amino acid
  misc_feature (73)..(73): Xaa can be any naturally occurring amino acid
  misc_feature (83)..(83): Xaa can be any naturally occurring amino acid
  misc_feature (93)..(93): Xaa can be any naturally occurring amino acid
  misc_feature (127)..(127): Xaa can be any naturally occurring amino acid
  unsure (1)..(180): unsure at all Xaa locations
LIAFTLGEIGMGTHEQSKSLATLAQDNLHFLFFSAIGEDGXILILGNLSCQYAFALADLSDTEVMTGCITDVXRTLNYFLDDXNNTAEILFPXKVSFLIAVFILSVVNTFNADAYKAKLINVSADYXKMDTPIICKDGDICKSEDLEGGSDSADSVEQVTAVVLMVLEEERAINGDEKST

SEQ ID NO: 50076 - protein, 338 aa, Methylococcus capsulatus str. Bath
MQIYYDKDADLSIIQGKKVAIIGYGSQGHAHANNLKDSGVQVVVGLRPGSASAKKAENAGLAVASVEDAVKQADVIMILAPDEHQARLYNEQIAPNIKQGAALAFAHGFNIHFEQITPRADLDVIMIAPKGPGHLVRSTYTQGGGVPSLIAVYQNASGRAKELALSYASANGGGRAGIIETTFREETETDLFGEQAVLCGGATALVQAGFETLVEAGYAPEMAYFECLHELKLIVDLMYEGGIANMRYSISNTAEYGDLTRGPRIVTEQTKQEMKKILREIQTGEFAREFILENQAGAATLKAKRRLGREHLIESVGARLRDMMPWIKANRIVDTSKN

SEQ ID NO: 50077 - protein, 523 aa, Ustilago maydis 521
MVVVKYAQDEARHPPLPSRLRHSLSKQRQRSARIVSTASIAPEGKATLVSSISNLTNTIIGTGMLATPGAFKYTGLVLGPLLIVFCGFTAALGLYLLTRCAARVGGRKNSFFTIASQALPAGAWYFDLAIALKCYGVSISYLIICGQLMPQVIMSFFRAFNRDVHQIPQLFLDRSFWILALIILLIPLCFLRRLDSLRHTSYLSLLAVLYLVIIVLHYSFSSDAKATLPPKGEVELVNLSWHTISIFPVFVFAFTCAQNMLPVYNELFNNHERRVNSAIGSSIGTGATVYLIVGVLGYLSFGGNVGDNIIAMYPSTSLFVCFGRVSIIILTIFSYPLQVHPCRASLDKVFSRASRRQQILDDAAAASAMDGANEEADAIEPYHDDDEDAIDDEEAPLRPSSSQTTHQAAQASDDDIPLAKWCFMTAAILSTTFVISLLVDDLSIILGFVGSVGSTTISFILPGVLYASLFRDQPNSRLRKAAVALAAWGVIVLVVALSANILKLVHAQVPSSLLVTTVAKGRP

SEQ ID NO: 50078 - protein, 375 aa, Mycobacterium smegmatis
MTTATESEAPRIHKGLAGVVVDTTAISKVVPETNSLTYRGYPVQDLAAQCSFEQVAYLLWHGELPTDQLALFSQRERASRRIDRSMQALLAKLPDNCHPMDVVRTAISYLGAEDLEEDVDTAEANYAKSLRMFAVLPTIVATDIRRRQGLTPIPPHSQLGYAQNFLNMCFGEVPEPVVVRAFEQSMVLYAEHSFNASTFAARVVTSTQSDIYSAVTAAIGALKGSLHGGANEAVMHDMLEIGSAEKAPEWLHGKLSRKEKVMGFGHRVYKNGDSRVPTMKVALEQVAQVRDGQRWLDIYNTLESAMFAATRIKPNLDFPTGPAYYLMDFPIESFTPLFVMSRITGWTAHIMEQAASNALIRPLSEYSGQPQRSLV

SEQ ID NO: 50079 - protein, 292 aa, Gloeobacter violaceus PCC 7421
MKIRYGFRQVGDVEVFYREAGSSDAPVILLLHGFPTASHMFRDLIPLLADRFRLVAPDLPGFGQTKAPPRGTFDYTFDRLADVIEGFVDALSLDQYVLYIFDYGAPIGLRLAMRHSERISAIVSQNGNAYIEGFSDEWGTWESYWREPSAANREACRPSLAPDIIRNWQYGTGADPNLLSPDGYELDIAYMGRPGAEEIQLDLILDYRSNVALYPVFQSYFREHRPPLLAVWGRHDPAFLPAGAAAYQRDLPDAKIHLLDAGHFALETHAEEVAILIRTFLDSAIGSTTVKI

SEQ ID NO: 50080 - protein, 243 aa, Lactococcus lactis subsp. lactis Il1403
MKFSGKKVLITGAASGIGLAQTKVFLAEGAEVVAVDLQEFTDESIINSKNLSVKILDVSDAQSVEKLADEVGSIDVLLNTAGVLDAYKTLEETDFAEWQRILSTNLNSMYLMISAFLPKMKAQKSGVIINMASVAGLIAGGGGVAYTTSKHAIVGLTKQLALDEAQHGIQVAAIAPGAINTPMNAADFTENNGQMAQWVADETPAKRWASPREVADLTLFLASPQASYMSGAIVPIDGGWTIK

SEQ ID NO: 50081 - protein, 191 aa, Triticum aestivum
  misc_feature (37)..(37): Xaa can be any naturally occurring amino acid
  misc_feature (63)..(63): Xaa can be any naturally occurring amino acid
  misc_feature (65)..(65): Xaa can be any naturally occurring amino acid
  unsure (1)..(191): unsure at all Xaa locations
AQYPESRLVALNTIKEYADALRRGSGDGGVAAIVDEXMHMLKIFLSYHCDFRIVGQEFTKEGXWXFAFQRDSPLAADLSTAILQLSESGQLQRIHDEWFTRPSCSTDDTEVGATSLGLRSFWGLFLVCALICLLALLVFFIRVCWQYSRYSSSEAAGEPGAADAVGPTAAAANAVERQRRPSRFGSFRELV

SEQ ID NO: 50082 - protein, 622 aa, ASPERGILLUS NIDULANS FGSC A4
MARDGVALSAPVDRSYSRGSSPLAERAIARDLEQYADGTDSASTADDEASENSTIRPVRSQPGTAPHSLAGSYQRPSFFTTVSHATVVPYPYQPENSERLTWREREQAIEDERELLTDNHFLDPATSTRSRRGSRAPADETTSLLARRRSSGHSAANAEDIDRKWEEAVIAGLIHTTWRREAIVIGKNAAPLVVTFLLQYSLTVASIFTLGHLGKTELGAVSLASMSASITGYAVYQGLATSLDTLCAQAYGSGKKKLVGLQMQRMIFFLWVITIPIALLWFFADKILLKIVPEREVAELAGLYLKVVILGAPGYAAFESGKRYVQAQGIFSASLYVLLICAPLNAFMNWLFVWQFGWGFIGAPIAVAITDNLMPLFLFLYVYLVDGSECWNGLTRRALNNWGPMIRLALPGLLMVEAECLAFEVLTLGSSYLGTTPLAAQSVLATVSSITFQIPFTLSISSSTRVANLIGATLVDAAKTTAKVAMCGAVLVGLLNMVLISSLRYYIPRLFTSEVEVIELVAHVLPFCAAFQLFDALATNCNGILRGLGRQEIGGYVQLFCYYAIAMPISFGTAFGLHWGLFGLWSGVAIALCLVSGIEAVFLTQTDWNRSVEDAVRRNAAA

SEQ ID NO: 50083 - protein, 683 aa, Chlamydophila pneumoniae TW-183
MGISYSCCFYIEGLQGLLMINKELDIGILGKIAGAIKQISIESIQKASSGHPGLPLGCAELAAYLYGYVLRQNPRDPHWINRDRFVLSAGHGSVLLYSCLHLAGFDVSLEDLQEFRQLHSRTPGHPEYGETVGVEATTGPLGQGLGNAVGMALSMKMLESRFNRPGHEIFNGKIYCLAGDGCFMEGVSHEVCSFAGSLNLNNLVVIYDYNNVVLDGYLNEISVEDTKKRFEAYGWDVYEIDGYDFTHIHETFSSIKRGQERPVLVIAHTIIGHGSPKEGTNKAHGSPLGVEGTHETKQFWHLPEEKFFVPPAVKNFFAHKIQEDRKAQEQWLDEVRVWSKQFPELHEEFVALTSHKLPKNLESLVQSVEMPDSIAGRAASNKLIQVLVQHIPYLIGGSADLSSSDGTWIANEKVIHTYDFSGRNIKYGVREFGMATIMNGLAYSQVFRPFGGTFLVFSDYMRNAIRLAALSKLPVIYQFTHDSIFVGEDGPTHQPVEQLMSLRAIPGLYVIRPADANEVRGAWIAGLKHTGPTVIVLSRQALPTLPAAHRPFKDGVGRGAYIVLKESGEKPDYTLFATGSEVSLALSVAKELEHLDKQVRVVSFPCWELFEAQDVDYKQSIVGGDLGIRVSIEAGSALGWYKYIGSEGLAIAMDRFGYSGASDDVSEECGFTTEQILQRILSQ

SEQ ID NO: 50084 - protein, 730 aa, Arabidopsis thaliana
MFRPGGLCFEPITATWLYSELFTNGTLTGLTIHHLKPSKSQRTLADQIRRPSTVASSVMTIECVNPEGLRFNQMKSSSHQTLETRMRPILMKGHERPLTFLRYNRNGDLLFSCAKDHTPTVWFADNGERLGTYRGHSGAVWCCDISRDSSRLITGSADQTAKLWDVKSGKELFTFKFGAPARSVDFSVGDHLAVITTDHFVGTSSAIHVKRIAEDPEDQVGDSVLVLQSPDGKKKINRAVWGPLNQTIVSGGEDAAIRIWDAEMRKWVTRRPLHPSAKQLMTLTSLQLWDMRTLTLIKTYTTVVPVNAVAMSPLLNHVVLGGGQDASAVTTTDHRAGKFEAKFYDTILQEEIGGVKGHFGPINALAFSPDGKSFSSGGEDGYTYAPTKKKRMKLLLRKEKNKIGATGEVRTHQIGKKLKTLKPLSFAKLWHLEFASNPKKLKMRPILMKGHERPLTFLRYNREGDLLFSCAKDHTPTLWFADNGERLGTYRGHNGAVWCCDVSRDSSRLITGSADQTAKLWDVKSGKELFTFKFNAPTRSVDFAVGDRLAVITTDHFVDRTAAIHVKRIAEDPEEQDAESVLVLHCPDGKKRINRAVWGPLNQTIVSGGEDKVIRIWDAELWDMRTLTLLKTYTTVVPVNAVSLSPLLNHVVLGGGQDASAVTTTDHRAGKFEAKFYDKILQEEIGGVKGHFGPINALAFNPDGKSFSSGGEDGYVRLHHFDSDYFNIKI

SEQ ID NO: 50085 - protein, 466 aa, Exiguobacterium sp. 255-15
MKEGTFRRKMESRHIVMLSLGGVIGTGLFLSTGYTLEQAGRVGTILSYLVGALAIYLVMLCLGELAVHMPETGAFHSYATKYIGSGTGYTVAWLYWLTWTVALGSEFTAAGLLMQRWFTDVPVWLFSALFVVMILGINVLTVRLFAEVEFWFSAVKVLTILVFIVLGTAAIVGFLPLADGSQAPLLAPLTEGGLFPNGAFAILMTMLAVNFAYSGTELIGIAAGEAVDPKRTVPLAIRTTVFRLVLFFVGTIIVLAILLPNDSKGVLESPFVAVFERIGLPFAADIMNFVILTAILSAANSGLYAASRMLWSLSDQRMITPYFSKLNASGVPTRAVLFSMLGGLLALFSSVYAPGSVYIALVSISGLAVVVVWMSISASQFMFRKRYLQEGHDLNDLVYRTPWYLFVPILSFLMCLASLIGIAFDPTQRVALYFGVPFIAVCYIVHHLTKTSWKRSVEDVKEQQSS

SEQ ID NO: 50086 - protein, 333 aa, Zea mays
MADASSRTDTSIVLDDNDKNHRMENGSGAVVPSNSSDRSDRSDKPLDQKTMRRLAQNREAARKSRLRKKAYVQQLESSKLKLAQLEQELQKARQQGIFISSSGDQTHAMSGNGALTFDIEYARWLEDQNKQINELRTAVNAHASDSDLRLIVDGIMAHYDEIFKVKGVAAKADVFHILSGMWKTPAERCFLWLGGFRPSELLKLLANHLEPLTEQQMLGLTNLQQSSQQAEDALSQGMEALQQSLAETLAGSLGPAGSSGNVANYMGQMAMAMGKLGTLENFLRQADNLRQQTLHQMQRILTIRQASRALLAIHDYFSRLRALSSLWLARPRE

SEQ ID NO: 50087 - protein, 473 aa, Salmonella enterica subsp. enterica serovar Typhi Ty2
MPTHLVWFRRDLRLQDNLALAAACRDASARVLALYISTPAQWQAHDMAPRQAAFISAQLNALQTALAEKGIPLLFHEVADFNASIETVKNVCRQHDVSHLFYNYQYEFNERQRDAAVEKTLPSVICEGFDDSVILAPGAVMTGNHEMYKVFTPFKNAWLKRLKEDIPPCVPAPKIRVSGALSIPLTPVSLNYPQQAFDAALFPVEENAVIAQLRHFCSQGADEYASRRDFPAVDGTSRLSASLATGGLSPRQCLHRLLAEQPQALDGGPGSVWLNELIWREFYRHLMTWYPALCKHQPFIRWTKRVAWQENPHYFQAWQKGETGYPIVDAAMRQLNATGWMHNRLRMITASFLVKDLLIDWRLGERYFMSQLIDGDLAANNGGWQWAASTGTDAAPYFRIFNPTTQRERFDRDGEFIRQWLPALRDIPGKAIHEPWRWAEKAGVVLDYPRPIVEHKQARIATLSAYEAARKGA

SEQ ID NO: 50088 - protein, 121 aa, Kluyveromyces marxianus
GHVDVALPCATQNEVSGAEAEHLVANGVKYVAEGSNMGSTQEAIDIFEGARLKTASATAPAVWYAPGKAANMGGVAVSGLEMAQNSSRVQWTRETVDAELKKIMTTCFDDCVATAQEYSNE

SEQ ID NO: 50089 - protein, 326 aa, Neurospora crassa
MVLHNPNNWHWVNKDATSWAKQWFEDNLTKLEAKEGDVTAKISKVISMDGDVDVAQRKGKVITIFDVKLTLEYTGSTATDDNVSGTITVPEVSHELDEDEFVFDIDIYSDANEKRPVKDLVRNKLVPQLRKEFLKLSPALIAEHGKDIQHAPGSNPSSGFSTPKFVPQPASSSARAVTTTSSSSSSSAINTTTVVDSAEFRTSADELYATFTDPGRLAAFTRAPPKVFEGAKPGGKFVLFDGNVSGEYVELQEPTKIVQKWRLEQWPQGHYSTLKIEFDQNDVDKVTVMRVEWTGVPVGQEEIVKNNWNEYYVRSIKRTFGFGTIL

SEQ ID NO: 50090 - protein, 324 aa, Arabidopsis thaliana
MVKGIRVYEHGGPEVLKWEDVEVGEPKEGEIRVKNKAIGLNFIDVYFRKGVYKPASMPFTPGMEAVGEVVAVGSGLTGRMIGDLVAYAGNPMGAYAEEQILPADKVVPVPSSIDPIVAASIMLKGMTAQFLLRRCFKVEPGHTILVHAAAGGVGSLLCQWANALGATVIGTVSTNEKAAQAKEDGCHHVIMYKNEDFVSRVNDITSGKGVNVVYDSVGKDTFKGSLACLKSRGYMVSFGQSSGSPDPIPLSDLAPKSLFLTRPSMMHYNETRDELLECAGEVFANVTSGILKARVNHKYPLSRVADAHADLENRITSGSVVLLP

SEQ ID NO: 50091 - protein, 182 aa, Zea mays
SPCGDAAAAAELTSLRISEGAGIPPLPGRRSVGGNAAEGEEEGDKNKKARKGKAGTQRIAGWGLREFSKIVSKKVETKGRTTYSEVADEICGELKLTLIGQEFDEKNIRRRVYDAFNVLIALRVITKDEKEIKWMGLSNFQYEKIKLEETRKELMIRIKNKKKLLQEIERQLDDLQNIKFRN

SEQ ID NO: 50092 - protein, 381 aa, Arabidopsis thaliana
MTNHLQDPLPTYPKPVLTKEEQEVDEKMVSLQAESIVNTVAFPMVLKAAFELGVIDTIAAAGNDTWLSPCEIACSLPTKPTNPEAPVLLDRMLSLLVSHSILKCRMIETGENGRTGKIERVYAAEPVCKYFLRDSDGTGSLVPLFMLLHTQVFFKTWTNLKDVILEGRDAFNSAHGMKIFEYINSDQPFAELFNRAMSEPSTMIMKKVLDVYRGFEDVNTLVDVGGGNGTVLGLVTSKYPHIKGVNFDLAQVLTQAPFYPGVEHVSGDMFVEVPKGDAVFMKWILHDWGDEDCIKILKNCWKSLPEKGKIIIVEFVTPKEPKGGDLSSNTVFAMDLLMLTQCSGGKERSLSQFENLAFASGFLRCEIICLAYSYSVIEFHK

SEQ ID NO: 50093 - protein, 504 aa, Oryza sativa (japonica cultivar-group)
MRRPPEFAAVAAVAVVAALVLAAGAGAAPLPAALRLERALPHKGVAVEHLRERDRARHGRRGLLGGGGGGVAGVVDFPVEGSANPFMVGLYFTRVKLGSPPKEYFVQIDTGSDILWVACSPCTGCPSSSGLNIQLEFFNPDTSSTSSKIPCSDDRCTAALQTSEAVCQTSDNSPCGYTFTYGDGSGTSGYYVSDTMYFDTVMGNEQTANSSASIVFGCSNSQSGDLTKTDRAVDGIFGFGQHQLSVVSQLNSLGVSPKVFSHCLKGSDNGGGILVLGEIVEPGLVYTPLVPSQPHYNLNLESIVVNGQKLPIDSSLFTTSNTQGTIVDSGTTLAYLADGAYDPFVNAITAAVSPSVRSLVSKGNQCFVTSSSVDSSFPTVSLYFMGGVAMTVKPENYLLQQASIDNNVLWCIGWQRNQGQQITILGDLVLKDKIFVYDLANMRMGWTDYDCSTSVNVTTSSGKNQYVNTGQFDVNGASPRPPYSGLVPAVAVAVALIFGGFSRR

SEQ ID NO: 50094 - protein, 131 aa, Glycine max
  misc_feature (52)..(52): Xaa can be any naturally occurring amino acid
  misc_feature (57)..(57): Xaa can be any naturally occurring amino acid
  misc_feature (84)..(84): Xaa can be any naturally occurring amino acid
  misc_feature (95)..(95): Xaa can be any naturally occurring amino acid
  unsure (1)..(131): unsure at all Xaa locations
MADETQNRYESSEVEVQDRGAHDFLAMKKDEEDKPHAYEEVIAAEVEKVTVXTNDRXQRRLLKKLHRSDSPSSSSSEEEGEHGXNGRRRRRHRKXLKEKIVEKIEGDHHHHKDEDTCVPDEKVDVVEDSHA

SEQ ID NO: 50095 - protein, 450 aa, Bacillus subtilis subsp. subtilis str. 168
MEMMGMENIQQNQGLKQKDEQFVWHAMKGAHQADSLIAQKAEGAWVTDTDGRRYLDAMSGLWCVNIGYGRKELAEAAYEQLKELPYYPLTQSHAPAIQLAEKLNEWLGGDYVIFFSNSGSEANETAFKIARQYHLQNGDHSRYKFISRYRAYHGNTLGALSATGQAQRKYKYEPLSQGFLHAAPPDIYRNPDDADTLESANEIDRIMTWELSETIAGVIMEPIITGGGILMPPDGYMKKVEDICRRHGALLICDEVICGFGRTGEPFGFMHYGVKPDIITMAKGITSAYLPLSATAVKRDIFEAYQGEAPYDRFRHVNTFGGSPAACALALKNLQIMEDEQLIQRSRDLGAKLLGELQALREHPAVGDVRGKGLLIGIELVKDKLTKEPADAAKVNQVVAACKEKGLIIGKNGDTVAGYNNVIHVAPPFCLTEEDLSFIVKTVKESFQTI

SEQ ID NO: 50096 - protein, 536 aa, Arabidopsis thaliana
MTTISDLPEDVVEEILPRVPLTSLSAVRSICKTWNTLSKNRVLCKAAVKKQFLGFIMMDYRVCSMKFHLRNDEGGDLVDDLSIKQVGILDQIEISEVLHCDGLLLFVTKDNSSLVVWNPYLGQTRLIQPSNNFHCSDRYAIGYDNNRNLKILRNFSDYGSSGSNKRGVSFKGNTYILAQGKIRVDSRWKIEAILLSFDFTTERFGPRLQLPFGFYYPQDLFSLSCVREEQLVVLHQSWMVSGELEIWITNKIDPGVVSWTKFLRSISCCRISIQAGSFFINEENQVAVVFDLDEYKGSETCRNQTAYIIGQDEYFKSVNIGEAPNLGRPEKYAPHIYCRPLGNTYILAQGKIRVDSRWKIEAILLSFDFTTERFGPRLQLPFGFYYPQDLFSLSCVREEQLVVLHQSWMVSGELEIWITNKIDPGVVSWTKFLRSISCCRISIQAGSFFINEENQVAVVFDLDEYKGSETCRNQTAYIIGQDEYFKSVNIGEAPNLGRPEKYAPHIYCRPLVCSSYVPSLVPLQINQPDTRKESDD

SEQ ID NO: 50097 - protein, 274 aa, Bacillus subtilis subsp. subtilis str. 168
MTAFWGEVIGTMLLIIFGAGVCAGVNLKKSLSFQSGWIVVVFGWGLGVAMAAYAVGGISGAHLNPALTIALAFVGDFPWKEVPVYIAAQMIGAIIGAVIIYLHYLPHWKSTDDPAAKLGVFSTGPSIPHTFANVLSEVIGTFVLVLGILAIGANQFTEGLNPLIVGFLIVAIGISLGGTTGYAINPARDLGPRIAHAFLPIPGKGSSNWKYAWVPVVGPILGGSFGGVFYNAAFKGHITSSFWIVSVILVVVLLGLYVYTKSHSAKTLSNSKYI

SEQ ID NO: 50098 - protein, 101 aa, Arabidopsis thaliana
NAQVQFFPCMPIDPENSPSVVAINVKTLVQRACPIEYGHVLLIPRVLDCLPQRIDHKSLLLAVHMAAEAANPYFRLGYNSLGAFATINHLHFQVYPKVIQA

SEQ ID NO: 50099 - protein, 308 aa, Leifsonia xyli subsp. xyli str. CTCB07
MRGDTMTVLEVTNDPVRDYLNSIGRTWLLTAEDEVSLAKRIEVGVLAGERLATRPGLSPREKRELHVLSDDGKRAFERFIEANLRLVVSIAKRYAGRGLAVMDLIQEGNLGLVRAVEKFDYRTGNKFSTYATWWIRQSILRGIADTARVIRIPVHTVEKIDKLDRIRRDLGGELGRTPTLEEIADAASLTPAEVHKLQMSDSETVSLAVPVGENEGAELGDLIEDGDAPGPSERVEVEFRHRDLEERLRELPLRDAKVVRMRFGLDGRKPMTLDEVGAVYGITRERVRQLETRSLKRLRSPELLEYLR

SEQ ID NO: 50100 - protein, 271 aa, Triticum aestivum
ENGHAAAPMEQVAVAPVGGSSAEAAAPPDAVMRELPPPVPYVFAPQVPVAPLQIPNEFSPVFNHSWMNGSDESTNNNPPEIEIPTLITWSQGGNEVFVEGSWDNWTSRKVLERSGKDHAVLLVLPSGIYHYRMIVDGVPRYVSELPHVTDERGQVANLLDVHEYIPDSLDSVAEFDAPPSPEHSYNMEFPTDEELTKQDPPALPPQLLMTALGGTDHSDELAPKAKPQHVVLNHLFIEKGWGAQSLLALGLTHRFQSKYVNFVLYKPLVRR

SEQ ID NO: 50101 - protein, 665 aa, Listeria monocytogenes EGD-e
MSRIDEQMVNSIRVLSMDMIEKANSGHPGLPMGAAPMAFSLWKNHLKFNPEHPTWFNRDRFVLSAGHGSAMLYSLLHLFGYDLPMSELKNFRQTGSKTPGHPEFGHTVGVDATTGPLGQGFAMGVGMAMAEAHLGAKFNQPEFPVVDHNTYVLCGDGCLMEGISYEAASLAGHLKLGKLVVLYDSNDISLDGDLNESFSEDIELRFRAAGWQTLRVDDGNDLDALDAAIHLAKTEKSRPTLIEVKTVIGYGSPGKAGKSAAHGSPLGEKELKLAKEAYDWQMPPFELPKTVENQKEFYHSKGRASESSWLRTFNAYKQKYPALAESLQHLMDDNLTADWDAELPVFDENADKPVATREVSGIILQELEKKLPNLFGGAADLASSNKTHLKASERFAPGNYAAKNISFGVREFAMGAAVNGMTLHGGVQAFGATFFVFSDYLRSAIRSAALMGIPSTFIMTHDSIAVGEDGPTHEPIEHLASFRAMPGLHVIRPADGNETVEAYRFAFTQKEQPTMLVLSRQNLPILPNSAAKAKTGLAKGAYILADSPLDKLDIILLASGSEVHLMTAVRDNLAKKGFGARVVSMPSFDLFDKQSPEYKESILPKAVKKRFAAEMGASYGWHKYLGDSGEILAIDSFGMSGPGDELAERFGFTVENLTELALKQL

SEQ ID NO: 50102 - protein, 523 aa, Arabidopsis thaliana
MGNCCSHGRDSDDNKEEPRPENGGGGVGAAEASVRASKHPPASPPPATKQGPIGPVLGRPMEDVKSSYTLGKELGRGQFGVTHLCTQKATGLQFACKTIAKRKLVNKEDIEDVRREVQIMHHLTGQPNIVELKGAYEDKHSVHLVMELCAGGELFDRIIAKGHYSERAAASLLRTIVQIIHTCHSMGVIHRDLKPENFLLLSKDENSPLKATDFGLSVFYKPGEVFKDIVGSAYYIAPEVLRRKYGPEADIWSIGVMLYILLCGVPPFWAESENGIFNAILSGQVDFSSDPWPVISPQAKDLVRKMLNSDPKQRLTAAQVLNHPWIKEDGEAPDVPLDNAVMSRLKQFKAMNNFKKVALRVIAGCLSEEEIMGLKEMFKGMDTDNSGTITLEELRQGLAKQGTRLSEYEVQQLMEAADADGNGTIDYGEFIAATMHINRLDREEHLYSAFQHFDKDNSGYITTEELEQALREFGMNDGRDIKEIISEVDGDNDGRINYEEFVAMMRKGNPDPNPKKRRELSFK

SEQ ID NO: 50103 - protein, 273 aa, Exiguobacterium sp. 255-15
MKRLENKVAVITGSATGIGQATALVFAEQGATVVCADVELEKAQVTVEKIKEAGGKAEAVHVDVSQVDSVKQLADHLQSTYGTVDVLFNNAGIDQQGGKVHEYPIELFDQIIAVDLRGTFLTSKFVIPLMLKNGGSIINTSSMSGRAADLNRSGYNAAKGGIANFTRAMAIDYARDGIRVNSLSPGTIETPLIDTLVGGKEEEQGKQFRDANAWITPLGRLGKPREMATVALFLASDDSSYVTGEDITADGGIMAYTWPGEMLIDDKWKTEAE

SEQ ID NO: 50104 - protein, 242 aa, Shigella sonnei
LKERKEGAFVPFVTLGDPGIEQSLKIIDTLIEAGADALELGIPFSDPLADGPTIQNATLRAFAAGVTPAQCFEMLALIRQKHPTIPIGLLMYANLVFNKGIDEFYAQCEKVGVDSVLVADVPIEESAPFRQAALRHNVAPIFICPPNADDDLLRQIASYGRGYTYLLSRAGVTGAENRAALPLNHLVAKLKEYNAAPPLQGFGISTPDQVKAAIDAGAAGAISGSTIVKIIEQHINEPEKML

SEQ ID NO: 50105 - protein, 896 aa, Desulfitobacterium hafniense DCB-2
MDSRLHLVDNLPALLWSSDRAGNYDYVNQAWLEFTGLTFVEVRGEGWLSCVHPEDSPGVMNVLEHSRRHKAPFEAEYRLRRYDGEYRHCLSRGQPYDDPKGELAGYTGVIIDITERKAAEIMTRENAEKFREIFNRITDCVFIHEVKDDGQIGKIQEVNDMACELIGLTRAEIIDLSREVIKVKSPLTLANEFTQKLLSKNYLVFEGMLLTHQGKEIPVEVKAHYHVLNGRRMLLSIARDISNQKRIHKILLASHNKYRQLFDNITDAVFVYELQKDGYPGLLIEINEKARRLMGYHEETFMFSAGPCIRPSSPQLTLDDVWQSLERTHSASFEGICTNLEGEDIPVEVNCHTFPLNGSKVMLTLLRDITERKQIEQERKRTEAEFQQAKEKAEAANRAKSEFLANMSHEIRTPINGIIGMIDLTLLTSLEKTQRENLKIAKNCAYSLFKIINDILDFSKIEAGKLTVEEIEFNLKEVIEQIIKTHSPEAERKGLDLAYTLSANLPDYYKGDPERIKQVLNNLLSNALKFTERGEVSLAVKRLQGDEDVSDLKFTVMDTGIGIAEEDQLHLFEEFNQVDGSITRKYGGTGLGLAISRKLVEMMGGRIWVESEKGKGSSFGVVLRLKHGDKDTLRFKSTQNNDQSREGSTARSYRILLAEDHIVNSIVITEMLKIQGHRVDIAMDGEEALALYHQNPYDVILMDIQLPRLDGIEVTKRIRASEGAQSRTPIIALTAYALQGDREGFLQAGMDEYIPKPVMMEELIMVLDRVVTKFASGEGQAQQEEVVITDEGVYLKDISSFPESVNKDLELSEMAYDFKKLRIALNNGDSVALEHIAHRIKERCSVIGAHKLKALAFKIELAARRGNPGEAKDYLHDLDSEYNQLSGGMLNENTRS

SEQ ID NO: 50106 - protein, 295 aa, Solibacter usitatus Ellin6076
MRKLIALVACMAFAAPAGQIYSLAWGPVIAVGGYKETRLRDGATLKGNAEAVRAVAFSRDGKLLAAAGGLPARKGEVLVWDMASQKVKVTISGHSDCIYAVAFSPDGATLATAGYDKLIKLWDASSGKELRTLRDHIDAIYALAFTPDGKRIVTGSADRAVKVWDAASGERLFTLSESTDAVNTLALSPDGKRVAAGGLDKTIRIWSLGEKEGTLLHTLIAHEDAILRLAWSADGQWLASASADRSIKIFRAADLTELRAITKLPDWAFGLEFAPDGNSLAAGFFNGQLEIYSRQ

SEQ ID NO: 50107 - protein, 242 aa, Shigella sonnei
LKERKEGAFVPFVTLGDPGIEQSLKIIDTLIEAGADALELGIPFSDPLADGPTIQNATLRAFAAGVTPAQCFEMLALIRQKHPTIPIGLLMYANLVFNKGIDEFYAQCEKVGVDSVLVADVPIEESAPFRQAALRHNVAPIFICPPNADDDLLRQIASYGRGYTYLLSRAGVTGAENRAALPLNHLVAKLKEYNAAPSLQGFGISTPDQVKAAIDAGAAGAISGSAIVKIIEQHINEPEKML

SEQ ID NO: 50108 - protein, 242 aa, Shigella sonnei
LKERKEGAFVPFVTLGDPGIEQSLKIIDTLIEAGADALELGIPFSDPLADGPTIQNATLRAFAAGVTPAQCFEMLALIRQKHPTIPIGLLMYANLVFNKGIDEFYAQCEKVGVDSVLVADVPIEESAPFRQAALRHNVAPIFICPPNADDDLLRQIASYGRGYTYLLSRAGVTGAENRAALPLNHLVAKLKEYNAAPPLQGFGISTPDQVKAAIDAGAAGAISGSAIVKIIEQHINEPEKML

SEQ ID NO: 50109 - protein, 619 aa, Mannheimia succiniciproducens MBEL55E
MVSADCRRRAGLIFGSYYNIGYNAPIIFLRRYTFMQKLQENDLSTSQTFKRLWPTIAPFKIGLIAAAAALVLNALTDSGLIYLLKPLLDDGFGKADTSFLKLMAVLVIVFIFIRGITSFISSYCLAWVSGKVVMTMRRRLFKHLMYMPVSFFDQNSTGRLLSRITYDSEQVANSSSNALVTIVREGAYIISLLAVMIATSWQLSVVLFIIGPVIAVLIRLVSKIFRRLSKNMQNSMGELTATAEQMLKGHKVVLSFGGQQIEEQRFNEVSNDMRRKGMKMVVADAISDPIVQIIASLALSAVLYLATIPSIMSQNLSAGSFTVVFSSMLAMLRPLKSLTNVNSQFQRGMAACQTLFDILDLDTEKDKGKYEAERVKGDVSFKDVSFTYQGKDQPALKHLSFDIPHGKTFALVGRSGSGKSTIANLVTRFYDINQGEILLDGVNVQDYTLSNLRTHCSVVSQQVHLFNDTIANNIAYAAKDKYSREQIIAAAKAAHAMEFIEPLENGLDTVIGENGASLSGGQRQRLAIARALLRDSPVLILDEATSALDTESERAIQAALEELQKDRTVLVIAHRLSTIEKADEILVIDHGEICERGSHEELLALNGAYKQLHKMQFNG

SEQ ID NO: 50110 - protein, 391 aa, Hordeum vulgare subsp. vulgare
MERVFSVEEIPDPFWGQPSPRQRGRRPPEGAMNRCPSEWYFQKFLEEAVLDSPAADPSPMSGASGRGQAACRPRGVAGTATGPAVDPVEYNAMLKQKLEKDLAAVAMWRASGAMPPERFAASPSCPNADGQHIGTINPIGGNVVPLQNKLAGGASGVSGPHLVQNADALVKQAASSSSREQSEDDDMEGEDEITGNGVPTDQRLRRRKQSNRESARRSRSRKAAHLNELEAQVSQLRVENSSLLRRLADVNQKYNGAAVDNRVLKADVETLRAKVKMAEDSVKRVTGMSALFPAGSDMSSLSMPFTGSPSEATSDAAFPDDLSAYFSTSEAGGNNGYMPEMASSAQEDDNFLNETMDTSKMGRPDSLHRVASLEHLQKRMCGGPASSGSTS

SEQ ID NO: 50111 - protein, 518 aa, Rigidoporus microporus
MFRFNTFSTLIPLALSLGVRAAIGPVADLHISNANISPDGFTRAAVLAGGSFPGPLITGNKGDNFQINVINDLTDADQLKTTTIHWHGFFQHGTNWADGPAFINQCPIASGNSFLYNFQVPDQAGTFWYHSHLSTQYCDGLRGAFVVYDPDDPHASLYDVDDESTVIALADWYHGLARLGPKFPTTNSTLINGLGRYDFGPSSDLAVISVQAGKRYRFRLVSISCDSNYVFSIDEHTFTVIEVDGVNHQPVDADSLQIFAGQRYSIVVNADKSEGGNYWIRASPTPGPQGFANGINSAILRYVGSDEVEPTTNQTTSTNPLVEANLVPLENPGAPGDPTPGGVDVPLNLAVAFDGTGLDFQVNGQTFIPPTVPVLLQILSGAQSATDLLPSGSVYVLPSNATVEISIPAGAVGGPHPIHLHGHTFDVVRSAGSSTYNYVNPPRRDVVSIGNAGDNVTIRFRTDNPGPWFLHCHIDWHLEAGFAVVFAEDIPNVASVNSPPQAWSDLCPIYDALDPSDH

SEQ ID NO: 50112 - protein, 231 aa, Streptococcus pneumoniae TIGR4
MEKEKRMHKILLIEDDQVIRQQIGKMLSEWGFEVVLVEDFMEVLSLFVQSEPHLVLMDIGLPLFNGYHWCQEIRKISKVPIMFLSSRDQAMDIVMAINMGADDFVTKPFDQQVLLAKVQGLLRRSYEFGRDESLLEYAGVILNTKSMDLHYQGQVLNLTKNEFQILRVLFEHAGNIVARDDLMRELWNSDFFIDDNTLSVNVARLRKKLEEQGLVGFIETKKGIGYGLKHA

SEQ ID NO: 50113 - protein, 526 aa, Trametes versicolor
MGKFHSFVNVVALSLSLSGRVFGAIGPVTDLTISNADVTPDGITRAAVLAGGVFPGPLITGNKGDEFQINVIDNLTNETMLKSTTIHWHGIFQAGTNWADGAAFVNQCPIATGNSFLYDFTVPDQAGTFWYHSHLSTQYCDGLRGPLVVYDPDDPNASLYDVDDDTTVITLADWYHTAAKLGPAFPAGPDSVLINGLGRFSGDGGGATNLTVITVTQGKRYRFRLVSISCDPNFTFSIDGHNMTIIEVDGVNHEALDVDSIQIFAGQRYSFILNANQSIDNYWIRAIPNTGTTDTTGGVNSAILRYDTAEDIEPTTNATTSVIPLTETDLVPLDNPAAPGDPQVGGVDLAMSLDFSFNGSNFFINNETFVPPTVPVLLQILSGAQDAASLLPNGSVYTLPSNSIEISFPIITTDGALNAPGAPHPFHLHGHTFSVVRSAGSSTFNYANPVRRDTVSTGNSGDNVTIRFTTDNPGPWFLHCHIDFHLDAGFAIVFAEDTADTASANPVPTAWSDLCPTYDALDSSDL

SEQ ID NO: 50114 - protein, 242 aa, Escherichia coli
LKERKEGAFVPFVTLGDPGIEQSLKIIDTLIEAGADALELGIPFSDPLADGPTIQNATLRAFAAGVTPAQCFEMLALIRQKHPTIPIGLLMYANLVFNKGIDEFYAQCEKVGVDSVLVADVPVEESAPFRQAALRHNVAPIFICPPNADDDLLRQIASYGRGYTYLLSRAGVTGAENRAALPLNHLVAKLKEYNAAPPLQGFGISAPDHVKAAIDAGAAGAISGSAIVKIIEQHINEPEKML

SEQ ID NO: 50115 - protein, 285 aa, Oryza sativa (japonica cultivar-group)
MAMASTLPLLLVHRSTPPTPRPTAPPLLHSRRLTLPSRLASLPATIAVVHPRKGVRLSKLHAASCCDSASAAGVTTGGGAGGGGAKGAMDWRLLLAWYLLALDKHPITTKAVTSAVLTLTGDLICQLAIDKVPKLDLKRTFVFTFLGLVLVGPTLHVWYLYLSKLVTINGASGAIARLLLDQFIFSPIFIGVFMSLLVTLEGKPSLVVPKLKQILCSTADAVAVADMWVREWLSSVIANWQLWIPFQFLNFYFVPQKFQVLAANFVALAWNVILSFKAHKEVTVK

SEQ ID NO: 50116 - protein, 541 aa, Oryza sativa (japonica cultivar-group)
MGQCCTGGGKAVAGDEAEPGTSKAAPPSRGTSSKNGSAKQQPCSPAAKAAATEAAAAASSSKKPAGPIGEVLERPMEEVRTTYSIGKELGRGQFGVTHLCTHKATGEKLACKTIAKRKLANKEDVDDVRREVQIMHHLSGQPNIVDLRGAYEDKHNVHLVMELCAGGELFDRIIARGHYTERAAAALLRAIVGIVHTCHSMGVIHRDLKPENFLLLSKGDDAPLKATDFGLSVFFKEGEVFRDIVGSAYYIAPEVLKRKYGPEADIWSIGVMLYIFLAGVPPFWAESENAIFTAILRGQIDLASEPWPKISSGAKDLVRKMLNINPKERLTAFQVLNHPWIKEDGDAPDVPLDNVVLNRLKQFRAMNQFKKAALRIIAGCLSEEEIKGLKEMFKNIDKDNSGTITLEELKNGLAKQGTKFSDNEIEQLMEAADADGNGIIDYEEFVTATVHMNKMDREEHLYTAFQYFDKDNSGYITKEELEQALKEQGLYDANEIKDVITDADSNNDGRIDYSEFVAMMRKGSGCAEATNPKKKRRDLVL

SEQ ID NO: 50117 - protein, 267 aa, Corynebacterium glutamicum ATCC 13032
MVATSQFIDDSEAAQAVRAAIVAGYRNIDTALAYGNERGVGEGIRTAGVPREELFISTKLAAEIKDYDGAVAAIDESLAKIGLDYVDLMLIHSPQPWSDFRGGDYSEGNREAWRALEDAYKAGKIRSIGVSNFLEADLENILDSATVAPHVNQLLVHVGNTPSELISFCDSKGILVEAYSPIAHGEMLKNQQVKAIADKYNVSIPQLCIRYTIQLGTVSLPKTANPDHMSSNAQIDFEISEEDMAALQEVTARDYGEHSGFPVYSGK

SEQ ID NO: 50118 - protein, 612 aa, Arabidopsis thaliana
MPEAPKIAALEVSDESLAEKNKNKLQFIEDVTTNADDVQRRVLEEILSRNADVEYLKRHGLEGRTDRETFKHIMPVVTYEDIQPEINRIANGDKSQVLCSNPISEFLTSSGTSGGERKLMPTIEEELDRRSLLYSLLMPVMDQFVPGLDKGKGMYFLFIKSESKTPGGLPARPVLTSYYKSSHFKNRPYDPYTNYTSPNQTILCSDSYQSMYSQMLCGLCQHKEVLRVGAVFASGFIRAIKFLEKHWPELARDIRTGTLSSEITDSSVREAVGEILKPDPKLADFVESECRKTSWQGIITRLWPNTKYVDVIVTGTMSQYIPTLDYYSNGLPLVCTMYASSECYFGVNLRPLCKPSEVSYTLIPNMAYFEFLPVHRNSGVTSSISLPKALTEKEQQELVDLVDVKLGQEYELVVTTYAGLYRYRVGDVLSVAGFKNNAPQFSFICRKNVVLSIDSDKTDEVELQNAVKNAVTHLVPFDASLSEYTSYADTSSIPGHYVLFWELCLNGNTPIPPSVFEDCCLTIEESLNSVYRQGRVSDKSIGPLEIKMVESGTFDKLMDYAISLGASINQYKTPRCVKFAPIIELLNSRVVDSYFSPKCPKWSHGHKQWGSN

SEQ ID NO: 50119 - protein, 762 aa, Methylococcus capsulatus str. Bath
MAVTHSLGFPRIGAGRELKRAVEACWAGRTGPAELAQTGRELRERHWMIQSGSGIDLVPVGDFAWYDQMLNMTALLGAVPRRFGFQADALSLDQYFQLARGNAEQPAMEMTKWFDTNYHYIVPEFDRETGFGPGTEWLFDEVEEAKALRLNPKPVLIGPLTYLHLGKERQAGFSRLELLPRLLPAYAAILRRLHASGVPWVQMDEPILGMDLPPEWLEAFAPAYAALAEAGPKLLLATYFASVAEHAVWLKSSAVAGLHIDAVRAPEQVADFLKDFPADKVLSLGLIDGRNVWRTDLRRALEQAESAGAVLGERLWLAPSCSLLHVPQDLSLETSLNPEIKDWLAFAVQKLEELAVIDKGLRLGRQAVAAELAERDRLLQTRAQSPLIHDPGVKRRLEGLSDADFRRHSPFAERSPLQRERLRLPPFPTTTIGSFPQTPKIRAARAAHRRGELNGDAYRDAMRAAIREAVYKQESLGLDLLVHGEAERNDMVEYFGERLAGYAFTKHGWVQSYGSRCVKPPIIYGDVARPEPMTVEWIGYAQSLTKKPVKGMLTGPVTMLQWSFARDDQPRAVTALQIALAIRDEVADLEAAGVAAIQIDEPAFREGLPLKAADRADYLDWAVKAFRLASCGVADDTQIHTHMCYSEFGDILPAIAELDADVITIETCRSAMDLLEAFGAFGYPNDIGPGVYDIHSPRVPAGAEIRALLEKAAAAVDPERLWVNPDCGLKTRQWPEAEQALANMVEAARAMRRAESLAGSAA

SEQ ID NO: 50120 - protein, 128 aa, Arabidopsis thaliana
  misc_feature (40)..(40): Xaa can be any naturally occurring amino acid
  misc_feature (43)..(43): Xaa can be any naturally occurring amino acid
  misc_feature (77)..(77): Xaa can be any naturally occurring amino acid
  misc_feature (91)..(91): Xaa can be any naturally occurring amino acid
  misc_feature (106)..(106): Xaa can be any naturally occurring amino acid
  unsure (1)..(128): unsure at all Xaa locations
MADVENLNSVPASEDTEYGFKRPEMYSTNIANSITSYARXVFXLYKTPEAWLSHVEEEGLPQRFATLLKDRKSDLLXVQTKLNVCKGGGSXDGDVFDFFPDYYQGXKGGLKYGNKGLLKGVFIGESLG

SEQ ID NO: 50121 - protein, 446 aa, Lactococcus lactis subsp. lactis Il1403
METNQSLKKKMAARHITMIALGGAIGAGLFKGSSSAIAAAGPSVLIAYFIGGIVLYFVMKSLEKLVLSSKDPHGLSGLVQPYLGNHTADFTDWVYWSMWMINIIAEAVAAASFLQLWFANVPTWVFVLIIALLTSLINLFSVALFAETEYWLAFIKISVVILLIIFGVFLVAKQIFDTNLVTTFSGMTAHGGFAPHGFKGVINSLLIVIYSYGGSELIAITVSETEDPKRAIPKAIRGVIGRIISFYIIPMFLLLVIYNWQTLATSSMSPFVMVFNKMHIPFAGDIVNLIIILALFSSINSGIYASSRLLYFRLKNRQGKMAQRMAHLNKHHVPQRAVIFCSGTLYIGVVLSYFVGDRLFNYLAGSLSYTVLAVWILISLAGFGLSLKTKSLSGRTMSLLALIALFLILIGILFTNPIGVTVFTAILYFIIFISYQKKNDSVSNLN

SEQ ID NO: 50122 - protein, 342 aa, Silicibacter sp. TM1040
MKAIYDPRQRAHNPSQFMAFGVMKPNPEQPERTEILRSGAEAAGCTFTAPEDAGLGPIAALHSPEYLTFLQTIHARWSEIEGAGPEVISHIKPGDRRDSYPRSALGQAGYHQADTSCPINADTWGSAYWSAQTAITAADLIAKGERAAYALCRPPGHHAFGDMAGGFCFLNNSGIAAQLLRDRGLRPAILDVDVHHGNGTQGLFYDRDDVLTLSIHADPADFYPFFWGHSSERGEGRGRGYNLNLPLPRGTEDAPFLDALDTCLDRVRAFGCDVLVIALGLDASVDDPFQGFQVTGDGFSRIGEAIARAGLPTLFVQEGGYISDSLGHNLTRVLGGFTSAAR

SEQ ID NO: 50123 - protein, 311 aa, Bordetella bronchiseptica RB50
MDSLPPSPPGRHGHSFLGPAHDENAKRTRWVVLLTLAMMVGEIVAGYLTGSMALLADGFHMATHAGALGIAAIAYAYAKRNADNRAFSFGTGKVGELAGFASALMLAMVSLAIGVESAIRLVQPTDVAFGEATLIAVVGLGVNLVSALLLGGGHAGHVHAEHHHPGHARHPHGHDNNLRSAYVHVLADALTSVLAIVALLAGRYLGWIWLDPVIGMVGAVVIARWAWTLMRDTGAILLDKADRHLEAEVRGAIETAGDATIADLHVWQIGPQAHAAIVSVVAARGVTASQIRERVSSIHEVRHLTVELVPA

SEQ ID NO: 50124 - protein, 1108 aa, Pseudomonas syringae pv. phaseolicola 1448A
MAKKPGDATFIKDPLWYKDAVIYQVHVKSFFDSNNDGIGDFAGLIEKLDYIAALGVNTIWLLPFYPSPRRDDGYDISEYRDVHSDYGTMADAKRFIAQAHKRGLRVISELVINHTSDQHPWFQKARHAKPGSKARDFYVWSDTDQKYDGTRIIFLDTETSNWTWDPVAGQYFWHRFYSHQPDLNFDNPHVLDAVLEVMRFWLDLGIDGLRLDAIPYLIERDGTNNENLPETHQVLKRIRAEIDANYPDRMLLAEANQWPEDTQLYFGDSKGPDGDECHMAFHFPLMPRMYMALAQEDRFPITDILRQTPEIPENCQWAIFLRNHDELTLEMVTDRERDYLWNYYAADRRARINLGIRRRLAPLVDRDRRRVELLNSMLLSMPGTPTLYYGDEIGMGDNIYLGDRDGVRTPMQWSIDRNGGFSRADPASLVLPPIMDPMYGFQSVNVEIQERDPHSLLNWNRRMLAVRKQQKAFGRGTLKMLSPSNRRILAYTREYTAPDGHSEVVLCVANVSSAAQAAELELSAYAGTVPVEMLGGSAFPPIGQLSYLLTLPPYGFYWFLLASENQMPSWHVEPAQSMPDFPTLVLKKRLEELLEEPLRSTMEKTSLAVYLPKRRWFAGKGKDIEQVNIAYAVRFGDEAHPVLLSEIEVTADGQTDRYQLPFGLLAEDDISSALPQQLALARVRRNRDVGLITDAFTLETFIRAVILGMQSDTVIPCADGELRFEQSSQLAPLALTAESEVRYLSAEQSNSSAVVGGSLVLKLIRKVSAGTHPELEMGAFLTNAGFKNISPLLGSVVRVGNDGKPNLLMIAQGYLSNQGDAWEWTQNNLERAVRDELAHGVSGQEQHYNALLELADFSRSLGQRLGEMHQILASPTDNSDFAVEVTSSQDSKASGTSVNAQLERALQLLEQRKGDLEQDDQQLVSDLLAQRKQIRRRVEGLAKRSAGGLRIRVHGDLHLGQVLVVKGDAYLIDFEGEPARALEERRAKHSPFKDVSGVLRSFDYAAAMAVRSAQNVDTSPEAAGARKRVAETYLAQAREAFIEGYRSATSGMAHAWKDAKGEDAALELFTLEKAAYEVIYEAENRPAWLAVPLQGLRGLLQPSDGEPI

SEQ ID NO: 50125 - protein, 530 aa, Caulobacter crescentus CB15
MTARKSGFIVGAVAGASVACAALAGMGMRMGTADAAQAPVVRVSTASAPTFAPPPGAPMSFADIFEKVSPAVVQINVTSKAQAPSLRIPGLEGFDIVPRGQRRPGQPGQQGQQQEDDGDTPATPKQQSAGSGFFISADGYIVTNNHVVADADDIQVVLKDGRELKATLVGRDESTDLAVIKVVDPKAKGKDFTFVNFENQAKPRVGDWVITIGNPFGLGGTATAGIISAYDRNLNDTTSSFVPYIQIDAPINRGNSGGPSFDIYGRVIGVNSAIYSPSGGSVGIGFAIPAEVAEGVAKQLIENGKVVRGYIGVSIMAFNAEMAEALGMSDVKGAIVASVVPGGPAAKAGLLPDDILVAVNGVKISDSSELTREVSKARPGETIKVSIIRDGKPRIVDVKSGTRPSESSLAVTDDEQGQDGAAPTPDKPASQKVDALGLTLGPIDAASRQTYKIEPDIKGLLIIGVKGDSDAGEKGLAKGDVLSNINGAPVTSVADVTSAVETAKKAGRASVLVKIVRQNRPVFIPLKIAP

SEQ ID NO: 50126 - protein, 546 aa, Methanosarcina acetivorans C2A
MKLGLGRIKDALKGGAEKNAGTEKKELKEETIKPDRVEEAAMKTKTSEHKSEDLLNNELENEPEKETKDKSKIKSENELKIEPEKEQENKPMVPADRSGAKKTGLIFFPAFDWAISPTHPEREERLLYTRDQIFEEGLMDLPQIAEYKPRLAAFRDIARVHFCVPDIKAQATTPHLIASGSCLVLADALMREEVKNAFALVRPPGHHAMAVSHGNRGFCNINNEAILVEYLRKKYGIRRIAIVDTDVHHGDGTQEIFYNDPDVLFISFHQDGRTIFPGSGFTYELGGPKALGRTINIPLPPGTPDEGIHYVLDTLVLPILRDFKPELVLNSAGQDNHYTDPLANMRFSTQGYAKLNEKLAPDMAVLEGGYAIQSALPYVNTGIILAMAGLDYSCVKEPDFKPGMFVQAARDRRVLEEVVATQLENWKNRDRLVAAEVAKHGDFYRRKKQIFYDTDMIQEFQEETVRMCPDCQGYVTIDSQAHRSINDTRIFGVSVPIYACDRCQAEAREEYRRRLNYPEYEYVYLQDKKADEYKEYNRRTKQETSY

SEQ ID NO: 50127 - protein, 399 aa, Escherichia coli Nissle 1917
MNRIPVIIINGFLGAGKTTLMKNLLTQANRNHLAVSVIVNDMSDLDVDGVLIANTEIVNIANNNFVSITSDSISSQSGIKTVDKAIKNMLRHYLPDVIFVETSGGSHPLPLIKYLQTHERLQLKSLLSLVDTVMLNDDYNGGKALIPAFQENLFHGKRRIENLLAEQIMFCSTLLLTKKDRLSFDIVTDVAKAIHPLNPYVNVIAVSWGNLKLAELLTLPDYDFNRVGLLIRELEDTITVEEAKISAQNGEIISRVIKDDRPFHPQRLWETYHYFMGMGIYRSKGFFWLPGRPDMALLWNQAAGSINLEFISYWNSGVLADPDNHLTHEERSVLQKKVNKTMGRFGDRRCHLTIIGRSDEVHDFTSALINCFLSEEEIVWWQSGGVFADPWPVNISRLN

SEQ ID NO: 50128 - protein, 499 aa, Arabidopsis thaliana
MATRLLRTNFIRRSYRLPAFSPVGPPTVTASTAVVPEILSFGQQAPEPPLHHPKPTEQSHDGLDLSDQARLFSSIPTSDLLRSTAVLHAAPIGPMVDLGTWVMSSKLMDASVTRGMVLGLVKSTFYDHFCAGEDADAAAERVRSVYEATGLKGMLVYGVEHADDAVSCDDNMQQFIRTIEAAKSLPTSHFSSVVVKITAICPISLLKRVSDLLRWEYKSPNFKLSWKLKSFPVFSESSPLYHTNSEPEPLTAEEERELEAAHGRIQEICRKCQESNVPLLIDAEDTILQPAIDYMAYSSAIMFNADKDRPIVYNTIQAYLRDAGERLHLAVQNAEKENVPMGFKLVRGAYMSSEASLADSVGCKSPVHDTIQDTHSCYNDCMTFLMEKASNGSGFGVVLATHNADSGRLASRKASDLGIDKQNGKIEFAQLYGMSDALSFGLKRAGFNVSKYMPFGPVATAIPYLLRRAYENRGMMATGAHDRQLMRMELKRRLIAGIA

SEQ ID NO: 50129 - protein, 408 aa, Zea mays
MSRPTGACLHAWRLGMATCTIPAAAAPRAHVGRHLPGIRQAARPALLLPSFSSSSSTTLLCHRLPPILPLVLQLLRVRANHAMAASAGTVYEADAEAVVRRITPALDRARHKGQAGKIAVIGGCREYTGAPYFAAISALKVGADLSHVFCTKDAATVIKSYSPELIVHPILEESYSVRVDERASVSSKILTEVAKWMERFDCIVVGPGLGRDPFLLECVSNIMRHARQANIPTVVDGDGLFLVNNNLNLVEGNPLAILTPNVYEYKRLVQKVLNCDVDEESASEQLIALCQKIGDVTIMQKGKADVISDGKTVTQVSTFGSPRRCGGQGDILSGSVAVFASWARHFGLTNEEPSEKRVNPMTLGCIAASLLLRKAASHAFEKNKRSTVTSDIIEFLGKSLEDICPAEH

SEQ ID NO: 50130 - protein, 554 aa, Solibacter usitatus Ellin6076
MPANLSPEDLPLQRIYRWELERANVPFLTQPWGGGQVRDWTWGQAVDEIRRIATWLKSQDWEPGSRIAILSRNCAWWIMADLAIWMAGHVTVPIYPSLKAQSIRQILEHCGARACFLGATDEREATDAGIPPGVCCVRFPTAAPNDWPSWDVLVTANRPLSGRPTRAPEELSTIIYTSGTTGTPKGVMHSFASFAFDAKVLAELIKLTPNERVLSYLPLAHIVERAGMEGTAVWLGYRVFFTEGIDTFVADLARARPTIFLSVPRLLLKFQQGVFAKIPEHKLERLLRIPILNRTVRKRVLQKLGLDTVVNAACGAAPLPTDILLWYRKLGLNLAEGYGMTETLITHLPAPGSIRPGYVGCAIPGVDAKVTETDELLLRSPMNMLGYYRDPEATKASFTDDGFFRTGDLARIDPDGQLKIIGRVKEQFKTSKGKYVMPTPIESQLLAHPVVDACCLMGAGMPRPFAVVLLANAPAERAVVEQTLLDLMNTVNTQLDPHEQLSFVAVAKGPWTVGNGFVTPTLKIKRNVLESRYQPCVDEWMRQNRPIVWESPPV

SEQ ID NO: 50131 - protein, 384 aa, Desulfitobacterium hafniense DCB-2
MKEAFIIEAKRTAIGKAGRGSLAHMRPDDLAAFVIQDVLKSAPNLNSADIDDCVIGCSFPEGEQGMNMARVIALRAGLPIDVSGLTINRFCSSGLQAISLAADRIRLGEAHAMLAGGAESMSAVPMGGGKPAPNPYMMEHCPEVYLSMGLTAENVAKKYEITREQQDEFAAASHQKAHAAQVGGRFEEEIVPVLIASGKKGEVWFSKDEGIRADSTVESLGKLKPAFKNGGCVTAGNSSQTSDGAAATLLMSEEKVKELDLKPLALWRGFAVAGVEAELMGIGPIKAIPKVLKQVGLTLEQIDLFELNEAFASQSLAIIKTLGIDPAKVNPNGGAIAFGHPLGCTGAKLTATLLHEMKRRGLKYGMVTMCIGGGMGAAGVYELL

SEQ ID NO: 50132 - protein, 242 aa, Escherichia coli
LKERKEGAFVPFVTLGDPGIEQSLKIIDTLIEAGADALELGIPFSDPLADGPTIQNATLRAFAAGVTPAQCFEMLALIRQKHPTIPIGLLMYANLVFNKGIDEFYAQCEKVGVDSVLVADVPVEESAPFRQAALRHNVAPIFICPPNADDDLLRQIASYGRGYTYLLSRAGVTGAENRAALPLNHLVAKLKEYNAAPSLQGFGIFAPDQVKAAIDAGAAGAIFVSAIVKIFGQHFNEPEKML

SEQ ID NO: 50133 - protein, 568 aa, Zymomonas mobilis
MSYTVGTYLAERLVQIGLKHHFAVAGDYNLVLLDNLLLNKNMEQVYCCNELNCGFSAEGYARAKGAAAAVVTYSVGALSAFDAIGGAYAENLPVILISGAPNNNDHAAGHVLHHALGKTDYHYQLEMAKNITAAAEAIYTPEEAPAKIDHVIKTALREKKPVYLEIACNIASMPCAAPGPASALFNDEASDEASLNAAVEETLKFIANRDKVAVLVGSKLRAAGAEEAAVKFADALGGAVATMAAAKSFFPEENPHYIGTSWGEVSYPGVEKTMKEADAVIALAPVFNDYSTTGWTDIPDPKKLVLAEPRSVVVNGVRFPSVHLKDYLTRLAQKVSKKTGALDFFKSLNAGELKKAAPADPSAPLVNAEIARQVEALLTPNTTVIAETGDSWFNAQRMKLPNGARVEYEMQWGHIGWSVPAAFGYAVGAPERRNILMVGDGSFQLTAQEVAQMVRLKLPVIIFLINNYGYTIEVMIHDGPYNNIKNWDYAGLMEVFNGNGGYDSGAGKGLKAKTGGELAEAIKVALANTDGPTLIECFIGREDCTEELVKWGKRVAAANSRKPVNKLL

SEQ ID NO: 50134 - protein, 369 aa, Vibrio fischeri ES114
MNTQSQTIVVKLGTSVLTGGTLKLDRAHMVELVRQCVQLKKAGHQVIVVTSGAIAAGREHLNYPELPKTMANKQLLAAVGQSCLIQAWQSLFGIYGVDVGQMLLTRADLDDRERYLNARDMLQALLKNNIVPIVNENDAVATNEIKVGDNDNLSALVGILAGADKLLLLTDQSGLFTADPRKDPKAELIKEVHTIDETLRKIAGGSGTTLGTGGMATKLQAADVARRAGIEVIIAAGSAENVITDVVNSKPQGTKFLPVECALESRKRWILAGPPSKGSIVIDEGAVNAVQQKGSSLLSKGITEVSGHFVRGGVAKIVNTKGELIARGISRYSSDDLSKILGKHSQDIYAVLGYEYGPVAIHRDDLVLI

SEQ ID NO: 50135 - protein, 391 aa, Bacillus licheniformis ATCC 14580
MKEAVIVSGARTPIGKAKKGSLRTVRPDDLGAYAVRETLKRAGGYEGNIDDLIIGCATPEAEQGLNMARNIGALAGLPHTVPAVTINRYCSSGLQSIAYGAEKIMLGAADTIIAGGAESMSIVPMMGHIVRPNAALAETAPEYYMGMGHTAEQVAVKYGVSREDQDAFAVNSHQKAAKAIAEGKFEDEIVPVDVTVREVDEHHNLKERTFTFSADEGVRPGTTKDVLSTLKPAFSANGSVTAGNSSQTSDGAAAVMIMDREKADALGLKPLAKFRSFAVGGVPPEVMGIGPVEAVPRALKMAGLELSDIGLFELNEAFASQAIQVIRSLGIDEEKVNVNGGAIALGHPLGCTGTKLTLTLIHEMRRRSEQFGIVTMCIGGGMGAAGVFELV

SEQ ID NO: 50136 - protein, 413 aa, Vibrio fischeri ES114
MGQAAKAAAFDLAVAPTAQKNKALAIIADELEANKDAILAANEKDIKAAVEAGISEAMQDRLLLTEERLVGIANDVRNVINLNDPVGSEIDSKVLENGMSLSRRRVPIGVIGVIYEARPNVTIDIASLCLKTGNASILRGGKETFFSNMELVKVIQVALEKAGLPAASVQYIEKPDRELVSQLLTMDDYVDMIIPRGGAGLHKMCKENSSIPVIIGGFGISHAFVDESADLERALVVVDNSKAQRPSACNALDTLLVHEAVAPQFLALLANNMAGRVELVAEPKAYGLLKEFEGVSLREAQEGDFDTEWLSYTLGVKVVADVNEAAAHMQKHNASHSDTILTNNIESAEKFINTAGSAAVYVNASTRFTDGAQFGLGAEVAVSTQKLHARGPMGLEELTSYKWVGKADYLIRS

SEQ ID NO: 50137 - protein, 242 aa, Escherichia coli
LKERKEGAFVPFVTLGDPGIEQSLKIIDTLIKAGADALELGIPFSDPLADGPTIQNATLRAFAAGVTPAQCFEMLALIRQKHPTIPIGLLMYANLVFNKGIDEFYAQCEKVGVDSVLVADVPVEESAPFRQAALRHNVAPIFICPPNADDDLLRQIASYGRGYTYLLSRAGVTGAENRAALPLNHLVAKLKEYNAAPPLQGFGISAPDQVKAAIDAGAAGAISGSAIVKIIEQHINEPEKML

SEQ ID NO: 50138 - protein, 330 aa, Trichoderma asperellum
DCSRWAKGHYTEGAELVDQVLDVVRREAENCECLQGFQITHSLGGGTGSGMGTLLISKIREEFPDRMMATFSVVPSPKVSDTVVEPYNATLSMHQLVENSDKTFCIDNEALYDICMRTLKLSNPSYGDLNHLVSAVMSGVSTSLRFPGQLNSDLRKLAVNMVPFPRLHFFMVGFAPLTSPGAHSFRAVTVPELTQQMLDPKNMMAASDFRNGRYLTCSTIFRGKVAMKEVEDQMRTVQNKNSAYFVEWIPNNIQTALCPIPPKGLKISSTFVGNSTAIQEIFRRVGEQFSAMFRRKAFLHWYTSEGMDEMEFTEAESNMSDLVSEYQQYQ

SEQ ID NO: 50139 - protein, 180 aa, Oryza sativa (japonica cultivar-group)
MPHLVRERLFFGDINDAIAALTTTAADTGGFTHLLSVVSSASISFITDCRPGLSIPTEEVRRVVAGEEGAPPVSAVAPGRLLRVVERAGVGLRVTRMAVPLRDTEEENLLDHLEPCLDFIDEGRKEGNVLVHCFAGVSRSATIIVAYLMRTEQKSLEGSTIPTKWVIFQSLLWLLLQMNT

SEQ ID NO: 50140 - protein, 242 aa, Escherichia coli
LKERIEGAFVPFVTLGDPGIEQSLKIIDTLIEAGADALELGIPFSDPLADGPTIQNATLRAFAAGVTPAQCFEMLALIRQKHPTIPIGLLMYANLVFNKGIDEFYAQCEKVGVDSVLVADVPVEESAPFRQAALRHNVAPIFICPPNADDDLLRQIASYGRGYTYLLSRAGVTGAENRAALPLNHLVAKLKEYNAAPPLQGFGISAPDHVKAAIDAGAAGAIFGSVIVKNIEQTINEPEKML

SEQ ID NO: 50141 - protein, 393 aa, Solibacter usitatus Ellin6076
MRDAVIVSAVRTAVGKAPKGMLRATRPDDLAAVAIQGAMARVPGLEAREVEDVIIGCAMPEGEQGMNVARIAALRAGMPIESSAMTINRYCASGLQSIALAAERIRGAGAEAIVAGGTESMSFIPFGGNKISINPWLQQNYPDSYLSMGLTAERVAKHYGITREQADEFALASHTKALAAQAAGKFVQEIVPVPVTFSAPDAKSKIRRTEMQFNIDEGPRADTSMEALGKLKAAFHAKGTVTAGNSSQTSDGAAAAVVMSEDRARALGIAPLARFVAYAYAGCLPEEMGIGPVYAIPKALKLAGLTLDQIDLIELNEAFAAQSLAVIKALGLAMDRVNVNGGAIALGHPLGCTGAKLTASLLQEMKRRKARYGIVTMCVGGGMGAAGIFENLN

SEQ ID NO: 50142 - protein, 242 aa, Escherichia coli
LKERKEGAFVPFVTLGDPGIEQSLKIIDTLIEAGADALELGIPFSDPLADGPTIQNATLRAFAAGVTPAQCFEMLALIRQKHPTIPIGLLMYANLVFNKGIDEFYAQCEKVGVDSVLVADVPIEESAPFRQAALRHNVAPIFICPPNADDDLLRQIASYGRGYTYLLSRAGVTGAENRAALPLNHLVAKLKEYNAAPSLQGFGISTPDHVKAAIDAGAAGAISGSAIGKIIEQHINEPEKML

SEQ ID NO: 50143 - protein, 197 aa, Glycine max
MSASRFIKCVTVGDGAVGKTCMLISYTSNTFPTDYVPTVFDNFSANVVVDGSTVNLGLWDTAGQEDYNRLRPLSYRGADVFLLAFSLISRASYENVAKKWIPELRHYAPGVPIILVGTKLDLRDDKQFFQDHPGAVPITTAQGEELRKLIGAPIYIECSSKTQQNVKAVFDAAIKVVLQPPKQKKKKRKGQKACSIL

SEQ ID NO: 50144 - protein, 301 aa, Triticum aestivum
GVLILSGDHLYRMDYMDFVQSHRQRDAGISICCLPIDGSRASDFGLMKIDDTGRVISFSEKPRGADLKEMEEAEKKPYIASMGVYIFKKEILLNLLRWRFPTANDFGSEIIPAAAREINVKAYLFNDYWEDIGTIKSFFEANLALAEQPSKFSFYDASKPMYTSRRNLPPSMISGSKITDSIISHGCFLDKCRVEHSVVGIRSRIGSNVHLKDTVMLGADFYETDMERGDQLAEGKVPIGIGENTSIQNCIIDKNARIGKNVTIANAEGVQEADRASEGFHIRSGITVVLKNSVIADGLVI

SEQ ID NO: 50145 - protein, 542 aa, Methylococcus capsulatus str. Bath
MIPIRLVSRLLHIQRMLVLHGLDELVEATHLYRPLRHAVRFSTALGARDVEAPRAVRLRRALEELGPIFVKFGQTLSTRRDLLPDDIGEELVKLQDRVPPFPGVEARRTVESALGQPVGTLFRSFDEEPLASASVAQVHAARLHSGEEVVVKVLRPGVRQRIEADIELLYALAGMAQRFWPDARRLRPTEVVAEFEKTILDELDLVREAANAAEIRRRFETSGILYVPKVYWDYTRRDVMVMERIAGIPIGDVPQLRRAGVDLKLLAERGVEIFFTQVFRDSFFHADMHPGNIFATTDARYIAVDFGIVGSISKADQYYVAENFLAFFNRDYRRVAEMHVESGWVPPTTRIEEFESAIRSVSEPIFEKPLKEISYGQVLLRLFQVARRFDMEVQPQLVLLQKTLLNIEGLGRELYPDLDLWQTAKPFLENWFQDERGPKSAVRRLGAKLPEWAQQWPEMPGLGYQALHRAVNGRLELSIRSDELRILTREIRLGQRRILGGIGGGSLILSATLLSTAFASPTLIWAVAALGLGLFAYAWTLR

SEQ ID NO: 50146 - protein, 516 aa, Burkholderia mallei ATCC 23344
MRMPHMISRHSMRWLSRALVAVSASGALAAHASTLTRDNGAPVGDNQNSQTAGANGPVLLQDGHLIQKLQRFDRERIPERVVHARGTGAHGVFVATRDISDLTRAKVFEPGTQTPVFVRFSSVIHGGTSPETLRDPRGFATKFYTAEGNWDLVGNNLPVFFIRDAMKFPDMVHSLKPAPDTNIQDPDRFFDFFSHQPEATHMITRVYSDAGTPASYREMDGNSVHAYKFVNAHGGVTYVKFHWKSLQGQKNLTAAQAEAIQGKDFNHMTRDLIAAIDAGRYPKWDLYVQTLKPDQLDQFAFDPLDATKVWPGVPEVKIGTMTLNRNPGNVFQETEQAAFAPSNLVPGIEPSEDRLLQGRLFAYADTQLHRVGVNGAQLPVNRPRAPVANYNRDGAMNGGAARGTVNYEPGAQAALAADPAFAASRAPLAGSTQQARIAKTRNFDQAGAFYRSLSASERANLVANLAGDLKQVRNDGVKYTMLSYFQKADAEYGRKVTAALGADQGRVDALTAKLAD

SEQ ID NO: 50147 - protein, 316 aa, Bacillus clausii KSM-K16
MFDVITLGDAMISFSPNATGPLKFVHSFERRVGGAELNVAIGCSRLGLKTGWITRLGKDEFGQHIQTFARGEGVDVSETKLVDGYATSLNFKEIMANGAGRTLYYRNPSPTETLKPEDLNPSYFQQAKILHLTGIYPAVATGNMAVTKQAIKLAKENGVKVAFDPNIRLRLWSKEEARLALYPLLQEVDILLTGDEEMEIILGTSDPAEIIAETTKLGIDLVAIKRGENGSVGSYQGKVVEAAPVQAAKVVDTVGAGDGFDAGLLYGYLQGWPLERMLAFANTIGSMVVSIVGDNEGLPYLEEVQAQLGELERIER

SEQ ID NO: 50148 - protein, 194 aa, Cicer arietinum
EYKPEFDIVSNASCTTNCLAPLAKVINDRFGIVEGLMTTVHSITATQKTVDGPSAKDWRGGRAASFNIIPSSTGAAKAVGKVLPVLNGKLTGMAFRVPTVDVSVVDLTVKLEKAATYDEIKAAINEESEGKLKGILGYTEDDVVSTDFIGDTRSSIFDAKAGIALNDRFVKLVSWFDNELGYSTRVVDLIVHIA

SEQ ID NO: 50149 - protein, 268 aa, Triticum aestivum
MVDLQAAALVISVVAAEVRDLTGKFLDRLKAKALSSSFKMQIFVKTLTGKTITLEVESSDTIDNVKAKIQDKEGIPPDQQRLIFAGKQLEDGRTLADYNIQKESTLHLVLRLRGGMQIFVKTLTGKTITLEVESSDTIDNVKAKIQDKEGIPPDQQRLIFAGKQLEDGRTLADYNIQKESTLHLVLRLRGGMQIFVKTLTGKTITLEVESSDTIDNVKAKIQDKEGIPPDQQRLIFAGKQLEDGRTLADYNIQKESTLHLVLRLRGGQ

SEQ ID NO: 50150 - protein, 164 aa, Thermococcus kodakarensis KOD1
MRKMVWRRDRYWDPFDIMREIQEEIDAIFRDFMRGPRLWSYREPGERIEVSETWREPFADIFDRGDRFVITVELPGVRKEDIKLRVTEDTVYIEAQMRREKELEQEGAIRIERYYSGYRRVIRLPEEVIPEKAKARYNNGVLEIEIPKKKPTKPEKEGVEVKIE

SEQ ID NO: 50151 - protein, 311 aa, Vibrio cholerae
MKVAVIGAAGGIGQALALLLKNRLPAGSDLALYDIAPVTPGVAADLSHIPTPVTIKGYAGEDPTPALEGADVVLVSAGVARKPGMDRADLFNVNAGIVKALAEKIAVVCPKACVGIITNPVNTTVPIAAEVLKKAGVYDKRKLFGVTTLDVIRSETFVAALKDKDPGQVRVPVIGGHSGVTILPLLSQVEGVSFTDEEVAALTNRIQNAGTEVVEAKAGGGSATLSMGQAACRFGLALVKALQGESDVVEYAYVEGEGEYAPFFAQPIKLGKNGVEALLDIGKLSAYEQAALDGMLDTLKGDIQIGVEFVK

SEQ ID NO: 50152 - protein, 769 aa, Hevea brasiliensis
MGTAVLSELGTEILVPVCAVVGIVFSLIQWYLVSRVKLTPERQAPGSSPAGANKNGYNDCLIEEEEGLNDHSVVAKCAEIRTAISEGATSFLFTEYQYVGVFMVAFAILIFLFLGSVEGFSTKSQPCTYDKQKTCKPALATAIFSTVSFLLGAFTSVVSGFLGMKIATYANARTTLEARKGVGKAFITAFRSGAVMGFLLAANGLLVLYIAINLFKLYYGEDWEGLFESITGYGLGGSSMALFGRVGGGIYTKAADVGADLVGKVERNIPEDDPRNPAVIADNVGDNVGDIAGMGSDLFGSYAESSCAALVVVPISSFGINHDFTAMLYPLLISSVGILVCLITTLFATDFFEIKAVKEIEPALKKQLIISTVLMTVGIAIVTWIGLPSSFTIFNFGTQKVVKNWQLFLCVAVGLWAGLIIGFVTEYYTSNAYSPVQDVADSCRTGAATNVIFGLALGYKSVIIPIFAIAIGIFVSFSFAAMYGIAVAALGMLSTIATGLAIDAYGPISDNAGGIAEMAGMSHRIRERTDALDAAGNTTAAIGKGFAIGSAALVSLALFGAFVSRASISTVDVLTPKVFIGLIVGAMLPYWFSAMTMKSVGSAALKMVEEVRRQFNTIPGLMEGHAKPDYATCVKISTDASIKEMIPPGALVMLTPLIVGTFFGVETLSGVLAGALVSGVQIAISASNTGGAWDNAKKYIEAGASEHARTLGPKGSDPHKAAVIGDTIGDPLKDTSGPSLNILIKLMAVESLVFAPFFATHGGLLFKMF

SEQ ID NO: 50153 - protein, 560 aa, Mycobacterium tuberculosis CDC1551
MTPQKSDACSDPVYTVGDYLLDRLAELGVSEIFGVPGDYNLQFLDHIVAHPTIRWVGSANELNAGYAADGYGRLRGMSAVVTTFGVGELSVTNAIAGSYAEHVPVVHIVGGPTKDAQGTRRALHHSLGDGDFEHFLRISREITCAQANLMPATAGREIDRVLSEVREQKRPGYILLSSDVARFPTEPPAAPLPRYPGGTSPRALSLFTKAAIELIADHQLTVLADLLVHRLQAVKELEALLAADVVPHATLMWGKSLLDESSPNFLGIYAGAASAERVRAAIEGAPVLVTAGVVFTNMVSGFFSQRIDPARTIDIGQYQSSVADQVFAPLEMSAALQALATILTGRGISSPPVVPPPAEPPPAMPARDEPLTQQMVWDRVCSALTPGNVVLADQGTSFYGMADHRLPQGVTFIGQPLWGSIGYTLPAAVGAAVAHPDRRTVLLIGDGAAQLTVQELGTFSREGLSPVIVVVNNDGYTVERAIHGETAPYNDIVSWNWTELPSALGVTNHLAFRAQTYGQLDDALTVAAARRDRMVLVEVVLPRLEIPRLLGQLVGSMAPQ

SEQ ID NO: 50154 - protein, 311 aa, Vibrio cholerae
MKVAVIGAAGGIGQALALLLKNRLPAGSDLALYDIAPVTPGVAADLSHIPTPVTIKGYAGEDPTPALEGADVVLVSAGVARKPGMDRADLFNVNAGIVKALAEKIAVVCPKACVGIITNPVNTTVPIAAEVLKKAGVYDKRKLFGVTTLDVIRSETFVAALKDKDPGQVRVPVIGGHSGVTILPLLSQVEGVSFTDEEVAALTKRIQNAGTEVVEAKAGGGSATLSMGQAACRFGLALVKALQGESDVVEYAYVEGEGEYAPFFAQPIKLGKNGVEELLDIGKLSAYEQAALDGMLDTLKGDIQIGVEFVK

SEQ ID NO: 50155 - protein, 157 aa, Oceanobacillus iheyensis HTE831
MSIYEYQVEKSNGEEISLSQYQDNVLLIVNTATKCGFANQFEGLEELHQKYQDEGLRVLGFPSNQFNEQEPVDDENMEEACKVNFGVTFPLFKKIDVKGPNAAPLFKYLTEEQKGLLGSNVKWNFTKFLVDRNGNVVKRFAPKDKPAKIEDDIKALL

SEQ ID NO: 50156 - protein, 101 aa, Streptococcus pneumoniae TIGR4
MAILVTGGAGYIGSHTVVELLNLGKEVIIVDNLSNSSILVLDRIEAITGIRPVFYELDVCDKQALRKVFEQESIDAAIHFAGYKAVGESVQKPVMYYKIIL

SEQ ID NO: 50157 - protein, 311 aa, Vibrio cholerae
MKVAVIGAAGGIGQALALLLKNRLPAGSDLALYDIAPVTPGVAADLSHIPTPVTIKGYAGEDPTPALEGADVVLVSAGVARKPGMDRADLFNVNAGIVKALAEKIAVVCPKACVGIITNPVNTTVPIAAEVLKKAGVYDKRKLFGVTTLDVIRSETFVAALKDKDPGQVRLPVIGGHSGVTILPLLSQVEGVSFTDEEVAALTKRIQNAGTEVVEAKAGGGSATLSMGQAACRFGLALVKALQGESDVVEYAYVEGEGEYAPFFAQPIKLGKNGVEALLDIGKLSAYEQAALDGMLDTLKGDIQIGVEFVK

SEQ ID NO: 50158 - protein, 235 aa, Streptococcus pneumoniae TIGR4
MSTLALVEVMSEFNVKKIVFSSSATVYGINNQSPLIETMQTSATNPYGYTKVMLEQILKDVHVADSEWSIALLRYFNPIGAHESGLIGEDPSGIPNNLMPYIAQVAVGKLSELSVFGNDYDTLDGTGVRDYIHVVDLAIGHIKALEKVSEKTDVYIYNLGSGEGTSVLQLVNTFESVNKIPIPYKIVPRRSGDVATCYANADKAYKELNWRTTKSIEDMCRDTWNWQSKNPNGYN

SEQ ID NO: 50159 - protein, 295 aa, Caulobacter vibrioides
MAVNSLSVMSPDGGLSRYLTEIRKFPMLSKDEEFMLAQRWKEHQDPQAAHKMVTSHLRLVAKIAMGYRGYGLPIGEVISEGNVGLMQAVKKFEPEKGFRLATYAMWWIRASIQEYILRSWSLVKMGTTAAQKKLFFNLRKAKSQIAAFQEGDLHPDQVSQIATKLGVLDSEVISMNRRLSGPDASLNAPLRADGESEWQDWLADEEQVSQETRVAEDEEKSLRMSLLEEAMVELTDRERHILTERRLKDDPTTLEELAAQYGVSRERVRQIEVRAFEKLQKTMREAAIAKNMVDA

SEQ ID NO: 50160 - protein, 366 aa, Hevea brasiliensis
MASLAYSLFILSLFTFTLLNPVCTELDEYLFSFGDGLYDAGNAKFIYPDKYLPSYHHPYGTTFFDYPTGRFSDGRTVVDFVAENVSLPRIPPFKNKEANFTYGANFASEGATASDSNPLIDFRSQIRDFGELKLEWAVQLVNVTELARRLKKAVYLISFGADDYLNYEIPSEASREQLESIVDVVLGNISDRIKELYDFGARKFVVENVAPLGLIPFIKQTSDNSTLFYELASLHAMKLPQILEKIQDGYLFPEFNYTVFNYFGIIKEIIDAPGEHGFKYGDIACCGNSTYRGQACGFLDYEFCVCGNKTEYLFFDGTHNTDAANNLLAELMWDKESGFISPYGVKDFFPSPTTIQTLLTEATALG

SEQ ID NO: 50161 - protein, 282 aa, Triticum aestivum
  misc_feature (68)..(68): Xaa can be any naturally occurring amino acid
  misc_feature (232)..(232): Xaa can be any naturally occurring amino acid
  misc_feature (244)..(244): Xaa can be any naturally occurring amino acid
  misc_feature (247)..(247): Xaa can be any naturally occurring amino acid
  unsure (1)..(282): unsure at all Xaa locations
AYLGDTTERVCTKKQAGTGPEFPGYRRPTRPLLGNLLGKKKAEEDKEKQEELVTGMEKVSVEEPEVKXEEHEDGEKKETLFSKLHRSSSSSSSSSDEEEEEVIDDNGEVIKRKKKKGLKEKLKEKLPGHKDTEGEHVTGLPAPAAPASVQTHHDTDVVVEKIDGDVKTEAAPAVPEEEKKGFLEKIKEKLPGGHKKPEDAAPVPVTHAAPAPVHAPAPAAEEVSSPDAKEKXGLLGQIMGQLPXYHXTGGEDQAAAAAGEPNPPLDPRRARDSGPNLIELLA

SEQ ID NO: 50162 - protein, 343 aa, Arabidopsis thaliana
MEAEKKMVLPRIKFTEHKTNTTTIVSELTNTHQTRILRISVTDPDATDSSSDDEEEEHQRFVSKRRRVKKFVNEVYLDSGAVVTGSCGQMESKKKQKRAVKSESTVSPVVSATTTTTGEKKFRGVRQRPWGKWAAEIRDPLKRVRLWLGTYNTAEEAAMVYDNAAIQLRGPDALTNFSVTPTTATEKKAPPPSPVKKKKKKNNKSKKSVTASSSISRSSSNDCLCSPVSVLRSPFAVDEFSGISSSPVAAVVVKEEPSMTTVSETFSDFSAPLFSDDDVFDFRSSVVPDYLGGDLFGEDLFTADMCTDMNFGFDFGSGLSSWHMEDHFQDIGDLFGSDPLLAV

SEQ ID NO: 50163 - protein, 501 aa, ASPERGILLUS NIDULANS FGSC A4
MGQNDDQKTYRYNESPVYTTSNGCPVMDPQASQRVGPNGPLLLQDFNLIDLLAHFDRERIPERVVHAKGAGAYGEFEVTDDISDITVIDMLKGVGKKTKTFVRFSTVGGEKGSPDSARDPRGFACKFYTEEGNWDWVFNNTPVFFLRDPSKFPMFIHTQKRNPQTNLKDATMFWDYLSTHQEAVHQVMHLFSDRGTPYSYRHMNGYSGHTYKWIKPDGTFNYVQLHLKTDQGNKTFTDAEATRLAAENPDWHTQDLFNAIARGEYPSWTCYVQTLSPEQAEKFRWNIFDLTKVWPQSEVPLRRFGRFTLNKNPENYFAEVEQAAFSPSHLVPGVEPSADPVLQARLFSYPDTHRHRLGTSNYQSIPVNCPLRAFTPFHRDGAMSVNGNHGANPNYPSTFRPLQYKPVKASQEHEKWAGSVVTEQLPVTDEDFVQANGLWKVLGRQPGQQENFVGNVAGHLCNAHPRVRQATYGMFRRVNADLGKRIEKATEKKATEARARL

SEQ ID NO: 50164 - protein, 752 aa, Chlamydomonas reinhardtii
MALPGSTMNLTTRCSTTPRSAVVARAVAAPTRPTTKSAVPELLDSRPGERNLNFMEYAQATQMLDRLKGQASDLELLLDQLNALEASLDESVLAPPTVDDPKERAARQARRAAKRAERRAQATSATVAAAAGPAMSAVVSHSTPTKAAAAPATSTASSSSSDSGLLDLVSFVGGFDTRPIPATTSAPPAGASSSDVQHLEDLFKLSVGEPDIPRASASAAPAVLRPRKLTPKKPSAAPSAAVTAAPSPAPTLPSTPSTSARIAPAPGSLADELERLLGPTTSREAAESEDEDSFAGPSEDDLLALEQEVSRKSSRLPVLDEEDEEDEQQQLEDNEEDAVAGPGSLEASAMATRTSSQLSIMQTGPSLLSLVPASAAPGRSAKARASRRAARNGHASGRLGGATANAAGRGKVGSKDGTMNFLGKVESLSTLDVEKEREVTAVCRDFLFLEKVKRQCEKTLHRPATSEEIAAAVAMDVESLKLRYDAGLKAKELLLKSNYKLVMTVCKSFVGKGPHIQDLVSEGVKGLLKGVEKYDATKGFRFGTYAHWWIRQAVSRSLAETGRAVRLPMHMIEQLTRLKNLSAKLQTQLAREPTLPELAKAAGLPVTRVQMLMETARSAASLDTPIGGNELGPTVKDSVEDEREAADEEFGSDSLRNDMEAMLLELPEREARVVRLRFGLDDGKEWTLEEIGEALNVTRERIRQIEAKALRKLRVKTIDVSGKLMEYGENLEMLMDGSREMAARTSSGTRKT

SEQ ID NO: 50165 - protein, 234 aa, Glycine soja
MFTLNHSSDLYHVSPELSSSLDTSSPASEGSRGVAFSDEEVRLAVRHPKKRAGRKKFRETRHPVYRGVRRRNSDKWVCEVREPNKKTRIWLGTFPTPEMAARAHDVAAMALRGRYACLNFADSAWRLPVPATAEAKDIQKAAAEAAQAFRPDQTLKNANTRQECVEAVAVAVADTTTATAQGVFYMEEEEQVLDMPELLRNMVLMSPTHCLGYEYEDADLDAQDAEVSLWNFSI

SEQ ID NO: 50166 - protein, 151 aa, Solibacter usitatus Ellin6076
MIELLKKIFLVDLFQGLFVTFRNQNPKYIYTEQYPAERPKVAERYRGAPRLNINPDNGETLCISCNLCALACPENLIVVTSERSEVTKRKELVTFTYDTSRCMFCGLCEDACPVDALELTQDFEMASYTREGQIWDRQALEEGPRPTQYKC

SEQ ID NO: 50167 - protein, 1298 aa, Neurospora crassa
MTDGPTLAAIAALVKSLAVDPATTQTSGLRPSTHVRLPGPYTREKGDLERELSALVVRIEQLETAAIAASPPAMPDTPNAPTDALFSNGTLSPSSETPDARYPAPLPRNGFIDEALEGLREHVDDQSKLLDSQRQELAGVNAQLIEQKQLQEKALAIIEQERVATLERELWKHQKANEAFQKALREIGEIVTAVARGDLSKKVRMNSVEMDPEITTFKRTINTMMDQLQVFSSEVSRVAREVGTEGILGGQAQIEGVDGTWKELTDNVNVMAQNLTDQVREIASVTTAVAHGDLTKKIERPAKGEILQLQQTINTMVDQLRTFASEVTRVARDVGTEGILGGQADVEGVQGMWNELTVNVNAMANNLTTQVRDIIKVTTAVAKGDLTQKVQAECRGEIFELKKTINSMVDQLQQFAREVTKIAREVGTEGRLGGQATVHDVQGTWRDLTENVNGMAMNLTTQVREIAKVTTAVAKGDLTKKIGVEVQGEILDLKNTINTMVDRLGTFAFEVSKVAREVGTDGTLGGQAQVDNVEGKWKDLTENVNTMASNLTSQVRGISTVTQAIANGDMSRKIEVEAKGEILILKETINNMVDRLSIFCNEVQRVAKDVGVDGIMGGQADVAGLKGRWKEITTDVNTMANNLTAQVRAFGDITNAATDGDFTKLVEVEASGEMDELKKKINQMVYNLRDSIQRNTQAREAAELANKTKSEFLANMSHEIRTPMNGIIGMTQLTLDTDLTQYQREMLNIVNSLANSLLTIIDDILDLSKIEARRMVIEEIPYTLRGTVFNALKTLAVKETEKFLDLTYRVDHSVPDHVVGDSFRLRQIILNLVGNAIKFTEHGEVSLTIQKASSVQCSTEEYAIEFVVSDTGIGIPADKLDLIFDTFQQADGSMTRKFGGTGLGLSISKRLVNLMGGDVWVKSEYGKGSKFFFTCVVRLANDDISLIAKQLNPYKSHQVLFIDKGRTGHGPEIAKMLHGLGLVPIVVDSERNPALEKARAAGQAPYDVIIVDSIEDARRLRSVDDFKYLPIVLLAPVVHVSLKSCLDLGITSYMTTPCQLIDLGNGMVPALENRATPSLADNTKSFEILLAEDNTVNQRLAVKILEKYHHVVTVVGNGEEAVEAVKRKKFDVILMDVQMPIMGGFEATAKIREYERSLGSQRTPIIALTAHAMMGDREKCIQAQMDEYLSKPLQQNHLIQTILKCATLGGQLLEKNRERELTRAADAVTGGRRDNGMYSASQAAQHAALRPPLATRGLTAADSLVSGLESPSIVTADKEDPLSRARASLSEPNIHKAS

SEQ ID NO: 50168 - protein, 456 aa, Bacillus licheniformis ATCC 14580
MDFRRDDEQKHANEEQFHEEAQTPQTAGSEEQQSEQPAKEPELILKKDTDDQSDLTNKETAAALEDARETRAAKEKRRKASWLSPILGGIIGGGLVLGISPYLPGDHPSETAGTGQTEPKQSQNFTTKPVTNADNVPDMVEDLEPAIVGVSNIQTSFGFSEDDVEESGTGSGVIFKKDGGKAYIITNNHVVEGASKVTISLYNGKTADAKIIGSDALTDLAVLEISSKGVDKVASFGDSAKLRAGEKVIAIGNPLGLQFSRTVTEGIISGVNRTIEVSTSEGNWDMNVLQTDAAINPGNSGGPLINSSGQVIGINSLKISQSGVESLGFAIPSNDVQPIVDELLEKGKVERPFLGVQMIDMQQVPEQYQQNTLGLFGDQLNKGVYIDKVSPKSPAADAGMKAGDVITKMNGKNVETTSDLRKILYTEAKAGDTVTFEVLRNGKQTTMKAKLAKSKS

SEQ ID NO: 50169 - protein, 404 aa, Shewanella sp. MR-4
MRPIIKSNKLDTVCYDIRGPVHKEARRLEDEGHRILKLNIGNPAPFGFEAPEEIVRDVILNLPSAQGYCESKGLFSARKAIVQHYQAQGIKGVDIEDVYIGNGVSELIMMAMQGLLNTDDEVLIPSPDYPLWTAAANLAGGKAVHYRCDEEADWFPDLDDIKSKISSRTRGIVLINPNNPTGAVYSKELLLQVIELCREHNLILFADEIYDKILYDEAKHIPAASLSDDILTVTFNGLSKAYRAAGFRVGWMMLSGNLKAAKSYIEGLEMLSSMRLCANVPNQHAIQTALGGYQSINELILPSGRLTVQRDTCYELLNQIPGVSVKKPKGALYAFPKLDMKKFNLRDDERLVLDLLRDKKILLVHGSAFNWPEPDHLRVVFLPYKEDLTKALTEFGNFLETYKQ

SEQ ID NO: 50170 - protein, 488 aa, Listeria seeligeri
MTDRRNLTTNQGVPIGDNQNSMTAGLKGPTLLEDYVLIEKLAHFDRERVPERVVHARGAGAHGKFVTKKSMKKYTKAQFLQEEGTETEVFARFSTVIHGQHSPETLRDPRGFSVKFYTEEGNYDFVGNNLPVFFIRDAIKFPDVIHSLKPDPRTNIQDGNRYWDFFSLTPEATTMITYLFSDEGTPASYREIRGSSVHAFKWINEEGKTVYVKLRWVPKAGIVNLSTDQAAQIQAKEFNHASRDLYEAIENGDYPEWDLYVQVLDPKDLDNYDFNPLDATKDWFEDVFPYEHVGTMTLNRNPDNIFAETESVGFNPGVLVPGMLPSEDRVLQGRLFSYSDTQRHRVGPNYLQLPINSPKTPVDNNQRDGQMPFKQQTSSINYEPNSYDTEPKENPAYIEPEQEIRGDISGRLVAEKPNNFGHAKEVWKRYSDAERAALVKNIVDDWEGVREDIKIRNLRNFYQVEPEFAERVAAGTGINLAEHVIDLK

SEQ ID NO: 50171 - protein, 275 aa, Brucella suis 1330
MTVPTVKLNDGNHIPQLGYGVWQISNDEAVSAVSEALKAGYRHIDTATIYGNEKGVGKAINGSGIARADIFLTTKLWNSDQGYESTLKAFDTSLKKLGTDYVDLYLIHWPMPSKDLFMETWRAFIKLKEEGRVKSIGVSNFRTADLERLIKESGVTPVLNQIELHPQFQQDELRLFHGKHDIATEAWSPLGQGKLLEDPTLKSIAEKHAKSVAQIILRWHIETGNIVIPKSITPARIKENFDIFDFTLNGTDHDAITKLDMADGRIGPNPSVFSA

SEQ ID NO: 50172 - protein, 473 aa, Triticum aestivum
MDVPLASKTFPSPSPSKREQCNIDGHKSSSKHADLNPHVDDSVLGIILGGGAGTRLYPLTKKRAKPAVPLGANYRLIDIPVSNCLNSNISKIYVRTQFNSASLNRHLSRAYGSNIGGYKNEGFVEVLAAQQSPDNPDWFQGTADAVRQYLWLFEEHNVMEYLILAGDHLYRMDYEKFIQAHRETDADITVAALPMDEERATAFGLMKIDEEGRIIEFAEKPKGEQLKAMMVDTTILGLDDARAKEMPYIASMGIYVISKHVMLQLLREQFPGANDFGSEVIPGATSTGMRVQAYLYDGYWEDIGTIEAFYNANLGITKKPIPDFSFYDRSAPIYTQPRHLPPSKVLDADVTDSVIGEGCVIKNCKIHHSVVGLRSCISEGAIIEDTLLMGADYYETEADKKLLAEKGGIPIGIGKNSHIKRAIIDKNARIGDNVMIINVDNVQEAARETDGYFIKSGIVTVIKDALLPSGTVI

SEQ ID NO: 50173 - protein, 355 aa, Arabidopsis thaliana
MTIECVNPEGLRFNQMKSSSHQTLETRMRPILMKGHERPLTFLRYNRNGDLLFSCAKDHTPTVWFADNGERLGTYRGHSGAVWCCDISRDSSRLITGSADQTAKLWDVKSGKELFTFKFGAPARSVDFSVDDHLAVITTDHFVGTSSAIHVKRIAEDPEDQVGDSVLVLQSPDGKKKINRAVWGPLNQTIVSGGEDAAIRIWDAETGKLLKQSDEEVGHKEAITSLCKAADDSHFLTGSHDKTAKLWDMRTLTLIKTYTTVVPVNAVAMSPLLNHVVLGGGQDASAVTTTDHRAGKFEAKFYDTILQEEIGGVKGHFGPINALAFSPDGKSFSSGGEDGYVRLHHFDSNYFNIKI

SEQ ID NO: 50174 - protein, 608 aa, Magnetospirillum magnetotacticum MS-1
MCGICGYVGAERPGLIQAMIAEIRHRGPDGEGCDSALGIHLGHARLAILDPSHGAQPLTGADGRYTVSYNGEIYNYPDLRRELEALGHRFETTCDTELLPLGFAAWGEGLFARLDGMFAFALRDNADGRLWLVRDQLGIKPLYYSLAGGELAFASSARALTRHPQVSRRLRPDAIQEFLQFRWVRSGRHLFSDVEILPPGGVLRWTEGEARLDRFWTPARRGPARNALPRDWAAEVELVLEDSVRRQLRADVALGIFLSGGVDSAMIGHYAARNAANRLTAFTFSTGDRVDETAQAAAMARDFGFDHRVVSLTASDFADFPQAVACLDNPVGDAVVLPTWKLCREAAREVKVVLTGEGADEMFAGYAHLPILRKLDQLGSVAGVLRLLAPLIRLMPVGLLNHLFDYQASLGRLGRDAAAELLAVAGDSGKMLARASAIMGDAEMAQATTLGPPPPRPKADLSLGGLLLDLTRGWLPEEILHKMDQLSMAHGLEARVPYVTTALYDLLLRCPDQMAMGKTLLRHVASQSGLAAARRRKVAFHLPVETLWRPQLEEMCREYLSPAMIRRHAILNEAFVGRSLSLLKAGEFLASKRLVAMVSLHAWLDAHT

SEQ ID NO: 50175 - protein, 994 aa, Arabidopsis thaliana
MPAIASKQYSDDVSLLVLLLDTNPLFWSTTSITFSQFLSHVLAFLNAVLGLNQLNQVVVIATGYSSCDYIYDSSLTSNHGNFESNGTGMPAIFGSLLKKLEEFVTKDEELSKEEVSEDRIPSCLLSGSLSMALCSKPIACLRPSMLSDIQRVFRSGHLHPQPRILCLQGSPDGPEQYVAVMNSIFSAQRLMVPIDSCYIGVQNSAFLQQASYITGGVHHTPKQLDGLFQYLTTWRTNETEGRESSVWRAMDLKKRRKILEKKKTIHDLIKRASSIDDPLSPFDSFRRYRRNVLTCFVLSSQKSLDDLSLYLESGRGDRLSSSVKHHIQKLLKTNMEGFYGSDWPIQAKVKRKEMSSADAHYIFVRELRFGKAYETSTQRTCMEGCNQIAGFVHYRFILEEEIPVLYVYEIQLESRVQGKGLGEFLMQLIELIASKNRMSAIVLTVLTSNALAMTFYMSKLGYRISSISPSKANLPTLSVKYEILCKTFDSEAKSVLEKTDESDEDLVPPMTWFTPEADTELQQCLATAKLTILKPESSQQTSRLQPAETKFGKLYILGLGLSRAGFVRIIVAARKRFRYFLMAAEDRSEELSSNVENGSCNSNEGINPETSSHWIENVVKVRKPYTVTKQREKWSEEEHDRFLEAIKLYGRGWRQIQEHIGTKTAVQIRSHAQKFFSKVLFVHMFHNISSTDLMAQEADSRSEGSVKAIVIPPPRPKRKPAHPYPRKSPVPYTQSPPPNLSAMEKGTKSPTSVLSSFGSEDQVNRCSSPNSCTSDIQSIGATSIDKKNNYTTSKQPFKDDSDIGSTPISSITLFGKIVLVAEESHKPSSYNDDDLKQMTCQENHYSGMLVDTNLSLGVWETFCTGSNAFGSVTEASENLEKSAEPISSSWKRLSSLEKQGSCNPVNASGFRPYKRCLSEREVTSSLTLVASDEKKSQRAPICWVTWIIAFHEPNPKSELINIRVKLQTLRIETLCKGNPLNFCGHLLKNWSPQV

SEQ ID NO: 50176 - protein, 572 aa, Arabidopsis thaliana
MSSCLLPQFKCPPDSFSIHFRTSFCAPKHNKGSVFFQPQCAVSTSPALLTSMLDVAKLRLPSFDTDSDSLISDRQWTYTRPDGPSTEAKYLEALASETLLTSDEAVVVAAAAEAVALARAAVKVAKDATLFKNSNYTNLLTSSTADKRSKWDQFTEKERAGILGHLAVSDNGIVSDKITASASNKESIGDLESEKQEEVELLEEQPSVGLAVRSTRQTERKARRAKGLEKTASGIPSVKTGSSPKKKRLVAQEVDHNDPLRYLRMTTSSSKLLTVREEHELSAGIQDLLKLERLQTELTERSGRQPTFAQWASAAGVDQKSLRQRIHHGTLCKDKMIKSNIRLVISIAKNYQGAGMNLQDLVQEGCRGLVRGAEKFDATKGFKFSTYAHWWIKQAVRKSLSDQSRMIRLPFHMVEATYRVKEARKQLYSETGKHPKNEEIAEATGLSMKRLMAVLLSPKPPRSLDQKIGMNQNLKPSEVIADPEAVTPEDILIKEFMRQDLDKVLDSLGTREKQVIRWRFGMEDGRMKTLQEIGEMMGVSRERVRQIESSAFRKLKNKKRNNHLQQYLVAQS

SEQ ID NO: 50177 - protein, 344 aa, Fusarium cortaderiae
  misc_feature (119)..(121): Xaa can be any naturally occurring amino acid
  unsure (1)..(344): unsure at all Xaa locations
LVSGGVISGVGKGIIASSAGLLLKTLGLRVTAIKTDPYINTDAGLLNPLEHGECFVLDDGGETDLDLGNYERYLGIQLSRDSNITTGKIYKQVIEKERRGDYLGKTVQVVPHITDAIQXXXERVAKIPVDASGEAPDVCIIELGGTIGDLESGPFVEALSQLRHRLGRDNFLSISVSYVPIINGEEKTKPTQHAIRQVRSAGLIPDVKGATSEEFSATAEHRVVIFMPEGSKEQMGGTMRLGSRTSHFKPGTEWSKLRGLYGGVEVVEERHRHRYEVNPDYIEDLEKAGLSLTSMDDQGVRVETIELKDHPFFVGLQAHPEYKSKTLAPAPSLLGLVAASSGCL

SEQ ID NO: 50178 - protein, 665 aa, Oryza sativa
MAASTMKHLVQVGEAREAAEEDGGAPSAGPAYRCAYGGGAASPPAVPGLECCWDIFRMTVERCPDNKMLGRREIVDGKAGKYTWITYKEAYDTVIKVGASIRSLGVGKGGRCGIYGANCPEWVISMQACNAHGIYCVPLYDTLGAGAVEFILCHAEVEIAFIEEKKIGEVLKTFPNATKYLKTIVSFGKVNPEQKEKVEQNGVSIYSWEEFLQLGGEEKYELPTKQKDDICTIMYTSGTTGDPKGVLISNRSIITIISAVDGFLANSKEQLREDDVYISYLPLAHIFDRVLEEVFIHHGASIGFWRGDVKLLVEDIGELKPTIFCAVPRVLDRIYGGLQDKVSTGGFLKKTLFNVAYKYKQGNMVKGSKHEEAAAMFDKLVFTKVKRGLGGRVRLILSGAAPLSNHVEEYLRVVTCSLVLQGYGLTETCAGSFVSLPNNMSMLGTVGPPVPYVEVHLESVPEMGYDALSKESPRGEICIRGDTLFSGYHKREDLTKEVLVDGWFHTGDIGEWQSGGSMKIIDRKKNIFKLSQGEYVAVENLENIFGQAPGVDSIWVYGNSFESCLVAVVNPNKQALERWAESNGVTGDFATMCEDPKAKEFILGELTKTGKEKKLKGFELIRAVHLEPVPFDMDRDLITPTYKKKRPQLLKYYQNVIDSMYKNMK

SEQ ID NO: 50179 - protein, 324 aa, Hypocrea jecorina
MASPTLKLNSGYDMPQVGFGLWKVDNAVCADTVYNAIKAGYRLFDGACDYGNEKECGEGVARAIKDGLVKREDLFIVSKLWQTFHDEDKVEPITRRQLADWQIDYFDLFLVHFPAALEYVDPSVRYPPGWFYDGKSEVRWSKTTTLQQTWGAMERLVDKGLARSIGVSNYQAQSVYDALIYARIKPATLQIEHHPYLQQPDLVSLAQTEGIVVTAYSSFGPTGFMELDMPRAKSVAPLMDSPVIKALADKHRRTPAQVLLRWATQRGIAVIPKTSRPEVMAQNLDNTSFDLDSEDLAKIADMDLNIRFNKPTNYFSANKLYLFG

SEQ ID NO: 50180 - protein, 311 aa, Vibrio cholerae
MKVAVIGAAGGIGQALALLLKNRLPAGSDLALYDIAPVTPGVAADLSHIPTPVTIKGYAGEDTTPALEGADVVLVSAGVARKPGMDRADLFNVNAGIVKALAEKIAVVCPKACVGIITNPVNTTVPIAAEVLKKAGVYDKRKLFGVTTLDVIRSETFVAALKDKDPGQVRVPVIGGHSGVTILPLLSQVEGVSFTDEEVAALTKRIQNAGTEVVEAKAGGGSATLSMGQAACRFGLALVKALQGESDVVEYAYVEGEGEYAPFFAQPIKLGKNGVEELLDIGKLSAYEQAALDGMLDTLKGDIQIGVEFVK

SEQ ID NO: 50181 - protein, 193 aa, Shigella boydii
ADERPGKINLGIGVYKDETGKTPVLTSVKKAEQYLLENETTKNYLGIDGIPEFGRCTQELLFGKGSALINDKRARTAQTPGGTGALRVAADFLAKNTSVKRVWVSNPSWPNHKSVFNSAGLEVREYAYYDAENHTLDFDALINSLNEAQAGDVVLFHGCCHNPTGIDPTLEQWQTLAQLSVEKGWLPLFDFAY

SEQ ID NO: 50182 - protein, 1281 aa, Neurospora crassa
MTDGPTLAAIAALVKSLAVDPATTQTSGLRPSTHVRLPGPYTREKGDLERELSALVVRIEQLETAAIAASPPAMPDTPNAPTDALFSNGTLSPSSETPDARYPAPLPRNGFIDEALEGLREHVDDQSKLLDSQRQELAGVNAQLIEQKQLQEKALAIIEQERVATLERELWKHQKANEAFQKALREIGEIVTAVARGDLSKKVRMNSVEMDPEITTFKRTINTMMDQLQVFSSEVSRVAREVGTEGILGGQAQIEGVDGTWKELTDNVNVMAQNLTDQVREIASVTTAVAHGDLTKKIERPAKGEILQLQQTINTMVDQLRTFASEVTRVARDVGTEGILGGQADVEGVQGMWNELTVNVNAMANNLTTQVRDIIKVTTAVAKGDLTQKVQAECRGEIFELKKTINSMVDQLQQFAREVTKIAREVGTEGRLGGQATVHDVQGTWRDLTENVNGMAMNLTTQVREIAKVTTAVAKGDLTKKIGVEVQGEILDLKNTINTMVDRLGTFAFEVSKVAREVGTDGTLGGQAQVDNVEGKWKDLTENVNTMASNLTSQVRGISTVTQAIANGDMSRKIEVEAKGEILILKETINNMVDRLSIFCNEVQRVAKDVGVDGIMGGQADVAGLKGRWKEITTDVNTMANNLTAQVRAFGDITNAATDGDFTKLVEVEASGEMDELKKKINQMVYNLRDSIQRNTQAREAAELANKTKSEFLANMSHEIRTPMNGIIGMTQLTLDTDLTQYQREMLNIVNSLANSLLTIIDDILDLSKIEARRMVIEEIPYTLRGTVFNALKTLAVKETEKFLDLTYRVDHSVPDHVVGDSFRLRQIILNLVGNAIKFTEHGEVSLTIQKASSVQCSTEEYAIEFVVSDTGIGIPADKLDLIFDTFQQADGSMTRKFGGTGLGLSISKRLVNLMGGDVWVKSEYGKGSKFFFTCVVRLANDDISLIAKQLNPYKSHQVLFIDKGRTGHGPEIAKMLHGLGLVPIVVDSERNPALEKARAAGQAPYDVIIVDSIEDARRLRSVDDFKYLPIVLLAPVVHVSLKSCLDLGITSYMTTPCQLIDLGNGMVPALENRATPSLADNTKSFEILLAEDNTVNQRLAVKILEKYHHVVTVVGNGEEAVEAVKRKKFDVILMDVQMPIMGGFEATAKIREYERSLGSQRTPIIALTAHAMMGDREKCIQAQMDEYLSKPLQQNHLIQTILKCATLGGQLLEKNRERELTRAADAVTGGRRDNGMYSASQAAQHAALRPPLATRGLTAADSLVSGLESPSIVTADKEDP

SEQ ID NO: 50183 - protein, 347 aa, Mannheimia succiniciproducens MBEL55E
MMEIKTLSCVVRGPKDVGVMEQSINYDESSKEQTLVKITRGGICGSDLHYYQYGKVGNYEIKHPMILGHEVIGTVVKTNAPDLYVGQKVAINPSKPCLTCKYCLSGDTNQCETMRFFGSAMYNPHVDGGFTQYKVVDNSQCIDYPQDVSDDIMAFAEPLAVTIHAAKQAGDLAGKRVFVSGVGPIGCLAVAAIKASGAKEIVVSDLSRRCLDLALEMGATKALNAKDDFSEYMAHKGEFDVSFEASGHPSSIERCLAVTKARGTIIQIGMGGAIPEFPIMTLIAKEICLKGSFRFIEEFNTSVEWLSSGKVNPLPLLSATFPYTELEKALIIAGDKDNISKVQLSFE

SEQ ID NO: 50184 - protein, 297 aa, Zea mays
MAFTSSLAPFFPPSGTFRAHPARRLRADAPGRFVASCLPPPDVVVTREQGKNARLISALEKHNVHPLELPLIKHVEGPDTDRLSDVLRNDKFDWIIVTSPEAAAMFLQGWKTAGSPKVRVAVVGEGTARVFHEVSESDDQSLELAFSPSKALGKVLASELPRSNENSCKVLYPASAKAGHEIEDVLSERGFDVTRLNTYTTVPVEDVDPLTLNLAISAPVVAVASPSALRAWLNLISKSDNWNNSVACIGETTASAAKKLGLKSIYYPTTPGLEGWVESILEALRVHRTASKEAPKR

SEQ ID NO: 50185 - protein, 164 aa, Arabidopsis thaliana
  misc_feature (31)..(31): Xaa can be any naturally occurring amino acid
  misc_feature (39)..(39): Xaa can be any naturally occurring amino acid
  misc_feature (46)..(46): Xaa can be any naturally occurring amino acid
  misc_feature (50)..(50): Xaa can be any naturally occurring amino acid
  misc_feature (72)..(76): Xaa can be any naturally occurring amino acid
  unsure (1)..(164): unsure at all Xaa locations
APRSSTNSDRREKLLKQSDEEVGHKKDITSXLCKAADDXSHFLYRXSLDXTAKLWDMRTLTLLKTLHHCGAXXXXXSLSPLLNHVVLGGGQDASAVTTTDHRAGKFEAKFYDKILQEEIGGVEGHFGPINALAFNPDGKSFSSGGEDGYVRLHHFDSDYFNIKI

SEQ ID NO: 50186 - protein, 673 aa, Neurospora crassa
MSESSVAYHDGPPRGADGKPLPLDFTHHLSEVTKRRQASQMKKYYRFFQIPGIKNLAGGLPNTKFFPFETLEAQTAKPERWQPTPNHPGTDKNKKDPAAEPAHITVPTVSGEANPVKKVDVATALQYGQANGYPPLLDWVRKFTRDHLHPDAPYSGGPDVILTCGSTDGFAKTLEMFVNPWIDGLNDPRERPGLLCETFVYGNILSQAEPKGVQIVPIKADENGMLATGEGGLEDVLANWDVSKGKRPHLMYTVTLGHNPTGFVIPVSRRKEIYAICSRYDVIIVEDEPYWYLQFPSATAANTAKATAKASGLKPSQPEQGGEISKRTVSTGYPFLDSLTPSYISIDVDGRVIRLDTFSKTIAPGCRLGWITAQPELIDRFNRIAETSTQQPSGFVQSLVAELVMGPQPEAPSSSSSSSSSSSTTATTSSSSGWSLFRSSSSKPQPAKQTPSGEGWQMTGWVRWLEGLRGMYERRMNRMCTILDSGSSLVSSSTRLRATSGSSSVGTPGDWEVITTTPLYTYSWPEGGMFIWLRMHFDTHPLWQHPLFFPSNGNGEGEKTKVIDGPTISLALMLFLTLKPHLVLVSAGNMFSATSQIREEVGWQYFRLCFAAVSEEDVDSGAQRFVDGVRAFWKITDARVIEKLVEQKVDTEEVVARVMGQEGVNNLGGWLGC

SEQ ID NO: 50187 - protein, 479 aa, Shewanella sp. MR-4
MFRRTKIVTTLGPATDRDDNLRRIIAAGANVVRLNFSHGSPEDHLKRATQAREIAKELGVHVAILGDLQGPKIRVSTFKDNKKVQLNLGQAYILDAELGKGEGDENQVGIDYKQLPDDVKIGDILMLDDGRVQLRVERVEGRKVHTTVTVAGPLSNNKGINKQGGGLSAAALTEKDKADILTAAMIQVDYLAVSFPRSGADLEYARSLAQQAGSNALIVAKVERAEAVASEEAMDDVILASDVVMVARGDLGVEIGDAALVAVQKKLIARSRQLNKIVITATQMMESMISSPMPTRAEVMDVANAVLDGTDAVMLSAETAAGDFPEETVKAMANVCIGAESHPSVKVSKHRLDARFTSVEETIALSTMYAANHLEGVKAIIALTESGATPKLMSRISSSLPILGLSRHETTLAKMALYRGVLPIYFDSTIYPADELAQKALESLTTAGYLQSGDLVLMTKGDAMETIGGTNTCKVLIVA

SEQ ID NO: 50188 - protein, 268 aa, Medicago truncatula
  misc_feature (192)..(192): Xaa can be any naturally occurring amino acid
  misc_feature (199)..(199): Xaa can be any naturally occurring amino acid
  unsure (1)..(268): unsure at all Xaa locations
MAISHNTLAFTFGMLGNVISFLVFLAPISTFYRIYKKKSTEGFQSLPYLVALFSSMLWLYYALLKKDAFLLITINSFGCVVETIYIILYIIYAPRDARNLTFKLLSAMNVGSFALILIVTNYAVHGPLRVQVLGWVCVSLSVSVFAAPLSIVAQVVRTKSVEFMPFNLSFTLTLSATMWFGYGFFLKDICIXLPNVLGXVLGLLQMLLYAIYRNGGEKAMKKEKKAPIEPPKSIVIETQLEKIEQEKKNKDDDNEEKDKSEEPIGCGV

SEQ ID NO: 50189 - protein, 292 aa, Triticum aestivum
  misc_feature (147)..(147): Xaa can be any naturally occurring amino acid
  misc_feature (211)..(211): Xaa can be any naturally occurring amino acid
  unsure (1)..(292): unsure at all Xaa locations
MAKDEVMETGGGGDFAAKDYTDPPPAPLIDAAELASWSLYRAVIAEFIATLLFLYITVATVIGYKHQTDPAVNAAADAACGGVGVLGIAWAFGGMIFVLVYCTAGISGGHINPAVTFGLFLARKVSLVRALLYMIAQCLGAMCGVGXLVKAFQSAYFVRYGGGANTLAAGYSKGTGLAAEIIGTFVLVYTVFSATDPKRSARDSHVPVLAXPLPIGFAVFMVHLATIPITGTGINPARSLGAAVIYNKDKAWDDQWIFWVGPMIGAAIAAFYHQYILRAGAIKALGSFRSNA

SEQ ID NO: 50190 - protein, 271 aa, Oryza sativa (japonica cultivar-group)
MAAATSHSAIVHTQSHRWRPNQAAIWFWFCLCIEVFGGGAGESSLILIRHGESLWNEKNLFTGCVDVPLTPKGVEEAIEAGKRICSIPIDVIFTSSLIRAQMTAMLAMMQHRRKKVYSEETRKQSIPVITAWQLNERMYGELQGLNKQETADRFGNEQVHKWRRSYDIPPPNGESLEMCAERAVAYFKEHVVPQLTAGKHVMIAAHGNSLRSIIMQLDKLTSQEVISLELSTGIPMLYIFKEGKFIRRGSPVGPSEASVCAYTRVRVFSNL

SEQ ID NO: 50191 - protein, 546 aa, Brucella suis 1330
MAAKDVKFGRTAREKMLRGVDILADAVKVTLGPKGRNVVIDKSFGAPRITKDGVSVAKEVELEDKFENMGAQMLREVASKTNDTAGDGTTTATVLGQAIVQEGAKAVAAGMNPMDLKRGIDLAVNEVVAELLKKAKKINTSEEVAQVGTISANGEAEIGKMIAEAMQKVGNEGVITVEEAKTAETELEVVEGMQFDRGYLSPYFVTNPEKMVADLEDAYILLHEKKLSNLQALLPVLEAVVQTSKPLLIIAEDVEGEALATLVVNKLRGGLKIAAVKAPGFGDRRKAMLEDIAILTGGQVISEDLGIKLESVTLDMLGRAKKVSISKENTTIVDGAGQKAEIDARVGQIKQQIEETTSDYDREKLQERLAKLAGGVAVIRVGGATEVEVKEKKDRVDDALNATRAAVEEGIVAGGGTALLRASTKITAKGVNADQEAGINIVRRAIQAPARQITTNAGEEASVIVGKILENTSETFGYNTANGEYGDLISLGIVDPVKVVRTALQNAASVAGLLITTEAMIAELPKKDAAPAGMPGGMGGMGGMDF

SEQ ID NO: 50192 - protein, 282 aa, Arabidopsis thaliana
MGRSPCCEKAHTNKGAWTKEEDERLVAYIKAHGEGCWRSLPKAAGLLRCGKSCRLRWINYLRPDLKRGNFTEEEDELIIKLHSLLGNKWSLIAGRLPGRTDNEIKNYWNTHIRRKLINRGIDPTSHRPIQESSASQDSKPIQLEPVTSNTINISFTSAPKVETFHESISFPGKSEKISMLTFKEEKDECPVQEKFPDLNLELRISLPDDVDRLQGHGKSTTPRCFKCSLGMINGMECRCGRMRCDVVGGSSKGSDMSNGFDFLGLAKKETTSLLGFRSLEMK

SEQ ID NO: 50193 - protein, 473 aa, Pseudomonas syringae pv. phaseolicola 1448A
MTLYVNLAELLGSRIENGFYRPGDRLPSVRALSVEHGVSLSTVQQAYRVLEDNGLAAPKPKSGYFVSVSRAAPALPAVGRPVQRPVDISQWDQVLDLIRVAPLEAVTQLGRGMPDATSPTLKPLMRALSQLSRHQDMPGLYYDNIYGVRRLREQIARLMLDSGCNLTANDQIVTNGCHEALSASVRAICSPGDIVAVDSPSFFGAMQTLKGVGMKALEIPTDPLTGISLEALELALEQWPIKVIQLTPNCNNPLGYVMPEARKRALLTLAQRFDVAIIEDDVYGDLAYNYPRPRTIKSFDEDGRVLLCSSFSKTLAPGLRIGWVAPGRYLEQVLHMKYIGTGSTAPQPQLAIADFIEGGHYEPHVRRMRTQYQRSRDQMIDWVMRYFPEGTRASRPQGGFMLWVELAEGFDTLRLNRALLDKGVQIAVGSIFSASGKYRNCMRMNFAAKPSREIENAVRIVGETIALLNAQTD

SEQ ID NO: 50194 - protein, 631 aa, Exiguobacterium sp.
MKKYRVNVQGMTCSGCEQHVAVALENMGAKAIEVDFRRGEAVFELPDDVKVEDAKNAIADANYHPGEAEEFQSEQKTNLLKKYRLNVEGMTCTGCEEHIAVALENAGAKGIEVDFRRGEALFELPYDVDIDIAKTAITDAQYQPGEAEEIQVQSEKRTDVSLNDEGNYDYDYIIIGSGGAAFSSAIEAVALNAKVAMIERGTVGGTCVNVGCVPSKTLLRAGEINHLAKNNPFVGLHTSASNVDLAPLVKQKNDLVTEMRNEKYVNLIDDYGFELIKGEAKFVNENTVEVNGNQITAKRFLIATGASSTAPNIPGLDEVDYLTSTSLLELKKVPNRLTVIGSGYIGMELGQLFHNLGSEVTLIQRSERLLKEYDPEISEAITKALTEQGINLVTGATYERVEQDGDIKKVHVEINGKKRIIEAEQLLIATGRKPNTESLNLHAAGVEVGSRGEIVIDDYLKTTNSRIYSAGDVTLGPQFVYVAAYEGGLAARNAIGGLNQKVNLEVVPGVTFTSPSIATVGLTEQQAKEKGYEVKTSVLPLDAVPRALVNRETTGVFKLVADAKTLKVLGAHVVAENAGDVIYAATLAVKFGLTVGDLRETMAPYLTMAEGLKLAVLTFDKDVSKLSCCAG

SEQ ID NO: 50195 - protein, 88 aa, Rubrobacter xylanophilus DSM 9941
MKFKPLGERALVKLVEREEKTASGIVLPDTAKEKPQTAEVIAVGDSEDIKVKEGDVVVFAKYSGTEISLNGDDYMILDADDILGVVEE

SEQ ID NO: 50196 - protein, 225 aa, Methanosarcina acetivorans
MAEAKPALEKEAAVKTGSIPSESEDETASHKEGSTSLVSIDEYLAAGVHIGTQQKTQDMMRFVYRVRTDGLYVLDIQSTDERIRVASKLLSHYDPARILVVSSRQYGQHPARMFSRALGTRAMLGRFIPGSLTNPQIHGFFEPDVIIVTDPAGDAQVLKEASSIGVPVVALCDTNNLTSNVDLVIPTNNKGRKALSLVYWLLAREVSRLNDTPFNYELTDFETPL

SEQ ID NO: 50197 - protein, 288 aa, Arabidopsis thaliana
  misc_feature (93)..(93): Xaa can be any naturally occurring amino acid
  misc_feature (105)..(105): Xaa can be any naturally occurring amino acid
  unsure (1)..(288): unsure at all Xaa locations
KWPKHVEGPEGFQTRDYEDPPPTPFFDADELTKWSLYRAVIAEFVATLLFLYITVLTVIGYKIQSDTKAGGVDCGGVGILGIAWAFGGMIFIXLSYCTAGISGGXHINPAVTFGLFLARKVSLIRAVLYMVAQCLGAICGVGFVKAFQSSYYDRYGGGANSLADGYNTGTGLAAEIIGTFVLVYTVFSATDPKRNARDSHVPVLAPLPIGFAVFMVHLATIPITGTGINPARSFGAAVIYNKSKPWDDHWIFWVGPFIGAAIAAFYHQFVLRASGSKSLGSFRSAANV

SEQ ID NO: 50198 - protein, 176 aa, Manihot esculenta
MASSMLSTATVASINRVSPAQATMVAPFTGLKSTPVFPTTRKTNSDITSITSNGGKVQCMKVWPTLGMKKFETLSYLPPLTREQLAKPSCIGPCLEFELEHGLVYREHARVPGYYDGRYWTMWKLPMFGCTDAAQVLKELDELIKHHPDGYARIIGFDNVRQVQCISFLAYKPPGA

SEQ ID NO: 50199 - protein, 182 aa, Manihot esculenta
MASSMLSTATVASINRVSPAQATMVAPFTGLKSTPVFPTTRKTNSDITSITSNGGKVQCMKVWPTLGMKKFETLSYLPPLTREQLASEVEYLLRSGWIPCLEFELEHGLVYREHARVPGYYDGRYWTMWKLPMFGCTDAAQVLKELDELIKHHPDGYARIIGFDNVRQVQCISFLAYKPPGA

SEQ ID NO: 50200 - protein, 193 aa, Shigella boydii
ADERPGKINLGIGVYKDETGKTPVLTSVKKAEQYLLENETTKNYLGIDGIPEFGRCTQELLFGKGSALINDKRARTAQTPGGTGALRVAADFLAKNTSVKRVWVSNPSWPNHKSVFNAAGLEVREYAYYDAENHTLDFDALINSLNEAQAGDVVLFHGCCHNPTGIDPTLEQWQTLAQLSVEKGWLPLFDFAY

SEQ ID NO: 50201 - protein, 478 aa, Glycine max
MFASVADGAFEGSGVSGPFLIPQRFVWPYGGTTVFLTGSFTRWSNHIAMSPMEGCPAVFQVVCNLMPGFHQYKFNVDGEWRHDEQQPFVNGSCGVVNTIYIVREPDILPSILNTETPGRSHMEVDNMEANPRMTVSDLEVSRHRISVFLSTHTSYDLLPESGKVIALDINLPVKQAFHVLYEQGISMAPLWDFCRSQFVGVLSAMDFILILKELGNHSSNLTQEQLETHTIAAWKEGKFQQFRTLDSNGGSYPWRFVHAGPHECLKDVALKVLQNKVSTVPIIHSSSEDGSYPQLLHLASLSGILKGICRHFKHSLSSLPILQLPVASIPLGTWMPRVGEPNGRPLAMLMPSASLGAALSMFVQAEVSSIPIVDANDSLLDIYSRSDITALAKDKAYARISLDEISIHQALLLGQDATSPYGLYNGHRCHMCLRSDSLYKVMERLANPGVRRLVAVEAGSKRVEGIISLSDVFRFLLG

SEQ ID NO: 50202 - protein, 156 aa, Arabidopsis thaliana
MGNQFRGFGNVGAWAAKLIHKKGGKVVVVSDITCAIRNPEGIDINALIKHKYAIGCLNDFNGGDAMNSDELLIYECNVLIPCALGGVLNKSILSKKGVIILPYIYANGRGVTFMWEEEKVNLELQKCITRAFHNIKTMGHTQSCNLRMRAFTLGVN

SEQ ID NO: 50203 - protein, 294 aa, Arabidopsis thaliana
MAAPIRFFELNTGAKLPCVGLGTYAMVATAIEQAIKIGYRHIDCASIYGNEKEIGGVLKKLIGDGFVKREELFITSKLWSNDHLPEDVPKALEKTLQDLQIDYVDLYLIHWPASLKKESLMPTPEMLTKPDITSTWKAMEALYDSGKARAIGVSNFSSKKLTDLLNVARVTPAVNQVECHPVWQQQGLHELCKSKGVHLSGYSPLGSQSKGEVRLKVLQNPIVTEVAEKLGKTTAQVALRWGLQTGHSVLPKSSSGARLKENLDVFDWSIPEDLFTKFSNIPQASSFIFLFFSR

SEQ ID NO: 50204 - protein, 260 aa, Legionella pneumophila subsp. pneumophila str. Philadelphia 1
MKLKNKVAIVTGAASGIGKEIALVYAKEGAKVAIADLNLDQASHVAEEIKSSGGQAMAVAMNVTDEAQVNQGVDKVADHFGGVDVLVSNAGIQIIESVDKLAFSDWKRMLAIHLDGAFLTTKACLKYMYASGNGGSIIYMGSVHSKEASVLKAPYVTAKHGLLGLCKVVAKEGGTHKVRANVICPGFVRTPLVDKQIPEQAKELGISEEDVIKKVMLKETVDGEFTTTDDVAQTALFFASFESNALTGQSLVVSHGWFME

SEQ ID NO: 50205 - protein, 296 aa, Staphylococcus aureus subsp. aureus Mu50
MKIVIIGGFLGGGKTTVLNHLLAESLKESLKPAVIMNEFGKMSVDGALVSEDIPLSELTEGCICCAMKADVSEQLHQLYLKEQPDIVFIECSGIAEPVSVLDACLTPILAPFTTITHMIGVIDASMYKHIKSFPKDIQGLFYEQLAYCSVLFVNKIDSADVETTSKLLKDLEVINPEADIQVGMHGSVTLPISVRQMTATSDNKHESLHKTINHQFVQSPVTCTKAEFIKRLACLPSHIYRLKGFMTFEDTTHTYLIQFTQGQYELTPVAFSKKVPEYLVLIGKGISKEDYQCLEQ

SEQ ID NO: 50206 - protein, 290 aa, Arabidopsis thaliana
MAAPIRFFELNTGAKLPCVGLGTYAMVATAIEQAIKIGYRHIDCASIYGNEKEIGGVLKKLIGDGFVKREELFITSKLWSNDHLPEDVPKALEKTLQDLQIDYVDLYLIHWPASLKKESLMPTPEMLTKPDITSTWKAMEALYDSGKARAIGVSNFSSKKLTDLLNVARVTPAVNQVECHPVWQQQGLHELCKSKGVHLSGYSPLGSQSKGEVRLKVLQNPIVTEVAEKLGKTTAQVALRWGLQTGHSVLPKSSSGARLKENLDVFDWSIPEDLFTKFSNIPQAKVLPSY

SEQ ID NO: 50207 - protein, 546 aa, Burkholderia pseudomallei K96243
MAAKDVVFGDSARAKMVEGVNILANAVKVTLGPKGRNVVLERSFGGPTVTKDGVSVAKEIELKDKLQNMGAQMVKEVASKTSDNAGDGTTTATVLAQSIVREGMKYVASGMNPMDLKRGIDKAVAAAVEELKKISKPCTTNKEIAQVGAISANSDSSIGDRIAEAMDKVGKEGVITVEDGKSLADELDVVEGMQFDRGYLSPYFINNPDKQVAVLENPFVLLHDKKVSNIRDLLPVLEQVAKAGRPLLIIAEDVEGEALATLVVNNIRGILKTVAVKAPGFGDRRKAMLEDIAILTGGQVIAEETGLTLEKATLAELGQAKRIEVGKENTTIIDGAGEAVNIEARVKQIRTQIEEATSDYDREKLQERVAKLAGGVAVIKVGAATEVEMKEKKARVEDALHATRAAVEEGIVPGGGVALIRARTAIAGLTGVNADQNAGIKIVLRAMEEPLRQIVTNGGEEASVVVAAVAAGKGNYGYNAATGEYVDMVEAGVVDPTKVTRTALQNAASVAGLLLTTDAAVAELPKEDAPMPGGMPGGMGGMGMDM

SEQ ID NO: 50208 - protein, 120 aa, Arabidopsis thaliana
  misc_feature (30)..(30): Xaa can be any naturally occurring amino acid
  misc_feature (48)..(48): Xaa can be any naturally occurring amino acid
  misc_feature (64)..(64): Xaa can be any naturally occurring amino acid
  misc_feature (97)..(97): Xaa can be any naturally occurring amino acid
  misc_feature (115)..(115): Xaa can be any naturally occurring amino acid
  unsure (1)..(120): unsure at all Xaa locations
YDLRSNSWRVLEVTPNGEMDPNHPLYGVSXKGNTYFFAHEDSSSGEIXEDGDIIDLEDFLLCFXFTTETFGLRLPLPFHSTIDATVTLSCVRDQQLXVLYHNEGLHSDDRFTTVXVLGLT

SEQ ID NO: 50209 - protein, 298 aa, Arabidopsis thaliana
MYSAIRSLPLDGGHVGGDYHGPLDGTNLPGDACLVLTTDPKPRLRWTTELHERFVDAVTQLGGPDKATPKTIMRTMGVKGLTLYHLKSHLQKFRLGRQAGKESTENSKDASCVGESQDTGSSSTSSMRMAQQEQNEGYQVTEALRAQMEVQRRLHDQLEYGQVQRRLQLRIEAQGKYLQSILEKACKAFDEQAATFAGLEAAREELSELAIKVSNSSQGTSVPYFDATKMMMMPSLSELAVAIDNKNNITTNCSVESSLTSITHGSSISAASMKKRQRGDNLGVGYESGWIMPSSTIG

SEQ ID NO: 50210 - protein, 371 aa, Arabidopsis thaliana
MGRAPCCEKVGIKRGRWTAEEDQILSNYIQSNGEGSWRSLPKNAGLKRCGKSCRLRWINYLRSDLKRGNITPEEEELVVKLHSTLGNRWSLIAGHLPGRTDNEIKNYWNSHLSRKLHNFIRKPSISQDVSAVIMTNASSAPPPPQAKRRLGRTGRSAMKPKIHRTKTRKTKKTSAPPEPNADVAGADKEALMVESSGAEAELGRPCDYYGDDCNKNLMSINGDNGVLTFDDDIIDLLLDESDPGHLYTNTTCGGDGELHNIRDSEGARGFSDTWNQGNLDCLLQSCPSVESFLNYDHQVNDASTDEFIDWDCVWQEGSDNNLWHEKENPDSMVSWLLDGDDEATIGNSNCENFGEPLDHDDESALVAWLLS

SEQ ID NO: 50211 - protein, 633 aa, Oryza sativa (japonica cultivar-group)
MGCAPMGHILYDEVMRYNPKNPYWFNRDRFILSAGHGCMLQYALLHLAGYDAVLEEDLKQFRQWGSKTPGHPENFETPGVEVTTGPLGQGIANAVGLALAEKHLAARFNKPDSEIVDHYTYCILGDGCQMEGISNEACSLAGHWGLGKLIAFYDDNHISIDGDTEIAFTEDVSARFEALGWHTIWVKNGNDGYDEIRAAIKEAKAVTDKPTLIKVTTTIGFGSPNKANSYSVHGSALGTKEVEATRENLGWPYEPFFVPEDVKSHWSRHVPQGAAFEADWNAKFAEYEKKYPEDAATLKSIVSGELPAGWADALPKYTPESPADATRNLSQQCLNALAKVVPGLLGGSADLASSNMTLLKMFGDFQKDTPEERNVRFGVREHGMGAICNGIALHSPGLIPYCATFFVFTDYMRAAMRISALCEAGVIYVMTHDSIGLGEDGPTHQPIEHLVSFRAMPNILMLRPADGNETAGAYKIAVLNRKRPSVLALSRQKLAQLPGTSIEGVEKGGYIVSDNSTGNKPDFIVMSTGSELEIVAKAADELRKEGKTVRVVSFVCWELFDEQSAEYKESVLPEAVTARVSLEAGSTLGWQKYVGSKGKAIGIDKFGASAPAGKIYQEYGITAENVIATAKSL

SEQ ID NO: 50212 - protein, 207 aa, Brassica napus
  misc_feature (185)..(185): Xaa can be any naturally occurring amino acid
  misc_feature (203)..(203): Xaa can be any naturally occurring amino acid
  unsure (1)..(207): unsure at all Xaa locations
MGIQERDPLTQLSLPPGFRFYPTDEELMVEYLCRKAAGHDFSLQLIAEIDLYKFDAWVLPSKALFGEKDWYFFSPRDRKYPNGSRPNRCAGSGYWKATGTDKAISTEGRRVGVKKALVFYVGKAPKGTKTNWIMHEYRLIEPSRRNGSTKLDDWVLCRIYKKQSSAQKDDYNSNLMTREYSHNGXSSTSYSSHQYDDVFEDKXRFLT

SEQ ID NO: 50213 - protein, 206 aa, Aspergillus niger
MAGTRNYDFLIKLLLIGDSGVGKSCCLLRFSEDSFTPSFITTIGIDFKIRTIELDGKRVKLQIWDTAGQERFRTITTAYYRGAMGILLVYDVTDERSFQNIRTWFSNVEQHASEGVHKILIGNKCDWEEKRAVSTEQGQQLANELGIPFLEVSAKNNINIEKAFYDLASDIKKGMDTSKSEQVGSQGVSIDQQGSGLNGSAGGKCC

SEQ ID NO: 50214 - protein, 201 aa, Aspergillus niger
MNPEYDYLFKLLLIGDSGVGKSCLLLRFADDTYTESYISTIGVDFKIRTIELDGKTVKLQIWDTAGQERFRTITSSYYRGAHGICVVYDVTDMDSFNNVKQWLQEIDRYATEGVNKLLVGNKSDMEDKKVVEYTVAKEFADSLGIPFLETSAKNASNVEQAFLTMARQIKERMGTATVNNKPTVQVGQGQGVQSGSAGGCC

SEQ ID NO: 50215 - protein, 234 aa, Bacillus clausii KSM-K16
MAEIMAELIGTMVLIIFGAGVVAGVTLKQSKGEGAGWIAISVGWGFAVALGVYVAGTVSDAHLNPAVTLGFAAIGQFPWAQVPGYIIGQLAGAFLGAVIVFLHYYPHWKATEDAGVKLGVFATGPAIRHLPANFLSELIGTAVLVFGLLAIGANTFSEGLNPIVVGLLIIAIGLSLGGTTGYAINPARDLGPRLAHALLPINKKGPSDWAYAWVPILGPFVGGIVGAVLYTLIF

SEQ ID NO: 50216 - protein, 500 aa, Triticum aestivum
MDAAGRDANPLAGYRIGKTLGIGSFGKVKIAEHIITGHKVAIKILNRRKIKSMEMEEKVKREIKILRLFMHPHIIRLYEVIDTPADIYVVMEYVKSGELFDYIVEKGRLQEEEARRFFQQIISGVEYCHRNMVVHRDLKPENLLLDSKCNVKIADFGLSNVMRDGHFLKTSCGSPNYAAPEVISGKLYAGPEVDVWSCGVILYALLCGTLPFDDENIPNLFKKIKGGIYTLPSHLSPLARDLIPRMLVVDPMKRITIREIREHSWFKARLPRYLAVPPPDTAQQVKKLDDETLNDVIKMGFDKNQLTESLQKRLQNEATVAYYLLLDNKLRTTSGYLGAEYQESMDSSFSQVSPETPSSASEARQYGSPGFGLRHHFAAERKWALGLQSRAHPREIITEVLKALQELNVCWKKIGHYNMKCRWSPGFVETMMHNNNGFGVESAIIEADGLSDKSTHIVKFEIQLYKTRDEKYLLDLQRVSGPQLLFLDLCSAFLTQLRVL

SEQ ID NO: 50217 - protein, 184 aa, Manihot esculenta
MATSMLSTATVASINRASPAQASMVAPFTGLKSTSAFTATTKTSADITSLASNGGRVQCMQVWPTRGKKKFETLSYLPPLSREQLASEIDYLLRSGWIPCLEFELEHGFVYRAHGSLPGYYDGRYWTMWKLPMFGCTDSSQVLKELDELIKAHPDGFARIIGFDNVRQVQCISFIAYKPPGTDY

SEQ ID NO: 50218 - protein, 468 aa, Pseudomonas syringae pv. phaseolicola 1448A
MGLNDQWMQRDLKVLWHPCTQMKDHENLPLIPIKRGEGVWLEDFEGKRYLDAVSSWWVNVFGHANPRINQRIKDQVDQLEHVILAGFSHQPVIELSERLVKLTPEGLNRCFYADNGSSCIEVALKMSFHYWLNRGQPDKKRFVTLTNSYHGETMAAMSVGDVPLFTETYKALLLDTIKVPSPDCYHRPEGMSWEEHSRNMFAAMEQTLAEHHASVAAVIVEPLIQGAGGMRMYHPVYLKLLRDACDRYGVHLIHDEIAVGFGRTGTMFACEQAGIRPDFLCLSKALTGGYLPLAACLTTDDVYDAFYDDYPTLRAFLHSHSYTGNPLACAAALATLDIFEQDNVIENNKALAQRMATATAHLVDHPHVAEVRQTGMAIAIEMVQDKATKTAYPWQERRGMKVFQHALERGALLRPLGSVVYFLPPYVITPEQIDFLAEVATEGIDIATRSSVSVAVRENFHPDFRDPG

SEQ ID NO: 50219 - protein, 184 aa, Manihot esculenta
MATSMLSTATVASINRASPAQASMVAPFTGLKSTSAFPATTKTSADITSLASNGGRVQCMQVWPTRGKKKFETLSYLPPLSREQLASEIDYLLRSGWIPCLEFELEHGFVYRAHGSLPGYYDGRYWTMWKLPMFGCTDSSQVLKELDELIKAHPDGFARIIGFDNVRQVQCISFIAYKPPGTDY

SEQ ID NO: 50220 - protein, 482 aa, Shewanella sp. MR-7
MTPASASSQHEPLPTSVFLAIFSAVFLPMFLAAVDQTLLATATPAIVEDLGGLRQASWITIGYMLAMAASVPIYGWLGDNFGRAKILMIALVVFALGSIVSASASTMDHMIAGRILQGLGGGGLMSLSQSLVGELVPIRQRARFQGYFAAMFTLASVGGPVIGGFVVHAYSWHWLFWANIPLVMLAVWRLNRLHKQSVKPVRQGRFDLLGVLLFPTIITALLYWLSVAGQDFAWLSTTSLGFMGFICVGALVLLWWERRRESPFLPLDLLANKAIYMPLFTAALFAACLFAMIFFLPIYLQVGLHTNPAKTGLLLMPMTFGIVTGSTIAGRLLSRDVAPKWLPTFGMGLAFIGLLLIGLVPPNANLIGALGVLVGIGLGTVMPSVQLVVQSVSGKARLSQITAMVSLSRSMGAAIGTALFSLLLYGLLPLDGAQVGIAAIKQLPIEVVHHAFQWGFIAAALVALSSAIVGYFSPATALRDHE

SEQ ID NO: 50221 - protein, 426 aa, Streptomyces sp. JP95
MSRRAVITGIGAVAPGGIGRDAYWDLLAHGRTATRRISRFDASAFRSQVAAECDFDPVAAGLSPQEVRRMDRAAQFAVVAAQEAIEDSGIDVGAGDPGRTAVSIGSAVGCTTGLEDEYAVLSDGGRNWLVDHTYGVPHLYGYMVPSTLAAEVAWRARAEGPVALISTGCTSGLDAIAHGVQLIEEGAADIVLAGATDAPLSPITSACFDAIKATTPNADQDPGSASRPFDGRRDGFVLGEGSAVMVIEEAGAARRRGATVYAEVAGFANRSNAFHMTGLKPDGREMAEAIRVALDRARLDPGAIDHVNAHGSGTKQNDRHETAAFKRSLGQRAHEIPVSSIKSMIGHSLGAIGSLEVAACALALRHQVVPPTANLTVPDPQCDLDYVPVTAREHRMDHVLSVGSGFGGFQSAMILSRPGARKEAVA

SEQ ID NO: 50222 - protein, 188 aa, Escherichia albertii
ADERPGKINLGIGVYKDETGKTPVLTSVKKAEQYLLENETTKNYLGIDGIPEFGRCTQELLFGKGSALINDKRARTAQTPGGTGALRVAADFLAKNTSVKRVWVSNPSWPNHKSVFNAAGLEVREYAYYDAENHTLDFDALINSLNEAQAGDVVLFHGCCHNPTGIDPTLEQWQTLAQLSVEKGWLPL

SEQ ID NO: 50223 - protein, 366 aa, Rubrobacter xylanophilus DSM 9941
MAAEDTMMLADRAYELLSKGRSQGFLSAEDVADLVREGDLSPDEAEELYATLEEEDITLVDEELEGAAEVTPERAAGREGDNPASQLAHAVATGDSIRMYLAEIGRVPLLTHADEIRLAKAISRGCKRSKDKLVEANLRLVVSIAKKYRNRGVSFLDLIQEGNIGLIRAAEKFDYRKGFKFSTYATWWIRQAITRAIADKGRTIRIPVHMVEKVNKYHRTQRRMTQALGREPTDEEVAEELGVPVEEVLRLQEISQRSISLETPVGDDESSSLGDFLEDASAVTPTDAVSESLLKLHLREALDELPERERQIIEMRFGMKDDRPRTLEEVGREFDITRERVRQIQMKTLNLLREQRRTQNLREYLH

SEQ ID NO: 50224 - protein, 420 aa, Streptomyces sp. JP95
MSALGLPAGRRSPAAVTGLGIVAPTGIGVRRHWESVLAGKSGLGRITRFDPAGYPVEVAGEVPGFTAGEQVPRGLVDRTDRFTHFALAAAEAALADADADPAQLPEYDMAVVTAASSGGTEFGQHEMERLYQRGPAWVGAYQSIAWFYAATTGQVSIRHGMRGPCGVLCAEQAGGLDALGQSRRLLDTGSRLVLSGGTDASLCPYGLTAQLSTGALSASDDPARAYLPFDEAAAGYAPGEGGAMLLVETERGARERGVRSYGRILGYAAGFDPPSSSGRPPVLASVVRRAVADAGIGADAVDVVFADAAGTPELDRAEAAAINEVFGAGRVPVTAPKTLTGRLYAGGAPLDVATALLALSAGVIPHTPGVERPAPGLGIDLVVGGPRRTGARTAVVLARGHGGFTSALVVEGGDRTDHTA

SEQ ID NO: 50225 - protein, 184 aa, Shigella boydii
ADERPGKINLGIGVYKDETGKTPVLTSVKKAEQYLLENETTKNYLGIDGIPEFGRCTQELLFGKGSALINDKRARTAQTPGGTGALRVAADFLAKNTSVKRVWVSNPSWPNHKSVFNAAGLEVREYAYYDAENHTLDFDALINSLNEAQAGDVVLFHGCCHNPTGIDPTLEQWQTLAQLSVEKG

SEQ ID NO: 50226 - protein, 494 aa, Shewanella sp. MR-7
MKNQVQLITYVDRITGAGLKQLKALLDNELDGLFGGVHLLPFYYPIDGSDAGFDPIDHVQVDSRLGDWDDVKNIGEAFDIMADLIVNHMSAESPEFKDVLKHGKQSVYWDLFLTKDKVFPEGLSEQDQKAIYRPRPGSCFSTYTLADGSTEEFWTTFTRNQIDIDVNSAAGKDYLNRVLARFNHSKVNLIRLDAAGYAIKKPGTSCFMIEESFEFVDKLAKQANELGMTTLAEIHSHHMTQIDIAKRVDMVYDFALPPLILHTLFSQDCSALSHWLDMAPRNCITVLDTHDGIGIIDVGPMDGLRGLLDEKQIDNLVETIHDNSKGESLQATGAAASNVDLYQINCTYYDALGQNDLDYLMARAIQFFAPGIPQVYYTGLLAIPNDMTLLNQTHVGRDINRPYLNREKVQQALQKPVVKALIQLIKLRNSSAAFNGRFSMAASGKTLTLTWSAQNASASLSLDFVHKQGLITLLDEQGIETQIALADLLTQAQA

SEQ ID NO: 50227 - protein, 728 aa, Zea mays
  misc_feature (51)..(51): Xaa can be any naturally occurring amino acid
  unsure (1)..(728): unsure at all Xaa locations
MKEVAEERCLDPQLWHACAGGMVQMPPVRSRVYYFPQGHAEHAHGGGGRAXAGARALPSLVLCSVTGVRFLADPETDEVFAKIRLVPVAPGEVEFREPDEFSVDPADAREKLSSFAKTLTQSDANNGGGFSVPRYCAETIFPKLDYRADPPVQTVLAKDVHGEVWKFRHIYRGTPRRHLLTTGWSTFVNQKKLVAGDSIVFLRTEHGELCVGIRRVKRVSCGGMECMSGWNAPGYGALSAFLKDEEGKMMKSHGGYMRGRGKVKITDVVNAASLAASGQPFEVVYYPRASTPEFVVKAASVQNAMRNQWCPGMRFKMAFETEYSSRISWFMGTIASAQVADPIRWPNSPWRLLQHSIVHPYIERNPGTNNNIDIALVYPIRNLLFFVCPYPSTFSFLGIALVAWDEPDLLQNVKCVNPWLVEIVSSIPPIHLGPFSPPRKKLRVPHHPDFPFDGQLLNPIFHGNPLGPSNGGGALRCFSDIAPAGIQGARHAQFGLPLTDRQLNKLHLGLFQGGGFKRRLDAITPPCPISRGFVIGSAPVDESVSCVLTIGTPRAAERSDDRKKPHLMLFGKPILTEQQMSSRGSRETLSPEATGNSSDGSVQKTGNVSDGSGSSICIGSSSRGREASRLGFEFEAGHCKVFVESEDVGRTIDLSVFGSYEELYGQLADMFGIEKAEVMSHLCYRDAAGAVKRTGDEPFCDFMKVARRLTIVESTEGRLQKPLVEYMA

SEQ ID NO: 50228 - protein, 106 aa, Bradyrhizobium japonicum USDA 110
MCMHFRPLHDRVLVRRIDAEEKTAGGIIIPDTAKEKPQEGEIIAAGSGGRNEQGQLIPIDVKPGDRVLFGKWSGTEVKIDGQDYLIMKESDLLGVVDKTGSVKKAA

SEQ ID NO: 50229 - protein, 461 aa, Escherichia coli K12
MADNKPELQRGLEARHIELIALGGTIGVGLFMGAASTLKWAGPSVLLAYIIAGLFVFFIMRSMGEMLFLEPVTGSFAVYAHRYMSPFFGYLTAWSYWFMWMAVGISEITAIGVYVQFWFPEMAQWIPALIAVALVALANLAAVRLYGEIEFWFAMIKVTTIIVMIVIGLGVIFFGFGNGGQSIGFSNLTEHGGFFAGGWKGFLTALCIVVASYQGVELIGITAGEAKNPQVTLRSAVGKVLWRILIFYVGAIFVIVTIFPWNEIGSNGSPFVLTFAKIGITAAAGIINFVVLTAALSGCNSGMYSCGRMLYALAKNRQLPAAMAKVSRHGVPVAGVAVSIAILLIGSCLNYIIPNPQRVFVYVYSASVLPGMVPWFVILISQLRFRRAHKAAIASHPFRSILFPWANYVTMAFLICVLIGMYFNEDTRMSLFVGIIFMLAVTAIYKVFGLNRHGKAHKLEE

SEQ ID NO: 50230 - protein, 540 aa, Bradyrhizobium japonicum USDA 110
MAAKEVKFSTDARDRVLRGVDTLANAVKVTLGPKGRNVVIEKSFGAPRITKDGVTVAKEIELEDKFENMGAQMVREVASKTSDLAGDGTTTATVLAQAIVKEGAKSVAAGMNPMDLKRGIDLAVEAIVNDLKAHAKKVTTNEEIAQIATISANGDIEIGRFLADAMQKVGNDGVITVEEAKSLDTELEVVEGMQFDRGYASPYFVTNAEKMRVEFEDPYILIHEKKLSTLQSMLPLLEAVVQSGKPLLVVAEDVEGEALATLVVNRLRGGLKVAAVKAPGFGDRRKAMLEDIAILTGGQAISEDLGIKLENVTLKMLGRAKKVVIDKENTTIVNGAGSKKDIEARVTQIKMQIEETTSDYDREKLQERLAKLAGGVAVIRVGGATEVEVKERKDRVDDAMHATRAAVEEGILPGGGVALLRGLKALDAIKTVNADQKAGVDIVRRAIQVPARQIVQNAGEDGSLVVGKLLENSSYNWGFNAASGEYQDLAKAGVIDPAKVVRTALQDAASVAALLITTEALIAEKPKKSEPAPAAPPMDF

SEQ ID NO: 50231 - protein, 193 aa, Shigella boydii
DERPGKINLGIGVYKDETGKTPVLTSVKKAEQYLLENETTKNYLGIDGIPEFGRCTQELLFGKGSALINDKRARTAQTPGGTGALRVAADFLAKNTSVKRVWVSNPSWPNHKSVFNAAGLEVREYAYYDAENHTLDFDALINSLNEAQAGDVVLFHGCCHNPTGIDPTLEQWQTLAQLSVEKGWLPLFDFAYQ

SEQ ID NO: 50232 - protein, 342 aa, Clostridium acetobutylicum ATCC 824
MMGKGLVLVTGGSGFIAVHIILKLLNQGYGVRATLRTLSRKDEVKSMLAQGGITDFANLEFIQTDLTSDMNWMEAATGATYVIHVASPTPAIRPDDGDAMVKMAVDGTLRVMKVAKAAGVKRVVLTSASGAVLSGHKSHPDIFTEEDWTNLSGDIDAYQRSKTMAELAAWEFAKKENMEFSVVNPVAVMGPVLGKDFSHSNQIIRSMLTGKMPFLLKIGFDYVDVRDVADLHLLAMIRSEAVGQRFIATTGENLTYKEEAKILQRSLGGAAKKVSIKEMPNFIVKFLAFFMKDLRMPATFLGQNTACSNAKAKKLLGWQPRSAEEAIIATGKSMVELGLVDK

SEQ ID NO: 50233 - protein, 319 aa, Shewanella sp. MR-7
MTVLLSFGEVLVDLLPTDISGKSHQAIAGGAPANVAVGYAKLGGKSYFAGGISTDDYGAMLKQALANEGVVTDYLTQVPEAPTATVVVNLDEHGERTFEFNRQGTADLCYSQRHFDAIPWQQMDIFHLCSNTFTEAAIFNASLYGARCANSFNKIVSFDVNLRLSLWPDIALLAERVEQCFRYTQVLKMSREEAEYLALTRNKSFEDYLQFCLAQGVEVILITDGANPVQCITVNERFSVPVPQIKAVDTTAAGDSFMAGFLFALGSELAFDLEHLTLKHRLACQTQLRKAIEFAVRCGAVTCGQKGAFPALPTLSQVS

SEQ ID NO: 50234 - protein, 191 aa, Escherichia albertii
DERPGKINLGIGVYKDETGKTPVLTSVKKAEQYLLENETTKNYLGIDGIPEFGRCTQELLFGKGSALINDKRARTAQTPGGTGALRVAADFLAKNTSVKRVWVSNPSWPNHKSVFNAAGLEVREYAYYDAENHTLDFDALINSLNEAQAGDVVLFHGCCHNPTGIDPTLEQWQTLAQLSVEKGWLPLFDFA

SEQ ID NO: 50235 - protein, 558 aa, Oryza sativa
MDFKVASFLLLLLIVTCGAAQGQGNDFVVLDLKTTEVGEDASPMYKEQIALTKIPVTLLRSKHSSLCSACENITSEAVNFLSEKQIQDKIMTILHDTCSQTFSFEQKCLETMDSYATLVFAKIAEIKPDEFCKQYGLCRDMALLSAMKSESTCVFCHHIIDEIMSKLKDPDAEFEIIQLLLKECNKIEGHQQQCKRMVLQYVPLVLVNGEKFLEKNDVCAMIQACDAGKRKAFNLFSARKLILSAYFAVLPLRDEGAISLGLSSLPGLFAGSLLLTLVAAPVASLAFSLPSIPKPRALVFIHRFFSLSLLVFFVLWFASTPGHSPSISQVSLLNLIAISSTWARVIDIMDSESGSRLFGFIGAGATLGQLFGSLFAATMALLGPCFWLIARSPYLMYISLFLWLSAVVSSFFYFQGRILTIAGVTVAICASPFIATLNMVALALWPTWVAVAVTETIRKVTTYVLTRPGRELLFTVVSQDEKYKAKVCIDVVVQRLGDATAAGIYSLLFSSLEKKASMVTLYALPLCFVWLLTAFHLGRLQTNLVKVQVASFASSIPR

SEQ ID NO: 50236 - protein, 473 aa, Claviceps purpurea
MASEVSVASSGSEHSGAQKCPFQDPGLSSMDQDSRLRDILSRFNREKIPERAVHARGAGAYGEFEVTHDVSDICDIDMLLGVGKKTPCVVRFSTTTLERGSAESVRDVKGMAIKHFTQDGNWDWVCLNIPMFFIRDPSKFPDMVHAQRPDPTTNVANPSRWWEFVCNNHETLHMVMFQFSDFGTMFDYRSMSGYAAHAYKWVMPDGSWKYVHWFLASDQGPNFETGHQAKQIGADDAESATRDLYQSLERGEYPSWTVKVQVVDPEDAPKLPFNILDVTKHWNLGNYPPDIDVIPGRTLGKLTLKKEPQDYFEEIEQLAFSPSRLVHGVEASEDPMLQARLFAYPDAQKHRLGPNNLDLPANRTKKFADGARPEKAEMAPQKVPSQEHADWVSQVKSSSWSEPNETDYKFPREFWKALPRLRGEAFQNSLVVNMAKSVSQVPVDMREKVYSTLALIADDLADRVRTMTEEIVE

SEQ ID NO: 50237 - protein, 475 aa, Arabidopsis thaliana
MAGIVTEPWSVAENGNPSITAKGSSRELRLGRTAHNMSSSSLRKKSDLRVIQKVPYKGLKDFLSNLQEVILGTKLAILFPAIPAAIICTYCGVSQPWIFGLSLLGLTPLAERVSFLTEQLAFYTGPTLGGLLNATCGNATELIIAILALTNNKVAVVKYSLLGSILSNLLLVLGTSLFCGGIANIRREQRFDRKQADVNFFLLLLGFLCHLLPLLVGYLKNGEASAAVLSDMQLSISRGFSIVMLISYIAYLVFQLWTHRQLFDAQEQEDEYDDDVEQETAVISFWSGFAWLVGMTLVIALLSEYVVATIEEASDKWNLSVSFISIILLPIVGNAAEHAGAVIFAFKNKLDISLGVALGSATQIGLFVVPLTIIVAWILGINMDLNFGPLETGCLAVSIIITAFTLQDGSSHYMKGLVLLLCYFIIAICFFVDKLPQSELVFKCICMLLLGKTIIEAYNTHISNGNASSNKVKTG

SEQ ID NO: 50238 - protein, 292 aa, Legionella pneumophila str. Lens
MLTNIERAKLQLIDETSDMVIITKAEPLDAPNGPEVVWVNKAFEKISKYKANEIIGQTPRILQGKETDQNTLKMIKEAIKAQMNINVDLLNYTKDGTPYWINFSIVYLRDGQGNLCYLGAIEKDISAIKNLNIQLSEKAKTDPLTNVYNQENFFIAGNEAVKNFHQNQETVGLLFFDIDDFKGINDTQGHIYGDKILKKVAQESLKLVRKTDNVFRYGGDEFAIIFSGIDVKILERKAQQLQKKLAKSHISVSIGGTISKQSDKSISTLLARADEALYYVKANKKGLFFIRK

SEQ ID NO: 50239 - protein, 1115 aa, Pseudomonas fluorescens Pf-5
MAKKPRPTTFIKDPLWYKDAVIYQVHVKSYFDSNNDGIGDFPGLIAKLDYIKDLGVNTIWLLPFYPSPRRDDGYDIAEYRGVSPDYGTLADARRFIAEAHKRELRVITELVINHTSDQHPWFQRARKAKPGSAARNFYVWSDDDQKYDGTRIIFLDTEKSNWTWDPVAGQYFWHRFYSHQPDLNFDNPQVMKAVLSVMRYWLDMGIDGLRLDAIPYLIERDGTNNENLPETHQVLKQIRAEIDANYPDRMLLAEANQWPEDTQLYFGDVTGSDGDECHMAFHFPLMPRMYMALAQEDRFPITDILRQTPEIPANCQWAIFLRNHDELTLEMVTDRERDYLWNYYAADRRARINLGIRRRLAPLMERDRRRIELLNSLLLSMPGTPTLYYGDEIGMGDNIYLGDRDGVRTPMQWSIDRNGGFSRADPASLVLPPIMDSLYGYPSVNVETQSGDPHSLLNWTRRMLAVRKQSKAFGRGTLKMLSPSNRRILAYTREYTGPDGKQEIILCVANVSRSAQAAELDLSAFAGMVPVEMLGGNAFPPIGQLNFLLTLAPYGFYWFVLAAENQMPSWHVEPAQSLPDFTTLVLKKRLEELLEAPSRTTLEQEVLPNWLPKRRWFAGKDSAIDQARIAYGVRFGDPQHPVLLSEIEVTSAGRSERYQLPFGLLAEEQINSALPQQLAMARVRRGRQVGLITDAFALDSFVRNVLLALQGTTCLDSEQGQIRFEATAQLAALGLGADAEVRYLSAEQSNSSVVVGGSLVLKLIRKVAGGIHPELEMGAFLTAAGFAHISPLLGSVLRRDAQGEDHLLMIAQGYLNNQGDAWEWTQNNLERAIRDELAEAMSEQEQHYNALGELQDFAGLLGQRLGEMHLLLAAPSDNPDFAPEHATAKDAQAWNQQVAEQLERGLQLLQQHQAELAAGEQKLLGKLLQHKALILGHIQQLAKQLVGGVRIRVHGDLHLGQVLVIKGDAYLIDFEGEPARPLAERRGKHSPYKDVSGVLRSFDYAAAMALEAPAVDGAQGAAAGRRKVVTRYLAEARHAFVQAYRLATANLAHGWQDPAAADAALALFSLEKAAYELAYEAENRPAWLPVPLHGLVGLLRELKPFSDIESGGEQS

SEQ ID NO: 50240 - protein, 457 aa, Bacteroides fragilis YCH46
MNRENKPLFLYTFITVFGGLIVGLNMAGISGAVPFLQEQFMLDDMALGLVVSILTVGCLCGALLGGGFSDRYGRQKVMFSSAVFFIVSSLGCALSGNLVSLLVFRLICGLGIGVISAVAPIYISEISPARLRGTLVSYNQLAIVIGILIAYIVDYILLDYERNWRLMLGFPFFFSVAYLLLLGILPESPRWLSARGKAGRARQVASKLNLEAGEMTVSDTNTQEGRDRIKVTELFKGNLAKVVFIGSILAALQQITGINVIINYAPSIFEMTGVAGDIALVQSILVGVVNLLFTLIAVWLVDKVGRKILLLCGSLGMGISLLYLVYTFVVPAANGIGALIAVLCYIGFFAASLAPLMWVVTSEIYPSRIRGTAMSLSTGISWLCTFLTVQFFPWILNNLGGSVAFGIFAVFSIAAFAFILFCVPETKGKSLEAIEKELGVDKEAEENVKEEHAFSKI

SEQ ID NO: 50241 - protein, 452 aa, Bacteroides thetaiotaomicron VPI-5482
MRNIYSIYKEHYKALISLGLPIVIGQIGVIVLGFADTLMIGHHSTIELGAASFVNNVFNLVIIFSTGFSYGLTPIVGGLYGTHQYASAGQALRNSLLANLLVAFLLTIGMTVLYFNVGNLGQPEELIPLIKPYYLVLLASLVFVMLFNGFKQFTDGITDTKTAMWILLGGNVLNIIGNYILIYGKLGLPEMGLLGAGISTLFSRIMMVVVFIIVFMRSPRFLRFKLGFYRLGWSKAIFGRLNSLGWPIAFQMGMETASFSLSAVMIGWLGTIALASHQVMLAISQFTFMMYYGMGAAVAVRVSNFNGQGDILNVRRSAYAGFHLMMALGVVLSSIVFLCRNYLGGWFTDSTEVAAMVTSLILPFLVYQFGDGLQITFANALRGISDVKLMMLIAFIAYFLISLPVGYFCGFVLEWGIIGVWMAFPFGLTSAGLMLWWRFHHKTKLPPSIQNS

SEQ ID NO: 50242 - protein, 256 aa, Phaseolus vulgaris
MATRRYSFGRTDEATHPDSMRASLAEFASTFIFVFAGEGSGLALVKIYQDSAFSAGELLALALAHAFALFAAVSASMHVSGGHVNPAVTFGALIGGRISVIRAVYYWIAQLLGSIVAALVLRLVTNNMRPSGFHVSPGVGVGHMFILEVVMTFGLMYTVYGTAIDPKRGAVSNIAPLAIGLIVGANILVGGPFDGACMNPALAFGPSLVGWQWHQHWIFWVGPLLGAALAALVYEYAVIPIEPPPHHHQPLATEDY

SEQ ID NO: 50243 - protein, 169 aa, Phaseolus vulgaris
FSTCIFVFVGEGSVLALNHIYKEPGSSATELVVVAVAHAFALFAAISISAHVSGGHVNPAVTFGALLGGRISVLKALYYWIAQILGSIVAALLLRLVTNNMRPEGFGLSSGVGAVHGLILEISLTFGLMYTVYATAIDPKRGANSTIAPLAIALVVGANILAGGPFDGA

SEQ ID NO: 50244 - protein, 495 aa, Saccharomyces cerevisiae
MTTDNAKAQLTSSSGGNIIVVSNRLPVTITKNSSTGQYEYAMSSGGLVTALEGLKKTYTFKWFGWPGLEIPDDEKDQVRKDLLEKFNAVPIFLSDEIADLHYNGFSNSILWPLFHYHPGEINFDENAWLAYNEANQTFTNEIAKTMNHNDLIWVHDYHLMLVPEMLRVKIHEKQLQNVKVGWFLHTPFPSSEIYRILPVRQEILKGVLSCDLVGFHTYDYARHFLSSVQRVLNVNTLPNGVEYQGRFVNVGAFPIGIDVDKFTDGLKKESVQKRIQQLKETFKGCKIIVGVDRLDYIKGVPQKLHAMEVFLNEHPEWRGKVVLVQVAVPSRGDVEEYQYLRSVVNELVGRINGQFGTVEFVPIHFMHKSIPFEELISLYAVSDVCLVSSTRDGMNLVSYEYIACQEEKKGSLILSEFTGAAQSLNGAIIVNPWNTDDLSDAINEALTLPDVKKEVNWEKLYKYISKYTSAFWGENFVHELYSTSSSSTSSSATKN

SEQ ID NO: 50245 - protein, 429 aa, Oryza sativa
  misc_feature (286)..(286): Xaa can be any naturally occurring amino acid
  unsure (1)..(429): unsure at all Xaa locations
SPPPPPHPSILSQKLPSSLSPSPSRFRFPFYPRNPRRATATTKPPLAGAGAAPPPRCPPAVPPNSSPFVAGGGAGAGAGAAMDVDSVECLSLPDSSSSSGAGAGGGGGGGGGGGVGAMDAADDVGLALHAHGALLAAAAAARAAACSKGGGGGGAAAGSGVHELLECPVCTNSMYPPIHQCQNGHTLCSTCKARVHNRCPTCRQELGDIRCLALEKVAESLELPCKYCSLGCPEIFPYYSKIKHEAQCMFRPYNCPYAGSECAVVGDIPYLVAHLRDDHKVDMHSXGCTFNHRYVKSNPREVENATWMLTVFHCFGQYFCLHFEAFQLGMAPVYMAFLRFMGDENEARNYSYSLEVGANGRKMVWEGTPRSVRDSHRKVRDSHDGLIIQRNMALFFSGGDRKELKLRITGRIWKEQQTPDGACIPNLCS

SEQ ID NO: 50246 - protein, 433 aa, Ralstonia solanacearum
MTPSDVKATLSFSDGSPSVELPIYTGTVGPDVIDIRKLYGQTGKFTYDPGFMSTASCNSKITYIDGDKGELLYRGYAIDDLAGKCDFLEICYLLLKGELPNAKQKDEFNSTVMNHTMVHEQMQFFLRGFRRDAHPMAVLTGLVGAMSAFYPDAANINDSREREISQIRLIAKLPTLVAMAYKYNIGQPLIYPQNNLSYTGNFMRMMFATPCEDYKVNPVLERALDRIFILHADHEQNASTSTVRLAGSSGTNPIAAIAAGIACLWGPAHGGANEAALNMLEEIGSVDKIDEFIKQVKDKNSGVRLMGFGHRVYKNYDPRAKLMRETCHEVLQELGLENDRLFKLAMALEKIALEDEYFVSRKLYPNVDFYSGIVQRALGIPTSMFTCIFALARSVGWIAQWEEMITDPEYKIGRPRQLFNGAATRAVPELGKR

SEQ ID NO: 50247 - protein, 285 aa, Zea mays
MVKKAVSTAPADAEADERRRLRSLAFSNGLLQRGDPAAPRAPLAPAAAVTRLQGRDVVRRGGQRKSRYLFSFPGLLAPAASGGRVGELADLGTKNPLLYLEFPQGRMKLFGTHVYPKNKYLTLQMTRSAKGVVCEDVFESLDGTTADCDFRGGAGGAIDEATGSKAGKEIAEPRSPKFASDDDAPEDSNHKDENNTQTMSGTPVRQSARNAGKTLKRYTDLSSGGESSDNNNETDISEDLDDKEVESPEIKDEIESEDVKPADSSAISLSSKKEPLVQATLSSML

SEQ ID NO: 50248 - protein, 460 aa, Bacillus clausii KSM-K16
MNVLEKEKGTYTSDVHEYVQHVYETVKQRNPYENEFHQAVKEVLDSLLPVLAKRPQYIRQAILERIVEPERMISFRVPWVDDQGNVQVNRGFRVQFNSALGPYKGGLRFHPSVNTSIIKFLGFEQIFKNALTGQPIGGGKGGSDFDPKGKSDGEIMRFTQSFMSELSKYIGPDTDVPAGDIGVGAKEIGYMFGQYKKMRGRFEAGVLTGKDIAYGGSLARKEATGYGTVYFVEEMLKEKGHSFAGSTVVVSGSGNVSIYAMEKAMHLGAKVVACSDSEGYIYDKRGINLETVKRLKESEKKRISEYVNEHPQAHFFQGCSDIWSVPCDIALPCATQNEIDENTATVLVSNGVKAIGEGANMPSTLEAVNVFHEHGVLFAPAKAANAGGVSVSALEMAQNSARLSWTFEEVDAKLQDIMKTIYRDCIEAAKENDAPGNLVVGANIAGFVKVADAMIAQGVI

SEQ ID NO: 50249 - protein, 221 aa, Oceanobacillus iheyensis HTE831
MKNHSLWKNVDEYFEAKLLPDDKILNQTLDNNQAAGLPQIDVAPLQGKLLYLLTKMKSARQVLEIGTLGGYSSIWFAKAVTQNGKVISLEANQSHAEVARQNIENAGFKQTVQVLVGNALDTLPTLENAGESFDVIFIDADKQNNPKYLEWALRLANEGALLIADNVVRNGEVIDQKSEDERIQGLREFVNMLENEERIESTAIQTVGSKDYDGFVIGIVK

SEQ ID NO: 50250 - protein, 520 aa, Trametes versicolor
MSRFHSLLAFVVASLAAVAHAGIGPVADLTITNAAVSPDGFSRQAVVVNGGTPGPLITGNMGDRFQLNVIDNLTNHTMLKSTSIHWHGFFQKGTNWADGPAFINQCPISSGHSFLHDFQAPDQAGTFWYHSHLSTQYCDGLRGPFVVYEPNDPAADLYDVDNDDTVITLADWYHVAAKLGPALPLGADASHNIGKGRSPSTTTADPICITCIPGQTYPFPPGVPVVRPQPHLQHRWSQQDDHRFRLNQHGASRGSNSIRSVAQRFSFVLEANQAVDNYWIRANPNFGNVGFTGGINSAILRFDGAAAMEPTTTQTTSTEPLNGVNLHPLVATAVPGSPAAGGVDLAINMAFNFNGTNFFINGASFTPPTVPVLLQIISGAQNAQDLLHSGSVYSLPPNADIEISFPATAAAPGALHPFHLHGHAFAVVRSAGSTVYNYDNPIFRDVVSTGNRAAGDNVTIRFRTDNPGPWFLHCHIDFHLEAGFAVVFAEDIPDVASANPVPQAWSDLCPTYDARDPSDQ

SEQ ID NO: 50251 - protein, 216 aa, Brassica napus
  misc_feature (166)..(166): Xaa can be any naturally occurring amino acid
  misc_feature (179)..(179): Xaa can be any naturally occurring amino acid
  unsure (1)..(216): unsure at all Xaa locations
MDKRGGICSGGSGSSGETEVRKGPWTMEEDLILINYIANHGDGVWNTLAKSAGLKRTGKSCRLRWLNYLRPDVRRGNITPEEQLIIMELHAKWGNRWSKIAKHLPGRTDNEIKNFWRTRIQKYIKQTDVAATATSSVGSQSSEIKDHAASTSAHKWSFGAQDQAMXTYSPTTTSYQHTXIWKFNYGNYSAPGGSGDYGCDDSKLFGTDRTVDDQTG

SEQ ID NO: 50252 - protein, 519 aa, Trametes versicolor
MGLQRFSFFVTLALVARSLAAIGPVASLVVANAPVSPDGFLRDAIVVNGVVPSPLITGKKGDRFQLNVVDTLTNHSMLKSTSIHWHGFFQAGTNWADGPAFVNQCPIAPGHSFLYDFHVPDQAGTFWYHSHLSTQYCDGLRGPFVVYDPKDPHASRYDVDTESTVITLTDWYHTAARLGPRFPLGADATLINGLGRSASTPTAALAVINVQHGKRYRFRLVSISCDPNYTLSIDGHNLTVIEVDGINSQPLLVDSIQIFSALDYSFVLNANQTVGNYWVRANPNFGTVGFAGGINSAILRYQGAPVAEPTTTQTPSVIPLIETNLHPLARMPVPGSPTPGGVDKALNLAFNFNGTNFFINNASFTPPTVPVLLQILSGAQTAQELLPAGSVYPLPAHSTIEITLPATALAPGAPHPFHLHGHAFAVVRSAGSTTYNYNDPIFRDVVSTGTPAAGDNVTIRFQTDNPGPWFLHCHIDFHLEAAFAIVFAEDVADVKAANPVPKAWSDLCPIYDGLSEANQ

SEQ ID NO: 50253 - protein, 166 aa, Bradyrhizobium japonicum USDA 110
MGIKDLIPWNNGGREVGIHRGADVNPFLTLHREMNRMFDEVFRGFDLAPFGSSRGLSGLGWPQIDIDETDKEVRITAELPGLEEKDVSLEIANGVLSISGEKKSESEDKARRFSERYYGRFERRIPLEGIDEDKVSAAFKNGVLTITVPKSAEAKNVRRIAINRNG

SEQ ID NO: 50254 - protein, 520 aa, Trametes versicolor
MGRVSSLCALTAVIHSFGRVSAAIGPVTDLTISNADVSPDGFTRAAVLANGVFPGPLITGNKGDNFQINVVDNLSNETMLKSTSIHWHGFFQKGTNWADGAAFVNQCPIATGNSFLYDFTATDQAGTFWYHSHLSTQYCDGLRGPMVVYDPSDPHADLYDVDDETTIITLSDWYHTAASLGAAFPVGSDSTLINRLGRFAGGDSTDLAVITVDQGKRYRMRLLSLSCYPNYVFSIDGHNMTIIEADAVNHEPLTVDSIQIYSGQRYSFVLTADQDIDNYFIRALPSAGTTSFDGGINSAILRYSGASEVDPTTTETTSVLPLDEANLVPLDSPAAPGDPNIGGVDYALNLDFNFGGTNFFINDVSFVSPTVPVLLQILSGTTSAADLLPSGSLFALPSSSTIEISFPITATNAPGAPHPFHLHGHTFSIVRTAGSTDTNFVNPVRRDVVNTGTAGDNVTIRFTTDNPGPWFLHCHIDFHLEAGFAIVFSEDTADVSNATTPSTAWEDPCPTYNALDSSDL

SEQ ID NO: 50255 - protein, 527 aa, Trametes versicolor
MGKFHSFVNVVALSLSLCGRVFGAIGPVADLTISNADVTPDGITRAAVLAGGVFPSPLITGNKGDEFQINVIDNLTNETMLKSTTIHWHGIFQAGTNWADGAAFVNQCPIATATSFLYDFTVPDQAGTFWYHSHLSTQYCDGLRGPLVVYDPDDPNASLYDVDDDTTVITLADWYHTAAKLGPAFPAGPDSVLINGLGRFSGDGGGATNLTVITVTQGKRYRFRLVSISCDPNFTFSIDGHNMTIIEVDGVNHESLDVDSIQIFAGQRYSFILNANQSIDNYWIRAIPNTGTTDTTGGVNSAILRYDTAEEIEPTTNATTSVIPLTETDLVPLDNPAAPGDPQVSGVDLAMSLDFSFNGSNFFINNETFVPPTVPVLLQILSGAQDAASLLPNGSVYTLPSNSTIEISFPIITTDGALNAPGAPHPFHLHGHTFSVVRSAGSSTFNYANPVRRDTVSTGNSGDNVTIRFTTDNPGPWFLHCHIDFHLDAGFAIVFAEDTADTASANPVPTTWSDLCPTYGALDSSDL

SEQ ID NO: 50256 - protein, 442 aa, Dianthus caryophyllus
QIKQSTMVRPAEETPNKSLWLSKIDMILRTPYSHTGAVLIYKQPDNNEDNIHPSSSMYFDANILIEALSKALVPFYPMAGRLKINGDRYEIDCNAEGALFVEAESSHVLEDFGDFRPNDELHRVMVPTCDYSKGISSFPLLMVQLTRFRCGGVSIGFAQHHHVCDGMAHFEFNNSWARIAKGLLPALEPVHDRYLHLRPRNPPQIKYSHSQFEPFVPSLPNELLDGKTNKSQTLFILSREQINTLKQKLDLSNNTTRLSTYEVVAGHVWRSVSKARGLSDHEEIKLIMPVDGRSRINNPSLPKGSCGNVVFLAVCTATVGDLSCNPLTDTAGKVQEALKGLDDDYLRSAIDHTESKPGLPVPYMGSPEKTLYPNVLVNSWGRIPYQAMDFGWGSPTFFGISNIFYDGQCFLIPSRDGDGSMTLAINLFSSHLSRFKKYFYDF

SEQ ID NO: 50257 - protein, 506 aa, Corynebacterium efficiens YS-314
MESSMVENNVAKKTVAKKTARKTARKAAPRAAAPLGSQDIPASSTPAATSPVTPAPAAIDATVDAATPASTDTTAGEAETSTGTAPAAKKTVAKKTARKTTAKKTTARKTTAKKAAPAKAAPKVIDPELEDEDDDLIVDEEDPAFIPGDELEQDDEVAPLGEEEEEEEEDDGSSVWDEDESATLRQARKDAELTASADSVRAYLKQIGKVALLNAEQEVSLAKRIEAGLYATHKMEEMEAAYAAGDKDAKLTPAVKRDLRAIARDGRKAKNHLLEANLRLVVSLAKRYTGRGMAFLDLIQEGNLGLIRAVEKFDYSKGYKFSTYATWWIRQAITRAMADQARTIRIPVHMVEVINKLGRIQRELLQELGREPTPQELSKEMDISEEKVLEIQQYAREPISLDQTIGDEGDSQLGDFIEDSEAVVAVDAVSFTLLQDQLQDVLETLSEREAGVVKLRFGLTDGMPRTLDEIGQVYGVTRERIRQIESKTMSKLRHPSRSQVLRDYLD

SEQ ID NO: 50258 - protein, 445 aa, Dianthus caryophyllus
MSIQIKQSTMVRPAEETPNKSLWLSNIDMILRTPYSHTGAVLIYKQPDNNEDNIHPSSSMYFDANILIEALSKALVPFYPMAGRLKINGDRYEIDCNAEGALFVEAESSHVLEDFGDFRPNDELHRVMVPTCDYSKGISSFPLLMVQLTRFRCGGVSIGFAQHHHVCDGMAHFEFNNSWARIAKGLLPALEPVHDRYLHLRPRNPPQIKYSHSQFEPFVPSLPNELLDGKTNKSQTLFILSREQINTLKQKLDLSNNTTRLSTYEVVAAHVWRSVSKARGLSDHEEIKLIMPVDGRSRINNPSLPKGYCGNVVFLAVCTATVGDLSCNPLTDTAGKVQEALKGLDDDYLRSAIDHTESKPGLPVPYMGSPEKTLYPNVLVNSWGRIPYQAMDFGWGSPTFFGISNIFYDGQCFLIPSRDGDGSMTLAINLFSSHLSRFKKYFYDF

SEQ ID NO: 50259 - protein, 241 aa, Nelumbo nucifera
MASASSFQLMILVIQCLAALSVSHATSVHFFHHAQVWAGSFCASEKGSCFPNTGMVSQEFTVHGLFPCSSSGTRLMNCDRGNSLDLSQITGLLHTMQRKWPSYSCPSSDSTPFWAHEWSKHGTCSLSVFDGQYDYFKAGLDLKDKVNILQILKKEGINPDGQYYSSERITRVLQIATGVTPALDCTVDKFGKYQLYQVMFCVDKSGSEFMDCPVYPEPTCPSIIRFPPFRGSAAEGIYLRS

SEQ ID NO: 50260 - protein, 376 aa, Streptococcus pneumoniae TIGR4
MLDLIQTRRDLHQIPEIGLEEFKTQAYLLDVIEKLTTGKDFVQIRTWRTGILVYLQGSQPERTIGWRTDIDGLPIVEQTGLPFASQHQGRMHACVHDFHMTIALGCLERALEEQPKNNLLFLFQPAEENEAGGMLMYEDGAFGDWLPDQFYGLHVRPDLKVGQIATNTHTLFAGTCEVKIRFKGKGGHAAFPHEANDALVAASYFVTQVQSVVSRNVNPIEGAVVTFGVFQAGTTNNVITDTAFLHGTIRALTQDMSLLVQKRVKTVAEGVAAAFDMEVEVELKQGGYLPVENNPALARELMDFFDEKDGIELIDIEPAMTGEDFGYLLSKVDGVMFWLGIDSPYALHHPQMSPKEEVLAIGVAAVSSFLKKKAAE

SEQ ID NO: 50261 - protein, 313 aa, Gossypium arboreum
MEPAWVDTTLDLNINPCFRTNKAMKREFEGDVAESAPVKYESGVLVEELNRVSAENKKLTEMLTVLCEQYYSLQHQFMELVNKNPEIETTAAATTSSSKKRKAEWEDYGANMIGFSGNTETSSSDDGSPKTPKDCIKPKVSRVQVRTNPSDNSLIVRDGYQWRKYGQKVTRDNPCPRAYFKCSFAPSCPVKKKVQRSAEDPSILVATYEGEHNHHEHHRSPPAEISLNSNNNTPSSNTGSGPVSSAPTKALASTVTLELLQPAGLGGDETERAALQIDAPAIQQILVHQMAASLSRDPNFTAALAAAISGRAV

SEQ ID NO: 50262 - protein, 446 aa, Dianthus caryophyllus
MSIQIKQSTMVRPAEETPNKSLWLSKIDMILRTPYSHTGAVLIYKQPDNNEDNIHPSSSMYFDANILIEALSKALVPYYPMAGRLKINGDRYEIDCNAEGALFVEAESSHVLEDFGDFRPNDELHRVMVPTCDYSKGISSFPLLMVQLTRFRCGGVSIGFAQHHHACDGMSHFEFNNSWARIAKGLLPALEPVHDRYLHLRLRNPPQIKYTHSQFEPFVPSLPNELLDGKTNKSQTLFKLSREQINTLKQKLDLSSNTTTRLSTYEVVAGHVWRSVSKARGLSDHEEIKLIMPVDGRSRINNPSLPKGYCGNVVFLAVCTATVGDLSCNPLTDTAGKVQEALKGLDDDYLRSAIDHTESKPDLPVPYMGSPEKTLYPNVLVNSWGRIPYQAMDFGWGSPTFFGISNIFYDGQCFLIPSQNGDGSMTLAINLFSSHLSLFKKYFYDF

SEQ ID NO: 50263 - protein, 231 aa, Nicotiana benthamiana
MAPKEKGTAAGKVNGVSKEVHYRGVRKRPWGRYAAEIRDPGKKSRVWLGTFDTAEDAARAYDAAAREFRGTKAKTNFLVLEQENVKLANGNRSPSYSSTVENSPPVMPENSPPAVILDTSPLDLSLGGSGSLFSNGVGRFHMYYLEAVQREQVISSYKKSCRTTAEFIAGCGGGASGESDCRTTAEFIAGCGGGASGESDSSSVIDFMGHDLKPTTRPINLDLNLPPPENM

SEQ ID NO: 50264 - protein, 468 aa, Salmonella enterica subsp. enterica serovar Paratyphi A str.
MDTLQQPPPAEPEGGLRRNLKKRHLLMMLLGGTIGTGLFIGIAEPLSSVGPAGTLLAYLFAGTIMLATMMCLGELSCAFPHSGSFQHYALMFMPSPCWSYTIGWLYWFSWVFSLAADLTAAGFIAHQFFPAVPVYMFCLAILLILTAINLTSAKSFGECEYWLSAIKVFAIVLFICAGGVMIYSLMGHSDWHPTLKTDGMWFPHGWEQIVVCMTIVIYSFQGVELVGNAAGETESPHIILPKVILGIGLRIILFYGLAIAVLALVYPHELTPNGQSPFVWVFSHAGIPGADTLMTLVIFSAAVSAANSAIYASSRMLWSMAGDRFAPACFGKTNGGGVPVYAILITALLALVSLLTRYIPAQQFYLYLIASTGQVGCLAWITIGWCQYRFRQSVRNGTYASDLLRYRSPLFPWTARFVIITNFAIMVGTWFSEQGVVIMLVELAFMIGILLSWYLFRPTLSRLRNTVG

SEQ ID NO: 50265 - protein, 274 aa, Glycine max
MYGQSSYESDLALLDSIRRHLLGDSEEHKFGAPNVSSGNTPAYSRSSCFSRLYPCLSNDWGELPLKEDDSEDMLLYGVLRDAINAGWVPSLDASSPESFSSGFIPAVTVKSEPDLFPAPEPVYIPPAAQKAEPAVVPAKGKHYRGVRQRPWGKFAAEIRDPAKNGARVWLGTFETAEDAALAYDRAAYRMRGSRALLNFPLRINSGEPEPVRVTAKRYSPEPSSSSSDSASSTKRRKKVVGSTVTAQSGLRKEQVGSQVAHSAHVESSCWSTNA

SEQ ID NO: 50266 - protein, 451 aa, Oryza sativa
MEAAAAMEAGRKLAARHPHGRSRTAHNMSSSSLRKKSDAALVRKVPVAPLRPLLANLQEVFLATKLAVLFPAVPLAIAAQCFRFDQVWVFALSLLGLIPLAERVSFLTEQIALYTGPTVGGLLNATCGNATELIIALFALLKGKIEVVKCSLLGSVLSNLLLVLGTSLFCGGVVNLGARQPYDRNQSDVSTALLFLAVLCHSAPLLLRYAVAAGEHSVSATSAAASLDLSRACSFVMLASYVAYLFFQLKTHRQLFEPQEVDGGDAGDDDEEPALGFASALFWLALMTAVISVLSEYVVGTIEPTSQSWGLSVSFISIILLPIVGNAAEHAGAIIFALKNKLDITLGVALGSATQISMFVVPLSVLVAWIMGVQMDLDFKLLETGSLFMAVLVTAFTLQDGTSHYLKGILLLLCYIVIGACFFVARQPAGHANSNGALLDVPTGSMSVQAA

SEQ ID NO: 50267 - protein, 478 aa, Arabidopsis thaliana
MAETDVGSVKGKEKGSGKRWILLIGAIAAVLLAVVVAVFLNTQNSSISEFTGKICNCRQAEQQKYIGIVEDCCCDYETVNRLNTEVLNPLLQDLVKTPFYRYFKVKLWCDCPFWPDDGMCRLRDCSVCECPESEFPEVFKKPLSQYNPVCQEGKPQATVDRTLDTRAFRGWTVTDNPWTSDDETDNDEMTYVNLRLNPERYTGYIGPSARRIWEAIYSENCPKHTSEGSCQEEKILYKLVSGLHSSISVHIASDYLLDEATNLWGQNLTLLYDRVLRYPDRVQNLYFTFLFVLRAVTKVKDYLGEAEYETGNVIEDLKTKSLVKQVVSDPKTKAACPVPFDEAKLWKGQRGPELKQQLEKQFRNISAIMDCVGCEKCRLWGKLQILGLGTALKILFTVNGEDNLPIFVVLFQLELQRNEVIALMNLLHRLSESVKYVHDMSPAAERIAGGHASSGNSFWQRIVTSIAQSKGKKALKNL

SEQ ID NO: 50268 - protein, 427 aa, Brucella suis 1330
MRTINENTATKTSRAAVRPEHNRIWILVFIFSFLGLMIDGADLMLLSYSLTSIKAEFGLTSVEAGSLGSITLAGMAIGGIYGGWACDRFGRVKTVSWTIVLFSIGTAVLGLTHSYFQFAVARFVSSLGLGALYVACNTLMAEYVPTKYRTTALGTLQAGWSVGYIVATVLAGAILPVYGWRYLFFVAIVPVIIALLMHKGVPEPESWVRAKAERESGGSKFTTAKRESAFKAIFGNPRVRTLFIFWALTAGFLQFGYYGVNNWLPSYLETEMGMNFKSMTAYMIGSYTAMILGKVLAGVAADWLGRRAVFALGALGTAAFLPIIVLYHSPNTILWMLVVFGFLYGVPYGVNATYMAESFEAKYRGTAVGGAYNIGRAGAALAPVAIGFFASQISIGFGFLVMGGAYFICGVIPALFIREKQFDPEKQ

SEQ ID NO: 50269 - protein, 592 aa, Ralstonia solanacearum
MVAVKTGLPRRKFDVVIVGAGGAGMRASLQLAEAGLSVAVLSKVFPTRSHTVAAQGGIGASLGNMSEDNWHYHFYDTIKGSDWLGDQDAIEFMCRQAPQVVYELEHFGMPFDRNADGTIYQRPFGGHTSNYGEKPVQRACAAADRTGHALLHTLYQRNVRAKTHFFVEWMALDLIRDQDGDVLGVTALEMETGEVYILEAKTTLFATGGAGRIYAASTNAFINTGDGLGMAARAGIPLEDMEFWQFHPTGVAGAGVLITEGVRGEGGILRNKDGERFMERYAPTLKDLAPRDFVSRSMDQEIKEGRGCGPNGDYVLLDLTHVGAETIMKRLPSIREIGLKFANVDAIKEPIPVVPTIHYQMGGIPTNYHGQVVVPKNGSPNEVVNGFYAIGECSCVSVHGANRLGTNSLLDLVVFGRSAGNHIVAQNLKNREHKPLPADAADRALARLAKLDSSSSGEYAQDVANDIRRNMQAHAGVFRTQKLMDEGVERIMEVTERAANIHLKDKSKVFNTARVEALEVANLVEVAKATMVSAAARRESRGAHAHSDFPNRDDDNWLKHTLFYSEGNRLEYKPVQMKPLSVESVPPKARTF

SEQ ID NO: 50270 - protein, 457 aa, Staphylococcus aureus subsp. aureus Mu50
MHINTVNGRGMYMSKAHQLIQEDEHYFAKSGRIKYYPLVIDHGYGATLVDIEGKTYIDLLSSASSQNVGHAPREVTEAIKAQVDKFIHYTPAYMYHEPLVRLAKKLCELAPGDFEKRVTFGLTGSDANDGIIKFARAYTGRPYIISFTNAYHGSTFGSLSMSAISLNMRKHYGPLLNGFYHIPFPDKYRGMYEQPQANSVEEYLAPLKEMFAKYVPADEVACIVIETIQGDGGLLEPVPGYFEALEKICREHGILIAVDDIQQGFGRTGTWSSVSHFNFTPDLITFGKSLAGGMPMSAIVGRKEIMNCLEAPAHLFTTGANPVSCEAALATIQMIEDQSLLQASAEKGEYVRKRMDQWVSKYNSVGDVRGKGLSIGIDIVSDKKLKTRDASAALKICNYCFEHGVVIIAVAGNVLRFQPPLVITYEQLDTALNTIEDALTALEAGNLDQYDISGQGW

SEQ ID NO: 50271 - protein, 490 aa, Pseudomonas fluorescens Pf-5
MLPLARPNPNRKRVLFVTSEIADLVKTGGLGDVSAALPRAMAHLHDVRVLIPGYPQVLHSENPIHIIGELGGHAALPACKIGRMDMPDGLVIYVLICPELYEREGTPYGANNGRDWPDNHIRFARLGLAAADIAANLAQIHWCPDLVHAHDWPAGLAPAYMHWRGQRTPTLFTIHNLAYQGVVSLASCPELGIPEHALQQEGMEFYGKLSFLKAGMAYASHITTVSATYAQEITTPAFGCGLDGFLASKTQQGLLSGIPNGIDESWDAATDAHLLTPFSIGDWDGKAANAAHVRQMFGLDASSGPLFAVVSRLVYQKGLDLTEAVAEFIVQSGGQIAIIGRGEPEEEQSMRALARRFPGRIGVHIGFNETDARRMFAGSDFLLMPSRYEPCGLSQMYAQRFGSLPVARNTGGLADTIENGVTGFLFDESTVASYQEALTRAFKVFAYPALLNAMRCRAMAAPFNWCKAVEPYAELYEQLVAKALGQAARQ

SEQ ID NO: 50272 - protein, 396 aa, Zea mays
  misc_feature (23)..(23): Xaa can be any naturally occurring amino acid
  misc_feature (238)..(238): Xaa can be any naturally occurring amino acid
  unsure (1)..(396): unsure at all Xaa locations
MSWWWTGAIGAVKKRQDEQAAAXEPSYQSVALVVGSTGIVGTSLLDILPLSDTPAGPWKVYAVSRRPLPPWSPAPSPAVTHLHLDLADSAAVAEALQPLTDITHVFFVAWTSRPTEAENREANSAMLRNVLSVVVPNCPALVHVCLQTGRKHYVGPFEAIGKVAAPDPPFTEDMPRLDCPNFYYDMEDILFHEVSRRDGAVSWSVHRPTTVFGYSPRSAMNLVGSLCVYAAICRKEGXTLRWPGSRVTWEGFSDASDADLIAEHEIWAAVDPFAKNEAFNCSNGDLFKWKQLWPILADHFGLEWAGYEGEENRFKLEEAMAGKEAVWAEIVRENDLIATELDEITNWWFVDAMFAVETQLLDSMNKSKEHGFLGFRNTVSSFNTWIEKLKVFKIVP

SEQ ID NO: 50273 - protein, 122 aa, Brassica napus
  misc_feature (8)..(8): Xaa can be any naturally occurring amino acid
  misc_feature (13)..(14): Xaa can be any naturally occurring amino acid
  unsure (1)..(122): unsure at all Xaa locations
DLLDSGAXERRCXXCATDKTPQWRTGPMGPKTLCNACGVRYKSGRLVPEYRPAASPTFVLAKHSNSHRKVMELRRQKEMTKAHHEFIHHHHGTETAMIFDVSSDGDDYLIHHNVGPDFGQLI

SEQ ID NO: 50274 - protein, 542 aa, Oryza sativa (japonica cultivar-group)
MGNQCQNGTLGSDYHNRFPREHAVGYVQGDSYLDLKKFDDTWPEVNNFKPTAASILRRGLDPTSINVLGRKTADLREHYIIGRKLGQAQFGTTYLCTEINTGCEYACKTIPKRKLITKEDVEDVRREIQIMHHLSGHKNVVAIKDVYEDGQAVHIVMELCAGGELFDRIQEKGHYSERKAAELIRIIVSIVAMCHSLGVMHRDLKPENFLLLDKDDDLSIKAIDFGLSVFFKPGQVFTELVGSPYYVAPEVLHKRYGPESDVWSAGVILYVLLSGVPPFWAETQQGIFDAVLKGHIDFQSDPWPKISDSAKDLIRKMLSHCPSERLKAHEVLRHPWICENGVATDQALDPSVISRLKQFSAMNKLKKLALRVIAERLSEEEIAGLREMFKAVDTKNRGVITFGELREGLRRFGAEFKDTEIGDIMEAAHNDNNVTIHYEEFIAATLPLNKIEREEHLLAAFTYFDKDGSGYITVDKLQRACGEHNMEDSLLEEIISEVDQNNDGQIDYAEFVAMMQGSNVGLGWQTMESSLNVALRDAPQVH

SEQ ID NO: 50275 - protein, 429 aa, Yersinia pestis CO92
MSHRELEQRRKEATPRGIGVLCDFYAVRAENATLWDEQGREYIDFTAGIATLNIGHRHPKVMAAVRQQLDQFTHTAYQVVPYASYVTLAEKINSLAPISDSNMTAAGNSKTAFFTTGVEAIENAVKIARAATGRPGVIAFSGAFHGRTLLAMALTGRAVPYKVGFGPFPASIFHALYPNELYGVSVEEAISSVERLFRCDISPTQVAAILFEPIQGEGGFNIAPPEFVSALRTLCDEHGILLIADEVQTGFARTGKLFAMEYYPDTKVDVITMAKSLGGGMPISAVTGRADIMDAPLPGSLGGTYAGNPLAVAASLAVLDIIAEEKLCERALILGAKLVDVLEKAQMSNAAIVGIRARGSMVAVEFNDPVSGKPSPELTRAYQRQALEEGLLLLSCGVHSNVIRFLYPLTIPDKQFKQAMNILTRLLAS

SEQ ID NO: 50276 - protein, 329 aa, Ralstonia solanacearum
MAKAPMRVAVTGAAGQIGYALLFRIAAGEMLGKDQPVILQLLEIPDEKAQKALKGVMMEIEDCAFPLLAGMEAHADPMTAFKDVDVALLVGARPRGPGMERKDLLSANAQIFTAQGKALNAVASRNVKVLVVGNPANTNAYIAMKSAPDLPRENFTAMLRLDHNRALSQIAAKTGKPVSSIEKLFVWGNHSPTMYADYRYATIDGQSVKDMINDPVWNNDVFLPTVGKRGAAIIEARGLSSAASAANAAIDHVRDWVLGSNGKIVTMGIPSNGDYEIPQDVMFGFPVTTANGKYEVVKGFEVDAYSREKINITLKELEEERAGVQHLLG

SEQ ID NO: 50277 - protein, 738 aa, Thiobacillus denitrificans ATCC 25259
MHKENAPVSDDPLHPHPQRSTVSSFPARPRILVVDDEILILEGMRRLLAARDYDVTTANGGCEALIAIGKQQFDVILLDLGMPDLSGAEVLRFVADRSADTPVIVVSGDSTIDAAIRALRGGAADFVRKPYEPEELLRRVDNTLTRRRLERENNHILQRLQQSEKWHRFLVNSSPDFIYTLDCDGRFTFVNDRVESLLGYTREDLLGQHYSTIIHEEDLARAEHVFNERRAGDRSARNIEIRLKCNPGMRRPRLMNGRCKAVELTATGMYDEDATLFERRFIGSYGVAKDVTERKQAEETVHYQAYHDLLTGLPNRALFRDHLALMLAQAKRSHKTLAVLSLDLDHFKVINDSLGHTIGDELLLAVGARLRQCLREGDTLARLGGDEFAVLLPTLLSRGDVEQICRKIIQVLSRPVYVKGHEIYISVSIGACVAPDDGEMIDSLIRQAEIAMYQAKAQGRSRLQFWEAGMQAPYSERMQIEADLRRALARNEFVLFYQPQVDTVSGEVRGFEALLRWWHPQRGFLSPAEFIPVAEESGVIVPIGDWVLREASAQMAEWRRAGLPQVRLSVNISARQLESPDFVESVMRAVQVHALDGQQIELEITESLLMRDFEANAIKLGRLSASGIRLAIDDFGTGYSSFKYLSRFPIHTLKIDQSFIQELEREENLSIVNAMVAMGRGMNLNVVAEGVETQSQLACLQQMQCHEMQGHYYSVPMSGHDATALLGRHTRGFVEAAG

SEQ ID NO: 50278 - protein, 285 aa, Triticum aestivum
MTIMRMFLALCALGFVAGVVEDGSSFDVSAYPVKWDEDPSVGSGDVAAPPSPGTEAPAPPPKHHMMVKKGMLFLERDLFAGALLPANTRLGYVRRTSSPGPVISSTTSPVPPFRYSSFEKILKFYNVTHGSKQAGRISETLQFCEEAGDKEPHACATSVAAARDFAATVLGTKEPRAVTSILHGRTQPLRYVVAPNGIASVGGDAVVPCHPLAYPVEVFYCHNPSNVQALRVQLVGQEDPSVGATAIAVCHKDTSYWDEAYFMMLNGSRGEPICHFMPANYLLWL

SEQ ID NO: 50279 - protein, 611 aa, Rubrobacter xylanophilus DSM 9941
MGKTWRKRLRLGLGWLAGDMREGGGPVAAAPAMPLREILRRFWPHARPYRRWLVPLLLLAALGPAVETATIWMYKVLVDGVLIPGEFGLLPWVVLAYLGLTLLDGAISFLDGYLSEWVGGRFILRLRTGLFRHLQTLSLDFFDRRKLGDTVARISDDVEEIEELLLSGAVSAVTYAFQLLFFVGALFYLEWRLALVSLLVAPLFWLVARRFSRRIKRAAREERRKAGSIGAVAEESLSNAALVQAYNRQEHEVARFHRENEEGFAAQMVAARLSALFSPLVNLIELLGALTVVSFGAYLLSRGALTVGGLLAFLVYLGMLYRPIRGFSRLANSFFSAAAAAERVAELLQMRPAVRGGALEPGRLRGEVRFREVTFRYPGAAEPALRGVSFEARPGEVVALAGPSGAGKSTVVRLLLRFYDPEGGSISIDGYELRELSLRALRENVAVVLQEAMIFDGTVRENIAYGRPGATEREIREAARAADAHEFIERLPQGYDTVVGQKGRLLSGGQRQRIAIARAMLRDAPVLVLDEPAAGLDAGSQERIMKPLRRLMAGRTTIVISHDLLAVREATRIVVLEGGRVAGSGTHAELLERGGLYAGLFRRQSPERGAV

SEQ ID NO: 50280 - protein, 441 aa, Oryza sativa (japonica cultivar-group)
MRPAVAAALLLVAAAVAASPVSALYSAGSPVLQFNPNNFKSKVLNSNGVVLVEFFAPWCGHCQQLTPIWEKAAGVLKGVATVAALDADAHKELAQEYGIRGFPTIKVFVPGKPPVDYQGARDVKPIVEFALSQVKALLRDRLNGKTSAGSGGKKSGGSSEKTEPSASIELNSQNFDKLVTKSKDLWIVEFFAPWCGHCKKLAPEWKKAAKNLKGQVKLGHVDCDAEKSLMSKYKVEGFPTILVFGADKESPFPYQGARVASAIESFALEQLEANAAPPEVSELTGPDAMEEKCASAAICFVSFLPDILDSKAEGRNKYLELLLSVAEKFKKSPYSFVWTAAGKQADLEKQVGVGGYGYPAMVALNVKKGAYAPLRSAFQLDEITEFVKEAGRGGKGNLPLDGTPTIVQSEPWDGKDGEVIEEDEFSLEELMADNSPVNDEL

SEQ ID NO: 50281 - protein, 260 aa, Brassica oleracea
QLMTWKTAVANIPYGGAKGGIGCDPSKLSISELERLTRVFTQKIHDLIGIHTDVPAPDMGTGPQTMAWILDEYSKFHGYSPAVVTGKPIDLGGSLGRDAATGRGVMFATEALLNEHGKSISGQRFVIQGFGNVGSWAAKLISEQGGKIVAVSDITGAIKNKDGIDIESLLNYTKEHRGVKGFDGAHPIDANSILVEDCDILIPAALGGVINRENANEIKAKFIIEAANHPTDPDADEILSKKGVVILPDIYANSGGVTVS

SEQ ID NO: 50282 - protein, 597 aa, Shewanella sp. MR-7
MSLEQYHVIRLLQQQSQSLKDAIALEGFEMAAPWHQVSWQAFDQISHKIAQVLIELGVQVQDRCVILSQNCPQWTCADIGTLKSRAVVVPIYPTSTLEQASFIINDAAAKVIFVDDAKQYALACELQKQCPTLEHVIVFDASVELARDKAQHQHLDSLLAKEYGQSAELEQRLKDANLDDLLTLIYTSGTTGDPKGVMLDYRNMASTVRQHDQILPFTTGDVSLAFLPLSHVFERGWSFYVLCRGGHNVYLQNTQRVKEAISAVRPHTLCVVPRFLEKVYSAVQDKVAKSAEGRKKLFAWAMGVGERQFEVSQGRAKGGLWLSLQWRLAHKLVYSKLQAVLGGRLKFMPCGGAALDLNVASFFHAIGIPVLCGYGMTETNATVTCNTLDNRVAGSNGKVLPEIEVKLGKDDEILVRGDTVMRGYYNRPEDTAAAFEDGWLKTGDAGRLDANGNLFITDRIKELMKTSNGKYIAPQRVEGTVGRCPFIEQVAVIADARNYVTALIVPAFESLEAWAKDKGLKYESPIELLRHSHVVEHFEQRLKHLQQELAGFEQIKKFTLLPEAFSMEAGLITPTLKLRRKMIYHKYAHEINAMYNN

SEQ ID NO: 50283 - protein, 442 aa, Prosthecochloris aestuarii DSM 271
MKRHVKAPILLTLGLLLAGVISGPPLFAAEATDAASVNAYAIDNMFLFLCAVLVLFMQAGFALVESGLNSAKNTVNILFKNMMDLGLGVILFYIIGYGLMYPGDAFSGGWFGFSGFGIGVESPEAVGGNLHPAVDFLFQVAFAATAATIVSGAVAGRMKFEAYLIYSAVITAFVYPISGFWKWGGGWLNELGFYDFAGSLVVHALGGFAALAAAIVLGPRIGRFNADGSPNAMPGHNLALSTLGVFILLIGWFGFNPGSQLAIAGAANTDIVMIIATNTLLAAAAGSVLAMIFAWILFKKPDLTMAMNGLLGGLVGITANCDSVTYNEALIIGAVAGILVVLGVKLLDMLKIDDPVGAWPVHGLNGVWGGLATGIFGGHPMVAQIIGSIAIPVWGFVTMLVLFLILKMMGILRVSREDEMKGLDISEHEEEAYHGFQIFSTQ

SEQ ID NO: 50284 - protein, 247 aa, Arabidopsis thaliana
MARKNLGRRKIELVKMTNESNLQVTFSKRRSGLFKKGSELCTLCDAEIAIIVFSPSGKAYSFGHPNVNKLLDHSLGRVIRHNNTNFAESRTKLRIQMLNESLTEVMAEKEKEQETKQSIVQNERENKDAEKWWRNSPTELNLAQSTSMKCDLEALKKEVDEKVAQLHHRNLNFYVGSSSNVAAPAAVSGGNISTNHGFFDQNGNSTSAPTLPFGFNVMNRTPAGYNSYQLQNQEVKQVHPQYWARYY

SEQ ID NO: 50285 - protein, 547 aa, Thiobacillus denitrificans ATCC 25259
MAAKDVRFGDSARHRMVAGVNVLADAVKVTLGPKGRNVVLDRSFGAPTVTKDGVSVAKEIELKDKLENMGAQMVKEVASKTSDVAGDGTTTATVLAQSIVNEGMKFVAAGMNPMDLKRGIDKAVNAITEELKKISKPCTTSKEIAQVGSISANSDAPIGQIIADAMDKVGKEGVITVEDGSGLENELDVVEGMQFDRGYLSPYFINNADKQMAIMDDPFILLFDKKISNIRDLLPVLEQVAKAGKPLMIVAEDVDGEALATLVVNNIRGILKTCAVKAPGFGDRRKAMLEDMAILTGGTVIAEEVGLSLEKATLQDLGRAKRIEVGKENTTIIDGAGDGNAIKGRIAQINKQIEEVTSDYDKEKLQERKAKLAGGVAVIKVGAATEVEMKEKKARVEDALHATRAAVEEGIVPGGGVALLRAKAAAAAIKGDNHDQDAGVKIVLRAIEEPLRQIVKNCGDEPSVVVNKVLEGEGNFGYNAGTSEYGDMVAMGVLDPTKVTRTALQNAASIAGLMLTTDCMVADLPEDKAPAMPMGGGMGDMGGMGMM

SEQ ID NO: 50286 - protein, 719 aa, Oryza sativa (japonica cultivar-group)
MLLLHPRPLPAPAPARRFEPAVRVPPPRRRRRRRRPPLPPLASASASAAIYSVGSSDEDAFTRCSGYLFEEGAATEGELPTAYDLAGIGAVYRRRPLLVVRRALQIGTSFGRWFTLRYLDRVNERSDDMFEIRAAQLRRILLELGPTFVKIAQAVSSRPDVIPPAYLDELSLLQDRIAPFSTEVAFNIIETELGLPLDMIFSEISPEPVAAASLGQVYQARLRSNRKVVAVKVQRPGVQAAISLDIYILRFLAGVARKAGKLNTDLQAVLDEWASSLFRLVSYLILKIRFIFLELHIEYRELYGKFRDVLVPEMYLEQTRRRVLIMEWVEGEKLSEVRDQYLVEVGVYCSLSQLLEYGFYHADPHPGNLLRTVDGKLAYLDFGMMGEFRQELRDGFIEACLHLVNRDFDGLAKDFVTLGLLPPTAQKDEVTKALTGVFQNAVDRGVQNISFGDLSGNLGRTMYKFKFQIPSYFSLVIRSLAVLEGIAISFNPNYKVLGSSYPWIARKVLTDSSPKLRSTLQTLLYKDGTFQIDRLESLLTESLRARTEQSLTRDQQEETDSSKFAIKQVLSFTLTEQGAFVKDLLLQEIAKGLDALGAATLSSATSAAASRLPFAVPSPSPSLDNEDATNLRNLHRLLLLLSKVPQKEDSSPIPGYNSTEENEGDSTDEISLVLYEMRSLPELLPVLSVIPEVRMEIQVGYGNTSRMEMYIRIDVEYDL

SEQ ID NO: 50287 - protein, 1147 aa, Yarrowia lipolytica CLIB122
MYQLLKALNAKVYSQQREIALHSGAVVALERDLSQTRNILNSFTETIAPGEKRVVDTDLLDRELRKSQTANRAFQKALMEIGEVVFAVAQGDLSKKVTIHDQEMDPEIVKFKETINKMMSQLQRFASEVTRVATEVAGGTLGGQAEGEGTVGVWRELTDNVNVMASNLTNQVREIADVTRAVAQGDLSRKINVHAQGEILELQKTINTMVEQLRTFAFEVTRVARETGVEGRLGGQAQIEGVEGIWRELTDNVNAMASNLTDQVRNIANVTTAVARGDLSQKVSADCKGEILDLKSTINKMVDRLQNFALEVTTLARSVGTEGILGGQAKVEDVEGAWKEITENVNVMASNLTTQVRSIAHVTTAVAQGDLSQKIDVHAQGEMLALKSTINKMVDRLQVFASEVTRVAKDVGIDGKLGVQAQVSDVDGLWKEITTNVNTMAANLTTQVRALVQITAAATDGDFTRFITVEASGEMDALKTKINQMVLNLRESIQRNTAAREAAELANRAKSEFLANMSHEIRTPMNGIIGMTQLTLDTELTQYQREMLSIVHNLANSLLTIIDDILDISKIEANRMTIEKIAFSLRGTVFGALKTLSVKANEKPLDLVYKVDNTFPDNLVGDSFRLRQVILNLVGNAIKFTESGEVALSVRKADDQRPGSPDEMMIEFCVSDTGIGIQSDKLDVIFDTFCQADGSTTRKFGGTGLGLSISKRLINLMGGDIWVKSEYGKGSQFFFTLAVQPADSGLSQLLDNIAPFRNHYVLFINTEHEQEVVDQLVDNMQRLNLNAWVVDSLEEAPLPEDRSGPKFDTIIVDSLEVATKLRTLNHLKYIPLILLHPCIPQVNLKICLDLGITSYGNTPCSTNDIGNVLLPALESRAAPLNSDGQMKFQILLAEDNVVNQKLAVRILEKHQHRVEVVENGYEAFEAIKKKRYDVVLMDVQMPVMGGFEATAKIREWEKQNITIRTRTPIVALTAHAMLGDRERCMQAQMDEYLSKPLKPALLVQTINKCVHSVNQLRSLALGPTSTSSVNQILSRSGQHKSAVAASSSAASASMLPYVAPQPTSPVLSPSLEDAIIKTTDGVVSKSPLPPSQSKPRPTIEQRSRTVTSVPHVDYPENGGARIVAIDEGTEPEKESEQPPSNRRVNSN

SEQ ID NO: 50288 - protein, 188 aa, Triticum aestivum
  misc_feature (156)..(156): Xaa can be any naturally occurring amino acid
  unsure (1)..(188): unsure at all Xaa locations
MAAKRELVVSFGEMLIDFVPTVAGVSLAEAPAFVKAPGGAPANVAIAVARLGGAAAFVGKLGDDEFGRMLANILRDNGVDAGGVVFDSGARTALAFVTLRADGEREFMFYRNPSADMLLTADELKVDVIKRAAVFHYGSISLIAEPCRKAHLHAMXVAKEAGAVLSNDPNPEGGVGGLPLEEGSNQKS

SEQ ID NO: 50289 - protein, 393 aa, Rubrobacter xylanophilus DSM 9941
MSTTRKAFGGLLAEAEREHAKRIVALRREIHREPELGFDTARTAAKVVASLEGLPLEVREGVAENGVVADLRGATDGPVVGLRADMDALPIREETGLPFASEVEGRMHACGHDGHTSMLVGAAHLLSGMRERVEGTVRFLFQPAEEGGGGGRVMVEEGALEGVEAVFALHLWPGLPFGVASTAGGPTMAAADAFELTVRGRGGHGAMPHLTADAVVAASHIVAALQTLVSRETDPTEPAVLTVGQLEAGSAFNIIPETARLTGTVRTVDEKLRRVMPRRIEELAKGVARAMRADASLEYAFSYPVTRNDPREAGFALEVAAGLFGEEGAVEASRPSMAAEDFAFMLEAVPGAYIWLGVGDVPGLHTPRFSFDERVLPRGAALLAALALARLGS

SEQ ID NO: 50290 - protein, 352 aa, Antirrhinum majus
MGRSPCCDKVGLKKGPWTPEEDQKLLAYIEEHGHGSWRALPARAGLQRCGKSCRLRWTNYLRPDIKRGKISLQEEQTIIQLHALLGNRWSAIATHLPKRTDNEIKNYWNTHLKKRLAKMGIDPVTHKPKSDTLMSNDGQSKNAANLSHMAQWESARLEAEARLVRQSKLQPPSANSFQASTSNPVQKSMGQARCLDVLKAWNGVVWGKNDEAAGVSVTVTTGIVGELGSPTSTLSSAAGTNGIMKEESEEEWKQMPENRDEIGNATPFTSNWESEQVALNSSEACSSREFRGKLYGLVTECFLCRWRGMRIVGYTNSGGNDVGVSDYYEDNKNYGNSILNLVNSSPSHSPIF

SEQ ID NO: 50291 - protein, 445 aa, Dianthus caryophyllus
MSIHIKQSTMVRPAEETPNKSLWLSKIDMILRTPYSHTGAVLIYKQPDNNEDNIQPSSSMYFDANILIEALSKALVPYYPMAGRLKINGDRYEIDCNGEGALFVEAESSHVLEDFGDFRPNDELHRVMVPTCDYSKGISSFPLLMVQLTRFRCGGVSIGFAQHHHVCDRMSHFEFNNSWARIAKGLLPALEPVHDRYLHLCPRNPPQIKYTHSQFEPFVPSLPKELLDGKTSKSQTLFKLSREQINTLKQKLDWSNTTTRLSTYEVVAGHVWRSVSKARGLSDHEEIKLIMPVDGRSRINNPSLPKGYCGNVVFLAVCTATVGDLACNPLTDTAGKVQEALKGLDDDYLRSAIDHTESKPDLPVPYMGSPEKTLYPNVLVNSWGRIPYQAMDFGWGNPTFFGISNIFYDGQCFLIPSQNGDGSMTLAINLFSSHLSLFKKHFYDF

SEQ ID NO: 50292 - protein, 333 aa, Corynebacterium efficiens YS-314
MTQPSTQDLNLTGDDREVDLGSRRGQTNDNPSQDLVRVYLNGIGKTALLTAEDEVELAQTIEVGLYAEYKLKHSDEPLTRAMKRDLKVLAKEGKKARAHLLEANLRLVVSLAKRYTGRGMPLLDLIQEGNLGLIRAMEKFDYTKGFKFSTYATWWIRQAITRGMADQSRTIRLPVHLVEQVNKLSRIKREMYQHLGREATNEELAEESGIEESKIEMLLRQSRDPVSLDMPVGADEEAPLGDFIEDSEATDAETAVVASMRHSDIRSVLSTLEQREQDVIRLRYGLEDGVPRTLDQIGRRFGLSRERVRQIEREVMSKLRDGERAAKLREYAV

SEQ ID NO: 50293 - protein, 566 aa, Emericella nidulans
MADIATRDVRQPIDIAEYLFRRLHEVGIRSVHGVPGDYNLAALDYLPKCGLHWVGNCNELNAGYAADGYARVNGIAALVTTFGVGELSAINAIAGRYSEFVPIIHIVGQPHSRSQKDGLLLHHTLGNGDYNVFSSMNKGISVTTANLNDTYDAATLIDNAIRECWIHSRPVYLALPTDMITKKIEGERLKTPIDLSLPANDPEKEDYVLVDARAQVFARSAKNPVILVDDSCVFDDSTGLSLEEVHDLIEVSGLPTFVAPMGKGAVNETHRCYGGVYAGTGSNPGVREQVESSDLILSIGAIKSDFNTAGFSYRIGQLNTIDFHTTYVRVRYSEYPDTNMKGVLRKVIQRLGFIKADPVPHISNALPEHEKNSSEQRITHAWMWPMVGQWLKENDIVITETGTANFGICWNLLPSELQPISQVLWGSIGYSVGACQGAALAAKEQGNRRTVLWVGDGSLQLTLQEISTMIRNNLNPIIFVICGEGYTIERFIHGWDESYNDIQTWDIKGLPVAFGGKGRYKGYKVTTRDELTKLFASEEFSSTPCLQVSLCDLTHYLSDANFEQLG

SEQ ID NO: 50294 - protein, 328 aa, Corynebacterium efficiens YS-314
MKLLVTGGAGYVGSVCAAVLVERGHDVTVIDNFTTGNREAVPASATLVEGDVRDVADEVLAAGGFDGVVHFAARSLVGESVDHPADYWQHNMVTSLTLLDAMRAHGVDNLVFSSTAATYGEPEQVPITEDMPTAPTNPYGASKLAIDYAITSYARAYGLGATSLRYFNVAGAYGNIGENREVETHLIPLVLQVALGHREKIFMFGDDWPTADGTAVRDYIHIHDLAEAHVLALESNVGGTHRIFNLGSGDGYSVRQVVEMCREVTGHPIPAEVAPRRAGDPAVLIASSEKAQRELGWNPTRTDLRTIVEDAWAFTSQLGERAHSAHRG

SEQ ID NO: 50295 - protein, 387 aa, Silicibacter sp. TM1040
MPVKNRFAELLPEITAWRRDLHENPEILFETHRTSALVEEKLKAFGCDEVVTGIGRTGVVGVIKGKSSASGKVIGLRADMDALPIHEETGLEYASKTANAMHACGHDGHTAMLLGAAKYLSETRNFDGTVVVIFQPAEEGGGGGKEMCDDGMMERWGIQEVYGMHNWPGRPVGSFAIRSGAFFAATDQFDITFTGKGGHAAKPQETIDSTVMASQAVLALQTIAARNADPVHQIVVSVTSFETSSKAFNVIPERVQIKGTVRTMAPEMRDLAEKRIKEICAGIAATFGGEADVTYHRGYPVMVNHDEQTEFAAKVARDISGQCDEAPLVMGGEDFAFMLEERPGAYILVGNGDTAAVHHPKYNFTDDAIPAGCSWWAEIVEQRMPAA

SEQ ID NO: 50296 - protein, 428 aa, Zea mays
MAAASFTAAKFLAPVAARSGGERAPPLPAGASSSSFARTLRRGAVHHPRLRTALAVSSDLLAGNKAAQAAAAHPAVTREEALELYEDMVLGRVFEDMCAQMYYRGKMFGFVHLYNGQEAVSTGFIKLLNQADCVVSTYRDHVHALSKGVPARSVMAELFGKATGCCRGQGGSMHMFSAPHNLLGGFAFIGEGIPVATGAAFAAKYRHEVLKESGPDGLDVTLAFFGDGTCNNGQFFECLNMAQLWKLPIVFVVENNLWAIGMSHIRATSDPEIWKKGPAFGMPGVHVDGMDVLKVREVAKEAIERARRGEGPTLVECETYRFRGHSLADPDELRKPDEKTHYAARDSITALKKYIIEQNLATESELKSIEKKIDDVVEEAVEFADASPHPPRSQLLENVFADPKGFGIGPDGKYRCEDPKFTQGTAQV

SEQ ID NO: 50297 - protein, 451 aa, Novosphingobium aromaticivorans DSM 12444
MAVSDHVDLPTFMEGVKKRNPYQPEFVQAVQEVAEDIFDFIEDKEEYHAQQILRRIAEPDRVVSFRVCWEDDNGNVRVQRGWRVQNNNAIGPYKGGIRFHPSVNESVLKFLAFEQTFKNALTGLPMGGGKGGSNFNPKGKSVREIMRFCQSFMTELYRHIGADVDVPAGDIGVGGREIGYMFGQYKRITNHFTGVLTGKGLEWGGSLIRTEATGYGAVYFLANMLATKGEDLRGKTAVISGSGNVATHAAEKIVQLGGKVLTLSDSGGFIHDPDGIDQEKIDWVKTHKTHRRGRIEEYVDAFPGASFHAGKTPWGVPCDVALPCATQNELLGEDARTLIANGCKGVAEGANMPTDLEGVHVFKAARILYAPGKASNAGGVAVSGLEMSQNSERRSWKEHELQQMLKDIMAGIHKSCLTYGDQGGGYIDYVKGANIAGFKKVADAMLAFGVV

SEQ ID NO: 50298 - protein, 533 aa, Borrelia garinii PBi
MKKNLKILVITGGVISGIGKGVTSASIARLFRYDFRVTPIKCDGYLNTDPGTINPVEHGEVFVLDDGGEVDMDFGHYERFLNLNAKSSWNITMGKIYKKILENERKGKYLGRTVQLIPHVTDEIKSTIFQIASSENSEMLIIEIGGTVGDMENILFIETVRQIRHEIGSGNIAFIHLTYVPSPAGINEQKSKPTQQSVKTLNKAGIFPDLIIARSSQVLTDQIRKKVAMFCNVESNSIIDNIDVSTIYEIPISFYKQGVHEILSSKLNIKVDPKIEELSKLVGVIKSNFFVPKKIINIAICGKYAELDDSYASIRESLVHVGANLDLLIKSTLIDSNDLNESYLKEFDGIIVPGGFGGKGYEGKIIAIKYARENNIPFLGICLGLQLAVIEFARNVCGILDADTEENLLKDKPLKSPVIHLLPEQKGIKDKGATMRLGGYPVILKKNTIVFNLYGQDRIIERFRHRYEVNNDYIDLFEKNGLVVSGFSSDFKIAKLIEIPKNKFFVACQFHPELITRIENPAKLFLGLIKACI

SEQ ID NO: 50299 - protein, 85 aa, Zea mays
  misc_feature (19)..(19): Xaa can be any naturally occurring amino acid
  unsure (1)..(85): unsure at all Xaa locations
SLMFQTSIGPTGISVGNVXQRPEQVFFGNCKDQFYYNDQKLFFVGDQIGQAMTNENSGRKGLLRVREITVAEIAHSVDPEDKGHP

SEQ ID NO: 50300 - protein, 515 aa, Shewanella sp. MR-4
MTTPADAPKWPRQIPYIIASEACERFSFYGMRNILTPFLMTALLLSIPEDLRGAVAKDVFHSFVIGVYFFPLLGGWIADRFFGKYNTILWLSLLYCVGHAFLAIFEHSVQGFYTGLFLIALGSGGIKPLVSSFMGDQFDQSNKSLAQKAFDMFYFTINFGSFFASLSMPLLLKNFGAAVAFGIPGVLMFIATVFFWLGRKRYVHMPPEPKDPHGFLPVIRSALLTKIEGKANIGLVLALIGGVSAAYALVNIPTLGIVAGLCSAMVLLMGFVGLGASLQLERARGIHPDAAVDGVRSVLRILVLFALVTPFWSLFDQKASTWILQANDMVKPSWFEPAMMQALNPLLVMLLIPFNNFVLYPAIERMGVKLTALRKMGAGIAITGLSWIVVGTIQLMMDGGSSLSIFWQILPYALLTFGEVLVSATGLEFAYSQAPKAMKGTIMSFWTLSVTVGNLWVLLANVSVKSPAVTEQIVQTGMSVTAFQMFFFAGFAILAAVIFALYARSYQMQDHYRQV

SEQ ID NO: 50301 - protein, 418 aa, Oryza sativa
  misc_feature (58)..(58): Xaa can be any naturally occurring amino acid
  unsure (1)..(418): unsure at all Xaa locations
GETASTSTSHQDLHSDSDDSHQDDRPSTSTQTPSPQSSASTSPTAYNTRNLSFPRRDXVAAIFVLVFSRDEHPHAPLFAWIIGYTIGCIASIPLICWRCAHRNRPSEQEPEQPPAAYPNLTSSQSSEGRNQRSSGTVLHFGCITISCPRPSILAYHFKTAVDCFFAVWFVVGNVWIFGGHSTLSDSQEAPNMYRLCLAFLALSCVGYAIPFVMCAAICCCFPCLISLLRLQEDLGHTRGATQELIDALPTYKFKPKRSKMWVDHASSSENLSEGGILGPGTKKERIVSAEDAVCCICLTKYGDDDELRELPCTHFFHVQCVDKWLKINAVCPLCKTEIGGVVRSFFGLPFGRRRVDRMAGRGSGFQKLLAFCGSSNPKIRNTTLVATGHHTPILPNELCSNHFVNVNIPKVPNPIKID

SEQ ID NO: 50302 - protein, 614 aa, Arabidopsis thaliana
MAYYETMFDQLDVTAAQLLVNDSSFRDKDFRKQLNETVKSMLDLRVIPIFNENDAISTRRAPYQDSSGIFWDNDSLAALLALELKADLLILLSDVEGLYTGPPSDPNSKLIHTFVKEKHQDEITFGDKSRLGRGGMTAKVKAAVNAAYAGIPVIITSGYSAENIDKVLRGLRVGTLFHQDARLWAPITDSNARDMAVAARESSRKLQALSSEDRKKILLDIADALEANVTTIKAENELDVASAQEAGLEESMVARLVMTPGKISSLAASVRKLADMEDPIGRVLKKTEVADGLVLEKTSSPLGVLLIVFESRPDALVQIASLAIRSGNGLLLKGGKEARRSNAILHKVITDAIPETVGGKLIGLVTSREEIPDLLKLDDVIDLVIPRGSNKLVTQIKNTTKIPVLGHADGICHVYVDKACDTDMAKRIVSDAKLDYPAACNAMETLLVHKDLEQNAVLNELIFALQSNGVTLYGGPRASKILNIPEARSFNHEYCAKACTVEVVEDVYGAIDHIHRHGSAHTDCIVTEDHEVAELFLRQVDSAAVFHNASTRFSDGFRFGLGAEVGVSTGRIHARGPVGVEGLLTTRWIMRGKGQVVDGDNGIVYTHQDIPIQA

SEQ ID NO: 50303 - protein, 157 aa, Brassica napus
  misc_feature (100)..(100): Xaa can be any naturally occurring amino acid
  misc_feature (145)..(147): Xaa can be any naturally occurring amino acid
  unsure (1)..(157): unsure at all Xaa locations
MSEKMANYVDGDSDRKRKYSSSSGSSKNNSNEGKRKVKKVDWTPELHRRFVDAVEQLGLEKAVPSRILELMGVHCLTRHNVASHLQKYRSHRKHVLAREXEAANWTRKRHIYGLDSTRVNINGRNKNGWIAPAPTIGYAPPPPAXXXSPTIHNHHFR

SEQ ID NO: 50304 - protein, 431 aa, Silicibacter pomeroyi DSS-3
MTEEKKTATLSLNGQSYDLPVYSPSAGPDVIDIRKLYGQAGVFTYDPGFTSTASCDSTITYIDGELGELLHRGYPIDQLAAKSHYLEVCYLLLYGELPTAAALEKFETTITRHTMIHEQMHYFFRGFRRDAHPMATMVGVVGAMSAFYHDSTDIADPHQREIASHRLIAKMPTIAAMAYKYSIGQPFMYPRNDLDYAANFLQMCFAVPAEHYHVDPILARAMDRIFTLHADHEQNASTSTVRLASSSGANPFACIAAGIACLWGPAHGGANQACLEMLKEIGSPDRIPEFIARAKDKNDPFRLMGFGHRVYKNFDPRATVMKQSADEVLDLLGVENNPILATAKELERAALADDYFAEKKLFPNVDFYSGIILEAMGFPTSMFTPIFAVSRTVGWVSQWKEQLADPQHKIGRPRQLYLGSTARDYVDIEDR

SEQ ID NO: 50305 - protein, 579 aa, Pseudomonas fluorescens Pf-5
MPRPSSFHSPSRRTFVKALAAGGVLAGFGLWRNPVWAVSSPGQPEVLAGSDFDLCIQQLPVNFSGRPRKAMAINGSLPGPLLRWREGDRVTVRVRNRLDQPSSIHWHGIILPADMDGVPGLSFEGIEPGGLYRYSFPVKQHGTYWYHSHSGLQEQLGVYGPLVIDAREPEPFSYERDYVVLLSDWSDEEPGQILRTLKKQSDYYNQHKRTLGDFIEDVGRDGWAATLAERSMWAQMNMTPTDLADVSGATYTFLLNGQAPGQPWCGLFRPGERLRLRVINASAMSYFDLRIPGVQMTVVAADGQHVVPVTVDELRIAVAETFDVLVQPGAGAHALFAQAMDRSGYALGTLASAPGLVAEAPAMDPRPLLGMTDMAMGAMDHGAMPGMDHGAMDHGAMNATISHPTSETNNPLVDMQAVNPMPRLDDPGIGLRDNGRRVLRYADLKSTFADPDGREPSRTLTLHLTGHMEKFAWSFDGIPFAEAEPLRLRYGERLRIELVNDSMMAHPIHLHGLWSDLEDEHGRFQVRKHTIDMPPGTRRSYRVTADALGRWAYHCHLLYHMESGMFREVRVEEERHHEA

SEQ ID NO: 50306 - protein, 129 aa, Brassica napus
MEGGASDEVAESSKKIGRGKIEIKRIENTTNRQVTFCKRRNGLLKKAYELSVLCDAEVALVIFSTRGRLYEYANNSVRGTIERYKKACSDAVNPPSVTEANTQYYQQESSKLRRQIRDIQNLNRHIRRE

SEQ ID NO: 50307 - protein, 395 aa, Oryza sativa (japonica cultivar-group)
MRPAVAAALLLVAAAVAASPVSALYSAGSPVLQFNPNNFKSKVLNSNGVVLVEFFAPWCGHCQQLTPIWEKAAGVLKGVATVAALDADAHKELAQEYGIRGFPTIKVFVPGKPPVDYQGARDVKPIVEFALSQVKALLRDRLNGKTSAGSGGKKSGGSSEKTEPSASIELNSQNFDKLVTKSKDLWIVEFFAPWCGHCKKLAPEWKKAAKNLKGQVKLGHVDCDAEKSLMSKYKVEGFPTILVFGADKESPFPYQGARVASAIESFALEQLEANAAPPEVSELTGPVSFRDINKVILLWRQWSGIDVLTRWFGFCRTPWKRNVLLLPFALYLSFQISWIQRPKEETSTLSCYYLLLRNLKRVHTVLSGQLLGSKLILRSKLELVVMAIQRWLLST

SEQ ID NO: 50308 - protein, 96 aa, Thiobacillus denitrificans ATCC 25259
MKIRPLHDRVIVKRMEEERKTASGIVIPDTAAEKPDQGEIVAVGAGKKDDQGKLISLDVKVGDRVLFGKYAGQTVKVEGEELLVMREEDIMGVVEQ

SEQ ID NO: 50309 - protein, 530 aa, Arabidopsis thaliana
MGNCCGTAGSLIQDKQKKGFKLPNPFSNEYGNHHDGLKLIVLKEPTGHEIKQKYKLGRELGRGEFGVTYLCTEIETGEIFACKSILKKKLKTSIDIEDVKREVEIMRQMPEHPNIVTLKETYEDDKAVHLVMELCEGGELFDRIVARGHYTERAAASVIKTIIEVVQMCHKHGVMHRDLKPENFLFANKKETASLKAIDFGLSVFFKPGERFNEIVGSPYYMAPEVLRRSYGQEIDIWSAGVILYILLCGVPPFWAETEHGVAKAILKSVIDFKRDPWPKVSDNAKDLIKKMLHPDPRRRLTAQQVLDHPWIQNGKNASNVSLGETVRARLKQFSVMNKLKKRALRVIAEHLSVEETSCIKERFQVMDTSNRGKITITELGIGLQKLGIVVPQDDIQILMDAGDVDKDGYLDVNEFVAISVHIRKLGNDEHLKKAFTFFDKNKSGYIEIEELRDALADDVDTTSEEVVEAIILDVDTNKDGKISYDEFATMMKTGTDWRKASRQYSRDLFKCLSLKLMQDGSLQSNGDTK

SEQ ID NO: 50310 - protein, 224 aa, Pseudomonas syringae pv. phaseolicola 1448A
MRILVVEDEPKTAEYMHQGLTESGYIVDIAATGLDGLYLAQHQAYDVVILDVNLPEMDGWEVLSRLRKTVSTRVMMVTARGRLEEKVKGLELGADDYLVKPFEFPELLARVRTLMRRSEQTTTSKVLQVGDLELDQGRHRAFRGSQRIDLTTKEFALLHLLMRHSGEVMSRTQIISLVWDMNFDCDTNVVEVSIRRLRAKIDDPFETKLIHTLRGVGYVLEVRE

SEQ ID NO: 50311 - protein, 955 aa, Arabidopsis thaliana
MRLRHQGGQYLARGMEPVYWSNKVDSTHDLYDNYTLGSYQNNSYNILAHTGFGYDHEFQIYEINSNSWRIIDATLDFKLGYIGRGVSLKGKTYWIASGEEEKRLGKFLISFDYTTERFERLCLPNKYPCYATLALSVVREEKLSMLSQRGIKSKAEIWVTNKIGETQVVSWSMVLALDLQPKRCIGESGSFLVDEKKRVVVCCDNIRDQGKTTFDSNLPRYHRQKKKGRMIIVFDVESMRLPVTVKATKPSFLVIWIRYSSAASSPTVSLNPSGRLQQTLAGSVEVKGKSLHSGKFSTVKLNPEIAGAGRFFEFRSRFIPASIEFAQESPLCTTLLKDELKIRTVEHLLSALEAKGVDNCRIQIESESSDDREVEVPIFDGSAKEWVDAIQGVGINAAQNHDGESVEKMVAHVNKPVYVCKNDTFVAAFPALETRITCGIDFPQVPAIGCQWFSWRPIHESSFAKDIASSRTFCVYEEVERMREAGLIKGGSLDNAIVCSAEHGWMNPPLRFDDEACRHKILDLIGDLSLVSRGGNGGLPVAHIVAYKNEEEEVRSSTEENENVRSSTEENEYVRSSTEAGRGEDPHEDSDNISESGAIHLQIMERFNQRSGSGKEEEEDTMDLSIKQVDLLNQVEISRVYHCDGLLLCVAKDNSRVVVWNPYLGQTRWIRPRTESNIGDSYALGYDINRNHKILRMVQTRNVSVYRYEIYDLRSNSWRVLEVTPNGEMDPNHPLYGVSVKGNTYFFAHEDSSSGEIDEDGDIIDLEDFLLCFDFTTETFGLRLPLPFHSTIDATVTLSCVRDQQLAVLYHNEGLHSDDRFTTVEFWVTTSIEPNSVSWSKFLTVDMRPLALTGVRFDNDMGATFFIDEDEKVAVVFDLDGYLSTESARYHTAFISGKDGFFKPVTLGVAPNVGEPCPRTGHIPTTYRPPLVCSSTYLPSLVQVNQQRKRKERHV

SEQ ID NO: 50312 - protein, 115 aa, Oryza sativa
DSKLEHPLERRQAESARIREKYSDRIPVIVEKADKTDVPEIDKKKYLVPADLTVGQFVYVVRKRIKLSPEKAIFVFVKNTLPPTASLMSAIYEENKDEDGFLYMTYSGENTFGSA

SEQ ID NO: 50313 - protein, 518 aa, Triticum aestivum
  misc_feature (369)..(369): Xaa can be any naturally occurring amino acid
  misc_feature (453)..(453): Xaa can be any naturally occurring amino acid
  misc_feature (464)..(464): Xaa can be any naturally occurring amino acid
  misc_feature (480)..(480): Xaa can be any naturally occurring amino acid
  unsure (1)..(518): unsure at all Xaa locations
MNGKGGDGGSDHDDMDMRKPLLVNTGSWYKMGSSLTAGSSSMAIICESHVSALLCTLIVALGPIQFGFTGGFSSPTQDAITRDLGLSISEFSVFGSLSNIGAMVGAIASGQMVEHVGHKGALMIAAVPNILGWLAISLAKDTTFLYTGRLLEGFGVGIISYTVPVYIAEISPRNKRGALGCVNPLSVTLGMVLAYVLGMLVPWRMLALIGTLPCTILIPGLLFIPESPRWLAKMNKMDDFEASLQVLRGSETDITSEVNDIKTAVASANKMTAIRFQELNQKKFRMPLILGIGLLVLQQLSGINAILFYAGSIFKAAGLTNTNLAACGLGAIALLATGATTWLLDRAGRRILLIISSAGMTLSLLAIAXYFFLKDNVPQDSDMYYILSMVSLFAIVAYVITFSFGMGPIPWVIMSEILPVSIKSLAGSFATLANWLTSFGIPMTANLLLSWSXGGTFACYNARXALSTLMFIILWVPGSXRGRTLEEIQWSFPVELQSVVFAVYVGNYSFAGHRLLFT

SEQ ID NO: 50314 - protein, 275 aa, Rubrobacter xylanophilus DSM 9941
MGTPGERAVGEHYGREGLEERISAALRSAGADPLAPSVEELHAVDQLHTRGVRATLELAELAGASPGERVLDVGGGLGGPARILASRFGCRVVVLDVTEEFCRVGALLTARAGLGERVLFRHGSALEIPFPDASFDLAWTQHSTMNIPDKDRLYREIHRVLKPGGRLAMHEILAGPSGPPRRFPLPWAASPALSHLLPPNRMRASLSRAGLRELAWSDVTPQTAEWLKTRSSGRPSGPPPEAFANLLLSIREGRATAVQALLERPEAQLDGNGSR

SEQ ID NO: 50315 - protein, 387 aa, Arabidopsis thaliana
  misc_feature (272)..(272): Xaa can be any naturally occurring amino acid
  unsure (1)..(387): unsure at all Xaa locations
TRTRPRTRPAFFRISFHFSLISRSLRPTMSAFTSKFADELIANAAYIGTPGKGILAADESTGTIGKRLASINVENVETNRRNLRELLFTAPGALPCLSGVILFEETLYQKSSDGKLFVDILKEGGVLPGIKVDKGTVELAGTDGETTTQGLDGLGDRCKKYYEAGARFAKWRAVLKIGENEPSEHSIHENAYGLARYAVICQENGLVPIVEPEILVDGSHDIQKCAAVTERVLAACYKALSDHHVLLEGTLLKPNMVTPGSDSPKVSPEVIXAEHTVRALQRTVPAAVPAIVFLSGGQSEEEATRNLNAMNQLKTKKPWSLSFSFGRALQQSTLKTWAGKEENVKAAQEALYVRCKANSEATLGTYKGDAKLGDGAAESLHVKDYKY

SEQ ID NO: 50316 - protein, 963 aa, Thermus thermophilus HB8
MASRAETAVLARFQRALLGDLEPTEILRNFLEVATEEGVERAALFLYRPEARELVGEVASGRGRRYTVSSVALPLHAKGPVQEAFFAEGPLRRGEEWLLPVVGEEEAFCWADPERRCRERPRATRETRALICPSCPRFRPLGVLTLERVPSRLQPLLPLLAQLTALALKNGALLKERDAALRRLSQHAERLAHVSAASRELARALEPDAVMAVLAGILRERLGFYRVTVALVREGALVGHLTRRGEDLYWTEGRSRIRLPVATSPDPMAQAVRERRTRIVPREALPPHLAEGVGASVAYVPVLVEEEALGCVAVDHGPGGPPVTEEEVEYVELLAGVAGVALRNAQLYRERTALSLALAAERKRLSEVLEELPDGVVVLLGERGFANTRAREILGVEAEVGLGDLPATLAPALEGGRAEVRLGGRTYSVRGRRLGEMRVLVLHEITERVRMERALREQAAFTQALVDLAQEALSAPGLEALAAAIARRLQVLFGAEEALVGMAEAELRLLYATRPLEGPLPRPNLLERALEEGKPLVLETLAEGSCALAEAWGLRSALVIPFRAQGFKGGLLLGYRRPRRWASGWEGRLAQVGLLLALVLEKARLLAYLEAEEERLRALLEHSQDVVYVLDEEARIRFVSPSVRAVLGYDPEGYRRAALDALAFVHPEDQERARALFQELLARPEATLRGEFRLLHQDGTPIPVEAWGRNLLKDPRVGGVVVNVRDLRPRLEAERLKGEFLAAVSHELRTPLAAILGLAELLRQEPLPPEAQESVELILESAFRLKNMVDNLLDTSRLEAGRFEVSRRPVHLKPLLLELARSFQGVARLSGVEFRVEVEELPLMEVDPDRIVQVVGNLLANAFKFTPPGGSVRLWAGVRGEEVWVEVQDTGPGIPKEEIPRLFQRYARAKHPGVRGVAGTGLGLFISKHIVEAHGGRIEVESEEGKGSLFRVILPLYGPHPGD

SEQ ID NO: 50317 - protein, 677 aa, Xanthomonas campestris pv. campestris
MATWLILVGELLVSLGLMVAILLRPQVSHTRRLIGMLLDYTCTGAIMAIQGEPASPLYAVCMWVTIGNGLRYGSNYLRAATAMGSLCFLGAILISPYWKANPYLSWGLLLGLIAVPLYFDSLLRAMTRAVREARHANQAKSRFLANMSHEFRTPLNGLSGMTEVLATTRLDAEQKECLNTIQASARSLLSLVEEVLDISAIEAGKIRIDRRDFSLREMIGSVNLILQPQARGRRLEYGTQVADDVPDLLKGDTAHLRQVLLNLVGNAVKFTEHGHVLLRVTRVSGSAEDAVRLRFDVEDTGIGVPMDMRPRLFEAFEQADVGLSRRYEGTGLGTTIAKGLVEAMGGSIGFKENQPSGSVFWFELPMAIGEPLKSSTVRVPTGALVDAPEELESSNIIAFSNPFLRHRARVRSMRMLVADDHEANRMVLQRLLEKAGHKVLCVNGAEQVLDAMAEEDYDAVIVDLHMPGMNGLDMLKQLRVMQASGMRYTPVVVLSADVTPEAIRACEQAGARAFLAKPVVAAKLLDTLADLAVSTRQLATPATTVQVATSFEGVLDSSVLDELAALGMGEEFERQFVRQCLDDAQNCVGDIERDGTCSDWEQLRESAHALRGVASNLGLAQVASSGGELMRMADWQLQAEWRLRLSTLREQLKAGKDALDARVQGVKDGECSPRSNE

SEQ ID NO: 50318 - protein, 410 aa, Streptomyces coelicolor A3(2)
MSPESEADTPGEAALPGTLPDALRAELVAFRRDLHMHPELGNQEFRTTAAIKERLERAGLKPRVLPIGTGLVCDIGTDSGQWSGGPRMLALRADIDALPIPDTKSECAYRSQVPDRAHACGHDVHTTVVLGTGLVLAALHEQGLLPRPVRLVFQPAEEVLPGGAADAIEGGALDGVRRILAVHCDPRVDAGRIGLRVGPITSACDRLEIALNGPGGHTARPHLTTDLVTAAARVVTDVPPLVARRVDSRSGLALTWGRIESGHAPNVIPQHAELAGTVRCLDLDAWRQAPDLVMGAIDEIADLYRAKSEITYVRGVPPVVNEVTSTELLQAAMVARRGTDAVESTEQSLGGEDFSWYLEHVPGAMARLGVRPPGERTVRDLHQGDFDVDEHAITVGVEMFTAAALIDAVQ

SEQ ID NO: 50319 - protein, 411 aa, Xanthomonas albilineans
MSRRVVVTGMGLVSPLGNDLASSWDGIVNGRSGIGPITLIDASQFATRIVGEIKDFDPTKFLSAKDVRKMDSFIHYGVAASFMALDDAGLEITDANAERIGAILGSGIGGVLGIEEQTLKLQEGGPRKVSPFYVPSTIINMLPGQVSIMKGLKGPTFSAVSACATSNHSIGTAMRMIQYGDADVMLAGGAERGSSPTAIAGFSSMRAMSTRNDDPAAASRPWDKDRDGFVMGDGAGVLVLEEYEHAKARGARIYAELAGFGASSDAFHMTSPSEDGEGAARSMRAAMRDAGLNPDQIDYLNAHGTSTPAGDLAETIAMKRALGDHAYKLMISSTKSMIGHLLGAAGGAEAIFSVMALHTGIIPPTINLDEPGEGCDLDYVPNVAREKKIDVAMSNGFGFGGTNGTLVFKRI

SEQ ID NO: 50320 - protein, 330 aa, Zea mays
  misc_feature (10)..(10): Xaa can be any naturally occurring amino acid
  unsure (1)..(330): unsure at all Xaa locations
KRQDEQAAAXEPSYQSVALVVGSTGIVGTSLLDILPLADTPAGPWKVYAVSRRPLPPWSPAPSPAVTHLHLDLADSAAVAEALQPLTDITHVFFVAWTNRPTEAENREANSAMLRNVLSVVVPNCPALVHVCLQTGRKHYVGPFEAIGKVSRRDGAVSWSVHRPTPVFGYSPRSAMNLVGSLCVYAAICRKEGHDAPHEIWAAVDPFAKNEAFNCSNGDLFKWKQLWPILADHFGLEWAGYEGEENRFKLEEAMAGKEAVWAEIVRENDLIATELDEITNWWFVDAMFAVETQLLDSMNKSKEHGFLGFRNTVSSFNTWIEKLKVFKIVP

SEQ ID NO: 50321 - protein, 439 aa, Klebsiella pneumoniae
MHDKYDVLIIGGGPGGYVAAIRAGQLGLRTVLVEKQHLGGICLNWGCIPTKALLHGAEVAHTITHASQLGISVGEVNVDLQKLVQFSRTVSQQLTAGVAYLLKKNGVRVIDGTARLRGKGQITVEDARGEARDYRADHVILATGARPRALPGIAPDGEHIWTYFEALRPKLLPKSLLIIGSGAIGVEFASLYNDLGCKVTLVELASQILPVEDAEVSAAVRKSFEKRGIQIHTQTLVTQVQLTDTGVRCTLNNTGGEYSQDVERVLLAVGVQPNIEDLGLETLGVELDRGFIKTDAACRTNVFGLYAIGDVAGPPCLAHKASHEGVLCVETLAGVEGAHPLDRDYVPGCTYARPQVASLGLTESTALARGRPIRIGKFSYQSNGKALVSGETEGFVKTIFDAETGELLGAHMVGAQVTEQIQGFASPVTWRPQTKASCR

SEQ ID NO: 50322 - protein, 639 aa, Anabaena variabilis ATCC 29413
MKIRYGFRQVGDVEVFYREAGSSNAPVILLLHGFPTASHMFRNLIPLLADRFRLVAPDLPGFGQTKAPPRGMFDYTFDHLADVIEGFVDALSLDQYVLYIFDYGAPIGLRLAMRHPERISAIISQNGNAYLEGFSDEWGSWETYWREPSAANREACRSSLTPDTIRNWQYGIGADPNLLSPDGYELDIAYMGRAGAEEIQLDLILDYRSNVALYPAFQSYFREYRPPLLAVWGRHDPAFLPAGAAAYQRDLPDAKIHLLDAGHFALETHAEEVATLIRAFLDSTIGSTLRLERENLPKLSGIKIPSLFILNQGELAQMESMKAAVLTAFGDAEKFEIQTVPIPTLKANQVLVRVCATSINPVDYQTRRGDYKELVQLPAILGVDVSGVIEAIGEAVTDFKVGDNVYYSPQIFGEFGSYAQYHVADAAIVALKPANLSHIEAASFPLAGGTAWDCLVTRGNLQVGETVLIHAGAGGVGSIAVQLAKAIGAYVFATCSSRNRDFVTELGADRVIDYKNEDYVEVIRQETNGLGVDLVLDTIGGETIQRSLEIIRPFGRLTSIVDIAIPQSLLEAWGKNLTIHFVFSPQYRAKLEALTKLIERHQLRPVIDSVFSWDQVVLAHQRLEQGGTRGKIVLKFTED

SEQ ID NO: 50323 - protein, 251 aa, Anabaena variabilis ATCC 29413
MMLKDKVALVTGGTSGIGRATAIAYAKQQAKVVVVGRRIDEGEETVRLIQEAGGEAFFVQSDVTKEADVKAMVDKAVGVFGRLDIAFNNAGMVGENPSLIEQTEAEYDRIMNVNVKGVWLSMKYEIAQMLKQGSGAIVNTSSGAGVVALPGVPLYTASKHAVVGLTKAAALQYAKAGIRINAVAPGSIETDMFEAATGGQDEVKAYITGLHPIGRIGTPLEVANAVLFLSSDIASFITGEMLMVDGGFVAQ

SEQ ID NO: 50324 - protein, 345 aa, Salmonella typhimurium LT2
MTLHCAFIGFGKSTTRYHLPYVLNRKDTWHVAHIFRRHAKPEEQAPQYSHIHFTSDLDEVLGDPQVKLVIVCTHADSHFEYAKRALEAGKNVLVEKPFTPTLAEAKVLFDLARSKGLTVTPYQNRRFDSCFLTAKKAIESGKLGKIVEVESHFDYYRPVAETKPGLPQDGAFYGLGVHTMDQIISLFGRPDHVAYDIRSLRNKANPDDTFEAQLFYGDLKAIVKTSHLVKIDYPKFIVHGTKGSFVKYGIDQQETSLKANIMPGEPGFAADESVGVLEYVNDDGVTVKEEVKPETGDYGRVYDALYQTLTVGTPNYVKESEVLTNLEILERAFEQATPATITLAK

SEQ ID NO: 50325 - protein, 149 aa, Catharanthus roseus
MAEQLTEEQIAEFKEAFSLFDKDGGGCITTKELGTVMRSLGQNPTEAELQDMTNEVDADQNGTIDFPEFLNLMARKMKDTDSEEELKEAFKVFDKDQNGFISAAELRHVMTNLGEKLTDEEVDEMIREADVDGDGQVNYEEFVRMMLAK

SEQ ID NO: 50326 - protein, 399 aa, Geobacter sulfurreducens PCA
MNTTQWIAKADKYIMKTYGRYPLVPVRGEGCRVWDADGKEYLDFLAGVAVNNLGHCHPKVVEALRTQAAEIIHCSNYYHIPNQIELAELLCAHSFADKVFFCNSGAEANEAAIKLARKHAREKTGDAERYGIITALASFHGRTMATISATGQEKVQKFFDPLLHGFTYVPFDDAAALEAAVTPTTCAVMLEPIQGEGGVVVPSADYFRKVREICDRHGLLLIFDEVQVGIGRTGKLFAHEHFDVTPDIMTLAKALAGGAPIGAMLARDEIAASFSPGTHGSTFGGNPLVTAAGLAAVRAVLEEGLLNRAEEMGEYLVGELERLKGKYDIITDVRGIGLMVGMELSVPAGDIVLKGLERGVLLNVAQDRVLRFVPPLVVTKQEVNDMIAVLDGILEEMTK

SEQ ID NO: 50327 - protein, 389 aa, Synechococcus elongatus PCC 6301
MKAMILAAGKGTRVRPITYTIPKPMIPILQKPVMEFLLELLKEHGFKEVMVNVSHLAQEIESYFRDGQRFGVEVAYSFEGRIEDGQLIGEALGSAGGMKRIQDFSPFFDDTFVVLCGDALIDLDLTEAVRWHKEKGALATIVMKTVPREEVSSYGVVVTDSDGRIQAFQEKPSVEEALSTTINTGIYIFEPEILNYIPSGQEYDIGGDLFPKLVETGAPFYGISMDFQWIDIGKVPDYWQAIRSVLNGEVRNVAIPGKQVRPGVYTGLNVAIDWDSVAIEGPVYIGGMTRIDEGVRIVGPAMIGPNCHICKGATIENSVIFEYSRLGSGVRLVDKLVFGRYCVDRNGNAIDVQAAALDWLITDARRAEPVQPSAEHQAIADLLGSNVLP

SEQ ID NO: 50328 - protein, 459 aa, Mycobacterium avium subsp. paratuberculosis K-10
METYDLAIIGTGSGNSLLDARFAGKRTAICEHGTFGGTCLNVGCIPTKMFVYAADVATTIREAARYGVDTHLDGVRWPDIVSRVFGRIDPIALSGEEYRRSSVNIDLYRSHTRFGPVQFDGRYLLRTDAGEQFTAEQVVIAAGSRPVIPPAILESGVTYHTSDTIMRIPALPEHLVIVGSGFVAAEFAHIFSALGVHVTVVIRSGRMLRQYDDMICERFTRLAAAKWELRTQRNVVGGSNRGSGVTLRLDDGSTLDADVLLVATGRISNADLLDAGQAGVDVENGRVVVDEYQRTSARGVFALGDVSSPYQLKHVANHEARVVRHNLLCDWDDTESMAVTDHRYVPSAVFTDPQLATVGLTENQAIARGFDISVAIQNYGDVAYGWAMEDTTGVVKLIAERTSGRLLGAHIMGPQASSIIQPLIQAMSFGLTAAQMARGQYWIHPALPEVVENALLGLY

SEQ ID NO: 50329 - protein, 310 aa, Zea mays
MAAAAGGGAVRALSQKEQDIQMMLAADVHLGTKNCDFQMERYAFKRRTDGIYIINLGKTWEKLQLAARVIVAIENPQDIIVQSARPYGQRAVLKFAQYTGAHAIAGRHTPGTFTNQLQTSFSEPRLLILTDPRTDHQPIKESALGNIPTIAFCDTDSPMRYVDIGIPANNKGRNSIGCLFWLLARMVLQMRGTILPGHKWEVMVDLFFYRDPEEAKEQEEEAAVAPEFAAITDYQGADQWGGDQWTSDVTAPPVAPTGADWGAAPAPVPTGDGWDQAGAPAPVVDGTVPPVVAPTGWDQAAPPPTAQGWE

SEQ ID NO: 50330 - protein, 395 aa, Synechococcus elongatus PCC 6301
MLDRIREVATRLEPRLLEIRRHLHAHPELSGHEHQTAAYVAGVLSSCGLQVREGVGRTGVVGDLPGTGRDRRCLALRTDMDALPIEEQTGLPFASRQQGIMHACGHDLHTTLGLGAAMVLSELGEPLPGDVRWLFQPAEEIAQGARWMVAAEALEGVDAILGVHVFPSIPAGVVGIRYGALTAAADDLEIVIQGESGHGARPHEAKDAIWIAAQIITMLQQAISRTQNPLRPVVLTIGQIQGGRAANVIADRVRLLGTVRSLHPETHAGLPDWIESIIASICKTYDAHYEFHYRRGVPSVQNDETLTRLVEAAAIEAWGQTAVERIEEPSLGAEDFSVYLEKIPGMMFRLGVGYPDRQNPPLHHPQFEIDERALIVGVITLAYSIWRYWQPAVKG

SEQ ID NO: 50331 - protein, 306 aa, Pseudomonas fluorescens Pf-5
MPKSVVAALQIGALPEGKAATLEQILSYEAAIIEAGAQLVVMPEALLGGYPKGEGFGTQLGYRLPEGREAFARYFANAIEVPGVETDALAALSARTGANLVLGVIERSGSTLYCTALYFDPQQGLSGKHRKLMPTGTERLIWGKGDGSTLPVLDTQVGRVGAVICWENMMPLLRTAMYAQGIEVWCAPTVDEREMWQVSMRHIAHEGRCFVVSACQVQASPEELGLEIANWPAQRPLIAGGSVIVGPMGDVLAGPLVGRAGLISAQIDTADLVRARYDYDVVGHYARPDVFELTVDQRPRPGVRFT

SEQ ID NO: 50332 - protein, 451 aa, Burkholderia pseudomallei K96243
MSAAANPARVLEIERVIDDTHRPAFHAMLLALCGLCLVIDGFDAQAMGYVAPSVIAEWGVKKQALGPVFSASLFGMLLGALGLSVLADRIGRRPVLIGATLFFALAMLATPFATSIPILIALRFVTGLGLGCIMPNAMALVGECSPSAHRVKRMMIVSCGFTLGAALGGFVSAALIPAFGWRAVFFVGGAVPLALAAAMAASLPESPQLLVLRGRHDAARAWLAKFAPRLAVPPDTRLVVREAGPRGAPVAELFRSGRARVTLLLWAINFMNLIDLYFLSNWLPTVMRDAGYASGTAVIVGTVLQTGGVIGTLSLGWFIERHGFARVLFACFACATIAIGLIGSVAHAFVWLLAAVFVGGFCVVGGQPAVNALAGHYYPTSLRSMGIGWSLGVGRVGSVLGPLVGGQLIALGWSNDALFHAAAVPVLCSAVFVIGLASVTRRRGTAAPNVA

SEQ ID NO: 50333 - protein, 258 aa, Mycobacterium avium subsp. paratuberculosis K-10
MMDLTQRLAGRVAVITGAGGGIGLAAARRMHAEGATIVVADIDADAGAAAADELSGLFVPTDVADEDAVNALFDTAARRYGRIDIAFNNAGISPPDDDVIENTEPPAWQRVQDVNLKSVYLCCRAALRHMVSARRGSIINTASFVAVMGSATSQISYTAAKGGVLALSRELGVQFARQGIRVNALCPGPVNTPLLQELFAKDPQRAARRLVHVPVGRFAEPGEIAAAAAFLASDDASFITASTFLVDGGISAAYVTPL

SEQ ID NO: 50334 - protein, 215 aa, Triticum aestivum
MAPMKLYGATVSWNVTRCVVALEEAGAEYQIVPIDFATAEHKSPEHLARNPFGQVPAFQDGDLHLWESRAICKYVARKNKAAELLREGNLQESAMVDVWLEVESNQYTAALNPILYECLVSPMFGGTTDQKVVEENLEKLKKVLEVYEARLAKHKYLAGDFLSLADLNHVSVTLCLLATPHASVLNAYPHVKAWWDGLMARPSVQKVAALMKPSA

SEQ ID NO: 50335 - protein, 181 aa, Bacillus licheniformis ATCC 14580
MAEKRELATFAGGCFWCMVKPFDEQPGILKVESGYTGGHTENPTYEEVCSNTTGHREAVQITFDPDVFPYEKLLELYWQQIDPTDSGGQFTDRGESYRTAIFYHNDKQRKLAEESKKKLGESGIFKDPIATDILEAGPFYPAEEYHQDYHKKHPERYTQYRIGSGREGFLQQHWGRKHDEQ

SEQ ID NO: 50336 - protein, 399 aa, Bordetella bronchiseptica RB50
MDKPFEPECSFSERAKQLTSSAIREILKVTERPEVISFAGGLPAPGGFPVEVVQAAFDKVLATNGRAALQYGPTEGYAPLRQWVADDLNAAGANVTADQILIVSGSQQALDLLGKVLIDKDSPILVEDPSYLGALQSFSLYQPKYVPIPTDDGGLVPEAITAELAEGARFLYALPNFQNPTGRTLNLERRKALVRQAAQFGVPIIEDDPYGELRYAGEPQPGLLALAGECGATVIRLGTFSKVLAPGLRLGYIAAPRNIINKLVQAKQATDLHTPTLTQMAVYEVVKTGFLAEHLPRVREIYRVQGRCMLEAIEREFPASVSWTKPEGGMFIWVTLPEHIDSTKLLAQAVEQNVAFVPGGPFYAGTPRQNTLRLSFATVPEAKIREGIAILGKLLKAAI

SEQ ID NO: 50337 - protein, 845 aa, Arabidopsis thaliana
MIWSLGERNTDPKSPPSRQSSEISLWERLGKASTVDIDSSCFSWNMLSSLHHTEHSSSTDHSEEDQSKPLEVTVNSGGVVFFALFNSSSSEDASRKEEAAVIKFASSRMATQSERLGYEFSKWLGVQIPQARVIHSCNPEWTLIKEATEKAQAKATSEGDEVGEMTCSELLEALELSRCLLLMSYVHGCPMLESMSSFETEEKAERAAAALGRILVLDLVIRNEDRLPCRQLRWRGNPANLLLTDRIVSSAKHHECSFDEAFDSAIKRYHPKDYRSIQRERRASSVDSRSRLSISDQMLVSQASDFSDITESPRSYDTGLMSPMSDRSVAADFHLVAIDSGVPRRPPAGKRASDQEIYPRLVELLLNSSQYSSNLLHEITEGSLGYPQAEDGEETSNVRSVVTPVVREFRNGFRAGLRDLQEFHIFLVTLHQKLDVLLRAFFSMMDKTMCADFDREDFAVPESPSHTHGHEVNHYPSPSKDRVPSDNSSDHSESDMQKSVPRTPNSENKEDGSSPKSRESWHGRSGKGGESLSSQRLAAKLRDFHKFAKVDAESNKELDQWNETLRNEVMKLCQENGFNTGFFEGSDNNSCTDAYELKVRLEHILERISLISKAANTEKPSMIQENLFIGGGLAARSIYTLQHLGITHVLCLCANEIGQSDTQYPDLFEYQNFSITDDEDSNIESIFQEALDFIKHGEETGGKILVHCFEGRSRSATVVLAYLMLQKKLTLLEAWSKLRKVHRRAQPNDGFARILINLDKKCHGKVSMEWRQRKPTMKVCPVCGKNAGLSSSSLKLHLQKSHRKLSSGSVDSAMNMEIQKALEALKLSTGRGSSASSNSFQSHPG

SEQ ID NO: 50338 - protein, 151 aa, Brassica napus
IWSAGCVLAELMLGQPLFPGESGVDQLVEIIKVLGTPTREEIKCMNPNYTEFKFPQIKAHPWHKVFHKRMPPEAVDLVSRLLQYSPNLRCTAVEALVHPFFDELRDPGTRLPNSRFLPPLFNFKPNELKGIPADVAAKLIPDHARKQSSHA

SEQ ID NO: 50339 - protein, 431 aa, Prochlorococcus marinus subsp. pastoris str. CCMP1986
MKRVLAIILGGGKGSRLYPLTKMRAKPAVPLAGKYRLIDIPISNCINSGINKMYVLTQFNSASLNRHIGRTYNLSAPFGQGFVEVLAAQQTPDSPKWFEGTADAVRKYQWLFQEWDVDEYLILSGDQLYRMDYSLFVQHHRDNKADLTVAALPVDESQAEGFGLMRTDDLGNIKEFSEKPTGEKLKSMAVDTSKFGLTKESASEKPYLASMGIYVFSRKTLFDLLNKFPSYTDFGKDIIPEALSRGDTLKSYVFDDYWEDIGTIGAFFESNLALTQQPKPPFSFYDEKFPIYTRPRYLPPSKLVDAQITDSIVCEGTILKSCSILHCVLGVRSRIESDSVIEDTLVMGSDFFESLEERIELRKGGGTPLGVGEGSTIKRAILDKNARIGDNVVIVNKDRVEEADKPDVGFYIRNGIVVVVKNATIANGTII

SEQ ID NO: 50340 - protein, 245 aa, Prochlorococcus marinus subsp. pastoris str. CCMP1986
MDEMIEQSYGGYKLYIYKDKLELSSNVSNFIENQIVQTLKIKDRFQFCVSGGSTPKSVYQLLSERDIEWEKVDIFLGDERCVDPKSELSNSLMLKNSLLTKYGSKAFFYEIFSDKKVDDNISKNLLISKLNEKCNGKPPSFDLTLLGLGDDGHTASLFPYQKNNNADDFVIFNEGKGLKRISLTPKVLSASSKIIFLVSGASKQLALKRLLDKNESPERTPSKLIKSSDQISIFCDEESSKELSI

SEQ ID NO: 50341 - protein, 329 aa, Glycine max
MATNIGIMDAAYFVGRSEILSWINSTLQLNLSKVEEACSGAVHCQLLDAAHPGIVPMHKVNFDAKSEYEMIQNYKVLQDVFNKLKITKHIEVSKLVKGRPLDNLEFMQWMKRYCDSVDSGLQYNYNPLERREVCKGGRETSKKSANSQASTKGSTAQRPHSSHNARRNEVSNANPTNQAAKVARAAPSAGNPAPVYEEKITELKLSIDSLEKERDFYFAKLRDIEILCQTPEIEHSPIVAAIQKILYATDDNGMAVVEAQAMISVGRKEIEGLSPIAEVSEEKSSSETHKRKNIANIDFDVAGLATLSPRQRLSDVSDVHCSESPLMTC

SEQ ID NO: 50342 - protein, 457 aa, Thermus thermophilus HB8
MTYDLLIVGSGSAGVAAALEASALGAKAAVVEAGVLGGTCVNVGCVPSKYLLRAADAFHRAGHPAFPGLRTEALGVDWKALLAGKEGLIAALRKEKYQEVLEAAGVPVLRGRARFLDGERMEVEGREVLAGRYLLATGARPFLPPIPGLQESAPWTYLEALSAPALPESLLVVGGGPIGLELAQAFARLGSRVTVLEALPEVLPQEDRELARLLRGYLEEEGLRVHTGVRVEAVAREGAFRVRTDRGVFEAERLLVATGRRPDLEGLGLERAGVERDERGFLRLDPSLRTTNPRVYAAGDAAGLPQFVYVAAQSGRVAARNALGVKAPLDLAALPRVTFTDPALAAVGLTEEEARRRYGAGVRAATLPLSQVPKALTARDTRGAFKIVVDEEGTVLGLHVLAHEAGDVIQEGILAVKYGFGYRDLIDTFHPYLTLAEGIRLVAQALDADPKKLSCCA

SEQ ID NO: 50343 - protein, 431 aa, Corynebacterium efficiens YS-314
MLVTSTWGWTVHGDGRKIEPGAVVAPRERLSWGRTIGIGMQHVVAMFGATLLVPTLTGFPVNTTLLFSGLGTIFFLLITRNRLPSYLGSSFAFIAPLTATQAQGISVQIGGVLVSGLVLMGIGFLVKAAGRRVIDAVMPPTVTGAIVALIGLNLAPTAASNYQAQPFVATVTLMVILLATVAGRGMVARLGILIGVVVGWVFAALTDNLAEGSVEAISSASWIGLPQFHTPEFQLSAILVTLPVVIVLVAENIGHVKAVSEMTGENLDDLAGNALIADGLATSVAGGFGGSGTTTYAENIGVMAATRVYSTAAYWVAAFTAIALAFIPKFGALIFTIPVGVLGGATLVLYGLIGMLGIRIWQDNRVNFNNPVNLTMAAVALVAGIGNLTLTIFGVTLEGIAWGSVGIIVLYPLMKKLYVTLGEGKGAKFYN

SEQ ID NO: 50344 - protein, 269 aa, Zea mays
EQLSHVDVLFHLHDRPAVVAALFMNIYIVGLNQLFDIEIDKVNKPTLPLASGEYTLATGVAIVSVFAAMSFGLGWAVGSQPLFWALFISFVLGTAYSINLPYLRWKRFAVVAALCILAVRAVIVQLAFFLHIQTFVFRRPAVFSRPLLFATGFMTFFSVVIALFKDIPDIEGDRIFGIRSFSVRLGQKKVFWICVGLLEMAYSVAILMGATSSCLWSKTATIAGHSILAAILWSCARSVDLTSKAAITSFYMFIWKLFYAEYLLIPLVR

SEQ ID NO: 50345 - protein, 362 aa, Arabidopsis thaliana
MMMSNLPKDLVEEILSRVPFKYLRAIRSTCKNWYDLSKNRSFANKNIDKAAVSGEKEFLMITQFNVFWVGVNLHRSQNNSFDLSIQLKAKIVSRDKKDDLFQKSQVIHCNGVFLCVREKMLVVLNPYWGQTKRIMPRPPFGCFDRYALGYDKSSGSHKILRLFGVNQNNLNIYDLSSSSWMIPDGTLERDMEYMKQGVSLNGDTYWYAKDKESIDWYLLCFDFTRERFGTPLPLPFSNEGYTLHKGYKSLSALKEEKLAVLLWDTMVIWVTNKIEPDAVSWSIFLKLDMEPSIYCRYGNFFIDEEKKVAVVFEKDSSSWSWMYNPNYNKAYIAGENGYFKSVNLLKSPNTLQLGHLVCSYAL

SEQ ID NO: 50346 - protein, 623 aa, Legionella pneumophila subsp. pneumophila str. Philadelphia 1
MPMTMNDQDQQSSQITKVISLGKEQGYLTYSQINDLLPNIVDTEHFDVIISMLEGMNIKVFELPPSEDELALLLNTEEVPDIEEAAMVLASVDKETGRTTDPVRMYMREMGTVELLTREGEIRIAKRIEEGIYQVLKSLAHYPETVQLVLEDYDRFLAEEIRLNEIISGFADVDEEIAPATNIGSMLDEEQQEEILLDVDEEDEDGEGGISDVDDGPNPEQAKIYFDELREAFEKAMKALKEHGRTNKKTVELLDSMSESFLKLKLTSRQVDKLTRHFRQLRNHIREFERSIMRLCIEKARIPRKLFIDTFPGQETDLGWLETIISKHAKKLDLQRIEENREEILRLQSKLASFEIEYGLTISEIKDINRKMSIGEAKARRAKKEMVEANLRLVISIAKKYTNRGLQFLDLIQEGNIGLMKAVDKFEYRRGYKFSTYATWWIRQAITRSIADQARTIRIPVHMIETINKLNRISRQILQETGREATPEELAEKMELSEDKIRKVLKIAKEPISMETPVGDDDDSHLGDFIEDNNIESPIDMATAEGLREATLEILETLTPREAKVLRMRFGIEMNTDHTLEEVGKQFDVTRERIRQIEAKALRKLRHPSRSEKLRSFLEGDEG

SEQ ID NO: 50347 - protein, 469 aa, Neurospora crassa
MAPVMRLGSAALRSSIHLTSRQTAFTAARCYSSKTQTLKERFAELLPENIEKIKALRKEHGSKVVDKVTLDQVYGGARGIKCLVWEGSVLDAEEGIRFRGKTIPECQELLPKAPGGKEPLPEGLFWLLLTGEVPSEQQVRDLSAEWAARSDVPKFIEELIDRCPSDLHPMAQLSLAVTALEHTSSFARAYAKGINKKEYWGYTFEDSMDLIAKLPTIAARIYQNVFKGGKVAAVQKDKDYSFNFANQLGFGDNKDFVELLRLYLTIHTDHEGGNVSAHTTHLVGSALSSPFLSVAAGLNGLAGPLHGLANQEVLNWLTEMKKVIGDDLSDEAITKYLWDTLNAGRVVPGYAHAVLRKTDPRYSAQRKFAQEHLPEDPMFQLVSQVYKIAPKVLTEHGKTKNPYPNVDAHSGVLLQHYGLTEANYYTVLFGVSRAIGVLPQLIIDRAVGAPIERPKSYSTDKWIEICKKL

SEQ ID NO: 50348 - protein, 149 aa, Neurospora crassa
MADSLTEEQVSEFKEAFSLFDKDGDGQITTKELGTVMLSLGQNPSESELQDMINEVDADNNGTIDFPEFLTMMARKMKDTDSEEEIREAFKVFDRDNNGFISAAELRHVMTSIGEKLTDDEVDEMIREADQDGDGRIDYNEFVQLMMQK

SEQ ID NO: 50349 - protein, 368 aa, Silicibacter pomeroyi DSS-3
MFIGSEIYRRSTYGAVHPLAIPRVSTVIDLCRAMGWFAPGQYRTSPRARPAALRAFHTPDYIAALQQAEAEQAVSEETRARHGLGTLPNPVFAEMYRRPATAAGGSLLAAELVARGHRVFNPGGGTHHGFADRAGGFCYLNDPVLAILALQRLGCARVAYVDIDAHHCDGVASAFQGSQTVRMISIHEARRWPFTGALEDDAGGAALNLPVARDLNDSAYALILDRLILPAVAGFRPDAVVLQCGADAVAEDPLSRLALSNCAHRDTVRALAALCPRLLVLGGGGYNPWSVARAWTGVWATLSGAEIPDRLPPEAEAVLRALSWQRQRHAPRPETWFTTLADAPRPGPIPSGLRTDLARLEQRLRAEV

SEQ ID NO: 50350 - protein, 339 aa, Glycine max
MNVTNKPNPYGSTNGFQSLLQQNGWEQGSSRLRPTKLYPAPTARYQDIVRDANLFWGTLQAFHKTLGTKYKISTVGGTPLDLHRLFVEVTSRGGIEKVIVDRKWKEVILTFNFKDTITNASFMVRKSYLSMLYHFEQVYYFGRQGIPPTTPDLMIRGQSCQPYSSTTIPEVAAVNDSPVQSTPVQAHDDMVSGTIDAKFDVGYVVTVTLGSEQLQGVLFHVPDNVSQSSHAEGTSSSQNLGDDTSNLQSRKRAKYAPRDPFRPKSNRSGYNFFFAENYARLKPSYHGQERAISKRIGFLWNNLSEAERQVYQEKGIRDKERYRTELMEYKSNNSTPNAQ

SEQ ID NO: 50351 - protein, 311 aa, Streptococcus gordonii
MAEIYLAGGCFWGLEEYFSRIEGVKKTTVGYANGQVESTNYQLIHQTDHAETVHLIYDEKRVSLREILLYYFRVIDPLSVNKQGNDVGRQYRTGVYYTNQADKAVIEQVFAEQEKQLGQKIAVELEPLRHYVLAEDYHQDYLKKNPGGYCHINVNDAYQPLVDPGQYEKPTDAELKEQLTQEQYQVTQLSATERPFHNAYNATFEEGIYVDVTTGEPLFFAGDKFESGCGWPSFSRPIAREVLRYYEDKSHGMERIEVRSRSGNAHLGHVFTDGPESAGGLRYCINSAALRFIPKEKMEAEGYAYLLQHMK

SEQ ID NO: 50352 - protein, 383 aa, Ceratopteris richardii
MNTFLSSGPHTYLNNLRCGEWGSGTAPGPIADPKSAAYYRDHTKNDKVNDLSNRLHSYGPPEALQYPNQHAIAADTEKMEVENSGKMAASVERSAQDAHASGALQEDVVAAYVDNMPACVAGVTLVPQGGRGTIPIRRIDNPTSRQVTFSKRRNGLLKKAYELSVLCDAEVGVMVFSATGRLSEFASTSMQKVLERYQEHSNGAPSRKVLLQDVEFWKREVLFLRDQLFHLKNYENHILGENQIPLDLAEIQRVETRLENALNKIRIQKVQVLHGEMQQIYKQEARLFEENNILRKKLAEATTINGMRGSMSTMTMSHEDLPGSTNQSYGTKALQGGCPSDTSTTTSNDPNHHSSHPPSHPSASQPLTLHLTSPCSPKLDLRL

SEQ ID NO: 50353 - protein, 318 aa, Oryza sativa (japonica cultivar-group)
MNMDELLRSIWTAEESQAMASASAAAAAAEGGLQRQGSLTLPRTLSVKTVDEVWRDLEREASPGAAAADGGGGGGEQQQPRRQPTLGEMTLEEFLVRAGVVRENTAAAAAMVAAAAAPPVAPRSIPAVNNSSIFFGNYGGVNDAAAAAAGAMGFSPVGIGDPTMGNRLMSGVAGIGGGAITVAPVDTSVGQMDSAGKGDGDLSSPMAPVPYPFEGVIRGRRSGGNVEKVVERRQRRMIKNRESAARSRARKQAYTMELEAEVQKLKEQNMELQKKQEEIMEMQKNFFPEMQKNQVLEAVNNPYGQKKRCLRRTLTGPW

SEQ ID NO: 50354 - protein, 713 aa, Cryptococcus neoformans var. neoformans JEC21
MALPETIRVSPDSPRAHWKSRPALSRAWESGLKAGPIRCRRAFRDPSPLSVVIVDHCGYSRLRCPTSYICLQNISFQLSTTHPTTSATTTMSDNEQVAFFTYILERLKQCGVKQIFGVPGDFNLTALDYIEKDPELQWVGNANELNAAYASDGYARVKGTLAVVITTFGVGELSALCGIAGCLSERVPVLHIVGAPSTSLQAKQSLLHHTLNLPESFSTFSSMSAPLSCSQALINNIEPKTPTSWTEAFDKTLKAVLEQCRPGYVEVPTDAVHAKVSAEGLKQPLPPPHSAPPPESMGTSLSNTSASAASRGAAQVSLSTAPTNVPSAPSSDDVTAHVVEDITKRFGEAKKPIILVDACAGRFGMAIEVRKLVDACGIRFFETPMGKSLMDERHPLYGGCYAGANSLPTVQKEVESADFVLYVGALKSDFNSGSFSVNIDPKVIVELHSFTTTIGYASYPTTDIRTILPLLRPAFEKLGRGKQSEGQSVEQKVEDKSVDSPVVPDPKGDEIKHEWLWPRVGKWFQDTDIIITETGTSSFGLTNVVLPSNSTYIAQILWGAIGWSVGACLGAAMAAKENGNNRRTVLFVGDGSLQLTLQEIGTMLRRGVHPYIFVLNNDGYEIERQIHGWTAEYNDIQLYDHQLLLPFLAGKKTKTPYQSYAVHTPQEFSKLLDDEEFNKPDRLRLIEVFMPRGDAPAGLIRQAKLTAEANDRI

SEQ ID NO: 50355 - protein, 239 aa, Ceratopteris richardii
MVRRKIKIKRIENATTRQVTFSKRRGGLLKKAHDLSVLCDADVGVIIFSSKGKLFQFANPSMKSVLERYYKAQGDAESADNVSSAENIEIDRITLFTEKLKALQRNVIGDDLERLSLRDLIHLEQQIHESLGRIRAKKEEMILDQLEDFKKKVTDARKTTNANSSLLDKLLDFCSSDMTSSHNFVDCEPLLISEAPQADASLAGRAATSEQSTDVRECSPPAKRLRITEDLNHSPVCME

SEQ ID NO: 50356 - protein, 592 aa, Arabidopsis thaliana
MDGTTSSINFLTSDDDASAAAMEAFIGTNHHSSLFPPPPQQPPQPQFNEDTLQQRLQALIESAGENWTYAIFWQISHDFDSSTGDNTVILGWGDGYYKGEEDKEKKKNNTNTAEQEHRKRVIRELNSLISGGIGVSDESNDEEVTDTEWFFLVSMTQSFVNGVGLPGESFLNSRVIWLSGSGALTGSGCERAGQGQIYGLKTMVCIATQNGVVELGSSEVISQSSDLMHKVNNLFNFNNGGGNNGVEASSWGFNLNPDQGENDPALWISEPTNTGIESPARVNNGNNSNSNSKSDSHQISKLEKNDISSVENQNRQSSCLVEKDLTFQGGLLKSNETLSFCGNESSKKRTSVSKGSNNDEGMLSFSTVVRSAANDSDHSDLEASVVKEAIVVEPPEKKPRKRGRKPANGREEPLNHVEAERQRREKLNQRFYSLRAVVPNVSKMDKASLLGDAISYINELKSKLQQAESDKEEIQKKLDGMSKEGNNGKGCGSRAKERKSSNQDSTASSIEMEIDVKIIGWDVMIRVQCGKKDHPGARFMEALKELDLEVNHASLSVVNDLMIQQATVKMGSQFFNHDQLKVALMTKVGENY

SEQ ID NO: 50357 - protein, 502 aa, Prosthecochloris aestuarii DSM 271
MKRKYTYLFLVLAGVLVGALAFSHIDVTVPVAEKKIAVTSFSNDAAASPGVEHQPIRSLKDLNEAFVQLAESATPSVVTIFTEKTVNRKTISPFDLFGSPFDDFFNVPRDRGGQNGSKEVLRGLGSGVVVSADGYILTNNHVVDNADVIYIRTYENNKVAAKVVGKDPKTDLAVIKADVKGLKPIAIGDSDALRVGEWVIAIGSPLGENLARTVTQGIVSAKGRANVGLADYEDFIQTDAAINPGNSGGPLVNINGELVGINTAIASRTGGFEGIGFAVPSNMAKKVMQSLISNGKVTRGWLGVTIQDVDENIAKGLQLDPPEGVLVGTVVDDGPAASAGVKTGDVIIAIDGKKVTDTIELRNGIAETPPGTTVKLRVWRNGQVKLLSVRLSELPGKEEVAVEEKAEITDLLGFSVSELTSELASRYRLSRDKGAVLVTGIDPSSKAYRAGLRQGDLILSVNKKNVSTYKEFLAVAGSVKKGDLLFLLIERQGSKVYFAFNI

SEQ ID NO: 50358 - protein, 365 aa, Pseudomonas aeruginosa UCBPP-PA14
MVHNRIDPPFTRYLDSDGRPLGELPAWAGDSDALVGLYRQMLLTRLFDQKAVALQRTGRIGTYAPTLGQEAIGVAIGSQMRAEDVLVPYYRDTAVQLMRGVRMEDILLYWGGDERGSDYAEPLAAQDFPICVPIATQALHACGVASAFRIRGEHRVAVTTCGDGATSKGDFLEALNVAGAWQLPVLFVVNNNQWAISVPRRIQCGAPTLAEKAVGAGFPGEQVDGNDVLAVAERVRAALERARQGKGPTLLECISYRLCDHTTADDASRYRSAEEVNQAWREEPIKRLRAFLAGRGQWDEEREQALVGECQARVQEAVERFETFAAQAPQALFEHVYARWPAALEEQREQLLERAARRQGGAEHE

SEQ ID NO: 50359 - protein, 564 aa, Synechococcus elongatus PCC 6301
MLESIAVPTATGTERWKSMTKFIFVTGGVVSSIGKGIVAASLGRLLKSRGYSVSILKLDPYINVDPGTMSPYQHGEVFVTADGAETDLDLGHYERFTDTPMSRLNSVTTGSIYQAVINKERRGDYNGGTVQVIPHITAEIRDRIHRVAQDTHPDVVITEIGGTVGDIESLPFLEAIRQFRKDVGRRDLAYIHVTLVPWIPSAGEMKTKPTQHSVKELRSIGIQPDILVCRCDRPLQAGMKEKMSEFCNVSPEAVITSQDASSIYEVPLMLEREGLAEQVLDILQLEQRQPDLTQWQRWVHQLQNPSRRVEVAIVGKYVRLNDAYLSVSESLRHAAASADADLQLRWVDAEDLENGDPATYLDGVDGIVVPGGFGARGVDGKVAAIQFARDHQIPFLGLCLGMQAAVIDWARNVAGLDGANSAEFDPETPHPVIALLPEQQDVVDLGGTMRLGLCPCKIQSGSLAQRLYGEDIIYERHRHRYEFNNAYRSLFLESGYCVSGTSPDSRLVEIVERPDHPFFIACQFHPEFVSRPNHPHPLFQGLIKAALGSDLTLVDPAPLPAETV

SEQ ID NO: 50360 - protein, 390 aa, Bacillus cereus G9241
MREAVIVAGARTPIGKAKRGSLKTVRPDDLGALVVKETLKRANYEGPIDDLIFGCAMPEAEQGLNMARNIGGLAGLSYDVPAITINRYCSSGLQSIAYGAERIMLGHSEAVLSGGAESMSLVPMMGHVVRPNSRLVEAAPEYYMGMGHTAEQVAVKYGISREEQDAFAVRSHQRAAKALAAGNFADETVSVDVTLRTVGSNNKLQEETIIFAQDEGVRAETTLDILGKLRPAFNVRGSVTAGNSSQMSDGAASVLLMDREKAVSDGMKPLAKFRSFAVAGVPPEVMGIGPIAAIPKALKLAGLELSDIGLFELNEAFASQSIQVIRELGLDEEKVNVNGGAIALGHPLGCTGAKLTLSLIHEMKRRNEQFGIVTMCIGGGMGAAGVFELL

SEQ ID NO: 50361 - protein, 49 aa, Musa acuminata
ESRTCESASTRFKGTCVRSSNCASVCQGEGFPDGKCEGVRRRCMCRKPC

SEQ ID NO: 50362 - protein, 182 aa, Rubrivivax gelatinosus PM1
MNTSANLETATLGGGCFWCTEAVFQEVDGVVAVESGYSNGHVNDPSYEQVCGGETGHAEVIRVQFDPQRIGFRELLEIFFVVHDPTTPNRQGNDVGTQYRSGIYTHSDEQARIAHEVIAELQASGGVRGKVVTEVKPELNYWPAEAYHQNYFVQHPGQGYCAFVVAPKVEKFRKTFASRRKV

SEQ ID NO: 50363 - protein, 343 aa, Bradyrhizobium japonicum USDA 110
MRAVVIHAPKDLRIDSYPDPAPGPGEVRVKIANGGICGSDLHYYHHGGFGVVRIQQPMALGHEIAGVVAAVGDGVTSVKPGTRVAVNPSKPCGKCLHCQEGMRNQCLDMRFLGSAMRFPHVQGGFREFLTIDATQAVPIADELSLAEAAVAEPLAVCLHAGKQAGPLLGKRVLITGCGPIGALMILVSRFGGASEIVVTDVADAPLAVARKLGATHAINVATHATALDPWRAGKGVFDTLFEASGNQAALRTALDVLRPGATLVQLGLGGEMTLPINSIVAKELQLRGTFRFDPEFELAVRLMGEGLIDVKPLITATMPFENAVAAFELASDRSQSMKVQLSF

SEQ ID NO: 50364 - protein, 414 aa, Frankia sp. EAN1pec
MPATSASPTARTGQAGPAIESVLESISAALAVLRPRMDAVSLAIHARPELKFAEFHARDVLTGWLGESGFTVRVPAGGLDTAFVAVHEGAEPGPCVAVLAEYDALPGVGHGCGHNLIAAGGAGAAIAAVRALPAHPGTIAVIGTPGEEMGGAGKIRLAEAGVFDGVDAAVMFHPGDRSLTGRPGLAAAHLRVAFAGTSAHAALSPWSGRSALAGAQLFLNALDTMRQFVPPSARLHGIISDGGQAPNVVPAHAAVDLYVRDGTAASVEELVERVRAAAAGAALATGTAAEVTETGPLYAERRDNTVLAERFAAAVRALGVDIAPGDPRGPAGSSDIGNLSQLLPVIHPYIQIAEVGTPGHSDALREAAATAFAHDRTQVAAAGLAWVVTGLLTEPGLLAAARAEFTTVSTDGTD

SEQ ID NO: 50365 - protein, 246 aa, Antirrhinum majus
MASLSDQSTEVSPERKIGRGKIEIKRIENKTNQQVTFCKRRNGLLKKAYELSVLCDAEVALVVFSSRGRLYEYANNSVKATIDRYKKASSDSSLNGSISEANTQYYQQEASKLRAQISNLQNQNRNMLGESLGALSLRELKNLESRVERGISRIRSKKNELLFAEIEYMQKRQEIDLHHNNQYLRAKIAESERVQGQHMNLMPGGSSGYEQLVETQPFDARNYLQVNGLQPNNDYPRQDQLPLQLV

SEQ ID NO: 50366 - protein, 187 aa, Brassica napus
  misc_feature (8)..(8): Xaa can be any naturally occurring amino acid
  misc_feature (48)..(48): Xaa can be any naturally occurring amino acid
  unsure (1)..(187): unsure at all Xaa locations
RFPLPVWXGLGSASKRVIQKDAKNLNMLKEMYNQWPFFRVTIDLVEMXFAKGDPGIAALYDRLLVSEELQPFGEQLRVNYQETRRLLLQVAGHKDILEGDPYLRQRLQLRDPYITTLNVCQAYTLKQIRDPSFHVKVRPHLSKDYMESSKPAAELVKLNPKSEYAPGLEDTVILTMKGIAAGMQNTG

SEQ ID NO: 50367 - protein, 1393 aa, Arabidopsis thaliana
MEKQRREESSFQQPPWIPQTPMKPFSPICPYTVEDQYHSSQLEERRFVGNKDMSGLDHLSFGDLLALANTASLIFSGQTPIPTRNTEVMQKGTEEVESLSSVSNNVAEQILKTPEKPKRKKHRPKVRREAKPKREPKPRAPRKSVVTDGQESKTPKRKYVRKKVEVSKDQDATPVESSAAVETSTRPKRLCRRVLDFEAENGENQTNGDIREAGEMESALQEKQLDSGNQELKDCLLSAPSTPKRKRSQGKRKGVQPKKNGSNLEEVDISMAQAAKRRQGPTCCDMNLSGIQYDEQCDYQKMHWLYSPNLQQGGMRYDAICSKVFSGQQHNYVSAFHATCYSSTSQLSANRVLTVEERREGIFQGRQESELNVLSDKIDTPIKKKTTGHARFRNLSSMNKLVEVPEHLTSGYCSKPQQNNKILVDTRVTVSKKKPTKSEKSQTKQKNLLPNLCRFPPSFTGLSPDELWKRRNSIETISELLRLLDINREHSETALVPYTMNSQIVLFGGGAGAIVPVTPVKKPRPRPKVDLDDETDRVWKLLLENINSEGVDGSDEQKAKWWEEERNVFRGRADSFIARMHLVQGDRRFTPWKGSVVDSVVGVFLTQNVSDHLSSSAFMSLASQFPVPFVPSSNFDAGTSSMPSIQITYLDSEETMSSPPDHNHSSVTLKNTQPDEEKDYVPSNETSRSSSEIAISAHESVDKTTDSKEYVDSDRKGSSVEVDKTDEKCRVLNLFPSEDSALTCQHSMVSDAPQNTERAGSSSEIDLEGEYRTSFMKLLQGVQVSLEDSNQVSPNMSPGDCSSEIKGFQSMKEPTKSSVDSSEPGCCSQQDGDVLSCQKPTLKEKGKKVLKEEKKAFDWDCLRREAQARAGIREKTRSTMDTVDWKAIRAADVKEVAETIKSRGMNHKLAERIQGFLDRLVNDHGSIDLEWLRDVPPDKAKEYLLSFNGLGLKSVECVRLLTLHHLAFPVDTNVGRIAVRLGWVPLQPLPESLQLHLLEMYPMLESIQKYLWPRLCKLDQKTLYELHYQMITFGKVFCTKSKPNCNACPMKGECRHFASAFASARLALPSTEKGMGTPDKNPLPLHLPEPFQREQGSEVVQHSEPAKKVTCCEPIIEEPASPEPETAEVSIADIEEAFFEDPEEIPTIRLNMDAFTSNLKKIMEHNKELQDGNMSSALVALTAETASLPMPKLKNISQLRTEHRVYELPDEHPLLAQLEKREPDDPCSYLLAIWTPGETADSIQPSVSTCIFQANGMLCDEETCFSCNSIKETRSQIVRGTILIPCRTAMRGSFPLNGTYFQVNEVFADHASSLNPINVPRELIWELPRRTVYFGTSVPTIFKGLSTEKIQACFWKGYVCVRGFDRKTRGPKPLIARLHFPASKLKGQQANLA

SEQ ID NO: 50368 - protein, 238 aa, Ceratopteris richardii
MVRRKIKIKRIENATTRQVTFSKRRGGLLKKAHDLSVLCDAEVAVIIFSSKGKLFQFANPSMETVLGRYVKASRDPEAGDNGSSTDNVEADRLTVFTEKLKMLQSNVIGDDLERLSLRDLIHLEQQVHESLGHIRAKKDELILEQIDEFKQKMADTRRTTNANTSMLDRLVDFCSSGITGSQNIVASEPGYVVGVPRTDTLRAGWIATSDQSNDGPEYVPCAKRFRITEGLNESPASE

SEQ ID NO: 50369 - protein, 240 aa, Ceratopteris richardii
MPRRKVKIKRIENGATRQITFSKRRAGLFKKAHDLSVLCDAKVAVIVFSEKGRLFEFASPSMESILKRYMDSQKYLGISEEENSSARLLNGDKHWVTTLRNRLKMLRSDLVELDLERLSGGNLIRLEQEMNYNLGRIRAKKDQLILREIESYSNKELMHKAHKRKEQVMNEKAARKVDCQGPCVSNSTALENADEEFLQMDRYASYDGDVIDECPSSVKKSMVLQDLNRLPSEYAQTLVE

SEQ ID NO: 50370 - protein, 296 aa, Rhizobium sp. USDA 1953
  misc_feature (16)..(16): Xaa can be any naturally occurring amino acid
  misc_feature (169)..(169): Xaa can be any naturally occurring amino acid
  unsure (1)..(296): unsure at all Xaa locations
RGKTQIKEFDAFPTLXQLPLWGFDGSSTQQAEGRSSDCVLKPVAVYPDPVRTNGALVMCEVMMPDGKTPHPSNTRATVLDDESAWFGFEQEYFFYKNGRPLGFPEQGYPAPQGPYYTGVGYKNVGDIARQIVEEHLDICLAAGINHEGINAEVAKGQWEFQVFGKGSKXAADEVWLARYLLLRLTEKYGIDVEFHCKPLGDTDWNGSGMHANFSTAYLREVGGKDYFEALMAAFEKNLHDHINVYGPDNHLRLTGKHETAPWDKFRYGVADRGASIRVPHSFVNNGYRGYLEDRRP

SEQ ID NO: 50371 - protein, 341 aa, Pseudomonas aeruginosa UCBPP-PA14
MFDMMDAARLEGLHLAQDPATGLKAIIAIHSTRLGPALGGCRYLPYPNDEAAIGDAIRLAQGMSYKAALAGLEQGGGKAVIIRPPHLDNRGALFEAFGRFIESLGGRYITAVDSGTSSADMDCIAQQTRHVTSTTQAGDPSPHTALGVFAGIRASAQARLGSDDLEGLRVAVQGLGHVGYALAEQLAAVGAELLVCDLDPGRVQLAVEQLGAHPLAPEALLSTPCDILAPCGLGGVLTSQSVSQLRCAAVAGAANNQLERPEVADELEARGILYAPDYVINSGGLIYVALKHRGADPHSITAHLARIPARLTEIYAHAQADHQSPARIADRLAERILYGPQ

SEQ ID NO: 50372 - protein, 120 aa, Brassica napus
MYMIESKGGAIVCMLLALLFLGTWLAIMTLTERRGRLPQHTYLDYTITNLLAAVIIAFTLGQIGPSRPNFITQLSQDNWQSVMFAMAGGIVLSLGNLATQYAWAFVGLSVTEVVTSSITV

SEQ ID NO: 50373 - protein, 297 aa, Rhizobium sp. USDA 1955
  misc_feature (131)..(131): Xaa can be any naturally occurring amino acid
  unsure (1)..(297): unsure at all Xaa locations
RGKTQIKEFDAFPTLEQLPLWGFDGSSTLQAEGRSSDCVLKPVAVYPDPVRTNGALVMCEVMMPDGKTPHASNTRATVLDDESAWFGFEQEYFFYKNGRPLGFPEQGYPAPQGPYYTGVGYKNVGDFARQXVEEHLDICLAAGINHEGINAEVAKGQWEFQIFGKGSKKAADEVWLARYLLLRLTEKYGIDVEFHCKPLGDTDWNGSGMHANFSTAYLREVGGQDYFEALMAAFEKNLHDHINVYGPDNHLRLTGKHETAPWDKFSYGVADRGASIRVPHSFVNNGYRGYLEDRRPN

SEQ ID NO: 50374 - protein, 266 aa, Xanthomonas oryzae pv. oryzae KACC10331
MMRHLCDALRDAPLQHMVLVTGTKHYLGAFENYGSGKAETPFRESEPRQPGENFYYTLEDLLFAHAQQHGFGWSVHRSHTIIGMANGSNAMNMGVTLAVYASLCKHTGQPFVFPGSQAQWNSLTDLTDAGLLGRQLAWAVLSPAARNQAFNTVNGDVFRWRWMWGEMATFFELDAAPCPAVPEPLEPRMRQTAPALWAELAAQHGLVEADVNRLASWWHTDADLGREIECVNDMTKSRELGFMDFYDSRASFFELFTRLRALRIIP

SEQ ID NO: 50375 - protein, 594 aa, Oryza sativa (japonica cultivar-group)
MGLCHGKPSQIPEPEAEEAAAAAGVAVAGAASPGPAAAAAAAAAAKPGTPKQPKFPFYLPSPLPASSYKSSPANSSVASTPARGGLKRPFPPPSPAKHIRALLARRHGSVKPNEAPIPEGGETEVGLDKGFGFSKHFFAKYELGDEVGRGHFGYTCSAKAKKGDHKGHDVAVKVIPKAKMTTAIAIEDVRREVRILSSLTGHSNLVQFYDAFEDEDNVYIVMELCKGGELLDRILARGGKYSEEDAKVVMVQILSVVSFCHLQGVVHRDLKPENFLFTSKDENSALKVIDFGLSDFVKPDERLNDIVGSAYYVAPEVLHRSYGTEADMWSIGVIAYILLCGSRPFWARTESGIFRAVLKAEPSFDEAPWPTLTAEAKDFVKRLLNKDYRKRMTAAQALSHPWIRNSQQVKIPLDMIIYKLMRAYISSSSLRKSALRALAKTLTANQLFYLREQFELLGPNKNGYISLQNLKTALVKNSTDAMKDSRVIDFVNTVCTLQYRKLDFEEFAASAVSVYQMEALETWEQHARRAYELFDKEGNRPIVIEELASELGLGPSVPLHVVLQDWIRHADGKLSFLGFIKLLHGVSSRSIPKA

SEQ ID NO: 50376 - protein, 297 aa, Rhizobium sp. USDA 1970
RGKTQIKEFDAFPTLEQLPLWGFDGSSTQQAEGRSSDCVLKPVAVYPDPVRTNGALVMCEVMMPDGKTPHPSNTRATVLDDESAWFGFEQEYFFYKNGRPLGFPEQGYPAPQGPYYTGVGYKNVGDIARQIVEEHLDICLAAGINHEGINAEVAKGQWEFQVFGKGSKNAADEVWLARYLLLRLTEKYGIDVEFHCKPLGDTDWNGSGMHANFSTAYLREVGGKDYFEALMAAFEKNLHDHINVYGPDNHLRLTGKHETAPWDKFSYGVADRGASIRVPHSFVNNGYRGYLEDRRPN

SEQ ID NO: 50377 - protein, 348 aa, Leifsonia xyli subsp. xyli str. CTCB07
MEATAEQPRAGVPRTGLLATIGEAMVVLYPEDRRPLAEAHTYASAVGGAEYNVATSLARLGLPTAWISRLGADGLGDRILKTANEAGVDTSAVERDELRPTGLYLKETSDGPDGVRTRMRYYRRDSAAAALSNGLLRSAPAADLLGRASIVHTSGITPALSASAAEAMSDLRSAIGPQTIVSVDLNHRPLLWAGRETEPLDALIGQADILLLGRDEAEAYAGHADPERFFAANPRLGVLVVKDDARRASVYRRDGGETHVPCLTVEVVEPVGAGDAFASGFLCGLAEGRDDASALRLGHALAALTLIGHGDRPLTVPDNAQRDRIAAVPETEWAGWSVRPGEIPWNGA

SEQ ID NO: 50378 - protein, 295 aa, Rhizobium sp. CC2129
RGKTQIKEFDAFPTLEQLPLWGFDGSSTQQAEGRSSDCVLKPVAVYPDPVRTNGALVMCEVMMPDGKTPHPSNTRATVLDDEGAWFGFEQEYFFYKNGRPLGFPEQGYPAPQGPYYTGVGYKNVGDIARRIVEEHLDICLAAGINHEGINAEVAKGQWEFQVFGKGSKKAADEVWLARYLLLRLTEKYGIDVEFHCKPLGDTDWNGSGMHANFSTAYMREVGGKDYFEALMAAFEKNLHDHINVYGPDNHLRLTGKHETAPWDKFSYGVADRGASIRVPHSFVNNGYRGYLEDRR

SEQ ID NO: 50379 - protein, 375 aa, Cryptococcus neoformans var. neoformans JEC21
MWTMEGEERDIPEPKADEVQIKVAMTGMCGSDLHYYLHGANGTFKIREPLVLGHESCGVITAVGSNVNSGFNLKVGDRVAMEVGVYCKTCKMCRRGRYNLCANMRFASSAKTYPHLDGTLREVMTWPAELVYKLPPNLELPLAALAEPLSVVLHAYRRAHLSPGSRILVIGAGAVGLLTCALARASGCTTVVAVDIEQGKLDFAAQQSWTTNTFCLPKGPRVSGAEALEVAGKQWDALKASDAVQSVEGLEDGFDAVFECTGVESCMQMAPMAAAIGTKVLFVGMGTKVLALPCGPSLLSEVDLIGVFRYCNTYPDALALLASGKLGDVSKMASHYYSLDQAAEAFEDLKRGKDKDGRTVIKPMVGNLEMCGIKK

SEQ ID NO: 50380 - protein, 54 aa, Zea mays
MGSETFVEILLAILLPPVGVFLRYGIGVEFWICLLLTILGYIPGIIYAVYVLVA

SEQ ID NO: 50381 - protein, 292 aa, Rhizobium sp. CC2155
RGKTQIKEFDAFPTLEQLPLWGFDGSSTQQAEGRSSDCVLKPVAVYPDPVRTNGALVMCEVMMPDGKTPHPSNTRATVLDDEGAWFGFEQEYFFYKNGRPLGFPEQGYPAPQGPYYTGVGYKNVGDIARRIVEEHLDICLAAGINHEGINAEVAKGQWEFQVFGKGSKKAADEVWLARYLLLRLTEKYGIDVEFHCKPLGDTDWNGSGMHANFSTAYMREVGGKDYFEALMAAFEKNLHDHINVYGPDNHLRLTGKHETAPWDKFSYGVADRGASIRVPHSFVNNGYRRYVE

SEQ ID NO: 50382 - protein, 575 aa, Cryptococcus neoformans var. neoformans JEC21
MMSWKFGKKFKEGGFLSGKHHSSNNNSPSDTSRSTTPTPGNPHPEDAVKPPVPRSGMLKIRVTAAKGLNLPQGVSVPAPIQEALTTNPTPASRIATSPPTAIVKAAGANRDSLQRRQVWWLPYLVLEFDKNEVLVDALGGDLASPVWMYSATFDVSRISEISATVYLRTREPHAEGREKSNGEGEGEDMGNSDLCLGSIRFTPNLDSLRVTDDWVTVQGGGGSGSINVQVSFKPASGQILTIDSFELLKVIGKGSFGKVMQVRKRDTLRIYALKTIRKAHIVSRSEVTHTLAERTVLAQVNCPFIVPLKFSFQSKEKLYLVLAFINGGELFHHLQREGKFNETRSRFYSAQLLLALEHLHSFNVIYRDLKPENILLDYAGNIALCDFGLCKLNMSNSDTTNTFCGTPEYLAPELLSGHGYTKCVDWWTLGVLLYEMLTGLPPFYDENTNEMYRKILTEPLRFPDGVRSEARSLLTGLLNRDPRQRLGVNGAQDIKNHPFFAKHINFTKLWNKQIQPPFKPAVASAIDTSNFDEEFTNEVPLDSVVDDSHLSQTVQQQFEGFSWSVSPLGESVGRY

SEQ ID NO: 50383 - protein, 480 aa, uncultured archaeon GZfos1C11
  misc_feature (121)..(121): Xaa can be any naturally occurring amino acid
  misc_feature (266)..(266): Xaa can be any naturally occurring amino acid
  unsure (1)..(480): unsure at all Xaa locations
MRRGKNVKMAGQLGGIPILVLKAGSERTRGKDAQIANINAAKAVGDAVRTTLGPKGMDKMLVDSLGDVVITNDGVTILKEMDIDSPAAKMMVEVAKTVEDVAGDGTTTAVVLGAELLKKAXELLELKLHPTVITLGYRLAAEKAKKVLDEIGKDIDIEDVKELKKIAETAITGKAADASRDFLAEIAINADKAVAEEVSKGKRVVDVDNINVEKKVGGRMSETELVQGMAIDKEIVHPGMPTKIEDAKIALINASLEVKKTEMSAXIKIQSSGQLKSFLAEEEQMLHQMAERIKESGANVVICQKGIDELVQHYLAKAGIAAVRRAKKSDMEKLEKATGGNVVNAVELISKTDLGYAGLVEERKISGSKMLFIEQCKNPHAVSIIVRGGTEQVVDEVDRSLDDTLRVVGCIIEDGKAIAGGGAVETEIALRIREYSTSLKGREQLAVEKFAEAMEIIPRTLAENSGLDPIDKLVELKSST

SEQ ID NO: 50384 - protein, 114 aa, Zea mays
KMLSNAKLFFPHNPPPPKEAFYYRMVFERFFPQKFVILPVPGGPSVGCSPPKPFEWAAQWSGNLAPSGRGALGVLFPPLEPQHDPEHVPAPFSPGSGKNPRPFRVAPPGVPLEG

SEQ ID NO: 50385 - protein, 342 aa, Synechococcus elongatus PCC 6301
MVQERTLPSFQASQAQVSREEGLRIYEDMVLGRTFEDKCAEMYYRGKMFGFVHLYNGQEAVASGIIKAMRSDDYVCSTYRDHVHALSAGVPARQVMAELFGKETGCSRGRGGSMHLFSAEHNLLGGFAFVAEGIPVATGAAFTTAYRRNALGDTSADQVTACFFGDGAANNGQFFECLNMATLWKLPILFVVENNKWAIGMSHERATSDPEIYKKGPAFGMPGVEVDGMDVLAVRAVAQEAIARARAGEGPTLIEALTYRFRGHSLADPDELRSKEEKEFWLARDPIKRFAAHLTEFNLATHEELKAIDKKIEALVAEAVEFAISSPEPKPEELTRYIWAED

SEQ ID NO: 50386 - protein, 463 aa, Pseudomonas putida KT2440
MQTHKNNLSHGLKSRHVTMLSIAGVIGAGLFVGSGRAIAEAGPATILAYILAGGLVVLVMRMLAEMAVASPDTGSFSTYADLAIGKWAGYTIGWLYWWFWVLIIPIEANIAATIINSWVPQLEIWVLSLVITLLLTATNLFSVKNYGEFEFWLALVKVVAIVSFIALGVCAIFGLLPGAGVSGVSRLWDTGGFMPNGFGAVLSAMLITMFSFLGAEVVTIAAAESDEAGKHISKATNSVIWRITLFYILSIFIVIALVPWTDPRLATEGSYVTVLDTLGVPNAKAIIDFVVLTSVTSCLNSSLYTASRMVYSLSRRGDAPACAQITSRSGTPVVAVLLSTGAAFLAVIANYLVPAKVFGFLMASSGAIALLVYLVIAISQLRLRQRLTAQGKTLGYRMWLFPWLTWGVILFISGVLVLMLFRPDHRLEVVSTMVLAVLVVCSGVLVTRRRARGGAVAGVGQGA

SEQ ID NO: 50387 - protein, 268 aa, Bouteloua dimorpha
ASYAAAAMPALDVLPDKPHHAWESNGAAPVAPTPAPRRLDGKVAIVTGGARGIGEDIVRLFVKHGARVVIADIDAAAGDALAAALGPQVSCVRCDVSVEDDVKRAVEWAVARHGRLDVLCNNAGLLGRQTRAAKSILSFDAGEFDRVLRVNALGAALGMKHAALAMAPRRAGSIVSVASVAGVLGGLGPHAYTASKHAIVGLTKNAACELGAHGIRVNCVSPFGVATPMLINAWRQGHAAAAPSGEEVEKMEEVVRGFATLKGPTLRP

SEQ ID NO: 50388 - protein, 360 aa, Prochlorococcus marinus subsp. pastoris str. CCMP1986
MKKWVVKIGTSILRGNEDQSTEQVIESLCKSLTSFIFKGNKVILVTSGAVGLGCKKLNLNTRPKELSALQAVAAVGQVNLMTLYEKTMKKLGHNIAQILITKTDFDSRESFNNASKTFQKLIDLNVIPIVNENDSIANEELKYGDNDTLSALVALAINANKLILLTDIENLYSKDPRNNEDAHPIKEVNSNQLKIIKDKNIQNYNNEWGTGGITTKLIAAEIATKGGVEVQLADGRNENNLINIFNEKKIGTIFHPVDKPVGNKKSWLSHAIKTVGQITLDEGACLAIEQKGASLLVVGVKEVEGDFTVNQAVRIVNTNKKEVAKGITSMSSDSLKRILNKKENINSSMIVVHRDVLALT

SEQ ID NO: 50389 - protein, 406 aa, Arabidopsis thaliana
MAALTLHHHHHHRHHSCLQASGHLSRRLYHRIFSSFPRNPVKDLNFRLSLADFSSFSLSTRGTVFAVRALSTVAVEESSEKKMVKGIRVYEHGGPEVLKWEDVEVGEPKEGEIRVKNKAIGLNFIDVYFRKGVYKPASMPFTPGMEAVGEVVAVGSGLTGRMIGDLVAYAGNPMGAYAEEQILPADKVVPVPSSIDPIVAASIMLKGMTAQFLLRRCFKVEPGHTILVHAAAGGVGSLLCQWANALGATVIGTVSTNEKAAQAKEDGCHHVIMYKNEDFVSRVNDITSGKGVNVVYDSVGKDTFKGSLACLKSRGYMVSFGQSSGSPDPIPLSDLAPKSLFLTRPSMMHYNETRDELLECAGEVFANVTSGILKARVNHKYPLSRVADAHADLENRITSGSVVLLP

SEQ ID NO: 50390 - protein, 164 aa, Silicibacter sp. TM1040
MTQIDYTRAAKYFLLQDVWQGFKLGLKYFFAPKATINYPHEKGPLSPRFRGEHALRRYPNGEERCIACKLCEAVCPAQAITIDAEPREDGSRRTTRYDIDMTKCIYCGFCQEACPVDAIVEGPNFEFATETREELFYDKDKLLANGERWEAEIARNLELDAPYR

SEQ ID NO: 50391 - protein, 636 aa, Streptomyces avermitilis MA-4680
MSDTQTLIENRPPSVAALFLERVAATPDAEAYRYPVPSPKLSASPEQGGAPAGQGPDDWKSLSWAQAAERVFAVAAGLIELGVQPEQRVALASSTRVEWILADLGIMCAGAATTTIYPQTNADESAFILADSESKVLIAEDAAQLAKAVEKRAELPALTHVVVIDPTGVESSDWVLTLAELEARGAAHLEKNPDLIKEKVGAITSDQLATLIYTSGTTGRPKGVRLPHDNWSYMAKATAGTGLISADDVQYLWLPLAHVFGKVLTSGQIEVGHVTAVDGRVDKIIENLPVVQPTYMAAVPRIFEKVYNGVAAKARAGGGAKYKIFQWAAEVAREYAKVSQDNFRRTGAASVPFGLGAKYKVADALVFAKIREAFGGNLRACVSGSAALAPEIGYFFAGAGIHILEGYGLTESSAASFVNPGEAYRTGTVGKPLPGTEVRIADDGEILLRGPGIMEGYHGLPEKTAEVLEPDGWFHTGDIGELSPDGYLRITDRKKDLIKTSGGKYIAPAEVEGQFKGVCPYVSNILVHGADRNFCTALIALDEPSILEWAKENGLAGKSYADVVAAPATVALVEGYVTELNGGLQRWQTIKKFRLLPRDLDIEHGEITPSLKLKRPVVEREYKHLIDEMYAGSREA

SEQ ID NO: 50392 - protein, 638 aa, Lupinus albus
MGYYSIYCLIVLVNVLVFCDGGKTSSFVRESERAIDMALDSDVFHVPRGYNAPQQVHITQGDLVGKAVIVSWVTVDEPGSTKVSYWSDKHSHDKKSAHGKIVTYRFFNYTSGFIHHTIKHLKYTTKYHYEVGSWNTTRHFWVYNFPIQFGLDVPCTFGLIGDLGQTFDSNQTLTHYQHNPRKGQAVLYVGDLSYADNYPNHDNVRWDTWGRFTERVVAYQPWIWTAGNHELDFVPEIGETKPFKPFTHRYPVPFKPSESTEPFWYSIKRGPAHVIVLASYKAYGKYTPQYQWLEAELPKPKVNRKETPWLIVLVHSPWYNSYNYHFMEGETMRVMFESWLVQYKVDVVFAGHVHAYERSECVSNVEVRHCKWQVYPCKDQSAPVYITIGDGGNIEGLANNMTEPQPKYSAYREASFGHAIFDIKNRTVLGLFSENYRLHTKQEEDEKNLASKGAMVKGVILQQVVQAVVATLLFAVTGNDSQDTNQNASLLVSARQFVIAMLVIDTWQYFMHRYMHHNKFLYKHIHSQHHRLIVPYSFGALYNHPLVGLILDTIGGALSFLISGMSPRISIFFFSFATIKTVDDHCGLWLPGNLFHIFSTTILLTMMFTISFSATSTTTHSHSLLCGIKSWVPTCLTH

SEQ ID NO: 50393 - protein, 1383 aa, Streptomyces avermitilis MA-4680
MSENSATRVLEDGQIRASDLRPLLAAMTAARDGIFTRVPETGHGLVAELSTAFNQIMDRNAHFNSEVQRVRRELVRHGRLDERLSASPGQGYWAARVSDVNQLLDALVAPAANATRVLDAVAGGDLTQRVDLHDGNRQLRGDLRRLGRAVNKMVDQLSLFTGEVTRVAREVGTEGRLGGRAKVQGLSGSWRDVTEAVNTMASRLTAQVRDIALVTTAVARGDLTRTVTVEATGELLELKLTVNTMVDQLSAFADEVTRVAREVGTEGQLGGRAQVRGVSGVWKDLTDNVNFMASNLTSQVRNIAQVTTAVANGDLSQKITVDAQGEILELKSTINTMVDQLSAFADEVTRVAREVGTEGNLGGRAQVRGVSGVWKDLTDNVNFMADNLTSQVRNIALVSTAVAQGDLGKKITVEAKGEILELKSTINTMVDQLSAFADEVTRVAREVGTEGNLGGQAQVRGVSGVWKDLTDNVNFMALNLTSQVRNIAQVTTAVANGDLSKKITVDARGEILELKDTVNTMVEQLRAFADEVTRVAREVGTDGRLGGRAQVLGVSGVWRDLTDNVNYMADNLTSQVRNIAQVATAVAQGDLSKKIDVDARGEILELKTTINTMVDTLSSFSSEVTRVAREVGSEGQLGGQARVEGVYGTWKRLTTNVNELALNLTTQVRAIAEVASAVAQGDMSRSISVETRGEVAELKDNINLMVANLRETTRAKDWLESNLARLAALMQGHRDLMEVADLILRELTPLVNAQYGAFFLADPDEDGASLRTTVPAKGLAFIAGYGSAHSVTVDTGGMPVHGLVRQAAREKKRILVEEAPPDYIKINSGLGEAAPASVVIIPILFEDKLLGVIELASFSRFSDVHLAFFDQFVNTIGVAINTIIANSRTESLLGESQRLAIQLQDRSDELQSQQAELQRSNAELEEKAALLATSSQYKSEFLANMSHELRTPLNSLLILARLLSDNPDGHLSDQEVQFATTIHRSGSDLLQLINDILDLSKIEAGRMDVRPKKLPLIKLLDYVHATFRPLTIDRGLAFDVAVGEDVPREMYSDEQRLQQILRNLLSNAIKFTASGRVELRVGRVKDPEHRYTREDSEEVIAFAVSDTGIGIAPEKLPVIFEAFQQADGTTNRKYGGTGLGLSISREIAGLLGGRIIAESVPGKGSTFTLYVPVVSPGHAATGPAPEERPLPTPEQLSTESYITHDPEDSWPAPTKLEEWQVGRAGQVLPGRRVLIVDDDIRNVFALTHVLGRVGMPVLYAENGREGIETLERNPDVELVLMDIMMPEMDGYETISVIRRTPRWAGLPIVALTAKAMPGDREKSIARGANDYVPKPVDVDQLLTVVCALLDPEGADAEERDDFAEPTDPGPVTSGEPAVPPLTE

SEQ ID NO: 50394 - protein, 160 aa, Triticum aestivum
  misc_feature (101)..(101): Xaa can be any naturally occurring amino acid
  misc_feature (114)..(114): Xaa can be any naturally occurring amino acid
  misc_feature (130)..(130): Xaa can be any naturally occurring amino acid
  unsure (1)..(160): unsure at all Xaa locations
MSKSGALDLASGLGGKIDKEQVKSAVDEYEKYHGYYGGKEESRKSNYTDMVNKYYDLATSFYEYGWGESFHFAHRWNGESLRESIKRHEHFLALQLELKPXMKVLDVRCEIGGXPLRQIARFTSTSVTGXLNHTAYQITTGKGALSGPVGSWPHFGRFVQ

SEQ ID NO: 50395 - protein, 134 aa, Brassica napus
MVPTYAWLWTLLAFILTWIVFHLIKRKKTAAEEAEADTEERRDGVADVIIVGAGVAGSALAYALAKDGRRVHVIERDLKEPQRFMGELMQAGGRLKLAQLGLEDCLKEIDAQESHSLAIYKDGKHGTLYYPSST

SEQ ID NO: 50396 - protein, 313 aa, Thermoanaerobacter tengcongensis MB4
MERIKSYYPYLAGIGMASIFGFSFMFTAMGLEVASPLELISYRFLLASIVITLLWAFGVIKLNYRGKDVKPLLLLSLAEPFIYFVFETYGIKYTSSSLSGLMIALIPVAVTILAVIFLNERPSLYQLLFILLSVAGVIFIIFMTGSEGGKSSLLGFLFLLGAVLSAAFYTILARKFSSVFSPIEITFVMMWFGAISFNILNLIEKVIRGDSLSSYFSSVANYKVLIPVLYLGILSSIVAYFLNNYALSKLPASQASVFANLTTVISIIAGVTIRHEVFYWYHVVGAIMILIGVWGTNYFGKAYEVKALSEEIH

SEQ ID NO: 50397 - protein, 74 aa, Lycopersicon esculentum
VERSTAYQPWIWTAGNHELDFAPEIGETKPFKPYTHRYHVPFRASDSTSPLWYSIKRASAYIIVLSSYSAYGKY

SEQ ID NO: 50398 - protein, 301 aa, Oryza sativa (japonica cultivar-group)
MDDSSLFLHWAVSTLQHQHPAAVAVVADDDATFFSFQELCDTEEVVVVPVQEEVITEAHGGGASRIGLAVAVDEHGGWSRSPNPGARPPSGGCGSNNLPLMSWDFSAASVAVQEDLGAHGGAAAAYAQLEHVVAERKRREKINQRFMELSAVIPKLKKMDKATILSDAASYIRELQEKLKALEEQAAARVTEAAMATPSPARAMNHLPVPPEIEVRCSPTNNVVMVRIHCENGEGVIVRILAEVEEIHLRIINANVMPFLDQGATMIITIAAKAKINRSEVKVQDLEQDRFEKAPLQQYGY

SEQ ID NO: 50399 - protein, 350 aa, Thermoanaerobacter tengcongensis MB4
MSIMDGLMTAVVKQYHKEGADIVKKEIPKIGPDEVLIKVKATSICGTDVHIYVWNEWAKSRIKPPKTMGHEFVGEVVEIGENVTSVKVGDLVSAETHIVCGKCRACRTGNAHICENTLILGVDTDGAFAEYIKVPESNVWINDKNIPLEILSIQEPLGNAVHTVFSGDVVGKSVAVIGCGPIGMMAIPLLKRTGAAAIFAIEPADYRRELAHKLGATRVINPLREDVVSIIKSETEGYGADVVLDFSGNPTAIRQGLEYIAKGGRMSILGLPDNEVPIDITNNVVFKGITIQGITGRRMYDTWYTVKGLLKSGLAEDLKPIITHTFPLTEYQKGMELMIKGQCGKVVLYP

SEQ ID NO: 50400 - protein, 530 aa, Arabidopsis thaliana
MGNCCGTAGSLIQDKQKKGFKLPNPFSNEYGNHHDGLKLIVLKEPTGHEIKQKYKLGRELGRGEFGVTYLCTEIETGEIFACKSILKKKLKTSIDIEDVKREVEIMRQMPEHPNIVTLKETYEDDKAVHLVMELCEGGELFDRIVARGHYTERAAASVIKTIIEVVQMCHKHGVMHRDLKPENFLFANKKETASLKAIDFGLSVFFKPGDRFNEIVGSPYYMAPEVLRRSYGQEIDIWSAGVILYILLCGVPPFWAETEHGVAKAILKSVIDFKRDPWPKVSDNAKDLIKKMLHPDPRRRLTAQQVLDHPWIQNGKNASNVSLGETVRARLKQFSVMNKLKKRALRVIAEHLSVEETSCIKERFQVMDTSNRGKITITELGIGLQKLGIVVPQDDIQILMDAGDVDKDGYLDVNEFVAISVHIRKLGNDEHLKKAFTFFDKNKSGYIEIEELRDALADDVDTTSEEVVEAIILDVDTNKDGKISYDEFATMMKTGTDWRKASRQYSRDLFKCLSLKLMQDGSLQSNGDTK

SEQ ID NO: 50401 - protein, 240 aa, Nicotiana tabacum
MAENGIKHQEVGHKSLLQSDALYQYILETSVYPREPESMKELREVTAKHPWNLMTTSADEGQFLNMLLKLINAKNTMEIGVYTGYSLLATALAIPDDGKILAMDINRENYEIGLPIIEKAGVAHKIEFREGPALPVLDQLVEDKKNHGTYDFIFVDADKDNYINYHKRIIDLVKVGGLIGYDNTLWNGSVVAPPDAPMRKYVRYYRDFVLELNKALAADPRIEICMLPVGDGITLCRRIT

SEQ ID NO: 50402 - protein, 470 aa, Zea mays
MASTKAPGPGEKHHSIDAQLRQLVPGKVSEDDKLIEYDALLVDRFLNILQDLHGPSLREFVQECYEVSADYEGKGDTTKLGELGAKLTGLAPADAILVASSILHMLNLANLAEEVQIAHRRRNSKLKKGGFADEGSATTESDIEETLKRLVSEVGKSPEEVFEALKNQTVDLVFTAHPTQSARRSLLQKNARIRNCLTQLNAKDITDDDKQELDEALQREIQAAFRTDEIRRAQPTPQDEMRYGMSYIHETVWKGVPKFLRRVDTALKNIGINERLPYNVSLIRFSSWMGGDRDGNPRVTPEVTRDVCLLARMMAANLYIDQIEELMFELSMWRCNDELRVRAEELHSSSGSKVTKYYIEFWKQIPPNEPYRVILGHVRDKLYNTRERARHLLASGVSEISAESSFTSIEEFLEPLELCYKSLCDCGDKAIADGSLLDLLRQVFTFGLSLVKLDIRQQPLLPLVLGPSSR

SEQ ID NO: 50403 - protein, 296 aa, Rhizobium sp. CC2160
RGKTQIKEFDAFPTLEQLPLWGFDGSSTQQAEGRSSDCVLKPVAVYPDPVRTNGALVMCEVMMPDGKTPHPSNTRATVLDDESAWFGFEQEYFFYKNGRPLGFPEQGYPAPQGPYYTGVGYKNVGDIARRIVEEHLDICLAAGINHEGINAEVAKGQWEFQVFGKGSKKAADEVWLARYLLLRLTEKYGIDVEFHCKPLGDTDWNGSGMHANFSTAYMREVGGKDYFEALMAAFEKNLHDHINVYGPDNHLRLTGKHETAPWDKFSYGVADRGASIRVPHSFVNNGYRGYLEDRRP

SEQ ID NO: 50404 - protein, 762 aa, Pseudomonas syringae pv. phaseolicola 1448A
MSTPSREGLKKPFLQKSKPVNIGAPARFLSKKMGFFRGYLEARLNRITSNLLVGVFEANQERGQLPVFSYLAGPIEELLGQNIKNVLADSTLLFDTVLPEDLTALMANMDAKSESEQPLRAFFRCRTMGREMHIRIDAVPEKTSGGSIIWKGVWVDVTEAREKSLKLSQAKDAAEEAAHAKSQFLATMSHEIRTPMNGILGLLELLHSKSMSPDQQQIMLMIDESAKSLMTVLNDVLDLSKIEFNQLELHRQPTDLRALISSVVGIMAHQAHAKGLRVRITISPALASSVEVDDMRLRQVLLNLLSNAIKFTAVGTVSIKVAVTRSSDTTQHLAISVIDTGLGMSDSQRERIFEPFTQGDASITRSYGGSGLGLVISQHLIRLMGGELALETEEHVGTNVTVVLPVSASSADSQSKKLIGKRVCVDLGDDEDRGELNDLLLALGATPVSASEVDSVHSCDLYFFDAPEKIPDLSETLAVEVTASPILSGWRDTGAGYPTLSSNPFMWGSVLYVCSELLGIGIINTQSRTRTGGSDRPLILVAEDHPTNQVLIKSQLDRLGFDCEIAANGSEALHQFNENVHCMVITDCYMPVMDGYTLAEKLRSKLSGRHFPILAITASILIEEQQRCTSAGIDECLLKPLSLDTLREALSRLLPASKIPMQVQPNEIERSGDWQALLGLLDESPEFKELINGFIRTTKEDIAHIETLSMPKEQQKLLEQLHRLRGGMRMFRLTELAARSEVIERELTKRSAEDISVELAEF

SEQ ID NO: 50405 - protein, 268 aa, Bouteloua dimorpha
ASYAAAAMPALDVLPDKPHHGWESNGGGAVAPTPAPRRLGGKVAIVTGGARGIGEAIVRLFAKHGARVVIADIDAAAGDALAAALGPQVSCVRCDVSVEDDVKRAVEWAVARHGRLDVLCNNAGVLGRQTRAAKSILSFDAGEFDRVLRVNALGAALGMKHAALAMAPRRAGSIVSVASVAGVLGGLGPHAYTASKHAFAGLTKNAACELGAHGIRVNCVSPFGVATPMLINSWRQGHAAAVPSDEEVEKMEEVVRGFATLKGPTLRP

SEQ ID NO: 50406 - protein, 291 aa, Rhizobium sp. USDA 1079
  misc_feature (266)..(266): Xaa can be any naturally occurring amino acid
  unsure (1)..(291): unsure at all Xaa locations
RGKTQIKEFDAFPTLEQLPLWGFDGSSTQQAEGRSSDCVLKPVAVYPDPVRTNGALVMCEVMMPDGKTPHPSNTRATVLDDESAWFGFEQEYFFYKNGRPLGFPEQGYPAPQGPYYTGVGYKNVGDIARQIVEEHLDICLAAGINHEGINAEVAKGQWEFQVFGKGSKKAADEVWLARYLLLRLTEKYGIDVEFHCKPLGDTDWNGSGMHANFSTAYLREVGGKDYFEALMAAFEKNLHDHINVYGPDNHLRLTGKHETAPWDKFXYGVADRGASIRVPHSFVNNGYRGYL

SEQ ID NO: 50407 - protein, 222 aa, Solanum habrochaites
MNIFETYNSDSLISTESSSSSSSSSSSLFSEEEIILASNNPKRPAGRKKFRETRHPIYRGIRKRNSGKWVCEVREPNKKTRIWLGTFPTAEMAARAHDVAALALRGRSACLNFSDSAWRLPIPASSNSKDIQKAAAEAAEIFRPLKESEEVSGESDNSTSPETSENVQESSDFVDEEAIFFMPGLLANMAEGLMLPPPQCAEMGDHYVETDAYMITLWNYSI

SEQ ID NO: 50408 - protein, 268 aa, Bouteloua dimorpha
ASYAAAAMPALDVLPEKPHHGWESNGGAAVAPTPAPRRLDGKVAIVTGGARGIGEAIVRLFVKHGARVVIADIDAAAGDALAAALGPQVSCVRCDVSVEEDVKRAVEWAVARHGRLDVLCNNAGVLGRQTRAAKSILSFDAGEFDRVLRVNALGAALGMKHAAQAMAPRRAGSIVSVASVAGVLGGLGPHAYTASKHAIVGLTKNAACELGAHGIRVNCVSPFGVATPMLVNAWRQGHAAAVPSDEEVERMEEVVRGFATLKGPTLRP

SEQ ID NO: 50409 - protein, 553 aa, Zea mays
  misc_feature (435)..(435): Xaa can be any naturally occurring amino acid
  unsure (1)..(553): unsure at all Xaa locations
MGETNELPPPPVASPPPMMPMQSMMVGAGAIHPPHEQFHHLNYCVHSNPSWVQVAALAFLHYLVMLGFTVMLATAIVPAMGGNAGDKARVIQSFLFMSGINTLLQTLIGTRLPTVMNASFAFVVPVLSIAKEIESNNFLNDHERFKHTMRTAQGALIVASILNMILGFSTIWGAYANPVIMTPVVCVVGLGLFQLGFPQVGKCVEIGLPMLILAVVVQQYVPNYFSYIHQRVTFLFERYSLLLCIGIVWAFAAILTAAGAYDHASPKTQQHCRTDKSFLMSSAPWIKIPLPFEWGPPIFTAGHSFGMMGAVLVAAFESTGAHFATARLAGATPPPAYVLSRSVGLQGIGMFLEGIFSVPAGSSVSVENIGLLGLTKVGSRRVIQISTGFMIFFSIFGKFGAFFASIPLPIFAAIYCILFGIVAAVGVSFMQFANXNSMRNIYIIGLSLFLGISVPQYFNGYTSSAGGHGPARTNAGWFNDIINTVFASGPTVALIVASVLDNTLEFRGYEADRGLSWFQPFLRRHKGYSDPRNEEFYSFPISVYDVIPDRFRR

SEQ ID NO: 50410 - protein, 287 aa, Rhizobium sp. USDA 1083
  misc_feature (5)..(5): Xaa can be any naturally occurring amino acid
  misc_feature (24)..(24): Xaa can be any naturally occurring amino acid
  misc_feature (180)..(180): Xaa can be any naturally occurring amino acid
  misc_feature (194)..(194): Xaa can be any naturally occurring amino acid
  misc_feature (282)..(282): Xaa can be any naturally occurring amino acid
  misc_feature (285)..(285): Xaa can be any naturally occurring amino acid
  unsure (1)..(287): unsure at all Xaa locations
RGKTXIKEFDSFPTLEQLPLWGFXGSSTHQAEGRSSDCVLKPVAVYPDPVRTNGALVMCEVMMPDGKTPHPSNTRATVLDDESTWFGFEHEYFFYKNGRPLGFPEQGYPAPQGPYYTGVGYKNVGDIARQIVEEHLDICLAAGINHEGINAEVAKGQWEFQVFGKGSKKAADEVWLARYXLLRLTEKYGIDVEXHCKPLGDTDWNGSGMHANFSTAYLREVGGKDYFEALMAAFEKNLHDHINVYGPDNHLRLTGKHETAPWDKFSYGVADRGASIRVPHSXVNXRY

SEQ ID NO: 50411 - protein, 512 aa, Nicotiana attenuata
MDGSTVQGGSSVESFLRNYKLGKTLGIGSFGKVKIAEHTLTGHKVAVKILNRRKIKNMDMEEKVRREIKILRLFMHPHIIRLYEVVETPSDIYVVMEYVKSGELFDYIVEKGRLQEDEARKFFQQIISGVEYCHRNMVVHRDLKPENLLLDSKWNVKIADFGLSNIMRDGHFLKTSCGSPNYAAPEVISGKLYAGPEVDVWSCGVILYALLCGTLPFDDENIPNLFKKIKGGMYTLPSHLSAGARDLIPRMLIVDPMKRMTIPEIRMHPWFQAHLPRYLAVPPPDTMQQAKKIDEDILQEVVKRGFDRNSLVASLCNRVQNEGTVAYYLLLDNRFRASSGYMGAEFQETMEYGYHQINSSEAVASPVGQHLPGIMDFQQVGARQFPVERKWALGLQSRAHPREIMTEVLKALQGLNVRWKKIGPYNMKCQWVPGVPGHHEGMSNNSIHNPFFGDDSTIIENGGVTIPNAVKFEVQLYKTREEKYLLDLQRVQGPQFLFLDLCAAFLAQLRVL

SEQ ID NO: 50412 - protein, 246 aa, Synechococcus elongatus PCC 6301
MFGLFGKKTGLPTPEEALPGRAQAMLVPAKHFVLGTPLDGPFPVGIQLALFGNGCFWGTEKQFWQLPGVYSTAVGYAGGLTPNPNYREVCSGMTGHNEVVRVAYDPDRISYADLLKAFWESHDPTQGMGQGPDRGTQYRSGIYCYTPEQKQIALASQAAYQAVLKAKGYGAITTEIIDAPTFYFAEEYHQQYLDKPGSRPYCGAQPTGADLPHPNQWNLPTELQSHLTAHPEVWSKNFAECPVVPL

SEQ ID NO: 50413 - protein, 296 aa, Rhizobium sp. USDA 1088
  misc_feature (266)..(266): Xaa can be any naturally occurring amino acid
  unsure (1)..(296): unsure at all Xaa locations
RGKTQIKEFDAFPTLEQLPLWGFDGSSTQQAEGRSSDCVLKPVAVYPDPVRTNGALVMCEVMMPDGKTPHPSNTRATVLDDESAWFGFEQEYFFYKNGRPLGFPEQGYPAPQGPYYTGVGYKNVGDIARQIVEEHLDICLAAGINHEGINAEVAKGQWEFQVFGKGSKKAADEVWLARYLLLRLTEKYGIDVEFHCKPFGDTDWNGSGMHANFSTAYLREVGGKDYFEALMAAFEKNLHDHINVYGPDNHLRLTGKHETAPWDKFXYGVADRGASIRVPHSFVNNGYRGYLEDRRP

SEQ ID NO: 50414 - protein, 297 aa, Actinobacillus actinomycetemcomitans
NRDHYRIFNDDMQGTGAIVMAAVFSGLKVTKQNFAEQRLVVYGAGTAGTGMADQISAAMQRDGLSREEAKKRVWLIDINGLVTDDMPNLPDYQQEYARPAAEAAAWAKTDGKIGLLEVVKQVKPTILIGTSTDHGAFTEDVVKALCAGVERPILLPLSNPTERIEVMPTDAVQWSDGKALISVGIPVPPVPYKGVNYQIGQANNAMLYPGLGLGVIVSGAKQVTDGMLLAAAEAVASQVNPQDEGASLLPPVDNLRASSATVAVAVAKQAVKDGVAANTSDNWVQAVQDAMWQPEYR

SEQ ID NO: 50415 - protein, 452 aa, Neurospora crassa
MSAANGRQPEVQPCRYKVGKTLGAGSYSVVKECVHIDTGRYYAAKVINKRLMAGREHMVRNEIAVLKKVSMGHQNILTLVDYFETMNNLYLVTDLALGGELFDRICRKGSYYESDAADLIRATLSAVAYLHDHGIVHRDLKPENLLFRTPEDNADLLIADFGLSRIMDEEQFHVLTTTCGTPGYMAPEIFKKTGHGKPVDIWALGVITYFLLCGYTPFDRDSDFEEMQAILNADYSFTPLEYWRGVSDNAKDFIRRCLTIDPAKRMTAHEALQHPFVAGWARGTDGAEADKGANLLPTVKKNFNARRTLHAAIDTVRAINKLREGQFMNGGRSREPAKKAAAALGPTLGKEASMVSTASSNVTKDSGYATQPEGEGGSRDGDDVLMKDASVPAPTSSSPAPCRVSYGRAVSRIRLSRLVKACGMGLVLSDDQFLGLSSLTNGGWFCSIVIIF

SEQ ID NO: 50416 - protein, 155 aa, Staphylococcus aureus
GADWIVITAGWGLAVTMGVYAVGQFSGAHLNPAVSLALALDGSFDWSLVPGYIVTQMLGAIVGATIVWLMYLPHWKATEEAGAKLGVFSTAPAIKNYFANFLSEIIGTMALTLGILFIGVNKIADGLNPLIVGALIVAIGLSLGGATGYAINPAR

SEQ ID NO: 50417 - protein, 176 aa, Triticum aestivum
  misc_feature (71)..(71): Xaa can be any naturally occurring amino acid
  misc_feature (87)..(87): Xaa can be any naturally occurring amino acid
  misc_feature (99)..(99): Xaa can be any naturally occurring amino acid
  misc_feature (123)..(123): Xaa can be any naturally occurring amino acid
  unsure (1)..(176): unsure at all Xaa locations
MGPTVMASSATFVTPFQGLKSTVGLPVSRRSNGASLGSVSNSGRIRCMQVWPIEGIKKFETLSYLPPVSTXEALLNQDHYLIRSKWXPCLQFIKGGFIXREHNASAVYYHGRYWTMWKLSMFXCTDSTQVINQVEEVKKEYPDAYVRIIGFDNMRQVQCVSFIAFKPPGCEESGKA

SEQ ID NO: 50418 - protein, 318 aa, Shewanella sp. ANA-3
MANTLEQLKSYTTIVADTGDIEAIKRYQPEDATTNPSLILKAAQIPEYRALIDNAIAWAKLQSADIEQQIDDASDKLAVNIGVEILKLVPGRISTEVDARLSFDKEKSIAKAHKLVRLYQEAGVDKSRILIKLASTWEGICAAKELEQEGINCNLTLLFSFAQARACAEAGVYLISPFVGRILDWYKNDTGKDYDAVNDPGVVSVTEIYNYYKQHGYNTVVMGASFRNIGEIIELAGCDRLTIGPSLLEELANSQVAIQPKLLPASTTVAAGEPLTEAQFRWDFNQDPMAVDKLAEGIRNFAIDQGKLEVMLKAKLAN

SEQ ID NO: 50419 - protein, 885 aa, Frankia sp. EAN1pec
MAHAASDLVADDIEAYLSAHEHKSMLRFITCGSVDDGKSTLIGRLLYDSKLVFSDHLAALETDSKKVGTQGDGLDFALLVDGLAAEREQGITIDVAYRFFSTERRKFIVADTPGHEQYTRNMVTGASTADLAVILVDARKGVLTQTRRHSHLVSLLGIRNIVLAINKLDLVGYSRDVFAGIEADYRAFAAEIGLSDIVAIPLSALAGDNITALSPNTPWYSGPTLVGHLESVEIADDLHTGPFRLPVQWVNRPDLDFRGFSGQIAGGAVRPGDRVRVLPSGQESTVARIVTADGDLDEAAAGQSVTLTLTDEIDVSRGDVLATAIDPPAVADQFECHLVWMAEEPMLPGRPYLLKIGSRTVGATVTQPKYKVNVNTLEHTAARTLDLNEIGVCNINLDRQIPFDPYTANRDLGGFILIDRFTQATVAAGLLHFALRRADNVHWQAVEVDKDARARLKGQRPAVVWFSGLSGAGKSTIANLVEKRLHEQGYHTYLLDGDNVRHGLNKDLGFTDADRVENIRRVAEVARLMVDAGVIVLASFISPFRAERALARDLLGEGEFVEVHVDAPPGGGRVPGPARGSTPRPGEENWSTSPASTPRTSPPRTPNCALTPAAPTRPRPPPTWSSTTCVRPVCSPRPRLARPRPPEHEQHGRSRTRRGPRRAGGVPPPRYPRAGWGPGGSAVQRAAAAPARADTSGRRRSVRGKRRRSRPPHPGPGLDHRPARRDPRVRRAAARRLGRPRRPRRQRDTHRGGGRTARRRPRAAHRRTTGPRRPDLRPDPSRRLAHPPTRLRRPACRPPGRGPGPHGFRRRQGDGGRPRRRRRLRPLRRPVRMGLRRPRRRRPRRGPAHLPPRRRTPPLQRAQPLPPRPAHLPPGARRHRPASTP

SEQ ID NO: 50420 - protein, 181 aa, uncultured archaeon GZfos35B7
MTWAIWITGLPGSGKSVIAEKVRAIMQERVKVLELDEIRNFITPQPSYSDDEREIVYASLVYMAKIMVASGIPVIIDATANRRRYRDRARATIPNFAEVYVKCSLDTCMERERDRKAKYAPTGIYKESKKDGATVPGVNVPYEEPWNPDVVVDSERMGVKACAEKVVAYIIKQGWRAEEKR

SEQ ID NO: 50421 - protein, 231 aa, Brassica napus
  misc_feature (105)..(105): Xaa can be any naturally occurring amino acid
  unsure (1)..(231): unsure at all Xaa locations
MGRGKIEIKRIENSTNRQVTFCKRRNGLLKKAYELAVLCDAEVALIVFSTRGRLYEYGNNNIRATIERYKKASSDNANTHSVQEINAAYYQQESAKLRQQIQTIXNSNRNLMGDSLSALNVKELKQVENRLEKAISRIRSKKHELLLAEIENLHKREIKLDNESIYLRTKIAEVERFQPHHHQMVSGTEMTAIEALASRNYFAHNIMTIGSGSGAGHGCSYFDPDKKTHLG

SEQ ID NO: 50422 - protein, 238 aa, Rhodospirillum rubrum
MEDKMTRPAEGFETWLFDLDNTLYPASADLFAQIDLRMKAYIGRLLGLPPEEAFRLQKHYYHTYGTSLRGLMDEHAIDPADFLAFVHDIDHTVLAADPVLGGLLARLPGRKIVFTNGSTRHALAVLDRLGITDHFEAIHDIAASGFIPKPQPACYDDLIARYGLDPATTIMVEDSHKNLQPAAALGMTTLLVRNTLHWAAVEDGGAPMAYCHHVTDDLRIWLADWLAHQAPHPEVCLD

SEQ ID NO: 50423 - protein, 332 aa, Arabidopsis thaliana
MAANGVATAGRQVSEKEADIQIMLSADVHLGTKNCNYQMERYVFKRRDDGIYIINLGKTWDKLQMAARVIVAIENPKDIIVQSARPYGQRAVLKFAQYTGVNAIAGRHTPGTFTNQMQTSFSEPRLLILTDPRTDHQPIKEGALGNIPTIAFCDTDSPMGFVDIGIPANNKGKHSIGCLFWLLARMVLQMRGTILAAQKWDVMVNSRNTIRTCVSPTPDKDLDLFLLCRWICFSTGSPKKQSKRVMKKLKYRPIMEWLVVTSGPLLKYLMLHGLVKSNSQFLLHLQLALPLLLDGRLLLFQLLVGSKSSLISLARTRLDVDLIFLFSRFGED

SEQ ID NO: 50424 - protein, 208 aa, Polaromonas sp. JS666
MHNLWTPLSRPLPRIALLTGLALSTIAANSAAPAPSASVAGSVAADASACPGLLQHNFLRLQDEKPQSLCQYQGKVVVAVNTASFCGFTSQYQGLEELYAKYKDRGLVVLGFPSNDFSQETGSNKEIADFCENTFGVKFPMFAKTSVSGKDANPLFRQLAAKTGTTPRWNFYKYVIARDGTSVASFNSLTAPGSRQFVKEIEKQLARP

SEQ ID NO: 50425 - protein, 425 aa, Thermoanaerobacter tengcongensis MB4
MPNKVYEIEETPPIKQMVPLSLQHVFAMFGATILVPLLTGLDPSVTLFTSGLGTLIFHLMTKGKVPAYLGSSFAFIAPIIAATKQFGLKGAFFGMFAAGLVYVVVFIIISLTGIDWLEKLLPPVVVGPVVMIIGLSLAPVAIAQAQKDLATALFTAALIIIFSMFGKGFIKVIPILLGTIGGYIFAITRGLVDFGPVAKASWIAIPKFSFLTGHTPEVAWGAVALVAPLALVAIIEDLGHVLVIGNIVERDLIKNPGFHRVMLGNGLATSIAALFGGPPSTTYGENIGVLAITRVYSSKVIQGAAIIAILLSFIQKIGALIEVIPQAVMGGVTIILFGMIAAAGMRTLVENKVDFSDSRNLIIASVILTLGVGGIKIPLGNFVFEGIGPATLAGILLNLVLPKINLGEEKMTEKVKSSKEAVQKA

SEQ ID NO: 50426 - protein, 508 aa, Zea mays
MGAMMASITSELLFFLPFILLALLALYTTTVAKCHGTHQWRRQKKKRPNLPPGARGWPLVGETFGYLRAHPATSVGRFMERHVARYGKIYRSSLFGERTVVSADAGLNRYILQNEGRLFECSYPRSIGGILGKWSMLVLVGDAHREMRAISLNFLSSVRLRAVLLPEVERHTLLVLRSWPPSDGTFSAQHEAKKFTFNLMAKNIMSMDPGEEETERLRLEYITFMKGVVSAPLNFPGTAYWKALKSRASILGVIERKMEDRLEKMSREKSSVEEDDLLGWALKQSNLSKEQILDLLLSLLFAGHETSSMALALAIFFLEGCPKAVQELREEHLLIARRQRLRGASKLSWEDYKEMVFTQCVINETLRLGNVVRFLHRKVIRDVHYNGYDIPRGWKILPVLAAVHLDSSLYEDPSRFNPWRWKLQSNNAPSSFMPYGGGPRLCAGSELAKLEMAIFLHHLVLNFRWELAEPDQAFVYPFVDFPKGLPIRVQRVADDQGHRSVLTESTRG

SEQ ID NO: 50427 - protein, 447 aa, Oryza sativa
MGKEKTHINIVVIGHVDSGKSTTTGHLIYKLGGIDKRVIERFEKEAAEMNKRSFKYAWVLDKLKAERERGITIDIALWKFETTKYYCTVIDAPGHRDFIKNMITGTSQADCAVLIIDSTTGGFEAGISKDGQTREHALLAFTLGVKQMICCCNKMDATTPKYSKARYDEIVKEVSSYLKKVGYNPDKIPFVPISGFEGDNMIERSTNLDWYKGPTLLEALDQINEPKRPSDKPLRLPLQDVYKIGGIGTVPVGRVETGVLKPGMVVTFGPSGLTTEVKSVEMHHEALQEALPGDNVGFNVKNVAVKDLKRGYVASNSKDDPAKEAASFTSQVIIMNHPGQIGNGYAPVLDCHTSHIAVKFAELVTKIDRRSGKELEKEPKFLKNGDAGMVKMIPTKPMVVETFSEYPPLGRFAVRDMRQTVAVGVIKNVEKKDPTGAKVTKAARKKK

SEQ ID NO: 50428 - protein, 217 aa, Bacteroides ovatus
MNDNKLMNRAADNIRILAASMVEKANSGHPGGAMGGADFVNVLFSEFLVYDPENPRWEGRDRFFLDPGHMSPMLYSTLALTGKFTLDELKEFRQWGSPTPGHPEVDIMRGIENTSGPLGQGHTFAVGAAIAAKFLKARFDEVMNQTIYAYISDGGIQEEISQGSGRIAGALGLDNLIMFYDSNDIQLSTETKDVTVEDTAMKYEAWGWNVLSINGND

SEQ ID NO: 50429 - protein, 539 aa, Chlamydia trachomatis
MSFKSIFLTGGVVSSLGKGLTAASLALLLERQDLKVAMLKLDPYLNVDPGTMNPYEHGEVYVTDDGVETDLDLGHYHRFSSVQLSKYSIATSGQIYTKVLTKERNGEFLGSTVQVIPHVTNEIINVIQSCADHHKPDILIVEIGGTIGDIESLPFLEAVRQFRCEHPQDCLSIHMTYVPYLRAAKEIKTKPTQHSVQNLRSIGISPDVILCRSEAPLSTEVKRKISLFCNVPEHAVFNAIDLERSIYEMPLLLAKENISDFLLNKLGFSPKPLDLSDWQDLVEALCDKERQHVRIGLVGKYLEHKDAYKSVFEALFHASVPANCSLELVPIAPESEDLLEQLSQCDGCLIPGGFGTRSWEGKISAARYCREQNIPCFGICLGMQALVVEYARNVLDKPLANSMEMNPETPDPVVCMMEGQDSVVKGGTMRLGAYPCRIAPGSLASAAYKTDLVQERHRHRYEVNPSYIERLEEHGLKIAGVCPLGELCEIVEIPNHRWMLGVQFHPEFLSKLAKPHPLFIEFIRAAKAYSLEKANHEHR

SEQ ID NO: 50430 - protein, 296 aa, Rhizobium sp. USDA 1114
RGKTQIKEFDAFPTLEQLPLWGFDGSSTQQAEGRSSDCVLKPVAVYPDPVRTNGALVMCEVMMPDGKTPHPSNTRATVLDDESAWFGFEQEYFFYKNGRPLGFPEQGYPAPQGPYYTGVGYKNVGDIARQIVEEHLDICLAAGINHEGINAEVAKGQWEFQVFGKGSKKAADEVWLARYLLLRLTEKYGIDVEFHCKPLGDTDWNGSGMHANFSTAYLREVGGKDYFEALMAAFEKNLHDHINVYGPDNHLRLTGKHETAPWDKFSYGVADRGASIRVPHSFVNNGYRGYLEDRRP

SEQ ID NO: 50431 - protein, 296 aa, Rhizobium sp. USDA 1115
  misc_feature (162)..(162): Xaa can be any naturally occurring amino acid
  unsure (1)..(296): unsure at all Xaa locations
RGKTQIKEFDAFPTLEQLPLWGFDGSSTQQAEGRSSDCVLKPVAVYPDPVRTNGALVMCEVMMPDGKTPHPSNTRATVLDDESAWFGFEQEYFFYKNGRPLGFPEQGYPAPQGPYYTGVGYKNVGDIARQIVEEHLDICLAAGINHEGINAEVAKGQWEFQXFGKGSKKAADEVWLARYLLLRLTEKIRIDVEFHCKPLGDTDWNGSGMHANFSTAYLREVGGKDYFEALMAAFEKNLHDHINVYGPDNHLRLTGKHETAPWDKFSYGVADRGASIRVPHSFVNNGYRGYLEDRRP

SEQ ID NO: 50432 - protein, 163 aa, Ralstonia solanacearum
MLLAIKEFFNSLLLKELFKGLALTGRYLFARKITVLFPEEKTPLSPRFRGLHALRRYPNGEERCIACKLCEAVCPALAITIESDQRDDGTRRTTRYDIDLTKCIFCGFCEEACPVDAIVETHILEYHGEKRGDLYFTKDMLLAVGDRFEPEIAANKAADAKYR

SEQ ID NO: 50433 - protein, 268 aa, Bouteloua dimorpha
ASYAAAAMPALDVLPEKPHHGWESNGGAAVAPTPAPRRLDGKVAIVTGGARGIGEAIVRLFVKHGARVVIADIDAAVGDALAAALGPQVSCVRCDVSVEDDVKRAVEWAVARHGRLDVLCNNAGVLGRQTRAAKSILSFDAGEFDRVLRVNALGAALGMKHAALAMAPRRAGSIVSVASVAGVLGGLGPHAYTASKHAIVGLTKNAACELGAHGIRVNCVSPFGVATPMLVNAWRQGHAAAVPSDEEVEKMEEVVRGFATLKGPTLRP

SEQ ID NO: 50434 - protein, 293 aa, Rhizobium sp. USDA 1177
RGKTQIKEFDAFPTLEQLPLWGFDGSSTQQAEGRSSDCVLKPVAVYPDPVRTNGALVMCEVMMPDGKTPHPSNTRATVLDDESAWFGFEQEYFFYKNGRPLGFPEQGYPAPQGPYYTGVGYKNVGDIARQIVEEHLDICLAAGINHEGINAEVAKGQWEFQVFGKGSKKAADEVWLARYLLLRLTEKYGIDVEFHCKPLGDTDWNGSGMHANFSTAYLREVGGKDYFEALMAAFEKNLHDHINVYGPDNHLRLTGKHETAPWDKFSYGVADRGASIRVPHSFVTRCSASTSST

SEQ ID NO: 50435 - protein, 268 aa, Bouteloua dimorpha
ASYAAAAMPALDVLPEKAHHGWESNGGAAVAPTPAPRRLDGKVAIVTGGARGIGEAIVRLFAKHGARVVIADIDAAAGDALATALGPQVSCVRCDVSVEDDVKRAVEWAVARHGRLDVLCNNAGVLGRQTRAAKSILSFDAGEFDRVLRVNALGAALGMKHAAQAMAPRRAGSIVSVASVAGVLGGLGPHAYTASKHAIVGLTKNAACELGAHGIRVNCVSPFGVATPMLVNAWRQGHAAAVPSDEEVEKMEEVVRGFATLKGPTLRP

SEQ ID NO: 50436 - protein, 178 aa, Bacillus clausii KSM-K16
MAIEKAMFAGGCFWCMVQPFDQLPGIKAIVSGYSGGHTKNPTYEQVKTGETGHYEVVEITYDSEQFPYSKLLELYWPQIDPTDDGGQFQDRGSQYRTAIFYYTEEQKQLAEASKAELNNSNRFNKPIVTAILPASTFYRAEEEHQDFYKKQPKAYKQDRAQSGRDEFIAMNWKENKPR

SEQ ID NO: 50437 - protein, 297 aa, Rhizobium sp. USDA 1944
  misc_feature (282)..(282): Xaa can be any naturally occurring amino acid
  unsure (1)..(297): unsure at all Xaa locations
RGKTQIKEFDAFPTLEQLPLWGFDGSSTQQAEGRSSDCVLKPVAVYPDPVRTNGALVMCEVMMPDGKTPHPSNTRATVLDDESAWFGFEQEYFFYKNGRPLGFPEQGYPAPQGPYYTGVGYKNVGDIARQIVEEHLDICLAAGINHEGINAEVAKGQWEFQVFGKGSKKAADEVWLARYLLLRLTEKYGIDVEFHCKPLGDTDWNGSGMHANFSTAYLREVGGKDYFEALMAAFEKNLHDHINVYGPDNHLRLTGKHETAPWDKFSYGVADRGASIRVPHSXVNNGYRGYLEDRRPN

SEQ ID NO: 50438 - protein, 268 aa, Bouteloua dimorpha
ASYAAAAMPALDVLPEKAHHGWESNGGAAVAPTPAPRRLDGKVAIVTGGARGIGEAIVRLFVKHGARVVIADIDAAAGDALAAALGPQVSCVRCDVSVEEDVKRAVEWAVARHGRLDVLCNNAGVLGRQTRAARSILSFDAGEFDRVLRVNALGAALGMKHAAQAMAPRRAGSIVSVASVAGVLGGLGPHAYTASKHAIVGLTKNAACELGAHGIRVNCVSPFGVATPMLVNAWRQGHAAAVPSDEEVEKMEEVVRGFATLKGPTLRP

SEQ ID NO: 50439 - protein, 294 aa, Rhizobium sp. USDA 3394
RGKTQIKEFDTFPTLEQLPLWGFDGSSTMQAEGRSSDCVLKPVALYPDPARTNGALVMCEVMMPDGVTPHASNARATILDDEDAWFGFEQEYFFYQNGRPLGFPEQGYPAPQGPYYTGVGYSNVGDVAREIVEEHLDLCLAAGINHEGINAEVAKGQWEFQIFGKGSKKAADQIWMARYLLQRLTEKYGIDIEYHCKPLGDTDWNGSGMHCNFSTKYMREVGGKDYFEALMAAFDKNMMDHIAVYGPDNDKRLTGKHETAPWNKFSYGVADRGASIRVPHSFIKNDYKGYVEDR

SEQ ID NO: 50440 - protein, 214 aa, Luffa cylindrica
MATKVLLLATIVLLLTILFLGAESQTFDHFFFVQQWPPTTCQQQQKPCFQPPPATFKIHGLWPQKGPNSVVYCNKNFDRTQISSLENQLDVVWPDVVTGNNTGFWEHEWNKHGSCSESQFNQTLYFQTAINMMNKVNLLKALGKGGITSDERTKSSQTMQKVLLAQFGNQPFLRCKKVGQQFWLLEIVMCFKDDGVTMINCQPSKVSCPPNFIF

SEQ ID NO: 50441 - protein, 394 aa, Pseudomonas aeruginosa UCBPP-PA14
MREVVIVDSVRTGLAKSFRGKFNLTRPDDMAAHCVDALLARNDLDPLLVDDCIVGAGSNEGAQGHNIGRNVAVLSGLGIQVPGMTLNRYCSSGLQAIAIAANQIASGCSEVIVAGGVESITLTLKSVNTDHLVNPLLQREVPGIYYPMGQTAEIVARRYGITREAQDAYALQSQQRMARAQADGLFADEIVPMTTRYAVEDKASGEKQVLDGVVDRDDCNRPDTTLEGLASLKPAFAEDGSVTAGNASQLSDGASMTLLMSLEKALALGLEPKAFFRGFTVAGCEPDEMGIGPVFSVPKLLKAKGLKIADVDLWELNEAFASQCLYCRDRLEIDNEKYNVNGGSIAIGHPFGMTGSRQVGHLVRELRRRNLRYGVVTMCVGGGMGASGLFEAVR

SEQ ID NO: 50442 - protein, 268 aa, Bouteloua dimorpha
ASYAAAAMPALDVLPEKPHHGWESNGGAAVAPTPAPRRLDGKVAIVTGGARGIGEAIVRLFAKHGARVVIADIDAAAGDALAAALGPQVSCVRCDVSVEDDVKRAVEWAVARHGRLDVLCNNAGVLGRQTRAAKSILSFDAGEFDRVLRVNALGAALGMKHAALAMAPRRAGSIVSVASVAGVLGGLGPHAYTASKHAIVGLTKNAACELGAHGIRVNCVSPFGVATPMLVNAWRQGHAAAVPSDEEVEKMEEVVRGFATLKGPTLRP

SEQ ID NO: 50443 - protein, 443 aa, Leptospira interrogans serovar Copenhageni str. Fiocruz L1-130
MNQNKPTSKLISDFWKGKTSEELFERAKKVSPGGVHSPVRSFRSVGGTPVFFASAKGATLTDISGKEYIDYCLSFGPLILGHRDPEIEEVVRETTEIAWSFGAAEPYSLELAELISSRVPWAEKVRFVNSGTEAVMSALRVARAATGREKILKFDGCYHGHLDSLLVKAGSGLAGESSSDSAGISATSIANTLVLPLDDEASVERVFETEGKNIAALIIEPLPANYGLLIQRKEFLLKIVETARKYGTLVVFDEVISGFRVGFQGMSGLLGIWPDLVTYGKIIGGGFPVGCYAGKKDLLDLVAPSGPVYQAGTLSANPFGMRAGLATLKKAQRDSIYSVLDDRTKIFTDTMTKLLNKKSNQEWEAVIHSSLFWFRKKTQQPIRRIDLIPEGHKESFAKVFHTFLKNGIYLAPSGYEVGFLSWAHDDEIIAKTLEIADKALKTF

SEQ ID NO: 50444 - protein, 440 aa, Prochlorococcus marinus subsp. pastoris str. CCMP1986
MENKQINFFKTKDINTVLKPFKKGTVVNIDNLEVREKQKELKLGLHGWYAICPSTELKKNKIHYFSLFDEPLLLFRDKNNNVRCIKNICPHRGSSFYGGSISNGELTCPYHGARFSSQGNCQNIDRITCSHIVDNNYDNYAKRIHLSQFKVVERESYIFIYFTDKSETDLNKFNDDSLISNYDLTANGFSVKDSVSEEVLVDFKCDWSRIIENHLDILHIFWVHGDTIPDKDVNKNVLVSFNQKININPNYIESIYFYKNNPTKEFIRIKYIPPGRILIYKGDPAASRYVQVLDHIPLGDNKARVIVRHYRKFLKNKFLNNLILFKEIQKKIFYKIFDEDYMILKTQTYNQKLGLIKNDEIKLLGEDRIINYFWNWYKKSEEKDNPWKHINKNKELNVYDEIILKYPPEIKKLEVINNINIIRKTFIRYAAPLVFLLLII

SEQ ID NO: 50445 - protein, 341 aa, Triticum aestivum
MSEASVVNQAEVEDAAAAAAAGLDLPPGFRFHPTDEEIISHYLTPKALDHRFCSGVIGEVDLNKCEPWHLPGKAKMGEKEWYFFCHKDRKYPTGTRTNRATESGYWKATGKDKEIFRGRGILVGMKKTLVFYLGRAPRGEKTGWVMHEFRLEGKLTHPLPRSAKDEWAVSKVFNKELTATNGAMAAAEAGIERVSSLGFITDFLDSGELPPLMDPPLGGDVDEVIDFKSTSAYATGAHSGLQVKMEQHMPPHMMYSSPYFSLPAANSGDMSPAIRRYCKAEQVSGQTSALSPSRETGLSTDPNAAGCAEISSAATPSSQNQEFLDQFDEYPALNLADIWKY

SEQ ID NO: 50446 - protein, 491 aa, Solanum tuberosum
DPSKYRPSSAYDTPFLTTNAGGPVYNNVSSLTVGPRGPVLLEDYYLIEKLATFDREKIPERVVHARGASAKGFFEVTHDISHLTCADFLRAPGAQTPVICRFSTVVHERGSPESIRDIRGFAVKFYTREGNFDLVGNNVPVFFNRDAKSFPDTIRALKPNPKSHIQENWRILDFFSFLPESLHTFAFFYDDVCLPTDYRHMEGFGVHAYQLINKEGKAHYVKFHWKPTCGVKSMSEEEAIRVGGTNHSHATKDLYDSIAAGNYPEWKLFIQTMDPEDVDKFDFDPLDVTKTWPEDLLPLIPVGRLVLNRNIDNFFAENEQLAFNPGHIVPGIYYSEDKLLQTRIFAYADTQRHRIGPNYMQLPVNAPKCGHHNNHRDGAMNMTHRDEEVDYLPSRFDPCRPAEQYPIPACVLNGRRTNCVIPKENNFKQAGERYRSWESDRQDRYITKWVESLSDPRVTHEIRSIWISYLSQADKSCGQKVASRLTVKPTM

SEQ ID NO: 50447 - protein, 150 aa, Kluyveromyces lactis NRRL Y-1140
MQIFVKTLTGKTITLEVESSDTIDNVKSKIQDKEGIPPDQQRLIFAGKQLEDGRTLSDYNIQKESTLHLVLRLRGGGKKRKKKVYTTPKKIRHKHKKVKLAVLNYYKVDDEGKVAKLRKECPNCGPGIFLANHGDRFYCGKCHSTFATQK

SEQ ID NO: 50448 - protein, 292 aa, Escherichia coli
MKVAVLGAAGGIGQALALLLKTQLPSGSELSLYDIAPVTPGVAVDLSHIPTAVKIKGFSGEDATPALEGADVVLISAGVARKPGMDRSDLFNVNAGIVKNLVQQVAKTCPKACIGIITNPVNTTVAIAAEVLKKAGVYDKNKLFGVTTLDIIRSNTFVAELKGKQPGEVEVPVIGGHSGVTILPLLSQVPGVSFTEQEVADLTKRIQNAGTEVVEAKAGGGSATLSMGLAAARFGLSLVRALQGEQGVVECAYVEGDGQYARFFSQPLLLGKNGVEERKSIGTLSAFEQNAL

SEQ ID NO: 50449 - protein, 268 aa, Polaromonas sp. JS666
MKVAAIQMVSGVQLQDNLDMAGQLLGQAAAQGAELAVLPEYFCIMGLKDTDKLQVQETAGQGLIQDFLSHSARELGMWIVGGTLPMATTDPRRARNCSLAYAPSGECVARYDKIHLFRFAHGKEDYDETRVLEPGTAPVRFELASRDGHAYTIGMSVCYDLRFPELYRALKADVLLVPSAFTYTTGQAHWEVLLRARAIENQAYVVAAAQGGTHDNGRQTWGHSMVVDPWGQVLAQHAEGAAVVMAEVLRAGLEGVRSRLPALRHGVL

SEQ ID NO: 50450 - protein, 107 aa, uncultured archaeon GZfos35D7
MARNIGLANVPIPSDTCEDPNCPFHGKLPIRGQVLDGVVIGSKMDKTVVIERTHERKIFKYERYEKRSSRIHAHNPPCLNAKEGDTVRIAECRPLSKTKSFVVVSIT

SEQ ID NO: 50451 - protein, 284 aa, Escherichia coli K12
MIENEFGEVSVDDQLIGDRATQIKTLTNGCICCSRSNELEDALLDLLDNLDKGNIQFDRLVIECTGMADPGPIIQTFFSHEVLCQRYLLDGVIALVDAVHADEQMNQFTIAQSQVGYADRILLTKTDVAGEAEKLHERLARINARAPVYTVTHGDIDLGLLFNTNGFMLEENVVSTKPRFHFIADKQNDISSIVVELDYPVDISEVSRVMENLLLESADKLLRYKGMLWIDGEPNRLLFQGVQRLYSADWDRPWGDEKPHSTMVFIGIQLPEEEIRAAFAGLRK

SEQ ID NO: 50452 - protein, 343 aa, Agrobacterium tumefaciens str. C58
MAVLVTGGAGYIGSHMVWALLDAGEEVVVVDRLSTGSRWAVAPAARFYLGDAADRALLDQVFEENHIETIFHFAGSVSVPESISQPLEYYENNTGTTRALVAAAVRSGIRNFIFSSTAAVYGNQPFDGPVPETAILSPENPYGLSKLASEIMLRDVVQAHDFNYVALRYFNVAGADPQGRAGPSPTGVANLIKVACEAATGRRDRVEVYGTDYPTADGTGVRDYIHVSDLIDAHMLAMAHLRAGGGTRTLNCGYGVGYSVLDVLQAVQRESACEFAVIHCPRRPGDIAAMVADSSRIQSELGWRPRFNDLATIVRTALQWEAKRQAQQSGRIPPMRRKLAAIG

SEQ ID NO: 50453 - protein, 244 aa, Arabidopsis thaliana
MATMEAIVFDPKAKQLSHAKIDMPSPPEKNEVIVKVAYAGICGTDLHIIDGEFPCKATPFVLGHEFSGVATDVGTGVSHIKRGDHVVVDPNNGCSVCDMCSGGEYHLCQTSSINSTVGIFKNGGWAQYCRVPADQVYRLPQSISLQIGALSEPMSCLSHGWDRLSPVAMGSRILIQGAGIIGALWLTTLHHMGHRNIIVSDPAESRRNIIKKLDLGVQVCHPEELLAARSRDFSWGVDVCIDCS

SEQ ID NO: 50454 - protein, 226 aa, Pimpinella brachycarpa
MAVTFYDLSSEAGLEKLDEYLLSRSYISGYQASKDDLAVHAALAKPPSSKYVNVSRWYNHVEALLRISGVSAEGCGVTVEGSSVATPPVADTKASAAEDDDDDDVDLFGEETEEEKKASEERAAAVKASGKKKESGKSSVLLDVKPWDDETDMTKLEEAVRSIKMDGLLWGASKLVAVGYGIKKLQIMLTIVDDLVSVDDLVEDYLTAEPANEYIQSCDIVAFNKI

SEQ ID NO: 50455 - protein, 488 aa, Xylella fastidiosa Ann-1
MSERQRRTRILATLGPATDPPGVLDALFKAGVNVVRLNFSHGDVSDQARRAAEVRAAAAHVGVEIGILADLPGPKIRIGRFIGGKVRLVAGARFDLLADSNASLGDATQVGVSYLGLPQDVVAGDVLLLDDGLMQLQVVQVQGARIVTTVLNDGVLSDRKGLNKQGGGLSLGALTDRDRELIGIVARMGIDFIAVSFCRHAEEMHEARRIARECGCDAALVSKIERAEAIVNLAEIVAASDVVMVARGDLGVEIGDAQLPGLQKKIIKEALLQNKVVITATQMLQSMVESPMPTRAEVLDVANAVIDGTDAVMLSAETATGDYPVKAVEAMARICLGAEHQFEFDTDYEMAQRNLQRADHAIAMATMFLSEHICLGGVVALTESGTTPRFLSRFRSHVPIYAFTRHEDVRRRMVLMRGVFPMRFDSRGLTPREAARATIRLLVECGCMSPGDRVVFTSGEHMETLGATNTLRLLEVGADGCVSGLWEL

SEQ ID NO: 50456 - protein, 157 aa, Leuconostoc mesenteroides subsp. mesenteroides ATCC 8293
MSIYDYFATLENGETYSLNKLANHPVVIVNTATKCGYAPQFGELEKLYKKYKDKGLVILGFPSNQFKQELETASQAAQACQLTYGVTFPMHQLVAVNGKNTDPLFKYLKENSKGMLGSSTIKWNFTKFLVDKEGNVVKRYAPKTEPKDLEEDIEDVL

SEQ ID NO: 50457 - protein, 443 aa, Oryza sativa
MNALAATSRNFKQAAKLLGLDSKLEKSLLIPFREIKVECTIPKDDGTLASYVGFRVQHDNARGPMKGGIRYHHEVDPDEVNALAQLMTWKTAVANIPYGGAKGGIGCSPGDLSISELERLTRVFTQKIHDLIGIHTDVPAPDMGTNSQTMAWILDEYSKFHGYSPAVVTGKPVDLGGSLGRDAATGRGVLFATEALLAEHGKGIAGQRFVIQGFGNVGSWAAQLISEAGGKVIAISDVTGAVKNSNGLDIAKLMKHSSENRGIKGFDGGDAIDPRSLLTEECDVLIPAALGGVINKDNANEIKAKYIIEAANHPTDPEADEASTSDSIWQTNTPTATKCTICLKCFLSEFLLQILSKKGVLILPDILANSGGVTVSYFEWVQNIQGFMWDEEKVNNELKTYMTRGFRDVKEMCRSHHCDLRMGAFTLGVNRVARATVLRGWEA

SEQ ID NO: 50458 - protein, 547 aa, Pasteurella multocida
MAAKDVKFGNDARVKMLAGVNILADAVKVTLGPKGRNVVLDKSFGAPTITKDGVSVAREIELEDKFENMGAQMVKEVASKANDAAGDGTTTATVLAQAIVNEGLKAVAAGMNPMDLKRGIDKAVTAVVTELKALSKPCETSKEIEQVGTISANSDSIVGQIIAQAMDKVGKEGVITVEDGTGLEDELAVVEGMQFDRGYLSPYFINKPETATVELDNPFILLVDKKVSNIRELLPVLEGVAKAGKPLLIIAEDVEGEALATLVVNTMRGIVKVAAVKAPGFGDRRKAMLQDIAILTAGTVISEEIGMELEKATLEDLGQAKRVVINKDNTTIIDGIGDEAQIQGRVAQIRQQIEESTSDYDKEKLQERVAKLAGGVAVIKVGAATEVEMKEKKARVEDALHATRAAVEEGIVAGGGVALIRAANKVAGLQGDNEEQNVGIKLALRAMEAPLRQIVANAGEEASVVASAVKNGEGNFGYNAGTEQYGDMIEMGILDPTKVTRSALQFAASVAGLMITTECMVTDLPKEDKADLGAAGMGGMGGMGGMM

SEQ ID NO: 50459 - protein, 516 aa, ASPERGILLUS NIDULANS FGSC A4
MPQAARWVGSPSIKGRTESMRMALLTFSLLGLQFTWGIEMTCVIADRSRSKWGRRRPFMIGGSLIVTVCLLVLGWTTEIVGVFVKDAEKAASVTIALAVLSIYAVDFAINVASSTSMCSELNRRYVTYTLATSWVRVGIFGTALGDTQFKQMTVIAALALLGAIAVTSYSVKERILITARDSDGKAGAFQVVTQLFRTTMDLPPRIQAICWAQFWAWIGWFPFLFYSTTWVGETYFRYEVPKDADRPVDMLGEVGRVGSLSLVVFSSITFISSVLLPFCVQSPDTKRARFTPRPPPGIAALLTKFMKIRPDLQTTWLISHVVFAATMIFAPLARSRAFATFLVAICGIPWAVSCWAPFAFMGVEINRLAMNPSQASRLSGVTMITSSSIRSGAYGDLNSSDASEMDVLRLNHHDQDDDSDAEDGISNIPSTGELAGIYLGVLNVYTTLPQFVGTFISWIVFSILEPGSTKRDDSASDSTWMDLDKSTPNAISICLFIGALCALIAMEATRRMRYIL

SEQ ID NO: 50460 - protein, 291 aa, Rhizobium sp. CIAM1141
GKTQIKEFDTFPTLEQLPLWGFDGSSTMQAEGRSSDCVLKPVALYPDPARTNGALVMCEVMMPDGVTPHATNARATILDDEDAWFGFEQEYFFYQNGRPLGFPEQGYPAPQGPYYTGVGYSNVGDVAREIVEEHLDLCLEAGINHEGINAEVAKGQWEFQVFGKGSKKAADQIWMARYLLQRLTEKYGIDIEYHCKPLGDTDWNGSGMHCNFSTKYMREVGGKDYFEALMAAFDKNLMDHIAVYGPDNDKRLTGKHETAPWNKFSYGVADRGASIRVPHSFVKNDYKGYVE

SEQ ID NO: 50461 - protein, 589 aa, Pseudomonas aeruginosa UCBPP-PA14
MCGISGEFRFDNQAADLAAVERITHHLAPRGPDAWGFHAQGPIALGHRRLKIMDLAEASGQPMIDPDLGLAMVFNGAIYNYPELRGELESLGYRFFSGGDTEVLLKGYHAWGADLLPRLNGMFAFAVWERDRQRLFLARDRLGIKPLYYSLDRSRLRFASSLPALLKGGDIASDLDPQALNFYLNFHAVVPAPHTLLEGVKKLPPATWMSVDLDGSCEQRTWWTLDYGPRPDERELTLDDWQERVLDGLREAVAIRQRAAREVGVLLSGGVDSSLLVGLLHEAGVDNLLTFSIGFEDAGGERGDEFQYSDLIAERYHTRHHRLRIGEHEVIEQLPAAFRAMSEPMVSHDCIAFYLLAREVSKHCKVVQSGQGADELFAGYHWYPKVDGADDAFAAYRAAFFDRDHEEYLATVGERFRVEDVAGRFVRDHFASPGAEAAVDKALRLDSTIMLVDDPVKRVDNMTMAWGLEARVPFLDYRLAELSARIPARFKLGDGGKQVLKGAARKVIPSEVIDRPKGYFPVPGLKHLQGRTREWVRELLLDPSQDRGLFQPAIFDRLLSDPDGDLTPLRGSKLWQLAALNLWLSEQGL

SEQ ID NO: 50462 - protein, 265 aa, Capsicum annuum
KVVSRNSTTPNGLGIFNYYPNHPRRYPPTVPPPGPRWNDVAPRVAQSVAIKSHKDFIHAPPQTSMLNTQNRVNGFTRWSVNNVSFNMPHTPYLIALKHNLLHTFEQIPPPDNYDHENYDIFNIAKNVNATTSNSIYRLKFNTSVDIILQNANTMNPNNSETHPWHLHGHDFWVMGYGNGKFNQSIDPKNYNLVNPIMKNTIPVHPYGWTALRFRADNPGVWAFHCHIESHFFMGMGVVFEEGIEKVGKLPTNIMGCGESKRYHKP

SEQ ID NO: 50463 - protein, 296 aa, Rhizobium sp. CIAM1143
  misc_feature (216)..(216): Xaa can be any naturally occurring amino acid
  unsure (1)..(296): unsure at all Xaa locations
RGKTQIKEFDTFPTLEQLPLWGFDGSSTMQAEGRSSDCVLKPVALYPDPARTNGALVMCEVMMPDGVTPHPTNARATILDDEDAWFGFEQEYFFYQNGRPLGFPEQGYPAPQGPYYTGVGYSNVGDVAREIVEEHLDLCLAAGINHEGINAEVAKGQWEFQVFGKGSKKAADQIWMARYLLQRLTEKYGIDIEYHCKPLGDTDWNGSGMHCNFSTXYMREVGGKDYFEALMAAFDKNLMDHIAVYGPDNDKRLTGKHETAPWNKFSYGVADRGASIRVPHSFVKNDYKGYLEDRRP

SEQ ID NO: 50464 - protein, 495 aa, Bordetella parapertussis 12822
MKAITVSNLFFRRFGAAALVAFMAVTAAGTQVQAQTQVAPPAVALPDFTGIVEKVEPAVVNIRTTATVPVRGGPGGGNDPYELFRWFFGPDFQPPGPAPGQRRKQPQPQPEERTIPRGVGSGFFISADGYILTNNHVISDATDIYVTLTDGREFKAKVIGSDDRTDVALIKIDAKDMTPLTIGDPKTLKKGQWVLAIGSPFGLDSTVTAGIVSAIGRDTGEYLPFIQTDVAVNPGNSGGPLLNLQGEAVGINSQIISRSGGFMGISLAIPIDEAMRVVDQLRATGKVTRGRIGVQIGEVGKDVADAIGLPRAEGALVSSVEAEGPAESAGVQPGDVILKFNGEPIKRWSDLPRIVGETKPGTSAKMDVWRKGRNVTLSVKVAELKSDRSAATADEGKQAEPTAENHLGLGVVDVPSDTQRKLRIKGGAQVRVAEGAAAQAGLQEGDIVLAVNDTDVTDAAQFNKLVSRLDKKKAAGLLVRRGDQTQWVAVQPASK

SEQ ID NO: 50465 - protein, 268 aa, Bouteloua dimorpha
ASYAAAAMPALDVLPEKPHHGWESNGGAAVAPTPAPRRLDGKVAIVTGGARGIGEAIVRLFVKHGARVVIADIDAAAGDALAAALGPQVSCVRCDVSVEDDVKRAVEWAVARHGRLDVLCNNAGVLGRQTRAAKSILSFDAGEFDRVLRVNALGAALGMKHAALAMAPRRAGSIVSVASVAGVLGGLGPHAYTASKHAIVGLTKNAACELGAHGIRVNCVSPFGVATPMLVNAWRQGHAAAVPSDEEVEKMEEVVRGFATLKGPTLRP

SEQ ID NO: 50466 - protein, 450 aa, Salmonella typhimurium LT2
MTKHYDYIAIGGGSGGIASINRAAMYGQKCALIEAKELGGTCVNVGCVPKKVMWHAAQIREAIHLYGPDYGFDTTINQFDWSKLIASRTAYIDRIHTSYDNVLGKNNVDVIKGFARFVDAKTIEVNGETITADHILIATGGRPSHPEIPGVEYGIDSDGFFALSALPERVAVVGAGYIAVELAGVINALGAKTHLFVRKHAPLRSFDPMISETLVEVMNAEGPQLHTHAVPKAVVKNADGSLTLELEDGRSETVDCLIWAIGREPSTDNINLAAAGVKTNEKGYIIVDKFQNTNVEGIYAVGDNTGAVELTPVAVAAGRRLSERLFNNKPEEHLDYSNIPTVVFSHPPIGTVGLSEPQAREQYGDEQVKVYKSSFTAMYTAVTTHRQPCRMKLVCVGPEEKIVGIHGIGFGMDEMLQGFAVALKMGATKKDFDNTVAIHPTASEEFVTMR

SEQ ID NO: 50467 - protein, 295 aa, Rhizobium sp. CIAM1146
RGKTQIKEFDTFPTLEQLPLWGFDGSSTMQAEGRSSDCVLKPVALYPDPARTNGALVMCEVMMPDGVTPHASNARATILDDEDAWFGFEQEYFFYQNGRPLGFPEQGYPAPQGPYYTGVGYSNVGDVAREIVEEHLDLCLAAGINHEGINAEVAKGQWEFQIFGKGSKKAADQIWMARYLLQRLTEKYGIDIEYHCKPLGDTDWNGSGMHCNFSTKYMREVGGKDYFEALMAAFDKNMMDHIAVYGPDNDKRLTGKHETAPWNKFSYGVADRGASIRVPHSFIKNDYKGYLEDRR

SEQ ID NO: 50468 - protein, 500 aa, Oryza sativa
MAMMAMGAASWAPIPAPARAAAAFYPGRDLAAARRRRGAAARRPFVFTPRAVSDSRSSQTCLDPDASTSVLGIILGGGAGTRLYPLTKKRAKPAVPLGANYRLIDIPVSNCLNSNVSKIYVLTQFNSASLNRHLSRAYGNNIGGYKNEGFVEVLAAQQSPDNPNWFQGTADAVRQYLWLFEEHNVMEFLILAGDHLYRMDYEKFIQAHRETDSDITVAALPMDEKRATAFGLMKIDEEGRIVEFAEKPKGEQLKAMMVDTTILGLDDVRAKEMPYIASMGIYVISKNVMLQLLREQFPGANDFGSEVIPGATNIGMRVQAYLYDGYWEDIGTIEAFYNANLGITKKPVPDFSFYDRSAAIYTQPRYLPPSKVLDADVTDSVIGEGCVIRHCTINHSVVGLRSCISEGAVIEDSLLMGADYYETETDKKALSETGGIPIGIGKNAHIRKAIIDKNARIGENVKIINVDNIQEASRETDGYFIKSGIVTVIKDALIPSGTVI

SEQ ID NO: 50469 - protein, 564 aa, Pseudomonas aeruginosa UCBPP-PA14
MTETAKRPLYVPHAGPSLLEMPLLNKGSAFSTQERIDFNLQGLLPHNIETIEEQTERAYSQYNLCNTDLDRHIFLRSIQDNNETLFFRLLEEHLEEMMPIIYTPTVGQACQEFSKIYRTHRGLFISYPDRERIDDILRSATKNNVKIVVVTDSERILGLGDQGIGGMGIPIGKLSLYTACGGISPAYTLPVVLDVGTNNPDLLNDPMYMGWRHERVSGAQYEEFVDLFIQAIKRRWPNVLLQFEDFAQTNAMPLLERYKDELCCFNDDIQGTAAVAVGTLLAACKAKGEKLSEQTVTFVGAGSAGCGIAEQIIAAMQLEGLDEAQARRRIFMVDRWGLLTDDMSNLLDFQHRLAQKRADLGAWGGQQGDDLALLEVIRNARPTVLIGVSGQRGLFSEEVIRELHSHCKQPLVMPLSNPTSRVEATPQEILNWTDGQALVATGSPFQPVQVGDKRIPIAQCNNAYIFPGIGLGVIAARANRVTEGMLMAAANALANCSPIVTRGEGAVLPALGDIREVSKRIAVAVAKQAQAEGKALHTSDEVLNDAIEANFWFPRYRAYRRTSF

SEQ ID NO: 50470 - protein, 474 aa, Thermus thermophilus HB8
MPPFKRTKIVATLGPATDDKEVIRALAEAGADVFRLNFSHGAPEDHRRRVGWVREVAEELGRTLAVLQDLQGPKIRVGRFREGQVLLRPGQRFVLTAEPVEGDEHRVSVSYKGLPEDVSPGQILLLDDGRIRLKVLEVRSPEILTEVEVGGVLSNNKGINIPGADLSIPALSEKDIQDLALGAELGVDWVAVSFVRTRDDLLLARHYLSRYGSKARLMAKIEKPSAVARFEEILEEADGIMVARGDLGVEMPLEEVPIVQKRLILRCIAAGKPVITATQMLESMVQNPSPTRAEASDVANAIFDGTDAVMLSAETAAGAYPVEAVAMMARIAKAVESSPEFLQKLNVLRPAPTPTTQDAIAQAADDVVEAVGARAIVVFTATGGSARRIARTRPQVPILALTPNPEVRNQLALVWGVYPHLAPDPQDTDDMVRIALREVKALGLAQVGDRVVIAAGVPFGVRGTTNLIRVERVG

SEQ ID NO: 50471 - protein, 268 aa, Bouteloua dimorpha
ASYAAAAMPALDVLPEKAHHGWESNGGAAVAPTPVPRRLDGKVAIVTGGARGIGEAIVRLFVKHGARVVIADIGAAAGDALATALGPQVSCVRCDVSAEDDVKRAVEWAVARHGRLDVLCNNAGVLGRQTRAAKSILSFDAGEFDRVLRVNALGAALGMKHAAQAMAPRRAGSIVSVASVAGVLGGLGPHAYTASKRAIVGLTKNAACELGAHGIRVNCVSPFGVATPMLVNAWRHGHAAAVPSDEEVEKMEEVVRGFATLKGPTLRP

SEQ ID NO: 50472 - protein, 293 aa, Rhizobium sp. CIAM490
GKTQIKEFDTFPTLEQLPLWGFDGSSTMQAEGRSSDCVLKPVALYPDPARTNGALVMCEVMMPDGVTPHASNARATILDDEDAWFGFEQEYFFYQNGRPLGFPEQGYPAPQGPYYTGVGYSNVGDVAREIVEEHLDLCLAAGINHEGINAEVAKGQWEFQIFGKGSKKAADQIWMARYLLQRLTEKYGIDIEYHCKPLGDTDWNGWGMHCNFSTKYMREVGGKDYFEALMAAFDKNMMDHIAVYGPDNDKRLTGKHETAPWNKFSYGVADRGASIRVPHSFIQNDYKGYVEDR

SEQ ID NO: 50473 - protein, 579 aa, Chlamydomonas reinhardtii
MASPAPSGSPPLVIYSCTDEQMLEVTELVGDSATAAIVCSQYDCSFTAVSCVLKYLAAQQADLSEQMDGTAKAEVALSLDVAFLLFSAYLVFGPMQLGFALLCAGAIRSKNSMNVLMKNILDACTGAIGFYLFGYAFAFGHHANQTSNAFIGDHNFALSYTTQVSSLDSNVSYDGFATQGWHVFFFQWSFCAAATTIVSGAVAERCTFQAYLAYAFFISSFVYPVVVHWVWSASGWLSAFNTSRDGYALLLQTGAIDFAGGGVVHLTGGMAALMGAWIIGPRIGRFDASGKVNEMKGHSATLVVMGTFLLWFGFYGFNPGSNLTIATTASAIVVSRVAVTTTLSAGAAGLTGLFWRYMRTSTWDTVLVCNCCLAGLVGITCSCSVVEPWAALICGFVAAFVFIGFEYVVLYKMKIDDPVSAVALHLFCGVWGLLFPGLLAQPTYVADVYGAYGFGPDVKGSKKFGILYGGHGQVLLCQVIEALSICAWVGVMMGAFFGLLKVAKRLRVPVDQELAGLDVSKHTNEAYNGAIMPTAGGGAGGGGGYGSNGGERGSGFYTGAGPAGDTSTGGGHAANGGYD

SEQ ID NO: 50474 - protein, 268 aa, Bouteloua dimorpha
ASYAAAAMPALDVLPEKAHHGWESNGGAAVAPTPVPRRLDGKVAIVTGGARGIGEAIVRLFVKHGARVVIADIDAAAGDALAAALGPQVSCVRCDVSVEEDVKRAVEWAVARHGRLDVLCNNAGVLGRQTRAARSILSFDAGEFDRVLRVNALGAALGMKHAAQAMAPRRAGSIVSVASVAGVLGGLGPHAYTASKHAIVGLTKNAACELGAHGIRVNCVSPFGVATPMLVNAWRQGHAAAVPSDEEVEKMEEVVRGFATLKGPTLRP

SEQ ID NO: 50475 - protein, 448 aa, Triticum aestivum
VTLQNKFVQKSRLVPVRNSRDIVDPRVRTRDHVYVIAEPNGARQINDQYGASESSAESSNFESSTEEVSSAKRVRAEKGIIRKINCDHRETVGENEPHTSLPAVFSCQPQQDKLGGQSRAQGTTSVVQKMLLQGMGTAIGSKDIIGIHRTPFLNNYREDRYNLFQKQAEITKSQHGNANVRYAWLPCSKAAVDEMMLNGTLQIKKPTRCPPYGTGVLLAPANCSINCVNYSDVDENGIIYMMLCRVVMGNVEIVHHGSKQHQPSNEYFDSGVDDLKNPQHYIVWDMNLDSHIYSEFVVTIKLPSKAKDSLFTQEDCHDSSDASLVLSPSSADSVSQDMNLEASPALGGQYEAPMLGGSMAKAPSTPWMPFSMLFAAISTKLPREKMDMINNCYEEFKAKKISRIDLVKRLRLIVGDRMLVSTIIRLQDKLPPMVKREAANAPAKARGQ

SEQ ID NO: 50476 - protein, 369 aa, Ustilago maydis 521
MTASTVPIIVNAASQLEIDVDTLDVALTQQLASVGVQPNDMTSNQFIVADALRLAQNEALLDDVVRGSGAGDWLAILDRVSVRLCAQNLANISGRALLQVSPTHAYDTEQIVEHALAYDREFSALGIGKHRYCIKILATPAGVKAAWILESQHAIRTLATGVFSVAQALAAAQAGCLYISPYYNEILAHFTAPDERAVYDDPVSQHPMSPRMAHIYQAYRELTLANPAARPPVIKSASFIGINEVLAMPQLGAQQATILAPILSEMIQRTGMRATTKPYRPSKTYDVALPDSTLALLKIDRLRADGVAQQFDLSVDYLSHNAQQLALAISNDPETQRRLNDAIRVFETAQLNAKTVIDAAIARVNAAHS

SEQ ID NO: 50477 - protein, 295 aa, Rhizobium sp. CIAM540
RGKTQIKEFDTFPTLEQLPLWGFDGSSTMQAEGRSSDCVLKPVALYPDPARTNGALVMCEVMMPDGVTPHATNARATILDDEDAWFGFEQEYFFYQNGRPLGFPEQGYPAPQGPYYTGVGYSNVGDVAREIVEEHLDLCLEAGINHEGINAEVAKGQWEFQVFGKGSKKAADQIWMARYLLQRLTEKYGIDIEYHCKPLGDTDWNGSGMHCNFSTKYMREVGGKDYFEALMAAFDKNLMDHIAVYGPDNDKRLTGKHETAPWNKFSYGVADRGASIRVPHSFVKNDYKGYLEDRR

SEQ ID NO: 50478 - protein, 469 aa, Bacillus subtilis
MNQSQSGLKKELKTRHMTMISIAGVIGAGLFVGSGSVIHSTGPGAVVSYALAGLLVIFIMRMLGEMSAVNPTSGSFSQYAHDAIGPWAGFTIGWLYWFFWVIVIAIEAIAGAGIIQYWFHDIPLWLTSLILTIVLTLTNVYSVKSFGEFEYWFSLIKVVTIIAFLIVGFAFIFGFAPGSEPVGFSNLTGKGGFFPEGISSVLLGIVVVIFSFMGTEIVAIAAGETSNPIESVTKATRSVVWRIIVFYVGSIAIVVALLPWNSANILESPFVAVLEHIGVPAAAQIMNFIVLTAVLSCLNSGLYTTSRMLYSLAERNEAPRRFMKLSKKGVPVQAIVAGTFFSYIAVVMNYFSPDTVFLFLVNSSGAIALLVYLVIAVSQLKMRKKLEKTNPEALKIKMWLFPFLTYLTIIAICGILVSMAFIDSMRDELLLTGVITGIVLISYLVFRKRKVSEKAAANPVTQQQPDILP

SEQ ID NO: 50479 - protein, 579 aa, Chlamydomonas reinhardtii
MASPAPSGSPPLVIYSCTDEQMLEVTELVGDSATAAIVCSQYDCSFTAVSCVLKYLAAQQADLSEQMDGTAKAEVALSLDVAFLLFSAYLVFGPMQLGFALLCAGAIRSKNSMNVLMKNILDACTGAIGFYLFGYAFAFGHHANQTSNAFIGDHNFALSYTTQVSSLDSNVSYDGFATQGWHVFFFQWSFCAAATTIVSGAVAERCTFQAYLAYAFFISSFVYPVVVHWVWSASGWLSAFNTSRDGYALLLQTGAIDFAGGGVVHLTGGMAALMGAWIIGPRIGRFDASGKVNEMKGHSATLVVMGTFLLWFGFYGFNPGSNLTIATTASAIVVSRVAVTTTLSAGAAGLTGLFWRYMRTSTWDTVLVCNCCLAGLVGITCSCSVVEPWAALICGFVAAFVFIGFEYVVLYKMKIDDPVSAVALHLFCGVWGLLFPGLLAQPTYVADVYGAYGFGPDVKGSKKFGILYGGHGQVLLCQVIEALSICAWVGVMMGAFFGLLKVAKRLRVPVDQELAGLDVSKHTKEAYNGAIMPTAGGGAGGGGGYGSNGGERGSGFYTGAGPAGDTSTGGGHAANGGYD

SEQ ID NO: 50480 - protein, 268 aa, Bouteloua dimorpha
ASYAAAAMPALDVLPEKAHHGWESNGGAAVAPTPAPRRLDGKVAIVTGGARGIGEAIVRLFAKHGARVVIADIDAAAGDALATALGPQVSCVRCDVSVEDDVKRAVEWAVARHGRLDVLCNNAGVLGRQTRAAKSNLSFDAGEFDRVLRVNALGAALGMKHAAQAMAPRRAGSIVSVASVAGVLGGLGPHAYTASKHAIVGLTKNAACELGAHGIRVNCVSPFGVATPMLVNAWRQGHAAAVPSDEEVEKMEEVVRGFATLKGPTLRP

SEQ ID NO: 50481 - protein, 566 aa, Saccharomyces cerevisiae
SSATVYGDATRFPNMIPIPEECPLGPTNPYGHTKYAIENILNDLYNSDKKSWKFAILRYFNPIGAHPSGLIGEDPLGIPNNLLPYMAQVAVGRREKLYIFGDDYDSRDGTPIRDYIHVVDLAKGHIAALQYLEAYNENEGLCREWNLGSGKGSTVFEVYHAFCKASGIDLPYKVTGRRAGDVLNLTAKPDRAKRELKWQTELQVEDSCKDLWKWTTENPFGYQLRGVEARFSAEDMRYDARFVTIGAGTRFQATFANLGASIVDLKVNGQSVVLGYENEEGYLNPDSAYIGATIGRYANRISKGKFSLCNKDYQLTVNNGVNANHSSIGSFHRKRFLGPIIQNPSKDVFTAEYMLIDNEKDTEFPGDLLVTIQYTVNVAQKSLEMVYKGKLTAGEATPINLTNHSYFNLNKPYGDTIEGTEIMVRSKKSVDVDKNMIPTGNIVDREIATFNSTKPTVLGPKNPQFDCCFVVDENAKPSQINTLNNELTLIVKAFHPDSNITLEVLSTEPTYQFYTGDFLSAGYEARQGFAIEPGRYIDAINQENWKDCVTLKNGETYGSKIVYRFS

SEQ ID NO: 50482 - protein, 161 aa, Xanthomonas oryzae pv. oryzae KACC10331
MSDLSTFEFTDLEGRTQTMRDYAGKVLLVVNVASKCGFTPQYAGLQALWQRYRERGLVVIGFPCDQFGHQEPGDAAQIRQFCSLDYAVDFPLAEKIEVNGSGAHPLWQWLKHEQRGVLGSEAIKWNFTKFLIGRDGRVLERYAPTTKPEALAADIERALDA

SEQ ID NO: 50483 - protein, 268 aa, Bouteloua dimorpha
ASYAAAAMPALDVLPEKAHHGWESNGGAAVAPTPAPRRLDGKVAIVTGGARGIGEAIVRLFVKHGARVVIADIDAAAGDALAAALGPQVSCVRCDVSVEEDMKRAVEWAVARHGRLDVLCNNAGVLGRQTRAARSILSFDAGEFDRVLRVNALGAALGMKHAALAMAPRRAGSIVSVASVAGVLGGLGPHAYTASKHAIVGLTKNAACELGAHGIRVNCVSPFGVATPMLVNAWRQGHAAAVPSDEEVEKMEEVVRGFATLKGPTLRP

SEQ ID NO: 50484 - protein, 728 aa, Oryza sativa
MAGSMVDRATSDMLIGPDWAKNMEICDICNRDPGQSKDVVKALKKRIGHKNPKVQILALTLLETAIKNCGDIFHMHVAERDVLHEMVKIVKKKSDQNVKEKVLTMIDTWQEAFGGPRARYPQYYAAYHDLVRAGAAFPKRSDRPAPLFNGQSPAGRNMRSPDQQDEAESSAGNDFPALSMSEIQNARGIMDVLAEMLNALDPGNREGLRQEVIVELVDQCRTYKQRVVLLVNATADEELMSQGLALNDDLQRVLAKHDAIAAGIAVRVEKKPKSLQALVDTEDSMNQDSKKEQALVDIEDPTTQETNKEPSQSASVQSPFEQLALPAPPVSNGSATPAPKSDLGVDLLSWDDNPSTTENSLALVPVTDPVVDSTPSQNALAIVDIFSQNNTTNNIAKPADPFGVNSSSTLPGSQPYNAPTQHPLQAQQQPQQVGLYPNGGAVNPGTSYPTSSGWNGQIANNATPPAQQTVNYDEQSGALPPPPWEAQSAPSGDMSNGGMQSHPVSNGQFGGMPSLPTPSNQMGGMQPLHPQMNQMGGPQAHQMYNNQQPGAMQPSQPAVTQMQSGFANQFGSMPPHSMPGMQFPGMQPSPMPGAQPVMMYAQPMMMPGMQFAAMPQPRMYGPQMSQYRLVQQQAAQYYSNSQGRPTYYAGMNDLSQKMYGLSMQDSSYMGMNSSPYSTTPSSSSSMGQPDESHRSLRTSCLEIFLALPKQSRTRLNEKQSNGVLKKKV

SEQ ID NO: 50485 - protein, 661 aa, Thiobacillus denitrificans ATCC 25259
MPTRTDLSNAIRALAMDAVEKAKSGHPGAPMGMAEIAETLWNHHMRHNPVNPKWADRDRFVLSNGHGSMLIYALLHLTGYDLSMDDLKQFRQLHSKTPGHPEYGYAPGVETTTGPLGQGITNAVGMAMAEKVLAHEFNKPGHSIVDHHTYVFLGDGCMMEGISHEACALAGTWKLNKLIAFWDDNGISIDGHIEHWYTDDTAKRFEAYGWQVIPNVDGHDVVAIEAAIQKAKASSDKPTLICCKTIIGKGSPNKAGTHDVHGAALGHDEVEATRKNMGWNSPAFEVPADIYAGWDAKTKGQGLETLWNNKFAEYKKAFPAEAAEFERRMKGELPANWKAHVAEKLAAINAKGETVATRKASQIAINALASALPEFLGGSADLTGSNLTNWEGCHPVRHGKPGNYISYGVREFGMAAIMNGMALHGGLLPFGGTFLMFSEYSRNAIRMAALMKQRVIHVFTHDSIGLGEDGPTHQPVEQTATLRMIPNIDVWRPCDTVETMVGWAHSVERTDGPTCHILSRQNLPFMQRDDATLASIAKGGYVLKDAAGAKAVIIATGSEVELAVKAADTLAAEGIAVRVVSMPSTNTFDRQDAAYRESVLPKGLPRVAVEAGVTDFWRKYVGLEGAVVGIDTFGESAPAPALFKHFGITAEAVAAAVKSVL

SEQ ID NO: 50486 - protein, 333 aa, Thiobacillus denitrificans ATCC 25259
MAIKVGINGFGRIGRMAFRAIAKDFPDIEVVAINDLLDPEYLAYMLKYDSVHGNFKGDIAVEGNNLIVNGKKIRLTAEREPANLKWNEVGAELVIECTGFFLTKETCQKHIDAGAKKVVQSAPSKDDTPMFVYGVNHEKYAGEAIVSAASCTTNCLAPIAKVLNDNWGIKRGLMSTVHAATATQKTVDGPSSKDWRGGRGILENIIPSSTGAAKAVGVVLPELKGKLTGMAFRVPTSDVSVVDLTVELEKPAKYADICAAMKKASQSGDISKTLGYTDEKVVSTDFRGNGFSSIFDAEAGIALDDTFVKVVSWYDNEYGYTCNMLRFVQHVAK

SEQ ID NO: 50487 - protein, 538 aa, Arabidopsis thaliana
MAGGGGGGGGVAPPLKHDGLEPHPVKDQLSSISYCITSPPPWPEAILLGFQHYLVMLGTTVLIPTYLVPQMGGGNEEKAKMVQTLLFVSGLNTLLQSFFGTRLPAVIGGSYTYVPTTLSIILAGRYSDILDPQEKFKRIMRGIQGALIVASILQIVVGFSGLWRNVVRLLSPLSAVPLVALAGFGLYEHGFPLLAKCIEIGLPEIILLLLFSQYIPHLIRGERQVFHRFAVIFSVVIVWIYAHLLTVGGAYKNTGVNTQTSCRTDRSGLISGSPWIRVPYPFQWGPPTFHAGEAFAMMAVSFVSLIESTGTYIVVSRFASATPPPPSVLSRGVGWQGVGVLLCGLFGAGNGASVSVENAGLLALTRVGSRRVVQISAGFMIFFSILGKFGAIFASIPAPVVAALHCLFFAYVGAGGLSLLQFCNLNSFRTKFILGFSVFMGLSIPQYFNQYTAVNKYGPVHTHARWFNDMINVPFSSKAFVAGILAFFLDVTMSSKDSATRKDRGMFWWDRFMSFKSDTRSEEFYSLPFNLNKYFPSV

SEQ ID NO: 50488 - protein, 434 aa, Bacillus cereus G9241
MVVKFTKSEALHKEALEHIVGGVNSPSRSFKAVGGGAPVAMERGKGAYFWDVDGNKYIDYLAAYGPIITGHAHPHITKAITTAAENGVLYGTPTALEVKFAKMLKEAMPALDKVRFVNSGTEAVMTTIRVARAYTGRTKIMKFAGCYHGHSDLVLVAAGSGPSTLGTPDSAGVPQSIAQEVITVPFNNVETLKEALDKWGHEVAAILVEPIVGNFGIVEPKPGFLEKVNELVHEAGALVIYDEVITAFRFMYGGAQDLLGVTPDLTALGKVIGGGLPIGAYGGKKEIMEQVAPLGPAYQAGTMAGNPASMASGIACLEVLQQEGLYEKLDELGAMLEKGILEQAEKHNIDITLNRLKGALTVYFTTNTIEDYDAAQDTDGEMFGKFFKLMLQEGVNLAPSKYEAWFLTTEHTKEDIEYTIEAVGRAFAALANNK

SEQ ID NO: 50489 - protein, 348 aa, Nicotiana tabacum
MALVPTPVVNEGPMFAEVDMGDNSSTPTVRATVVQASTIFYDTPATLDKAERLLAEAASYGAQLVVFPEAFIGGYPRGSTFGVSIGNRTAKGKEEFRKYHASAIDVPGPEVDRLAAMAGKYKVYLVMGVIERDGYTLYCTVLFFDSQGHYLGKHRKIMPTALERIIWGFGDGSTIPVYDTPLGKIGAAICWENRMPLLRTAMYAKGIEIYCAPTADSRDVWQASMTHIALEGGCFVLSANQFCRRKDYPPPPEYVFSGTEDLTPDSIVCAGGSVIISPSGAVLAGPNYEGEALISADLDLGEIARAKFDFDVVGHYARPEVLSLIVRDHAVSPVSFTSTSSKAESSPK

SEQ ID NO: 50490 - protein, 1193 aa, Gloeobacter violaceus PCC 7421
MSQHQVDLLRKRRRGVVLSERGLQKLRRAIAAAEQEELEGWRYTLEALSARIGLTARTIARVLAGREGLDRSTLEHCFSRFGLQLEAADYTSLPLEALAVVRPHTHQYWGEAVDVSVFFGRERELATLESWLVEERCRLVAILGMGGMGKTSLSVKLAQQVQAYFEWVIWRSLADAPPMSELSAEWVALMGGGGVELPDTAGAQISLLLRYLRAHRCLLVLDNCETILQGGGEAAGTAGLCRPGFEDYGELLRRLGEVPHDSCLVLTSREKPEAVARQEGSRLPVRSLALGGLSAPEANALLLVKDLQATPSECVRLVDLYLGNPLALKIVAATIRDTFAGSLTGFLAQGASVMGGIRTLLDEQFTRTSPMEQQLLFWLAIHREPVPIDRLRTALVEPWATERLLGVLESLSRRSLIELRTERPGAEGGGFALQPVVLEYLVDRLVEAACREICTLTPAVLHRHALLQAQTKDYLRATQEQLLLRPVLEALIVALGSPAAAEEQLRTLVASLRRSSVGRGYAAGNALNLLGHLDADLSGMDLAGLAVWQAYLPERRLCRVDFTGADLNGSVFARVFALIVVLAFHPRGHLLACGDSTGKIYLWQTDNGRQVACFEAQPEAVWGLVFTPKGDTLVSAAGRGVDAAIQFWDVESGRCLRSHKVHTGTIPTLAISADGEYLASGGADGQIHLWRRADGYGNSCVLVGLSRTIYGLAFSPDGRWLVSAGADCLLRVWDVESSVCLRVLGGHTDWIKSVAFSPSGHLVASAGIDRTVRLWDPAGGECVAVLEGHTGPTLSVLFIDDTTVASGSTDRSIRFWDVATGRCTRLIAAHDNNVMALALSPCGTRLASGSDDQAIRLWEVSTGRLLRTICGRINWLTSGTFSPDGRFVAAGGEYDLVLLWDRIADRQWRLVGHTGAVGAVVFSPDREHLASASADGTIRLWSLTSHRQVAIFEGHTAAIRGLAFSPDGALLVSCGYDSGVRVWQVSTGHLLRSGGEQLVDSVAVASDGKRLAVGLIDDRAEIWDLETFEKLQIFPGHREWAWQVAFSPDGRILASGSHDGTVRLWDSAEGKLLHTLEAHRGWVWRVAFSPDGQFLASAGTDAKAAVWEVATGRRLRAWQAHNSWVISVAFSPDGRILLTAGIDVMLKLWDRETGECLKSVQVERLYEGMNIAGATGLTPTQVATLKALGAVET

SEQ ID NO: 50491 - protein, 764 aa, Glycine max
  misc_feature (70)..(70): Xaa can be any naturally occurring amino acid
  unsure (1)..(764): unsure at all Xaa locations
MASHIVGYPRMGPKRELKFALESFWDGKSSAEDLQKVSSDLRASIWKQMADAGIKYIPSNTFSHYDQVLXDATATLGAVPPRYGWTGGEIGFDTYFSMARGNATVPAMEMTKWFDTNYHFIVPELGPDVNFTYASHKAVDEYKEAKALGVDTVPVLVGPVTYLLLSKPAKGVEKSFSLLSLLPKVLAVYKEVIADLKAAGASWIQFDEPTLVLDLESHKLQAFTDAYAELAPALSGLNVLVETYFADIPAEAYKTLTSLNGVTAYGFDLVRGTNTLDLIKGGFPSGKYLFAGVVDGRNIWANDLAASLTTLQGLEGIVGKDKLVVSTSSSLLHTAVDLVNETKLDDEIKSWLAFAAQKIVEVNALAKALSGHKDEAFFSGNAAALASRKSSPRVTNEAVQKAAAALKGSDHRRATNVSARLDSQQKKLNLPILPTTTIGSFPQTVELRRVRREFKANKISEEEYVKSIKEEIRKVVELQEELDIDVLVHGEPERNDMVEYFGEQLSGFAFTVNGWVQSYGSRCVKPPIIYGDVSRPKPMTVFWSSLAQSFTKRPMKGMLTGPVTILNWSFVRNDQPRSETTYQIALSIKDEVEDLEKAGITVIQIDEAALREGLPLRKSEQAHYLDWAVHAFRITNVGVQDTTQIHTHMCYSNFNDIIHSIIDMDADVITIENSRSDEKLLSVFREGVKYGAGIGPGVYDIHSPRIPPTEEIADRINKMLAVLEKNILWVNPDCGLKTRKYTEVKPALTNMVAAAKLIRNELAK

SEQ ID NO: 50492 - protein, 449 aa, Arabidopsis thaliana
MYIKAIMNRHRLLSAATDECNKKLGQACSSSLSPVHNFLNVQPEHRKTPFIRSQSPDSPGQLWPKNSSQSTFSRSSTFCTNLYLSSSSTSETQKHLGNSLPFLPDPSSYTHSASGVESARSPSIFTEDLGNQCDGGNSGSLLKDFLNLSGDACSDGDFHDFGCSNDSYCLSDQMELQFLSDELELAITDRAETPRLDEIYETPLASNPVTRLSPSQSCVPGAMSVDVVSSHPSPGSAANQKSRMRWTPELHESFVKAVIKLEGPEKATPKAVKKLMNVEGLTIYHVKSHLQKYRLAKYMPEKKEEKRTDNSEEKKLALSKSEADEKKKGAIQLTEALRMQMEVQKQLHEQLEVQRVLQLRIEEHAKYLEKMLEEQRKTGRWISSSSQTVLSPSDDSIPDSQNMSKTKASSPQPPLPAENKASETEDDKCESPQKRRRLENIAESEDPKR

SEQ ID NO: 50493 - protein, 332 aa, Gloeobacter violaceus PCC 7421
MTRARMYYDEDADLSVLDNKTIAIVGYGSQGHAHALNLKDSGIDVIVGLYEGSRSWARAENEGLAVYPTAEAAAKADLVMILLPDEVQREIYNRDIAPHLGTGKTLAFAHGFNIHFSQIVPSQEVDVLMVAPKGPGHLVRRVFTEGKGVPCLFAVEQDASGRARATAMAYARAIGGTRAGILETTFREEAETDLFGEQTVLCGGLTALIKAGFETLVEAGYQPELAYFECLHEVKLIVDLIVEGGLAKMRDSISNTAEFGDYTRGPRIVDERTKAEMKKILAEIQNGEFAKQWVLDSQANYASFKAMRRREAEHPIEEVGADLRKMMSWLRP

SEQ ID NO: 50494 - protein, 143 aa, Bacillus subtilis subsp. subtilis str. 168
MAYNKEEKIKSLNRMQYEVTQNNGTEPPFQNEYWDHKEEGLYVDIVSGKPLFTSKDKFDSQCGWPSFTKPIEEEVEEKLDTSHGMIRTEVRSRTADSHLGHVFNDGPGPNGLRYCINSAALRFVPKHKLKEEGYESYLHLFNK

SEQ ID NO: 50495 - protein, 194 aa, Brassica napus
  misc_feature (149)..(149): Xaa can be any naturally occurring amino acid
  misc_feature (152)..(152): Xaa can be any naturally occurring amino acid
  misc_feature (176)..(176): Xaa can be any naturally occurring amino acid
  misc_feature (179)..(179): Xaa can be any naturally occurring amino acid
  misc_feature (183)..(183): Xaa can be any naturally occurring amino acid
  unsure (1)..(194): unsure at all Xaa locations
FNSNFRSSRDRGSSSMDEYNETVKNQIQALVRVIKVARAYTEDNVPSLIQEGLYLGSVAAACNKNLLKSYNVTHILTVASSLRPAHPDDFLYKVVRVVDKEDTNLEVYFDECFDFIDEAKKLGGSVLVHCFVGKSRSVTVVVAYLMKKXGMXLAQALQHVQSIRPVASPNAGFIKXLQXLEKXLQGKQERIQQV

SEQ ID NO: 50496 - protein, 177 aa, Bacillus subtilis subsp. subtilis str. 168
MSEKKEIATFAGGCFWCMVKPFDEQPGIEKVVSGYTGGHTENPTYEEVCSETTGHREAVQITFHPDVFPYEKLLELFWQQIDPTDAGGQFADRGSSYRAAIFYHNDKQKELAEASKQRLAESGIFKDPIVTDILKAEPFYEAEGYHQHFYKKNPAHYQRYRTGSGRAGFISEHWGAK

SEQ ID NO: 50497 - protein, 616 aa, ASPERGILLUS NIDULANS FGSC A4
MAAHENPPEEGKPPLDAADMGITTEDLTAPKKAHADESLDDAAPRSSSSEITSSPQKDDAAAAPDTETGNPLDRVPSQAQKLGKKKIAAVMGALCTIISTALPTMAVDFNASESGYSWMASSFSLTNAAFVPLWGKISDIWGRKPILLLANLAFLIGSLICALAINLPMVLAGRAIQGAGAGGIITLANISVSDLFSVRERPMYYALFGSTWAIAGALGPLVGGAFTTSVTWRWCFYLNLPIGGFSFLVLFFFLKVDSPKTPLIAGLKTIDWSGTLLIVGATLMFLFGLQFGGVDYPWGSATVLCLIIFGLLTYALAMLNEWKIARYPVIPIRLFSNWHNVLVLLICFIHSLVFMGGAYYLPFYFQSVLLVTPILSGVYVLPQVLSLSVLSAMTGVIIKKTGRYRELIVAAFVFLTLGYGLLIDLKPYASWPRLIIYQLIAGIGTGPLFQAPLVALQANIHPSDMAAGTATFSFLRQVSAAISIVIGTVIYQNMLVDKASTIAAAVGPDTAQSLQNSFAANNHDLIRSLADDQKRVVLSAFTFALSRIWVFYTAIAGVGLIVSVFVRPVVLSKTHTVAKTGLAEQERARKEILEAQAKARASNNNNKEVPEGKEKV

SEQ ID NO: 50498 - protein, 450 aa, Methanosarcina acetivorans C2A
MEKEYDIIILGTGTAGRTLAGRAKSSGLKFAIIDSREYGGTCPLRGCDPKKVLAGASEATDWNNRLIGKGAGTEKPLEINWSSLIEFKRTFTRDYPRETEKMFADMGIDMYHGRANFENENTILVGKDKLKGKYIFLATGSKPRKLNIPGEEYLITSEEFMETEKFPEKIIFVGGGYVSFEFAHIALRAGAEVLILHRSEKPLRDFDSEMADLLVRASEAAGMRILTDRPVVAVEREGDRFLVRAEYKTETGSETQTFNADMVVNGAGRTPDIEDLRLENAGITAEKKGIIVDKHMQTSNPRVYAGGDCTAEGMQLTPVATLQGEIAAANIFDENRAEIDYTGIPSAVFTIPVLASVGITEAKVNDKHRVIFRDRSKWSTTRRAGLEFAASKIIVDETNDHIVGAHILGPNAEEAINIFATAMQLGLRASSIKKMAFTYPTTCSDIRYML

SEQ ID NO: 50499 - protein, 549 aa, Salmonella typhimurium LT2
MLNQKLNPTPSEDLTIDVDLLYETDPCELKLDEMIEAEPEPEMIEGLPASDALTPADRYLELFEHVQSTKLFPDSKTFPDCAPKMDPLDILIRYRKVRRHRDFDLRRFVENHFWLPETLSSEYVSNPENSLKEHIDQLWPILTREPQDHIPWSSLLALPQSYIVPGGRFSETYYWDSYFTMLGLAESGREDLLKCMADNFAWMIENYGHIPNGNRTYYLSRSQPPVFALMVELFEEDGVRGARRYLDHLKMEYAFWMDGAESLALNQAYRHVVRMPDGSLLNRYWDDRDTPRDESWLEDVETAKHSGRPPNEVYRDLRAGAASGWDYSSRWLRDAGRLASIRTTQFIPIDLNAFLYKLESAIANISALKGERDTEALFRQKASDRRAAVNHYLWDDENGCYRDYDWRREEMALFSAASIVPLYVGMANHEQADRLANVVRSRLLTPGGIMATEYETGEQWDKPNGWAPLQWMAIQGFKRYGDDMLGDEIAHNWLKTVNHFYQEHHKLIEKYHISGGTPREGGGGEYPLQDGFGWTNGVVRRLIGLYGEP

SEQ ID NO: 50500 - protein, 349 aa, Malus x domestica
MTVSPSLSVARNGRVLIVGATGFIGRFVAEASLAAGRPTYVLVRPGPLHPSKADTVKSFKHKGAIILHGLISDKTLMEKILREHEIETVISAVGGATILDQIALVEAIAAVGTVKRFLPSEFGHDVDRADPVEPGLTMYEEKRKVRRWVEKSGVAYTYICCNSIASWPYFDNTHPSEVLPPLDRFQIYGDGTVKAYFVDGTDIGKFTIKTVDDIRTINKNIHFRPPSNLYDINGLASLWEKKIGRTLPRITITENHLLALAAENRIPESIVASFTHDIFIKGCQVNFAVEGPRDVEVGTLYPGDSFRTLDECFNDFLLKLKDNLEPVHEENVSTKNAVVESRAVTPTCA

SEQ ID NO: 50501 - protein, 293 aa, Rhizobium sp. USDA 3353
  misc_feature (291)..(291): Xaa can be any naturally occurring amino acid
  unsure (1)..(293): unsure at all Xaa locations
RGKSQIKDYAEFPTLEQLPLWGFDGSSTQQAEGHSSDCVLKPVAVFPDPARTNGVLVMCEVMMPDGVTPHSSNKRATILDDEGAWFGFEQEYFFYKDGRPLGFPESGYPAPQGPYYTGVGYSNVGSVARQIVEEHLDQCLAAGINHEGINAEVAKGQWEFQIFGKGSKKAADQMWMARYLMQRLTEKYGIDIEYHCKPLGDTDWNGSGMHANFSTAYMREVGGKAYFEALMAAFDKNLMDHIAVYGPDNDKRLTGKHETAPWNKFSYGIADRGASIRVPHSFINNGYKGYXED

SEQ ID NO: 50502 - protein, 347 aa, Flaveria linearis
YIGLRQRRASGKEYAELMNEFMSAVKQNYGEKVLIQFEDFANHNAFDLLEKYRTTHLVFNDDIQGTASVVLAGLISALKLVGGSLADHKFLFLGAGEAGTGIAELIALEISKQTNAPLEETRKKIWLVDSKGLIVRSRLDSLQHFKKPWAHDHEPVNKFLDAVKAIKPTVLIGSSGAGQTFTKEVVEAMRSFNEKPIILALSNPTSQSECTAEQAYTWSEGRTIFASGSPFAPVEYNGKVYVSGQSNNAYIFPGFGLGLIISGAIRVHDEMLLAASEALAEQVTQEHFDNGLIYPPFTNIRKISAHIAAKVAAKAYELGLASRLPQPENLVAYAESCMYSPKYRNYR

SEQ ID NO: 50503 - protein, 294 aa, Rhizobium sp. USDA 3357
  misc_feature (82)..(82): Xaa can be any naturally occurring amino acid
  unsure (1)..(294): unsure at all Xaa locations
RGKTQIKDYAEFPTLEQLPLWGFDGSSTQQAEGHSSDCVLKPVAVFPDPARTNGVLVMCEVMMPDGVTPHSSNKRATILDDXGAWFGFEHEYFFYKDGRPLGFPESGYPAPQGPYYTGVGYSNVGSVARQIVEEHLDQCLAAGINHEGINAEVAKGQWEFQIFGKGSKKAADQMWMARYLMQRLTEKYGIDIEYHCKPLGDTDWNGSGMHANFSTAYMREVGGKAYFEALMAAFDKNLMDHIAVYGPDNDKRLTGKHETAPWNKFSYGIADRGASIRVPHSFINNGYKGYMEDR

SEQ ID NO: 50504 - protein, 268 aa, Bouteloua dimorpha
ASYAAAAMPALDVLPEKAHHGWESNGGAAVAPTPVPRRLDGKVAIVTGGARGIGEAIVRLFVKHGARVVIADIDAAAGDALAAALGPQVSCVRCDVSVEEDVKRAVEWAVARHGRLEVLCNNAGVLGRQTRAARSILSFDAGEFDRVLRVNALGAALGMKHAAQAMAPRRAGSIVSVASVAGVLGGLGPHAYTASKHAIVGLTKNAACELGAHGIRVNCVSPFGVATPMLVNAWRQGHAAAVPSDEEVEKMEEVVRGFATLKGPTLRP

SEQ ID NO: 50505 - protein, 338 aa, Ralstonia solanacearum
MKVFYDKDADLSLIKGKNVTIIGYGSQGHAHALNLNDSGVKVTVGLRKNGASWNKAVNAGLQVKEVAEAVKDADVVMILLPDEQIADVYKNEVHGNIKQGAALAFAHGFNVHYGAVIPRADLDVIMVAPKAPGHTVRGTYAQGGGVPHLIAVHQDKSGSARDIALSYATANGGGRAGIIETNFREETETDLFGEQAVLCGGTVELIKAGFETLVEAGYAPEMAYFECLHELKLIVDLIYEGGIGNMNYSISNNAEYGEYVTGPRVVTAETKQAMKQCLHDIQTGEYAKSFLLENKAGAPTLISRRRLTADHQIEQVGAKLRAMMPWIAKNKLVDQSKN

SEQ ID NO: 50506 - protein, 296 aa, Rhizobium sp. USDA 3584
RGKTQIKEFAEFPTLEQLPLWGFDGSSTQQAEGHSSDCVLKPVAVFPDPARTNGVLVMCEVMMPDGVTPHASNKRATILDDEGAWFGFEQEYFFYKDGRPLGFPESGYPAPQGPYYTGVGYSNVGSVARQIVEEHLDLCLAAGINHEGINAEVAKGQWEFQIFGKGSKKAADQMWMARYLLQRLTEKYGIDIEYHCKPLGDTDWNGSGMHANFSTAYMREVGGKAYFEALMAAFDKNLMDHIAVYGPDNDKRLTGKHETAPWNRFSYGIADRGASIRVPHSFIKSDYKGYLEDRRP

SEQ ID NO: 50507 - protein, 477 aa, Thiobacillus denitrificans ATCC 25259
MIRRTKIVATLGPACSDAKTLDRMMEAGLDVVRLNFSHGVAQDHIDRAELVRSLARTRGRAVGVLVDLQGPKIRIGKFKDNKIVLAKGDNFILDAECALGDQERVGLDYKELPSDVARGVTLLLDDGRIELWVEDVKGSEIHCKVVQGGVLSNNKGINRKGGGLSAAALTEKDIEDIKTAAALKADYLAVSFPRSGADMRQARELLRAAGGRSQLVAKIERTEAIENLEEILDASDAIMVARGDLGVEVGDAAVPALQKRMIRMAIARNKVVITATQMMESMITSPIPTRAEVSDVANAVLDGTDAVMLSAETAAGQYPVEAVQAMDRVCLEAEKEAETQFTRERLDHSFLRADEAIAMSAVFTSVHLNIKAIAALTESGNTCLWMSRLSTRVPIYALTPQVETRRKVTLFRGVYPINLKTATKERDVLLAEAEEELRRRGAVRDGDLILLTIGEPIGQSGGTNTMKIVRVGASKKP

SEQ ID NO: 50508 - protein, 268 aa, Bouteloua dimorpha
ASYAAAAMPALDVLPEKAHHGWESNGGAAVAPTPAPRRLDGKVAIVTGGARGIGEAIVRLFAKHGARVVIADIDAAAGDALAAALGPQVSCVRCDVSVEDDVKRAVEWAVARHGRLDVLCNNAGVLGRQTRAARSILSFDAGEFDRVLRVNALGAALGMKHAAQAMAPRRAGSIVSVASVAGVLGGLGPHAYTASKHAIVGLTKNAACELGAHGIRVNCVSPFGVATPMLVNAWRQGHADAVPSDEEVEKMEEVVRGFATLKGPTLRP

SEQ ID NO: 50509 - protein, 295 aa, Rhizobium sp. USDA 3876
RGKTQIKEFAEFPDLEQLPLWGFDGSSTQQAEGHSSDCVLKPVAVYPDPARTNGVLVMCEVMMPDGVTPHASNKRATILDDEGAWFGFEQEYFFYKDGRPLGFPESGYPAPQGPYYTGVGYSNVGSVARQIVEEHLDLCLAAGINHEGINAEVAKGQWEFQIFGKGSKKAADQMWMARYLMQRLTEKYGIDIEYHCKPLGDTDWNGSGMHANFSTAYMREVGGKAYFEALMAAFDKNLMDHIAVYGPDNDKRLTGKHETAPWNRFSYGIADRGASIRVPHSFIKSDYKGYLEDRL

SEQ ID NO: 50510 - protein, 268 aa, Bouteloua dimorpha
ASYAAAAMPALDVLPEKPHHGWESNGGAAVAPTPAPRRLDGKVAIVTGGARGIGEAIVRLFVKHGARVVIADIDAAAGDALAAALGPQVSCVRCDVSVEDDVKRAVEWAVARHGRLDVLCNNAGVLGRQTRAAKSILSFDAGEFDRVLRVNALGAALGMKHAAQAMAPRRAGSIVSVASVAGVLGGLGPHAYTASKHAIVGLTKNAACELGAHGIRVNCVSPFGVATPMLVNAWRQGHAAAVPSDEEVEKMEEVVRGFATLKGPTLRP

SEQ ID NO: 50511 - protein, 763 aa, Oryza sativa
  misc_feature (99)..(99): Xaa can be any naturally occurring amino acid
  unsure (1)..(763): unsure at all Xaa locations
MASHIVGYPRMGPKRELKFALESFWDGKSSAEDLEKVATDLRASIWKQMADAGIKYIPSNTFSYYDQVLDTTAMLGAVPERYSWTGGEIGFSTYFSMAXGNATVPAMEMTKWFDTNYHFIVPELGPNTKFSYSSHKAVNEYKEAKALGVDTVPVLVGPVSYLLLSKPAKGVEKSFALLSLLSSILPVYKEVIAELKAAGATWIQFDEPTLVLDLDSHQLAAFSAAYTELESALSGLNVLIETYFADIPAESYKTLTSLNSVTAYGFDLIRGSKTLDLVKSAGFPSGKYLFAGVVDGRNIWADDLAASLTTLESLEAIVGKDKLVVSTSCSLMHTAVDLVNETKLDNEIKSWLAFAAQKVVEVNALAKALAGQKDEAYFAANAAAQASRRSSPRVTNEEVQKAAAALRGSDHRRATNVSSRLDTQQKKLNLPVLPTTTIGSFPQTVELRRVRREYKAKKISEDEYVSAIKEEISKVVKIQEELDIDVLVHGEPERNDMVEYFGEQLSGFAFTANGWVQSYGSRCVKPPIIYGDVSRPNAMTVFWSKMAQSMTSRPMKGMLTGPVTILNWSFVRNDQPRFETCYQIALAIKKEVEDLEAGGIQVIQIDEAALREGLPLRKAEHAFYLDWAVHSFRITNCGVQDTTQIHTHMCYSNFNDIIHSIINMDADVITIENSRSDEKLLSVFREGVKYGAGIGPGVYDIHSPRIPSTEEIADRINKMLAVLDTNILWVNPDCGLKTRKYTEVKPALTNMVLAAKLIRTQAR

SEQ ID NO: 50512 - protein, 284 aa, Rhizobium sp. USDA 3883
  misc_feature (279)..(279): Xaa can be any naturally occurring amino acid
  unsure (1)..(284): unsure at all Xaa locations
RGKTQIKEFAEFPTLEQLPLWGFDGSSTQQAEGHSSDCVLKPVAVYPDPARTNGVLVMCEVMMPDGVTQHASNKRATILDDEGAWFGFEQEYFFYKDGRPLGFPESGYPAPQGPYYTGVGYSNVGSVARQIVEEHLDQCLAAGINHEGINAEVAKGQWEFQIFGKGSKKAADQMWMARYLMQRLTEKYGIDIEYHCKPLGDTDWNGSGMHANFSTSYMREVGGKAYFEALMAAFDKNLMDHIAVYGPDNDKRMTGKHETAPWNKFSYGIADRGASIRVXHSFIK

SEQ ID NO: 50513 - protein, 358 aa, Synechococcus elongatus PCC 6301
MVDSLQKPELEELRPGIKAPAKETILTPRFYTTDFEAMAKMDLSPNEDELRAILEEFRADYNRKHFVRTPEFDGSAADMDPETKKVFVEFLEQSCTSEFSGFLLYKELSRRIKNRNPLLAECFELMARDEARHAGFLNKSMSDFDLQLDLGFLTANKKYTYFKPAYIFYATYLSEKIGYWRYITIFRHLEQHPEYRIYPIFKFFENWCQDENRHGDFFDALMKAQPSTVRGFVAKLWCRFFLLAVFATMYIRDVQRKEFYEALGLDAREYDRHVIAKTNETSARVFPVVLDVDHPKFYDRLETCIANNNQLAAIEATSAPKPVKVLRKLPYYLSNGLQLLKLYLVKPLESDVYQPAVR

SEQ ID NO: 50514 - protein, 665 aa, Bacillus clausii KSM-K16
MTNKVEELAVNTIRTLSIDSIEKANSGHPGMPMGAAPMALNLWTKHMNHNPANPKWSNRDRFVLSAGHGSMLLYSLLHLSGYDVTLDDLKSFRQLGSRTPGHPEYGHTDGVEATTGPLGQGIAMAVGMAMAERHLAATYNTDKYPIVDHFTYAICGDGDLMEGVSQEAASLAGHLKLERLIVLYDSNDISLDGDLHESFSESVEDRFKAYGWHVVRVEDGTDMEEIHRAIEEAKRVDRPTLIEVKTVIGYGSPNKAASSASHGSPLGTEEVKLTKEAYKWTFEEDFYIPEEVKAYFAAVKEEGAAKEAEWNDLFAAYKAEYPELAAQYERAFSGELPEGFDQALPVYEHGTSLATRASSGEALNSLAAHTPELFGGSADLAGSNKTTLKGESNFSRDNYAGRNIWFGVREFAMGAALNGMALHGGLKVFGGTFFVFSDYLRPAIRLSALMGVPVTYVLTHDSVAVGEDGPTHEPVEHLAALRAMPGLSVVRPGDGNETAAAWKIALESSDRPTVLVLSRQNVDTLKGTDKKAYEGVKKGAYIVSEPQDKPEVVLLATGSEVPLAVKAQAALADEGIDASVVSMPSWDRFEEQPQEYKDAVIPRDVKARLAIEMGSSFGWAKYVGDEGDVLGIDTFGASGAGEAVIAEFGFTVDNVVSRAKALLKK

SEQ ID NO: 50515 - protein, 364 aa, Burkholderia plantarii
MPKSKRHEPQAESEKISRATQASMGRAGASKDDDDDTAESEREYEARESDAEESDGEREGRGGSESAPEPDDFRAVLQAELTADTIQHYLNRISVKPLLTVEEEQRYSRLAKAGEFEARQVMIERNLRLVVSIAKGYLNRGVPLLDLIEEGNLGLMHAIEKFDPTRGFRFSTYATWWIRQSIERAIMNQARTVRLPVHVIRELNQVLRAKRHLEKNSMSTGEAAERREAGIDDIAYLTGKTAEEVTDILALNEHTASLDAPLDLDPASSLLDLLPDDQSQSPDAEVQHRELETLTRAWLSRLSDKHRHVIERRFGLNHIEPATLEELADEMGLTRERVRQIQQEALVRLKRFFASNGVRKDAVL

SEQ ID NO: 50516 - protein, 625 aa, Pseudomonas syringae
MQSKTSRRTFVKGLTAMGVLGGLGLWRNPSWALSGPSQLNTLTGTDFDLSIGEMPVNITGKPRTAMVINGGLPGPLLRWKEGDTVTLRVRNNVRDHTSIHWHGIILPPNMDGVPGLSFAGIEPDGMYVYKIHVKQNGTYWYHSHSGFQEQAGVYGPLVIEAKDPEPFAYDRDYVVMLTDWTDEDPASLMRKLKKQSDYYNYNKRTVGDFIEDVHKQGWSATMADRKMWAEMKMNPTDLADVSGATYTYLLNGHAPNTNWTGVFRPGEKIRLRFINGSSMTYFDMRIPGLKMTVVASDGQYVKPVTVDELRIAVAETYDVIVEPTEQAYTLFAQSMDRTGFARGTLAVREGLLAPVPPLDPRPLVTMADMGMGGMDHGSMGDMGSMQGMEGMDHGAMGAGDKGMDSMSGAPMQGMDGGQTQGMDHSKMSGMDHGSMGDMAGMAGMSGMGDMPMQAHPATEKDNPLVDMQAMSPTPKLDDPGLGLRNNGRRVLTYSDLRSTFEDPDGREPGRTIELHLTGHMEKFAWSFNGVKFADAEPLRLKYGERVRVVLVNDTMMTHPIHLHGMWSDLEDENGNFMVRKHTIDMPPGSKRSYRVTADALGRWAYHCHLLFHMEMGMFREVRVEE

SEQ ID NO: 50517 - protein, 440 aa, Thermus thermophilus HB8
MGVMRVLHVAPEAYPLAKVGGLADVVGALPKALRPLGVEAHVLLPWHGGLEARRVGEVAFAFFGREERAPLGERVEGGVRFLLLGVEGFGRERVYGYPDDAERYLRFALAAKEVARGYDLVHAHDWTAALLALYAPTVYTIHNLAHQGLVDPGLFFSWTGLPWSLFHMEALEFYGRVNLMKGGIVFARRVTTVSPSYAEEIQTPEFGMGLDGVLRRHAGKLRGILNGLDTEVFDPGKDPYLPAPYTREDPSGKARAKEAFRERTGLRPPVLAYVGRLDYQKGLDLVLKALPRLLEMGFRLYVQGVGDGGLQEAFLRAEEENPEGVRFLPAYDEAMARLAYAGAEAVLVPSRFEPCGLVQMIASRYGTPPVARAVGGLKDTVEDGRGGVLFETYHPEGLLYGVLRLFRLGAEEMGLRAMEKDFSWEGPARAYREVYREALG

SEQ ID NO: 50518 - protein, 489 aa, Escherichia coli O157:H7 EDL933
  misc_feature (57)..(57): Xaa can be any naturally occurring amino acid
  unsure (1)..(489): unsure at all Xaa locations
MVSETKTTEAPGLRRELKARHLTMIAIGGSIGTGLFVASGATISQAGPGGALLSYMXIGLMVYFLMTSLGELAAYMPVSGSFATYGQNYVEEGFGFALGWNYWYNWAVTIAVDLVAAQLVMSWWFPDTPGWIWSALFLGVIFLLNYISVRGFGEAEYWFSLIKVTTVIVFIIVGVLMIIGIFKGAQPAGWSNWTIGEAPFAGGFAAMIGVAMIVGFSFQGTELIGIAAGESEDPGKNIPRAVRQVFWRILLFYVFAILIISLIIPYTDPSLLRNDVKDISVSPFTLVFQHAGLLSAAAVMNAVILTAVLSAGNSGMYASTRMLYTLACDGKAPRIFAKLSRGGVPRNALYATTVIAGLCFLTSMFGNQTVYLWLLNTSGMTGFIAWLGIAISHYRFRRGYVLQGHDINDLPYRSGFFPLGPIFAFILCLIITLGQNYEAFLKDTIDWGGVAATYIGIPLFLIIWFGYKLIKGTHFVRYSEMKFPQNDKK

SEQ ID NO: 50519 - protein, 397 aa, Xanthomonas oryzae pv. oryzae KACC10331
MFQENICNVAEPACKANLHCIMALSQSLPRAGSNRTRHWVFADHVISMRGGSKQRAARATSAPANLRDLVALGNNVCQPHPLSARAWQFGRAMAACVRPPVRLGPVFSTTGLPLTTSISPGACAGARLPRQIPFIIGNDACERFSFYGMRNILVQFLITWLLLQEISGPGREAEAKHILHSFMIGVHFFPLPGGWLADRFLGNYNTILWFSLVSCAAHACLALFEGSRDGFFLGLGLIALGAGGIKPLVASFVGDQFDQSNKHLAKLVFDAFYWIINFGALFASLLIAPALKSLGPAWAFGIPGILMLVATLVFWPGRKRYVLVPLPPKDPHAVGAAIERCGAQRDGDRAYRRYWAQRRGILDVLLRGFCVPGGPGLRPVRAPVSPGRQLPYCLRSA

SEQ ID NO: 50520 - protein, 515 aa, Shewanella sp. ANA-3
MTTPADAPKWPRQIPYIIASEACERFSFYGMRNILTPFLMTALLLSIPEDLRGAVAKDVFHSFVIGVYFFPLLGGWIADRFFGKYNTILWLSLLYCVGHAFLAIFEHSVQGFYTGLFLIALGSGGIKPLVSSFMGDQFDQSNKSLAQKAFDMFYFTINFGSFFASLSMPLLLKNFGAAVAFGIPGVLMFIATVFFWLGRKRYVHMPPEPKDPHGFLPVIRSALLTKAEGKANIGLVLALIGGVSAAYALVNIPTLGIVAGLCSAMVLLMGFVGFGASLQLERARGVHPDAAVDGVRSVLRILVLFALVTPFWSLFDQKASTWILQANDMVKPSWFEPAMMQALNPLLVMLLIPFNNFVLYPAIERMGVKLTALRKMGAGIAITGLSWIVVGTIQLMMDGGSALSIFWQILPYALLTFGEVLVSATGLEFAYSQAPKAMKGTIMSFWTLSVTVGNLWVLLANVSVKSPAVTEQIVQTGMSVTAFQMFFFAGFAILAAAIFALYARSYQMQDHYRQV

SEQ ID NO: 50521 - protein, 421 aa, Lotus corniculatus var. japonicus
MNHCVVLCIIVVGFFFFFFLSQFVMQIKREISIMKLVRHPYVVRLYEVLASRTKIYIILEFITGGELFDKIIRHGRLSEAESRRYFQQLIDGVDYCHSKGVYHRDLKPENLLLDSLGNIKISDFGLSALPEQGVSILRTTCGTPNYVAPEVLSHKGYNGAVADVWSCGVILYVLLVGYLPFDELDLTSLYSKIEKAEYSCPPGFPVGAKTLIHKILDPNPETRITIEQIRNDEWFQRGYVPVSLLEYEDVNLDDVNAVFDDAEEQRANQQCDHEDMGPLMLNAFDLIILSQGLNLAAIFDRGQDSMKYQTRFITQKPAKVVLSSMEVVAQSMGFKTHIRNYKMRVEGLSAKKTSHFSVMLEIFEVAPTFYMVDIQKAAGDAGEYLKFYKNFCGNLEDIIWKPPHESTKSKVSKTRSKRRSR

SEQ ID NO: 50522 - protein, 477 aa, Polaromonas sp. JS666
MPSRATKIVVTLGPASSDPVLLEKMIRAGVNVVRLNFSHGTAQDHVDRAKLVREAAQRAGREVAIMADLQGPKIRVGKFAEGKVRLEAGEKFILDASRTEPGDLKGVGLDYKELPRDVKAGDVLLLNDGLIVLTVEAVRGEEVHTIVKLGGDLSNNKGINKQGGGLTAPALTAKDMEDIKTAMSFRADYVAVSFPKNATDMEMARQLCDVAAAPYKHKPGLIAKIERAEAIPKLEEILRVSDAIMVARGDLAIEVGNAAVPALQKRMIKMARALDKVVITATQMMESMIVNPVPTRAEVSDVANAVLDGSDAVMLSAETAAGKYPLETVEEMAKICEEAEKAEYKELEADFTGKTFTRIDQSIAMGTLFTAHHLGAKAIVALTDSGSTPLWMSRHDIRVPIYALTPHLATQRRMALYRNVRPLLMDTSADRDTALAQAEGHLLRRNIVQSGDVYAITCGEPMGAPGGTNMLKICRVA

SEQ ID NO: 50523 - protein, 454 aa, Staphylococcus xylosus
PSGPLLMQDIYFLEQMAHFDREVIPERRMHAKGSGAFGTFTVTNDITKYTCASIFAEVGKQTEMFARFSTVAGERGAGDAERDIRGFALKFYTDEGNWDLVGNNTPVFFFRDPKLFPSLNHVVKRNPKTNMKDPQANWDFWTLLPEALHQITILMTDRGIPKGFRNMHGFGSHTYSMYNDKGERFWVKFHHRTQQGIENYSAEEAEQVMAKDRDSSQRDLFNNIEQGNFPKWKMYIQVMTEEQARNHKDNPFDLTKVWYKDEYPLIEVGEFELNRNPENYFQDVEQAAFAPTNIVPGLDFSPDKMLQGRLFSYGDTQRYRLGVNHWQIPVNQPKGVGMENICPFSRDGQMRILDNNQGASTHYYPNSNGAFEDQPQYKKPALDIQGQAYEYDFREDDDNYFEQPGKLFRLLSSEEQQILFNNTANEMSPVTDALKHRHIRHCYKADPAYGQGVA

SEQ ID NO: 50524 - protein, 443 aa, Staphylococcus xylosus
GPLLMQDIYFLEQMAHFDREVIPERRMHAKGSGAFGTFTVTNDITKYTCASIFAEVGKQTEMFARFSTVAGERGAGDAERDIRGFALKFYTDEGNWDLVGNNTPVFFFRDPKLFPSLNHVVKRNPKTNMKDPQANWDFWTLLPEALHQITILMTDRGIPKGFRNMHGFGSHTYSMYNDKGERFWVKFHHRTQQGIENYSAEKAEQVMAKDRDSSQRDLFNNIEQGNFPKWKMYIQVMTEEQARNHKDNPFDLTKVWYKDEYPLIEVGEFELNRNPENYFQDVEQAAFAPTNIVPGLDFSPDKMLQGRLFSYGDTQRYRLGVNHWQIPVNQPKGVGMENICPFSRDGQMRILDNNQGASTHYYPNSNGAFEDQPQYKKPALDIQGQAYEYDFREDDDNYFEQPGKLFRLLSSEEQQILFNNTANEMSPVTDALKHRHIRHCYKA

SEQ ID NO: 50525 - protein, 592 aa, Zea mays
MGLCHGKPTQIPEAEAGEDPHVASGAGDSGDGPTSPSAAAPTAKPGTPKQPKFPFYLPSPLPPSSYKGSPANSSVASTPARGGFKRPFPPPSPAKHIRALLARRHGSVKPNEASIPEGGEPELGLDKSFGFSKHFFAKYDLGEEVGRGHFGYTCSAKAKKGEHKGQDVAVKVIPKAKMTTAIAIEDVRREVRILSSLTGHSNLVQFYDAFEDEDNVYIVMELCKGGELLDRILARGGKYSEEDAKVVMVQILSVVSFCHLQGVVHRDLKPENFLFSSKDENSPLKVIDFGLSDFVKPDERLNDIVGSAYYVAPEVLHRSYATEADMWSIGVIAYILLCGSRPFWARTESGIFRAVLKAEPSFDEAPWPTLTAEAKDFVKRLLNKDYRKRMTAAQALSHPWIRNSQQVKVPLDMIIYKLMRAYISSSSLRKSALRALAKTLTTDQLFYVREQFELLGPNKNGYISLQNLKSALAKNSTDAMKDSRVVDFVNTVCALQYRKLDFEEFAASAISVYQMEALETWEQHARRAYELFDKEGNRPIVIEELASELGLGPSVPLHVVLQDWVRHADGKLSFLGFIKLLHGVSSRSIPKA

SEQ ID NO: 50526 - protein, 447 aa, Staphylococcus xylosus
PLLMQDIYFLEQMAHFDREVIPERRMHAKGSGAFGTFTVTNDITKYTCASIFAEVGKQTEMFARFSTVAGERGAGDAERDIRGFALKFYTDEGNWDLVGNNTPVFFFRDPKLFPSLNHVVKRNPKTNMKDPQANWDFWTLLPEALHQITILMTDRGIPKGFRNMHGFGSHTYSMYNDKGERFWVKFHHRTQQGIENYSAEEAEQVMAKDRDSSQRDLFNNIEQGNFPKWKMYIQVKTEEQARNHKDNPFDLTKVWYKDEYPLIEVGEFELNRNPENYFQDVEQAAFAPTNIVPGLDFSPDKMLQGRLFSYGDTQRYRLGVNHWQIPVNQPKGVGMENICPFSRDGQMRILDNNQGASTHYYPNSNGAFEDQPQYKKPALDIQGQAYEYDFREDDDNYFEQPGKLFRLLSSEEQQILFNNTANEMSPVTDALKHRHIRHCYKADPAHG

SEQ ID NO: 50527 - protein, 199 aa, Zea mays
MAIAGQCSSCYYTSPTLQLHRRHSHLPRQPQAARRARRPRLQVAAAADSGPIRAATDAEFFQPSDTRPIMLFDGVCNLCNGGVRFVREHDPNRFFRWVRNSNRSIRYVPLQSESGRKLLQRSGRSPDDISSVVLVEKDRSFIKSEAVLRIMEYLNLPFPQLAVFLKFVPLFLRDFAYDNVANNRYAMFGRAEAEACEIL

SEQ ID NO: 50528 - protein, 454 aa, Staphylococcus xylosus
GPLLMQDIYFLEQMAHFDREVIPERRMHAKGSGAFGTFTVTNDITKYTCASIFAEVGKQTEMFARFSTVAGERGAGDAERDIRGFALKFYTDEGNWDLVGNNTPVFFFRDPKLFPSLNHVVKRNPKTNMKDPQANWDFWTLLPEALHQITILMTDRGIPKGFRNMHGFGSHTYSMYNDKGERFWVKFHHRTQQGIENYSAEKAEQVMAKDKDSSQRDLFNNIEQGNFPKWKMYIQVMTEEQARNHKDNPFDLTKVWYKDEYPLIEVGEFELNRNPENYFQDVEQAAFAPTNIVPGLDFSPDKMLQGRLFSYGDTQRYRLGVNHWQIPVNQPKGVGMENICPFSRDGQMRILDNNQGASTHYYPNSNGAFEDQPQYKKPALDIQGQAYEYDFREDDDNYFEQPGKLFRLLSSEEQQILFNNTANEMSPVTDALKHRHIRHCYKADPAYGQGVAEA

SEQ ID NO: 50529 - protein, 500 aa, Oryza sativa
MVLTHVEAVEEGSEAAAAVFASRYVQDPVPRYELGERSISKDAAYQIVHDELLLDSSPRLNLASFVTTWMEPECDRLILEAINKNYADMDEYPVTTELQNRCVNIIARLFNAPVGDGEKAVGVGTVGSSEAIMLAGLAFKRRWQNRRKAAGKPHDKPNIVTGANVQVCWEKFARYFEVELKEVKLTEGCYVMDPVKAVDMVDENTICVAAILGSTLTGEFEDVRRLNDLLAAKNKRTGWDTPIHVDAASGGFIAPFIYPELEWDFRLPLVKSINVSGHKYGLVYAGVGWVIWRNKEDLPEELIFHINYLGADQPTFTLNFSKGSSQIIAQYYQFLRLGFEGYKSVMKNCMESARTLREGLEKTGRFTIISKEEGVPLVAFTFKDGAGAQAFRLSSGLRRYGWIVPAYTMPAALEHMTVVRVVVREDFGRPLAERFLSHVRMALDEMDLAARAPVPRVQLTIELGPARTAGEEASIRVVKSEAVPVRKSVPLVAGKTKGVC

SEQ ID NO: 50530 - protein, 245 aa, Gloeobacter violaceus PCC 7421
MVGNLDNRKEKILVVDDEASIRRILETRLSMIGYDVVTAADGEEALEVFSREHPDLVVLDVMMPKLDGYGVCQELRKDSDVPIIMLTALGDVADRITGLELGADDYVVKPFSPKELEARIRSVLRRADRDTASGIPSSGVIHVGDLKIDTNKRQVYKRGERIRLTGMEFSLLELVVSRSGEPFSRSEILQEVWGYTPERHVDTRVVDVHISRLRSKLEDDPSNPELILTARGTGYLFQRITEPKE

SEQ ID NO: 50531 - protein, 183 aa, Xanthomonas campestris pv. vesicatoria str. 85-10
MSQTLYDIPVTRIDGQPTTLADYRGKVLLVVNVASKCGLTPQYEGLEALYRDKRMQGLEVLGFPANDFNAQEPGSEAEIAQFCQLTYDVTFPMFAKIAVTGDQAHPLYRALTSTHPHTTGDGPMREKLAGYGIAPNPAPGVVWNFEKFLIGRDGKIVDRFAPDIPADDARLRAAVDAALATHA

SEQ ID NO: 50532 - protein, 414 aa, Sulfolobus tokodaii str. 7
MAISLAKKYQGKLEIMPKIPIRSYEDFALIYTPGVAELVKEIQKDENQSFELTSRWNTIAILTDGSRVLGLGNVGPIASLPVMEGKALLFKFLGGVDAFPLPIKVSDKEEFIQVAKAIEPAFGGINLEDIESPKCFFILEELQKTLNIPVWHDDQQGTAGAVLAGLINAIKITGKDKNSKIVLMGAGAANIATAQLLIKYGFNPKNMILIDKEGPLYAERGDVDSLMFKHPWKYELAIQTNSERVKTIEEAFKGADILIAASSPEVRIDKKLIRMMNKPIVFALANPIPEIYPNEAKEAGAVIVATGRSDFPNQVNNSLIFPAVFRGVLDSRAKKITDEMIIAAAEELAKYAEEKGLREDYIIPRMDEIEVYYRMAAAVATKAVELGYARLKLSYREFLESAKERILRARRLSL

SEQ ID NO: 50533 - protein, 234 aa, Arabidopsis thaliana
MGRGKIVIRRIDNSTSRQVTFSKRRSGLLKKAKELSILCDAEVGVIIFSSTGKLYDYASNSSMKTIIERYNRVKEEQHQLLNHASEIKFWQREVASLQQQLQHLQECHRKLVGEELSGMNANDLQNLEDQLVTSLKGVRLKKDQLMTNEIRELNRKGQIIQKENHELQNIVDIMRKENIKLQKKVHGRTNVIEGNSSVDPISNGTTTYAPPQLQLIQLQPAPREKSIRLGLQLS

SEQ ID NO: 50534 - protein, 309 aa, Salmonella typhimurium LT2
MSKKIAVIGECMIELSQKGADVQRGFGGDTLNTSVYIARQVDSAALAVHYVTALGTDSFSQQMLEAWQHENVDTSLTQRMENRLPGLYYIETDDTGERTFYYWRNEAAAKFWLESEQSAAICETLATFDYLYLSGISLAILSPTSRDKLLSLLRECRANGGKVIFDNNYRPRLWTSREETQQVYQKMLECTDIAFLTLDDEDALWGQQPVEEVIARTHAAGVQEVVVKRGADSCLVSIQGEALIDVPAVKLPKEKVIDTTAAGDSFSAGYLAVRLTGGSATDAAKRGHLTASTVIQYRGAIIPHDAMPQ

SEQ ID NO: 50535 - protein, 296 aa, Rhizobium sp. USDA 4004
RGKTQIKEFAEFPTLEQLPLWGFDGSSTQQAEGHSSDCVLKPVAVYPDPARTNGVLVMCEVMMPDGVTPHASNKRATILDNKGAWFGFEQEYFFYKDGRPLGFPESGYPAPQGPYYTGVGYSNVGSVARQIVEEHLDQCLAAGINHEGINAEVAKGQWEFQIFGKGSKKAADQMWMARYLMQRLTEKYGIDIEYHCKPLGDTDWNGSGMHANFSTAYMREVGGKGYFEALMAAFDKNLMDHIAVYGPDNDKRLTGKHETAPWNRFSYGIADRGASIRVPHSFINNGYKGYLEDRRP

SEQ ID NO: 50536 - protein, 297 aa, Rhizobium sp. USDA 4007
RGKTQIKEFAEFPTLEQLPLWGFDGSSTQQAEGHSSDCVLKPVAVYPDPARTNGVLVMCEVMMPDGVTPHASNKRATILDDEGAWFGFEQEYFFYKDGRPLGFPESGYPAPQGPYYTGVGYSNVGSVARQIVEEHLDQCLAAGINHEGINAEVAKGQWEFQIFGKGSKKAADQMWMARYLMQRLTEKYGIDIEYHCKPLGDTDWNGSGMHANFSTAYMREVGGKAYFEALMAAFDKNLMDHIAVYGPDNDKRLTGKHETAPWNKFSYGIADRGASIRVPHSFIKNDYKGYLEDRRPN

SEQ ID NO: 50537 - protein, 143 aa, Lactobacillus gasseri
MFNKEEALKKLNSEQYEVTQHAATEYPFTGKYDKFNQKGIYVDVVSGEPLFSSEDKYDAGCGWPSFTKPIEKLVYHRDQSHGMERTEVKSPLADSHLGHVFTDGPVDQGGLRYCINSAALKFIPYDKLEEEGYENYQKLFKGR

SEQ ID NO: 50538 - protein, 297 aa, Rhizobium sp. CIAM0128
RGKTQIKEFAEFPTLEQLPLWGFDGSSTMQAEGHSSDCVLKPVAVYPDPARTNGVLVMCEVMMPDGVTPHASNKRATILDDEGAWFGFEQEYFFYKDGRPLGFPESGYPAPQGPYYTGVGYSNVGSVARQIVEEHLDLCLAAGINHEGINAEVAKGQWEFQIFGKGSKKAADQMWMARYLMQRLTEKYGIDIEYHCKPLGDTDWNGSGMHANFSTAYMREVGGKAYFEALMAAFDKNLMDHIAVYGPDNDKRLTGKHETAPWNRFSYGIADRGASIRVPHSFIKSDYKGYLEDRRPN

SEQ ID NO: 50539 - protein, 414 aa, Thermus thermophilus HB8
MVKVEVLGMILAGGQGSRLYPLTAKRAKPAVPFGAKYRIIDFVLNNFVNSGIYAIYVLTQYKAQSLTEHIQRYWRFGAFLEDHFILLVPAQMYRYEELGPVWYRGTADAIYQNLHLVHNHAPKAVAVFGGDHIFKMNIRHMVEYHYDTRADITIAAYPVPVAEATRFGVLQVDEEWRITEFQEKPEEPKPIPGRPDMALASMGNYIFRTEALFELLEADARDETSAHDFGKDVIPRALREGYRVYAYDFHRNPIPGQEGPNLYWRDVGTLDAYYEASMDLVKVVPEFDLFNPEWPLRTANLFSPPAKFVHETGERVGRALNSLLAGGVIVSGGTVRESVLFRRVRVNSYSLVERSVLFDDVEVGRYCRIRNAIIDKNVKIPPHTEIGYDLELDRARGFTVTPEGVVVVPKGYRF

SEQ ID NO: 50540 - protein, 297 aa, Rhizobium sp. CIAM2026
  misc_feature (82)..(82): Xaa can be any naturally occurring amino acid
  misc_feature (91)..(91): Xaa can be any naturally occurring amino acid
  unsure (1)..(297): unsure at all Xaa locations
RGKTQVKEFAEFPTLEELPLWGFDGSSTMQAEGHSSDCVLKPVAAYPDPTRTNGVLVMCEVMMPDGVTPHASNKRATILDDXGAWFGFEQXYFFYKDGRPLGFPETGYPAPQGPYYTGVGYKNVGDVARQIVEDHLDLCLAAGINHEGINAEVAKGQWEFQIFGKGSKKAADQMWIARYLLLRLTEKYRIDIEFHCKPLGDTDWNGSGMHANFSTAYMREVGGKAYFESLMAQFDKNLMDHIAVYGPDNDKRLTGKHETAPWNKFSYGIADRGASIRVPHSFVKNDYKGYLEDRRPN

SEQ ID NO: 50541 - protein, 285 aa, Bordetella parapertussis 12822
MTTTDRIAAAFARVSEAGRAAALIPYIAAGDPSPQATVPLMHALVRAGADLVELGVPFSDPMADGPVVQRAAERAIAQGVGLRRVLELVADFRRDDSVTPVVLMGYANPIERMGQRAFAQAAQAAGVDGVLVVDYPPEEVDEFAAMLAEAGVAPIFLLAPTSTEARIEAIGRVARGYVYYVSLKGVTGAGSLDTDDVARKLALIRRHVHIPVGVGFGIRDAASAQRIAAHADAVVIGSKLIETMEQTGAQAGADQKNEAAIAAAQQWLHTIRLALDDVKRENAPA

SEQ ID NO: 50542 - protein, 502 aa, Secale cereale
MDGGGEHSEALKNYYLGKILGVGTFAKVIIAEHKHTRHKVAIKVLNRRQMRAPEMEEKAKREIKILRLFIDLIHPHIIRVYEVIVTPKDIFVVMEYCQNGDLLDYILEKRRLQEDEARRTFQQIISAVEYCHRNKVVHRDLKPENLLLDSKYNVKLADFGLSNVMHDGHFLKTSCGSLNYAAPEVISGKLYAGPEIDVWSCGVILYALLCGAVPFDDDNIPNLFKKIKGGTYILPIYLSDLVRDLISRMLIVDPMKRITIGEIRKHSWFQNRLPRYLAVPPPDMMQQAKMIDEDTLRDVVKLGYDKDHVCESLCNRLQNEETVAYYLLLDNRFRATSGYLGAHYQQPMESASPSTRSYLPGSNDSQGSGLRPYYRVERKWALGLQQSRAPPRAIMIEVLKALKELNVCWKKNGDCYNMKCRWCPGFPRVSDMLLDANHSFVDDCAIKDNGDANSRLPAVIKFEIQLYKTKDDKYLLDMQRVTGPQLLFLEFCAAFLTNLRVL

SEQ ID NO: 50543 - protein, 629 aa, Anabaena variabilis ATCC 29413
MTTQEQLHQWHELAQQLRIDSIRATTVAGSGHPTSSMSSADLMAVLLTNYLHYDFDNPHHPNNDRFILSKGHAAPLLYAMYKAAGVITDEELMSLRQMGSRLEGHPTPVLPWVDVATGSLGQGLPIGVGLGLAGKYLDQLPYNVWVLLGDSETAEGSVWEAFDHAAHYTLDNLIAIIDVNRLGQRGQTELGWNTQAYANRAKAFGWQAIEIDGHNLTEIDQAFSAAISINDRPTVIIARTKKGKGVASLEDLGGWHGKALKPDAAKQAIAELGGERHITIQVAQPEPGQPTLLHPQPLQLPTYKQGAEVATRRAYGDALKALGAAQPDVVALDAEVSNSTYTEDFAEAYPERYFEMYIAEQQMVAAAVGLQVRQYKPFAATFAAFLTRAYDFVRMAAISRANIKLVGSHAGVSIGQDGPSQMALEDLAAFRAVGNSTVLYPCDANQTAKLVEQMSDRQGIVYLRTTRENTPVIYGIEEEFSIGGSKVIRSSDQDQATIIGAGITLHEAIKAGDRLKNEGITVRIIDAYSVKPIDVQTLHQAANDTEGNLVVVEDHWQEGGLGAAVLDAFAGIGDLPSYDGPPLQLIKLAVHHMPGSGTPEELLHAANIDADAIVEAVKSQVRHLIGTRV

SEQ ID NO: 50544 - protein, 382 aa, Arabidopsis thaliana
MQIFVKTLTGKTITLEVESSDTIDNVKAKIQDKEGIPPDQQRLIFAGKQLEDGRTLADYNIQKESTLHLVLRLRGGMQIFVKTLTGKTITLEVESSDTIDNVKAKIQDKEGIPPDQQRLIFAGKQLEDGRTLADYNIQKESTLHLVLRLRGGMQIFVKTLTGKTITLEVESSDTIDNVKAKIQDKEGIPPDQQRLIFAGKQLEDGRTLADYNIQKESTLHLVLRLRGGMQIFVKTLTGKTITLEVESSDTIDNVKAKIQDKEGIPPDQQRLIFAGKQLEDGRTLADYNIQKESTLHLVLRLRGGMQIFVKTLTGKTITLEVESSDTIDNVKAKIQDKEGIPPDQQRLIFAGKQLEDGRTLADYNIQKESTLHLVLRLRGGSF

SEQ ID NO: 50545 - protein, 300 aa, Ustilago maydis 521
MAGTSRNVRVLVTGANGFVGSHIVSLLLSRGYVVNATVRRQTASEKLIATFACDRLHVFVIPDLTSEQALDEAIRGCKYVVHVASTVPSKEQASGIDIDSAISSIESVMNSAVAHASEKVVLTSSMSTHLDVKAPILNESTWYTPDRSSTKLMVQYMSSKTLVERRAWELSSTLKLPLTTVAPVYIGGPTIIHEQDPKSSVSNQDLLRCIEDESRSRIPGWIDVRTVAHLHLHAIEDHSLNGRRILACTHNRGVVPMDCSLMNSLLAKDSAALIDFDRTKRDLLEQIDAFNSGQTRRVVA

SEQ ID NO: 50546 - protein, 347 aa, Halobacterium sp. NRC-1
MQAVTFDGHGGTGVIDYRTVPEPDLGADDVLVDVRAGALNHLDVWTRRGMPGIDLSMPHVPGSDAAGVVSAVGASVTRFEPGDRVAVLAGVSCGQCEFCRHGEPALCASFRVLGEHVPGVHSERAAVPADNLIAVPEHVDWETAAAAPLVFQTAWRMLNTRADVSPGESVLVLGASGGVGHAAVQIAAHAGAEVFATASTEQKLQYAAELGADHVVNYTETNFADEIRARTGKRGVDVVVDHVGEATWDDSLRSLAKGGRLVTCGATTGGRPETNVQRVFWNQLDILGSTMATPGEADAALEHVWDGTFDVRIRDVLPMRETARAHELLENREGFGKVVVKPDNELD

SEQ ID NO: 50547 - protein, 461 aa, Lactobacillus plantarum WCFS1
MTKENSQPATEQLSRGLKSRHVQLIAIGGTIGTGLFLGAGQSIHLAGPAILIAYLVTGLVCFLLMRALGELLLSDLHTHSYIDFIKQYLGDKTGFVAGWTYWVCWITIAMAEITAAGEYMQFWWPRLPQWLPGLIILILLLGLNSINVSAFGETEFWFAIIKIAAILALIAVGIGMVLLSVKTPVGHASLTNLVSYGGFMPHGIKGLVLSFQMVLFSFIGIEMVGMTASETADPKTVIPKAINDIPVRIILFYVGSLFFLMCMYPWQYFSAAHSPFVQVFTNLGIRSAAAIINFVVLTAAASSCNSALFSTGRMLFSLTYDGKSKFAKRMGILSTRQVPRNALWFSTLVIGLSVILNLLMPGKVFSLIASVSTTCFIFIWGAIVVAHIKYRRQAGSQAKVKFRMPLFPLSDYFILVFLAFIAVVLCLKFETLIALLVSAVWVVGLYIVKIVSDRIRQRTHD

SEQ ID NO: 50548 - protein, 439 aa, Staphylococcus xylosus
FLEQMAHFDREVIPERRMHAKGSGAFGTFTVTNDITKYTCASIFAEVGKQTEMFARFSTVAGERGAGDAERDIRGFALKFYTDEGNWDLVGNNTPVFFFRDPKLFPSLNHVVKRNPKTNMKDPQANWDFWTLLPEALHQITILMTDRGIPKGFRNMHGFGSHTYSMYNDKGERFWVKFHHRTQQGIENYSAEEAEQVMAKDRDSSQRDLFNNIEQGNFPKWKMYIQVMTEEQARNHKDNPFDLTKVWYKDEYPLIEVGEFELNRNPENYFQDVEQAAFAPTNIVPGLDFSPDKMLQGRLFSYGDTQRYRLGVNHWQIPVNQPKGVGMENICPFSRDGQMRILDNNQGASTHYYPNSNGAFEDQPQYKKPALDIQGQAYEYDFREDDDNYFEQPGKLFRLLSSEEQQILFNNTANEMSPVTDALKHRHIRHCYKADPAHG

SEQ ID NO: 50549 - protein, 328 aa, Escherichia coli O157:H7 EDL933
MTRTNLITGFLGSGKTTSILHLLAHKDPNEKWAVLVNEFGEVGIDGALLADSGALLKEIPGGCMCCVNGLPMQVGLNTLLRQGKPDRLLIEPTGLGHPKQILDLLTAPVYEPWIDLRATLCILDPRLLLDEKSASNENFRDQLAAADIIVANKSDRATPESEQALQRWWQQNGGDRQLIHSEHGKVAGHLLDLPRHNLAELPASAAHSHQHVVKKGLAALSLPEHQRWRRSLNSGQGHQACGWIFDADTVFDTIGILEWARLAPVERVKGVLRIPEGLVRINRQGDDLHIETQNVAPPDSRIELISSSEADWNALQSALLKLRLATTA

SEQ ID NO: 50550 - protein, 437 aa, Desulfuromonas palmitatis
MSTLKETLRKKIEEHRPRTTRLVKEFGDVKLGDVTISQAIGGARGIKCLVTDISYLDPMEGIRFRGKTIPETFAALPKVPGSDYPYVEGFWWMLLTGDVPTMEQTLEVVEDWKKRSQIPAYVIDVLRALPRDSHPMAMFSAAIVAMQRDSVFAKNYAAGKFNKMTCWEDMYEDANELMAKLGPIAAYIYRMKYKGDTHIPADPKLDMGGNFAHMMGVDKPYDDVARMYFILHSDHESGNVSAHTTHLVASALSDAYYSYAAGINGLAGPLHGLANQEVLAWTQNFMDKLGGKVPTKEELEKALWDTLNSGQVIPGYGHAVLRKTDPRYTSQREFCLKTPGLKEYPLFQLVSMIFEVAPDVLLKHGKAKNPWPNVDAQSGVIQWYYGVTEYDFYTVLFGVGRALGCLANITWDRALGYAIERPKSVTTAMLEDAAGIK

SEQ ID NO: 50551 - protein, 448 aa, Staphylococcus xylosus
GPLLMQDIYFLEQMAHFDREVIPERRMHAKGSGAFGTFTVTNDITKYTCASIFAEVGKQTEMFARFSTVAGERGAGDAERDIRGFALKFYTDEGNWDLVGNNTPVFFFRDPKLFPSLNHVVKRNPKTNIKDPQANWDFWTLLPEALHQITILMTDRGIPKGFRNMHGFGSHTYSMYNDKGERFWVKFHHRTQQGIENYSAEQAEQVMAKDRDSSQRDLFNNIEQGNFPKWKMYIQVMTEEQARNHKDNPFDLTKVWYKDEYPLIEVGEFELNRNPENYFQDVEQAAFAPTNIVPGLDFSPDKMLQGRLFSYGDTQRYRLGVNHWQIPVNQPKGVGMENICPFSRDGQMRILDNNQGASTHYYPNSNGAFEDQPQYKKPALDIQGQAYEYDFREDDDNYFEQPGKLFRLLSSEEQQILFNNTANEMSPVTDALKHRHIRHCYKADPAYG

SEQ ID NO: 50552 - protein, 197 aa, Bradyrhizobium yuanmingense
PTPNLRGKTQIKFASFPTLEQLPLWGFDGSSTQQAEGHSSDCVLKPVAVFPDGARTNGVLVMCEVMMPDGKTPHASNKRATILDDAGAWFGFEQEYFFYKDGRPLGFPTSGYPAPQGPYYTGVGFSNVGDVARKIVEEHLDLCLAAGINHEGINAEVAKGQWEFQIFGKGSKTAADQMWMARYLMLRLTEKYGIDIE

SEQ ID NO: 50553 - protein, 450 aa, Staphylococcus xylosus
PRGPLLMQDIYFLEQMAHFDREVIPERRMHAKGSGAFGTFTVTNDITKYTCASIFAEVGKQTEMFARFSTVAGERGAGDAERDIRGFALKFYTDEGNWDLVGNNTPVFFFRDPKLFPSLNHVVKRNPKTNIKDPQANWDFWTLLPEALHQITILMTDRGIPKGFRNMHGFGSHTYSMYNDKGERFWVKFHHRTQQGIENYSAEKAEQVMAKDRDSSQRDLFNNIEQGNFPKWKMYIQVMTEEQARNHKDNPFDLTKVWYKDEYPLIEVGEFELNRNPENYFQDVEQAAFAPTNIVPGLDFSPDKMLQGRLFSYGDTQRYRLGVNHWQIPVNQPKGVGMENICPFSRDGQMRILDNNQGASTHYYPNSNGAFEDQPQYKKPALDIQGQAYEYDFREDDDNYFEQPGKLFRLLSSEEQQILFNNTANEMSPVTDALKHRHIRHCYKADPAYG

SEQ ID NO: 50554 - protein, 427 aa, Staphylococcus epidermidis ATCC 12228
MSFEKSIKAMEQAEKLMPGGVNSPVRAFKSVDTPAIFMDHGEGSKIYDIDGNEYIDYVLSWGPLILGHKNQQVISKLHEAVDKGTSFGASTLQENKLAELVIDRVPSIEKVRMVSSGTEATLDTLRLARGYTGRNKIIKFEGCYHGHSDSLLIKAGSGVATLGLPDSPGVPEGIAKNTITVPYNDLDSLKLAFEKYGDDIAGVIVEPVAGNMGVVPPVNGFLQGLRDITNEYGALLIFDEVMTGFRVGYNCAQGYFGVTPDLTCLGKVIGGGLPVGAFGGKKEIMDYIAPVGTIYQAGTLSGNPLAMTSGYETLSQLTPESYEYFNSLGDILEKGLKEVFAKHNVPITVNRAGSMIGYFLNEGPVTNFEEANKSDLKLFSNMYREMAKEGVFLPPSQFEGTFLSTAHTKDDIEKTIQAFDNALSRIV

SEQ ID NO: 50555 - protein, 426 aa, Staphylococcus xylosus
REVIPERRMHATGSGAFGTFTVTNDITKYTCASIFAEVGKQTEMFARFSTVAGERGAGDAERDIRGFALKFYTDEGNWDLVGNNTPVFFFRDPKLFPSLNHVVKRNPKTNMKDPQANWDFWTLLPEALHQITILMTDRGIPKGFRNMHGFGSHTYSMYNDKGERFWVKFHHRTQQGIENYSAEEAEQVMAKDRDSSQRDLFNNIEQGNFPKWKMYIQVMTEEQARNHKDNPFDLTKVWYKDEYPLIEVGEFELNRNPENYFQDVEQAAFAPTNIVPGLDFSPDKMLQGRLFSYGDTQRYRLGVNHWQIPVNQPKGVGMENICPFSRDGQMRILDNNQGASTHYYPNSNGAFEDQPQYKKPALDIQGQAYEYDFREDDDNYFEQPGKLFRLLSSEEQQILFNNTANEMSPVTDALKHCHIRQCYIAD

SEQ ID NO: 50556 - protein, 479 aa, Streptomyces avermitilis MA-4680
MLTTLLRDSRALAALAVPLILTQLAQVALTTTDTVMMGLLGTRELAAGGLALVIFNQLRTMGVGLVTSVGNQIAAAGARAEQAEQAEAERTAGRDDDGRGHAQEEAHEEMRGIVRASLALATLAGLAGAVLMILIGQALPWLGQDAAVADRAQTMLFALAPGLLPCLWFQAIRQFTVGMRRPQALLRITVASVAVNAGLNWVLIHGTWGLPRMGLTGVGVATSSVYVLTCIALYVSARKDGALAPLLALDVMKADPAVLRRLLRLGLPIAATYGSEAGFFSLTALMAGSFGPAALAAHTAVNQLVYIVFQVAVGLSHAASINVSRELAVGRYEDAGRIKNTALACAAAVMTVVGVVYLTLPELVLAPFLESGSGQALTIATHLLVVTAFLQFFDCAQNIGVGLLRGLDDTRSGFRITLIGYWAVGLPAAWLLAYALELDTLGIWLGLLTGLATTAVLLLRRYAQSLTTRSARHTPLTAT

SEQ ID NO: 50557 - protein, 612 aa, Arabidopsis thaliana
MGAALLCLLYFLSFLTLSLSSVNIDCGTSLPGVDNNNLKWVGDQDFITSGDSATISSTTVEKSLTTLRYFPTGDSNCYSNIPVTKGGKVLVRTMFYYGNYDGKSSTPSFSVVFEGKHRGTLSISSAFEPYLLELIFSPAGGETSVCFVRTSSSSNPFVSSIEVVDLDDGMYAELGPGEGLFYQQRRAYGATEFLRSDLQGRFWLPSEINILVTGIQSTAVSIDTSGASNKPPESVLRNSWTGEGLSLVDPTLPSAGVPVYLAMYFSEPLESSLRSFNIFFGGKQVGRGPVVPLFGKATQVVVRDVVASSSTLLTLWSTSSALLPPMINAAELYVISKGTSESTGGNETGSGSGSGSGGSGGGGSGSSGSGSGGTSKGGTGGSNEVSPGGSTNGKSSKLPIILGVVSPVAFVLVAYVFIAIILANRRKVRLQALAMPTFEESSSKTKQNRANRVSETMSLVPTFFGGRRTNVFDPFSLDVWDPFEGFLTPGLTNAPAKDVAAFTNAKVDWRETPEAHVFKADVPGLKKEEVKVEVEDGNILQISGERSSENEEKSDTWHRVERSSGKFMRRFRLPENAKVEEVKASMENGVLSVTVPKVQESKPEVKSVDISG

SEQ ID NO: 50558 - protein, 465 aa, Staphylococcus xylosus
ENSMTAGPRGPLLMQDIYFLEQMAHFDREVIPERRMHAKGSGAFGTFTVTNDITKYTCASIFAEIGKQTEMFARFSTVAGERGAGDAERDIRGFALKFYTEEGNWDLVGNNTPVFFFRDPKLFPSLNHVVKRNPKTNMKDPQANWDFWTLLPEALHQITILMTDRGIPKGFRNMHGFGSHTYSMYNDKGERFWVKFHHRTQQGIENYTAEEAEQVIAKDRDSSQRDLFNTIEQGNFPKWKMYIQVMTEEQARNHKDNPFDLTKVWYKDEYPLIEVGEFELNRNPENYFQDVEQRAFAPTNIVPGLDFSPDKMLQGRLFSYGDTQRYRLGVNHWQIPVNQPKGVGMENICPFSRDGQMRILDNNQGASTHYYPNSNGAFEDQPQYKKPALDIQGQAYEYDFREDDDNYFEQPGKLFRLLSYEEQQTLFKNTANEMSPVTDALKHRHIRHCYKADPAYGQGVAEAMG

SEQ ID NO: 50559 - protein, 206 aa, Xanthomonas campestris pv. vesicatoria str. 85-10
MLEIYGKPSSINVRKVLWLCDELGLDYTLHAYGSGFASVQTPEFRALNPNALVPVIRAGELVLWESNTICRYLAAHSQRDDLLPAAPAARALVEQWMDWQATELNTAWRYAFMATVRGSAAHTDAQAIAASVEQWNRHMAILDAQLQRGGPFVLGACFTLADIVLGVSTQRWVASPIAHAALPAVAAYYAHLQTRAGFQRHGCTAP

SEQ ID NO: 50560 - protein, 542 aa, Solibacter usitatus Ellin6076
MAKQIVYSEASRQAILRGVNQLADAVKVTLGPKGRNVVLEKKFGGPTITKDGVTVAKEIELKDPLENMGAQMVREVASKTSDVAGDGTTTATILAQSIYREGVKAVAAGANPMALKRGIDKAVELATEEVKKLSKPVSGDMIAQVGTISANSDKTIGNIIADAMKKVGKDGVITVEESKTMVTELDTVEGMQFDRGYLSPYFVSDAERMEAVLEDPYILIHEKKISNMKDLLPLLEQIARSGKPLLIIAEEVEGEALATLVVNKLRGTLNACAVKAPGFGDRRKAMLEDIGILTGGKPIMEDIGVKLEGVRLEDLGRAKRVTVDKDNTTIVDGAGNPKGIEGRIKQLRAQIDETTSDYDREKLQERLAKLAGGVAVIKVGAATETEMKEKKARVEDALHATRAAVEEGIVPGGGVALLRAAKALATFKVDGDEQIGVSIVKRACEEPLRQIVSNSGTEGAIVVDKVRENANNNYGYNAATDTYEDLVAAGVIDPTKVTRSALQHAASIAGLMLTTEAMIAEIPEKKSAPAGGPGGHGPEMDY

SEQ ID NO: 50561 - protein, 346 aa, Staphylococcus aureus subsp. aureus N315
MARKLHRELNNRHIQLIAIGGAIGTGLFLGSGQTISLTGPSLLFTYMIIGVVLFAFMRALGELLLSNTRFNSFVDIANEYLGPFGGFVIGWTYWLCWIVSSMSDLTAMGQYFAFWYPQVPNWITVLFIVLILISFNLLGARLFGELEFWFSIIKVVTIIAMVIVGLVLIFFSFKTHYGHASFTNLISHGGMFPGGTFGFLMSFQIAVYSFIGIELIGVTAGETKDPEKTLPKAINNVPIRILLFYIGGLLVIMSVIPWNDIDPNSSPFVKLFTLIGVPFAAGVVNFVVLTAAASATNSGIYSNSRILFGLSQQGLGPKVLNWRALFINVSFINCITYSSLVKLHFP

SEQ ID NO: 50562 - protein, 160 aa, Bacillus subtilis subsp. subtilis str. 168
MSIYHMKVRTITGKDMTLQPFAGKVLMIVNTASKCGFTSQLKQLQELYDTYQQEGLEILGFPCNQFMNQEPGEEADIQEFCETNYGVTFPMFSKVDVNGKNAHPLFVYLTEHAKGMLGTKAIKWNFTKFIVDRNGEIVGRYSPNTNPKELEDDIVKLLEQ

SEQ ID NO: 50563 - protein, 450 aa, Leuconostoc mesenteroides subsp. mesenteroides ATCC 8293
MDDKHKGQGLPNLPLSTIWMLSFGFLGVQMAFSLQSSQMGRIFQTLGADPTKLGFFFILPPLAGLFVQPLVGYFSDRTWTKRFGRRMPYLLVGALVSVIVMFLLPNSGSFGFSTTAALWFGAITILFMDLSSNVAMQPFKMVVGDMVNEDQKSYAYSIQSFLSNTGSVLATIFPFLLTAIGVANTADKGQVPASVIISFYVGAVVLVVFSLVAVFNVKEYDDATYELYHGYALNTPNDNDGGFLTLLKRAPKTFWMVTVTQFFCWMAFQYLWTYGTGAVADNVFHATDPTTAGYQNGGNWFGILSAVYAIAAVLWSLVLSKIPAEKNKFGYALSLLLGSTGFISVFFIHSQYLLIASFILIGISWAGMMAYPFIMVTNALNGDHMGTYLGLFNGSICLPQIVASVASFVVFPALGSHFPSMILVSGVLMLLGAVSVGFIKEIHSNPVNAH

SEQ ID NO: 50564 - protein, 336 aa, ASPERGILLUS NIDULANS FGSC A4
MRPILLAGHERSLNQIKFNRDGDLLFSVAKDKIVCAWWSANGERLGTYSGHLGAIWTVDVSPNTVLLATGSADNSVRLWNVKTGECVKVWEFPTAVKRVEFSPDGSKVLAVTEKRMGFLGTIAVLDINYDGDFTNQAEEPSLRITCTESKATVAGWSYLGKYIIAGHEDGSVSQYDAKTGEQLENVQAHEFDHQINDLQFSPDRTHFLTASKDKSAKLMSSRNLAILKTYVADTPLNSAAITPKKEYVILGGGQAAMDVTTTSARQGKFEARFYHKVFEDEIGRVKGHFGPLNTIHVHPAGTAYASGGEDGYVRVHHFDKPYFDFMYEVEREQLRR

SEQ ID NO: 50565 - protein, 296 aa, Rhizobium sp. CIAM2209
  misc_feature (236)..(236): Xaa can be any naturally occurring amino acid
  unsure (1)..(296): unsure at all Xaa locations
RGKTQIKDYAEFPTLEQLPLWGFDGSSTQQAEGHSSDCVLKPVAVFPDPARTNGVLVMCEVMMPDGVTPHSSNKRATILDDEGAWFGFEQEYFFYKDGRPLGFPESGYPAPQGPYYTGVGYSNVGSVARQIVEEHLDQCLAAGINHEGINAEVAKGQWEFQIFGKGSKKAADQMWMARYLMQRLTEKYGIDIEYHCKPLGDTDWNGSGMHANFSTAYMREVGGKAYFEALMAAFDXNLMDHIAVYGPDNDKRLTGKHETAPWNKFSYGIADRGASIRVPHSFVNNGYKGYLEDRRP

SEQ ID NO: 50566 - protein, 335 aa, Anabaena variabilis ATCC 29413
MTSINKTQKKGKSLPPKLIIGLGKFVWTTLWQIMMSKLAPRNQSGEYIRPASQFRNSVKTGGDSPYQPAAGRYTLYVGLGCPWAHRTLVVRALKGLEDAISVSIVVPSPDSGGWVFNTPEEGCQTLAELYALAEPGYSGRSTVPVLWDKETKTIVNNESADIIVMLNSEFNEFAKNPTLNLYPEELKQKIDWWNGKIYANVNNGVYRCGFAQTQEAYDKACDELFTTLDEIEVALANSRYLCGGQVTLADVRLFTTLFRFDIVYYGLFKCNRRRIQDYKNLGAYLRELYQLEGVASTCDLESIKRDYYGNLFPLNPGGIIPSGPDMAYLGLTQVS

SEQ ID NO: 50567 - protein, 297 aa, Oenococcus oeni PSU-1
MEIKANKLTDTYTLNNNVQIPVIGFGTWQSADGEEAYNAVKWALEAGYRHIDTAAAYGNEESVGQAIKDSGVKREDLFVTTKLWNYQRDNYENSLRGFHDSITRLGLDYVDLYLIHWPEPIEYRDHWQSLNADSWRAMEKIYKDGKTRAIGVSNFREKHIDELMKTAEIAPMVNQIFLNPGDQEKDLVTYNKNHNILTEAYSPLGTGNLLDNPELKKLADKHGVDVAQILIRWNLEKGYLPLPKSTHQKYIESNKKVFSFQLDYDDHKTLDALDGQGKQHTDPHEHNFQKVVPFLNN

SEQ ID NO: 50568 - protein, 924 aa, Lactobacillus gasseri
MLNLSQKGGNFLMSIKKLENSSDHAMVAEEVKILTNLLNESTRQLSGDVVFNKIQDLIKISAQKDYDALEKQIASLTNQEMMVVARYFATLPLLVNISEDVELASEVNLLNNTDQDYLGKLEDTIDLVAQKENANEILKHVNVVPVLTAHPTQVQRKTVLELTDQIHNLLRNYREVKNGTINQAEWTEKLRAYIEILMQTDIIRSHKLQVSNEITNVLAYYPKALIPAITKFTARYQELAKKYNLDLKGATPITMGMWIGGDRDGNPYVTADTLKLSASLQSQVIFEYYIKKLNKLYRTISMSTSYMKTSTAVEKLSALSNDDSPFRTNEPYRRAFYYIESRLLHTEYQLLGTVDKNSFVKRRDLENLDKIPVYNNPQAFKADLITIKESLEQDHDQAVIRSFFTELLEAINIFGFHLATIDMRQDSSVNEACVAELLKSAGICDNYSELPEKEKVQVLLKELNDDPRNLHANNKPKSDLLQKELKIYKTARELKDRIGEDVIKQHIISHTESVSDLLEQAIMLKEYDLLDNQGARIQVVPLFETVEDLENSREIMKEFLNLDIVKKWLASQNDYQEIMLGYSDSNKDGGYLASCWNLYKAQKDLTAMGKKLGVNITFMHGRGGTVGRGGGPSYEAITAQPFGSINDRIRMTEQGEIIQNKYGNQDTAYYNLEMLASATIDRIVSKQIVSEDDIGGFRDSMDKIVLDSNKVYRKLVFETPAFLDYFLQATPIKQISNLNIGSRPAARKKITDFSGLRAIPWVFSWSQSRIMFPGWYGVGSAFKHFIDADSHNLETLQKMYQGWPFFHSLLSNVDMVLSKSNMDIAKQYADLCEDEDTKQVFDTIYQEWKLTKEVILQIEGNKELLADNPSLQMSLNYRMPYFNILNYIQIEMIKRDRVADIAGVYESILPITINGVTSGLRNSG

SEQ ID NO: 50569 - protein, 294 aa, Rhizobium sp. USDA 4003
RGKTQIKEFAEFPDLEQLPLWGFDGSSTQQAEGHSSDCVLKPVAVYPDPARTNGVLVMCEVMMPDGVTPHASNKRATILDDEGAWFGFEQEYFFYKDGRPLGFPESGYPAPQGPYYTGVGYSNVGSVARQIVEEHLDLCLAAGINHEGINAEVAKGQWEFQIFGKGSKKAADQMWMARYLMQRLTEKYGIDIEYHCKPLGDTDWNGSGMHANFSTAYMREVGGKAYFEALMAAFDKNLMDHIAVYGPDNDKRLTGKHETAPWNRFSYGIADRGASIRVPHSFIKSDYKGYLEDR

SEQ ID NO: 50570 - protein, 497 aa, Arabidopsis thaliana
METKTLIFSILFVVLSLIYLIGKLKRKPNLPPSPAWSLPVIGHLRLLKPPIHRTFLSLSQSLNNAPIFSLRLGNRLVFVNSSHSIAEECFTKNDVVLANRPNFILAKHVAYDYTTMIAASYGDHWRNLRRIGSVEIFSNHRLNSFLSIRKDEIRRLVFRLSRNFSQEFVKVDMKSMLSDLTFNNILRMVAGKRYYGDGVEDDPEAKRVRQLIADVVACAGAGNAVDYLPVLRLVSDYETRVKKLAGRLDEFLQGLVDEKREAKEKGNTMIDHLLTLQESQPDYFTDRIIKGNMLALILAGTDTSAVTLEWALSNVLNHPDVLNKARDEIDRKIGLDRLMDESDISNLPYLQNIVSETLRLYPAAPMLLPHVASEDCKVAGYDMPRGTILLTNVWAIHRDPQLWDDPMSFKPERFEKEGEAQKLMPFGLGRRACPGSGLAHRLINLTLGSLIQCLEWEKIGEEVDMSEGKGVTMPKAKPLEAMCRARPSVVKIFNESV

SEQ ID NO: 50571 - protein, 138 aa, Cryptococcus neoformans var. neoformans JEC21
MARTKQTARKSTGGKAPRKQLATKAARKQAPSQVSGGVKKPHRYRPGTVALREIRRYQKSTELLIRKLPFQRLVREIAQDFKTDLRFQSSAIGALQEASEAYLVSLFEDTNLAAIHAKRVTIQPKDLQLARRLRGERS

SEQ ID NO: 50572 - protein, 294 aa, Rhizobium sp. USDA 2061
RGKTQIKEFDAFPTLEQLPLWGFDGSSTQQAEGRSSDCVLKPVAVYPDPVRTNGALVMCEVMMPDGKTPHPSNTRATVLDDESAWFGFEQEYFFYKNGRPLGFPEQGYPAPQGPYYTGVGYKNVGDIARRIVEEHLDICLAAGINHEGINAEVAKGQWEFQVFGKGSKKAADEVWLARYLLLRLTEKYGIDVEFHCKPLGDTDWNGSGMHANFSTAYMREVGGKDYFEALMAAFEKNLHDHINVYGPDNHLRLTGKHETAPWDKFSYGVADRGASIRVPHSFVNNGYRGYVEDR

SEQ ID NO: 50573 - protein, 296 aa, Rhizobium sp. 2M164
RGKTQIKEFDEFPTLEQLPLWGFDGSSTQQAEGRSSDCVLKPVAIYPDPARTNGALVMCEVMMPDGVTPHASNARATILDDEHAWFGFEQEYFFYQNGRPLGFPEQGYPAPQGPYYTGVGYSNVGDVAREIVEEHLDLCLAAGINHEGINAEVAKGQWEFQIFGKGSKKAADQIWMARYLLQRLTEKYGIDIEYHCKPLGDTDWNGSGMHCNFSTKFLREVGGKEYFEALMAQFDKNLMDHIAVYGPDNDKRLTGKHETAPWNKFSYGVADRGASIRVPHSFIKKDYKGYLEDRRP

SEQ ID NO: 50574 - protein, 513 aa, Brassica oleracea
MGAFETENTAKDAAALETQSSLEEFNQPSPLRKIISVSSIAAGVQFGWALQLSLLTPYVQLLGIPHKWSSLIWLCGPVSGMIVQPIVGFHSDRCTSRFGRRRPFIAAGAAMVAVAVFLIGYAADIGYKMGDKLEQTPRVRAIGIFALGFWILDVANNTLQGPCRAFLADLAAGDAKRTRVANAFFSFFMAVGNVLGYAAGSFTNLHKMFPFAMTNACDLYCANLKSCFFLSITLLLIVTVTSLWYVKDKQWSPPPVAADEEKKSVPFFGEIFGAFKVMERPMWMLLIVTALNWIAWFPFLLFDTDWMGREVYGGDSEGDARLKQIYNKGVQSGALGLMFNSIVLGFMSLGVEWIGKKVGGAKRLWGIVNFILAIGLAMTVLVTKLAADYRKVAGPYAGPSPGIRAGALSLFAVLGIPLAITFSIPFALASIFSSSSGAGQGLSLGVLNLAIVIPQMIVSLGGGPFDALFGGGNLPAFIVGAIAAAISGVLAITVLPSPPPDAPALKTGAMGFH

SEQ ID NO: 50575 - protein, 296 aa, Rhizobium sp. USDA 3620
  misc_feature (82)..(82): Xaa can be any naturally occurring amino acid
  misc_feature (291)..(291): Xaa can be any naturally occurring amino acid
  misc_feature (294)..(294): Xaa can be any naturally occurring amino acid
  unsure (1)..(296): unsure at all Xaa locations
RGKTQIKEYAEFPTLDQLPLWGFDGSSTMQAEGHSSDCVLKPVAIYPDPARTNGVLVMCEVMMPDGVTPHASNKRATILDDXGAWFGFEQEYFFYKDGRPLGFPESGYPAPQGPYYTGVGYSNVGSVARQIVEEHLDLCLAAGINHEGINAEVAKGQWEFQIFGKGSKKAADQMWMARYLLQRLTEKYGIDIEYHCKPLGDTDWNGSGMHANFSTAHMREVGGKAYFEALMAAFDKNLMDHIAVYGPDNDKRLTGKHETAPWNKFSYGIADRGASIRVPHSFIKNDYKGYXEDXRP

SEQ ID NO: 50576 - protein, 463 aa, Fragaria x ananassa
MASNQAGGHVAVLAFPFSTHAAPLLNIVCRLAAAAPSTLFSFFNTKQSNSSILASDTSVLRYTNVCVCEVADGVPEGYVFVGKPQEDIELFMKAAPDNFRKCLEASVAESGREVSCLVTDSFFWFGAHMADDMGGVPWVPFWTAGPASLSAHVHTDLIRNTTSGDCHDEKETITVIAGMSKVRPQDLPEGIIFGNLESLFSRMLHQMGLMLPLATAVFINSFEELDPVITNDLKSKFKRFLNVGPLDLLEPTASAATTTPQTAEAVAGDGCLSWLDKQKAASVVYVSFGSVTRPSPEELMALAEALEASRVPFLWSLRDNLKNPQLDEFLSKGKLNGMVVPWAPQPTGPGAWFSWSFVTHCGWNSVLESVAGGVPLICRPFFGDQKLNARMVEDVWKIGLRLEGGVFTKNGMLKSLDMLLSQDKGTKMKNKIHTLKQLAQQAVEPKGSSTRNFESLLEMATTN

SEQ ID NO: 50577 - protein, 152 aa, Candida glabrata CBS138
MQIFVKTLTGKTITLEVESSDTIDNVKSKIQDKEGIPPDQQRLIFAGKQLEDGRTLSDYNIQKESTLHLVLRLRGGGKKRKKKVYTTPKKIKHKHKKVKLAVLSYYKVDGEGTVTKLRKECSNPTCGAGVFLADHKTRLYCGKCHSVYKVDA

SEQ ID NO: 50578 - protein, 553 aa, Halobacterium sp. NRC-1
MPTETEYDPSLGSKFVFVTGGVMSGLGKGITAASLGRLLSNAGFDVTAVKIDPYLNVDAGTMNPYQHGEVYVLDDGGEVDLDLGNYERFLDEDMTSDHNVTTGKVYQDVIERERSGDYLGKTVQIIPHVTDDIKRRVREAAEGSDVCLVEVGGTVGDIEGMPFLEALRQFSHEQDDEDILFTHVTLVPYSKNGEQKTKPTQHSVKELRSIGLQPDILVGRCEDRLDPDVREKIALFCDVPMDAVFSNPDVEDIYHVPLTVEEEGLDQYVMEQFDMVEDALPAAQRSTEWRDLVTRERTGEVDIALVGKYALEDAYMSIHEALKHASLEAGVEVNVLWVDSEKMHDHHERRIADADGIVVAGGFGSRGTAGKIDAIQHAREHDVPFLGLCLGFQLAVVEYARNVLGMTGAHSAEIDEDTEYPVIDLLPEQYDLEDLGGTMRLGAHETAIEPGTLAHDLYGATSCTERHRHRYEVNPEYIDDLTADGLTFSGEAGNRMEIVEHDDHPFFFGTQFHPEYRSRPTRASPPFVGLLDAVLERADVAPAGSDADVEVTN

SEQ ID NO: 50579 - protein, 458 aa, Escherichia coli K12
MKNASTVSEDTASNQEPTLHRGLHNRHIQLIALGGAIGTGLFLGIGPAIQMAGPAVLLGYGVAGIIAFLIMRQLGEMVVEEPVSGSFAHFAYKYWGPFAGFLSGWNYWVMFVLVGMAELTAAGIYMQYWFPDVPTWIWAAAFFIIINAVNLVNVRLYGETEFWFALIKVLAIIGMIGFGLWLLFSGHGGEKASIDNLWRYGGFFATGWNGLILSLAVIMFSFGGLELIGITAAEARDPEKSIPKAVNQVVYRILLFYIGSLVVLLALYPWVEVKSNSSPFVMIFHNLDSNVVASALNFVILVASLSVYNSGVYSNSRMLFGLSVQGNAPKFLTRVSRRGVPINSLMLSGAITSLVVLINYLLPQKAFGLLMALVVATLLLNWIMICLAHLRFRAAMRRQGRETQFKALLYPFGNYLCIAFLGMILLLMCTMDDMRLSAILLPVWIVFLFMAFKTLRRK

SEQ ID NO: 50580 - protein, 194 aa, Vigna radiata var. radiata
MAKEGLGLEITELRLGLPDAEHVAVANKNGEKKNKRVFSEIDDVGDENSSSGGGGDRKMENKNQVVGWPPVCSYRKKNSVNEASKMYVKVSMDGAPFLRKMDLGMHKGYSDLAFALEKLFGCYGMVEALKNVENGEHVPIYEDKDGDWMLVGDVPWEMFMESCKRLRIMKRADAKGFGLQPKGSLKGFIESVGK

SEQ ID NO: 50581 - protein, 196 aa, Vigna radiata var. radiata
MESRVVFESDLNLKATELRLGLPGTEEKEDNNLRTHAVLRNNKRQVRETSQDSVSISKASHHQQHVETVSAPPPKAKIVGWPPIRSYRKNSVQEGEGDGIFVKVSMDGAPYLRKVDLKVYGGYPELLKALETMFKLAIGEYSEREGYKGSEYAPTYEDKDGDWMLVGDVPWDMFVTSCKRLRIMKGSEARGLGCVV

SEQ ID NO: 50582 - protein, 300 aa, Geobacter bemidjiensis
RPFEALPKAAGSEYPTVESFWYFLLTGEVPTAAQVSAVEAEFKTRQVVPEYVYTAVRALPKESHPMVMLSVGIMAMQKDSKFAAFYSGGKFNKMDAWESVYEDASDIVARIPVLAAFIYNLKYRGDKQIAIDPKLDMGANFAHMIGQSEQYKDVARMYFILHSDHESGNVSAHTTHLVHSALSDPYYAYSAGLNGLAGPLHGLANQEVLGWIMEFQKKLNGAEPTKENVTKALWDTLNAGQVVPGYGHAVLRKTDPRYTAQREFCLKTPGLKDDQLFKLVAMIFETAPGVLTEHGKTKNP

SEQ ID NO: 50583 - protein, 450 aa, Staphylococcus xylosus
PRGPLLMQDIYFLEQMAHFDREVIPERRMHAKGSGAFGTFTVTNDITKYTCASIFAEVGKQTEMFARFSTVAGERGAGDAERDIRGFALKFYTDEGNWDLVGNNTPVFFFRDPKLFPSLNHVVKRNPKTNIKDPQANWDFWTLLPEALHQITILMTDRGIPKGFRNMHGFGSHTYSMYNDKGERFWVKFHHRTQQGIENYSAEEAEQVMAKDRDSSQRDLFNNIEQGNFPKWKMYIQVMTEEQARNHKDNPFDLTKVWYKDEYPLIEVGEFELNRNPENYFQDVEQAAFAPTNIVPGLDFSPDKMLQGRLFSYGDTQRYRLGVNHWQIPVNQPKGVGMENICPFSRDGQMRILDNNQGASTHYYPNSNGAFEDQPQYKKPALDIQGQAYEYDFREDDDNYFEQPGKLFRLLSSEEQQILFNNTANEMSPVTDALKHRHIRHCYKADPAYG

SEQ ID NO: 50584 - protein, 477 aa, Pisum sativum
MGLENNSQKLLSKIATNNKHGENSPYFDGWKAYESNPFHPTKNPQGVIQMGLAENQLCFDLIEEWIKNNPKASICTPEGVNQFRHIANFQDYHGLPEFKNAVANLMSKVRGGRVRFDPDRLLMSGGATGANELIMFCLADPGDAFLVPSPYYPAFVRDLCWRTGLQLIPVQCHSSNNFMITREALEEAHKKAQDENINVKGLIITNPSNPLGTTIEKETLKSIVSFINENNIHLVCDEIYSGTFYDTPKFVSVSEIIQEMEDIKEDSIHTTYSLPKDLGLPGFRVGFVYSSTDEDVDCRTKNSSFGLLRRETQIFLLQILYDGKTQERFLRAVQKRLALRREVFTKGTPKVGIKCSQSYGGLLVCMHLSLKEKTVEGENDCRVIVHEVTIIVLPGVSFHCSEPGWYRVCFANMDEETVEIALMRIRAFVNGREKGVKKVEMKRWKSNLRLSFSSRRFEENVMSPHSPIPHSPLVRAT

SEQ ID NO: 50585 - protein, 299 aa, Desulfuromonas acetexigens
KAKGSKYPTVESFWYFLLTGDVPTQAQVDAVVAEWKTRQIVPSYVWDAIRALPRDSHPMVMLSVGILALQKDSKFAAFYNSGKFNKMTAWESVYEDASDLCARIPIIAAFIYNLKYRSDFQTAIDPNLDMGANFAHMIGQCEEYKDVARMYFILHSDHESGNVSAHTTHLVHSALSDPYYAYSAGLNGLAGPLHGLANQEVLDWTLKFQEKYCKDVEPTKELVTKALWDTLNAGQVVPGYGHAVLRKTDPRYMSQREFCLNTPGLKDDKLFKLVAMIFETAPGVLTEHGKAKNPWPNVD

SEQ ID NO: 50586 - protein, 337 aa, Heliobacillus mobilis
MNEAKENKEVTNRNDGGNGQTALATFAGGCFWCMVGPFEELDGIHQILSGYTGGHKENPTYHEVCSDETGHFEAIQITYDPAAVAYETLLDRFWRQIDPTDPGGQFHDRGSSYRTAIFYHDEGQREKAEASKKELEESRRFDKPIVTQILPASTFYPAEAYHQDYHKKSPFRYGLYRMGSGRDAFLEQYWRKPEKAQLKQKLSPVQYEVTQNNGTEPPFRNEYWDNHREGIYVDIVSGEPLFSSIDKFDSGCGWPSFSRPLHEEKVKEKMDLSHGMTRTEVRSQGADSHLGHVFDDGPAPGGLRYCINSAALRFIPKEDLEKEGYGQYKSLFEKKNS

SEQ ID NO: 50587 - protein, 198 aa, Bradyrhizobium elkanii
PTPSLRGKTQIKEFASFPTLEQLPLWGFDGSSTQQAEGHSSDCVLKPVACYPDAARENGVLVMCEVMMPDGKTPHVSNKRATVLDDEGAWFGFEQEYFFYKDGRPLGFPEEGYPAPQGPYYTGVGYKNVGSVARKIVEEHLNLCLAAGINHEGINAEVAKGQWEFQIFGKGSKTAADQMWMARYLMLRLTESYGIDIE

SEQ ID NO: 50588 - protein, 441 aa, Helianthus annuus
MREIVSIHLGQAGIQVGNSCWELYCLEHGIQPDGLMPNNTSNDSFGTFFSEGRRGKYVPRAVYLDLEPMVIDEVRTGSYRKLFNPNQLISGKEDAANNFARGHYTVGREFIDQCVDRVRKLADNCSNLQGFMVFNAVGGGTGSGLGSLLLERLSGEYGKTLKLGFTIFPSPKVSTAVVEPYNAVLATHSMIEHTDIVVQLDNEAIYDICRKGLRLEKPSYRNLNRLISQTISSLTTSLRFNGSMNVDISEFQTNLVPFPRIHFMLSSYAPVISSSRAYHELNSVPEITNAVFDPSNMMAKCDPRKGKYMACCLMYRGDIAPKDVNTSVGSIKTKKTVQFVDWCPTGFKCGINYQAPTFVPGGDLAKVKRAVCMISNNTAVSEVFSRIDHKFDTMFAKRAFVHWYLGEGMEEGEFTEAREDLAALEKDYEEVVQDGQQEEEY

SEQ ID NO: 50589 - protein, 280 aa, Desulfovibrio desulfuricans G20
MWDYTDKVRDHFLNPRNAGAIEDANAVGEVGSLACGDALKLYLKIDDQERIVDAKFQTFGCASAIASSSALTEMIKGMTVDEAMKVTNKDITAYLGGLPQQKMHCSVMGQEALEAAIKNYRGEEVEQHHHEGQLVCKCFGVTDEQIIRSIRENKLTSVEEVTHFTKAGGGCGDCLNDIQKLLDEELGKTAACEVPEPQPRTLSNVQRMQLVVKTLEEDIRPSLQKDGGDIELVDIDGKEVKVALRGMCTHCPSSQLTLTNFVQRTLREHVEPDITVKEVS

SEQ ID NO: 50590 - protein, 458 aa, Staphylococcus xylosus
TAGPRGPLLMQDIYFLEQMAHFDREVIPERRMHAKGSGAFGTFTVTNDITKYTCASIFAEVGKQTEMFARFSTVAGERGAGDAERDIRGFALKFYTDEGNWDLVGNNTPVFFFRDPKLFPSLNHVVKRNPKTNMKDPQANWDFWTLLPEALHQITILMTDRGIPKGFRNMHGFGSHTYSMYNDKGERFWVKFHHRTQQGIENYSAEEAEQVMAKDRDSSQRDLFNNIEQGNFPKWKMYIQVMTEEQARNHKDNPFDLTKVWYKDEYPLIEVGEFELNRNPENYFQDVEQAAFAPTNIVPGLDFSPDKMLQGRLFSYGDTQRYRLGVNHWQIPVNQPKGVGMENICPFSRDGQMRILDNNQGASTHYYPNSNGAFEDQPQYKKPALDIQGQAYEYDFREDDDNYFEQPGKLFRLLSSEEQQILFNNTANEMSPVTDALKHRHIRHCYKADPAYGQGVAE

SEQ ID NO: 50591 - protein, 292 aa, Malonomonas rubra
GFWYLLLTGDVPTMEQTLEVVEDWNQRSAVPEYVIDVLRALPRDSHPMAMFSAAIVAMQRESVFASNYAAGKFNKMTCWEDMYEDANTLMARLGPIGAYIYRMKYKGDTHIAPDPELDMGGQFAHMIGQSDEYKDVARMYFILHSDHESGNVSAHTTHLVASALSDAYYAYSAGINGLAGPLHGLANEEVLRWTQNFMQKLGGEVPTEEGLKEALWATLNSGQVIPGYGHAVLRKTDPRYTSQREFCMNTSGLKEYPLFQLVKMIFEVAPGVLTEKNPWPNVDAQSGVIQWY

SEQ ID NO: 50592 - protein, 198 aa, Bradyrhizobium japonicum bv. glycinearum
PTPNLRGKTQIKEFASFPTLEQLPLWGFDGSSTQQAEGHSSDCVLKPVAVFPDAARTNGVLVMCEVMMPDGKTPHASNKRATILDDAGAWFGFEQEYFFYKDGRPLGFPSSGYPAPQGPYYTGVVFSNVGDVARKIVEEHLDLCLAAGINHEGINAEVAKGQWEFQIFGKGSKKAADEMWMARYLMLRLTEKYGIDID

SEQ ID NO: 50593 - protein, 454 aa, Leuconostoc mesenteroides subsp. mesenteroides ATCC 8293
MSSNEHKKGQLPMLTSMQLFLMTFGYAGVQVAFSVQTGNMGRIFQTLGSDPTKLGFFFILPPLAGMITQPLIGLFSDKTWLPKLGRRMPYLIGGCLVSLIVLLLLPNTGSFGFGYGSMTALWFGAVTVLFMDLSANVSMQPFKMIIPDMVNEKQTDKAWSLQNIWGSLGGVIAFVFPFILTSFGVANTAARGVVPDSVKISFYVAAAILLLSTIFTIINVKEYDPETLAYYHGFRSDDKTHESFIDILKHAPKVFWTLGIVEFFVWFGIPYMWTYSTGALSENIWHVSDPASAGYQAAGNWFGILQAVYSVVAIVVGILFQRLNDKTRKMTYFLSLIAGGLGFIIVAYGHTHVSSLIGFVLIGIGWIALISIPFTILTNALDGKHDGVYLGLFNCFICIPQIVASVASFAIFPAVGKSMAHMLAIAGVFLMIGGCLIWIVKEEKTQVDMTQKGE

SEQ ID NO: 50594 - protein, 450 aa, Staphylococcus xylosus
GPLLMQDIYFLEQMAHFDREVIPERRMHAKGSGAFGTFTVTNDITKYTCASIFAEVGKQTEMFARFSTVAGERGAGDAERDIRGFALKFYTDEGNWDLVGNNTPVFFFRDPKLFPSLNHVVKRNPKTNMKDPQANWDFWTLLPEALHQITILMTDRGIPKGFRNMHGFGSHTYSMYNDKGERFWVKFHHRTQQGIENYSAEKAEQVMAKDRDSSQRDLFNNIEQGNFPKWKMYIQVMTEEQARNHKNNPFDLTKVWYKDEYPLIEVGEFELNRNPENYFQDVEQAAFATTNIVPGLDFSPDKMLQGRLFSYGDTQRYRLGVNHWQIPVNQPKGVGMENICPFSRDGQMRILDNNQGASTHYYPNSNGAFEDQPQYKKPALDIQGQAYEYDFREDDDNYFEQPGKLFRLLSSEEQQILFNNTANEMSPVTDALKHRHIRHCYKADPAYGQG

SEQ ID NO: 50595 - protein, 198 aa, Bradyrhizobium japonicum bv. glycinearum
PTPNLRGKTQIKEFASFPTLEQLPLWGFDGSSTQQAEGHSSDCVLKPVAVFPDAARTKGVLVMCEVMMPDGKTPHASNKRATILDDAGAWFGFEQEYFFYKDGRPLGFPASGYPAPQGPYYTGVGFSNVGDVARKIVEEHLDLCLAAGINHEGINAEVAKGQWEFQIFGKGSKKAADEMWMARYLMLRLTEKYGIDIE

SEQ ID NO: 50596 - protein, 116 aa, Heliobacillus mobilis
MLTNIQANISKKQNTLRRVPFRMNIKPLADRIVVKPIEAEAKTASGIIVPDTAKEKPQQGEVVAVGIGRLLDNGERAAMEVAVGDKIIYSKYSGTEIKLDGSEYLILNERDILAKL

SEQ ID NO: 50597 - protein, 464 aa, Arabidopsis thaliana
MENKPSVLTDKYDVGRLLGQGTFAKVYYGRSILTNQSVAIKMIDKEKVMKVGLIEQIKREISVMRIARHPNVVELYEVMATKTRIYFVMEYCKGGELFNKVAKGKLRDDVAWKYFYQLINAVDFCHSREVYHRDIKPENLLLDDNENLKVSDFGLSALADCKRQDGLLHTTCGTPAYVAPEVINRKGYDGTKADIWSCGVVLFVLLAGYLPFHDSNLMEMYRKIGKADFKAPSWFAPEVRRLLCKMLDPNPETRITIARIRESSWFRKGLHMKQKKMEKRVKEINSVEAGTAGTNENGAGPSENGADEPTNLNAFDLIALSAGFDLAGLFGDDNKRESRFTSQKPASVIISKLEEVAQRLKLSIRKREAGLFKLERLKEGRKGILSMDAEIFQVTPNFHLVEVKKSNGDTLEYQKLVAEDLRPALSDIVWVWQGEKDELTSQQETEYQQQQQQEQQEQEEPLKF

SEQ ID NO: 50598 - protein, 322 aa, Enterococcus faecium
MEKIIDITVFGCEPDEMEVFQKISYELGVTATLIKDSISESNAGLANGCRCVSVSHKAELSEPILLALKNAGVKYISTRSIGFNHIDIQAAGLLGMVVGTVEYSPGSVADYTVMLMLMLMRGTKSILRETQRQNYCLNDLRGKELRDMTVGVLGTGRIGQAVMERLEGFGCKVLAYDRNQKAGADYVSFHELLKKSDIVTLHIPLAEDTRHMIGYEELEMMKEEALLINTGRGALVDTAALVEALKGQKIGGALDVLEGEEGIFYHDCTQRRIEHPFLSVLQGMPNVIVTPHTAYHTERVLVDTVRNTIRNCLNFERSLGNV

SEQ ID NO: 50599 - protein, 198 aa, Bradyrhizobium japonicum bv. glycinearum
PTPNLRGKTQIKEFASFPTLEQLPLWGFDGSSTQQAEGHSSDCVLKPVAVFPDAARTNGVLVMCEVMMPDGKTPHASNKRATILDDAGAWFGFEQEYFFYKDGRPLGFPSSGYPAPQGPYYTGVGFSNVGDVARKIVEEHLDLCLAAGINHEGINAEVAKGQWEFQIFGKGSKKAADEMWMARYLMLRLTEKYGIDIE

SEQ ID NO: 50600 - protein, 470 aa, Frankia sp. CcI3
MFDYDVLVIGSGPGGQKAAIAAAKLGRRVAIVDKREMIGGVSINTGTIPSKTLREAVLYLTGMSQRELYGSSYRVKDDITVGDLSARTRHVISREIDVIRNQLSRNHVTLLTGLASFVDPHTVNVRAGGEDTEDRRIQAERIIIATGTRPARPDTVDFDGRTVVDSDQILALEKLPRSMVVVGAGVIGIEYASMFAALGTKVTVVERRDRMLDFCDLEIVEALKYQLRDLAVTFRFRESVVSVERHNGGTLTLLESGKKLPADTVMYSAGRQGLTDILNLPAAGLSADNRGRIKVGSDFRTEVDHIYAVGDVIGFPALAATSMEQGRLAAYAACGEDVNAMRAELMPIGIYTIPEISYVGSTEDELTEQAIPFEVGIARYRELARGAILGDSYGMLKLLVSPDDRRLLGVHVFGTGATELVHIGQTVMGCGGTIDYLVDSVFNYPTLAESYKVAALDAMNKMRAVARFSG

SEQ ID NO: 50601 - protein, 500 aa, Staphylococcus epidermidis ATCC 12228
MKKNNKQNDGVQRGLKDRHISMIAIGGCIGTGLFMTSGGAIHDAGALGALIAYAVIGAMVFFLMTSLGEMATYLPVSGSFSTYATRFVDPSLGFALGWNYWFNWVITVAADVTIAAQVIQYWSPMQGIPAWVWSCIFLIIIFALNSLSVRVYGESEYWFALIKVVTVIIFIGIGILTILGIMGGEFVGFDTFTKGDGPILGGNLGGSLLSILGVFLVAGFSFQGTELIGITAGESENPERAVPKAIKQVFWRILLFYILAIFIIGMLIPYDSKALMGGGDSIATSPFTLVFKNAGLAFAASFMNAVILTSVLSAGNSGMYASTRMLYSMSKDKLAYNSFGKTNKSGVPYVSLIATGVLVILIFALQHLSGDAYEYIVAASGMTGFIAWVGIAISHFRFRRAFDKQNYDKSKLKYKAKLFPFGPIFAGILCVIVIIGQDVDFIKTGNFDMNRFFITYMGIPVFLIFFFYHKFRYKTKKIPLNKVDLRQDVSMEEVRHHKNN

SEQ ID NO: 50602 - protein, 639 aa, Alkalilimnicola ehrlichei MLHE-1
MCGITGFWGGPAVDEGIAGRMAARIASRGPDDAGAWRDVKAGVALAHRRLSVIELSPAGHQPMRSPCGRYTLVYNGEIYNHLDLRVALETAGGAPDWRGYSDTETLLAALAHWGVPETLTRLNGMFAFALWDNREATLFLARDRMGEKPLYYGRNGGTFLFGSELKALTAYPGWQGQVDRDALALYLRYNHVPAPRSIYRGIGKLPPAHYVAVRDGGRNVGEPQCYWSLGEIAEQGVMQAGGSAHELADELDGLLRDAVGRRMAADVPLGSFLSGGFDSSMVAAQMQAQSERPVKTFSIGFHEAGYNEADHARAVATHLGTDHTELYITPEEAMAVIPELPAIFDEPFGDSSQIPTYLVSRMAREHVTVSLSGDGGDELFGGYNRHVVGPALWGRLARLPAPLRRGLGRAVGVAARIDRLPGAGRVPQLGEKLDKLASAMRASGGTAFYKDLLSHWKTPATVVRGASEPASLPDRIEAMPNLPGLRERMLYLDMMTYLPDDILTKVDRASMAVSLEARVPLLDHRLVAFAWRVPTDYKVRDGQGKWLFRRVLDRYVPRALMERPKMGFAVPIEHWLRGPLRDWAEVLLDERRLEREGFFHPAPIRRMWAEHLSGRRRHHAPLWNVLMFQAWSERQERIG

SEQ ID NO: 50603 - protein, 310 aa, Zea mays
MPMQLQQPAAAEQPHHRPRKAAKVNTSWDSCITEQGSPAADSSSPTILSFGGHTAFAKAEPTTHQPPSCAGYYGAAAAAAKAPKQEMMDAAAMPPFQQARPAKRSYDDMAAVAEAANAPSANTRPASQNQDHILAERKRREKLSQRFIALSKIVPGLKKMDKASVLGDAIKYVKQLQDQVKGLEDDARRRPVEAAVLVKKSQLSADDDEGSSCDDNSVGAEASATLLPEIEARLSGRTVLVRVHCDNRKGVLIAALSEVERLGLSVMNTNVLPFTASSLDITIMAMAGDDFCLSAKDIVKKLNQAFKSPF

SEQ ID NO: 50604 - protein, 110 aa, Arabidopsis thaliana
MPVPLAPYPTPPAPALAPSYNTPPANGSTSGQSQLVCSGCRNLLMYPVGATSVCCAVCNAVTAVPPPGTEMAQLVCGGCHTLLMYIRGATSVQCSCCHTVNLALEGLHAY

SEQ ID NO: 50605 - protein, 441 aa, Salmonella typhimurium LT2
MPQPGLTTPDNDALPWQTTLLLALQHVLVVAATPITSVFLIAKALHFTDTVTASVLSATFLMCGLGAILQSLGVKGVGARLPFIMVPGGAPIAIFVAIALQTNIQTAIGAVILTSLFYFIALPIFRRCLHHFPPFIIGIMLLMVSINLIRLYGGLIIGQPGSADFAHPTSIILSLGTILITLIFALAFSGILRQLAVMFGLLAGTLLGMALGSTDFSGVSHGPLFSFPQLLPFGWPIFDLSASLPLLIYAVISMAEATGQTIATAEIVNSTQNVQQAIPRTIRGDAVMSLLGGIFGTSLIITSGENIGVVRTTNVKSRFVTAAAGGLLILIAIFAPLVRLATCLPGSVVCGTAVIVFSIIGVIGIDMIAREPLHTPGKTYALAMGLAMGMLPILVPGLYQNFPAGVQMVFGNGMAAGTLTAILVNSLFNWSEKRTQARVKS

SEQ ID NO: 50606 - protein, 508 aa, Brassica oleracea
MEKGSNGSAALEMQTSELDQPAALRKIISVSSIAAGVQFGWALQLSLLTPYVQLLGIPHKWASLIWLCGPISGMLVQPIVGYHSDRCTSRFGRRRPFIVAGAGLVTVAVFLIGYAADIGHSMGDQLDKPPRTRAIAIFALGFWILDVANNTLQGPCRAFLADLSAGNAKKTRTANAFFSFFMAVGNVLGYAAGSYKNLYKVVPFTMTKSCDLYCANLKTCFFLSITLLLLVTFMSLCYVTEKPWTPEPTADGKPSSVPFFGEIFGAFKELKRPMWMLLIVTALNWIAWFPFLLFDTDWMGREVYGGNSDATASVASKKLYNDGVRAGALGLMLNAIVLGFMSLGVEWVGRKMGGAKRLWGAVNFILAICLAMTVVVTKQAENHRRDHGGAKTGPPGNVTAGALTLFAVLGIPQAITFSIPFALASIFSTNSGAGQGLSLGVLNLAIVVPQMVVSVGGGPFDELFHGGNIPAFVLGAIAAAVSGILALTVLPSPPPDAPAFKTGAMGFH

SEQ ID NO: 50607 - protein, 297 aa, Rhizobium sp. CIAM1416
RGKTQVKEFAEFPTLEELPLWGFDGSSTMQAEGHSSDCVLKPVAVYPDPTRTNGVLVMCEVMMPDGVTPHASNKRATILDDEGAWFGFEQEYFFYKDGRPLGFPETGYPAPQGPYYTGVGYKNVGDVARQIVEDHLDLCLAAGINHEGINAEVAKGQWEFQIFGKGSKKAADQMWIARYLLLRLTEKYRIDIEFHCKPLGDTDWNGSGMHANFSTAYMREVGGKAYFESLMAQFDKNLMDHIAVYGPDNDKRLTGKHETAPWNKFSYGIADRGASIRVPHSFIKNDYKGYLEDRRPN

SEQ ID NO: 50608 - protein, 411 aa, Zea mays
MNALAATSRNFKQAAKLLGLDSKLEKSLLIPFREIKVECTIPKDDGTLASYVGFRVQHDNARGPMKGGIRYHHEVDPDEVNALAQLMTWKTAVANIPYGGAKGGIGCSPGDLSISELERLTRVFTQKIHDLIGIHTDVPAPDMGTNSQTMAWILDEYSKFHGYSPAVVTGKPVDLGGSLGRDAATGRGVLFATEALLAEHGKGIAGQRFVIQGFGNVGSWAAQLISEAGGKVIAISDVTGAVKNVDGLDIAQLVKHSAENKGIKGFKGGDAIAPDSLLTEECDVLIPAALGGVINKDNANDIKAKYIIEAANHPTDPEADEILSKKGVLILPDILANSGGVTVSYFEWVQNIQGFMWDEEKVNAELRTYMTRAFGDVKQMCRSHSCDLRMGAFTLGVNRVARATVLRGWEA

SEQ ID NO: 50609 - protein, 140 aa, Pisum sativum
TVEEFWSIYNNIHHPGKLAVGADFYCFKHKIEPKWEDPICANGGKWTANYPKGKSDTSWLYTLLAMIGEQFDHGDEICGAVVNVRGRAEKISIWTKNASNEAAQVSIGKQWKEFLDYNETMGFIFHDDARKLDRNAKNKY

SEQ ID NO: 50610 - protein, 140 aa, Pisum sativum
TVEEFWSIYNNIHHPGKLAVRADFYCFKHKIEPKWEDPICANGGKWTANYPKGKSDTSWLYTLLAMIGEQFDHGDEICGAVVKVRGRAEKISIWTKNASNEAAQVSIGKQWKEFLDYNETMGFIFHDDARKLDRNAKNKY

SEQ ID NO: 50611 - protein, 335 aa, Aeropyrum pernix
MKRPRVFVTREVFPEALELLSKYYDVEVWDKYQPPPYETLLSKAREADALYTLLTDRIDCDLLSQAPRLRIVAQMAVGFDNIDVECATRLGIYVTNTPGVLTEATAEFTWALILAAARRVVEADHFVRWGEWWRLRTGWHPMMMLGVELRGKTLGILGMGRIGSRVAEIGKAFGMRIIYHSRSRKREIEKELGAEYRSLEDLLRESDILSIHLPLTDETRHLIGESELKLMKKTAILVNTGRGAIVDTGALVKALREGWIAAAALDVFEEEPLNPNHPLTAFKNVVLAPHAASATRETRLRMAMMAAENLVAFAQGKVPPNLVNREVVKVRQPGF

SEQ ID NO: 50612 - protein, 172 aa, Candida albicans SC5314
MKCVLSVRFYYLQQSFILTINFIKAEKLSEQQIAEFKEAFSLFDKDSDGKITTKELGTVMRSLGQNPSESELTDMINEVDVNSDGSIDFPEFLTMMARKMKDTDSEAEIAEAFKVFDRNGDGKISAAELRHVLTSIGEKLSDADVDQMIKEADTNNDGEIDIQEFTSLLAAK

SEQ ID NO: 50613 - protein, 547 aa, Zea mays
MESEMADAPAAAIPPAAEPLAAVAEEGEGEAEAEAPAEAAVGSTLTMERVAAAKKFIENHYRSQMKTIQERKERRFKLERQLASSQVPKEQQIDLIKDLERKETEYMRLKRHKICVDDFELLTIIGRGAFGEVRLCREKTSGNIYAMKKLKKSDMVVRGQVEHVRAERNLLAEVASHCIVKLYYSFQDTEYLYLIMEYLPGGDIMTLLMREDTLTEHVARFYIAETILAIQSIHKHNYIHRDIKPDNLLLDKNGHMKLSDFGLCKPIDCSKLSTLNEDEPMGDDNMRESMDIDSSLSNTANGRRWRSQHEQLQHWQMNRRKLAFSTVGTPDYIAPEVLLKKGYGMECDWWSLGAIMYEMLVGYPPFYADDPITTCRKIVHWRNHLKFPEDAKLSNEARDLICRLLCDVDHRIGSAGADQIKAHPWFQGVAWDKLYEMEAAFKPQVNDELDTQNFMKFEELENPPAKTGSGPSRKMMLNSKDLSFVGYTYKNFDAVKAIKISDLQRNSSLTRPSIGSIFGPSGMDSPMEPNGRDTHMHTVSSGDPMIP

SEQ ID NO: 50614 - protein, 335 aa, Zea mays
MALRNGGGDGACPAAVVLVAAAVAALLGAGVAATKFDDVVQPSWANDHVVYDGDLLKLRLDSSSGGGFVSRTKFLYGKASADLKLVPGDSAGVVTAFYLSSTGDKHNEFDFEFLGNVTGEPYLVQTNLYIDGVGNREQRIDLWFDPTADFHTYAVLWNPSQVVFMVDDTPIRVYENATLHQGHGHGHHRHGGAAAEANGTNTTTTTLAAAPAPFPGPQPMAVYSSIWNADDWATHGGRVKTDWSHAPFEATFREVRVDGCAWAANATDGDAAEARRCSQSSWGKEGRYWWKEKEMSELSVHQSHQLVWARAHHLVYDYCVDTDRFPVQPPECAGR

SEQ ID NO: 50615 - protein, 611 aa, Yarrowia lipolytica CLIB122
MLNTCTNTTFTNNTMWAVQNPIRQAERDETDPPSPNPKWLSVAGDGQQTRAAAEMEQITSLWNRTDFWLAWASMFLVSIALALEKMTFKVYSTFATSDFNEMSLLSALNVVQAVMYTATMTIMAKFADVLGRFESFLLCVILFTMGEIMLAASSNISTYFAAHIFYVFGQVGIRFLQQVFAADTSSLRNRLFFVVIPNFAYIFVPWCSAPITNAIIKHSTWKWGYGMWCIILPVVSVPVLVILFRLKRRVKVVNGKKYDKEKYKGSRWNFIKERLLEFDMIGLVLFTGGLSLLFLAVTLVKSQDSWKQAHVLSMIIIGPILLILFPFWEMYPKYPFLPFSAMKNKTLITGCSFCLVYSIAQNLYNPYYFPWLLVCKGLSVTAASNTSATLMVASVASSVVAAFILRYTNRVKPVIVAGICIYMLGLGLTYHYRQPDQSLAKFIVTQAVEGVGQGFLQSPSLVIIQASVPKNHVVSATAIFYAANSIGQVIGDAISGSMYRQTYPKKLADYAPFLNATEIDQMVNNVAAPLRYKWGTSERTAVIEAFNHIYRKMLYGPMIVAAVCILIALALPNIDLSESEDGSECTIDDDKSVIVHKSSSKTASAVIEKQL
